United States Patent Application Publication US 2007/0054278 A1 - sequence listing, part 134

SEQ ID NO: 379406 - DNA, 201 bp, Homo sapiens
ccatatcacagcaaacccattcaaggtagacttggtgtctgaagaagaggttgtgattagcataaattccctgggccaattatactttgagcatctacagrttcttcacaaacaaaggtattcttatgcattacttgacacataaagaccttaacataacctggttaatgaatatcagttgcctaaatagataacatagca

SEQ ID NO: 379407 - DNA, 201 bp, Homo sapiens
ggataccaaatatatgataaaatgggcatttatggttcagtaccttatctcctggcccacaaactgggcagaactataggtattttctggctgaatgcctyggaaacactggtggagatcaatacagagcctgcagtagaggtgagctatttatcatggctacatgtcatacttaaagaagaaacaaaaccactgcagtgg

SEQ ID NO: 379408 - DNA, 201 bp, Homo sapiens
cacgagaatccagaacatacccccttcactgagaaactgatgagggagcacttggaaagcattgtagtgaacatcttccttttgtgggctggagataatgktgggaaatgatgccgttaaaatggtctccctgatttcagtggagataatgagactccaggtagcagaggcagagtagaaacatttagttgtcagagacaa

SEQ ID NO: 379409 - DNA, 201 bp, Homo sapiens
tttacttagtgtcaaggtaaattaataatcagtgtctaggtgaaaaacaatctttggggactaaagcattttcaagtacctgcaaaactttaatctcttctcataacactttccagtgatatttcaactcagttttgccggttggtttccattatattgtcatattatttcactaaaggaatatcagattatgccagatgc

SEQ ID NO: 379410 - DNA, 201 bp, Homo sapiens
agtcttttggatactgacaatcacaaataattatcaagcatctgcatactccgtatctataggcgtcagaaacagtggctttccaagaagtccacctatcrggcattattggattcagtcacaacagatgaagacagcaccaggttccaaatcatcaatgaagcaagtaaggtgagatggaagtattttctacagagaata

SEQ ID NO: 379411 - DNA, 201 bp, Homo sapiens
gcctgcctgcccctacacctttaaaacccttaaagcagtaactttggagttgtcaagatttgttaatttttgaatttctccctctcaattcccttccccartctgctccttaataaacaaccaggaagcagaaccaagcttcattcaacattgggttaggctgccataaccaaatatcacaggctaggcagcttacacaac

SEQ ID NO: 379412 - DNA, 201 bp, Homo sapiens
ttcttttgcagcctgtttgcaaggtttcaccagagacaacacttccagcagcttctccgaggatgcaggaatatctctgagcacctctgtgaagttacccyttgcctcttcatctaagcctaatgaaaatgaagctttgcccaaccagccaccttctcagcagatgaggcacaactaccgcttattagccagtactgtgtc

SEQ ID NO: 379413 - DNA, 201 bp, Homo sapiens
gcatcccaatctgaaaatccaaagcccaaaatgctccaatgagcatttcctttgagtgtcatgttggtgttcaaaaagtttcagattttggaggccagatktggtggctcatgactgtaatcccagcactttggggagccaagatgggcgatcacctaaggtcaggagtttgagaccagcttggtcaacatggtgaaaccc

SEQ ID NO: 379414 - DNA, 201 bp, Homo sapiens
ctttgttacactgtttttcctgcatgcttccctggtggactccacctgtcaatctggccaagaaaagaacagaaatagaaaatggggagggagagaagccmctggaacatgtataatgctgctttccagttccaggagtggtggtggtggtaatagcaataatgaaaagatggaaggagagaagaaaatggagagaggaga

SEQ ID NO: 379415 - DNA, 201 bp, Homo sapiens
ctctgattttggagactttgctcaaatgtgagttttgagacacagtctcactctgttgcccaggctggagtatagtggtgcaatctcggctcactgcaacmtccacctcctgggttcaagcagttctcctgcctcagcctcccaagtagtggggactacaggtgcccgccaccacacctggataatttttgtatttttagt

SEQ ID NO: 379416 - DNA, 201 bp, Homo sapiens
caggcttttcacagacagccagagcccatccagttaactcctaatttcccaattaataaatagttaccatatatcaagctgttatgggctagacaatatgrtaaaacacattattccatccagcgatgacaaaactataaggtaggtcttgttaccccatattttagatgaagaagctgaggcttagactggtttcaaaat

SEQ ID NO: 379417 - DNA, 201 bp, Homo sapiens
taggtcttgttaccccatattttagatgaagaagctgaggcttagactggtttcaaaatttacacaaaggcacacagtgaataaatagcatggcaagaatmtgaaccatggtctgcctgactccagatcttctgtccttaataagtagttatttactgaggccttgaaccttcaagatgctgtggtagtgctgaagggtat

SEQ ID NO: 379418 - DNA, 201 bp, Homo sapiens
tggtaaggaatggctcatatcagacttaaaaacacattagcaactttttttttaaccatttatagaatgtgatgttactgtgctgatgccttccttttccytttttttttttttttttttcatttgtttgtttgaaacagagtctcgctttgtcacccaggctggagtgcagtggcacagtcatgactcactgcagcattg

SEQ ID NO: 379419 - DNA, 201 bp, Homo sapiens
acctgtaatcccagcactttgggaggccgaggcgggtggatcacctgaggtcaggagttcaagactagcctgatcaacatggtgaaaccctgtctctactaaaaaaaaaaaaaaaaaatagctgcgtggtagcgcgcacctgtaatcccagctactagggaggctgaggcaggagaatcgcttgaacctgggaggcagggg

SEQ ID NO: 379420 - DNA, 201 bp, Homo sapiens
tgggaggcaggggttgcagtgagcagagatcgtgccattgcactccagcctgggcaacaagagcaaaactctgtctcaaaaaatatatatatatatatatwttttttttggtcacgagcagtggctcatgtctgtaatcccagtacttttctgaggcaggtgggcagatcacttgaggttaggagtttgagaccagcctgg

SEQ ID NO: 379421 - DNA, 201 bp, Homo sapiens
ccagtatcctcgatgaacattgatgcaaaaatcctcaacaaaatactggcagactgaattcagcagcacatcaaaaagcttatccaccgtgatcaagaagsctttatcattggaatgcaaggttggtttaacatacccaagtcaataaatgtgattcatcacataaacagaactaaagacaaaaaccacatgatcatctca

SEQ ID NO: 379422 - DNA, 201 bp, Homo sapiens
tcacgcctataatttcagcactttgggaagccaaggcaggtggatcacttgaggctaggagttcaagaccagcctggccaacatggtgaaacccctctctmctaaaaatacaaaatttagccaggagtgatggtgcacacttgtaatcccagctacttgggaggctgaggcaggagactcacttgaaccctgggaggcaaa

SEQ ID NO: 379423 - DNA, 201 bp, Homo sapiens
gggcatgaaatcaagttgtcagaaagggagccagagccattttcttatcacttccttcctagacgctcttgataactaagtttctcttcctgacagctatcttttcttcttgaaagtgagaaaaatagaactacaaggaatttagcaaatcagaaagtcagccttacagaaattctttttactcagcagatttaaaattct

SEQ ID NO: 379424 - DNA, 201 bp, Homo sapiens
tgctgagaatttctcaagttgattccagcaaagtggtgggttcccattaagaggaactggctccctttccgacttagtcacagagttttattcgtgatctrtcatcattccaaacacgtcgttgtgagtgtgtattatgttccttcagcactatttcctggactgttctgtgattgtttctcttgcttcacaaacctgccg

SEQ ID NO: 379425 - DNA, 201 bp, Homo sapiens
tgggtaacctgttgaaggtaatctcttgtatctgtttccaggttcctctcctggctgaaatttatggtatagaaggaaacattttcaggcttaaaattaaygaagagactcctctaaaacccagatttgaagttccggatgtcctcacaagcaagccaagcactgtaaggtaagccaaggagcgaggtattttagagacac

SEQ ID NO: 379426 - DNA, 201 bp, Homo sapiens
ggcatgaaatcaagttgtcagaaagggagccagagccattttcttatcacttccttcctagacgctcttgataactaagtttctcttcctgacagctatcttttcttcttgaaagtgagaaaaatagaactacaaggaatttagcaaatcagaaagtcagccttacagaaattctttttactcagcagatttaaaattctg

SEQ ID NO: 379427 - DNA, 201 bp, Homo sapiens
gaaaaagatgtttgctttcattctgcttctgatgatatcttaagaatttatcccatcaaattactttagagaccttattggtacttcagcaactaaacccycttgatagataacaaccttatctttgaattgtgctttgtttaaaaaaaaaaaaaagatactataatagtaattcaagtttccatttttttcctcccagat

SEQ ID NO: 379428 - DNA, 201 bp, Homo sapiens
gcatgaaatcaagttgtcagaaagggagccagagccattttcttatcacttccttcctagacgctcttgataactaagtttctcttcctgacagctatcttttcttcttgaaagtgagaaaaatagaactacaaggaatttagcaaatcagaaagtcagccttacagaaattctttttactcagcagatttaaaattctgt

SEQ ID NO: 379429 - DNA, 201 bp, Homo sapiens
tactcctatcaacattatataagattgcctggctgggcgaggtggctcacacctgtaatcccagcacttcgggaggccaaggcaggcggatcacctgaggytgggagtttgagaccagcccgaccaacatgcagaaaccccgtctctactaaaaatacaaaattagccaggcatggtggcgcatgcctgtaatcccagcta

SEQ ID NO: 379430 - DNA, 201 bp, Homo sapiens; identical to SEQ ID NO: 82184

SEQ ID NO: 379431 - DNA, 201 bp, Homo sapiens; identical to SEQ ID NO: 82185

SEQ ID NO: 379432 - DNA, 201 bp, Homo sapiens; identical to SEQ ID NO: 82187

SEQ ID NO: 379433 - DNA, 201 bp, Homo sapiens
gccatgtggctggacatagagcacactgagggcaagaggtacttcacctgggacaaaaacagattcccaaaccccaagaggatgcaagagctgctcaggarcaaaaagcgtaaggtaaaataagccaacatttctgaaccttttaattacagagttttaaaaaatgttttagacttgccttggcacatcagtggtggagaa

SEQ ID NO: 379434 - DNA, 201 bp, Homo sapiens
ataggccgggtgcagtggctcacgcaggtaatcccacagcactttgggaggctaaggtgggaggatcgcttgagttcaggagttcgagaccccctccccgycccctcggagtcccagctacttgggagaccactgggaggatggatttggaggctgcagtggagctgtgatcttgccactgcttgggcaacaaagtgagac

SEQ ID NO: 379435 - DNA, 201 bp, Homo sapiens
gaggatgcaggaatatctctgagcacctctgtgaagttaccccttgcctcttcatctaagcctaatgaaaatgaagctttgcccaaccagccaccttctcrgcagatgaggcacaactaccgcttattagccagtactgtgtctgcagaaatggccaggaacaggcagctaatttgggaactggccagacaatcagaagca

SEQ ID NO: 379436 - DNA, 201 bp, Homo sapiens
caggaatatctctgagcacctctgtgaagttaccccttgcctcttcatctaagcctaatgaaaatgaagctttgcccaaccagccaccttctcagcagatraggcacaactaccgcttattagccagtactgtgtctgcagaaatggccaggaacaggcagctaatttgggaactggccagacaatcagaagcacacctgg

SEQ ID NO: 379437 - DNA, 201 bp, Homo sapiens
aaatttacacaaaggcacacagtgaataaatagcatggcaagaatctgaaccatggtctgcctgactccagatcttctgtccttaataagtagttatttamtgaggccttgaaccttcaagatgctgtggtagtgctgaagggtatacagagatgagctccttgtggtcttacagtgagtgaagaaaaggcaagtatccaa

SEQ ID NO: 379438 - DNA, 201 bp, Homo sapiens
catgaaatcaagttgtcagaaagggagccagagccattttcttatcacttccttcctagacgctcttgataactaagtttctcttcctgacagctatcttttcttcttgaaagtgagaaaaatagaactacaaggaatttagcaaatcagaaagtcagccttacagaaattctttttactcagcagatttaaaattctgtg

SEQ ID NO: 379439 - DNA, 201 bp, Homo sapiens
taaatagcatggcaagaatctgaaccatggtctgcctgactccagatcttctgtccttaataagtagttatttactgaggccttgaaccttcaagatgctrtggtagtgctgaagggtatacagagatgagctccttgtggtcttacagtgagtgaagaaaaggcaagtatccaactacaatacaggaaagtaacataagg

SEQ ID NO: 379440 - DNA, 201 bp, Homo sapiens
catcttcagcttcactgacagcaaacagtaaagcacttggaaaggagcaatgggggtgctttgactactgacacattagcagttagacacaaaatgagacygatggactgtgtcagagtcccttcctataatctcagtatacccagagtgcattaatgacaggcgatgacctttttgagctcacctctttgagcgcctgcc

SEQ ID NO: 379441 - DNA, 201 bp, Homo sapiens
ttacaggcgtgagccatcatatctggcctagaagtgcattttagatgagccctgaagcatgtccctaactaatgagtaagcagggagagggaagagggcawtgcagccagaggaaggagcattaggggtgttcggaaagcagtgcacaggcaagtttgacagccaggcatgtgagggttctaatagtggaggatctgacca

SEQ ID NO: 379442 - DNA, 201 bp, Homo sapiens
aaaaagtttttgttttaatgtaattgtgatcaacactatgcttgaagacatagacaaagctatttctaccaccatgatgtttacaaaatatctggtatttwcgcctatatggccattaaaaaaactagatttgtggataacaaaccaccaagttttaattgtttttatttaataagggagaaataagacagaaaaagagaa

SEQ ID NO: 379443 - DNA, 201 bp, Homo sapiens
gctggagataatggtgggaaatgatgccgttaaaatggtctccctgatttcagtggagataatgagactccaggtagcagaggcagagtagaaacatttarttgtcagagacaaggtgaacataattccattatgtgtggtaggacccatgtagtactcaaaatggtttaacgcttggggcagtaagcaatttatggtggg

SEQ ID NO: 379444 - DNA, 201 bp, Homo sapiens
caagtacatacataaactggggagcttttttttttaattgccattgttctccaatttgcttggcctatcataattgaaacaaatactttcctaattattgyaattggtgcaaaattggccatcacttgggtaacctgttgaaggtaatctcttgtatctgtttccaggttcctctcctggctgaaatttatggtatagaag

SEQ ID NO: 379445 - DNA, 201 bp, Homo sapiens; identical to SEQ ID NO: 82204

SEQ ID NO: 379446 - DNA, 201 bp, Homo sapiens
aggaagttttcattctgttccagtgttctgatcaataggtaatggcagctaaagaaactgtttgttttcttaagtaaatcacactatccgttcagcatcctcaaatcaaatgcacaggtatgttttaagttactatttaaagaaatgaatggtgaaggccgtttccggaatatttttttcttttcttttcttttctttttt

SEQ ID NO: 379447 - DNA, 201 bp, Homo sapiens
tggattcacaagccctgtgtgaaataaatttctcaaaatgtctttttatttagtgttgaagatgaagctgtagataaaaacattttcagagactgtaacargatcgcattttacaggtaaggaaaataaatatagtaactagatcaaaacatctctgacagtatttcaaaattgatgcttattaaatttttggaactgata

SEQ ID NO: 379448 - DNA, 201 bp, Homo sapiens
ggaagttttcattctgttccagtgttctgatcaataggtaatggcagctaaagaaactgtttgttttcttaagtaaatcacactatccgttcagcatcctcaaatcaaatgcacaggtatgttttaagttactatttaaagaaatgaatggtgaaggccgtttccggaatatttttttcttttcttttcttttcttttttt

SEQ ID NO: 379449 - DNA, 201 bp, Homo sapiens
caaatgtgcaaattatttagagcatagactttataagcattaaaaaaaactaatggaggtaaaacctaaatgcgatgtgaaataattttagtgttgatacygtatgtgtatttttattctaataaacttttgtgttccagattgaatttggcattggtctagtcattttagtataagtaaattataggaatgtggctcttg

SEQ ID NO: 379450 - DNA, 201 bp, Homo sapiens; identical to SEQ ID NO: 82214

SEQ ID NO: 379451 - DNA, 201 bp, Homo sapiens
ctaattataggctagcttattactaacttttctaaatgatccacaaagagtaagatagagattctctgataccttgtatatattatgcattttagaaaccraaaacatcatcttatttttaaaaagtgattattttatgatgaatatgataagagtaaatgatcctatgataataataataatggctaacactttttggtg

SEQ ID NO: 379452 - DNA, 201 bp, Homo sapiens; identical to SEQ ID NO: 82216

SEQ ID NO: 379453 - DNA, 201 bp, Homo sapiens; identical to SEQ ID NO: 82217

SEQ ID NO: 379454 - DNA, 201 bp, Homo sapiens
actcccagacctctcaatccagtgattaagttatcttacttgacacctctgtggtatttgacactatttacaccaatgataattgcttccttcctgaagakcttcctgaagctcttcccttggattctgagagagcttttctgggaataatagttctttcactgtcctcagatcttcttccgtcacagcctgtaatggcaa

SEQ ID NO: 379455 - DNA, 201 bp, Homo sapiens
gatcagcactgaacatggagtggttggagtctcaattccaataccttatacaaagagctgtttactgcctatgaacctatcatgagctgtatttttctccygtaagtattgtgtttatttgcttctacttccaggccaacacatatgaaaagtactggccattttaccagaagcatggagggcattattttcccaaagatc

SEQ ID NO: 379456 - DNA, 201 bp, Homo sapiens
tctgcccaaggactgccctgtctcttcttacaacgaatgggaccccttagaggaagtgatagtgggcagagcagaaaacgcctgtgttccaccgttcaccrtcgaggtgaaggtaaaggaaggctattcacatgtctgaaagtgcgctccctcctcacctgctgctgctaccctctgactgctttcccttcagcttactcc

SEQ ID NO: 379457 - DNA, 201 bp, Homo sapiens
tactcccagacctctcaatccagtgattaagttatcttacttgacacctctgtggtatttgacactatttacaccaatgataattgcttccttcctgaagmgcttcctgaagctcttcccttggattctgagagagcttttctgggaataatagttctttcactgtcctcagatcttcttccgtcacagcctgtaatggca

SEQ ID NO: 379458 - DNA, 201 bp, Homo sapiens
accaaatatttatcgatcgtatgtctttcttttgttttcaggttacaaactacctaggcattgaatggatgcgtaggcatcttgctccagactacagagtrcatatcatctcctttaaagatcccaatcccatgcatattgatgctaccttcaacatcattggacctggtattgtgctttccaaccctgaccgaccatgtc

SEQ ID NO: 379459 - DNA, 201 bp, Homo sapiens
atcatccttgcatggccagggcaatgccactgggcagtggttgtattccctctacagtggggtagcctccctttggccaaccctgctctgtagggaaaagygaagccactgcactgcagctggtctatccccttcacctgcagcctcctactttctgtccatagcctcctacttccagttaggtgatgagtgattttctgt

SEQ ID NO: 379460 - DNA, 201 bp, Homo sapiens
aggcattgaatggatgcgtaggcatcttgctccagactacagagtgcatatcatctcctttaaagatcccaatcccatgcatattgatgctaccttcaacrtcattggacctggtattgtgctttccaaccctgaccgaccatgtcaccaggtaagagatttcttgggactctggaaaagcaacagaatctagtaactaaa

SEQ ID NO: 379461 - DNA, 201 bp, Homo sapiens
tcagtggatgctgatactgaactctatatattttgttttttcctgtacatatatacatacctatgataaagtttaatttacaaattaggcacagtaagagmctaacaacaataatgaataataaaatggaacaattatataaatatactttactaaaagttaggtgaatgtggtctctctgtttctctcaaaatatcttaa

SEQ ID NO: 379462 - DNA, 201 bp, Homo sapiens
taattcaattttgattccttttagaggcaccaagttattatttcacagaaagtcagtatttttattttcaacacacgtagccccaacaagttggagatgcrtcctgagctcctgagacatccccttaacaataagtttataaatcttatatgacttagccaacgttttggtgcccatgtgcagaaaaccacccctttgcag

SEQ ID NO: 379463 - DNA, 201 bp, Homo sapiens
aagagccttcgcaggctccaggagctgggcggcgtcccccagtcagggggaacttgcgttgcggctccagcccttggggtctacttgctgtctgcgcgtcygcggcctgctggcccacggcgcagggggcgccgcccccctctaccggaccttggtgcgctgcaccaagcttcccgctcggagcaaggggttgggacgacg

SEQ ID NO: 379464 - DNA, 201 bp, Homo sapiens
gtaatccagataataataatgcagtattttttaagcatcaaaattaatgaaaaaatccatgatgaacaaaatatcaaaatgttaaatgaagacaagatcastattactgatgtttcttttgcctcaggttccaatgtggcttgacacggcactgactgtacccaggaactagaggtgaagtggaagtaaaccggcccttgt

SEQ ID NO: 379465 - DNA, 201 bp, Homo sapiens
ttttatttatctattcatcagttgctgaatatttaggttatttccactttggggctattatgataaggctgctgtgaacacttacatacaagtttctgcgkaggcatatgttttcacttctcttggggtatatacctaggagtggaatttctgggttatgtggtaactctgtatgccctacagaaaaaaagttatattaaa

SEQ ID NO: 379466 - DNA, 201 bp, Homo sapiens
ctagaaaaagaacctgatctacagttcaaattcacagtaaaatgaaatgtatgtcccttattaaatcagttaccatttgatcttttatagaaaaaaatttwaaaatcaaaatagcttctgggtttaaagacagaaataaataatgaattagttttgccactcccaatcaaatttggcaggggaaacatggcatctcgtttt

SEQ ID NO: 379467 - DNA, 201 bp, Homo sapiens; identical to SEQ ID NO: 82208

SEQ ID NO: 379468 - DNA, 201 bp, Homo sapiens
catttctcgcctgtacccccaagtcctaggcaaccaataacctactttctgtccctgtcattttgtctattctggacatttcatgtaaatggaatcattcrgtaagtggtcttttgtgatgaacttctatcgcttagcaaaatattttcaagtttccttcgctctgtagctcatatcagtacctcctgtattcttatggcc

SEQ ID NO: 379469 - DNA, 201 bp, Homo sapiens; identical to SEQ ID NO: 82209

SEQ ID NO: 379470 - DNA, 201 bp, Homo sapiens
atgcctggctaattttgtatttttagtagagaggggcttggccaggctggtctcgaactcctgacctcaagtgatccatccacctatgcctcccatagcaytgggattatgggtgtgagctaccatgcgcgactaggaaagtctttctgaatggctcatgccaccttcctctccctggctataccaatggaccctttagtg

SEQ ID NO: 379471 - DNA, 201 bp, Homo sapiens
aaccaaaaaaagaggtaatattatatagacattttttgtttgtttgtttgagacagagtctcactctgtcgcccaggctggagtgtggtggcacaatctcsgctcactgcagcctttgcctcttggttcaagtgattctcctgcctcagtctcccgagtagctaggattacaggcacgtgccaccatgcctggctaattgt

SEQ ID NO: 379472 - DNA, 201 bp, Homo sapiens
agaacaaggctgggacttgtgtttgcaactttttcatccatagaaaatgaagtaaggagaagacagaataaaacaacatcacgtaaagcaagatatgactktttttttttttttgagacagtgtcttgctttgtcacccaggcttgagtgcagttgtgcagttgtgcagtcacagctcactgcagcctcaagactcctggg

SEQ ID NO: 379473 - DNA, 201 bp, Homo sapiens
acatttttgaaaaccaatattttggccgggcatggtggctcacacctataatcccagccctttggggggccgacgcgggtggatcacgaggtcaggagatygagaccagcctggccaacatggtgaaaccctgtctctactaaaaatacaaaaaattagccgggcgtggtggcatgcgcctgtaatcccagttactcaggg

SEQ ID NO: 379474 - DNA, 201 bp, Homo sapiens; identical to SEQ ID NO: 82227

SEQ ID NO: 379475 - DNA, 201 bp, Homo sapiens
gggaagatgcatcacgtacatttctcaatgtatttatgattgagaaattgactaagaacttagacatttggaaaacaatctgaatgcagaatctgtctagrtttttacatttttgaaaaccaatattttggccgggcatggtggctcacacctataatcccagccctttggggggccgacgcgggtggatcacgaggtcag

SEQ ID NO: 379476 - DNA, 201 bp, Homo sapiens; identical to SEQ ID NO: 82228

SEQ ID NO: 379477 - DNA, 201 bp, Homo sapiens
atgtggaacataattgttgggaagcataattttttaaagctctgtgactttttgttctgcaaaatatagtaaatatctgctatcaaatatatatatatatagatatatatttttttaagatggaatctcgctgtctcgcccaggctggagtgcagtggcgtgatctcggctcgctgcaagctccgcctcctgggttcatgc

SEQ ID NO: 379478 - DNA, 201 bp, Homo sapiens
aatgaagatattaagaggtttgctagtttgctatctacctaacaggattaaggattaatctaaagataaaaggttacatgttaagtattttaaaggacaamacaacaacttattatagttgtatggatccagtttgccaattacattccaaaggtactttgtcggtgtaatagttgtagatatcagtaacattagcagtat

SEQ ID NO: 379479 - DNA, 201 bp, Homo sapiens
caatgcaggtatcactaccattaaagttaacattcgtaatgccaattccctgggaggaggcttccattgctggacctgcgatgtccggcgccgaggcaccytacagtcctacttggactgaacaggcctgatggagcttgtggctggcctcagatacacctaagaagcttaggggcaaggttcattctcctgctttaaaaa

SEQ ID NO: 379480 - DNA, 201 bp, Homo sapiens
aatgtggaacataattgttgggaagcataattttttaaagctctgtgactttttgttctgcaaaatatagtaaatatctgctatcaaatatatatatatatagatatatatttttttaagatggaatctcgctgtctcgcccaggctggagtgcagtggcgtgatctcggctcgctgcaagctccgcctcctgggttcatg

SEQ ID NO: 379481 - DNA, 201 bp, Homo sapiens
tcgatcgtatgtctttcttttgttttcaggttacaaactacctaggcattgaatggatgcgtaggcatcttgctccagactacagagtgcatatcatctcytttaaagatcccaatcccatgcatattgatgctaccttcaacatcattggacctggtattgtgctttccaaccctgaccgaccatgtcaccaggtaagag

SEQ ID NO: 379482 - DNA, 201 bp, Homo sapiens
tgtctttcttttgttttcaggttacaaactacctaggcattgaatggatgcgtaggcatcttgctccagactacagagtgcatatcatctcctttaaagaycccaatcccatgcatattgatgctaccttcaacatcattggacctggtattgtgctttccaaccctgaccgaccatgtcaccaggtaagagatttcttgg

SEQ ID NO: 379483 - DNA, 201 bp, Homo sapiens
aaaaattatctgtaatcccactacccacctacacactgttaacgtcttggtttatgctgttctaaaggggtttaagtggcaatgttatgctggatttttaytccatctccacttcctcctctctgtaagtactgatagagcaatgcaatacaataatcttttctttgttcttggaagcttggacgaaccttgacaggatgg

SEQ ID NO: 379484 - DNA, 201 bp, Homo sapiens
taacgtcttggtttatgctgttctaaaggggtttaagtggcaatgttatgctggatttttactccatctccacttcctcctctctgtaagtactgatagakcaatgcaatacaataatcttttctttgttcttggaagcttggacgaaccttgacaggatgggtgcagcgaactttccagagcacccaggcagctacggct

SEQ ID NO: 379485 - DNA, 201 bp, Homo sapiens
agcagctgtctatggttttctgagaggaggactgacccatctgcaaaacagttgcttaaagcttgagtgcaggaattgcattctgagataaagatgggggkgtatggtagctggggacacggtcttctgaggagttttaaagagttacagcaattaatagataagaagacaatttgtagataaacaagagggttaaaaaaa

SEQ ID NO: 379486 - DNA, 201 bp, Homo sapiens
acaaacaaacaaaaactcctagtggtttttatctgtaacgttcttatatccagggcctctatgggctggtgttcaggttctatactgcataaggattccayatctaagggaccactttccacattgtagacacagcctagactcctattaataatgggttacaaatgtatctttagtgtccttaaatttttcctgaatatt

SEQ ID NO: 379487 - DNA, 201 bp, Homo sapiens
atatagtaaatatctgctatcaaatatatatatatatagatatatatttttttaagatggaatctcgctgtctcgcccaggctggagtgcagtggcgtgakctcggctcgctgcaagctccgcctcctgggttcatgccattctcccacctcagcctcccaagtagctgggactacaggtgtcccccaccaggcctggcta

SEQ ID NO: 379488 - DNA, 201 bp, Homo sapiens
atttgttttttttgtatttttagtagagacggggtttcaccgtgttagccaggatggtctcgatctcctgacctcgtgatccacacgccttggcctcccamagtgctgggattgcaggggtgagccaccgtgcccagcctcaaatatgttttttgttttgcttttgtcttttaaaaataaagcccttgataaaggaccttt

SEQ ID NO: 379489 - DNA, 201 bp, Homo sapiens
ccagcctctgtttaagactttcactggcatcattcagtttttctaaagacctgtttcttggcttattccttattcaccaagctaggttccagcgtaactgwtgtgaacctggatattgaactaaccagagatgggtccactttcatatatttgatatttgtcagactgagataaaaatggaagtcgagacacaaaatctag

SEQ ID NO: 379490 - DNA, 201 bp, Homo sapiens
ccctgggaagctcagcttcaagagccttcgcaggctccaggagctgggcggcgtcccccagtcagggggaacttgcgttgcggctccagcccttggggtcyacttgctgtctgcgcgtccgcggcctgctggcccacggcgcagggggcgccgcccccctctaccggaccttggtgcgctgcaccaagcttcccgctcgga

SEQ ID NO: 379491 - DNA, 201 bp, Homo sapiens
cctatcatgagctgtatttttctcctgtaagtattgtgtttatttgcttctacttccaggccaacacatatgaaaagtactggccattttaccagaagcawggagggcattattttcccaaagatcatttgaaaaaggctgttgctgaaattgaagaaatgtgcaatattttaaaaacggaaggagtgacagtaaggaggc

SEQ ID NO: 379492 - DNA, 201 bp, Homo sapiens
tagctattccaaaccttcactacattttcttagctgatcatattgtttcatttttcacaaaggagagagagaccatcaggcattagttccttcagtttacratcccctatagatttatacacatttgcatattctggttaagtttctttctcctttcctttacagtaagtagttctcccttatcctcagggaatatgttcc

SEQ ID NO: 379493 - DNA, 201 bp, Homo sapiens
atatttgctttattacaatctgtccatctaatttttttgtgcatttaaaaataacttgtgcatatttgtccatttcaccccaaataccagtgtgatatatwggtagagttatcaacatttgcttaattttcattttttaagataaaatttatgcacaattttgcataatcttaagtatattacttggtgagttttgacaaa

SEQ ID NO: 379494 - DNA, 201 bp, Homo sapiens
tttccacaatattttattattgaaattttcagacatacagaaaaactcaaagaattgtacagtgaatgccagtatactcacttcctagattcttcagttgktaatattttgctatatttgctttattacaatctgtccatctaatttttttgtgcatttaaaaataacttgtgcatatttgtccatttcaccccaaatacc

SEQ ID NO: 379495 - DNA, 201 bp, Homo sapiens
agttattcacttcaaaatcttgaagccattttcctgaccttatcttctatggtaagagcatatgtaagtgaacttttaacatttttttcttatttttgtgytttttgggacagtgtcttgctctgttacgcaggctggagtgcagtagcacgatctcggctcactgcaacctccgcctcccagttcaggtgatcctcctgt

SEQ ID NO: 379496 - DNA, 201 bp, Homo sapiens
gttctctttattttttccacaatattttattattgaaattttcagacatacagaaaaactcaaagaattgtacagtgaatgccagtatactcacttcctarattcttcagttgttaatattttgctatatttgctttattacaatctgtccatctaatttttttgtgcatttaaaaataacttgtgcatatttgtccattt

SEQ ID NO: 379497 - DNA, 201 bp, Homo sapiens
atattggagaaaacatgtttgagtgtaaaatttttttcttctgaattctgattgttctctttattttttccacaatattttattattgaaattttcagacmtacagaaaaactcaaagaattgtacagtgaatgccagtatactcacttcctagattcttcagttgttaatattttgctatatttgctttattacaatctg

SEQ ID NO: 379498 - DNA, 201 bp, Homo sapiens
ttcaactgttccctcctactagctttttgaccttaagccagttattaacctaagtgttatgttttttttttaaatcagaaaaatgaagaaataaaagttcytatttgacaacactgagaaataaatgagacaatatgtatagagcattacttctgggccagacacaaaatattcacttgctctttgctgttactgtgttta

SEQ ID NO: 379499 - DNA, 201 bp, Homo sapiens
ctgtttttataggctgacttttgacacagagtacttctgttcaaggagctcattgttacaaagttagtgccagtttatactagaacttaacttttaaagcrcatgtaaatagatttcttaatgggtttttgggtttttaaaatcacctagattttttttttcctggtggccaaatagcacatgctcattctgaaaaattgt

SEQ ID NO: 379500 - DNA, 201 bp, Homo sapiens
acacagcgtgttctcacggccaccggccaaaatggcggtgcccagccgccgcacgcgcaagccataggacgtagtgcgcgcgcgcgacatagagcgtgagrcggaaccctggaggtaggtagggagatatgacgtcattgagctgcgacccttgttcaacgccgttggcgaagccagctgctggaggtgccgagaatctga

SEQ ID NO: 379501 - DNA, 201 bp, Homo sapiens
gttgtgtctttgttctcattggtttcaaaaaacatctttatttctgctttcatttcgttatgtacccagtagtcattcaggagcaggttgttcagtttccmtgtagttgagcggttttgagtgagtttcttaatcctgagttgtaatttgattgcattgtggtctgagagacagtttgttgtgatttgattgcattgtggt

SEQ ID NO: 379502 - DNA, 201 bp, Homo sapiens
tttctggaggagtctttaggatttttgaggtaaacgattatattgtcagtaaacagtgacagtttgacttcctctttactgatttggatgtcctttatttstttcgcttgtttgattgctctggataggacttccagtactatgttgaagacgagtggtgagagtgggcatccttgttttgttccagttctcagagggaat

SEQ ID NO: 379503 - DNA, 201 bp, Homo sapiens
attcttttctcttttcttctttattagtcttgctagcggtctatcaattttgttgatcttttcaaaaaaccagctcctggattcattgattttttttttttgaagggttttttttgtgtctctgtgtccttcaattctgctctgatcttagttatttcttgccttctgctagcttctgaatttgtttgctcttgcttctct

SEQ ID NO: 379504 - DNA, 201 bp, Homo sapiens
caacaacagcctgcagctggtcagttgggaccttcccaggggtgcatgggagcgccaagtctcccttctccctccttagaccagcacagcagcagcagccrtgtctctagatctccagtatctagattctccaagtggcgcccagctgaggttgctccaggatctgtgggatgcctgtgagattctgagtttcctttctgg

SEQ ID NO: 379505 - DNA, 201 bp, Homo sapiens
tctagtgatttaatcacaggacaagatttttctgcatccatttttttctccaaggccagccttcattagacatcaatttttgagtgattgtgttactgtaktttaatgcattctcagaagtttgaattagtaggtcaaaggttgtgtttctactaactggtgatgaaagcacctttttctaatcaaatttgagtactatca

SEQ ID NO: 379506 - DNA, 201 bp, Homo sapiens
cttctagtttatttgcatagaggtgtttatagtgttctctgatggtagtttgtacttctgtgggatcggtggtgatatcccctttatcatttttcattgcrtctatttgattcttttctcttttcttctttattagtcttgctagcggtctatcaattttgttgatcttttcaaaaaaccagctcctggattcattgattt

SEQ ID NO: 379507 - DNA, 201 bp, Homo sapiens
tccccatctttgtggttttatctaccttcggtctttgatgatggaactagagagggtgggttcctcccaggcaagcagcatggacaagaagctgtggggastgtggtcttctcatttctgtctcaacaacagcctgcagctggtcagttgggaccttcccaggggtgcatgggagcgccaagtctcccttctccctcctta

SEQ ID NO: 379508 - DNA, 201 bp, Homo sapiens
tttgggtatatacccagtaatgggatggctgggtcaaatggtatttctagttctagatccctgaggaattgccaccctgtcttccacaatggttgaactasttcacagtctgaccaacagtggaaaagtgttcctatttctccacatcctctccagcacctgttgtttcctgactttttaatgatcgccattctaactggt

SEQ ID NO: 379509 - DNA, 201 bp, Homo sapiens
gtggtgggtggttcctattcagaagtgacctggcagtctttgggttggcagtagtgctgattttgtgacccattacataacttctcctaatgttagtacartagtatttaatcttacagtatttaagaactatacatcgtcaaaactcttcattttgtaaaactttaactctctaccatgtaaacaataaatttcaatttc

SEQ ID NO: 379510 - DNA, 201 bp, Homo sapiens
gaaatgagaattacaagatactactcaaaaaaaataaaataaaatcagagatgatacaaacacatgagaaaaaccttccaggctcatggataggaagactyaatattgttaaaaggccatactgcccaaagctatttacagattcagtgctatacctatcaaattaccaatgacattgttcacagaattggaaaaacctgt

SEQ ID NO: 379511 - DNA, 201 bp, Homo sapiens
taccttgattttttggtttttgtttttgctttttaaattctatttttgttttataggtcctgtgagatttgtgctttattttatttatatatatatatatwttttttattatactctaagttctagggtacatgtgcacaacgtgcaggtttgttacatatgtatacatgtgccatgttggtgtgctgcacccattaactc

SEQ ID NO: 379512 - DNA, 201 bp, Homo sapiens
acttgacaatggtctctaagtgtccaagtgaaaggaagtgtctcacatctctcactttaactcaaaagctagaaaggactgagcttaaaagggggggggggcgtgttgaaagccaaaataggccaaaagctaacctcttgttctaatggaaaagttcctgaaggaaattaaaagtgctactctagtgaacacatgaatgat

SEQ ID NO: 379513 - DNA, 201 bp, Homo sapiens
caggaggtggcgctttccagagagcatcagctgtggtagtatagggaggatcagacggtgggcggggggcctagaactcccaagagagtatgccctttgtyttcaactaccagggtggatagggaaggaccatcaggtaggggcagggtttggtgtgtctgagctcagactttccttgggtgggccttggtgcagctgctg

SEQ ID NO: 379514 - DNA, 201 bp, Homo sapiens
gctgagatcctacataatcttcatataaagacaatattgggtcataattatgcctaacataatacaactatccttcgtacaaccagaaatgcatcaatccycaacccaaatactagtacatacatgaagttaacaatacttaaatgctgatgtgaagtctgtaaatcttacgtcacttgataaaggaaaaggaaataaaat

SEQ ID NO: 379515 - DNA, 201 bp, Homo sapiens
ccttgtcaacttgaacctatatgtatctgctgagatcctacataatcttcatataaagacaatattgggtcataattatgcctaacataatacaactatcyttcgtacaaccagaaatgcatcaatccccaacccaaatactagtacatacatgaagttaacaatacttaaatgctgatgtgaagtctgtaaatcttacgt

SEQ ID NO: 379516 - DNA, 201 bp, Homo sapiens
ctgtatataggatattatatataatacatatccttgttataatatatataggatatgtatgtgggatatatatacacacacacacacacacacacacacayacatatatatatatatatatataaaggagagtttgttaagtgttaacttacagaatcacaaggtcccacaataggctgtctgcaagctgaggagcaagga

SEQ ID NO: 379517 - DNA, 201 bp, Homo sapiens
ataggattatatacatataatttttatcctgtatataggatattatatataatacatatccttgttataatatatataggatatgtatgtgggatatatayacacacacacacacacacacacacacacacatatatatatatatatatataaaggagagtttgttaagtgttaacttacagaatcacaaggtcccacaat

SEQ ID NO: 379518 - DNA, 201 bp, Homo sapiens
atgaggagctccgcaactgtgttctggagtttctgttgggtccttagtgtttccctgctctccagagtccataaaacacacattcatgcatgcacacacayacacacacacacacacacacacacacacacacacacacacacacgttatctatttggtataagaaatagaacattatgagtatctcagttcctgtcacaa

SEQ ID NO: 379519 - DNA, 201 bp, Homo sapiens
tgtctcccaggctggagtgcagtggtgcgatcttggctcactgcaaccttggcctcccaggttaaagcgattctcctgcctcagcctcttgagtagctgarattacaggcattcaccaccacacccagctaatttttactatttttaatagagacagggttgcatcatgttaggctggtctcgaactcctgacctcaaatg

SEQ ID NO: 379520 - DNA, 201 bp, Homo sapiens
aaaggaagttttggttaaaatcatgtgaggtcgacagacacattttttaatttcaactgttccctcctactagctttttgaccttaagccagttattaacytaagtgttatgttttttttttaaatcagaaaaatgaagaaataaaagttcctatttgacaacactgagaaataaatgagacaatatgtatagagcattac

SEQ ID NO: 379521 - DNA, 201 bp, Homo sapiens
gcacaattaattaaaaggaagttttggttaaaatcatgtgaggtcgacagacacattttttaatttcaactgttccctcctactagctttttgaccttaasccagttattaacctaagtgttatgttttttttttaaatcagaaaaatgaagaaataaaagttcctatttgacaacactgagaaataaatgagacaatatg

SEQ ID NO: 379522 - DNA, 201 bp, Homo sapiens
agcacaattaattaaaaggaagttttggttaaaatcatgtgaggtcgacagacacattttttaatttcaactgttccctcctactagctttttgaccttargccagttattaacctaagtgttatgttttttttttaaatcagaaaaatgaagaaataaaagttcctatttgacaacactgagaaataaatgagacaatat

SEQ ID NO: 379523 - DNA, 201 bp, Homo sapiens
cactatggaatactgtagcggtgatttccccctccccccgttttttaaaagctttttcagctttcttttgggttctttggaattccttaatatccattatygtatcaaatattcctgtaaatatgattaaattgaacatctttcactgtttgatctattagtatgactagactggtgccatattgtgtcagtaatgagata

SEQ ID NO: 379524 - DNA, 201 bp, Homo sapiens
ttttaaaaacatgttttataactattttgttttttacatttagctttaaatgtaaagctatcgtctatcacatatatttagttttaagttttgtaccttarggtttattagttactcttatataatgtagtcacatagacctggattaaattctggctctgtgctttactagatgtgtaaacaaggaccacttgcttaacc

SEQ ID NO: 379525 - DNA, 201 bp, Homo sapiens
atgcctgattatttccctttccccagtgcagttaccttggtacaaggccagaggtcttcttggggaaggatgggagaaagattcactgtataaattgttgstaatgtagtggggtccttccccaaggggacctggcctctccttcattcaaggggttctggtctgtaaactggctcaagtctggaaattgagaggctgtga

SEQ ID NO: 379526 - DNA, 201 bp, Homo sapiens
attacctgagcctaggaggtggaggttacagtgagctgagatcacactactgcactccagcctggatgagagtcagacccagtctcaaaaaaaaaaaaaaaccccaaccaacccagacaaagcaaatctaaagctctaatggaaaaagaattattaatagccaggaaaactgaaaaaggggaagcaggatgggggaaatcc

SEQ ID NO: 379527 - DNA, 201 bp, Homo sapiens
gcgtaaatgttgagaaatacaatgccacttttaatttctgatgctttgcatgtgatctatttttctctcaagtagcttttataatctccttatccttgatrttctgaaaattcatgatgctgtgccttattgcatatgtgtttcctttattgtgcagggtgctcaatggtttctatcaatttgaagatacctgtccctgag

SEQ ID NO: 379528 - DNA, 201 bp, Homo sapiens
ttgaactcctgacttcaggcaatccacctaccttggcctcccaaagtgcgaggattatagacatgaaccaccatgcccggccctagttagctttttaaccrtccttttgaatgaccttttatctattatttatttttattttgtagagatagggtctcactatgttgccaggcttgtctggaacttctggcctcaagctat

SEQ ID NO: 379529 - DNA, 201 bp, Homo sapiens
agggttttgctctgtcacccatgcttgagtgcagtagcgcaatcatggttcactggggcctagaccttctaggttcaatcgatcctcctgcctcagcctcytgagtagctgagactactggcatatgctaccatgctctgctaatttttgtgttttttgtagagacagggttttgccatattggccaggctgctctgaaac

SEQ ID NO: 379530 - DNA, 201 bp, Homo sapiens
tgcggtgagcccagatcgtgccattgtactccagcccgggcatcaagagcaaaactccgtctcaaaacacacacacacacacacacacacacacacacacatacacacacactaaaacaaaagcatacaatagtttgcttttctatataatctcatgaaattaagagttttcattacatctaactgtttatttctttgggt

SEQ ID NO: 379531 - DNA, 201 bp, Homo sapiens
gtgcggtgagcccagatcgtgccattgtactccagcccgggcatcaagagcaaaactccgtctcaaaacacacacacacacacacacacacacacacacacatacacacacactaaaacaaaagcatacaatagtttgcttttctatataatctcatgaaattaagagttttcattacatctaactgtttatttctttggg

SEQ ID NO: 379532 - DNA, 201 bp, Homo sapiens
tgcaccaccatgcctggctaatttttgtatttttaatagagacggggttttgccatgttggccaggctggtcttgaactcctgacttcaggcaatccaccyaccttggcctcccaaagtgcgaggattatagacatgaaccaccatgcccggccctagttagctttttaaccgtccttttgaatgaccttttatctattat

SEQ ID NO: 379533 - DNA, 201 bp, Homo sapiens
cagggttgcatcatgttaggctggtctcgaactcctgacctcaaatgatcctcctgccttggcctcccaaaatgctgggattacaggcatgagccattgcrcctggctgccttagcttttttcttcttttttttctttgagacggagtctcactctgtcatccagggtggagtgtagtggcaccatctcggcactctgcaa

SEQ ID NO: 379534 - DNA, 201 bp, Homo sapiens
agcgagactgtgtttcaaacaaaaaaaaaagagtatacctcatagggctattgcaaggctggaaaaaaatcaatacatctatagttcttacaactgtgctygccaaagaaaaagtgcttccaaaatgtttattgttatttattattatctcatagaaaaggaaaaatctaaagcaagaaaacttgaatggagtcagcctta

SEQ ID NO: 379535 - DNA, 201 bp, Homo sapiens
taaaattaacaaaagatgtgaaagatgaggtcaacctttttagaatgggccagttattcacttcaaaatcttgaagccattttcctgaccttatcttctayggtaagagcatatgtaagtgaacttttaacatttttttcttatttttgtgctttttgggacagtgtcttgctctgttacgcaggctggagtgcagtagca

SEQ ID NO: 379536 - DNA, 201 bp, Homo sapiens
tccctgcaaaggacattatctcattcctttttatggctggatagtactccacgtgtttacagtgttggtggaaatgtaaattagttcaaccattgtggaakacagtgtggcgagtcctcaaagatgtagaaccagaaataccatttgactcagcaatcccatcactgggtatatacccaaaagaatataaattattatttt

SEQ ID NO: 379537 - DNA, 201 bp, Homo sapiens
gagtttgaattcttgctctgccatttaaccatgaaccttggaatgttagcctcagatttctagtatctaaagtgaagattaaaagaatgtaccttggctgrgtacagtgacttacgcctgtaattccagcactttgggaagtcatggcaggcagatcacaaggtcaagagatcgagaccatcctggccaacatggtgaaac

SEQ ID NO: 379538 - DNA, 201 bp, Homo sapiens
catccactcctatataattcacactacttttcttcccaatctctttcagaattccacatttccacaaagcatatttagattatattgaagtcagaattgtrcatcttattcattacctacataggattgcgataaccttgcagtaagaatcgcttagctgtggaattctagtttgaaaataattttccttagaattttaaa

SEQ ID NO: 379539 - DNA, 201 bp, Homo sapiens
gatcctacaagcaaagtgtttgtgggtcattgggttggggagctacttcagttgttttttttaatataactggaggtgtatattggatttttacctctgcktagatctgtagtaagaactttgttcccattgtcatgcattatttctgtgcatattaactaataatataaaacaataagtattatgagactttcacccagt

SEQ ID NO: 379540 - DNA, 201 bp, Homo sapiens
tttaacaggagaggaaataaagcccagacctactcaaagtctaggctgattaaaggagatactgaagccaaaactttgattctgtgctcttttgactactrtagctcactgctttgcatatctggtcatatgaaacaaaacctgaattcctaagatttttatttatttaaaaatagagatggggtcttgccatgttgtcca

SEQ ID NO: 379541 - DNA, 201 bp, Homo sapiens
gcatgcattagctatttttcctaatgctctccctccccctaccccatcctgacaggccctagtgtgtgatgttcccctccctgtgtccatttgttgtcatygtttagctcctatttataagcgagaacatgtggtgtttggttttctgttcctgtgttagtttgctgaggatgatggcttccagctcctgaaagggagagg

SEQ ID NO: 379542 - DNA, 201 bp, Homo sapiens; identical to SEQ ID NO: 82237

SEQ ID NO: 379543 - DNA, 201 bp, Homo sapiens
tttttaggtaacaggacattcagttagtaatgatggttgcaggttgaatagtctcgccctagatctcacctaacttgcaggcaagtgacaactagttcatractgaacctattcatctgtttattcattcagtaaattacttattgagcgtttaagcctcaggccttgccaaagtttacagtccgttgtgtctgccgttat

SEQ ID NO: 379544 - DNA, 201 bp, Homo sapiens
atgttttaataggcagtttacttaatgtaatttacttaatgcaattctgaactaaggtagttcttaaaacttgtttaagcactctttggagtaattgtttytaaatttatagattggggactaatgaaatgatttaatagcaggaattctatcttttcttattataatatttgtgccaaataagatgattctgaggaggat

SEQ ID NO: 379545 - DNA, 201 bp, Homo sapiens
gctgtctccgccacctaaggcctaaccaaaggctctcggagaacgtccctacattctttccaacctggcagatggcagctaacggccaaacctctccgggstattcacgtacctggagaaaacgatccccttgcggaggggagcacagaggccaaatcagctcttgccttcacttttcagccacacagcgtgttctcacgg

SEQ ID NO: 379546 - DNA, 201 bp, Homo sapiens
caattttacatgagatttgggcagggacacagacccaaactatatcaaggccttataaaaatagttaaaaagtgtttctcccttttctattctctgtgttkgcggaaaatttaggttattttttaaatatttagaagaagccagtccaactgataaagccatccaggtctgaagttttgttgtagattttaaattatgagt

SEQ ID NO: 379547 - DNA, 201 bp, Homo sapiens
aggattatatacatataatttttatcctgtatataggatattatatataatacatatccttgttataatatatataggatatgtatgtgggatatatatayacacacacacacacacacacacacacacatatatatatatatatatataaaggagagtttgttaagtgttaacttacagaatcacaaggtcccacaatag

SEQ ID NO: 379548 - DNA, 201 bp, Homo sapiens
cttgcagtttccttgtacaggcatctccccttatcccaggggatacattccaggactcccagtggatgcctaaaaccatggatagtactgaaccctttctrtattaatactatgttttttcctatacataaatacctgtgataaagtgtaatttataaattaggcacagtaagagattaacaataattaataataaaatag

SEQ ID NO: 379549 - DNA, 201 bp, Homo sapiens
tcagatgcacgtttacatttcataattgttgtatgaatcttttaattattgtttcttgtggttatttaggataatattgctgtatatctggaaccagttaytaaattttagtcaatagatccaatagtcaatgaatgattcttgctcctcaatttgcttcttattagttgtcttattctctcactgaatccagaatatgga

SEQ ID NO: 379550 - DNA, 201 bp, Homo sapiens
ctgttcacacatcattttttttttactgaaagttcctcttggaataaagactctgtgttttctgagtgtagtgaaacatttgttggttcttatatttttcratttgtgagggattctgtttataggataagttgtcatggctatatgttgcactaatgttattggcacatcaaaaaagtagagaaaaggcttgtgtattta

SEQ ID NO: 379551 - DNA, 201 bp, Homo sapiens
ttcttcctacaaggatttgtagatatttgggaatctttcctcttgtatttgaaattatagttgatggtacaaaacagaaaccgtagcttagccatctcacyacttttttagaatctgttgcctactttgtaattagatagctaattaataatgataattagctaattggatggcctacagctagtcttgatttcttatact

SEQ ID NO: 379552 - DNA, 201 bp, Homo sapiens
tatattcagaatattgggtaggatttgaataagcagaaaggggcatctggaattctcagcttaggcaactggttgaaagttggcatttactagtaatggcmtacagagaaggaacattctgagggggaggggcagagagaaagggacttagataatgagattaattttggtcactgatatctggtatctcttcaaatggag

SEQ ID NO: 379553 - DNA, 201 bp, Homo sapiens
tttgatagtttaataatgaaagataaattataaattttaaaaaacctgtatttactaaagcctgggttgaatgaaaacattgatagtaataaactccattrtcatgtaaagcactttgaacagaaagtactttataaatttaataaaatcctatatatactttaataccaatatatgtatggatgtaaattgcttaagcca

SEQ ID NO: 379554 - DNA, 201 bp, Homo sapiens
attggggagtaatttagtttaatatggattatagggactaatgtacttgtttgctgatttaaaaggataaatactgaaatattaaactgagtaggaacaargcaaaatttgtgcttttgtttgatctgccttcatcaaaatttctacaaattttattaaatgtaatcttgctatttttatcatggtaataacattatacaa

SEQ ID NO: 379555 - DNA, 201 bp, Homo sapiens
acatggtgagagtggactactccacacctatttagttaattcttccccaggagctgctcagggccagaaatgagtcctggtgctcagcaaccccattcacrgttcctagcttactcccctttcagcccagggtctgcttggtcctccctctgtccactctcaatgccttccttctgacagtctgcttaaagtatgcttgtc

SEQ ID NO: 379556 - DNA, 201 bp, Homo sapiens
tccccaacccaaatactagtacatacatgaagttaacaatacttaaatgctgatgtgaagtctgtaaatcttacgtcacttgataaaggaaaaggaaatamaatgaagatattttcttagtacaagtctatacatgcataaacatgtttttaacaaaagcagaaggaactcatgacagttacagtcctcatttctgcagct

SEQ ID NO: 379557 - DNA, 201 bp, Homo sapiens
gatctcacctaacttgcaggcaagtgacaactagttcatgactgaacctattcatctgtttattcattcagtaaattacttattgagcgtttaagcctcargccttgccaaagtttacagtccgttgtgtctgccgttatttagtaagtatcaagtgcttgtgtgccgattaaagaacaacttcggatacaatgggaggtg

SEQ ID NO: 379558 - DNA, 201 bp, Homo sapiens
ttttattttaagaccgtatctgctgaaaattatgcattaaggtctcatatatcctttcaaaacatggtctttgttgttgtagtcttccgcgaaaactttcrtcttagcatctagttaacattgatacagaggacatttttcacttcttattttgagatggagtttcgctctgtcaccaggctggagtacagtagcgcaatc

SEQ ID NO: 379559 - DNA, 201 bp, Homo sapiens
ctcagtgcttgtgggttgcatgctgtaatccagagggcctttgaacagacccaaaaccttgttctctggcccttcaagataagcaactgctgtactggagkggccacagtgtttccagtgtgctggcaacaacactccaatgaggggtgcagtcaaagcagtcaggggaagtctgtgggcaaatgtatgctggcagcagcc

SEQ ID NO: 379560 - DNA, 201 bp, Homo sapiens
gcctgccaccacgcccacctaattttttgtatttttagtggagacagggtttcaccgtttcagccagaatggtctcgatctcctgacctcgtgatccaccygcgttggcctcccaaagtgctgggattacaggtgtgagccaccacgcctggcaaattcttttttatttttgtctagctgaattgatttgaagaaccagtc

SEQ ID NO: 379561 - DNA, 201 bp, Homo sapiens
cgagtagctgggattacaggtgcctgccaccacgcccagctaatttttatatttttagtagagacaaggtttcaccatgttggccaggctggtctcaaackcctgacctcaggtgatctagccgcctcggcctcccaaagtgctgggattatacgtgtgagccactacacctagccatgtattcagtgtttagttcccact

SEQ ID NO: 379562 - DNA, 201 bp, Homo sapiens
ttattagtgttgctagcggtctatcaattttgttgatattttcaaaaaaccagctcctgtattcattgattttttgaaggttttttgtgtctctatctccytcagtcctgctctgatcttagttattttttgccttctgctggcttttgaatgtgtttgctcttgcttctctagttcttttaattgtgatgttattgtgtc

SEQ ID NO: 379563 - DNA, 201 bp, Homo sapiens
ggtgtatttgtccaggaatttatccatttcttgtagattttctagtttatttgcgtagaggtgtttatagtattctctggtggtagtttgtatttctgttkgttcagtggtgatattgctttatcattttttattgtgtctatttgcttcttttctcttttcttctttattagtgttgctagcggtctatcaattttgttg

SEQ ID NO: 379564 - DNA, 201 bp, Homo sapiens
taattttgattaatcagaattttaatcagaagcatttggcttcagaatatatatgccttttgaaaatattttaagtcatcttttttcttgtctcagtaagyatggcatattgaacttattagaatgtgtttatttttgaggattttgtgcttagtcatttttactatcagcttgcaaaaagcacaagaaactgagtttaaa

SEQ ID NO: 379565 - DNA, 201 bp, Homo sapiens
agacagtttgttgtgatttgattgcattgtggtctgagagacagtttgttgtgatttctgttcttttacatttgctgagggatgctttacttccaactatrtggtcaattttggaataagcgtgtggggtgctgagaagaatgtatattctgttcatctggggtggagagttctatggatgtctattaggtctgcttggtg

SEQ ID NO: 379566 - DNA, 201 bp, Homo sapiens
cagtcaagttgtaaatggtcttcaaaaatagtaataaaaaaagatttataatggaaagaattgatggtatatttcacctaaagtaagaaagacaatgtgtrataagggattttgcggttttacagctcagtgcatgtgtttgaaagctgttctctcagcaacgtgggtggcaggttatgctaccatataatgtattgtagt

SEQ ID NO: 379567 - DNA, 201 bp, Homo sapiens
ggcaactgctgtttttcctacttcttccctgagactgtatatatgctgctaaagaaatgtgatttttataataaatgagtatcccttttttttttttttttgagacagagtctcgctctgttgcccaggcaggagtgcagtggtgcaatctcggctcactgcaaccttcgcctcccaggttcaagcgcttctcctgtctca

SEQ ID NO: 379568 - DNA, 201 bp, Homo sapiens
aaacaacagtcaagttgtaaatggtcttcaaaaatagtaataaaaaaagatttataatggaaagaattgatggtatatttcacctaaagtaagaaagacamtgtgtaataagggattttgcggttttacagctcagtgcatgtgtttgaaagctgttctctcagcaacgtgggtggcaggttatgctaccatataatgtat

SEQ ID NO: 379569 - DNA, 201 bp, Homo sapiens
ctttgttctctgagattctttcctcaacttggtgtgtactgctgttaacactgctgaatgtattatgaaatccttgtagtgagtttttcagctctaccagrtcagtttggttctttcttaaaatagctatttcgtctttcagctcttgattcattttactggattccttagattccttggattgggtttcaacttccatct

SEQ ID NO: 379570 - DNA, 201 bp, Homo sapiens
ttttactttgtcagaaaacaacagtcaagttgtaaatggtcttcaaaaatagtaataaaaaaagatttataatggaaagaattgatggtatatttcacctmaagtaagaaagacaatgtgtaataagggattttgcggttttacagctcagtgcatgtgtttgaaagctgttctctcagcaacgtgggtggcaggttatgc

SEQ ID NO: 379571 - DNA, 201 bp, Homo sapiens
attaagtaaacctggagtgatcgtaagttttttagctgtggaatattcatataacttctcaaatttttacttttatttggaaaatttttttttttttttttacttagaacctttaaggacattttcctttttgataatgctttttgaggggaaaggaaaaacagccacatgtttttcaatgctttgaatgtatttattatc

SEQ ID NO: 379572 - DNA, 201 bp, Homo sapiens
taaaagacatcttttactttgtcagaaaacaacagtcaagttgtaaatggtcttcaaaaatagtaataaaaaaagatttataatggaaagaattgatggtwtatttcacctaaagtaagaaagacaatgtgtaataagggattttgcggttttacagctcagtgcatgtgtttgaaagctgttctctcagcaacgtgggtg

SEQ ID NO: 379573 - DNA, 201 bp, Homo sapiens
taactgggtggctgttcacgctattaatagagacaaagaacttaagggaggaatgggagttagaatgggtatcggttttgccatctttgggcacatccttktatcctctctggcctgaaaacaaaggattaaataatttctaggaaattacatttaccttgaagttttgatacttctataatataaaacgccggagtcctt

SEQ ID NO: 379574 - DNA, 201 bp, Homo sapiens
aaaaaaaattagataacctttgaccgtgaacagtatcatctgaggaggtgagagacctgcttacagatcagatgaagaatgttgatttttatattactagrctgtaagaagaaattccaaaagactttaagaagaaagaggttaatatttaaaacataagcttttgaaaacttatcttctctaacacattctactttgttt

SEQ ID NO: 379575 - DNA, 201 bp, Homo sapiens
caccccttaagtagcttttccttcttcctttcaaataggggttggaagagtagcaggtgagaacaacctctttcttcctcaattgtagagactcaatagtytaggctataaattaaaaaaaaaaaaaaaaaattccccagaggctgactcagcacatgcctgccttttaaaggaacagagagacccaattggaatagaaac

SEQ ID NO: 379576 - DNA, 201 bp, Homo sapiens
ctcttatggttgcagattctcataaacacaaagataaacacaaagatcgagaacaccggcacaaagaacacaagaaggagaaggaccgggaaaagtccaarcatagcaacaggtaagggtggaatcaagcaagtccctcatcattcagcagtgggttggccattgcttggcttacctggaataggtcttaacttgagctac

SEQ ID NO: 379577 - DNA, 201 bp, Homo sapiens
ctcccaggttcaaacgattcttgtgtctcagtctcctgagtagctgggattacaggcgtatgcccccatgcctggataatttttgtatttttagtagagaygggggggtctcgccatgttggccaggctggtctcgaactcttgtcctcaagtgatccgcccaccccagcctcccaaagtgcggagattacaggtgtgagg

SEQ ID NO: 379578 - DNA, 201 bp, Homo sapiens
aacttttctacttttgctgtttagaatcttgaaataaacatgtttttaaaaaatacttatttctgttaacatgttctatttaactactataccagcagtayatgattttgtgtttatgatgaaaaaactcaaatgattgacagatttaatagttagaataaaaatcaaagtcacctttacctgtcttctcccattctcatt

SEQ ID NO: 379579 - DNA, 201 bp, Homo sapiens
gttgacaggagagatttttaaaaattgagatttgacttgcatatcacaaaatttgtattttaatggtatacagtgtaccattttttttttttttttttttttagtatattcacaaggtattgcagcctcttcactaattccagaacattttcatttctctaaaaagaaacttcatattcagtagcgattatggagttttct

SEQ ID NO: 379580 - DNA, 201 bp, Homo sapiens
attccccttttaatgatgacaagttttcaggctttttcactgcctttagttttgcattaagttcctgggagattcacacacccctgatatttactgcactyctggatgccagttttttatcactcaagaccagcttgttatctgtcctagacagaagccatcttcttttaaaagtattagaacatactgggtatagagtgt

SEQ ID NO: 379581 - DNA, 201 bp, Homo sapiens
gtgtgagccaccgcgcccggccaaaatttttaaacttttaacgtcccttcaattcctcgttctgttctggctacattgggtggagaggtggggaggtaggragtggccagtatagaacttatgaatatgggcaacaaaccatagtaatatcagcagcacctatgatgagcatatgggtggggaggaagcaaggagatgaag

SEQ ID NO: 379582 - DNA, 201 bp, Homo sapiens
aggggaaggtggaacttaaaggaagatggagtgttcctgaattcagattcctgaattagccatttatagtttcatgggaagacaatgaaaaaaaaaaaaaagaaagaaagaaaagaaaagaaaagaaacaagcaaccccaaaggtttttatcctttcaggtatccaaacatctttattctagaaagtttctcctcgatggt

SEQ ID NO: 379583 - DNA, 201 bp, Homo sapiens
tcatggaggcaagtccagtgaaacttgggcagttagggggaccctttccctctcccttttcaaagttactcagtcagcagctgctactgttgggatggcgyggtcaggtgggtattatgcttattatgaaacttgatgagggcagggactcagttttggggctgagttgtatttcaacacttaagtggcactcagtaaata

SEQ ID NO: 379584 - DNA, 201 bp, Homo sapiens
tctccagaacttttcatcatcccagtctttgaattcactaaataataacttttcattctgttcccctgtcccaatatctttctactttgtctttttttctstttcccttctaccttttatctttatgaatttgcctattctaagtacttcatataagtggaataatacaatatttatcttttttaaatctgttctatattc

SEQ ID NO: 379585 - DNA, 201 bp, Homo sapiens
ttgttttatcctgactgacattgtaagtcctaagaggacttacaactggtaagtaaagttgtgtttaccaaagcagttggaagttcaggcagttgtacgtwttatttgaccccttagagctaaacaggtgaaaatttcaggtcctttggatgaagtaagttctcattttatctcagcaaccctatgaggtaggttatgtct

SEQ ID NO: 379586 - DNA, 201 bp, Homo sapiens
attgattagaaaaaaatgaacactggcccttaactctgcaaaactgctagaaaataaataaataaataaataaataaataaataaataaataaataaataaggtggtggtggtgatatgcccttgtaatcccagccattccaagggctgtggcaggaggattgcttgagcccaggagttcgagaggagcctgcgtaacatc

SEQ ID NO: 379587 - DNA, 201 bp, Homo sapiens
catttgaataaagcagtatagttgacgcttgaacaacacgagggttagggatgctgactcctatgcagtcaaaaattcgagttataacttttgactcctcraaaacttaactaatagcctactgttgaccagaagccttactgataacagaaacagtcaattaacacacattttgtatgttatatgtattatatactatga

SEQ ID NO: 379588 - DNA, 201 bp, Homo sapiens
tattgattagaaaaaaatgaacactggcccttaactctgcaaaactgctagaaaataaataaataaataaataaataaataaataaataaataaataaataaggtggtggtggtgatatgcccttgtaatcccagccattccaagggctgtggcaggaggattgcttgagcccaggagttcgagaggagcctgcgtaacat

SEQ ID NO: 379589 - DNA, 201 bp, Homo sapiens
ttattgattagaaaaaaatgaacactggcccttaactctgcaaaactgctagaaaataaataaataaataaataaataaataaataaataaataaataaataaggtggtggtggtgatatgcccttgtaatcccagccattccaagggctgtggcaggaggattgcttgagcccaggagttcgagaggagcctgcgtaaca

SEQ ID NO: 379590 - DNA, 201 bp, Homo sapiens
tttattgattagaaaaaaatgaacactggcccttaactctgcaaaactgctagaaaataaataaataaataaataaataaataaataaataaataaataaataaggtggtggtggtgatatgcccttgtaatcccagccattccaagggctgtggcaggaggattgcttgagcccaggagttcgagaggagcctgcgtaac

SEQ ID NO: 379591 - DNA, 201 bp, Homo sapiens
ttccagttacaaagcggtcactgtaaagtaaaaggtgtcttcatatctaggtttgggctgagaaggatccaattgtatatctagttcctacttttcttttyttttttttttttttgagatggagtctcactctgttacccaggctggagtgcagtggcgcaatctcggctcactgcaagctccgcctcccaggttcacgcc

SEQ ID NO: 379592 - DNA, 201 bp, Homo sapiens
cctgggcagcttgctctgagagcaggcaatgaaaaggaggaaggagaaacagcggacactgtgggctgctgctcacttcgtgtggagcacatcaatctacrcccagagttggatggtcaggaatatgtggtagagtttgacttcctcgggaaggactccatcagatactataacaaggtccctgttgagaaacgagtaagt

SEQ ID NO: 379593 - DNA, 201 bp, Homo sapiens
  misc_feature (1)...(201): n = A,T,C or G
agcatgggttgactgcttttttgtgtgctttgcactttgctgggcaccagcaaaagtgacttgagacaggcaacatggcacatgcctgtagacccagctantcagaaggctgagacaggaggatcactggagaccaaaagtttgaggctgtagtgtgctgtgatcacacctgtgaatagccactgtactccagcctgggca

SEQ ID NO: 379594 - DNA, 201 bp, Homo sapiens
tgcttaaccctagttcacgaatcaaggtaaggggatagttgagagctgcactggttcatggtgctgataacctttttttgttgaaatgtaacgttctcgtyctctagaatcactttgacaaattaaaaatcctccccattgaaagaaggcaagtactttcatagttagcattatggtgatcttcctacagtgcctccattt

SEQ ID NO: 379595 - DNA, 201 bp, Homo sapiens
tgcttctatttagggatagaaaacaaggaaggatcctatgtaatagataatcctttttatttcattttgttttattgccatgcaattttgaggaaggggcrtcaggtgttaactcttaaaggctcatttgctgctgaaaaagtgccatggaaaaggggctattcatgtcttccctacatagtccaaaaaaggtttgtcaac

SEQ ID NO: 379596 - DNA, 201 bp, Homo sapiens
agaaactgtatttgatcctagagttgctatgaggatggccatgatttaggccttaaatgggatgccattgttcagatcaagatgtataaagcaagtatgtytaattttcttttaatatatacctcattaaaaatacagttgttcactaagataggtaaggattcattgtgacacatgatggcatttaatcaagtctgtagc

SEQ ID NO: 379597 - DNA, 201 bp, Homo sapiens
ctttgtgaatattgtctggaagatgtggtgttggtaactatgcttgctatctcaagtaatacattgttaaccagtgattgatttatgtaactatgaaaaamactttaaaaaaagtagaaatcaatgtttaattatgcccagacatgtcattattgaactttgtattaagagattgtttaagcgtgattttaagagggccta

SEQ ID NO: 379598 - DNA, 201 bp, Homo sapiens
tttggagctcattcttcgcaatatttaaaattgtagctctttgcatgtaatttagaacattctgacccatactcaactgctgggagactctgttatttatwtttaaaatgttgacagtgagttaggaatttggagcagaaaccatatctaagtctaagtgaaaagacttcctaagtattggtagaactaactgtagtgggg

SEQ ID NO: 379599 - DNA, 201 bp, Homo sapiens
agaagttataacatctgatctttagagtcagtgttcaatactatccctttgttatcatttataggtcaggcttaatagtattatgtctagggagaaaaacrccaaactgtggcttctttccacagaataattggctctcatttccttatcctccccatattagtaacttgtcttgattgtagaagcaggctaatgggagct

SEQ ID NO: 379600 - DNA, 201 bp, Homo sapiens
acataaagacagagacaaggaaaaacgaaaagaggaaaaggtacagagttttctagtaggggaggaaggaacgtggatgcacttttgtttacctttgaaarcagatatcttaattgcatagtaagatcccttggtcttgaagtgaaaggtttcttgtcaggagaatttagagcaaactgtagtcttaaactataaaaacta

SEQ ID NO: 379601 - DNA, 201 bp, Homo sapiens
caagacccagcagtggatagtactactgacttagaccctgatcttggggagtttgcagcctaacaggactccataatctcagaggcaaatgcttatgttaygtaaacattttgacctgttgaccagagagcctaagacagttctttcagccctcacgctggtcattcctggagactcttaactataactcaaagccaaaac

SEQ ID NO: 379602 - DNA, 201 bp, Homo sapiens
aacccttgtttctttccagatcactgaagaacaaatagttgaattcactagtccttgtgcatcttctccctgccttcatgaagccacccttgttttttttwatctgacaaaccactgacagagacagcctggtccagataacatcttggtttcaccttctcaggtggagccatttttcctctacagctcataaccttacca

SEQ ID NO: 379603 - DNA, 201 bp, Homo sapiens
gtattccgtacatacaatgcctccatcacgctacagcagcagctaaaagaactgacagcccgtaagtattgcttggccagatagggcccacacccctactwatggtatccggtgaccttgcttatctaaggcctagagtcagttctactttttttccctaccattgtggtcagacactttttccctttagacctctagtag

SEQ ID NO: 379604 - DNA, 201 bp, Homo sapiens
cagcccgaggatgatctttttgatagactcaatgtgagtagatgaagcacacaatgttgaagggagtcccagccagagcctcacagtacctaaaggggagsgttgctggcagatgacttgggctctccctttagcctggcctgctctgtggcatcccatacactctctcttcctccctctgagtccacggtgaatctgtag

SEQ ID NO: 379605 - DNA, 201 bp, Homo sapiens
caaacttccgagctttacgtagcacctgctgttcctctatctggaacacacatgctcccttctttatccttttggcctataaccttcctcaaaaaactcakttccgtttaaatgctttcctaaatgttcttgttgatgcttgtggtagattgaaaatagaatcatatgcttcctccttttgacacttttgagttcttgtac

SEQ ID NO: 379606 - DNA, 201 bp, Homo sapiens
tgactccagtaaggtagcccctttgtttccttgtagttgactatgtgagctcttgccaagcagcagaagtgggatgaagggaactaattttgaaaacttaytaggcaccacatttttatgtgcattaaatctgaattgaataaagataatatagattgcataggcttatggggagaaccagagaccaggaaaggaaacgtt

SEQ ID NO: 379607 - DNA, 201 bp, Homo sapiens
tggagagagtgagcatacatgcacactgtgcaaatgatgaatggggtaaaatgttaacagtgaatctcggtgacggatgtatgcgtgttccttgtgccttkttctttgcaagtttctttaagtttggggttatttctaaagttaggatttttttcaagagtaataattaggattcacttatatcttttaggtttttaagaa

SEQ ID NO: 379608 - DNA, 201 bp, Homo sapiens; identical to SEQ ID NO: 82243

SEQ ID NO: 379609 - DNA, 201 bp, Homo sapiens
agagccagcttgtgatcatgatgtcccaggaactgatgctacatattctcaaaaagaggtttcttcaaatttagtcctttcaaggtactagttactgttgktttacttttcaggttcgagcctctggggatgcaaaaataaagaaggagaaggaaaatggcttctctaggtaagactttgctgctgcgtgggcttcccttt

SEQ ID NO: 379610 - DNA, 201 bp, Homo sapiens
tgatattcctaatatgaaaaaaagctcttttaaaacaaatatgaaaggaatgatctaatcagaatgtgaggaacagtcagtttagtaaaatagttaataarcatctaaaaatgtgatcaacttcataagtaatcaaagatgcaaaaaaaatgataaatctttttgtttaatgcctctcagattgggaaagattaataagtg

SEQ ID NO: 379611 - DNA, 201 bp, Homo sapiens
atactaccaaggaaatatttaggaaaaatttctttaaagactggagaaaggtactgtagcccatgtgttaatatcctagtaccttgcaaaacaatcaagtrctaagtaataaattatcattttgcaaaacatttcctgatgtaaaatttgagttgtatggattttgttgtatttaaacttgcgtattttttgtcttcattt

SEQ ID NO: 379612 - DNA, 201 bp, Homo sapiens
ttgccccaccatatgagcctcttccagagaatgtcaagttttattatgatggtgagttgtttcaaggttcttgattcttggccaggaaaagaaatctgctkctatttagggatagaaaacaaggaaggatcctatgtaatagataatcctttttatttcattttgttttattgccatgcaattttgaggaaggggcatcag

SEQ ID NO: 379613 - DNA, 201 bp, Homo sapiens
ctgaggaggccttttccttacaaacaatgtaaacaatccctctgtcatgtatgccattgtggtaaaacaactgtttacattttcaagtccctcacttgttrctgagctccttcattgttgatctcttctgtccagtattcttaaactgagctgttgaaatgtattttcctttattcaccacagtatttcatcttacttgtg

SEQ ID NO: 379614 - DNA, 201 bp, Homo sapiens; identical to SEQ ID NO: 82249

SEQ ID NO: 379615 - DNA, 201 bp, Homo sapiens; identical to SEQ ID NO: 82248

SEQ ID NO: 379616 - DNA, 201 bp, Homo sapiens
agaattgggaggcttctgttttggatgcctagaaattgcataagggtcaaaaggctgggcgcagtggctcacgcctgtaatcccagcactttgggaggccraggcaggtggaacacgaggtcaagagaccatcctggccaatgtggtgaaaccccatctctactaaaaatacaaaaaaaaaaaaaaaaataaaaattggcg

SEQ ID NO: 379617 - DNA, 201 bp, Homo sapiens
ttgatagactcaatgtgagtagatgaagcacacaatgttgaagggagtcccagccagagcctcacagtacctaaaggggagggttgctggcagatgacttsggctctccctttagcctggcctgctctgtggcatcccatacactctctcttcctccctctgagtccacggtgaatctgtagtcaagagaagacacatctg

SEQ ID NO: 379618 - DNA, 201 bp, Homo sapiens
aggacagtttagtcatagctggttgctcttgagaagtgtatttaggtggagaacttttctacttttgctgtttagaatcttgaaataaacatgtttttaamaaatacttatttctgttaacatgttctatttaactactataccagcagtacatgattttgtgtttatgatgaaaaaactcaaatgattgacagatttaat

SEQ ID NO: 379619 - DNA, 201 bp, Homo sapiens; identical to SEQ ID NO: 82247

SEQ ID NO: 379620 - DNA, 201 bp, Homo sapiens
tttatccttccctgctcctgcagagctttcccttcactgaatgcccagccacccctgctggagacccaaaacctgtccctgatatcttaatagggaaggamaaatttgctttattggtttgttaagcccaccaacctgggccaggcttggtggcttacgcctgttatcccagcactttgagaggtcaagtagggcagatcc

SEQ ID NO: 379621 - DNA, 201 bp, Homo sapiens
gccttggccatcctcattactgaaggatctttctggtatccagctgggatgtcatttttcttctacaggctgcctgtttttgtaaaaaaaaaaaaaaaaaatttattggaaccagctgcctctacttgtctacatattatctacggctgtgtttatgcaacaatgacagagatgagtagttgcaaaagagagtagttgcaa

SEQ ID NO: 379622 - DNA, 201 bp, Homo sapiens
gtgatccttgcaccgcctcctaaagtgctgggattacagatgtgaaccaccatgctcagccacatttttttttaaatggtgttaacagtttacatttttttcttgccattttatttcatttattttattcctaatgacttaatgttttcctttatattggaaacatgttacagttttctaaagaagttcagggaatctttt

SEQ ID NO: 379623 - DNA, 201 bp, Homo sapiens
gcaacatggcaaaaccattatccaggtgtggtagtccacacctgtagtcccagctgcttaggagcctcagaaggattgcatgagcccgggaggtggaggcrgcagtgaaccgagattgtaccactgcactccaggctgggtgtcagagtgagaccctgtcatacacacacacaaagattgaaatacttcatagagaggcat

SEQ ID NO: 379624 - DNA, 201 bp, Homo sapiens
  misc_feature (1)...(201): n = A,T,C or G
atatccttacgaagcaagagtattgagttattaaaattaatatcctgatatttggggggaaatactttaaacaatttctctagagtaactttctgaagtangttttccaacttctagtgaaatcattaactggttctaaatctattggatctcaaactggtttccaccactgtgaacagaatggactgtagaagcagacct

SEQ ID NO: 379625 - DNA, 201 bp, Homo sapiens
cctgatattgcccattcacctgtacaatgaggacaaatactatctacttcacaggattgaagtgagaaaaagtgctcacagaacatcttcatgatatgtaygtggttatccttatttctgttagcttcttttcaacgaaatgacatattccttctttgtattaatagaatacagatgttctagcactctgaccagcaattt

SEQ ID NO: 379626 - DNA, 201 bp, Homo sapiens
cataaagacagagacaaggaaaaacgaaaagaggaaaaggtacagagttttctagtaggggaggaaggaacgtggatgcacttttgtttacctttgaaagyagatatcttaattgcatagtaagatcccttggtcttgaagtgaaaggtttcttgtcaggagaatttagagcaaactgtagtcttaaactataaaaactaa

SEQ ID NO: 379627 - DNA, 201 bp, Homo sapiens
taaggtgggactactgtattgactgttaagaaggaaacttggaaaattatgctcagcagataggtccacttggggtcatgaaaggtgaaattattcctcayatcttatttcactatcctcgtgctctgttatttccagagatgccaaggttccttctcctcctccaggacataagtggaaagaagtccggcatgataacaa

SEQ ID NO: 379628 - DNA, 201 bp, Homo sapiens; identical to SEQ ID NO: 82240

SEQ ID NO: 379629 - DNA, 201 bp, Homo sapiens; identical to SEQ ID NO: 82242

SEQ ID NO: 379630 - DNA, 201 bp, Homo sapiens
tgagccaccacatccagcctagagcacttacattgctacatatttggagcaaacataattaaagtatgacttactgtgacccagcagtcaataacagataygtttttgtaatagaatgttgaagggtggtaactggtggttttacttcatggagggctttaggtcggctatatgggaagctgccatcatgatgcttttgtt

SEQ ID NO: 379631 - DNA, 201 bp, Homo sapiens
ctatacttgtacaactggagtttaagaactactactgtggaatgagactgcattttaaggcccagaatattttccatttgttgagatttccttaagataagtacccatgagtaatatagctggttcaaaaggtacacacaacttataatttatgctacagatgccatctggctttcttgaagagacgtacatgtccacagt

SEQ ID NO: 379632 - DNA, 201 bp, Homo sapiens
ttagtagatacagggtttcaccgtgttagccaggatggtctcgatctcctgacctcgtgatccaccagcctcggcctcccaaagtgctgggattacatgcrtgagccaccgcgccaagcctaattcctacttttctaagaatgtttacagcaaagtggtcattgccaaaggaacttgtagcagtacagaagatgggctcag

SEQ ID NO: 379633 - DNA, 201 bp, Homo sapiens
ttttgtactgacctcaatttgcctccctatcatttctcagcagtaatataaatttatatttactcagaaattacaaatttactgagtaaatttatataatrcaatataatagtcattaagatatttgaagaagttgccatgtaatacactttttgacacacctttcacagcacacatagcacatgtaataacttttatttg

SEQ ID NO: 379634 - DNA, 201 bp, Homo sapiens
tctatacttgtacaactggagtttaagaactactactgtggaatgagactgcattttaaggcccagaatattttccatttgttgagatttccttaagataagtacccatgagtaatatagctggttcaaaaggtacacacaacttataatttatgctacagatgccatctggctttcttgaagagacgtacatgtccacag

SEQ ID NO: 379635 - DNA, 201 bp, Homo sapiens
tcgccgacgtgttgtttaaaagcggccgcgcaggcgcagtgagcccaaatgcgaacttaggctgttacacaactgctggggtctgttctcgccgcccgccmggcagtcaggcagcgtcgccgccgtggtagcagcctcagccgtttctggagtctcgggcccacagtcaccgccgcttacctgcgcctcctcgagcctccg

SEQ ID NO: 379636 - DNA, 201 bp, Homo sapiens
ttctatacttgtacaactggagtttaagaactactactgtggaatgagactgcattttaaggcccagaatattttccatttgttgagatttccttaagataagtacccatgagtaatatagctggttcaaaaggtacacacaacttataatttatgctacagatgccatctggctttcttgaagagacgtacatgtccaca

SEQ ID NO: 379637 - DNA, 201 bp, Homo sapiens
ccatggggtaaattcatatttcatccataagtgtgaccattgcagaagttctaggactgctactgtctgtatttttgtccttcagcatatcccagactaarcttactcttaaaatatgtttgtccaacctttggtttccttcctatggttgatattaagcctttcttctactcttagaagacaaaatggggagacaaaaaa

SEQ ID NO: 379638 - DNA, 201 bp, Homo sapiens
attctatacttgtacaactggagtttaagaactactactgtggaatgagactgcattttaaggcccagaatattttccatttgttgagatttccttaagataagtacccatgagtaatatagctggttcaaaaggtacacacaacttataatttatgctacagatgccatctggctttcttgaagagacgtacatgtccac

SEQ ID NO: 379639 - DNA, 201 bp, Homo sapiens
aattctatacttgtacaactggagtttaagaactactactgtggaatgagactgcattttaaggcccagaatattttccatttgttgagatttccttaagataagtacccatgagtaatatagctggttcaaaaggtacacacaacttataatttatgctacagatgccatctggctttcttgaagagacgtacatgtcca

SEQ ID NO: 379640 - DNA, 201 bp, Homo sapiens
gctttgacctaaatctgttgctttgtctcctccagactggtattctgaataagcatcttcaggatctcatggagggcttgacagccaaggtattccgtacrtacaatgcctccatcacgctacagcagcagctaaaagaactgacagcccgtaagtattgcttggccagatagggcccacacccctactaatggtatccgg

SEQ ID NO: 379641 - DNA, 201 bp, Homo sapiens
gtgagtagatgaagcacacaatgttgaagggagtcccagccagagcctcacagtacctaaaggggagggttgctggcagatgacttgggctctccctttascctggcctgctctgtggcatcccatacactctctcttcctccctctgagtccacggtgaatctgtagtcaagagaagacacatctgctgcagaacaactg

SEQ ID NO: 379642 - DNA, 201 bp, Homo sapiens
taagatttcatggtggagacagcatttgagctagccattcaaagatggttaaaattttgctaacggaaagtaatggttagaaagaaaaacataagcaaaayatagaggcattgtagtatatgctttgttctgggaggaatctagttaggtgggttacacagggtggaatagtagaaaatgagacccaaaaaagtggcttga

SEQ ID NO: 379643 - DNA, 201 bp, Homo sapiens
tttcatcttttgacagctcatctaaaataggaggagtcacagttgcttctccctctattaggacagaattcagtaaaacagcccaaaatctcatttttttwaaatttatttttatatttatttatttgagacagagtcacactctgtcacccaggctggagtgcagtggcacaatcttggctcactgcagcctccacctcc

SEQ ID NO: 379644 - DNA, 201 bp, Homo sapiens
gttctttctattataactgtttcaatattgtgctacagttctctacacccctgcaaagtcagattgcatatcattatgagataagatgtcttctgagtttygaaataaatggatttctggttaaattttagttttctataaagaatgtgggcagccttggtgaattattaatacctgtgtaatagtaaggtggtggaatta

SEQ ID NO: 379645 - DNA, 201 bp, Homo sapiens
gttcaaacgattcttgtgtctcagtctcctgagtagctgggattacaggcgtatgcccccatgcctggataatttttgtatttttagtagagacgggggggtctcgccatgttggccaggctggtctcgaactcttgtcctcaagtgatccgcccaccccagcctcccaaagtgcggagattacaggtgtgaggtactctg

SEQ ID NO: 379646 - DNA, 201 bp, Homo sapiens
acagcagcagctaaaagaactgacagcccgtaagtattgcttggccagatagggcccacacccctactaatggtatccggtgaccttgcttatctaaggcstagagtcagttctactttttttccctaccattgtggtcagacactttttccctttagacctctagtagcgagataatgctttgttgtataaacataggat

SEQ ID NO: 379647 - DNA, 201 bp, Homo sapiens
tctgtaaatatacacatggagagagtgagcatacatgcacactgtgcaaatgatgaatggggtaaaatgttaacagtgaatctcggtgacggatgtatgcrtgttccttgtgcctttttctttgcaagtttctttaagtttggggttatttctaaagttaggatttttttcaagagtaataattaggattcacttatatct

SEQ ID NO: 379648 - DNA, 201 bp, Homo sapiens
agtgtcctttgatgcacagaagtttttaagttcagtgaagttcagtttatttatttattgagacagagtgtctctctgttgcccaggctggagtgcagtcrcgtgatctcggctcactgcaaccttcacctcccaggttcaaacgattcttgtgtctcagtctcctgagtagctgggattacaggcgtatgcccccatgcc

SEQ ID NO: 379649 - DNA, 201 bp, Homo sapiens
ttgacaggagagatttttaaaaattgagatttgacttgcatatcacaaaatttgtattttaatggtatacagtgtaccattttttttttttttttttttttagtatattcacaaggtattgcagcctcttcactaattccagaacattttcatttctctaaaaagaaacttcatattcagtagcgattatggagttttctg

SEQ ID NO: 379650 - DNA, 201 bp, Homo sapiens; identical to SEQ ID NO: 82245

SEQ ID NO: 379651 - DNA, 201 bp, Homo sapiens
caaagagaaatgttaatctgatgtccctctcgctgttaattcttgctcatttattttaggtactttctactcttgaaaccacatatactatatttgcctargtgattttttaaaatctcattattctcaatttggataatgtggacagaggcagcagtaaagtttacttcctgaactagctcagaaaaagcagacttaata

SEQ ID NO: 379652 - DNA, 201 bp, Homo sapiens
tccaaaattgggctgtgaggtttttttgttttgcttgttttcagtgcatgtgtggggtggggaggtgcaaaaaaatgtttgccttctaatatacagctttsttgtatattaattatatagtaacagttgtccctgctgctaatggtatggaaaatgattctgttgtgctttctgaatacatatcattttagaagtttcaga

SEQ ID NO: 379653 - DNA, 201 bp, Homo sapiens
tttctttggttcagtagatagagtaaaatggaaaataggaaaccaaggtcagtccccaaatctcattttaaccaatagcagcaaaaaaaaaaaaaaaaaaaggaattgagtctgactttttccccttgctgtcagcataaagatggggaattgagagagttggaaagacattcattagtttgttcagattattaaataaca

SEQ ID NO: 379654 - DNA, 201 bp, Homo sapiens
tttctgttctttgcaaaaataaaaacatcaaacaagataaagtccgatgtagccaagaccctctacttgaaccttctgtcggtactgtttgtttaagtacygtaagtttccacggttcatgttatcttaggatatcttgtgaaacgaatccttgtggtccctactctgggctaacgctttgtgacttaactttttacagtg

SEQ ID NO: 379655 - DNA, 201 bp, Homo sapiens
agtaacttgtcttgattgtagaagcaggctaatgggagctttgtctgggcttctttgtgaaagctttttttttcagtggcatgtgctattatgcctaccaygccatttgaatcctgtcattgtacttcttgaccagcttgtcaaggtaggcatacagaagatagctcatgactcctgttaactgactcatctcttatggtt

SEQ ID NO: 379656 - DNA, 201 bp, Homo sapiens
aaaagtgtgcagcatctgtcagggcccctggggccctggcttttcgatggtttctgagaaatgtcttttggaaatctctatactagggcttttattgactyaaagtggcaggatgggtacagtgtgctcttgtctagagcccaggcctggttcttgaggactttgctattcttctagggtagtagagtcaaagaagaaggc

SEQ ID NO: 379657 - DNA, 201 bp, Homo sapiens
cttgggggactgtgtgagctggaaacgtggctggccagatgggcagcaccatggagccccctgggggtgcgtacctgcacctgggcgccgtgacatccccwgtgggcacagcccgcgtgctgcagctggcctttggctgcactaccttcagcctggtggcccaccggggtggctttgcgggcgtccagggcaccttctgca

SEQ ID NO: 379658 - DNA, 201 bp, Homo sapiens
ctatatggccacggtgtcggggctcctcaagatcgtccaggccttcgtggcctgcatcatcttcggggcgctggtccatgacagccgctacgggcgctacrtggccacccagtggtgcgtggccgtctacagcctgtgcttcctggccacagtggccgtggtggccctgagtgtgatgggccacacagggggcctgggctg

SEQ ID NO: 379659 - DNA, 201 bp, Homo sapiens
tcagtggcagcggccccgcctacgtaaggactgcgggggaagctggcggcggcgggcacttcccgggaccaccgggcacatctgtccctgctccccctggragggccagggtggagggctccaaggctgtgggaactggagcttgcccagaagggaaggaggagaagcccaggagagaggctcagggtgccttctccccac

SEQ ID NO: 379660 - DNA, 201 bp, Homo sapiens; identical to SEQ ID NO: 82285

SEQ ID NO: 379661 - DNA, 201 bp, Homo sapiens
actgcttggtggggtgagtgcatctaggcactgcgtccatggccagacggacacgctggtttctcttccagaagctgtcagcgtttcggccagcccccagrgtcatccgctgcatgaccaacactccagtcgtggtgcgggagggggccaccgtgtatgccacaggcacgcacgcccaggtggaggacgggaggctcatgg

SEQ ID NO: 379662 - DNA, 201 bp, Homo sapiens
ggggactgtgtgagctggaaacgtggctggccagatgggcagcaccatggagccccctgggggtgcgtacctgcacctgggcgccgtgacatcccctgtgkgcacagcccgcgtgctgcagctggcctttggctgcactaccttcagcctggtggcccaccggggtggctttgcgggcgtccagggcaccttctgcatggc

SEQ ID NO: 379663 - DNA, 201 bp, Homo sapiens
tgcctgcggctctcctggggcaacttcaccgccgccttcgccatgctggccaccctgctatgcgcgacggctgcggtcctgtatccgctgtactttgcccrgcgggagtgttcccccgagcccgccggctgtgctgccagggacttccgcctggcagccagtgtcttcgccgggctcctcttcctggcctacgctgtggag

SEQ ID NO: 379664 - DNA, 201 bp, Homo sapiens
ctagggagctgcagtccatggctgaccaggagcaggtgtcaccagccgccatcaagaagaccatcctggacaaggtgaagctggactcccctgcagggacygctctgtcgccttctggccacaccaagctgctcccccgcagcctggccccagcgggcaaggattgacacgtcctgcctgaccaccatcctgccaccacct

SEQ ID NO: 379665 - DNA, 201 bp, Homo sapiens
ttgcatggcagaggcctctctcacacacatctgctcattcacgcactcagcagatacgtattgagctccagcccagtgttgcgcaggacacagggggcccygaggttccctgggttactgtgggcagtgcccctccccaccttccgtttcctgcgaggagggaacatccatagagggacccggatgctgtgccctgtgctc

SEQ ID NO: 379666 - DNA, 201 bp, Homo sapiens
tgaggcccagtgggagagactggcctctttccacttctgcagggctgggggctgaaggtgggtgctgggtcacaaggcctgagtcctgcgggaactggcarcttctgtgtgtttggggctttacctgtgctgtctcactcttcttcctgggaatggggagggagggaagccaaagctagccatgaagaggaactgtttccg

SEQ ID NO: 379667 - DNA, 201 bp, Homo sapiens
gggccacaccagtggggtggcggggtggccagccacattaggaaacttctgtgggggcccaccttcctcctgccctcgctgtgggattaagttagaccagyaggacacgcagcaacatccaggcacaaggaaaattccatggaaggtgaaagaagcaaagagcaagagaaagacagagtttgctgtttgcctgggatccca

SEQ ID NO: 379668 - DNA, 201 bp, Homo sapiens
gtgtacaccttcctggctgtgctcctgtacctcagcgccgccgtgatctggccagtcttctgtttcgatcccaagtacggtgagcccaaacggccccccarctgtgctcggggcagctgtccctgggacagccagctggtggtggccatcttcacctacgtcaacctgctcctgtacgtcgttgacctcgcctactcccag

SEQ ID NO: 379669 - DNA, 201 bp, Homo sapiens
tgcagcacagtgatgtgctcttcctggctgtgaagccacacatcatccccttcatcctggatgaaataggcgccgacattgaggacagacacattgtggtrtcctgcgcggccggcgtcaccatcagctccattgagaaggtagcaccgcaggcccagtggggtgtggagaggggctgtctagagcccgggccctcagtac

SEQ ID NO: 379670 - DNA, 201 bp, Homo sapiens
gctccaaagccaacctctccctgcctctctagggagctgcagtccatggctgaccaggagcaggtgtcaccagccgccatcaagaagaccatcctggacarggtgaagctggactcccctgcagggaccgctctgtcgccttctggccacaccaagctgctcccccgcagcctggccccagcgggcaaggattgacacgtc

SEQ ID NO: 379671 - DNA, 201 bp, Homo sapiens; identical to SEQ ID NO: 82290

SEQ ID NO: 379672 - DNA, 201 bp, Homo sapiens; identical to SEQ ID NO: 82282

SEQ ID NO: 379673 - DNA, 201 bp, Homo sapiens
tggaggacgggaggctcatggagcagctgctgagcagcgtgggcttctgcacggaggtggaagaggacctgattgatgccgtcacggggctcagtggcagyggccccgcctacgtaaggactgcgggggaagctggcggcggcgggcacttcccgggaccaccgggcacatctgtccctgctccccctgggagggccaggg

SEQ ID NO: 379674 - DNA, 201 bp, Homo sapiens; identical to SEQ ID NO: 82288

SEQ ID NO: 379675 - DNA, 201 bp, Homo sapiens
gagcttgcccagaagggaaggaggagaagcccaggagagaggctcagggtgccttctccccacaggcattcacagccctggatgccctggctgatgggggygtgaagatgggacttccaaggcgcctggcagtccgcctcggggcccaggccctcctggtcagtgtgtttcctgaccctctggtggggccactctttgcgg

SEQ ID NO: 379676 - DNA, 201 bp, Homo sapiens
ggcacagcccgcgtgctgcagctggcctttggctgcactaccttcagcctggtggcccaccggggtggctttgcgggcgtccagggcaccttctgcatggmcgcctggggcttctgcttcgccgtctctgcgctggtggtggcctgtgagttcacacggctccacggctgcctgcggctctcctggggcaacttcaccgcc

SEQ ID NO: 379677 - DNA, 201 bp, Homo sapiens
ctgggggtgcgtacctgcacctgggcgccgtgacatcccctgtgggcacagcccgcgtgctgcagctggcctttggctgcactaccttcagcctggtggcycaccggggtggctttgcgggcgtccagggcaccttctgcatggccgcctggggcttctgcttcgccgtctctgcgctggtggtggcctgtgagttcacac

SEQ ID NO: 379678 - DNA, 201 bp, Homo sapiens
ctcctggggcaacttcaccgccgccttcgccatgctggccaccctgctatgcgcgacggctgcggtcctgtatccgctgtactttgcccggcgggagtgtycccccgagcccgccggctgtgctgccagggacttccgcctggcagccagtgtcttcgccgggctcctcttcctggcctacgctgtggaggtggccctgac

SEQ ID NO: 379679 - DNA, 201 bp, Homo sapiens
tcctcaagatcgtccaggccttcgtggcctgcatcatcttcggggcgctggtccatgacagccgctacgggcgctacgtggccacccagtggtgcgtggcygtctacagcctgtgcttcctggccacagtggccgtggtggccctgagtgtgatgggccacacagggggcctgggctgcccctttgaccggctggtggtgg

SEQ ID NO: 379680 - DNA, 201 bp, Homo sapiens
gggctcagtggcagcggccccgcctacgtaaggactgcgggggaagctggcggcggcgggcacttcccgggaccaccgggcacatctgtccctgctccccytgggagggccagggtggagggctccaaggctgtgggaactggagcttgcccagaagggaaggaggagaagcccaggagagaggctcagggtgccttctcc

SEQ ID NO: 379681 - DNA, 201 bp, Homo sapiens
cctagcccgggaatgtgatcatcacagtcagttaagacctgcaggtttaccccactgaggcttacagggagagggcggatgtctgttaatgaggaagtatgggggggcgtggattttaggtaagcagtataaatgggtctgctaattctgctacctttattttctatacccaggctctgtctctgtgatgctaaaacaatg

SEQ ID NO: 379682 - DNA, 201 bp, Homo sapiens
agtgaaatagtaaatgatttagtgtgtccacagatgagtaaattaaggtcaaagaggtttaataaaaattttcggccgggcacggtggctcatgcctgtawtcccggcactttaggaggccgaggtggatggattactcaagctcaggagttccagaccagcctgggaaacaaggcaagactctgcctctactaaaaatac

SEQ ID NO: 379683 - DNA, 201 bp, Homo sapiens
attatctgtaaaaattgttataattagagttgtgatacagagtatatttccattcagacaatatatcataacttaataaatattgtattttagatatattmtctaataaaattcagaattctattctgggttatttatttatttatttttattatactttaagttttagggtacatgtgcacaacgtgcagatttgttaca

SEQ ID NO: 379684 - DNA, 201 bp, Homo sapiens
gattctggaagacaatttgatgggggataatgtggagatcatctgagaaatgttttcaacctacctgtgcctgtctgtgtgcacccctccccagtacacayatacatacatacatacacacacacacacacacacacacttacaatcatactcacactttctggcatagtatgatgatttattagaatcaagtaaaggttg

SEQ ID NO: 379685 - DNA, 201 bp, Homo sapiens
agagaaaaaataggcagttagcaatttctgctattttttaaaattatttttacattagaaaatagatttcattttaaactgcaacagtttagaaaatggcrtgtagtcatttaaataaataagtagatccagaatatagcataaagtccctaacttaaaccaagatattatgttttatgtttctcaaataaaaagtttgag

SEQ ID NO: 379686 - DNA, 201 bp, Homo sapiens
cgggaggcggaggtcgcagtgagccgagaccgcaccactgcactccagcctggtgacagaacgagactccatctcaaaacaaacaaacaaacaaaaaaccmcacacacacacacacaaaaccatgtggaaaaactccctttagactttctttcttttttttttttttaaataaaacaatcctaggctctcaaagccaaaac

SEQ ID NO: 379687 - DNA, 201 bp, Homo sapiens
gggaagccagggcaggaaaatcactgcagcctaggggtttgaggttgcagtgagctatgatcatgccactgcactacaagctggatgacagagcaagactytgactctaaaaaaaaaaaaaaaaaaaaaaaaaaagcgagagtcaagagagatttgggttgctggaaggcgtagggaaagccaaagaagaaaataattttt

SEQ ID NO: 379688 - DNA, 201 bp, Homo sapiens
tgacagaacgagactccatctcaaaacaaacaaacaaacaaaaaaccacacacacacacacacaaaaccatgtggaaaaactccctttagactttctttcttttttttttttttaaataaaacaatcctaggctctcaaagccaaaacaaagaatagagatactctagttaaactcaccttaataaacatgaagaaacaga

SEQ ID NO: 379689 - DNA, 201 bp, Homo sapiens
cattgcactttatttgctacagcttatctcatcttccttgggaccaccctcgtctccagtccccactcagtggtggcagggtggctggcaattaaaacctrtcagtaaagggcatttcagtctgttcaggtttcagcagttttttttttaggttttcattccccactcataccagcccacacagatggtgtctgggtgaca

SEQ ID NO: 379690 - DNA, 201 bp, Homo sapiens
accgccagcgcgaccatgtcccatcactgggggtacggcaaacacaacggtgagtgccggcgacggccagcgcgggggcgccccgatccccgatccccgakccccgatccccgagcccggatgccggcccggggcccgcagcgcccgcacatgctgtttaccgcggccgcggggagtgctggaggctcaggtgcgccccgg

SEQ ID NO: 379691 - DNA, 201 bp, Homo sapiens
atatgtgtatgcagatacatacatatatgttacatatatatatatgttttaattttagtgctcaagggaggacccctggatggcacttacagattgattcmgtttcactttcactggggttcacttgatggacaaggttcagagcatactgtggataaaaagaaatatgctgcagaagtaagatatacttttttttttctt

SEQ ID NO: 379692 - DNA, 201 bp, Homo sapiens
aaggcaaacatttagtactgtaaaacagaattaagattgtaatatttaggcatgtgtttcatgtgtgtgtatgtatgtgtgtatacctatgtatatatgtrtatgcagatacatacatatatgttacatatatatatatgttttaattttagtgctcaagggaggacccctggatggcacttacagattgattcagtttca

SEQ ID NO: 379693 - DNA, 201 bp, Homo sapiens
ggaaagctgtgcagcaacctgatggactggccgttctaggtatttttttgaaggttagttgatgacccaattcttttttttccctatttttaataaagaaygaccagacagagtatttgtaacatacaggacattctacaaaagagcttaggaaatgcctttgtccctgaaatgttttcaagtttatctcctcctttcata

SEQ ID NO: 379694 - DNA, 201 bp, Homo sapiens
ttttcaatactccattggttttagaaatttcttttgatcaaattgcacagtctcaatgacatgtggtgtttggatgagcagttagtaaaggtagaatattmcttaaatatttaattaacgtttctttcaacaaagttgatcctaatgctagcataattctaagacttgtatttatttaatcttgctcccccatcatttgga

SEQ ID NO: 379695 - DNA, 201 bp, Homo sapiens
ctccatctcaaaacaaacaaacaaacaaaaaaccacacacacacacacacaaaaccatgtggaaaaactccctttagactttctttctttttttttttttwaaataaaacaatcctaggctctcaaagccaaaacaaagaatagagatactctagttaaactcaccttaataaacatgaagaaacagaagctgaagagttt

SEQ ID NO: 379696 - DNA, 201 bp, Homo sapiens
ttagggacaaatattgaaagtcaatgccagaattattgggccaactcttatccaagtcttacatcatttctgtttttcagaaattggaattttttaaatctgtttgttatttcaagaaaagagtaaaggaagctggatgagtttacctgtgctctttttaagtgacccattgtctgtatgacgtaatggatcttcatacat

SEQ ID NO: 379697 - DNA, 201 bp, Homo sapiens
tagggacaaatattgaaagtcaatgccagaattattgggccaactcttatccaagtcttacatcatttctgtttttcagaaattggaattttttaaatctgtttgttatttcaagaaaagagtaaaggaagctggatgagtttacctgtgctctttttaagtgacccattgtctgtatgacgtaatggatcttcatacatg

SEQ ID NO: 379698 - DNA, 201 bp, Homo sapiens
agggacaaatattgaaagtcaatgccagaattattgggccaactcttatccaagtcttacatcatttctgtttttcagaaattggaattttttaaatctgtttgttatttcaagaaaagagtaaaggaagctggatgagtttacctgtgctctttttaagtgacccattgtctgtatgacgtaatggatcttcatacatgg

SEQ ID NO: 379699 - DNA, 201 bp, Homo sapiens
gggacaaatattgaaagtcaatgccagaattattgggccaactcttatccaagtcttacatcatttctgtttttcagaaattggaattttttaaatctgtttgttatttcaagaaaagagtaaaggaagctggatgagtttacctgtgctctttttaagtgacccattgtctgtatgacgtaatggatcttcatacatgga

SEQ ID NO: 379700 - DNA, 201 bp, Homo sapiens
ataggaacaagttttattttaacaggggctaaaacaggtatctggtgataacagattagcactgaatgtgtttaatcattgagcccagagcactttatctttttttttttttagtgttagctgttagcaagtattgtttactaaaggtttgcacacactcttgcctaattctaaatgtttttagaaacaaattaagatgaa

SEQ ID NO: 379701 - DNA, 201 bp, Homo sapiens
ggccgaggtggatggattactcaagctcaggagttccagaccagcctgggaaacaaggcaagactctgcctctactaaaaatacaaaaattaactggacayggtggtgcacacctgtaatcccagctactcgggaggctgaggcacgagaatcgcttgaactctgcttgaggcggaagttgcagtgagccgagatcgcacc

SEQ ID NO: 379702 - DNA, 201 bp, Homo sapiens
ggcacgagaatcgcttgaactctgcttgaggcggaagttgcagtgagccgagatcgcaccaccgcactccagcctgggcaacagagcaaagctctgtttcaaaataataataataataataaataaataaataaataaataataaaaaaaattaagggaacaaagctagccagcagcagtgagagtctaaattctaaagaa

SEQ ID NO: 379703 - DNA, 201 bp, Homo sapiens
gtaggagaagatgagcgcttcatgtaaggctctgccagcctacgaggaaatgcaatcctccaggctcgaccgagcgtgggctgcgggcaggggactgtggsgccgttgtctcgttttattccacggccgtgcagcagagggcgcgtgcctctcagcactcatgctgcgcgctcccctgcgcctctaggatcgtatccctat

SEQ ID NO: 379704 - DNA, 201 bp, Homo sapiens
aactctgcttgaggcggaagttgcagtgagccgagatcgcaccaccgcactccagcctgggcaacagagcaaagctctgtttcaaaataataataataataataaataaataaataaataaataataaaaaaaattaagggaacaaagctagccagcagcagtgagagtctaaattctaaagaatttgggaagcctatata

SEQ ID NO: 379705 - DNA, 201 bp, Homo sapiens; identical to SEQ ID NO: 82360

SEQ ID NO: 379706 - DNA, 201 bp, Homo sapiens
agagatataaatgaagtattatctgtaaaaattgttataattagagttgtgatacagagtatatttccattcagacaatatatcataacttaataaatatwgtattttagatatattctctaataaaattcagaattctattctgggttatttatttatttatttttattatactttaagttttagggtacatgtgcacaa

SEQ ID NO: 379707 - DNA, 201 bp, Homo sapiens
ccagggcaggaaaatcactgcagcctaggggtttgaggttgcagtgagctatgatcatgccactgcactacaagctggatgacagagcaagactctgactytaaaaaaaaaaaaaaaaaaaaaaaaaaagcgagagtcaagagagatttgggttgctggaaggcgtagggaaagccaaagaagaaaataatttttaaaaag

SEQ ID NO: 379708 - DNA, 201 bp, Homo sapiens
tcttctttcccccaggacctgagcactggcataaggacttccccattgccaagggagagcgccagtcccctgttgacatcgacactcatacagccaagtakgacccttccctgaagcccctgtctgtttcctatgatcaagcaacttccctgaggatcctcaacaatggtcatgctttcaacgtggagtttgatgactctc

SEQ ID NO: 379709 - DNA, 201 bp, Homo sapiens
ctctgtcaatgtgatagtttgaagctgcgtatttgccttgttctagggcaagagtgctgacttcactaacttcgatcctcgtggcctccttcctgaatccytggattactggacctacccaggctcactgaccacccctcctcttctggaatgtgtgacctggattgtgctcaaggaacccatcagcgtcagcagcgagca

SEQ ID NO: 379710 - DNA, 201 bp, Homo sapiens
catttccgtgtttttgtgtatttggagatgccagctcgtcactcagcccatggagcttacaggtcctgatcacttgatctaattgtatggatgtggtagtwtgtcttccctggggcagaaaacaaagctttaatttggaactaaaattgttattattttgcatctaaaggtatgagtttatagacttttgatgttagattt

SEQ ID NO: 379711 - DNA, 201 bp, Homo sapiens
agtgagtagcagaaatcggttatactggtttgatcaaaagtttgacctgtttacactttatgaacagactctctttcagattgctggaattctgttgtaaygaatcaaccctatatatccttagaatgctcccttgcattcagtaaccatagctgtgcatgttataatgtatgtgcatggaaggtggctctacgggggtga

SEQ ID NO: 379712 - DNA, 201 bp, Homo sapiens
gttgactaatgtgacagtgtagtttaattggtgcagtgagtagcagaaatcggttatactggtttgatcaaaagtttgacctgtttacactttatgaacasactctctttcagattgctggaattctgttgtaacgaatcaaccctatatatccttagaatgctcccttgcattcagtaaccatagctgtgcatgttataa

SEQ ID NO: 379713 - DNA, 201 bp, Homo sapiens
atgaggaagtatgggggggcgtggattttaggtaagcagtataaatgggtctgctaattctgctacctttattttctatacccaggctctgtctctgtgaygctaaaacaatgagtcaagttgactaatgtgacagtgtagtttaattggtgcagtgagtagcagaaatcggttatactggtttgatcaaaagtttgacct

SEQ ID NO: 379714 - DNA, 201 bp, Homo sapiens
tactataattatacacagttgtgtgaaacaaaggaatgaatgcaataacattttaacgaagagatcatttaatataagccttggttgttttatttttcctycttcctattgaacattttccatcagcatttcaacttctcatctcttttgaaaccaggcatctttttaaaaataatctctcaagcattcaaagtatcccac

SEQ ID NO: 379715 - DNA, 201 bp, Homo sapiens
ctgagtagaggatgaccaaggaaatgtcatcttcggtacttaaacagtaatgagtaatcctaggttaaagtcctaattctcagtttactaagaatctgackttaaggaccacacactgaagaaatctttaaagattcattcctaaaggctaattaaagttttaaaatatcccaatgacacataataaaccatttacagcct

SEQ ID NO: 379716 - DNA, 201 bp, Homo sapiens
tggcagtgggggaaagacattggaggacgtgttttacgagcgtgaggtatgatataagtggaaatactattagcttatttttctcttactgtggattttayatattttcttactttgggttttctttttacagctgatcatgccaattgattaggcacattcatagcttgatagtcagtgatgtattattgctacaaagtt

SEQ ID NO: 379717 - DNA, 201 bp, Homo sapiens
ccaccccctccacagcatggtaacagtgtaataggtcattgggaggctaaaagaaatatttgtaggcctggctcacgcctgtactaccagcactttgggasgctgaggcgggaagatcacttgaggtcaggaatttgagaccagcctggccaacatggcaaaaccccgtttctactaaaaatacaaaaattagccaggcct

SEQ ID NO: 379718 - DNA, 201 bp, Homo sapiens
catggcaaaaccccgtttctactaaaaatacaaaaattagccaggcctggtggcacatgcctgtagtccaagctactcaggaggttaagtcaggagaaccrcttgaacccggggagggtggaggttgcagtgagccgagatcacagcattgcactccagcctgggcgacagagcaagactccaactcaaaaacaacaacaa

SEQ ID NO: 379719 - DNA, 201 bp, Homo sapiens
atcacatgtgaaccatttgtagtagagaaggaactggagctcatctctcaaccttcaaacttttcactttataccaggtcatagcaaataaataatagcayttgtcattcttcaaaaaaaatgtaattttctagcttggttttacagaattagtttcttgtccttccatttaaatttttgtctagataaggctgcatatag

SEQ ID NO: 379720 - DNA, 201 bp, Homo sapiens
agctaggagattttgtcaccagcagacctactctaaaagaatggctaaacgaagcttttgaaacacaaaggaaatgataaaaagagtaatcttgaaacaawgggaaaaaagaaaggacaacagaaaggagaaaaatatgggtaaatacaatataccctttctcctcttgagttttcttaattgtatttcacagttgaagca

SEQ ID NO: 379721 - DNA, 201 bp, Homo sapiens
gactagatagcaccaaagcctaggtcttctgaatctccatccatgatctgtcccatcatgtcatgtgatgtcttgtgactagcaaccctggcagcattcarttgctgtctgtagaccttagaggtttattacaataagaaatgatatatggccagacacagtggctcatgcctgtaatcccagtactttgggaggccgagg

SEQ ID NO: 379722 - DNA, 201 bp, Homo sapiens
gtcttctgaatctccatccatgatctgtcccatcatgtcatgtgatgtcttgtgactagcaaccctggcagcattcagttgctgtctgtagaccttagagrtttattacaataagaaatgatatatggccagacacagtggctcatgcctgtaatcccagtactttgggaggccgaggtgggcagatcacttgaggtcagg

SEQ ID NO: 379723 - DNA, 201 bp, Homo sapiens
gttatcaatcaagtgaattaacaagtatgtgaattcacatacttattttttgtggggagaacacaaaatctactctttacatgattttaaaaatacaatamattgttatttactatagtcaccattttgtaccataggtctcttgaagttattcctcctaactgaatctaactgagttttgtatcctttgacatctttcca

SEQ ID NO: 379724 - DNA, 201 bp, Homo sapiens
ttcagttttgtttatgatatttttaaacatatatatttttaaaatatttatgcagaaatttttccatttttttcctttgttgttttgccttttgcatatayccagaaaagccttctatattggatacattatgacattgaaatgcactgtatgatcaatctcagtgcttttgattaaattttctcattttctactcaccac

SEQ ID NO: 379725 - DNA, 201 bp, Homo sapiens
gtcctattagaaaatgcccgagacaacgttatacaaatgattaaatctgttttattagagacagtctaaatttaagttggtataataaatacaatcttaarcattgcacattttatgagatataattactgtacatgtgaaacttattttgaaaatctggaatggatatttttaaatacttaatagcaggaagatctgctg

SEQ ID NO: 379726 - DNA, 201 bp, Homo sapiens
gaactcccacataatagtgaactgcacttttatgacaccaattaataaattttacttagtgctcaaatggaccatttgaaataagcttatgccctttcagytctcctagctgaaaaactgggaacaaagacacacaaataaatgagctgtgtgttatgtagataaaatgtagatgtaaagcacaaagttctgaagactagg

SEQ ID NO: 379727 - DNA, 201 bp, Homo sapiens
ggaagatctgctggagggtttgtatactataattatacacagttgtgtgaaacaaaggaatgaatgcaataacattttaacgaagagatcatttaatatargccttggttgttttatttttcctccttcctattgaacattttccatcagcatttcaacttctcatctcttttgaaaccaggcatctttttaaaaataatc

SEQ ID NO: 379728 - DNA, 201 bp, Homo sapiens
gaaacgaattgaatatagactttgttcattaaccaatggaagagttacttaagatgcagattctaagatcatgcttttaaaaatcatgatttactaggttytggaatgcagtcaatgaatttgctcttctaaaagccctccaggcgaccctgatacaggtgagaaattcttataaccagtaggtagactctaaactgggtc

SEQ ID NO: 379729 - DNA, 201 bp, Homo sapiens
tgtgatcatggctcactgcaacctcagcctcctgagtagctggaactacaagcagtcaccaccacacccagctaatttctgtcttttttgtagagaggcasctttgccatgttgcccaggctggtctcaaactcctgagctcaagcgatccgcctgccttggcttcccaaagtgctaagattacaggaatgagccacagct

SEQ ID NO: 379730 - DNA, 201 bp, Homo sapiens
cgtgtgtttaaaaaatgaaagaggttttttactaaaatgtattttgtgctcactacacaagttagtacctttataatcactttcctgtattaaatttaatmaattttcacagcaaccctatggagtggtactagtattgttggctttttagaaataagacgatggattgagtaaagactatacttcagaattcatgtcaca

SEQ ID NO: 379731 - DNA, 201 bp, Homo sapiens
gcctttcacacacacacaccgatcctttccatgaacaatgacccctgaaatgcttttttttttttaattgagacagggtcttattctgtcacccaggctgyagtgcagtggtgtgatcatggctcactgcaacctcagcctcctgagtagctggaactacaagcagtcaccaccacacccagctaatttctgtcttttttg

SEQ ID NO: 379732 - DNA, 201 bp, Homo sapiens
tctgtgtttttcaacttttcaagccctttgtccattctgataaaccaaacaagttcacaccctcaccccccaccatcacatttgagaatgactgtggaggrgcttcttccgcatattcccaccagccaaggttttatttagttagttgttagaatattgaatatgctttttcatggccaggtgcaggcaccatggctcatg

SEQ ID NO: 379733 - DNA, 201 bp, Homo sapiens
gtttcttgtccttccatttaaatttttgtctagataaggctgcatataggaagcattttctttcaggaagtttaaaaatgtcatttttctgagatgctcamgagtatctgtcaagtcatcagaagcaatgatgaaatgattgttaatttcattataatttggcactaacaagagttgtgttcaaaatgctaaagagataat

SEQ ID NO: 379734 - DNA, 201 bp, Homo sapiens
gtggaaacgatgctgggttataagaataaggggactaatctcctacttcagtctcattagataactccaccatttagtcccactgaacttcaatttcttcrtctgtaataaaaggatactgaaacagagcaccgatggctgcccgtgccacctgcccccacacccatggtagctactactaatacatttatcttttccatc

SEQ ID NO: 379735 - DNA, 201 bp, Homo sapiens
gcctttggcaattttagggcatttctgaccatttgtcttacaaatgaactgtgtggtagaattaggttctcatgactcttcaaattgcctagtcacatttratttacttatattataataataatgataataataattatcattattattttgagacagagtctcactctgtcctccaggctggagtgcagtggcacaatc

SEQ ID NO: 379736 - DNA, 201 bp, Homo sapiens
gttgcttcattttttacatttaaaactttggtccattttagaatttattttcgtgtaaagaattagactacagatctagctcaaattgttttcccaaatarctctccctttctactccatttctgtaagtaagcaagtagaagaaaagaccataggtcaaggaaggaaggaattgtggatatacctgaggcatgactttag

SEQ ID NO: 379737 - DNA, 201 bp, Homo sapiens
gtgtgtttaaaaaatgaaagaggttttttactaaaatgtattttgtgctcactacacaagttagtacctttataatcactttcctgtattaaatttaatcrattttcacagcaaccctatggagtggtactagtattgttggctttttagaaataagacgatggattgagtaaagactatacttcagaattcatgtcacag

SEQ ID NO: 379738 - DNA, 201 bp, Homo sapiens
tggttgggaggaagtagaaagtgcttaggctttgggctgagtcagatccaaattcatacctaatcttcaatagctggcatgagagaggctctgcaagcagyggtgcctcctgcaaaaatacctggcatggataattatggaaacagtaaagattcctgagctgaaggacaaaatggccctagttgtgtggaaggaaaaata

SEQ ID NO: 379739 - DNA, 201 bp, Homo sapiens
gttagtacctttataatcactttcctgtattaaatttaatcaattttcacagcaaccctatggagtggtactagtattgttggctttttagaaataagacratggattgagtaaagactatacttcagaattcatgtcacagagcccagaggtaaccactcaaaactttcatgcatatctttctaaactttttccttgtga

SEQ ID NO: 379740 - DNA, 201 bp, Homo sapiens
gctcactgcaacctccacctcctgagttttagtgattctcctgcctcagcctcctgagtagctgggattacaggcatgcaccatcatgaccagctaatttytgtatttttatagagactgggttttgccatgttggcaaggctggtctcgaactcctgacctcaagtgagccacctgcctcagcctcccaaagtgctggga

SEQ ID NO: 379741 - DNA, 201 bp, Homo sapiens
ggtgactattattttaaagatgcattgaaattgtcactacatataaatgtaaaatatggcaaattggaaagttgttttgcacacacaacagcaaaattcctttttttttttttttttgagcatgttgacgtccaggactggctctaggcaagactgtgaagaagctatggtgtgcacatttaacaactggctgtccataaa

SEQ ID NO: 379742 - DNA, 201 bp, Homo sapiens
acaggcatgcaccatcatgaccagctaatttctgtatttttatagagactgggttttgccatgttggcaaggctggtctcgaactcctgacctcaagtgakccacctgcctcagcctcccaaagtgctgggattataggcgtgaactaccgtgctcagcctatatatatatatatatatatatatatctttttgtatatag

SEQ ID NO: 379743 - DNA, 201 bp, Homo sapiens
cctttgtccattcatccatcaatgggcacttagcttgattctatgtcttagctattgtgagcaatgttataatgaatgtaggagtacagatatctcttcamcatactgatttcatttcctttggatatatacccagtagtgagattgctagatcatagggggttctatttttaatttatttctctcccacttaatacttca

SEQ ID NO: 379744 - DNA, 201 bp, Homo sapiens
actgggaggatccaaaatatctgaagatgttttgtaaattgtaaatcttaacaatacacccctgcactgtagtttacatacaacaagaatttgttttcccycttctgctagactttggaattcctgaaatagttctttccattttatggttttggatagtggcatttggatatgaatccatttagtttattctgttcttca

SEQ ID NO: 379745 - DNA, 201 bp, Homo sapiens
ggcctcaaacaatcctcctgcttcagcctcccaaaatgctgggattacaagcgtgagcactgataagtgctttcttatctcatctttagatggtatctccktggcctaactcccagttcactgggaggatccaaaatatctgaagatgttttgtaaattgtaaatcttaacaatacacccctgcactgtagtttacataca

SEQ ID NO: 379746 - DNA, 201 bp, Homo sapiens
accacacagaataggtagtctagtatctatttttcaggaggagcaactgaggcacagagaaggctaataacttacccgacgtctcacagctagtaagtcasgattggaatgcaagcagttggctcacgtacttatgtgcttatccactctgccatagtgcctctgcattaaattcaccattcacaattcttttatataaac

SEQ ID NO: 379747 - DNA, 201 bp, Homo sapiens
attttagagtgtagtggggagaaatgcaggcacagatttcaaaatgaagtggtaattactgggcatttggagtacctagagaagagctgcgtagcccaagraaaccatggcaagcccccacaataggcagaggagcccctaaaggagagactgagatggaatggccagaggaggagaaccaagagactgtagaaacatgga

SEQ ID NO: 379748 - DNA, 201 bp, Homo sapiens
gaccctctatccaaccttcggcaaactctatcctgaggggttgcggctgttggctcaagcagaagactttgaccagatgaagaacgtagcggatcattacrgagtatgtgatgacactggcttccctaagtcctttgtgttcattcatttccatgtgctttagaagctcacacatcaaatttccgcttatactcaaaagaa

SEQ ID NO: 379749 - DNA, 201 bp, Homo sapiens
gtaataccctggagagcttcttcactgaactgtgtttttcttagaaggtgtttctctttttctatctcatgccagagtgcttagtgaatgacagtcatttytcagctattgctaatgacactgaagtactaaaatttttattcagagaagagcaattcctctaacttaccaaattatggctctataatatttgacctctta

SEQ ID NO: 379750 - DNA, 201 bp, Homo sapiens
ggaatattctgcatttaaaaggaaaaacgcatgaggaagcactctaaaaggagaaatatggaaagattaccaagatacattaagtcagaaaagcaaggggaagaaccaggtgtggcatggcactctttagtaaaaagtgggataaattttaaaaatatacttcctatatgattacctagctacaaagaaactgtgaaagga

SEQ ID NO: 379751 - DNA, 201 bp, Homo sapiens
gctccctgcagggtggactgaggacttctttgagtctgcatcagagctcaagttctccctctgcccaatcttacttccactcctttccacaggtgttgatkccaggacccctccctaataaaagtcctacacactaaaattaaagttaaaaattaactagaaatcctgcttcctgaggaactcaacgggtaatacgaattt

SEQ ID NO: 379752 - DNA, 201 bp, Homo sapiens
cttgtgtgctgcagacgataccccctcacttaatggtcaccacgctgtaaggggagaagtattttccccctgggtggccatgtgatagagtggttgaacayttccgctacctctgactgtgtggccaaaggcagtttgacatctaagcattagtttctcatctagccaatgggagagtacctgttcttaggattattgtgc

SEQ ID NO: 379753 - DNA, 201 bp, Homo sapiens
ctcacaatagctgagcccaagagttttgatgtcatcttggatgactgcataatcataagatgtgtaagttttatatatacacaaacataggatatggaaaytataataatgcccaaactactttccctaagtaatccctctctctggcatcttcattattccatctggccttccatagtggcttttccactgactccccct

SEQ ID NO: 379754 - DNA, 201 bp, Homo sapiens
ccccagttcttcccctttcaattctgttctcaaggtctgggtttatctccgtctctgctcactctgactcagtacttgtaagcacatcagaaatcttaacyctccccttctctacctcagagacccttttggattttatcttagagataaataacagtgtggccagcggttctttgtcatatagtgtccaatgtcccttct

SEQ ID NO: 379755 - DNA, 201 bp, Homo sapiens
ataggtattctcctttttatagaagagacacttgtgacactagcggcctaatgtgacagagacacatgaggaattcattgcagggtgcccgggaaataaawcttactggggtttcaggagtcataggttatcattgctgctgtgtgatccttctctggcaagcagagttactccattacaagaaaagactaagggaacact

SEQ ID NO: 379756 - DNA, 201 bp, Homo sapiens
atgccactcagcaactgcacttcagggcatttatccaagaataataaaacttattttaatataaaaatcagcacacagatgttcttagcagttgttattcrtaatagccaaaaactagaaaaaaaacacaaatgtccatcaataggtgaatggttaaatacactgtggtatatcaataccatggaatactactcaccaata

SEQ ID NO: 379757 - DNA, 201 bp, Homo sapiens
aatcctgttagtatccctgaatctcacagctaatctgcccacacaattttaatctacagtgtgcagcataccagaatgaacaatttgtgtacactgcatcmtaggtaccactttgcataatgtgactgtctggactgtgctgccaccatttgagtagctgtatatactttaggctgagcaaaatctgtccatttttagtca

SEQ ID NO: 379758 - DNA, 201 bp, Homo sapiens
ttactggaacacagtcacattcgttcatttatgtgtgatatgcggctgcttctccactacgatagcaaagttgagtcatttcaatagagttgaaatggccsacaattcctaaaatatttactatttgacctatataaaaaatactttactgatcctttgtataactgacacaaggttggccatgagtccataattattgaa

SEQ ID NO: 379759 - DNA, 201 bp, Homo sapiens
atacaaaaaaaaaaaaaaattaaaaataggaaatatttggaagacagaagaaaatactgtcatgctttaaaaatacatattttaaaatacaaatttttaamttcatgtgaattcaaaagatataatttattcaagttaaaaatgaagtggatatgtatagaatagtgatatatgagttttgtaacacttttaaaataatta

SEQ ID NO: 379760 - DNA, 201 bp, Homo sapiens
attaagaagacaaaaactgtatgatctcacttagatgaggcatctgaaaaagctgaactcatagaaaaaaagagcagaagtagaatgctgattgccagggrctggaggacgggggaaatggggagatgtttgtccaggagtactaatgttcagttacaaggtgagtaaatctggggacctaatgtgcagcatggtgagtat

SEQ ID NO: 379761 - DNA, 201 bp, Homo sapiens
tttgagtatttccggaatcattccctggagcccctcagcacatttctcacctatatgacgtaagtgatgacagaaagccctaataagccccaatgtactcrtgcggatgacccctaacaattacagggtgggtatcaagccagagtgagacttaagaccttttccattgtttgtaagtttaaattcattcacattttagca

SEQ ID NO: 379762 - DNA, 201 bp, Homo sapiens
cttctctagttagaatttttggggttaagctctagaagttccacaatgaaggagacccccttttccaaccagaaacgaattccctgcccaggaagtctgtmccccatgcagccagactctggtgacaatgtttctacgtgttcaagtaaattttcatccagtaaaaaggtatcatttttcaagtgtatctcacaaaggtgg

SEQ ID NO: 379763 - DNA, 201 bp, Homo sapiens
agctgtattctttgtaaaggaaggccctaggtctcatttacttctcaacctcattgcttgtaatatcttaggtgctgactacatgagtgaaccaggacatkcacccagggtatcccgagcagagcttataccaaataaagaaatcacataaaaatgattaaaatatgaattaatatgaattaataaactcggggatgtgag

SEQ ID NO: 379764 - DNA, 201 bp, Homo sapiens
atctgcacccattgcaacctcctcttcccctaatgctctcatctcaataaatggctctataacctaactgtcaagcccagaaacctacacatcaccccaamaactaaaagcacataatgtgagggttcagaggaagatttcagaagcagactgcctgagtctgagtctcagctctcctacttgtcagctttgtgtgtcatc

SEQ ID NO: 379765 - DNA, 201 bp, Homo sapiens
tgaggccagcctgggcaacatggcgaaacctcatctctataaaaaatacaaaataaaattagccgggcgtggtggcatgagcctggagtccgagctactcrggaggctgcagtgggaggatcacttgagcccaggatgaggaggacacagtgagccaagattgcaccactgcactccagcctgggtgacagcgccaaatgc

SEQ ID NO: 379766 - DNA, 201 bp, Homo sapiens
gttacctcctggttaccttgaactcattccatctaaaacatctgcacccattgcaacctcctcttcccctaatgctctcatctcaataaatggctctatarcctaactgtcaagcccagaaacctacacatcaccccaaaaactaaaagcacataatgtgagggttcagaggaagatttcagaagcagactgcctgagtct

SEQ ID NO: 379767 - DNA, 201 bp, Homo sapiens
gtttcactcttgttgcataggctgaagtatagtggcgtgatcttggctcaccacaacctccgcctcccgggttcaagcaattctcctgcctcagcctcccragtaactgagattacaggtgcccaccacctggcccgactaatttttgtactttttggagagacgggttttcaccatgttggccaggctggtcttgaactc

SEQ ID NO: 379768 - DNA, 201 bp, Homo sapiens
agctgtcttcagggcacacacttcttaggcttacttgacatctcctcttggttacctcctggttaccttgaactcattccatctaaaacatctgcacccaytgcaacctcctcttcccctaatgctctcatctcaataaatggctctataacctaactgtcaagcccagaaacctacacatcaccccaaaaactaaaagca

SEQ ID NO: 379769 - DNA, 201 bp, Homo sapiens
tcaggttattaaaattgcatcattgattgtctctatctgtttgggccttttaaaatgttgattatataatcacgtgctaggaaaatagctcagataaggastcaaataaaattcagaatttaaaagcattcacaggttgggtgccatggctcacgcctataattccaacatgttcggaggccaaagcaggaggattacttg

SEQ ID NO: 379770 - DNA, 201 bp, Homo sapiens
acagctcaccacagcctgatcacagctcaccacagccttgacctctgggttcagggctcaagcaattcgcccacctcagcctcctgagtacctgggactayaagtgcacacctctacacctagctaatttttttttttttttgtacagacaatgtcttgctatgttgcccaggctggaaataatttaattcatgtgaagca

SEQ ID NO: 379771 - DNA, 201 bp, Homo sapiens
caccacagccttgacctctgggttcagggctcaagcaattcgcccacctcagcctcctgagtacctgggactacaagtgcacacctctacacctagctaatttttttttttttttgtacagacaatgtcttgctatgttgcccaggctggaaataatttaattcatgtgaagcacttacatcagcacctggaatattataa

SEQ ID NO: 379772 - DNA, 201 bp, Homo sapiens
accacagccttgacctctgggttcagggctcaagcaattcgcccacctcagcctcctgagtacctgggactacaagtgcacacctctacacctagctaatttttttttttttttgtacagacaatgtcttgctatgttgcccaggctggaaataatttaattcatgtgaagcacttacatcagcacctggaatattataaa

SEQ ID NO: 379773 - DNA, 201 bp, Homo sapiens
tttggcccaatttagagattgcctgtttaaacacaaataagcactgcacaagttcaagccagtcagtagcttaatattattccataatgttccaaataagytgatgatctgtgttactttttttctttcctcaggtacaaatgaatgtgctggcattcaacagacagttccactacggtgtgttttatgcatatgtaaagc

SEQ ID NO: 379774 - DNA, 201 bp, Homo sapiens
tacaggtgcatgccaccacacccagctaatttttgtatttttggtagagtcagggtttcaccatgttggacaggctggtcttgaactcctgacctcaagtkactgcccacctcagcttcccaaagtgctggaattacaggagctagccaccacacccagccctcatatgacattaaaactattatcagacttgctgggcat

SEQ ID NO: 379775 - DNA, 201 bp, Homo sapiens
tattatgagactgtatctgtatgctcatttatttttaaatatatttatatctatgctttttaaatcaagttctttgactttgccataataagttatttatrtttatttgtttcatttcttcagggatgttccctccatttcataaactttttaaacgtctaagataactattaattcatgcaatttcaagtaaaacatcat

SEQ ID NO: 379776 - DNA, 201 bp, Homo sapiens
atagttgagaagcatatctacatatctgcccccagttcctggcaataaatatatagatatagttattcatatcaatagatatagatacatagcagatatasacatagattgatatagatagatatagatataaatatagatagatatagctagataaaatctgtatctattgatacagatatagatagcaaaatagatata

SEQ ID NO: 379777 - DNA, 201 bp, Homo sapiens
acaagtccagctggtaaattttccatcattagtttatgtaattactatacaagttactgctgtagcaagacagctcctgggatcattgccatcaaaatacaaaaaaaaaaaaaaattaaaaataggaaatatttggaagacagaagaaaatactgtcatgctttaaaaatacatattttaaaatacaaatttttaaattca

SEQ ID NO: 379778 - DNA, 201 bp, Homo sapiens
agtgccagtaggttatgtattaatcagtacattaaaaatttgagggactcacggtaagattctttactctgggataggacaggacaggacaggacaggacyggcatcataagacctccgccaggcaggtaaatttggaagcctgcccaatgtgacctacatgttatcaatcaagtgaattaacaagtatgtgaattcacat

SEQ ID NO: 379779 - DNA, 201 bp, Homo sapiens
ggcatttatccaagaataataaaacttattttaatataaaaatcagcacacagatgttcttagcagttgttattcgtaatagccaaaaactagaaaaaaamcacaaatgtccatcaataggtgaatggttaaatacactgtggtatatcaataccatggaatactactcaccaataaaaaggaacaaactgtttacatgca

SEQ ID NO: 379780 - DNA, 201 bp, Homo sapiens
gccagtctcaaaatgtcacatattatctgctgccagttatatattattcagaaaatggcaaaattatagagtgggagaactgattcgcattttctagacaytgggggtggtgggtgggaaagggtgggtgtgacaatgaagaggtaataccctggagagcttcttcactgaactgtgtttttcttagaaggtgtttctctt

SEQ ID NO: 379781 - DNA, 201 bp, Homo sapiens
acctttataatcactttcctgtattaaatttaatcaattttcacagcaaccctatggagtggtactagtattgttggctttttagaaataagacgatggaytgagtaaagactatacttcagaattcatgtcacagagcccagaggtaaccactcaaaactttcatgcatatctttctaaactttttccttgtgaaaaatg

SEQ ID NO: 379782 - DNA, 201 bp, Homo sapiens
tactaaaggatatattttaatttatctactcttcctattggctatacatgctttgaattagtgcttttagtatctctgtctggactccctattacctaatrggcattgaatatttgttgaatcaatatagaatcctgcattcagcagtactttacacggagctagaaaaatatatccagataactcagcagtttatatttt

SEQ ID NO: 379783 - DNA, 201 bp, Homo sapiens
ccactcctattcaagttagtattggaagttctggccagggcaatcaggcaagagaaagaaataaaggatattcaattaggaagagaagaagtcaaattgtmtctgtttgcagatgacatgattgtatatttagaaaaccccgtcatctcagcccaaaatctccttaagctgataagcaacttctcaggaagttgtagcaaa

SEQ ID NO: 379784 - DNA, 201 bp, Homo sapiens
gtggtgtggccgctgtgcaaactcaaagatggatttcaaagctgggaccctggggcccccgatcaactgtgttccccatagtaggaggtttgcaagacacmattctcatggatgccatagatacaaagcattcaatgcaactattattttaaaaagtaacactgaatatctagataaactattttcaaatgaacatttcaa

SEQ ID NO: 379785 - DNA, 201 bp, Homo sapiens
aaaaggttgaagctgcagtgagctgtaactgcaccactgtgctccagcctgggcgacagagtgagaccctgtctcaggaaaaaaaaaaaaaaaaaaaaaargaattctagaaagtaaaaagataaaaatcaggaatttaaaaattgtaccctatattttctgccaaggtcccttttaatcaaaagacttgtcgagggaagg

SEQ ID NO: 379786 - DNA, 201 bp, Homo sapiens
gcctaagctcatgtctaaggaccaatatacagaaggtataaaggcccagctctttgtttccaatcactctgaaggtcatcacaactccagagctccctgcrgggtggactgaggacttctttgagtctgcatcagagctcaagttctccctctgcccaatcttacttccactcctttccacaggtgttgattccaggaccc

SEQ ID NO: 379787 - DNA, 201 bp, Homo sapiens
gattttagtaataatactgtctgtgcagattcacattgcagaataaacaggagattcaagtaggaaaaagaaaatagagtgccttctaaacagtccaattwtgcagaggtagtggcttattattatagaatcatagccttctgtatctgtttccaggattgtttcctgggctatgcccttcgactggctgggaagcaacta

SEQ ID NO: 379788 - DNA, 201 bp, Homo sapiens
gagccagcactttgattttagggacccaactctgctgcttgccagcactgtgatcttgggtaaggtatttagtactgctaagcctcagttttccttaatartggttcttacagcattgagttgttgtgaagcttgagtgagagtgtgcatataattactgccacatagtaaaaacttcaaaaagaatcagcatttaaagat

SEQ ID NO: 379789 - DNA, 201 bp, Homo sapiens
ccttggtaatgtaaaaaaaggatagtatcataaaaatgcttatcactgggatgatgtgatcaaactacgatatgcccagtgttctcattgtacttttccartcttcatggtatcagatgagattagtgtttgtttgtttgtttcaaacagcattaaaaaaaaatccagctaggcatggtagtttatgcctgtaatcccagc

SEQ ID NO: 379790 - DNA, 201 bp, Homo sapiens
cctgctcacaccattgacgctggtcgcccgtcaacgttgctctaatagtcctctgctaattaggaatgttcgcagctcagatgcttttacattgcaggggrggttgtggggaacaattaaatgtctggagtctgctaagcattattaagtactagcaattgccctctgaggtaattgcttttgagccataaagggacagtt

SEQ ID NO: 379791 - DNA, 201 bp, Homo sapiens
tagaatttacatttctttgattattagaaagtttcagttttgctcctgacatctttcggccacttatacttctgtttgtgaattgtctcttttttgtcaakttttcttttgaattgctctcctctccaccctcacaataaaactatctgccctttgtcaatttttctttcctttattaatgggctctttataaattaaaga

SEQ ID NO: 379792 - DNA, 201 bp, Homo sapiens
aataaaattagccgggcgtggtggcatgagcctggagtccgagctactcaggaggctgcagtgggaggatcacttgagcccaggatgaggaggacacagtragccaagattgcaccactgcactccagcctgggtgacagcgccaaatgctgtttcaaaaaaaaaagtattcactagttcaatatgtatattgtcattttt

SEQ ID NO: 379793 - DNA, 201 bp, Homo sapiens
agaccctgtctcgaaaagaaaaaaaaaaaaaaaagaaaagaaaagaaaaaagaaaataataatctatacttctctattttctcacttatttcctcatcccmcttcggtcttatttccttccccatcaggtcaccaaaagctattctaatagctaagtccaatggatattttttcagctgtttcctaattcgccatggcatt

SEQ ID NO: 379794 - DNA, 201 bp, Homo sapiens
attgtgactagagttctctattaaaacttactttactcattaaccaacttctgcaattatgaaactgtgcatatttggaatatagcttttatagttctggyctgtcctctagttaaatgcatgcatgtcagcttcccctagccagcaagatatttgaaaggaaataacatgccctattcttccatattcctagctccttgc

SEQ ID NO: 379795 - DNA, 201 bp, Homo sapiens
caggcacagtagctcatgtctgtaatcccagcactttgggaggccaaggtggaaggatcacttgaggccaggagtttgaaaagcctggtgaacatagtgasaccctgtctctacaagagaaaaaatttaaaaattagcccagtgtggtggtacatacctgtagtcccagttactggggagtctgaggcaggaggattgctt

SEQ ID NO: 379796 - DNA, 201 bp, Homo sapiens
aggagccactgcccctggccctaatcatagaatcttagacatggaaggaaacttagcattcattaattaagcaagcatccttatttcacaacaaactactrtgttacaaatatactgtttctaaaacaaaaataattacttaaaattttaaatatttctagttataagcagtatttttaaaaattatgtacaaaaatacag

SEQ ID NO: 379797 - DNA, 201 bp, Homo sapiens
gaatcgcttaaagccgggaggcggaggttgcagtgaggtgagattgtgccactgcactccagcgagggcgacagaatgagactctatctcaaaaataaaawaaattaaaaaaattgaactcccacataatagtgaactgcacttttatgacaccaattaataaattttacttagtgctcaaatggaccatttgaaataagc

SEQ ID NO: 379798 - DNA, 201 bp, Homo sapiens
tcactctcacccaggctatagtgcagtggcgcaatctcggcttactgcaagctccaccccccaggttcaagtaattctcctgcttcagccttccaagtagytgggtctacaggtgcacaccaccgtacccagctaatttttgtgtttttagtagagatgaggtttcgccatgttagcctggctggtctcaaactcctgacc

SEQ ID NO: 379799 - DNA, 201 bp, Homo sapiens
tctgaccaggaagatgatactccctctatccttctattctttctttgtccttccgtatcatccatttttttttttttttttttttttgagactgagtctcrttctgtcgctcaggctggagtacaatggcgtgatctcggctcactgcaaccttcgcctccgtggttcaagagattttcctgcctcagcctcctaagtagc

SEQ ID NO: 379800 - DNA, 201 bp, Homo sapiens
ccgcctcccgggttcaagtgattctcatgcctcagcctcaggagtagttggaattacaggcgcacgccaccacgcccagctaatttttgtatttttttttwttttttttagtagagatagggtttccccatgttggtcaggctggtcttgaactcctgacctcaagtgatccacccgcctcagactttcaaagtgctggga

SEQ ID NO: 379801 - DNA, 201 bp, Homo sapiens
ttgttggtatctgcaaggcccttcctaaaaagtaaaaaccttaaggagaaacccaaaatgtaaaagagatgaaagaagatgccaggattactcacagaacrtattcctcctcccagtgatggttgggaggaagtagaaagtgcttaggctttgggctgagtcagatccaaattcatacctaatcttcaatagctggcatga

SEQ ID NO: 379802 - DNA, 201 bp, Homo sapiens
actgctactgccaatgtatatagaaaatttatttcaccccaggataaatataaatacagaaatttagaaagaaaaaagatatcacctctagctggagacawttgaaaagcttcatgaaaaatatgatactagaatatggccttaaaggattggtaaggaagggaaattttatacctctggagaagggtaggaaccaagaca

SEQ ID NO: 379803 - DNA, 201 bp, Homo sapiens
ctccagcctgggcaacagagtcagcctctgtctcaggaaaaaaaaaaaagggaaaaaaattgaccaggcatgatggtgcatgcctgtagccgcagttactytggaggctgaggtgggaggattgcttgagcccaggaggtcgaggctgcagtggtctgtgattgtaccacagcactccagcctgggtcacagagagagacc

SEQ ID NO: 379804 - DNA, 201 bp, Homo sapiens
atgcatttttctaatatattatgtcaattttatatttatttatttattttgtgtgggaggtggggggaacgaagtctcactctgtctccaggctggagttyagtggtgcaatctcggctcactgcaacctctgcctcctgatttcaagcgattctcctgcctcagcctccccagtagctgggcctacaggcgcacaccaac

SEQ ID NO: 379805 - DNA, 201 bp, Homo sapiens
ccaacacgctcagctaatttttgtattttttagtagagacagggtttcaccatgttggccaggatggtctcgatctcttgacctcaagatctgcccgcctyagcctcccaaaatgctgggattacagatgtgagccactacatccagccatttttatttatttatttttgagatggagtttcactttgttgcccaggctgg

SEQ ID NO: 379806 - DNA, 201 bp, Homo sapiens
cagccatttttatttatttatttttgagatggagtttcactttgttgcccaggctggagtgcagtgatgcgatctcagctcactgcaacttctgcctcccrggttcaagtgattctcttgcctcagcctcccgagtagctgggattacaggcacctgtcaccacgcccagctaattcttgtatttttagtacagatggggt

SEQ ID NO: 379807 - DNA, 201 bp, Homo sapiens
accaccacaccctgctaatttttgtatttttagtagagacgaggtttcaccatattggccaagctggtcttgaactcctgaccttgtgatacacccacctyagcctcccaaagtgctgggattacaggcgtgattcaccgcgcctggccacaagcagaaaatcttcagataataatggctctactctaaccaagtgccatg

SEQ ID NO: 379808 - DNA, 201 bp, Homo sapiens
aattactgccaaggaagatttaatagccatccaacacctgaaattcttttagtcttctcttcaggaagaagaaaatattaaaatactcataactttaaatygccaaaatcaacaaagcataaatggccccacttccaactccaaatataagagatccttctaggtgaagtagtccagaaagtcaatgactctggcgacagt

SEQ ID NO: 379809 - DNA, 201 bp, Homo sapiens
atgcaactattattttaaaaagtaacactgaatatctagataaactattttcaaatgaacatttcaacaaataaaaatcaattctgcatttttatttgaaraatttttgcatagttttcacaaacatttcaaaactgatttctaatttaaataaatcaaagtttcttaactatttactgaaacatactctggctttccttg

SEQ ID NO: 379810 - DNA, 201 bp, Homo sapiens
cgaaagcgtccttggcccctgtatctccatatatctggtttttctcttccttcaaggtcagcttgcagcatgaactccattctttaagcctccatgtcccrttaatttcagacacacaatggccagtcttccgccatcctcttctccctttcccttgcacagacacactccactgaaggcgttttcattgcattctctgat

SEQ ID NO: 379811 - DNA, 201 bp, Homo sapiens
gtctcagaggtcatatatttttctccacatctcctaaaccccagtgtttaaaataaaaagagactcatgtattttctgaatgaaacagtgtgtacctaaasagtgtgtgttttttacttgtgggatgcttcttatccttttgcagctgtcctctaatgattgagttgtcttctgaaccaggtgcagttatatgatagacaa

SEQ ID NO: 379812 - DNA, 201 bp, Homo sapiens
atgtaattcagattccattaaagcatttaataaaccatgaaaagctgatctagacattttcaaaaggaatatatattcattatatcactttatgatctttyttctttttaagtcttaccttgaggcattctataaattctgtaagaatcatggtgatgtcacagcagaagttatgtgtcccattcttgaggtaagaaagag

SEQ ID NO: 379813 - DNA, 201 bp, Homo sapiens
agaagcaatttgaaccatagcagatttctcattaggcacctcatggagccagaagcaagcggtgtagtatttttcaagcactaaagacaagaaaaaaaaayagcattttgtattcagtgaaaatccttcaggaatgaaggggaaatcaaggcattctaagatgaaggaaagctaggagattttgtcaccagcagacctact

SEQ ID NO: 379814 - DNA, 201 bp, Homo sapiens
acactgtcaccaacaaaaattcaatgttttcatatccctttaaagttcttgcagataccttgaaatgtcatgtatgttttctctattttgaagtaagataycacactcatcctttattatttatttatttattgagatggagtttcactcttgttgcataggctgaagtatagtggcgtgatcttggctcaccacaacctc

SEQ ID NO: 379815 - DNA, 201 bp, Homo sapiens
ctatagacactccataatcacccaaattccctctggtgagggaacattgggcagctgggaacccccacaacttggcatcaaaagtccactatagcttcatycacagggacattgtgccttacaaatcctaaaataaaggctgccccaagcaacccatgaacattccagcttttggcaggaagactcatttgttatgtgatt

SEQ ID NO: 379816 - DNA, 201 bp, Homo sapiens
aatgcttggcacatactaaagttgcaaataataaatattattattagatagtgaaggaggagggacttcaaaaaaaagccttaagtgaatagctccaaggwgttgtgaagattaaatgaaagtatattcagtgtatagtgtagtgagtgaggtttagggcagcagtccccaacctttagggcaacagggactggtttcgtg

SEQ ID NO: 379817 - DNA, 201 bp, Homo sapiens
gcctcgacctcttgggttcaaatgatcctcccacctcagcctcctgagtagctggaaccacatgcacatgccaccatgcccagctaagtgttttatttttwaaaaaagtttgaaaagaccaggtcttggctgggcatggtggctcacacctataatcccagcactttgggaagccaagctgggtgagcacctgaggttggg

SEQ ID NO: 379818 - DNA, 201 bp, Homo sapiens
ataactaacagaaggcaccgttctaagcaatttataggccttaactcactaatccacctggcaaaaatatgatgtttatgctatctccattcctcagaggwgaaaactgaggcttggagagccaaggtttctttggaagaagtcagttagctaaaacgtattagagttgggatccaaactcaggcagtctgaccctacagc

SEQ ID NO: 379819 - DNA, 201 bp, Homo sapiens
gtcctttcaaaagcattgtattgcaggcagtgttccttttggtaaagtgacttatgggcctagaggaggcatccttgagatataactaacagaaggcaccrttctaagcaatttataggccttaactcactaatccacctggcaaaaatatgatgtttatgctatctccattcctcagaggagaaaactgaggcttggaga

SEQ ID NO: 379820 - DNA, 201 bp, Homo sapiens
ccatactatgatgtatagccctgaggtataaaaagctttagggcactaaacaaaccacaggaccatttgaagtgttagtgtgttgtttttttaattgatamataacattttccatatttatgaggtccatgcaattttttttttacagttatagaatgtgtaatgatcaggtcagggtatctgaggagtctatgactttga

SEQ ID NO: 379821 - DNA, 201 bp, Homo sapiens
taattccatatctttgttatcgtgaatagtgctgcaataaacatgtgagtgcaggtatccctttgacatactgatttattttctttagtatagatacccartagtggcattgctggattgtatggtgtttctgtttttagttttttgaggtatcttcctactgttttccacagtacttgtactaattgaaatttctaccaa

SEQ ID NO: 379822 - DNA, 201 bp, Homo sapiens
gaggtataaaaagctttagggcactaaacaaaccacaggaccatttgaagtgttagtgtgttgtttttttaattgatacataacattttccatatttatgrggtccatgcaattttttttttacagttatagaatgtgtaatgatcaggtcagggtatctgaggagtctatgactttgagtatttgtcattctgtgttggg

SEQ ID NO: 379823 - DNA, 201 bp, Homo sapiens
ctttagtatagatacccagtagtggcattgctggattgtatggtgtttctgtttttagttttttgaggtatcttcctactgttttccacagtacttgtacyaattgaaatttctaccaatggtgtataagaatctccttttttccacatcctctctccagcatattttattgtttgtctttttaatactgtccattctaaa

SEQ ID NO: 379824 - DNA, 201 bp, Homo sapiens
ggcagatcacttgaggccaggagtttgagactagcctggccaacatggtgaaaccccgtctctactaaaaatacaaaaattagctgggcatggtggcacgygcctataatcccagctactcaggaggctgaggcaggagaaccgcttgaacccgggagtgagaggttgcagtgagctgagatcgcgccactgcactccagc

SEQ ID NO: 379825 - DNA, 201 bp, Homo sapiens
attgatcatttcatatttattatttatgtggatttgatacaggacctaattgtctatttttgttagagttttcagcagtttttaatgacatataacagctmtttgtaaattaagaaagtttagcccttcataatatatgttgcaaaactattttctttgtgttatatattttaatttttataatgtttgtggttttttgct

SEQ ID NO: 379826 - DNA, 201 bp, Homo sapiens
ggcctttggcacaaaggaaaaccaatgcaaatttcctattattgacagtgggcaagagcagaagtaaaggaaggctcttctgtttggaatttcacatcgcrtcatacaatctgaggatcaattttacttaatgaataatatctttaagaaaaaaagaaaagtaattaagggacatgattacaatctttcaagagttcagaa

SEQ ID NO: 379827 - DNA, 201 bp, Homo sapiens
taataattatcattattattttgagacagagtctcactctgtcctccaggctggagtgcagtggcacaatcttagcttactgcaacttccgcctcccacgwtcaatcgattgtcgtgcctcagcctcccgagtagctgggattacaggcatgcaccacaaagcctggctaatttttgtatttttggtagagacgaggtttc

SEQ ID NO: 379828 - DNA, 201 bp, Homo sapiens
aaaacagacctgcattcctaggcctttggcacaaaggaaaaccaatgcaaatttcctattattgacagtgggcaagagcagaagtaaaggaaggctcttcygtttggaatttcacatcgcatcatacaatctgaggatcaattttacttaatgaataatatctttaagaaaaaaagaaaagtaattaagggacatgattac

SEQ ID NO: 379829 - DNA, 201 bp, Homo sapiens
caaagcctggctaatttttgtatttttggtagagacgaggtttcaccgtgctggccaagctggtctccacctcaggtgatctgccccgctaagcctccgcragtgctgggattacaggtaagccatcatgccagcctaaattaaattatttttattaaaaaccctctctttgttcatattgatagtcctcaaagaattttg

SEQ ID NO: 379830 - DNA, 201 bp, Homo sapiens
gtatttttggtagagacgaggtttcaccgtgctggccaagctggtctccacctcaggtgatctgccccgctaagcctccgcaagtgctgggattacaggtragccatcatgccagcctaaattaaattatttttattaaaaaccctctctttgttcatattgatagtcctcaaagaattttggattagtgtaaattacagt

SEQ ID NO: 379831 - DNA, 201 bp, Homo sapiens
ggtcattctggattaagtcttttttttttctttttgagacggagtttagctcctgtcacccaggctggtctccaatggcacgatcttggctcactgcaacytctgcctcccaagttcaagtgattctcctgcctcagcctctcaagtggctagaattacaggcatgtgccaccatgcctggctagttttgtattttttttt

SEQ ID NO: 379832 - DNA, 201 bp, Homo sapiens
aaataaataataataaataatacatactccattttatatatatacacacagacacacatatgtatatacacatatacatataaatctattcgctttatcarttttctttatccattcatccattgaatggacactgtgtttccatgtcttggctattgtgaataatgctgcaatgaacatgggagtgtaaatatctctttg

SEQ ID NO: 379833 - DNA, 201 bp, Homo sapiens
aacagtgtccactggctctcaagatgtgggaggtcattctggattaagtcttttttttttctttttgagacggagtttagctcctgtcacccaggctggtstccaatggcacgatcttggctcactgcaacctctgcctcccaagttcaagtgattctcctgcctcagcctctcaagtggctagaattacaggcatgtgcc

SEQ ID NO: 379834 - DNA, 201 bp, Homo sapiens
cacttaaatatctttacttctcttcctcccaccctaaaaggacacatattaaaactaaaaatcgaaagcgtccttggcccctgtatctccatatatctggtttttctcttccttcaaggtcagcttgcagcatgaactccattctttaagcctccatgtcccattaatttcagacacacaatggccagtcttccgccatcc

SEQ ID NO: 379835 - DNA, 201 bp, Homo sapiens
ataaatagtgtgtgaacagcagttcaactgttgcatctgtgaatgtacttaaggagactcagtctgccccaagctagattcagagctgagaagaaatcaavttgttggaatagaatcctaaaggcttaaggattttagtttacttttgcacaaaatatacaccatacaaactatggataaacaacaggttacactgtgcca

SEQ ID NO: 379836 - DNA, 201 bp, Homo sapiens
taccctacagatgcctacttccaggtctcaacttacatgtggactttgactctccaatcacttcttagaactctctagaacttcctaaaattctctcccctgattctccttcccccatctagtcatccctctgaatttccttcaaggtccttaaaagctggggttccccagagttcccaagaaagaactctctacatgcac

SEQ ID NO: 379837 - DNA, 201 bp, Homo sapiens
tttatttagttagttgttagaatattgaatatgctttttcatggccaggtgcaggcaccatggctcatgcctataattccagaattttgggaggccaaggmgggcagatcacttgacgtcaagagtttgagaccagcctggccaacacagtgaaaccctgtatctactaaaaatacaaaaattagctgggtatggtggtga

SEQ ID NO: 379838 - DNA, 201 bp, Homo sapiens
aaatatatatatttaaaaccttgttctatagaattttattctatcacatttctcagtatctattgatttgagagtttgaagtctacctttaactgaagttaaaaaaaaaaaaaatcaagagctgttactggtggggccagccctggattcaaaagtcctggatttgacttctgtcatgtcaccagtaggtgacctgtggct

SEQ ID NO: 379839 - DNA, 201 bp, Homo sapiens
ttagaatattgaatatgctttttcatggccaggtgcaggcaccatggctcatgcctataattccagaattttgggaggccaaggcgggcagatcacttgaygtcaagagtttgagaccagcctggccaacacagtgaaaccctgtatctactaaaaatacaaaaattagctgggtatggtggtgagagcttgtaatcccag

SEQ ID NO: 379840 - DNA, 201 bp, Homo sapiens
gtgcaggcaccatggctcatgcctataattccagaattttgggaggccaaggcgggcagatcacttgacgtcaagagtttgagaccagcctggccaacacrgtgaaaccctgtatctactaaaaatacaaaaattagctgggtatggtggtgagagcttgtaatcccagctactcaggaagctgaggcaggagaatcactt

SEQ ID NO: 379841 - DNA, 201 bp, Homo sapiens
cacaacctagatccctcagatgcacagttcataatagggtttgctctcctatgagaacctaatgctgccgttgatctgacaggagggggagctcaggtggyaatgcaaacagtggggagcagttgtaattacagttgaagccactctctggcccactgttcacctcagctgtgtggctcagttactaacaggccacggact

SEQ ID NO: 379842 - DNA, 201 bp, Homo sapiens
ctagtcacaaaaaccctgactatcacctgatagattgcttgtgctgcctgataattactcgcacttttcccaggctagtgcaaatcttcaggggccgtccrggactacagagctgtttcaccctaccttggcttcaatctcttcccccatgctcgaaggtgcggagctgtacttcaacgtggaccatggctacctggaggg

SEQ ID NO: 379843 - DNA, 201 bp, Homo sapiens
tttgtttgttttgatttttgagacagggtctcactctgttgcccaaactggaggagtgcagtggcatgatcatggctcactgcagcctcgacctcttgggytcaaatgatcctcccacctcagcctcctgagtagctggaaccacatgcacatgccaccatgcccagctaagtgttttattttttaaaaaagtttgaaaag

SEQ ID NO: 379844 - DNA, 201 bp, Homo sapiens
ggttgaggctgcagtgagtcctgaccccaccactgcacgccagcctggatgacagagtgagacccaatctccaaaggaagaaaaaaaaaaaaaaaaaaaamcaatgaacaagaaagacatggttcttcaaagattttagagtgtagtggggagaaatgcaggcacagatttcaaaatgaagtggtaattactgggcatttg

SEQ ID NO: 379845 - DNA, 201 bp, Homo sapiens
gtgattcacagttggtaagctcatttaattatgtgtcaaacaccaccattggtatctacctctctagctgatgttataacttaattcctcttaaggaccayagatttcatctatgcttaggagtcctcttgcataagaatgttgacctgcatatgcatgggagattcagggcagagatcagaaggatttgtggggcatcct

SEQ ID NO: 379846 - DNA, 201 bp, Homo sapiens
aacccttactgaccaaatcatgaacattcactgagcttctataatgtacctagctagccctaagaacctgagtgagaaaatgagctcaaacactgtatacygagagttgaattgccttgtagccctgaacaagccaataggctagaatttcatccacactcttgttatttggatttttttattgtttcttcgggaggccaa

SEQ ID NO: 379847 - DNA, 201 bp, Homo sapiens
ttcatagcttgatagtcagtgatgtattattgctacaaagttacacacagacctaggaatctttgtgctagcagtgctgctaaagtttgtagcttttctttcttttttttttttttttataccctcctaaaagagtttacttaaaaactgcgagaagtaatggaagtacattcaattcctcatggaatttgctgaagaaca

SEQ ID NO: 379848 - DNA, 201 bp, Homo sapiens
gttttgagtttctcggattttccttcgggttgcctcatacactcctaactggatgctagaaaatcttacagcccagaaagccaatgggcacatacaaaaaygcccccaaggaaaggctgttctctctagccaaaggaccaggaaaggggcagcttcacaaacagaaagtctttttttttttttttttttttttttgagatg

SEQ ID NO: 379849 - DNA, 201 bp, Homo sapiens
ttggccagagacttcaagagacttaatatggtagaagagaccattaacctcagcttacatgtgaaaatttgacctaattacaagattataacttcatatgaaaaaaaaagaaattgacttatgttcaaggcaaatgcactgtagtataatatttgccttttactcctactcttcaatcttatggttaatagggcagtgaaa

SEQ ID NO: 379850 - DNA, 201 bp, Homo sapiens
gggctgagtgtgctgtgttgaaagccactgaaaccagaggaaactagtcacaaaaaccctgactatcacctgatagattgcttgtgctgcctgataattaytcgcacttttcccaggctagtgcaaatcttcaggggccgtccaggactacagagctgtttcaccctaccttggcttcaatctcttcccccatgctcgaag

SEQ ID NO: 379851 - DNA, 201 bp, Homo sapiens
ctgtggaggggcttcttccgcatattcccaccagccaaggttttatttagttagttgttagaatattgaatatgctttttcatggccaggtgcaggcaccrtggctcatgcctataattccagaattttgggaggccaaggcgggcagatcacttgacgtcaagagtttgagaccagcctggccaacacagtgaaaccctg

SEQ ID NO: 379852 - DNA, 201 bp, Homo sapiens
tggaattacaggagctagccaccacacccagccctcatatgacattaaaactattatcagacttgctgggcatggtggctcacacttgtaatcccaacaayttgggaggttgaggcgagaggatcgcttgagcccaggagtttgagaccagcttaggcaacatagaaagacccatttctaaaaataaattaataatattta

SEQ ID NO: 379853 - DNA, 201 bp, Homo sapiens
atgcatagttgggcttattgtttgttttagaacagtgagatcatacatgtattgtccacaatttgtccttttaaaatgtaatctattataatttttgcatmaatatataaagatatattttatttaatatatttttaatttatgtattatttacttaatttaattcattaacttatttgtttttctgagacagagtctcac

SEQ ID NO: 379854 - DNA, 201 bp, Homo sapiens
tcttagagataaataacagtgtggccagcggttctttgtcatatagtgtccaatgtcccttctgtccccttagatcagtgatcaccatcctttaatcatayacctatcattaacacacaagcccaaaataatataacatatttaattatatattatatgcatttttctaatatattatgtcaattttatatttatttattt

SEQ ID NO: 379855 - DNA, 201 bp, Homo sapiens
tctgttcctgtgttagtttgctgagaatgatggtctccagctttatccatgtccctgcaaaggacatgaactcatccttttttatggctgcatagtattcyatggtatatatgtgccacattttctttatccaggctatcactgatgggcatttgggttggttccaagtctttgctattgggaaaagtgctgcaataaaca

SEQ ID NO: 379856 - DNA, 201 bp, Homo sapiens
aaaaaaaaattgtgttatactttaagttctgagatacatgtgcagaatgtgcaggttttgttatgtaggtatacgtgtgccatggtgggttgctgcacccstcaacccatcatctactttaggtatttctcctaatgctatccctcccctattccccccaccgacaggccccagtgtgtgatgttcccctccctgtgctca

SEQ ID NO: 379857 - DNA, 201 bp, Homo sapiens
cattcaattcctcatggaatttgctgaagaacattattacaaatgctacaaattttagtgtaaaattttggttaatcatatgagataatgtttcttttttwaaaaaaaaattgtgttatactttaagttctgagatacatgtgcagaatgtgcaggttttgttatgtaggtatacgtgtgccatggtgggttgctgcaccc

SEQ ID NO: 379858 - DNA, 201 bp, Homo sapiens
cccttgcacagacacactccactgaaggcgttttcattgcattctctgatgaccccttagttgctgtaccctacagatgcctacttccaggtctcaacttrcatgtggactttgactctccaatcacttcttagaactctctagaacttcctaaaattctctcccctgattctccttcccccatctagtcatccctctgaa

SEQ ID NO: 379859 - DNA, 201 bp, Homo sapiens
tacctgggcatggtgtcacatgcctgtagtccctgccacttgggaggctgaggtgggaggttgaggctgcagtgagtcctgaccccaccactgcacgccarcctggatgacagagtgagacccaatctccaaaggaagaaaaaaaaaaaaaaaaaaaaacaatgaacaagaaagacatggttcttcaaagattttagagtg

SEQ ID NO: 379860 - DNA, 201 bp, Homo sapiens
ggtcttatgttgcccaggctactctcaaactcctgggctcaagcaatcctcccaccttggccttctaacatgctgggattataggcctgagccaccacaaycagccaggaataagttaaataagttatggaacattcacataatggaatattctgcatttaaaaggaaaaacgcatgaggaagcactctaaaaggagaaat

SEQ ID NO: 379861 - DNA, 201 bp, Homo sapiens
aaattacctgggcatggtgtcacatgcctgtagtccctgccacttgggaggctgaggtgggaggttgaggctgcagtgagtcctgaccccaccactgcackccagcctggatgacagagtgagacccaatctccaaaggaagaaaaaaaaaaaaaaaaaaaaacaatgaacaagaaagacatggttcttcaaagattttag

SEQ ID NO: 379862 - DNA, 201 bp, Homo sapiens
aatgttttgccttttctagagctgcaccttcaatcacaaattccatcccttatcccatgttcctggaaagcgaccatctccctttaaagtcttcatttaartcacttcctctgtaagccccttcctacagaatctatcatgggatggaattgacaagcttcaactttagctccacggtaccttgtaatgaacctaatcctg

SEQ ID NO: 379863 - DNA, 201 bp, Homo sapiens
tgtttgccagtctgcaatgctgcctacgttgccctaattctcttcgtaagatcatgacattttagaatcagagagcacattaaagaacatctgtgacaatyacctccattgttgctctagttgccctaatttttgttttaagttttcttattgccacgaaatcttcttcttccatttcttctcttatccctagaaggtcta

SEQ ID NO: 379864 - DNA, 201 bp, Homo sapiens
gactctgctgtttgccagtctgcaatgctgcctacgttgccctaattctcttcgtaagatcatgacattttagaatcagagagcacattaaagaacatctrtgacaatcacctccattgttgctctagttgccctaatttttgttttaagttttcttattgccacgaaatcttcttcttccatttcttctcttatccctag

SEQ ID NO: 379865 - DNA, 201 bp, Homo sapiens
taatgttaccagtagggtaacattgaagtgtagattataataagccaatctgaaaaggggtgggggaagaaattctagagtggggttgggtcagcatttaytgaagtatggatgctagaaaatacctggtttgttcaggaggaagtgacaatcaacaaagctgaaattcagttcaatccaattacctggcaaccaaaatgg

SEQ ID NO: 379866 - DNA, 201 bp, Homo sapiens
tcatagcttgatagtcagtgatgtattattgctacaaagttacacacagacctaggaatctttgtgctagcagtgctgctaaagtttgtagcttttctttcttttttttttttttttataccctcctaaaagagtttacttaaaaactgcgagaagtaatggaagtacattcaattcctcatggaatttgctgaagaacat

SEQ ID NO: 379867 - DNA, 201 bp, Homo sapiens
aagtgtagattataataagccaatctgaaaaggggtgggggaagaaattctagagtggggttgggtcagcatttattgaagtatggatgctagaaaatacmtggtttgttcaggaggaagtgacaatcaacaaagctgaaattcagttcaatccaattacctggcaaccaaaatggatgacatttaaaggatgcatggcat

SEQ ID NO: 379868 - DNA, 201 bp, Homo sapiens
agagtttacttaaaaactgcgagaagtaatggaagtacattcaattcctcatggaatttgctgaagaacattattacaaatgctacaaattttagtgtaawattttggttaatcatatgagataatgtttcttttttaaaaaaaaaattgtgttatactttaagttctgagatacatgtgcagaatgtgcaggttttgtta

SEQ ID NO: 379869 - DNA, 201 bp, Homo sapiens
gttaagagattatgtatactaaaaccattctggcaatggtaaaacgctctacaaattttataaaagttgtttttaatctgcctaaaacttttcagtggctscaagctatttttaggatcattacagtaccaaaacaattcttaggaaagattaaacttgaggcggggagcacatgaggagaaatgagcctgggaaaatcga

SEQ ID NO: 379870 - DNA, 201 bp, Homo sapiens
tcaatccaattacctggcaaccaaaatggatgacatttaaaggatgcatggcatggtctggtggaaacgatgctgggttataagaataaggggactaatckcctacttcagtctcattagataactccaccatttagtcccactgaacttcaatttcttcatctgtaataaaaggatactgaaacagagcaccgatggctg

SEQ ID NO: 379871 - DNA, 201 bp, Homo sapiens
caccctgagaacggcaatatattagcaaaaatggagaaagaagtgtctggttgtacatcttccggtgtatttattaaaagtctgagtaattaccagatttsatggttgattccaatatgttagttggaaaaattctggtttagaggataaaagctgaattccttagcaatttattttggagataggtgggtacaattgaaa

SEQ ID NO: 379872 - DNA, 201 bp, Homo sapiens
tttgtatcctcaacagtttcccaggtagctatctccaaaagactaaaacctgtttgccatctgtggattaggtgtttgttaggtttttttttttttcagayctgctaaataataccagatttcttagtaattgaaatattttgtgagggccaggcacagtggctcctgcctgtaatcccagcactttgggagcctgaggtg

SEQ ID NO: 379873 - DNA, 201 bp, Homo sapiens
attttgtggtggattctctatgctggctctttacctacctgaatcatctttttttgtttgtttgtttcttttcttttttgagacaggatctcactctattkcctgagccagagtgcagtagcttgaacacagctcactccagcctccacctcccaggctcaagcaattctcccacctcagcttcctgagtatggggaccac

SEQ ID NO: 379874 - DNA, 201 bp, Homo sapiens
acagatcacttgaggtcaggagttcgagaccagcctggccaacatggtgaaaccctgtctctacttaaaaaaatacaaaaattagccaggtatagtggcamacgcctgtggccccagttacttgggaggctgaagcaggaaaattgcgcgaacccaagaggcagaggttgccgtgagctgagatcgcaccacggcactcct

SEQ ID NO: 379875 - DNA, 201 bp, Homo sapiens
attagaggcgtgagccactgtaccagacaaccttgtttaatccccaaaacaacctgaaagcgtagactatatccattttgtagatgaggaaactgagttcrgaaaattcagataatttccctaagttcagcagcagcagagtgtggggaaaggcagggggctgcttggatagaacagtagatagtcacttctctttatttt

SEQ ID NO: 379876 - DNA, 201 bp, Homo sapiens
acttgggaggctgaggtgggaggttgaggctgcagtgagtcctgaccccaccactgcacgccagcctggatgacagagtgagacccaatctccaaaggaaraaaaaaaaaaaaaaaaaaaaacaatgaacaagaaagacatggttcttcaaagattttagagtgtagtggggagaaatgcaggcacagatttcaaaatgaa

SEQ ID NO: 379877 - DNA, 201 bp, Homo sapiens
tcctcctggtatttttttttaaataggtacacaatttctataatgctaggaaaaatatatttatatacatttataagaaatgaaaatgtctttaaaattartgtctttgtttttaaggtatacaaacctttatttgaagctgtaggtggcagtgggggaaagacattggaggacgtgttttacgagcgtgaggtatgatat

SEQ ID NO: 379878 - DNA, 201 bp, Homo sapiens
gatagaacagtagatagtcacttctctttatttttagtagagacggggtctccctatgttacccagactggtctcaaactcctgggctcagcaaccctccygcctcggcctccagagtagctggggttacaagcatcagccaccacgcccagccaaaaaggaattttctaaaaatagtctgccaacaaattagtagacaat

SEQ ID NO: 379879 - DNA, 201 bp, Homo sapiens
gagcccctcagcacatttctcacctatatgacgtaagtgatgacagaaagccctaataagccccaatgtactcgtgcggatgacccctaacaattacaggstgggtatcaagccagagtgagacttaagaccttttccattgtttgtaagtttaaattcattcacattttagcaactgataagctcatagagccacatttt

SEQ ID NO: 379880 - DNA, 201 bp, Homo sapiens
tagcccaagctgctaatttttaaagttcctgccaagcaagtacttgtttaaatctccaaggaatggtcatctgagcactccttttgaagtgtttgataaarcaagttcccccaggagactggttcagtgttctggaaatgtgagctcatatcaacgttatgtaaaatagtctaacccagcagccctttcaggtacccacta

SEQ ID NO: 379881 - DNA, 201 bp, Homo sapiens
tgcttgtgtccttcccccactccagcatccatttgctcttggagcgcctgaagctcctcagcttaaggttgtacactttggctcagcttccattccctctsacttgcacacatttacataacctccaggtaacttttccagggctagaatgacactcatcttttcctccagatttctgaagcactccaggaaagatgaaag

SEQ ID NO: 379882 - DNA, 201 bp, Homo sapiens
caaagtagctggcactacaagtgtacacccccacacaaggctaagttttgtattttttgtagagacagggtttcaacatattatccaggctggtgtcgaaytcctgggctccagggatccacagtcccccttggcctcccaaagtgttgggattacatgcatgagccactgtgctgggcttcatttacattttaactgtct

SEQ ID NO: 379883 - DNA, 201 bp, Homo sapiens
ctgcagctccctcttctggcctggactctgctgtttgccagtctgcaatgctgcctacgttgccctaattctcttcgtaagatcatgacattttagaatcwgagagcacattaaagaacatctgtgacaatcacctccattgttgctctagttgccctaatttttgttttaagttttcttattgccacgaaatcttcttct

SEQ ID NO: 379884 - DNA, 201 bp, Homo sapiens
aacagtccttttccaattctaaaacgatgggtgttttcaccataggataatacacacacttacccaaaagagcctctagactagaagagtaaggtagatayatagtcagttatgataaaaggaaaatggaatgtaatcagggttcaaagggaatcatatccaattagagaagaaatggaagggcttgttatgaaaaagatg

SEQ ID NO: 379885 - DNA, 201 bp, Homo sapiens
gcaagtaaacagttcattgctatctcttgaaataacaaaaaaaataaggtctagttttaacatgagtaagtttttatagggaaaagtaaaaggaaagtcaygggactgccaacatacaccataccacacagcgtgccaactctctgcaagaaacaggaactaagtcacactaacaccagcccattcagtctcctctaatca

SEQ ID NO: 379886 - DNA, 201 bp, Homo sapiens
aaatgtctttaaaattaatgtctttgtttttaaggtatacaaacctttatttgaagctgtaggtggcagtgggggaaagacattggaggacgtgttttacragcgtgaggtatgatataagtggaaatactattagcttatttttctcttactgtggattttatatattttcttactttgggttttctttttacagctgat

SEQ ID NO: 379887 - DNA, 201 bp, Homo sapiens
cagtgagccataagccacctcattccaggctgggtgacggagtgagatcctgtctctaagaaataaaaataaaaatccattgaacagtttttatttatacrgaaatatcagctacacagggcatgaggttataacatttataattatatgatcaaagggtgtttgtcagctttacataaatactttcgatcatgtaattac

SEQ ID NO: 379888 - DNA, 201 bp, Homo sapiens
tggctttgtaatccttggtaatgtaaaaaaaggatagtatcataaaaatgcttatcactgggatgatgtgatcaaactacgatatgcccagtgttctcatkgtacttttccaatcttcatggtatcagatgagattagtgtttgtttgtttgtttcaaacagcattaaaaaaaaatccagctaggcatggtagtttatgcc

SEQ ID NO: 379889 - DNA, 201 bp, Homo sapiens
cagatcacttgaggtcaggagttcgagaccagcctggccaacatggtgaaaccctgtctctacttaaaaaaatacaaaaattagccaggtatagtggcacrcgcctgtggccccagttacttgggaggctgaagcaggaaaattgcgcgaacccaagaggcagaggttgccgtgagctgagatcgcaccacggcactcctg

SEQ ID NO: 379890 - DNA, 201 bp, Homo sapiens
gccacatttttgcattagaaaatggatttcattgatttataaacatgattatatcagcggtggtggcctccatctaaaggaatcttttcagttttcatttaaaaaaaaaaagtgttgccagtgtttaaggtgttagtactgaaggtaaatgttatgtgacattcttggatcacttttcagggtggggttgacaatatctca

SEQ ID NO: 379891 - DNA, 201 bp, Homo sapiens
ctttgtaacagtataagtagcagttgtgaaagttatatatgttttatttttatccatcatctgtggttccaattgtgcaacacatgagctcctcattctamaaaatatttggggccgggagctgcggctcatgcctgtaatcccagcactttgggaggccaaggtgggtggatcacgaggtcaggaattcgagaccagcct

SEQ ID NO: 379892 - DNA, 201 bp, Homo sapiens
caagggcttgggaaatgcaaagttatcagcattcttgttctaaaatatgctattatggcaatgctgacttgtaagtaacttttcagtattttattttgctwcaaggaaaaacaagtgtgacagcaaaattgtttgctttttcaaattattttaattttcacttcctctatttaaaaaagggaagcttcagagaaggaagaa

SEQ ID NO: 379893 - DNA, 201 bp, Homo sapiens
ggtacagtgacttcactggtgggtggaattctgatttcaagaaaagcctaataagcattacccttcaggtaaaaagaaaaaaaattaacttcatttgcaartatttcaacctaatgctctgaaactgcatatgataaaactagctcccctcaaaacatctaatcattaaaattttacttggttgatgacttctgatataga

SEQ ID NO: 379894 - DNA, 201 bp, Homo sapiens
ggtactgaacaccttagtttacccaaagtgtttcccaggactcagaacttgtagtgttgataccaggaaagtccttggaaaaccagatcatttgatcaccytatcaccatatagtcaaaaaatgaacaacataactctggctcactaagggcttacattctaatgcagcaagcaagtccacaaatggtgtaaaagtaagac

SEQ ID NO: 379895 - DNA, 201 bp, Homo sapiens
caaataaatgagctgtgtgttatgtagataaaatgtagatgtaaagcacaaagttctgaagactaggtccaagcccaggtctggtgcctggcactcaggcrtcaatatatttgtggaaagaaaatatcaatgaaaaaatgctgcatagtataagccaaagattagtcaaaggggaacaaaagaacaggacttcatgtcaaa

SEQ ID NO: 379896 - DNA, 201 bp, Homo sapiens
aatgatgaagggatacgagcccaggtgcctagtggtgttcagcacagagaagacaggccgtgagtatgtgttgacctacctggaagatcatgtagccacaytccagcatcttacaaagaagaaaacttcttgcgagaaagatgatttgccctaacccacatagttcttagctacagtcttagatttattgatacctcacct

SEQ ID NO: 379897 - DNA, 201 bp, Homo sapiens
tgtatgaaagcatggctttgggagacaatctaagatttttagaggcagattccaagaaaatataataagagaaagcctggaaaaatagagggcagagactscttctgaaagagcagagcagtttcagcctctgtctggttgaacgataaaatgatggcgctgcctcaaggagcagggaatgaaaagaatccgcttatctga

SEQ ID NO: 379898 - DNA, 201 bp, Homo sapiens
gcctcagttccatgaatacagcaaggagtggagcaatctgagcaacttgatctttttcatatcccacatctcctttgacaatttaatgaaagatgcaaatcccccccccccaaaaaaatgcatagacatgaaatttacattcacttttagggggtcagagacccccaccaagaatccacaaagtacaggtgtagctgtcgg

SEQ ID NO: 379899 - DNA, 201 bp, Homo sapiens
ggggtgggagggtgcagacctgtttatcaaatatctactatgtgctaggtgctatgcttccttcttgactcatgttaactcatttggtctccaccactggrccattttacattatcatccctatttggcagttgaggcccagagaggtcaattaactcacctgaggtcacacatccaggaagctgaggagttggggtatga

SEQ ID NO: 379900 - DNA, 201 bp, Homo sapiens
gcagaccacctgaggtcaggagttcgagaccagcctggccaacatagtgaaaccccgtctctactaaaaatacaaaaatcagccaggcacgatggcaggcrcctgtaatcccagctacttgggaggctgaggcaggagaatcacttgaacccgggaggcgggggttgcagtcagccgagatcgtgccactgcactccagtc

SEQ ID NO: 379901 - DNA, 201 bp, Homo sapiens
ctgcctgggcagctcggaccagcatcagggagggttgcaggcaaggtcccctgcctgagtgtattttgtacttgcaggatatcacctaccttcgcatcccrgtcgctgatacccctgaggtacccatgtaagttcccctggatggacccatagatggacagacagctgccttctgtggtgggggagggggagggggtttga

SEQ ID NO: 379902 - DNA, 201 bp, Homo sapiens
aaaagaaaagaaaacatgctaaggggcagactgatccagggcttgggtgactcaaagtgggaaaatcatttccatctgcagagtcagaaaaagctttagasagggaggggctcaggtgcttcacccttgtaaatcctggtcccttccttcctgggagctccctcagccgctcatgccaccttgatttctgtgagtatttgg

SEQ ID NO: 379903 - DNA, 201 bp, Homo sapiens
cagcacggcgttgggaaagagtcgggcaaggaagaaatctgtgggaatggggttgtgagcacagaggtgcaaagtgggaggagttacccagaagtgcaaascgggaggagtgatccccgctgggcgcctgggggtcactttagcaggtctggaagctggcgtgtcaaagggggaagaggggtcagggagagggaggggcct

SEQ ID NO: 379904 - DNA, 201 bp, Homo sapiens
tgaggcaggagaatcacttgaacccgggaggcgggggttgcagtcagccgagatcgtgccactgcactccagtctgggcaacagagcgagactctgtctcaaaaaaaaaaaaaaaaaaaagagaaagaaaaaagaaaagaaaacatgctaaggggcagactgatccagggcttgggtgactcaaagtgggaaaatcatttc

SEQ ID NO: 379905 - DNA, 201 bp, Homo sapiens
tcccatttggagtggagtccctttaagtagccctttcctagctacttgataaaggttcctgggtccctgttgggagggataggtgacgtcatgcccacgcygctgatggggttaggagacaccatgtgcttagaaggttcaggaatcacaagtggtcacagctgggaggcctcagagatgacaactactttctttggacag

SEQ ID NO: 379906 - DNA, 201 bp, Homo sapiens
gccccttgggaatcttgctcccagcctgctgctgcccatcattgtgcccaggtgctctgattgcagaccccagaggagtgggacccctgtgtttcctcccwcccatttctctgaaaggccacaataaacccaacatgaaaacagggtccacaggaggagtgctcctgcctagatggtgagatttgtcctgactggtctctc

SEQ ID NO: 379907 - DNA, 201 bp, Homo sapiens; identical to SEQ ID NO: 82369

SEQ ID NO: 379908 - DNA, 201 bp, Homo sapiens
ccgggtgtggtggcgggagcctgtagtcccagctactccggaggctgaggcaggagaatggcgtgaacccgggaggcagagcttgtggtcagccgagatcrcgccactggactccagcctgggagagagagcaagactccgtctcaaaaaaaaaaaaaaaaaaaaaaaaaaaaaacattgtgggcatcattgcacatcagc

SEQ ID NO: 379909 - DNA, 201 bp, Homo sapiens
gccagagagctatcacaggtgttcaactcaaccagtcccaggtttgactctgtctcaaccatgcccttgtgataggcccttggccaagactctccacctcyccgagcctcagtctcatcagctatgaaatgggaaaaggacactctgtaccttgggaccagctacaccagctgatttgaaagggtcatattcagcctgttc

SEQ ID NO: 379910 - DNA, 201 bp, Homo sapiens; identical to SEQ ID NO: 82370

SEQ ID NO: 379911 - DNA, 201 bp, Homo sapiens
tgagagaagggctggaatctcacacaaagccatggacaaatgagaacctggctggtggtcccttagttactgccagtgacgggcctggcccctgaaaagakccatttgaatataaaaatgttaagacagtttctcgagaaaagcaaggaggtcctcaggaggcgggcaaaaataatcttcatgatattgtgtggctaatca

SEQ ID NO: 379912 - DNA, 201 bp, Homo sapiens
tctccgtctgcatgtgtccctctcccttgtcgctgactcctcggctctctccggggctgtttctccatcctgtcccgcctctgcctgtcattgcctttctrcctccccagccccagaatttccatccctgcaccctgcaagtctacctctctcctctcctctcctcctaagacctgccttcctcctctcccctctcatacc

SEQ ID NO: 379913 - DNA, 201 bp, Homo sapiens
tcccccaaagccacggtgtcccgcctgacaaggcccaagtccctccttctctcggaacccccttccaccttttgaacccctctcctccaccatgaggggcycctcccctccccgactcccttcccttccctgtgcacaaatagtagctaggaaggtgaggtagcgcctccctcatcctgaccttttactgcatgagttcac

SEQ ID NO: 379914 - DNA, 201 bp, Homo sapiens
gattaatacctcttcctatgtggatctcctagcccccagactcatcctcaaagctattatcaccacctggaattgattatctgatcaacgtctgtcccccscccagccatactgtaagctccaggacagcaaagaccatgcctgttttatacccgctacatccccagtgcctgaaaaagaacagatgctcaggacatattt

SEQ ID NO: 379915 - DNA, 201 bp, Homo sapiens
gcaggatatcacctaccttcgcatcccggtcgctgatacccctgaggtacccatgtaagttcccctggatggacccatagatggacagacagctgccttcygtggtgggggagggggagggggtttgaaggaggacaaagtactcaggccagagagctatcacaggtgttcaactcaaccagtcccaggtttgactctgtc

SEQ ID NO: 379916 - DNA, 201 bp, Homo sapiens; identical to SEQ ID NO: 82397

SEQ ID NO: 379917 - DNA, 201 bp, Homo sapiens; identical to SEQ ID NO: 53161

SEQ ID NO: 379918 - DNA, 201 bp, Homo sapiens
gagcaagaaggaatgaagaaagaagcaggctgggtgcagtggctcacacctgtaatcccagcactttaggaggcccagaagggtggatcacttgaggtcaygagttcaagatcagcctgggcaacatgctgaaactccatctctactaaaaaatacaaaaattagccgggtgtggtggcccatgcctgtaatcccagctac

SEQ ID NO: 379919 - DNA, 201 bp, Homo sapiens
aatgaagaaagaagcaggctgggtgcagtggctcacacctgtaatcccagcactttaggaggcccagaagggtggatcacttgaggtcacgagttcaagaycagcctgggcaacatgctgaaactccatctctactaaaaaatacaaaaattagccgggtgtggtggcccatgcctgtaatcccagctacccgggaagctg

SEQ ID NO: 379920 - DNA, 201 bp, Homo sapiens; identical to SEQ ID NO: 82382

SEQ ID NO: 379921 - DNA, 201 bp, Homo sapiens; identical to SEQ ID NO: 82383

SEQ ID NO: 379922 - DNA, 201 bp, Homo sapiens; identical to SEQ ID NO: 82384

SEQ ID NO: 379923 - DNA, 201 bp, Homo sapiens; identical to SEQ ID NO: 82405

SEQ ID NO: 379924 - DNA, 201 bp, Homo sapiens; identical to SEQ ID NO: 82386

SEQ ID NO: 379925 - DNA, 201 bp, Homo sapiens; identical to SEQ ID NO: 82408

SEQ ID NO: 379926 - DNA, 201 bp, Homo sapiens; identical to SEQ ID NO: 82389

SEQ ID NO: 379927 - DNA, 201 bp, Homo sapiens; identical to SEQ ID NO: 82390

SEQ ID NO: 379928 - DNA, 201 bp, Homo sapiens; identical to SEQ ID NO: 82391

SEQ ID NO: 379929 - DNA, 201 bp, Homo sapiens; identical to SEQ ID NO: 82393

SEQ ID NO: 379930 - DNA, 201 bp, Homo sapiens; identical to SEQ ID NO: 82394

SEQ ID NO: 379931 - DNA, 201 bp, Homo sapiens; identical to SEQ ID NO: 82395

SEQ ID NO: 379932 - DNA, 201 bp, Homo sapiens; identical to SEQ ID NO: 82396

SEQ ID NO: 379933 - DNA, 201 bp, Homo sapiens; identical to SEQ ID NO: 82398

SEQ ID NO: 379934 - DNA, 201 bp, Homo sapiens; identical to SEQ ID NO: 82379

SEQ ID NO: 379935 - DNA, 201 bp, Homo sapiens; identical to SEQ ID NO: 82381

SEQ ID NO: 379936 - DNA, 201 bp, Homo sapiens; identical to SEQ ID NO: 82387

SEQ ID NO: 379937 - DNA, 201 bp, Homo sapiens
ccagctacccgggaagctgaggtgggaggatcatggtggaccagcccatgaggtggaggttgcagtgaactgagatggcaccactgtactcctgcctggaygacagagcgagactctgtctcaggaaaaaaaaaaaaaaaagaagaagcaaagattatgtccattgtttcaaagtgacttttcttgtaagatgagacaagg

SEQ ID NO: 379938 - DNA, 201 bp, Homo sapiens; identical to SEQ ID NO: 82392

SEQ ID NO: 379939 - DNA, 201 bp, Homo sapiens
cttgtctcatggaccttcaccagacctacctcaaagcaccacagcatgcacaacagtcaataagagaaaagtacaaaaattcaaagtaagaattaacttgsatattgaagcttacttttctagattatggttcagagatctttgacattttaaccttattcatgaatctgccatagcctccttgagaagctgttctctaaa

SEQ ID NO: 379940 - DNA, 201 bp, Homo sapiens
aatgctttttttttccctacttacaggtatcatggtgtttctctcctcaacccaccagagacactaaatctgtaacaatgaaagactgcctttgttttctragatgtaaatcactcaaagtatatggtgtacagtttttaacttaggttttaattttacaatcatttctgaatacagaagttgtggccaagtacaaattat

SEQ ID NO: 379941 - DNA, 201 bp, Homo sapiens
agagaaaagtacaaaaattcaaagtaagaattaacttggatattgaagcttacttttctagattatggttcagagatctttgacattttaaccttattcaygaatctgccatagcctccttgagaagctgttctctaaattggttatgtgtttgaagaaggttgtagttcatgctttctgccctgggtctgggggagaaga

SEQ ID NO: 379942 - DNA, 201 bp, Homo sapiens
gtttgttaggtagtaagcttagttgtaacttggattgaaaggtgagcttttttaaaagcatctgacctgttgctggcagggaaagtagtagaaaatggatygagggatggaataatggcctgagaaaactagtagttggaaaagttaaagattagtactggaatttaacataagcttaatgccaactatttactgtgtttg

SEQ ID NO: 379943 - DNA, 201 bp, Homo sapiens
tagtcgcgggatacttgaactgcaagaacagccgccgctccagcgggctgctcgctgcatctctgggcgtctttggctcgccacgctgggcagtgcctgcytgcgcctttcgcaacctcctcggccctgcgtggtctcgagctgggtgagcgagcgggcgggctggtaggctggcctgggctgcgaccggcggctacgact

SEQ ID NO: 379944 - DNA, 201 bp, Homo sapiens; identical to SEQ ID NO: 82418

SEQ ID NO: 379945 - DNA, 201 bp, Homo sapiens
agaaatagactgagaccattgccactgaaactgaagagggcaagagaaagaggagtggtaccctaaagaaaaataacgatcctggccgggcgtggtggctyacgcctgtaatctcagtagctcatgcctgtaatcccagcactttgggaggccaaggtgggcggatcacaaggtcaggagatcgagaccatcctggccaac

SEQ ID NO: 379946 - DNA, 201 bp, Homo sapiens
cactaggtggctcagcttaaaataatcggaagcgtcgggccctaaatcctacctctccccgccccgcgcaggcgttttctcccgccccagccagtttgttkctccctcctgccccgcccctgctcagtttcctttggtttacccttcactcgcctgcgaccctgtcgccttgaatgacgtcaaggccgcgagcgctttcat

SEQ ID NO: 379947 - DNA, 201 bp, Homo sapiens
gacagaaatagcattttttagttcccaatacatgagtacaaacattattccatgatctcctttacccagtgagtgtttactaaaaatgctttttttttccstacttacaggtatcatggtgtttctctcctcaacccaccagagacactaaatctgtaacaatgaaagactgcctttgttttctaagatgtaaatcactca

SEQ ID NO: 379948 - DNA, 201 bp, Homo sapiens
gttctctaaattggttatgtgtttgaagaaggttgtagttcatgctttctgccctgggtctgggggagaagagagaaggaagggggcatgcatgtgtgttrcagggaccagacagtgtttctaaaaccatcaagtcggtcagacagaaatagcattttttagttcccaatacatgagtacaaacattattccatgatctcc

SEQ ID NO: 379949 - DNA, 201 bp, Homo sapiens
tgtttgaagaaggttgtagttcatgctttctgccctgggtctgggggagaagagagaaggaagggggcatgcatgtgtgtttcagggaccagacagtgttyctaaaaccatcaagtcggtcagacagaaatagcattttttagttcccaatacatgagtacaaacattattccatgatctcctttacccagtgagtgttta

SEQ ID NO: 379950 - DNA, 201 bp, Homo sapiens
atatggaagggtgactgcaggacttgaatatgtacagatttgggtatatttgggaagggtcctggaaccaatccctcatgtacactgagggatgattatayactgtttaaggcatgttacctgttgaacagtgtttgttaggtagtaagcttagttgtaacttggattgaaaggtgagcttttttaaaagcatctgacctg

SEQ ID NO: 379951 - DNA, 201 bp, Homo sapiens
gtcttccatgtcagtgctgagaggaaaacttcagcttgtgggcactgctgctatgctgttagcctcgtaagtctaccttggtttgtttaaaagtgatcacraccttttgtctagggaagaaattgatttttttaatggtgaccttttaacatacaccaggcagagtcagtgactactttagggatggcaatgtgctggggc

SEQ ID NO: 379952 - DNA, 201 bp, Homo sapiens; identical to SEQ ID NO: 82424

SEQ ID NO: 379953 - DNA, 201 bp, Homo sapiens
ggactggtgattattatttgaagtcataggatttctaaaattatcaatactttaacattacattggattgaattttgaatattaaggtgcttctgtttttmattttaaataggaattacagattcatgagggaaatacgaactttctgataccagaatatcactgtattctagaagaggcagatcacctacaggaagaata

SEQ ID NO: 379954 - DNA, 201 bp, Homo sapiens
ggagggaaaatacaggatgaggatggaacaaaacactaaaatgattgatatgtttaaagatgaggctgtgagatattttttctagagttgctacagagccrttatcaaaggcaggaaaaaattaggttagaaggcagaggtttgacatttgaattctaaacgctcttgtgatcataaagtattttttattccagtttttgg

SEQ ID NO: 379955 - DNA, 201 bp, Homo sapiens
atattactttctggcatataagcagtgtctcttttattaagaagtaaaggctgggtgcggtggctcgcgcctgtaatcccagcactttgggaggccgaggygggcggatcacttgaggtcaggagtttgagaccagcctggccatcatggcgaaaccctgtctctactaaaaatacaaaaattagctgggcatggtgatgc

SEQ ID NO: 379956 - DNA, 201 bp, Homo sapiens
aaactgcaaagttgaaagtttagcaatggtgagttaactttcattttgttgaatggtgattctttggtaataattaggggtaagccctaattcctttgtamaggaacctagttcctttgtacagcagtggtgaagagatttagtattcagagggagattaatgctgcagtatggaagaaagcctactgctggcaaaagata

SEQ ID NO: 379957 - DNA, 201 bp, Homo sapiens; identical to SEQ ID NO: 82419

SEQ ID NO: 379958 - DNA, 201 bp, Homo sapiens
gcgaccctgtcgccttgaatgacgtcaaggccgcgagcgctttcattggtccatttcaatagtcgcgggatacttgaactgcaagaacagccgccgctccrgcgggctgctcgctgcatctctgggcgtctttggctcgccacgctgggcagtgcctgcctgcgcctttcgcaacctcctcggccctgcgtggtctcgagc

SEQ ID NO: 379959 - DNA, 201 bp, Homo sapiens
tgtctcatggaccttcaccagacctacctcaaagcaccacagcatgcacaacagtcaataagagaaaagtacaaaaattcaaagtaagaattaacttggasattgaagcttacttttctagattatggttcagagatctttgacattttaaccttattcatgaatctgccatagcctccttgagaagctgttctctaaatt

SEQ ID NO: 379960 - DNA, 201 bp, Homo sapiens
tgttaggtagtaagcttagttgtaacttggattgaaaggtgagcttttttaaaagcatctgacctgttgctggcagggaaagtagtagaaaatggatcgayggatggaataatggcctgagaaaactagtagttggaaaagttaaagattagtactggaatttaacataagcttaatgccaactatttactgtgtttggtg

SEQ ID NO: 379961 - DNA, 201 bp, Homo sapiens
tggaagggtgactgcaggacttgaatatgtacagatttgggtatatttgggaagggtcctggaaccaatccctcatgtacactgagggatgattatatacygtttaaggcatgttacctgttgaacagtgtttgttaggtagtaagcttagttgtaacttggattgaaaggtgagcttttttaaaagcatctgacctgttg

SEQ ID NO: 379962 - DNA, 201 bp, Homo sapiens
gggaaaatacaggatgaggatggaacaaaacactaaaatgattgatatgtttaaagatgaggctgtgagatattttttctagagttgctacagagccgttrtcaaaggcaggaaaaaattaggttagaaggcagaggtttgacatttgaattctaaacgctcttgtgatcataaagtattttttattccagtttttgggag

SEQ ID NO: 379963 - DNA, 201 bp, Homo sapiens
agcttgtgggcactgctgctatgctgttagcctcgtaagtctaccttggtttgtttaaaagtgatcacgaccttttgtctagggaagaaattgattttttwaatggtgaccttttaacatacaccaggcagagtcagtgactactttagggatggcaatgtgctggggcttagggcagtggaggaggatgaaactgttcta

SEQ ID NO: 379964 - DNA, 201 bp, Homo sapiens
aatattctacatattttgtcatgagaagctctttttagtttgaagaaataagtgctttgttaatatgagattccttccatggcagtcatttttagctattraactaaataggcaaacaattaatttaatcatatcttttgaattgtcccagagtcaccacatactatggacatgtcaattgtattagaagatgaaaagcca

SEQ ID NO: 379965 - DNA, 201 bp, Homo sapiens
aactgcaaagttgaaagtttagcaatggtgagttaactttcattttgttgaatggtgattctttggtaataattaggggtaagccctaattcctttgtaamggaacctagttcctttgtacagcagtggtgaagagatttagtattcagagggagattaatgctgcagtatggaagaaagcctactgctggcaaaagataa

SEQ ID NO: 379966 - DNA, 201 bp, Homo sapiens; identical to SEQ ID NO: 82423

SEQ ID NO: 379967 - DNA, 201 bp, Homo sapiens; identical to SEQ ID NO: 82422

SEQ ID NO: 379968 - DNA, 201 bp, Homo sapiens
tgcttttggcaaattccgccattttagccggatttgctctgttgctccaccctcgggcgacagtggtgaaccaacaatttttttgctgtctttcctaaacktgtcacgtattggcctgtcacccgacccttcttgtggccctgataagttttgcataattccacctagtgttatctattgatagcctttgtgggaatgcct

SEQ ID NO: 379969 - DNA, 201 bp, Homo sapiens
tggtttgtttaaaagtgatcacgaccttttgtctagggaagaaattgatttttttaatggtgaccttttaacatacaccaggcagagtcagtgactacttwagggatggcaatgtgctggggcttagggcagtggaggaggatgaaactgttctaatctagaacactaattttcccccaactggattccttgaacatgata

SEQ ID NO: 379970 - DNA, 201 bp, Homo sapiens; identical to SEQ ID NO: 82425

SEQ ID NO: 379971 - DNA, 201 bp, Homo sapiens
ggcagtcatttttagctattaaactaaataggcaaacaattaatttaatcatatcttttgaattgtcccagagtcaccacatactatggacatgtcaattrtattagaagatgaaaagccagtgagtgttaatgaagtaccagactaccatgaggatattcacacataccttagggaaatggaggtaaaggttctctgaat

SEQ ID NO: 379972 - DNA, 201 bp, Homo sapiens; identical to SEQ ID NO: 82426

SEQ ID NO: 379973 - DNA, 201 bp, Homo sapiens
taacttggatattgaagcttacttttctagattatggttcagagatctttgacattttaaccttattcatgaatctgccatagcctccttgagaagctgtyctctaaattggttatgtgtttgaagaaggttgtagttcatgctttctgccctgggtctgggggagaagagagaaggaagggggcatgcatgtgtgtttca

SEQ ID NO: 379974 - DNA, 201 bp, Homo sapiens
gaaaagtacaaaaattcaaagtaagaattaacttggatattgaagcttacttttctagattatggttcagagatctttgacattttaaccttattcatgaytctgccatagcctccttgagaagctgttctctaaattggttatgtgtttgaagaaggttgtagttcatgctttctgccctgggtctgggggagaagagag

SEQ ID NO: 379975 - DNA, 201 bp, Homo sapiens
gactcctggaactgcccaaattggagagggagtagaaaactcctggggtgatcttgaagactctgagaaggaagatgatgaaggcggtggtgatcaagctrtcattcttgatggtataaaaatggacactggagtagaagtctctgatattggaagccaaggtaggtgacactttatggcacacttattactatatattac

SEQ ID NO: 379976 - DNA, 201 bp, Homo sapiens
tcaagagggaccaatggttttctgggtccaggtaaactaatggctgaattaaaagccagggcatcttcacgctctattttttgagattcagctggcttctyctgagcttctttttctgcttcatccacatgaatggtgaacgcaggctgtttactgtttgctttccaaggaggaacggtgacatgctcatcatttacagga

SEQ ID NO: 379977 - DNA, 201 bp, Homo sapiens
aaataaggtaacaaatttctggtttatttcaaatgtatacatatactcaacacttatagaggtttgctctctggttttactctcatcttgccacatgactrtaaacaaaaagacatccctttttcattagagatccatctgttctgtgatttttttaccttgtgatttataaaaattaggacctaaatctataatataaac

SEQ ID NO: 379978 - DNA, 201 bp, Homo sapiens
aacaccatgaaggaaacgccactctcaaactgcgaacgccgcttcctactccgtgccatcgaagagaagaaggtatggtttggtgcccgcagaattgcgckctgcgtgggcgctcgggtgtcaaggtgtggactgatacctggcccgcctgggcccggggagctactaggggaacgaccggcacgttcaccccatccctca

SEQ ID NO: 379979 - DNA, 201 bp, Homo sapiens
tgagtgatttacatcttagaaaacaaaggcagtctttcattgttacagatttagtgtctctggtgggttgaggagagaaacaccatgatacctgtaagtasggaaaaaaaaagcatttttagtaaacactcactgggtaaaggagatcatggaataatgtttgtactcatgtattgggaactaaaaaatgctatttctgtc

SEQ ID NO: 379980 - DNA, 201 bp, Homo sapiens
cggagtacagtggtgtcattatagctcactgtaatcttaaactcctgggctcaagagatcctctctccttagcctcccgaatagctaggactataggcgcrtgccactccacccagctaactaaaaaacttttttttttttttttttgtagagatagggtcttgctgtgttgctcaggctggtctcgaactcctaggctaa

SEQ ID NO: 379981 - DNA, 201 bp, Homo sapiens
gactagagaaaacacaagttttagtgattgtaagtgtagagttttatcagaggaaaatgggccagcattgtccagtagaaataaaatgtgaaccatatatrtaattttcttattttcttcttttttttgagatgaggtctggctttgttgcccaatttggatttcagcagcgtgatttttgctcattacaacctctgcttt

SEQ ID NO: 379982 - DNA, 201 bp, Homo sapiens
tgtaatcttaaactcctgggctcaagagatcctctctccttagcctcccgaatagctaggactataggcgcatgccactccacccagctaactaaaaaacttttttttttttttttttgtagagatagggtcttgctgtgttgctcaggctggtctcgaactcctaggctaaagcagttctgccaccttgacctcccaaag

SEQ ID NO: 379983 - DNA, 201 bp, Homo sapiens
ttaatggtgctttcaaatgaaaacttgagccttaaattcctttagaaacaagggaagataaaaatatttcacacagtgttgtgcacaaggactagagaaamcacaagttttagtgattgtaagtgtagagttttatcagaggaaaatgggccagcattgtccagtagaaataaaatgtgaaccatatatgtaattttctta

SEQ ID NO: 379984 - DNA, 201 bp, Homo sapiens
actgcgtgttttaacagcaagaaaaaataatttgtacacaatgttacttttcctgataaatagccactggttgtaatcagttaggatttatttttattttraattcactatcaggtttggcaaatacgtgtagacctacatttattaaatcatgatggaaatattattgatgctgccagcattgctgcaatcgtggcctta

SEQ ID NO: 379985 - DNA, 201 bp, Homo sapiens
tttgggtctcactttctttatctgtaaaatagggaatgatgttattgccaacaccttgttgttataaggatataaatatattgcacagtgtctagcacacatttattaagtgtgcaataaatgttagtttctggtatcatcatcatcatctttaccagcatcacaagtactacccagattacccacagaaaaaggaagtta

SEQ ID NO: 379986 - DNA, 201 bp, Homo sapiens
caataaattgtgctgcattaggatattagaattttattttattttattttgttttatttttttgagatagagtctcactctgttgcccaggctggagtgcrgtggtgcaatctcagctcactgcaacctctgcctcccctgttcaagcgattctcccactcagctttccgagcagctggaactaccggcgcctgccaccac

SEQ ID NO: 379987 - DNA, 201 bp, Homo sapiens
gagatgcagtaaaatcgctggtgtgaaagtagcagaaattacagagctaatattgaaagctttggagaatgaccaaaaagtaaggtaagtaacttttccaraactaagtggtcttttattttcattttttaaatttttattattttttttagtataggcaagctttattatgcatgaacttgatttcacatacaaagttag

SEQ ID NO: 379988 - DNA, 201 bp, Homo sapiens
gaacactggcataaatgatagtgatatttttaattaaaaaaattttgtgtgtgtgtatgtatgtgggtgggttttaagggaatgagtttcttgaagatctkattcctccctgctgtctttttttttgtagtttctagactgaaacaaaaagcccatcccatatcataacatataatactgcctaaataaaactttctatga

SEQ ID NO: 379989 - DNA, 201 bp, Homo sapiens
gggtctcactttctttatctgtaaaatagggaatgatgttattgccaacaccttgttgttataaggatataaatatattgcacagtgtctagcacacatttattaagtgtgcaataaatgttagtttctggtatcatcatcatcatctttaccagcatcacaagtactacccagattacccacagaaaaaggaagttagtg

SEQ ID NO: 379990 - DNA, 201 bp, Homo sapiens
ttgggtctcactttctttatctgtaaaatagggaatgatgttattgccaacaccttgttgttataaggatataaatatattgcacagtgtctagcacacatttattaagtgtgcaataaatgttagtttctggtatcatcatcatcatctttaccagcatcacaagtactacccagattacccacagaaaaaggaagttag

SEQ ID NO: 379991 - DNA, 201 bp, Homo sapiens
cactctcaaactgcgaacgccgcttcctactccgtgccatcgaagagaagaaggtatggtttggtgcccgcagaattgcgcgctgcgtgggcgctcgggtstcaaggtgtggactgatacctggcccgcctgggcccggggagctactaggggaacgaccggcacgttcaccccatccctcaggctttatttatttttttt

SEQ ID NO: 379992 - DNA, 201 bp, Homo sapiens
tgggtctcactttctttatctgtaaaatagggaatgatgttattgccaacaccttgttgttataaggatataaatatattgcacagtgtctagcacacatttattaagtgtgcaataaatgttagtttctggtatcatcatcatcatctttaccagcatcacaagtactacccagattacccacagaaaaaggaagttagt

SEQ ID NO: 379993 - DNA, 201 bp, Homo sapiens
gccactgaaagaactcaaggatttaaatgaagaacttatcaaccaggagttctggtatgaaactgtactataaaaatgaattcatgttgctaaagaacttragtggttagtaccctgtaatccccttgccgattttgaaaattaatcatttctgtccactttcctccttcttcacaatttctctctccagaccatgtggag

SEQ ID NO: 379994 - DNA, 201 bp, Homo sapiens
ctgtcttctatccaatctgttaccttcctcccccttccttcccaccaaaaaaacccccacatacaggaaagaaggtggaaagtttggttttgcagagtctrtagcaaatcaaaggatcacagcatttaaaatggaaaaggcccctattgatacctcggatgtagaagaaaaagcagaagaaatcattgctgaagcagaacc

SEQ ID NO: 379995 - DNA, 201 bp, Homo sapiens
acccagctatatatcatattcacatgggagcttttagaaaatagatctccatatagcatacagtgtagatgattaaaagcttctttagtttgaattctagktctgcccccatactagctgatcttgggcaaatgattttatatctttgggtctcactttctttatctgtaaaatagggaatgatgttattgccaacacctt

SEQ ID NO: 379996 - DNA, 201 bp, Homo sapiens
tgatttcattgtaataactagagatacccacttagcattcatttgtgttcataaacacaataattttcttgtctctttccccatttcagtgacccaaatcygtaggctcagacctttattctctgttgactttattgatgccatcttttaaaaattcattacccaagaaatggtaagcattcggtctcagatttgttcagg

SEQ ID NO: 379997 - DNA, 201 bp, Homo sapiens
gtgtgtggcatacccagctaatttaaaaaaattttttttgtagagacagggtctcactttgttgcccaggctggtcccaaactcatgagctcaagtgatcytgcagtcctgacctcccaaagtgctgggattacaagcatgagccaccatgcctggcctcatatgtgtaatttaatattttccagtagtcacattaaaaag

SEQ ID NO: 379998 - DNA, 201 bp, Homo sapiens
agggatatctttcaaagtgctggcatcaaacccacttattgcaaaatgcatcacagatgggaatttaagtctgggtcaagtccagaattctaaaacaataragaggaaagaccctcctaagagcaagaggtcttcattaatccagactccaagatacaacacagggaacaggaaatggccctaaatggtcttttaatatat

SEQ ID NO: 379999 - DNA, 201 bp, Homo sapiens
aagctttggagaatgaccaaaaagtaaggtaagtaacttttccagaactaagtggtcttttattttcattttttaaatttttattattttttttagtatargcaagctttattatgcatgaacttgatttcacatacaaagttagaatggcaatttcaattaaaattgactcattaaaaagtgtaaataccatggtatagt

SEQ ID NO: 380000 - DNA, 201 bp, Homo sapiens
cagcccaagccatttcccatttttccgccgccgcgccttgatgacgtaattttcctgcgcctcggggcgagcagcggcgcgcaaggaaagatcgggttccrtttttcccgcggattctggtgcctgtggggccggtgacccaacaccatgaaggaaacgccactctcaaactgcgaacgccgcttcctactccgtgccatc

SEQ ID NO: 380001 - DNA, 201 bp, Homo sapiens
ataatttgtacttggccacaacttctgtattcagaaatgattgtaaaattaaaacctaagttaaaaactgtacaccatatactttgagtgatttacatctyagaaaacaaaggcagtctttcattgttacagatttagtgtctctggtgggttgaggagagaaacaccatgatacctgtaagtagggaaaaaaaaagcatt

SEQ ID NO: 380002 - DNA, 201 bp, Homo sapiens
ccaaaatgtgggtattaaaagtgtgagccaccacgcccagccccagaaataagagtttagaacgtctgatagaaataaattcatgtagaaataaattttgyaagagattgcttaacttttttttttttttttaaattaataaaaaaacaaagatgctcccataatactctcagatagtgaagaagaagaaatgatcatttt

SEQ ID NO: 380003 - DNA, 201 bp, Homo sapiens
tctcaaactgcgaacgccgcttcctactccgtgccatcgaagagaagaaggtatggtttggtgcccgcagaattgcgcgctgcgtgggcgctcgggtgtcmaggtgtggactgatacctggcccgcctgggcccggggagctactaggggaacgaccggcacgttcaccccatccctcaggctttatttattttttttcga

SEQ ID NO: 380004 - DNA, 201 bp, Homo sapiens
ttaaatctttttcttaagttgctttagtcataggagaacctaacagcagtgagcttttgttttaatacctggtgttatatttcatgacattagcccattcytattttctccttataggcagtcagatctcttggtgaagttgaatcgactcatggaaagatgtctaagaaattcgaagtgtatagacactgagtctctctg

SEQ ID NO: 380005 - DNA, 201 bp, Homo sapiens
gaaccaggatccttgatatgaatgaatgaggagggtcttaaatgtgcaggcaacttgtttttagtgaagttatgttgtagatggcaattgggtcgtttctraaaatttgtttgtaagactgaaactgcatatggtcaaaattgccctggaaatctcttaaccgttcctctgttgaaacatttgtcagtaagaacataccct

SEQ ID NO: 380006 - DNA, 201 bp, Homo sapiens
ttatttcaataatccaaaacttaacatactcttagtaaattcttactttgctttattcacagaacacagaccaccagtgcaaaacaagaaaaagcaccaastaaaaagccagtgaaaagaagaaaaaagaagagagctgccaattaaagctaacagttgtatatctgtatatataactattaaaagggatatttattccat

SEQ ID NO: 380007 - DNA, 201 bp, Homo sapiens
aaacacttcccttaatagtaaagcaccttgtatttcctttctttctttgtaagggcattagttggcaaagaactttctcagtagaagtaacaaaactcttwtactttgatgaagatacttcccaacatttttcttttcatgggatacttataaacttaggaatttactatggcatggtagtgttttatgtttcctaaggct

SEQ ID NO: 380008 - DNA, 201 bp, Homo sapiens
ctttggaacatattagatggagtagttctaggagtcggttacaaggggggatggttcacagactggaggaaaaaaatctaatgttcttaagttttccagcrttttcattacttaactgctaaatcctcctgtggcagaaaacttggagtttttcaggtccatttaatggtgctttcaaatgaaaacttgagccttaaattc

SEQ ID NO: 380009 - DNA, 201 bp, Homo sapiens
atggttcacagactggaggaaaaaaatctaatgttcttaagttttccagcgttttcattacttaactgctaaatcctcctgtggcagaaaacttggagttyttcaggtccatttaatggtgctttcaaatgaaaacttgagccttaaattcctttagaaacaagggaagataaaaatatttcacacagtgttgtgcacaag

SEQ ID NO: 380010 - DNA, 201 bp, Homo sapiens
ttgatacctcggatgtagaagaaaaagcagaagaaatcattgctgaagcagaacctccttcagaagtgtatctttatttggtggtttttgcagtaacaagrttcataacacttggcattataatattaggctatatgaaggatgtgtatactgaaattagtttttgtaaacactgtactttgttagagaaaacacttaaaa

SEQ ID NO: 380011 - DNA, 201 bp, Homo sapiens
agccatccatagtgtagctatattaagttttttttcccctaggaacttggggcacacttgaatcaatcttacaagaagaaaactttcattctcatcttcarcagttcatcaaatagcaatatttttgttactcagttttcttaacttgttaagtgtttctacacctgtgctatggactcctggaactgcccaaattggaga

SEQ ID NO: 380012 - DNA, 201 bp, Homo sapiens
acccttatgccgcctcattccagtgtttgttcatttaatctgctccaaatcctgcatctgcggctttccagggaccaatgtcaactcatctgtgaaattgsagaagtacatgtctagtctccaccccgtgagaggactgagcaaagggtgaagtgtgcgagcggtctactgataataatttctatcactctcatggttatt

SEQ ID NO: 380013 - DNA, 201 bp, Homo sapiens
aggacctaaatctataatataaacttcttggatgccagtcttactcatagctgacacattttagatcctactggaaaactaagaaatgcctcttatttcartaatccaaaacttaacatactcttagtaaattcttactttgctttattcacagaacacagaccaccagtgcaaaacaagaaaaagcaccaagtaaaaagc

SEQ ID NO: 380014 - DNA, 201 bp, Homo sapiens
gcatagcagcagtgcccacaagctgaagttttcctctcagcactgacatggaagacaggaacctatcaatgtagttcacagccaaatgcagggtctcattytgtagtttatattcttctcctacttcaactaaccagtccacgaggatagctctcatactgttagtgatgtctggctgtttcttcatgtaacccactttag

SEQ ID NO: 380015 - DNA, 201 bp, Homo sapiens
cttgcaaagttttccaaatcaatttattatcctgacagctggcatcattaatactttaacaaaaccacttaaaattagccaaatatctaagacagatacaratacaaaagatatacaaattaaaaccatttaaaaagtaatagataccataatttgtacttggccacaacttctgtattcagaaatgattgtaaaattaaa

SEQ ID NO: 380016 - DNA, 201 bp, Homo sapiens
attcagagaacctttacctccatttccctaaggtatgtgtgaatatcctcatggtagtctggtacttcattaacactcactggcttttcatcttctaatayaattgacatgtccatagtatgtggtgactctgggacaattcaaaagatatgattaaattaattgtttgcctatttagtttaatagctaaaaatgactgcc

SEQ ID NO: 380017 - DNA, 201 bp, Homo sapiens
ctcactgatactgtattccatgcactgtaaccaccttgatctcccaggtctcccagttcatctcctcaacttagagaccatcaggcttcacctttctcccytcctgatttgcagcctggaaaccctctctgcagttagctggggcaattgtgcagctcatcttgtttcttccatcttttaggatcactatcttcattgcct

SEQ ID NO: 380018 - DNA, 201 bp, Homo sapiens
agtttagctcataacccttctaagtattgtaccccacctcctgtgaattacgaaggtttttccacttggcctggtgagaacagaaactattcttgaccgtrtacaacttctatatatagttccctgtaatgctttcaaatgattctttaccatcattgaggaaagagctacacagagagaggatgcaggtagcttcctcat

SEQ ID NO: 380019 - DNA, 201 bp, Homo sapiens
aagataaagcctttgcctagttaaaaaaaaaaaaagaaactagagaaggatgctcactagcaccacttatatttaatattttcttgaaggatccataagtmcagtatgacaaaaataaattatacaagcaaaatgtttggaaaggaggcaataaaacttatttacaaatatgatcatgtttttgcatagaaacccctcaaa

SEQ ID NO: 380020 - DNA, 201 bp, Homo sapiens
cttattttccttctgtggtctaaactccagaattcttctagctcaccatggctataagagacttttacaggcaaaataaaattttataatattaataactrgggctttggcccaaattcctacatagattttgcatctggtgaactaactgaataccatgaaatgcaaggacatttagccttgtttaaacataagttttcc

SEQ ID NO: 380021 - DNA, 201 bp, Homo sapiens
agaaattgcggaggaagaattgaaaattatgataggagtgttggaaccaaagagagggttttcaagcctaagtaatgtagaagtagatgcctctaatgctyaggtttattccagaaatttattgtttgatgtatgaatgaaattataagttttcttacataagatactgccagtgtatcttatttcatattgttaaaatga

SEQ ID NO: 380022 - DNA, 201 bp, Homo sapiens
atctatatagttagggataaaatttgttttctcaaaagattgttatgaggattaaacgagttaattcatgtaatgctctcacagcaacacctggcacatartgagtgctcaagaagtggctgcacttgctgtggtgatgacgcagtagtggtgaaatggaaccgtaaagaaagaaaaagaaattgcggaggaagaattgaa

SEQ ID NO: 380023 - DNA, 201 bp, Homo sapiens
aaccagggcatctgcaaaccatgggcatcctactgagatgctatagggaagcaagggcattttgcctcttcaactctttcactaaaatctccaccatgtaktgctgtggagctagtctcagctctggattgctgcaagagcaaatgaaagccaagaactcttccctaccacggtaatgtttttcaaaagcatagtcagtag

SEQ ID NO: 380024 - DNA, 201 bp, Homo sapiens
aaataataaatctagagttactgttaagggttccatattcaaccccaaactgctagacatggcaaagaaaagaaataccaggaaaatgtgagtcatcatcrggaaaaatagtcaataaaacggactctgactgggctcagtgttggatttaatgaagacttcaaattggctatttagaatatattgaaagaattaaaggaa

SEQ ID NO: 380025 - DNA, 201 bp, Homo sapiens
atggcagtgttgtctttaacactatatggattagattttgaagattaataccagaattaccagaaatatatctaacctatttattatattcacttctagtkggagtttgagcaagtaaatatgcattgtaatacaaacatttccttttaaaactcttcaacaggactctgacttgaagaaaacagtggatgaaagtgcacg

SEQ ID NO: 380026 - DNA, 201 bp, Homo sapiens
gtttctcctgtcctttggtgactgtagttacatgtatattaggcccattgaagttgtcccatgggtcactgattagttcatttatttcagccttttttctstgtatttttcatgttggatgttttctattgttttgttttcaagtttactaatcttttcttttgcaatgtctaatctgctattaatcacacctagtgggta

SEQ ID NO: 380027 - DNA, 201 bp, Homo sapiens
ttgtgtttttagtagagacagagtgttgccatgttggccaggctagtcttgaactcctgacctcacatgatccacctgcctcggcctcccaaactgctggkattacaggcatgagccaccgcgcctgccctaaaaattattcttttaggataagaaatgaaaaaaaatttaacattttagtattaattaagaaattccttg

SEQ ID NO: 380028 - DNA, 201 bp, Homo sapiens
tagagacagtgtttcactatgttggccaggctggtcttgaactcctgacctcaggtgatctgcccacctcggcctcccaaagtgctgggattacaggcgtsagccatcatatcatgcccagcctcattgatcttttggaaggttttttgtgtctcagttttcttcagctcagctctaatttttgttatttctcatcttatt

SEQ ID NO: 380029 - DNA, 201 bp, Homo sapiens
gttcattatctgaagtactaaatacattgtcagttacaattaaatcagagtggtttgacaaggattttttaaattcagtggcaagtgatacaactatagtrtttttaattgtgctatgtgttttaggtatttgtgaagtgtcattttgattataatccatacaatgacaacctaataccttgcaaagaagcaggattgaag

SEQ ID NO: 380030 - DNA, 201 bp, Homo sapiens
aacactcggctttactcctactatgaaaggatgattagaattactttcggccgagggcggtggctcatgcctgtaatcccagcactttgggaggccgaggygggtggatcacgaggtcaggagatcaagaccatcctggctaacatggtgaaaccctgtctctactaaaaatacaaaaaattagccaggcttggtggcggg

SEQ ID NO: 380031 - DNA, 201 bp, Homo sapiens
acttaacactcggctttactcctactatgaaaggatgattagaattactttcggccgagggcggtggctcatgcctgtaatcccagcactttgggaggccraggcgggtggatcacgaggtcaggagatcaagaccatcctggctaacatggtgaaaccctgtctctactaaaaatacaaaaaattagccaggcttggtgg

SEQ ID NO: 380032 - DNA, 201 bp, Homo sapiens
tttgaacttaacactcggctttactcctactatgaaaggatgattagaattactttcggccgagggcggtggctcatgcctgtaatcccagcactttgggrggccgaggcgggtggatcacgaggtcaggagatcaagaccatcctggctaacatggtgaaaccctgtctctactaaaaatacaaaaaattagccaggctt

SEQ ID NO: 380033 - DNA, 201 bp, Homo sapiens
gttctttactcactagagaattccattctgatttacttacacttactcatctttttttttttttttttttcagagcaaagctcatcctttttgatataatrtatgcagaaacaaaatagaaattgagttctccattctctctgtctcatttctactttctgctcaaaaattcttttttatttttgagtattagtgagcctg

SEQ ID NO: 380034 - DNA, 201 bp, Homo sapiens
tgttctggatccctttgcaactctataagaattttagaatcagtttgtcaatttctataaacatgtcacttaggattccagtaggcattgcattgaatccrtagttcgttctggggagtattgccatcttaacagtgatgtcttctaatccataaacatttatttaaatctttaatttctttcaacaatgttttataattt

SEQ ID NO: 380035 - DNA, 201 bp, Homo sapiens
gctgcaagagcaaatgaaagccaagaactcttccctaccacggtaatgtttttcaaaagcatagtcagtagatgatctttatcagaatcgtttcaggtgcytggtaaaagtccagaatctgctatgggacataagtatctatgttttaaattttgagggccagagtgagttagaagtagccaattctgaagttcttcaact

SEQ ID NO: 380036 - DNA, 201 bp, Homo sapiens
tgttttaagaaagtactatatggaatgagaaggacagaacagggataagtattaagttatgtcctttaattcatagaacaagtgcaaacagcctttgatayatactaaagggtagcagaattctagttctaatattgtataaattggcttataattattcttttacacaggcactgaaagtattgaggacatcagagttta

SEQ ID NO: 380037 - DNA, 201 bp, Homo sapiens
ctgagatgtacaattcattaatttgattctaggctagccatgtaaaagagggaggaagcgctggtctcattccaagccagttcctggaagagaagagaaargcatttgttagaagagactgggacaattcaggtgatgagctcgacacaataagtaacaagcagtcctttgtgaccacctttctttgtctcttttgtctaa

SEQ ID NO: 380038 - DNA, 201 bp, Homo sapiens
actcctgacctcaggtgatctgcctgccttagcctcccaaagtgctgggattacaggtgctatattaacagtattaattcttccagtctatgagcatagaygtctctctgtttatttaggttttcattttaatgctgtttatggttttcattgtacaaatattatgctgcttttgtcacatttattcctgagtattttttt

SEQ ID NO: 380039 - DNA, 201 bp, Homo sapiens
aaactttgacaataatttcttcagacatttttttctatttttctgtttctcctgtcctttggtgactgtagttacatgtatattaggcccattgaagttgkcccatgggtcactgattagttcatttatttcagccttttttctctgtatttttcatgttggatgttttctattgttttgttttcaagtttactaatcttt

SEQ ID NO: 380040 - DNA, 201 bp, Homo sapiens
ttgatgtctttgttgtgaaatctttgaccattcctatggccaggatggtattgcgcaggttgtcttctggggtttttacatttaaatctttaatccatctmaagttgatttttgtgtactatataaagaaggggctgagcttcaatcttctgcatatggctagctggttatcccagcaccatttattgaatagggagtctt

SEQ ID NO: 380041 - DNA, 201 bp, Homo sapiens
aagcatagtcagtagatgatctttatcagaatcgtttcaggtgcttggtaaaagtccagaatctgctatgggacataagtatctatgttttaaattttgasggccagagtgagttagaagtagccaattctgaagttcttcaactttcttatagcttagatttccgggggctattcgtaattccatttgtttattaaggcc

SEQ ID NO: 380042 - DNA, 201 bp, Homo sapiens
tctcggcccactgcaagctctgccttctgggttcatgccattctcctgcttcagcctcctgagtagctgggactacaggcgcccgccatcacacccggctwattttttgtatttttagtagaaacggggtttcaccgtgttagccagtatggtctcgatctcctgacctcgtgatccatccgcctcggcctcctaaagtgc

SEQ ID NO: 380043 - DNA, 201 bp, Homo sapiens
caaatacattgttgtgaataaaactattatctattaaatcaattaggaataagaaaaataaaagattttattttaccttttttttctctagcactcgtctytatatcaacccaagttttgcacttacaccattttccttctttctgatgaatgtcttttaacatttcttgcaagacaggtgtagtagtaacaaatattctc

SEQ ID NO: 380044 - DNA, 201 bp, Homo sapiens
attctcctgcctcagcctctcaagtagctgggattacaggcacgcccagcttatttttgtattttcagtagtgactggtttcaccacgttggccagggtgrtctcaatctcctgaccttgtgatctgcccacgtcggcctcccaaaatgctaggattacaggtgtgagccaccgcatccagccaacagtctcttttaagtg

SEQ ID NO: 380045 - DNA, 201 bp, Homo sapiens
ttaaatacatttcataggactacagctgccatagatttcgattcctctaatggatctggataaagtaaattgcaagccttccagaaagggtttactattcyagatgccattaagaacatttgtgatgcatgggagaaggtcagaatatcaacattcacatgagttggggagaagttgagtccagctctcatggatgacttt

SEQ ID NO: 380046 - DNA, 201 bp, Homo sapiens
taagaacatttgtgatgcatgggagaaggtcagaatatcaacattcacatgagttggggagaagttgagtccagctctcatggatgactttgagggattcmagacttcagtggaggaagtcactttagatgacaagtgactttcacttagatgaaagatgacactttcttgactttagaagacaagaaaacaagaattaga

SEQ ID NO: 380047 - DNA, 201 bp, Homo sapiens
caatggcaaagtactgattttcttcttttgcattagactgtgtacctacttttcatgtaagttcttgacttcctttatctagtgcttttttgaaattttgktatttgttgcataagcctggtattttaagtctgtttccctagtcaactctggagtaatctctttaactcattgataagtatactttacaaccatttttat

SEQ ID NO: 380048 - DNA, 201 bp, Homo sapiens
atgttcaacctgtataaccttatgagttgtatcaatgtcatttatatttttcaggtaagaagatagatgtgtggttagattttttaaaaatactacattgrggaaaatgagattataattcagaatttagtttttactctatttaatcactccttttgccacacatgtcctcagcatttatactggagtgttttatgaagc

SEQ ID NO: 380049 - DNA, 201 bp, Homo sapiens
tttccaatggtgatagtcttttatgataaatattgagtgtcctcatcttctcatccttatctggcttgtattatatgttcagaaaattacaaatttacccrttttcattttttgtggcattttctagtctaattttttttttttttttttttttttgagacggagtctctgtcacccacgctggagtgcagtggcatgatc

SEQ ID NO: 380050 - DNA, 201 bp, Homo sapiens
tgtcttttgttgccattgcttttggtgttttagacatgaagtgcttgcccatgcctatgtcctgaatggtaatgcctaggttttcttctggggtttttatrgttttaggtctaacgtttaagtctttaatccatcttgaattgatttttgtataaggtgtaaggaagggatccagtttcagctttctacgtatggctagcc

SEQ ID NO: 380051 - DNA, 201 bp, Homo sapiens
gcttgcccatgcctatgtcctgaatggtaatgcctaggttttcttctggggtttttatagttttaggtctaacgtttaagtctttaatccatcttgaattratttttgtataaggtgtaaggaagggatccagtttcagctttctacgtatggctagccagtggtcccagcaccatttattaaatagggaatcctttcccc

SEQ ID NO: 380052 - DNA, 201 bp, Homo sapiens
tagccagtggtcccagcaccatttattaaatagggaatcctttccccattgcttgtttttctcaggtttgtcaaagatcagatagttgtagatatgtggcrttatttctgagggctctgttctgttccattgatctatatctctgttttggtaccagtcccatgctgttttggttactgtagccttgtagtatagtttgaa

SEQ ID NO: 380053 - DNA, 201 bp, Homo sapiens
actgaaatcctaaacaccccagggcagtcataacttcagtacctacttactagtttgttttttccccttcatattggctcacagggatattcttggggactttttttttttttttgaggggatgttttcagtattttattttgcatttttagatgttttgtgagagaattattttcagattttcaagggtaccttctttgc

SEQ ID NO: 380054 - DNA, 201 bp, Homo sapiens
acattcatctgctgtgcatgtctatcagagctcttgggtgacaaggtgagttgtcaatgagcagtaatattttgaaaggaatctttttttctgagcagtakgtctcaacagtggacttaataaattcagtaaaccttgttgtaaaccgaagtgctgtcatcaaggttttgttccatttatagtgcacagttagagtagatt

SEQ ID NO: 380055 - DNA, 201 bp, Homo sapiens
ttatacaaatcaatttaaatgttttttattttttagctagtaatcttttggaatggaggtcagtaaaaaaaaatgtaagccctatttttaaaaggttggamtatcttgtgagacaaagtagtctcagtttgccatcaccaaccaatccttagcattaagctcttgaaaacaactaggtagagaaattttccgtgaaggaat

SEQ ID NO: 380056 - DNA, 201 bp, Homo sapiens
aacattcaatttttttaaaaacagtatctgtgaagcacaataaaatgaagtgcagtaaaatgaggtatgcctgtagaaggttttagatattcaggtgagagatgatgagagagtgaactaaggcagtgacagtggagatagagaaaatgggatagtatttgagaaatatgccaagatttaaatcaaaagttcttcgtgaca

SEQ ID NO: 380057 - DNA, 201 bp, Homo sapiens
acattcaatttttttaaaaacagtatctgtgaagcacaataaaatgaagtgcagtaaaatgaggtatgcctgtagaaggttttagatattcaggtgagagatgatgagagagtgaactaaggcagtgacagtggagatagagaaaatgggatagtatttgagaaatatgccaagatttaaatcaaaagttcttcgtgacag

SEQ ID NO: 380058 - DNA, 201 bp, Homo sapiens
cattcaatttttttaaaaacagtatctgtgaagcacaataaaatgaagtgcagtaaaatgaggtatgcctgtagaaggttttagatattcaggtgagagatgatgagagagtgaactaaggcagtgacagtggagatagagaaaatgggatagtatttgagaaatatgccaagatttaaatcaaaagttcttcgtgacaga

SEQ ID NO: 380059 - DNA, 201 bp, Homo sapiens
ttttcccacatgaacagctcctgcttcgtggctactaattttgtggacataagatcaaattgggagggaatttgcaacttaataagtgcagaattaaccascctgtggcactaacccattggtttagggattagaccaattggtttttttcacatgggtaattgcattaaaatatgctattggccaagaagaactcacttg

SEQ ID NO: 380060 - DNA, 201 bp, Homo sapiens
atatatataaatatataaaaaatatataaaatacataatatataatatatataaatatatataaatatgtaaatatatattatatatttttaatatatataatatataatatatataatatataatatataatatataaatatatattaactatatataaatatatataaatatatataaatatatatatatttgaatgtc

SEQ ID NO: 380061 - DNA, 201 bp, Homo sapiens
gcttctatttctgaccaagcccccttttaacatggcattcctttaggtatattaatgcctttaagctattttgagtcaaatcctaggctaactttaacccyatctcttttaattgaattttagagtttccctggttttgtccagtatattttgggtttaattctcagtgagtactcttattgctaaaattcttaaaagtta

SEQ ID NO: 380062 - DNA, 201 bp, Homo sapiens
attaatgataataaatttttgtatattaggattttccatatacagaatcatatgatctgcaaatataaattgttttacttattgctttctagtctggatgscttttctttattttcttttttcttttttttttttttgcttaacagccctgtctagaacctctaatccaaagttgaataaaaatgccaaaagtgtacagcc

SEQ ID NO: 380063 - DNA, 201 bp, Homo sapiens
attttttaaaaatcttcagtacaactggcgttatgaacactgactaaacatttgataacattaaggaattactgttaatttgctaggtattgctaatttgwtactattgctaacagtattttggttatgttgtttaaaaggagtgctgatctttgagacatatacattgaaataggatttctggaatttgcttcaaagtta

SEQ ID NO: 380064 - DNA, 201 bp, Homo sapiens
agcttttggttttcatttacatggaatatcttttttcatctctttgctttccctctgtgtgtcttcacagttgaaatgagtttcttgtaggcaacatgtarttgactcttgttttttaaatccattcatccagtttatattttttaattggggaatccaatccgtttacagccaagggtgttgttgatatgtgaggactta

SEQ ID NO: 380065 - DNA, 201 bp, Homo sapiens
aggaattggatgatgttagtgatttactgtaatgactaatacacatttgtctctgactgtagggactaataaacatttgtctttgtttttgaaatacgtgratctttacttgtgaacttagatgttctctcccttgaagaaagcaggagataagctaacattgctttcattcccattgctgtgcttctatttctgaccaag

SEQ ID NO: 380066 - DNA, 201 bp, Homo sapiens
gtaatgagaagtactgccaaccacatttatgaccatatgttagggcatacaagtcacaaaaatttttaaaaatcaaaataatatcaagtatcttatctgascacaatgaaataaaactagaaaccagtaacaagagaaacataaaactgtacaaaaacatggaatttcaaccacatgatcctgaatgaccaatgaatgaag

SEQ ID NO: 380067 - DNA, 201 bp, Homo sapiens
ctgactaaatttatcagttccaagagtttttttggtagtcttttaggcttttctttattgtaagatcatgtcatatgtaaatagtaacaatttgacttctycctttccaatttggatgccctttatttcttatttgaagagagacaaggacattgtagtaaaagggtaaattaagcaacaggctaaatcaattataaatgc

SEQ ID NO: 380068 - DNA, 201 bp, Homo sapiens
  misc_feature (1)...(201): n = A,T,C or G
aagggggattattatcattagttattgttattcccaaataagttttctttatggcagtgaaagtgaacaagtaaaagacattgaaaaatttagtaattctntagctgtcttgaaatagtgctgcagtgctgttggcttgctgtctggtggcaagtgcttctctaaactattcagttcagaaatgttagaattaaatgccta

SEQ ID NO: 380069 - DNA, 201 bp, Homo sapiens
ttttaaagagaggacccttggaaatctttcagtttcttctatttgatctatttcattttttacttctttctttgataattgacattttcttagaaaatcayctacttgactagatttttaaaataaagttgttcattgtattcttaaaagagatttaaaaatctctatacctacagttattttctcatctcgtttctaatg

SEQ ID NO: 380070 - DNA, 201 bp, Homo sapiens
gtgaaaatagttgcatcaaaatttaatcttaagaaaatgaaatttcagtcagttcttttttctttatcatctcttggaaatgtactttacaaaataatgtkgctgctgtattgcaaaaaccttagaaatagtgcagatgacttttaagtgcttcctttaagaaaatacttaaaaataatgcatagaatgagattttgtttt

SEQ ID NO: 380071 - DNA, 201 bp, Homo sapiens
cctcccaagtatctgggactacaggcacattgccaccatgcccagctaactaatttatttatattttctttttgtagagatgaggtctttctctattgccyaggctggtctcaaattcctggccttaagccatcctcccacctcagcctcctgaaatgctggcattacaggtgtgaggcagcatggccaaccttagattta

SEQ ID NO: 380072 - DNA, 201 bp, Homo sapiens
ttttagaaacagtgtcttgctgttacctagtagcacagtcacagctcactataaccttgaactctttggctcaagtgattctgctgtctcagcctcccaartatctgggactacaggcacattgccaccatgcccagctaactaatttatttatattttctttttgtagagatgaggtctttctctattgcccaggctggt

SEQ ID NO: 380073 - DNA, 201 bp, Homo sapiens
aagggaattatggagaatcctattgtaaaatcacttgctaaggtatatagatttattcataagattactgaattattttggacttagtttttatagagatrttttcagatattactattttagaatttggttgatatacattaggtttagttagcaaataaaaacattcagcacataatgaaatcttaacatatgcaaaaa

SEQ ID NO: 380074 - DNA, 201 bp, Homo sapiens
agttgggagcatttcagatttttggattagagatgttcaacctgtataaccttatgagttgtatcaatgtcatttatatttttcaggtaagaagatagatstgtggttagattttttaaaaatactacattggggaaaatgagattataattcagaatttagtttttactctatttaatcactccttttgccacacatgtc

SEQ ID NO: 380075 - DNA, 201 bp, Homo sapiens
taagtaatcttttttgatcccgttctgccacctgctggtagagtatcaaaattcagtggcttaactcacctccaccctcttttgcttcctaggatgccacwttggggagataattctcccacccctgtaaaatactatagggcaattttttcatattctgatatactgcttaagttatatttgttttatcatccttcagga

SEQ ID NO: 380076 - DNA, 201 bp, Homo sapiens
taagctgcttggattccaaagctgttttatattttattttctgtggagtttttttcatgtgtgtcggggttgttgggttggggttgtttgttttgtcaggktggaaaggtgactccctccattacctttgggtgatagagaatgttattatgtatacatagctagttaaataaatctctgaacaattagccaacagaggct

SEQ ID NO: 380077 - DNA, 201 bp, Homo sapiens
ataagaagcagatcagatctggtcatagcctacagtttgctgcacccagtggaaaaacgttaagccaccctatgtattttagtctattttttatgccctamaatttctttgtacaaaaatctcaacactattttatttagttacttcacggaaaccaagggaagatgaaaaagatggccaggcatataagtttgtgtcacg

SEQ ID NO: 380078 - DNA, 201 bp, Homo sapiens
gggaacattactcatatgctggaataataggcataaaccagggcatctgcaaaccatgggcatcctactgagatgctatagggaagcaagggcattttgcstcttcaactctttcactaaaatctccaccatgtagtgctgtggagctagtctcagctctggattgctgcaagagcaaatgaaagccaagaactcttccct

SEQ ID NO: 380079 - DNA, 201 bp, Homo sapiens
aaatatataaaaaatatataaaatacataatatataatatatataaatatatataaatatgtaaatatatattatatatttttaatatatataatatataatatatataatatataatatataatatataaatatatattaactatatataaatatatataaatatatataaatatatatatatttgaatgtctactgtgt

SEQ ID NO: 380080 - DNA, 201 bp, Homo sapiens
aatatataaaaaatatataaaatacataatatataatatatataaatatatataaatatgtaaatatatattatatatttttaatatatataatatataatatatataatatataatatataatatataaatatatattaactatatataaatatatataaatatatataaatatatatatatttgaatgtctactgtgtg

SEQ ID NO: 380081 - DNA, 201 bp, Homo sapiens
ttttttttttttttatggagtcttgccctgtcacccaggctggagtggagtggtgtgatctgggctcactacaacttctgcctcctgggttccagtgattytcccgtcccagcctcccaagtagctgggattacaggtgtgcaccaccgcacctggctgttttttgtatttttagtagagtcgaggtttcatcatgttggc

SEQ ID NO: 380082 - DNA, 201 bp, Homo sapiens
ctgaacacacacatgatatatatgtgtatatatatgtgtatatatgtgtgtgtatatatacacgtgtatatatgtatgtgtatatatacatatatgtgtgtatatatacatatatgtgtgtgtatatatacatatatatgtgtgtatatatacatatatgtatgtatatgtatgcgtatgtatacacacacatatacatat

SEQ ID NO: 380083 - DNA, 201 bp, Homo sapiens
tgaacacacacatgatatatatgtgtatatatatgtgtatatatgtgtgtgtatatatacacgtgtatatatgtatgtgtatatatacatatatgtgtgtatatatacatatatgtgtgtgtatatatacatatatatgtgtgtatatatacatatatgtatgtatatgtatgcgtatgtatacacacacatatacatatg

SEQ ID NO: 380084 - DNA, 201 bp, Homo sapiens
tgcctggaaatcattcatatttttatacaaatcaatttaaatgttttttattttttagctagtaatcttttggaatggaggtcagtaaaaaaaaatgtaarccctatttttaaaaggttggactatcttgtgagacaaagtagtctcagtttgccatcaccaaccaatccttagcattaagctcttgaaaacaactaggta

SEQ ID NO: 380085 - DNA, 201 bp, Homo sapiens
cacacatgatatatatgtgtatatatatgtgtatatatgtgtgtgtatatatacacgtgtatatatgtatgtgtatatatacatatatgtgtgtatatatacatatatgtgtgtgtatatatacatatatatgtgtgtatatatacatatatgtatgtatatgtatgcgtatgtatacacacacatatacatatgtgtgtg

SEQ ID NO: 380086 - DNA, 201 bp, Homo sapiens
acacatgatatatatgtgtatatatatgtgtatatatgtgtgtgtatatatacacgtgtatatatgtatgtgtatatatacatatatgtgtgtatatatacatatatgtgtgtgtatatatacatatatatgtgtgtatatatacatatatgtatgtatatgtatgcgtatgtatacacacacatatacatatgtgtgtgt

SEQ ID NO: 380087 - DNA, 201 bp, Homo sapiens
ctggtgatatggtgagggctaatgtcagttgtttacaaattcttgaatgtttcagaacattttgttttagttctgtaatggcagagtttataaataatctrtagaatattactataaatactttattggtattaccagcttagtgcttgcgttacttttctaaaagaaacattgatttttttttcattaactgtaataaat

SEQ ID NO: 380088 - DNA, 201 bp, Homo sapiens
gatgtttgtgaaagggtaaaaagttaatgcacaacttatttgaacactaacttgcattgctttgtttttggctaaagtcataaacaaactgaaacagcagkcttcctcccccaaaaagagataccttttgagtggtatttagttacccctttccatcttctccattcccctttcttctaccccagtactggtaaagttgtt

SEQ ID NO: 380089 - DNA, 201 bp, Homo sapiens
ttcattgcaccagactggaaacctaggttcagtttccagtgaacttgccagtttttaaaaagcatcactaatatctcttcatatctcaaagaaggaatatratattgtttgatgataataaaactatatatttttatatctcttaaaaattatatatttatttgatcaacctgatatttgggaatttaataccatgtgcct

SEQ ID NO: 380090 - DNA, 201 bp, Homo sapiens
gattggtgattcatggtttattcatatttgtaactgaagagtctagattaaatctattaatttttctctagcccatgtaagaatcccatttatggctgggmgcggtagctcacgcctgtaatcccagcactttgggaggccgaggtgggcggatcaggaggtcaggggatggagaccatcctggctaacacggtgaaaccc

SEQ ID NO: 380091 - DNA, 201 bp, Homo sapiens
ccaacttccttattgtcttccttggccaacaggcatgtttttattagactactcttacaaagtaggggttagtcctataaggtctcagcttcatgtgggawggtctaagttgcatttttcatcttgaacaggccagggcctaaatggcagcttctgaactcctggttactgaaatcctaaacaccccagggcagtcataac

SEQ ID NO: 380092 - DNA, 201 bp, Homo sapiens
agttttctgtgactgctgtgacaaattgccacagacttagtggcttataaataaatgtattctcttacgattctgaaggccagacatttgaaatcagtatwattgggccaaaatcaaggtgtcaacagggacatttttcctccaaagaatctaagggagaacttacttgttgccttttccagtttctggtggcttctggca

SEQ ID NO: 380093 - DNA, 201 bp, Homo sapiens
agatatctcattaatacactgatttcctgtactttgaataaattcccagtagtggcattgctggatgatgtggtagttctatttgtagattttaaggaatmtccctactgtcctccattgtggctgtactagtttacatttccaccaatagtgtaaaagagttcctttttctccaaatccttggttaaatttattcttagg

SEQ ID NO: 380094 - DNA, 201 bp, Homo sapiens
gagaagatcagtttttgttttttgatttttaaatatttcaatgtaattagactacatcttttaccacatacatgtgtgtttatatacacatacatacacayatttatatacatatgtgtgaacctgtaatggatttttttaaatgttatatgtaaaggtttttttactcactgttcatcacaactttggagtctactccat

SEQ ID NO: 380095 - DNA, 201 bp, Homo sapiens
aatatagataaaatagaatagcatttatgtttttagtaaagtaggcatttaattaggtttttttttgtttcattttgtttttttgagatggggtcttgctrtgttgcccagactggttttgaatttgggcttaagcaatcctcctgcctcagcctcccaaagttctaggattataggaatgagccactgctcctggcctat

SEQ ID NO: 380096 - DNA, 201 bp, Homo sapiens
tctgatttgtcaacttcattttcttgaagatgtcactcctggagccttctaagctgaatacggactcattttctgaagctggtgtacacgtgtcaccgatmttcttagaaattatctttgcctttttcctgagttgggccttctagatcctgtattctctgtctccctctttatgttttgcttgtttcatgctttgagagc

SEQ ID NO: 380097 - DNA, 201 bp, Homo sapiens
agttgtatcaatgtcatttatatttttcaggtaagaagatagatgtgtggttagattttttaaaaatactacattggggaaaatgagattataattcagamtttagtttttactctatttaatcactccttttgccacacatgtcctcagcatttatactggagtgttttatgaagcaattcattattattattctaacat

SEQ ID NO: 380098 - DNA, 201 bp, Homo sapiens
tactagtggggtaactgggctccgagatcattaacaggcatgtttattatatggtttatcattggtaaagtggggtgttctgatgtttagtttctattacrtgttttttcctttttttcctgtctacttttttacttaatggaaattcaaaaatatatacaaaagagggaataaatgagtccctatgccgatcgcctagct

SEQ ID NO: 380099 - DNA, 201 bp, Homo sapiens
agtatgtgactggtttgtcagttgtcattcctgatcttttccaagaagtttgaggagagctgtggctgagatggcacgggtggagaactggaaagataacrcataatacagactactctttgaaaagtgtggtggggaaaaggagagagataaggctgtgacttaaaagagaaatgaggttccatatagggatttttaaaa

SEQ ID NO: 380100 - DNA, 201 bp, Homo sapiens
ttttcttcagtcacctccattgtgaccgaattgaagaaccagtttatcattggatctgttatgaattctaggtatttttgtaagtatatatataaagtatkattttgaaaacagaccctatcaatgaaatttattctaaaattacatagttttgggattcaaattagaacatttgataaaatatctcagtgattctataat

SEQ ID NO: 380101 - DNA, 201 bp, Homo sapiens
tattaggattttccatatacagaatcatatgatctgcaaatataaattgttttacttattgctttctagtctggatgccttttctttattttcttttttcttttttttttttttgcttaacagccctgtctagaacctctaatccaaagttgaataaaaatgccaaaagtgtacagccttatttttttccttattaggagt

SEQ ID NO: 380102 - DNA, 201 bp, Homo sapiens
caaaatagatagaccgctagccagactagtaaagaagaaaagagggaagaatcaaatagatacaataaaaaatggtaaaggggataccatcactgatcccrcagaaatataaactaccatcagaaaatactataaacacctctctgccaataaactagaaaatctaaaagaaatggataagtaattcgtggacacataaca

SEQ ID NO: 380103 - DNA, 201 bp, Homo sapiens
gggtaattttgactttcaagtcttagttaaatacatttcataggactacagctgccatagatttcgattcctctaatggatctggataaagtaaattgcargccttccagaaagggtttactattctagatgccattaagaacatttgtgatgcatgggagaaggtcagaatatcaacattcacatgagttggggagaagt

SEQ ID NO: 380104 - DNA, 201 bp, Homo sapiens
tcacaaccagaaatgcaggtaggttttaaatactttttgagaagtccaagtgaagtagctatatgtcatttagtgtggcataaactctgaatatacagctktaagtgagtgtaattcagattagtacctagttgcaaggggctgacatatgaacacatggtgcaatataatataaattatttaaaacccacattatatata

SEQ ID NO: 380105 - DNA, 201 bp, Homo sapiens
tgccacagccacccaagccttcagcaaccaccgccttgatcagtcagcagccatcagcatcaagacaagaccttacacaggcaaaaagattttgactctgkgaaggctctgatccttagcattttaacctttaaagtatttttaaattaagatatgtatattgtcttttagacatattgcagttgcacacttaatagatca

SEQ ID NO: 380106 - DNA, 201 bp, Homo sapiens
catcagcatcaagacaagaccttacacaggcaaaaagattttgactctgtgaaggctctgatccttagcattttaacctttaaagtatttttaaattaagrtatgtatattgtcttttagacatattgcagttgcacacttaatagatcaccttgtcatgtaaacataacttttatatacacagggaaacaaaaaaatttg

SEQ ID NO: 380107 - DNA, 201 bp, Homo sapiens
acttacaccattttccttctttctgatgaatgtcttttaacatttcttgcaagacaggtgtagtagtaacaaatattctcaatttttgttgaaaaagtcctttttttttttaacttttttatgataactttactggataggtaattccaggttggtggagtttttttttttttttttttctttcaacatttaaagatttca

SEQ ID NO: 380108 - DNA, 201 bp, Homo sapiens
tagtagtaacaaatattctcaatttttgttgaaaaagtcctttttttttttaacttttttatgataactttactggataggtaattccaggttggtggagtttttttttttttttttttctttcaacatttaaagatttcactctattctctgcttgcatgtttcctgaagagttcagtataattcttatgcttgctcctc

SEQ ID NO: 380109 - DNA, 201 bp, Homo sapiens
agatttcactctattctctgcttgcatgtttcctgaagagttcagtataattcttatgcttgctcctctgcaggtaaggttgccccccccccaccccgatstttcagtattttgttttttattttctgcagtttgaatataatatacctagacttagaattcggggtttttaatcctgcacagtgttctatgagtctcgtg

SEQ ID NO: 380110 - DNA, 201 bp, Homo sapiens
ccattcaccagtaatgtgaactcacgcaaatcacttcacctttttttgcatcagtttcttcgtccatagtgtgagtataatatacctacctttgctgaatmcacacacacacacacacacacacacactacttagaatatagtatccaacgcagaaaaaaaagcccttcaatagatgttaaggttctttccttcctttttt

SEQ ID NO: 380111 - DNA, 201 bp, Homo sapiens
ggttttctgtttttgttgtttctttttacataaatggaaaaattctatatagattcttcaggggttttattaaatagaactattccttggagatctttttrtggtagttactgtagagctttttttctttgtaattgctatatagtatgaatatatattcatttaaccactctccaattaatcaacattgaggttatttct

SEQ ID NO: 380112 - DNA, 201 bp, Homo sapiens
gaccaacttgcaaagggttgtatgtctctgaaagtattcaaagctgtaaaatatcagacaaaaggatctcctacttctaaattttgacttgagctattcartctcattttcccagaaataatatgtcaggtcagaggagaggaggttaatagaccataataataatgaggcgtctagctctaccactgaagtataaaatag

SEQ ID NO: 380113 - DNA, 201 bp, Homo sapiens
agacttagaattcggggtttttaatcctgcacagtgttctatgagtctcgtggatctgtggtttggtgtccatcattaatttaggaaaattctcagtttcrgattttgtagcattttggattttagatttttggattggggatactcaacctatattatgaatattgctgccataaacattcttggacacacttttatgta

SEQ ID NO: 380114 - DNA, 201 bp, Homo sapiens
ctcggctttactcctactatgaaaggatgattagaattactttcggccgagggcggtggctcatgcctgtaatcccagcactttgggaggccgaggcgggyggatcacgaggtcaggagatcaagaccatcctggctaacatggtgaaaccctgtctctactaaaaatacaaaaaattagccaggcttggtggcgggtacc

SEQ ID NO: 380115 - DNA, 201 bp, Homo sapiens
tacaaaaataaataaaatgccatatcctcagtgaacccactaattttgtgttagagatagacatgtaaattaaaatagttctcattattcaagatagttayggtgtataaagtctctgcaaatgcagaattatcaaatgctgagccgtgttgcttctaggggaaatgcagggttaggttcctgcaagcctttagtcacagt

SEQ ID NO: 380116 - DNA, 201 bp, Homo sapiens
ttgaggtaattatgtagtttttgtctttagttctgtttatgtgatgaatcacatttattgatttgcaaatgttgaacagaccttgcattctggggatgaascctacttgatcatggtggattagctttttgatgtgccgattgatttggtttgcaagtattttgttgaggattttgacattaatgtttgtcaaggatattg

SEQ ID NO: 380117 - DNA, 201 bp, Homo sapiens
ttggaatagcttttctgtaggaatggtaccatctcttatttgtacatctgatagcattcagctgtgaatccatcaggtcccaggctttttttggttgataractatttattactgattcaatttcggaggttgttattggtctatgcagggaatcaatttattcctggctcagtcttcggaggttgtatatgtctaggaat

SEQ ID NO: 380118 - DNA, 201 bp, Homo sapiens
tttcccacatgaacagctcctgcttcgtggctactaattttgtggacataagatcaaattgggagggaatttgcaacttaataagtgcagaattaaccagsctgtggcactaacccattggtttagggattagaccaattggtttttttcacatgggtaattgcattaaaatatgctattggccaagaagaactcacttgg

SEQ ID NO: 380119 - DNA, 201 bp, Homo sapiens
tctccctgcttccactcatgtcatgccacattttcactcaaggcccacagaggtctttccatctcgtaggggtcctccatgacttaccttgtttcccaacycttcacccattctggtcttctttcagtatcttgaacgtgccagggtcgtttccttcctctggattttgccctgctgtttcctctgcctgaatgctgacct

SEQ ID NO: 380120 - DNA, 201 bp, Homo sapiens
tcagtagtaacattcccttcatcatttctaattgtgtttatttggctctcctctcttttcttctttattagtctagctagtggcttgtctattaatttttycaaaaacccaactcctggattctgattttttgttgttgttgttgttgttttaatttaatttaattaatttttttttttttttgagatggagtcactgtgt

SEQ ID NO: 380121 - DNA, 201 bp, Homo sapiens
aaacctaagagcaattcttgactcattcattttcctcccttttcaaatcctggatgatgtaaaaagctaatcctgattattttatcaccaaaataaatttmcagtctggtgtcattttcatctcctctgtcaccatcataacctaggcaacccttctctctgacctggattcctgccatcagtctccctgcttccactcat

SEQ ID NO: 380122 - DNA, 201 bp, Homo sapiens
aattgtgtttatttggctctcctctcttttcttctttattagtctagctagtggcttgtctattaattttttcaaaaacccaactcctggattctgatttkttgttgttgttgttgttgttttaatttaatttaattaatttttttttttttttgagatggagtcactgtgttgtccaggctggagtgcagtggcacgatc

SEQ ID NO: 380123 - DNA, 201 bp, Homo sapiens
tgttgttttaatttaatttaattaatttttttttttttttgagatggagtcactgtgttgtccaggctggagtgcagtggcacgatctcggttctctgcarcctccacctcccaggttcaagcaattctcctgcctcagcctcccaagtagctgggactaggcagtcacgtgccgtgacacccagctaatttttgtatttt

SEQ ID NO: 380124 - DNA, 201 bp, Homo sapiens
aggagaatcacttgaacccaggaagtgggggttgcagtgagccgagatcacaccactgcactccagcctaggtgacagagtgagactctgtctcaaaaaaraaaaaaaaaaagcaattcctagaaagctagatcaaaaccacccatgctggtagcacatacatagtaagtataggaggtaaaaaaaatacgttatattcgg

SEQ ID NO: 380125 - DNA, 201 bp, Homo sapiens
aagtccgaggtagcctgaggcgtgtcctcccataaagaagtaaagaaactataacatgaaggcttccaaaagaacatccaaattgagactttttttttttwaaatgaaaaggggaacattactcatatgctggaataataggcataaaccagggcatctgcaaaccatgggcatcctactgagatgctatagggaagcaag

SEQ ID NO: 380126 - DNA, 201 bp, Homo sapiens
aaaagagaataacctcaatggagaatttgataaaattcaatgatttttaaaaaatgattagtaaattaggaacagaagggaaaagccttaattttattacaaaaaaaaaaatagaacaaacattattctgaattaactaatgttagaagctttccctttaaagtcagaaactggccttgcagctggtctgcctgagacctc

SEQ ID NO: 380127 - DNA, 201 bp, Homo sapiens
aaactaattgaatcgacaaaagcagtccttgcacgaaccagtgatataaacttaagaattatgattagtataattttggcctaggttagtagttagtagattttttttttttttttttttttttgagatagagtctagctctgtcacccaggttggagtgcagtggcgtgatcttggctcactgcagcagcgtgatcttgg

SEQ ID NO: 380128 - DNA, 201 bp, Homo sapiens
ttgatcttttgaaaggttttttggtattccatggtgtgtgtgtgtgtatatatatatatatcacattttctttatccaatctatcattgacaggcatttargttgatttgtgtctttgctgttgtgaatagtgctgcaatgaacatttgcatgcatgtctttatggtaggaagatttatattcctctgggtatatacccag

SEQ ID NO: 380129 - DNA, 201 bp, Homo sapiens
ttcctccactttttgctatatttcatctacattgcccttcattttgttcctcatcaatgccatggcttgctcctaacttagggcttttgcactatgttcaytctgttgggaactcttcctaaatcattacatgagtgactacttttcatcatttcatgttgtagttcaaatatcatcttttcagacaagcattgctaccta

SEQ ID NO: 380130 - DNA, 201 bp, Homo sapiens
aaattcaccatgacaaaccaaatgacatagggcgtcttgaggttttcaaggaattccgaggcaaaggcagtctctggattttcagagtttggaaattcccygcccgccctgccccccaaattctagtattttccccaaaataaaccctggtcttgtttaaaggattttttttttgttttttgttttttggttatttttatt

SEQ ID NO: 380131 - DNA, 201 bp, Homo sapiens
tttaataccatgtgccttggaaatttttagtactccattggaataatgaaataacaaagtacttttagtaacaaatttcatccacatatcataaataaccrcaggctattttgactccttatagtcactgttggaggcccatgatattgtggcatcaaagtgttatgattcacctccatcaagcccagaaatgaataattc

SEQ ID NO: 380132 - DNA, 201 bp, Homo sapiens
cctttctgtgtatttaggtcagttattcttttttaatgtttaaattgttgtgtcttcagcagtaggagcctattcaacttggcttctgagtctttttaacrtgattctagtaatgtctgataattccttgctttctgatatgacaagatgttccagattattctacatttcctggcccagacctggaaccagccatccaga

SEQ ID NO: 380133 - DNA, 201 bp, Homo sapiens
ccagaaatgaataattcttctatcaataatcagttattaccagtagatgccattcgtattcttggtattcacaaaagagctggggaaccactggtgagtayagataaatcagtaccctattaaatctgaaatatgacataatttgtggttcagtcactactctgtttcattttttttccttttcataatgttatgaaaact

SEQ ID NO: 380134 - DNA, 201 bp, Homo sapiens
tgtcctcaactcaagagtcctgtaggctcctttgggctcactctccccatcctactgcccagaaactctttcaagccaggaagctggggtaatcataagastcacttcatttgttttctgtctttctatgatctgtttttaataccttgatgtatagtgtcttaaaaagtgttgtttgatacattttgtccataaattaat

SEQ ID NO: 380135 - DNA, 201 bp, Homo sapiens
cattttagggccagttaatccccacaaataaggcaagacccatttggtactcctaccacagggcttgtgagtcatgagattttctgttctggctaaggggraataggtaccattcctgggtacctctaatcctttctggtggttctttctcagcttcaggtcgttgtaccaatgtgcaggttggtacttcagccgaatgct

SEQ ID NO: 380136 - DNA, 201 bp, Homo sapiens
gaggagaagatattgaagcatcccatgtagctaattttagtgttcatttcaccacagaggggaagttcttcctttatcatagtcatatagataagattaargcccacaactttgttaaccattaagctgtgaccattattaccaggtgtaataaagtcaaaagcctggtttctactttttcttttctgacagtatttaacc

SEQ ID NO: 380137 - DNA, 201 bp, Homo sapiens
atccaaaccctttaaacaaattggtctcctcttataaaaagcttttggaggagaagatattgaagcatcccatgtagctaattttagtgttcatttcaccrcagaggggaagttcttcctttatcatagtcatatagataagattaaagcccacaactttgttaaccattaagctgtgaccattattaccaggtgtaataa

SEQ ID NO: 380138 - DNA, 201 bp, Homo sapiens
gctgttttatattttattttctgtggagtttttttcatgtgtgtcggggttgttgggttggggttgtttgttttgtcagggtggaaaggtgactccctccrttacctttgggtgatagagaatgttattatgtatacatagctagttaaataaatctctgaacaattagccaacagaggcttgggtggcaatagaaactgt

SEQ ID NO: 380139 - DNA, 201 bp, Homo sapiens
ttgacatctggaatgtcaaaatgaattattttgcattctaggttaaatcaacactggaaaaattaaggtgtttaagcaagtctagtagctctatataagasagaatctttttttttctttaggccaactgttggatttttaaaaatgaatcatatttttaaacatttgagggagcagtttgcttctgagtctcattttagg

SEQ ID NO: 380140 - DNA, 201 bp, Homo sapiens
tggagtgcaatggcatgatctcggctcactgcagcctccacctcctggattcaagccattctcctgcctcagcctccccagtagctgggattacaggcacycaccatcctgcctggctaattttttttgtatttttagtagagacttgctttcaccatgttggccaggctggtttcgaactcctgacctcaggtgatctgc

SEQ ID NO: 380141 - DNA, 201 bp, Homo sapiens
aactaattgaatcgacaaaagcagtccttgcacgaaccagtgatataaacttaagaattatgattagtataattttggcctaggttagtagttagtagattttttttttttttttttttttttgagatagagtctagctctgtcacccaggttggagtgcagtggcgtgatcttggctcactgcagcagcgtgatcttggc

SEQ ID NO: 380142 - DNA, 201 bp, Homo sapiens
aaaaatagatttaagcaagaaaaattgtcttttaaaaattagaatgttttatttggactctgaaggatccactctatggtaaaaataacatctaaagtatkatagtttaggtatctgaaaaagtttagttgatactgttaccacttgaaatgtggatttttctttagcaatccttgaaatggatcttaaaatataagattt

SEQ ID NO: 380143 - DNA, 201 bp, Homo sapiens
acaggcattcctgtacacatcaccctggattttacctgcaagaaagaaggggatggggctgagtggcggtaaaaagaatgcaaagataaatatttgaaaayataaatgatgcttttatgaagcagaataggaaaggagccataagatgcaattaaagtgctacaggagttcaaaggagagcaattacactagtcccttctt

SEQ ID NO: 380144 - DNA, 201 bp, Homo sapiens
gttacaatgatttttcccacatgaacagctcctgcttcgtggctactaattttgtggacataagatcaaattgggagggaatttgcaacttaataagtgcrgaattaaccagcctgtggcactaacccattggtttagggattagaccaattggtttttttcacatgggtaattgcattaaaatatgctattggccaagaa

SEQ ID NO: 380145 - DNA, 201 bp, Homo sapiens
cgtgcttggccattttgattggctgccaggcatcaaaaattttaccttgttgggtgctggatatttttgtattagaaatattctttttttttcttccaacttttttttttttttgagacagagtctcgctctgttgccaggctggagtgcagtggcacgatctcggctcactgcaacccccacctcctgggttcaagtgat

SEQ ID NO: 380146 - DNA, 201 bp, Homo sapiens
aggagaggcaagtggggacgtttggactggccagctaacagaggaggatgtgaaggcccttatgctgtattaaggaattttgattctgtaggtgatgggaractattggatgattttagccaggggagaaacatggtcatatttgtattttggaaagctcacactgctttggtattgggtatagatgaagtaaggaaaata

SEQ ID NO: 380147 - DNA, 201 bp, Homo sapiens
atgttcgttcatagcaagtaaagcatcatttcttaaggtcttaatgtctatttgctcccctcttctcagatattgggaaatggaggttcactctatcagtkttgtttggttttggattaaaatctgtgtatatggaaagagatgtgtattatcactgtatttttccctccttttttcagaagatctgtttaatggtattct

SEQ ID NO: 380148 - DNA, 201 bp, Homo sapiens
taataatataatatgtctacttgtgttatttgaattttgttggttacagaagtatgataaacaaatagaaaaagaacattgttattttgactaattgtgtrctttcttattaaagtttacatgctgattaatgctaaggcaattctttagaagataacatttgaatttctataaatatatataaaacaagtctgttttaag

SEQ ID NO: 380149 - DNA, 201 bp, Homo sapiens
ttttttttccttcaacttttgttttaagttccggggtgcatgtacaggatgtgcgggtttgttacataggtgaatgtgtgccgtggtggtttgccgcacagatcaacccatcatctaggtatttagcccaacatccattagctattcttcctgatgctctctcttcctcgtgctcccaccctgacaggccccaatgtgtgt

SEQ ID NO: 380150 - DNA, 201 bp, Homo sapiens
atccatagcctataagtgcaacactttaaattgcatttaataaaatataattatactaaatctagtcatatctttaatggttttagagtcattacaaaatrgttagatcaaaggttgggttgatttttcagacaaattttcaaagttcaaagtaaaatcaggttaatctgagtttttgaccataacagtaatgttctaaaa

SEQ ID NO: 380151 - DNA, 201 bp, Homo sapiens
tcttgaacagccctttccccttctgtgacccaggaatctctggagttctgtttttctttatactacctgattttatatatatatgtgtatacagttttttsttgttttttaaactaaagacttgtttatccagtaagtcaggttctttttttttttcctggagacctctgtctcagaaccctctgtctttctgcttcaatg

SEQ ID NO: 380152 - DNA, 201 bp, Homo sapiens
tcttgtgcataagtcattttggatgtatctgcataacatagctgttgaatacattcccagacatggattactaggtcagagggtttatgcgtttgtaatcktgacagctattgccaaattgtcctcccaagaggttgaaccattcttccacaagcctattaggaaaatgcctattaacccacagttcttttgtagaatgtt

SEQ ID NO: 380153 - DNA, 201 bp, Homo sapiens
aaggtctacttcatgtgggagatataattaaagaagtcaatggccatgaggttggaaataatccaaaggaattacaagaattactgaaaaatattagtggragtgtcaccctaaaaatcttaccaagttatagagataccattactcctcaacaggttagtaataaaatttttggtagtattaaaaatactttcatgtttt

SEQ ID NO: 380154 - DNA, 201 bp, Homo sapiens
cttaatccagtctatcattgttggacatttggattggttccaagtctttgctattatgaataatgccgcaataaacatacgtgtgcatgtgtctttatagyagcatgatttatagtcctttgggtatatacccagtaatgggatggctgggtcaaatggtatttctagttctagatccttgaggaatcgccacactgactt

SEQ ID NO: 380155 - DNA, 201 bp, Homo sapiens
cctcccaagtagctgggattacaggcatgcgctaccaggcctggctaatttttgtatttttagtagagacggggtttcaccatgttggccagactggtctygaactcctgacctcaggcaatctgcccacctcggcctcccaaagtgctagaactacaggcgtgagccaccgtgcctggccaactcttagctaattatgct

SEQ ID NO: 380156 - DNA, 201 bp, Homo sapiens
atgtgttttaggtatttgtgaagtgtcattttgattataatccatacaatgacaacctaataccttgcaaagaagcaggattgaagttttccaaaggagarattcttcagattgtaaatagagaagatccaaattggtggcaggttagtatgcttctcagaagttcctcagctacttttctaattttaatcttagatctga

SEQ ID NO: 380157 - DNA, 201 bp, Homo sapiens
tgaacataaatgcaaaaatcctcaacaatattatcaaaccaaatccaacaacacatcaaaaagatcatacaacatgatcaagtgggattacagggatgcarcaatggttcaatatacacaaatcaataaatgtgactcatgaacagaatgaaaaataaaaaccacataatcatctcaatagatgcagaaaaagcgttttgt

SEQ ID NO: 380158 - DNA, 201 bp, Homo sapiens
aaaaagtttttcgcttttatcaaattcatatgtgcccaatatttttagcaagtagttcttaaagacatataatggggaaaaaaataaccccttctcttccyctgcctcacttatgaaaaacagtcacttttcattgtttttgctatttcttttggttgtgttccatatttcttaataatgtctttagtctgctgtttcctg

SEQ ID NO: 380159 - DNA, 201 bp, Homo sapiens; identical to SEQ ID NO: 82449

SEQ ID NO: 380160 - DNA, 201 bp, Homo sapiens; identical to SEQ ID NO: 82458

SEQ ID NO: 380161 - DNA, 201 bp, Homo sapiens
cattgctcattgacttggctgcatccctcaggagacagctcccagagagcaggacagaaccacggtcatgccccttcatgccccttcacacctctcgtgcytagtccagagtataagtccttgatccctgagtgaaatatggatttatgtggtgaggggcgatgaaaggaggggcctttggtcatggttgttaggaagtga

SEQ ID NO: 380162 - DNA, 201 bp, Homo sapiens
actcagtgcccataaatagagtgttcttggaacacaaccacacccattcccttgtgtgttgtctatggctgcatttcatctataatagcacggttggagtyggagttggcataaagtatgtcccctaaagcctaaaatacttattctctggacttttgcagaaaatgtttgccatcggctcctgtataggataagaaactg

SEQ ID NO: 380163 - DNA, 201 bp, Homo sapiens
gattagctggttgatcataaaaatggatgtcctggaatttgttcttcctttattcattctggacaagttttaaactaatgaagtaaattttgaaactaccrtacaaaagatgatgagtcctcttgatggagaatatttttactagctttgtaaatccctcagtccccaagccaggcctgtctcttacgcttcccttaatgt

SEQ ID NO: 380164 - DNA, 201 bp, Homo sapiens
atgccaaagactatcgagggttacatcagctcctctgggaatttatgaggaatacagaatcccaggcctctgctcaggcctcttgcattagaatctgcatytgtaactggctttccaagtgacttgcgtgcatatgcatgtttggaaagcactatgcctgatgactgtaacttgcagccacaagtccctcccaggaggaaa

SEQ ID NO: 380165 - DNA, 201 bp, Homo sapiens
atgtcatttctcagaaatattaagaaatagagaatcttcccagaggtcgcatgtcagggcaggtcacttaacttgtgggccacagagaccctgaccttccygtgggaaggcttcatggaggaattgccataaagctggggcacgcacgaatggcagtagtgtcaccagagcagggcattctgaacaagggaagcttgagac

SEQ ID NO: 380166 - DNA, 201 bp, Homo sapiens
atatttatttctcacagctctggaggctggaagttcaagatcaaggtgtcagcagaagtggttcttcatgaaaccccattccttgctcgcagagggccacrttttgcctgtgccttcacatggtggagagaatgagagagagagacagagtgagctctgttttatcttcctcttcttataaggacaccaatcttgtcagaa

SEQ ID NO: 380167 - DNA, 201 bp, Homo sapiens
aggagggacagagatgtaggtgttgatctcagcctaacctggcataccctgaacgaggcaccacctcttcagtcctcctggagctctccacattgtgcagstggcactgttgtcattgctcattgacttggctgcatccctcaggagacagctcccagagagcaggacagaaccacggtcatgccccttcatgccccttca

SEQ ID NO: 380168 - DNA, 201 bp, Homo sapiens
ccaggcgtactggagcagcctgctcctgccggcttctcacccccacacaagtctccttagctgcacacatttccgcagaagcactctctctgcattgtcaytgggtcatttggtgacatagaccactgggccctattcatttagacaaacccatgtgtttggtttaagattgtcatcacctgctcctttttcttgctttag

SEQ ID NO: 380169 - DNA, 201 bp, Homo sapiens
gtgggacttccttctgagcaatggccaagttttctccaagattgtgttcgaacatgatctttgctgtgaggtccttcgaggccctccctgaccctctgccrgctcccatctctttcctctgggctcttgagtttccacggctggatctatgtctactctgaggtctagtcattcattcctcccacgtgcatcttccacatt

SEQ ID NO: 380170 - DNA, 201 bp, Homo sapiens
gaagaatgataagacgtagtcaaaattgcatagccctcaaacctttgttgaaaactcatttgtctattttagggattcccaatacggtcagtccagctgartaactggcatattaatacaagcgctttgctgaatagatcctggtctgcttgtgcaaaagcactctggcatgaaaagaatgtagtagataattccttactt

SEQ ID NO: 380171 - DNA, 201 bp, Homo sapiens
gaggactgtggtaaggatgccttaattgttgagttttcatactcagaactctgacgttcagcactttttttttttttttttttttttttttttttgacggkgtctcgctcttgttgccctggctggagtgcagtggcgtgatcccagctcactgcaacctctgcctcctgggttcaagggattctcctatctcagcctcct

SEQ ID NO: 380172 - DNA, 201 bp, Homo sapiens
gtgtccgaattattgattacctgaatagaagctttatcagctattgggatatggaagtctgacggttacaaaaactgaaatttggtgggagttttctatgycagccccactctttaacagttcacacagtcacacctcctttgatccccatgacaatcccatgaggttggtgctgttaccatccccatatttcagatggga

SEQ ID NO: 380173 - DNA, 201 bp, Homo sapiens
gggagcctgcagttcagtctctggctcaacataacccaaagttaaatttcattatccaacataaaatattttctatgtgggagtttgattgtatcctgggwctatcatccattgggtagttttggatattgagctatactctcaattttaataaaactggctattgagcacgtttattgtctgccatgtacccggcattgc

SEQ ID NO: 380174 - DNA, 201 bp, Homo sapiens
tgcccacattggtgacaaaactttgtggttaatttttaacagtaatcactttggctaggaattttggattccgtggctcttggaaaattctcttgaaattytggattccaagagagccatgcatgatcaacccgtatgtttctcaatcctctaaagcattcatgttttagattgatcttatactatcttagaatttacgac

SEQ ID NO: 380175 - DNA, 201 bp, Homo sapiens
atagcaagggttagcatgctctgactagggaggcaaacctggcctggttgtatgcagccagctaaacatataaaatgattgcaaaaaataacaatagtaaraaggaaaataatatttaatgacacgtgaaaattatatgaaattcactcagtgcccataaatagagtgttcttggaacacaaccacacccattcccttgtg

SEQ ID NO: 380176 - DNA, 201 bp, Homo sapiens
gacctggttatgtttttttttttttttttttttcaagatagactgtcaattcacagttttatgtaaaatctactcactttcaagtgccagcagctaattcratattcctaaataacaccatgtgggccaaaccaaacatttctgtgtgtaagccttatatctgtcacacaggcctccaatgtatggcctctggtttccagg

SEQ ID NO: 380177 - DNA, 201 bp, Homo sapiens
tctgagtggaatcagagcagcaagtgcagtttgagagaccctatccaaggaaacagcctcttttccactaaaggctgtattcttccccctccccatcaagragacctcagcagcttagaagtttgatatatggtgctacttttaacctataaaatgttagatgcccacattggtgacaaaactttgtggttaatttttaac

SEQ ID NO: 380178 - DNA, 201 bp, Homo sapiens
ccttcatttctcctgccaatatctttgtttttccttctttctcactatgatttagaggaaggaatgcagttattaacagacaataactcatgttcacatgktttttttttcaattttgaaacacaaagcaatctatttctaattgtagctctgctatccttcttcttatctcataaagtatgaataagaccaaaatggttt

SEQ ID NO: 380179 - DNA, 201 bp, Homo sapiens
gtaagtgggggttgtagcccagatccagcacaggggctgcaggcgggacttcaggtctggtcttgccagacctggttatgtttttttttttttttttttttcaagatagactgtcaattcacagttttatgtaaaatctactcactttcaagtgccagcagctaattcgatattcctaaataacaccatgtgggccaaacc

SEQ ID NO: 380180 - DNA, 201 bp, Homo sapiens
cattaatgtgctgatgaccttgagaaggttgtgagaagcaggaagtcttgaaaactcagttcatcattggaacaatcacacacgcgtgtatatgtatatayacacacacacacacactcaaagagagacacaacaattatatgccacaggcccctcttgaaaggagatggaaccaggacttgatgagtgaaccttgctgag

SEQ ID NO: 380181 - DNA, 201 bp, Homo sapiens
cagaattgcaacccactgatgtacagcttctccccattcatcttcaggcctgtctccagcatgaaacatccttagcttcctctacccatggggaatgaagkctgtagctttttcagatcgttagaataatatctactgggccgtagtttgtcaatagttatgtgctactacaagaggtctagaaaaatgaatacattattc

SEQ ID NO: 380182 - DNA, 201 bp, Homo sapiens
tcaatttttagagtgtttttccttttaacataatacacattacatgtcttaagaaaatctgtttgaagagagggccctgatgttaattaataatttttttwaaaaaggagaaaagtcacaaatggggagtgactccactggggaaaagtaaaacatgaccagtgtcacgagatgacccgggtcccccttgtctgaatcttt

SEQ ID NO: 380183 - DNA, 201 bp, Homo sapiens
gagaagctggtgagaaattggcatcttgagatggcatcggaaaaagcaaagggttctttactttcctgtggttatgtctagaatgaagcctcaagcccccsccctgggtccccctaaaagttggagcatgtacttttcttattaaaataagaaattattttactggaaaaatcttgtgagggttggggggggggcctctga

SEQ ID NO: 380184 - DNA, 201 bp, Homo sapiens
acagcttctaaaagagtctttccaggttttggttagcccatctaactctttcagctgagtttgacagggatggacaacttcatgactaagcactcttaagwggaagcagttaattacaacagcagcatagatgaagattccttagtgaggcttattaagctgtgcttctagactgtggatcctctgtgatgccacagggta

SEQ ID NO: 380185 - DNA, 201 bp, Homo sapiens
gatttgaagagcatagaagtccagtgatgttttgtgacagggtggtcttcagcagcccctgagtaaaccccaacgcagccagaccactgagagtggtacaygccactccctctccctgcctcagcagagcttctgaggaccccaacacaacacctcatgatcttgagggaaagacatagaaactgtagtgttccaactaga

SEQ ID NO: 380186 - DNA, 201 bp, Homo sapiens; identical to SEQ ID NO: 82459

SEQ ID NO: 380187 - DNA, 201 bp, Homo sapiens
ctctcttcagactcacttaaaacccttctaagcagttggaaccaaacatcctatttagggaacacaaccttcccttcatagaaggattttttttttttttttgtgggagatgggcctctttctccttgtccatatctcccagccctgaactagggcttagttgaatgatcccacctggggcctggaatcttgaaagactag

SEQ ID NO: 380188 - DNA, 201 bp, Homo sapiens; identical to SEQ ID NO: 82461

SEQ ID NO: 380189 - DNA, 201 bp, Homo sapiens
agcaacaagagcaaaactccataaaaaaaaaaaaaaaatggcggtgacatctgccttgccttcctaccttacagtgtagggttgtagtgacaatagctgartatagtatgagaccacattatcaatagtaaagctttgtacaaatgaaggcttttttgcactttgtagtaatttcacttgtttatccctccaggcctattt

SEQ ID NO: 380190 - DNA, 201 bp, Homo sapiens
cctgcctcagcctcctgagtagctgggattacaggcgtgtgccaccacgcctggctaatttttgtatttttagtagagacagggtttcaccatgtttgacmggctggtcttgaactcttgacctcatgttctacccgccttggcctcccaaaagtgctgggattacaggcataagccaccgctcccagcctcctctaccct

SEQ ID NO: 380191 - DNA, 201 bp, Homo sapiens
aagtgacactgctgagatttaagttcaggactatatgcttcatcccaatgccagggctatttttcctctacttttttatttatttatttatttatttattttttgagatggagtctcgctctgttgcccaggctggagtgccatggtgtgatcttggctcactgcaaactctgcctcccaggttcaagcaattctcctgcc

SEQ ID NO: 380192 - DNA, 201 bp, Homo sapiens
acactgagaactgagcttttaagcatagcattttcctttgtcaattagttgactcagggcaattaaaacaatatcatgaatgtaggatttaaataccttayggatagttaaattcctggaatgtaagtacatgttgaaggtatgaagaactcagatctcttcttcatttgaagaaatgatgtaaaatatagtggagtcctc

SEQ ID NO: 380193 - DNA, 201 bp, Homo sapiens
gaagtgacactgctgagatttaagttcaggactatatgcttcatcccaatgccagggctatttttcctctacttttttatttatttatttatttatttattttttgagatggagtctcgctctgttgcccaggctggagtgccatggtgtgatcttggctcactgcaaactctgcctcccaggttcaagcaattctcctgc

SEQ ID NO: 380194 - DNA, 201 bp, Homo sapiens
tgaagtgacactgctgagatttaagttcaggactatatgcttcatcccaatgccagggctatttttcctctacttttttatttatttatttatttatttattttttgagatggagtctcgctctgttgcccaggctggagtgccatggtgtgatcttggctcactgcaaactctgcctcccaggttcaagcaattctcctg

SEQ ID NO: 380195 - DNA, 201 bp, Homo sapiens
gtgaagtgacactgctgagatttaagttcaggactatatgcttcatcccaatgccagggctatttttcctctacttttttatttatttatttatttatttattttttgagatggagtctcgctctgttgcccaggctggagtgccatggtgtgatcttggctcactgcaaactctgcctcccaggttcaagcaattctcct

SEQ ID NO: 380196 - DNA, 201 bp, Homo sapiens
aaccacggtcatgccccttcatgccccttcacacctctcgtgcctagtccagagtataagtccttgatccctgagtgaaatatggatttatgtggtgaggsgcgatgaaaggaggggcctttggtcatggttgttaggaagtgaaagtaccattatgataaacagaattatcagtctttgaggggaggcagatcttttcat

SEQ ID NO: 380197 - DNA, 201 bp, Homo sapiens
ctctcagacatgcagaggattcaaggaagcacagaaggctagaggaggagatattcgaatagtcctcctctttttcaaggaaaaagtggggccaattactstaacttatcccccactgcatagtaaatgtggtccaaggaagcttattaacattatgtggcctgacttacggtcctttctaccctaaactcttttcacccc

SEQ ID NO: 380198 - DNA, 201 bp, Homo sapiens
cctggagctctccacattgtgcaggtggcactgttgtcattgctcattgacttggctgcatccctcaggagacagctcccagagagcaggacagaaccacrgtcatgccccttcatgccccttcacacctctcgtgcctagtccagagtataagtccttgatccctgagtgaaatatggatttatgtggtgaggggcgatg

SEQ ID NO: 380199 - DNA, 201 bp, Homo sapiens
tctcccagttcagcaccctatttaccctggtgctttggccctttcgagcaaagaagactttgtggatatgcatcttatgtgtccgaattattgattacctraatagaagctttatcagctattgggatatggaagtctgacggttacaaaaactgaaatttggtgggagttttctatgccagccccactctttaacagttc

SEQ ID NO: 380200 - DNA, 201 bp, Homo sapiens
tctcttcagactcacttaaaacccttctaagcagttggaaccaaacatcctatttagggaacacaaccttcccttcatagaaggattttttttttttttttgtgggagatgggcctctttctccttgtccatatctcccagccctgaactagggcttagttgaatgatcccacctggggcctggaatcttgaaagactagc

SEQ ID NO: 380201 - DNA, 201 bp, Homo sapiens
caggacctctaggcatagcttccttcattaatgtgctgatgaccttgagaaggttgtgagaagcaggaagtcttgaaaactcagttcatcattggaacaaycacacacgcgtgtatatgtatatacacacacacacacacactcaaagagagacacaacaattatatgccacaggcccctcttgaaaggagatggaaccag

SEQ ID NO: 380202 - DNA, 201 bp, Homo sapiens
ctgccggcttctcacccccacacaagtctccttagctgcacacatttccgcagaagcactctctctgcattgtcactgggtcatttggtgacatagaccastgggccctattcatttagacaaacccatgtgtttggtttaagattgtcatcacctgctcctttttcttgctttagttcttaaggttctctgctaaaggca

SEQ ID NO: 380203 - DNA, 201 bp, Homo sapiens
agtataagtccttgatccctgagtgaaatatggatttatgtggtgaggggcgatgaaaggaggggcctttggtcatggttgttaggaagtgaaagtaccaytatgataaacagaattatcagtctttgaggggaggcagatcttttcattcggattgcctgagttcagattggcagctgtcctttgtcatctcatgaaggg

SEQ ID NO: 380204 - DNA, 201 bp, Homo sapiens
tcatgccccttcacacctctcgtgcctagtccagagtataagtccttgatccctgagtgaaatatggatttatgtggtgaggggcgatgaaaggaggggcmtttggtcatggttgttaggaagtgaaagtaccattatgataaacagaattatcagtctttgaggggaggcagatcttttcattcggattgcctgagttca

SEQ ID NO: 380205 - DNA, 201 bp, Homo sapiens
aaagtgaatgtcaacatttgttgaagattgacatgtataggcaatttcaagaaaataaatatttatgtaggtcttgaaatatcactgtcctctcataggckgacaggcacaaactaaacgtatttccaatttcattgtttctaaaatgacctgccaaggatgaaaatctgacaccactgtgaggtgctcttccatagctat

SEQ ID NO: 380206 - DNA, 201 bp, Homo sapiens
ggaaatacacacagtggaggaagtcccagccaaacagttttgctttactaattattctgaggaccatgtactagtcagctagggctgctatcatcaaatamcttgcaatggatggtttaaacaatagatatttatttctcacagctctggaggctggaagttcaagatcaaggtgtcagcagaagtggttcttcatgaaac

SEQ ID NO: 380207 - DNA, 201 bp, Homo sapiens
ctgtgccactgggaagtccaaattacaaaaccacaagaggaagttggctcccaatgcccacagtgtgtatgtaatataaaacaggttatactatatttagmtatgaatatatgtgtgcatacatttacacacacaaacacatatgtacttatacacatttttacatatacacataaaagatacacatggggtatacacatg

SEQ ID NO: 380208 - DNA, 201 bp, Homo sapiens
gccctccctgaccctctgccagctcccatctctttcctctgggctcttgagtttccacggctggatctatgtctactctgaggtctagtcattcattcctyccacgtgcatcttccacattataaggtgctccttgaggacagggacgggattatttcagtgtccccagggactcagtacaattttagaaacatcgtagat

SEQ ID NO: 380209 - DNA, 201 bp, Homo sapiens
aagttctgcaggatggctctcacattctaatttattaagcctcatcattagccactctctgttctgtatacatacctcataatctgacctcaggaccaccstttgttcccagataaatcaggaatgtgagcattcacacccctacgcatactgtttcctctgcgtagaacttttgtacgttctcccttttcttatcaggtt

SEQ ID NO: 380210 - DNA, 201 bp, Homo sapiens
aagctgtgggtcctgtagcctcatccacaccagcacctgccatggcctgtgctccccacagcatatcttagcataggctgaggctttccttgtaccccatytggctttttctcctactgccctgaatgaatgcttccgtgggacttccttctgagcaatggccaagttttctccaagattgtgttcgaacatgatctttgc

SEQ ID NO: 380211 - DNA, 201 bp, Homo sapiens
gggcctctttctccttgtccatatctcccagccctgaactagggcttagttgaatgatcccacctggggcctggaatcttgaaagactagctaaagggcasagggacattggagtgtttatttaccaccttggatcatggatcaagtggcgttggcagcagtatgcatgtcccaagctgtggtcccagaggtgccttttct

SEQ ID NO: 380212 - DNA, 201 bp, Homo sapiens
taccctctttctaaatttctagagagaacactgcagcctctcaagctgtgggtcctgtagcctcatccacaccagcacctgccatggcctgtgctccccayagcatatcttagcataggctgaggctttccttgtaccccatttggctttttctcctactgccctgaatgaatgcttccgtgggacttccttctgagcaat

SEQ ID NO: 380213 - DNA, 201 bp, Homo sapiens
agtgggtgcctgcgccttctccccgcccgcctgccccgggccatccagaaacttgctctacccgccgcgggtgctcggcagtgctgcccatggcccagccyaggagcctatttagggcgccggacgggctggacagaggcgcggctcaggtgagtgcggcgcgcgcggggtgggagagtggcaggacgcaggtgtagaggg

SEQ ID NO: 380214 - DNA, 201 bp, Homo sapiens
ccgctcctcctcccgctcctccccctcctcgggattgagcaccaaaacgcccgcctgcaaggtcctctgcgccctggcagccaggagtcgccgccacgacmgccgggtctcagtgggtgcctgcgccttctccccgcccgcctgccccgggccatccagaaacttgctctacccgccgcgggtgctcggcagtgctgccca

SEQ ID NO: 380215 - DNA, 201 bp, Homo sapiens
taaaatgttttttctataatattttacttaattccacctaagaaaacaagcactggtccctttcttcaagatagggaaattaggcccagagtgaaaaatascttcttcaagggcatgtaactaacccagaatgcaaacccaagataatttaaacatgattgctttgatctttctgccccatccatttatttctctgtttcc

SEQ ID NO: 380216 - DNA, 201 bp, Homo sapiens
tttgtgtctcacaatgggtaatgaaattcatactatggcaccaaagcactttgagctctttagaaaaagtaatcataccaacttagagcattaaaaccacmccgtattttgaaggactcatgatctgcactgtgcttggctgctggtggaagcttaaagacaccagtaattggcagaactttatcttagacttccatttga

SEQ ID NO: 380217 - DNA, 201 bp, Homo sapiens
atgcatcttcactcatgagctgggatggctctgtgtgtctttcatcctccctctgggaccatgggctagccagggcatattcttctcatggcaaagccaakagtgaaagagggtgagcaaaaacacacaaggcctcttgcagccaggctggggactgatacgttgtcacatctgctcatatgctagtagcaaggccaattc

SEQ ID NO: 380218 - DNA, 201 bp, Homo sapiens; identical to SEQ ID NO: 82472

SEQ ID NO: 380219 - DNA, 201 bp, Homo sapiens
ctattgctattggtggtggtgatagtggtgttatgtaataacctccagaccctgggtcaggccccaggctcacttctgggggagtagtggggactatggtrccttctgtgccttcaaggtgctctcaggctggtggggaagggagacaggcaaatagttttggggtctctgctaaacatccggatgtagggcaaccctgtg

SEQ ID NO: 380220 - DNA, 201 bp, Homo sapiens
cagggttgccacagatcttcaatttgtaacaaacacagtgtctgtggagtacactaaaatgaggtgtgcctgtactgacctaggttgttcaaggcagtgtrcactgccgggtagctattgctattggtggtggtgatagtggtgttatgtaataacctccagaccctgggtcaggccccaggctcacttctgggggagtag

SEQ ID NO: 380221 - DNA, 201 bp, Homo sapiens
gatcctgggcctcctttgtttcttcacttgccgcctggccaggccgctcaggtaggggaactcagctggcctgactccccctgcatcccgccaaattcccygccctaagctcgttcagcttccatttgttctcgtgagatggagcaagcggggcactcatttctcttactcttcatggtggggaaaccaaggcccggagag

SEQ ID NO: 380222 - DNA, 201 bp, Homo sapiens
tagcctggcagccactttgatgtcactctggggttgggtttctgcaagttccaggactggcccctggggaggcctcgtgggatgaggctgggccaagaacraggtgggggtagggactagggaagggcccccgtggggttggtgggggtgtggaactgagtggctttgaaccctttccatcccttctgagtcagctcaggc

SEQ ID NO: 380223 - DNA, 201 bp, Homo sapiens
accccaagctccagctccttggagtggcctctggccctttaaatctgagctgctggcctgcgggcctggggcagctggggtctggaaatgactgtggtcasggctgaagacagtggggagtagcctggcagccactttgatgtcactctggggttgggtttctgcaagttccaggactggcccctggggaggcctcgtggg

SEQ ID NO: 380224 - DNA, 201 bp, Homo sapiens
tggagcctctccctgcacgcattcagccttccaccgtgggagaggaggctctgggagtccctgcccttagctgcacgaatacagcagggccctagtgccayagccggaaaagccctgggtttgaatcctgatgctgccacttcctggctctgtggccttcgggggaaaaaaccaatttctgtgcccatttttttagttgga

SEQ ID NO: 380225 - DNA, 201 bp, Homo sapiens
ggctaagtttcgaaacaaattttatttgtatagacagggtcttgccatgttgtccaggctggtctcaaactcctggcatcaagtgatcctcccgcctcagmctcccaaagtgctgggattacaggcatgagccaccgcgcctggccagtcgcattttatggataggaaaactgggctcacagagtttaggtggcaggccct

SEQ ID NO: 380226 - DNA, 201 bp, Homo sapiens
caggcggctgctgttatgctcttggccctactttaaaaatagtcagaacttcaaacatggactcccaaggaaaacaaacagtcccgcgtccgtctgcccgcacacaccagctggtgggtaaaattagcctggtggtgactacagagccgtgaggcccggccccgctgtttgcccaggctgcggtgggctggctcccagctg

SEQ ID NO: 380227 - DNA, 201 bp, Homo sapiens
aggcggctgctgttatgctcttggccctactttaaaaatagtcagaacttcaaacatggactcccaaggaaaacaaacagtcccgcgtccgtctgcccgcacacaccagctggtgggtaaaattagcctggtggtgactacagagccgtgaggcccggccccgctgtttgcccaggctgcggtgggctggctcccagctgt

SEQ ID NO: 380228 - DNA, 201 bp, Homo sapiens
ggcatcttggaaccctgcagaagtgatggctcctgtctcttttaggtgatcatggggggtggccggaaatacatgtaccccaagaataaaactgatgtggrgtatgagagtgacgagaaagccaggggcacgaggctggacggcctggacctcgttgacacctggaagagcttcaaaccgagatacaaggtagcctgtgct

SEQ ID NO: 380229 - DNA, 201 bp, Homo sapiens
ctgtggataaagccaaacccgcccctcctgcaccccagggaaatctgtgggcattgtgaccaccacgagagtgaaccatgccacccccagcgccgcctacrcccactcggctgaccgggactggtactcagacaacgagatgccccctgaggccttgagccagggctgtaaggacatcgcctaccagctcatgcataacat

SEQ ID NO: 380230 - DNA, 201 bp, Homo sapiens
cctggaattaggcctgaaatctgctggctgtgcagggggattagcctcattgggcacaagaagaaactgaagctcagagaggggagtggcccgcggcatgyggcacaagtgacagcggtacggcccaggcaagtttgagccctggctgggaactgggacttaacagctcctgggctatggagcctgggacctggagtcagc

SEQ ID NO: 380231 - DNA, 201 bp, Homo sapiens
taggcctgaaatctgctggctgtgcagggggattagcctcattgggcacaagaagaaactgaagctcagagaggggagtggcccgcggcatgtggcacaastgacagcggtacggcccaggcaagtttgagccctggctgggaactgggacttaacagctcctgggctatggagcctgggacctggagtcagctctactgt

SEQ ID NO: 380232 - DNA, 201 bp, Homo sapiens
ttagcccaactgcctgtgaggcccagggttaggtgctggaatcacagatggatctgccctggattttgccttcaaagagtgtgtgtaggctgggctccgcrgctcacgcctgtagtcccagcactttgggaggccaaggccagtggatcacctgaggtcaggagttcgagaccagcctgaccaacatggtgaaacctcgtc

SEQ ID NO: 380233 - DNA, 201 bp, Homo sapiens
aaaagatctaccaggtgacccttttttagactgagtatcgctctgttccccaggctggagtgcagtggcgtgatctcggctcactacaacctccgcctccygggttccagagattctcctgcctcagcctcccatgtagctgggattacaggcacatgccaccacacccagctaatttttgtatttttagtagagacatgg

SEQ ID NO: 380234 - DNA, 201 bp, Homo sapiens
taaggcaggagaatcacttgaacccgggaggcagaggttgcagggagccgagatcgcaccactgcactccagcctggacaacagagtgagactctgtctcaaaaaaaaaaaagaaaagaaaagaaaaagaaaaaagaaaaaaaaaggaattgggggcctaattctgggcccacaaaaatcacccagataaggatcctccca

SEQ ID NO: 380235 - DNA, 201 bp, Homo sapiens
caggtaggggaactcagctggcctgactccccctgcatcccgccaaattccctgccctaagctcgttcagcttccatttgttctcgtgagatggagcaagmggggcactcatttctcttactcttcatggtggggaaaccaaggcccggagaggttgagccctggcgtcagcctgggcttaaatggcgcatagtcgaagac

SEQ ID NO: 380236 - DNA, 201 bp, Homo sapiens
tggagcggcctctcctggcgtgctcacctgggtgctggcgtcttggcacttgtcagggtggagagaggaggaagccagtcaagaaggggaaagacgggtgygggaggacattcactgattcaacaaacatctcattagcccaactgcctgtgaggcccagggttaggtgctggaatcacagatggatctgccctggatttt

SEQ ID NO: 380237 - DNA, 201 bp, Homo sapiens
aaaatgttgggattaacaggcggtgagccaccaggcctggcatatttttcagtttttaaagccatttcttttttctctttttttttttttttttttgagayggagtctcgccctgtcgcccaggatggagtgcagtggcttgatcttggctcactgcagcctcccaggttcaagtgattctcctgcctcagcctctggagt

SEQ ID NO: 380238 - DNA, 201 bp, Homo sapiens
gggaccccgggtctgctgagagggggctgctggaaacacggccctggtgtcaggatggagaagtccagctcttaaagggaactgactggtttgggggtgamgggagaggtccctttaggagaataggttgtggaaggagacgggtggcactgtagacactcccagcccagcaagctgctctcctttgggcatggagatgca

SEQ ID NO: 380239 - DNA, 201 bp, Homo sapiens
ggaccccgggtctgctgagagggggctgctggaaacacggccctggtgtcaggatggagaagtccagctcttaaagggaactgactggtttgggggtgaakggagaggtccctttaggagaataggttgtggaaggagacgggtggcactgtagacactcccagcccagcaagctgctctcctttgggcatggagatgcaa

SEQ ID NO: 380240 - DNA, 201 bp, Homo sapiens
ggctgctggaaacacggccctggtgtcaggatggagaagtccagctcttaaagggaactgactggtttgggggtgaagggagaggtccctttaggagaatrggttgtggaaggagacgggtggcactgtagacactcccagcccagcaagctgctctcctttgggcatggagatgcaagttaggttcagcaatccaggaag

SEQ ID NO: 380241 - DNA, 201 bp, Homo sapiens
gtcaggatggagaagtccagctcttaaagggaactgactggtttgggggtgaagggagaggtccctttaggagaataggttgtggaaggagacgggtggcrctgtagacactcccagcccagcaagctgctctcctttgggcatggagatgcaagttaggttcagcaatccaggaaggcttcctgggagaggaggcagatt

SEQ ID NO: 380242 - DNA, 201 bp, Homo sapiens
ggcatggagatgcaagttaggttcagcaatccaggaaggcttcctgggagaggaggcagatttctcccctttggtagtctttcttggggacctggccctgraggggcaagcagcccctcagcctcactgcccagaaaagcaaatccgcaggccccggctttcccacgctgtgtgctgatgttcccaggctctttcagcgcc

SEQ ID NO: 380243 - DNA, 201 bp, Homo sapiens
gagatgcaagttaggttcagcaatccaggaaggcttcctgggagaggaggcagatttctcccctttggtagtctttcttggggacctggccctgaaggggyaagcagcccctcagcctcactgcccagaaaagcaaatccgcaggccccggctttcccacgctgtgtgctgatgttcccaggctctttcagcgccggccag

SEQ ID NO: 380244 - DNA, 201 bp, Homo sapiens
ggaagtgtgaggaagtgataaagattccagaaaccttccagtgctaacagcccttgcccaccgcagttcctcatgttgccctgctaacatcggtatgtatmcacacacatgcacacacgtgaacatgtttgcacatatgctccccacgcatacacacatgctcagcgcctccgccttccagaggtgagcgtccgccagccc

SEQ ID NO: 380245 - DNA, 201 bp, Homo sapiens
cctccctcaccgaggcctttgccttggtgtcccaaggaggcagaattgaccacgggcaccatgaaggaaaagccaagcaggccctgcatgaggcggtggasatggaccgggccatcgggcaggcaggcagcttgacctcctcggaagacactctgaccgtggtcactgcggaccattcccacgtcttcacatttggtggat

SEQ ID NO: 380246 - DNA, 201 bp, Homo sapiens
tcatcatgttcctgggagatggtgaggcccaggggcctgtgggaggggtggaacaggacacctagctaggagccccgggagccaggctgagttgaaggggkctgtgttgaaggggctagggctctggaggaagggtgtttaaaaggatgaggggccaggctgtggattcaagaggcctgctctgccagacagccccctgag

SEQ ID NO: 380247 - DNA, 201 bp, Homo sapiens
aaagccaagcaggccctgcatgaggcggtggagatggaccgggccatcgggcaggcaggcagcttgacctcctcggaagacactctgaccgtggtcactgyggaccattcccacgtcttcacatttggtggatacaccccccgtggcaactctatctttggtaggtgggccttctttggggtggacactcctggggtctcc

SEQ ID NO: 380248 - DNA, 201 bp, Homo sapiens
ctggatgatggatggatgatggatggatggatggatggatggatggatggatgatggatggatggatgggtggatggatggatggatgggtggatggatgratgggagggacatgggtacaatgaaaactggggaatggttagttggaaataataaggtttagaaggtggcttcttggaggcattgcagggcccttcaaag

SEQ ID NO: 380249 - DNA, 201 bp, Homo sapiens
gatagtcagtgactaatcatttccttcccttggaggggataccagagagaggcggatggtgaggaggaggctgggccagggaataacctgcgtggacattsagtcaccctgagcacctattgtatgtaggcacctggcggggcatgcgtgaggcacagaggctgagtcagatggccaaggaaacatggaatgctgtgtgcc

SEQ ID NO: 380250 - DNA, 201 bp, Homo sapiens; identical to SEQ ID NO: 82499

SEQ ID NO: 380251 - DNA, 201 bp, Homo sapiens
gggccccagcatgacccctgaacaccccctccctgtgcaggtctggcccccatgctgagtgacacagacaagaagcccttcactgccatcctgtatggcartgggcctggctacaaggtggtgggcggtgaacgagagaatgtctccatggtggactatggtgagacctccaggacccagggctgggaggggacagggcac

SEQ ID NO: 380252 - DNA, 201 bp, Homo sapiens
tgaacaccccctccctgtgcaggtctggcccccatgctgagtgacacagacaagaagcccttcactgccatcctgtatggcaatgggcctggctacaaggyggtgggcggtgaacgagagaatgtctccatggtggactatggtgagacctccaggacccagggctgggaggggacagggcacccctcggggatgggcttg

SEQ ID NO: 380253 - DNA, 201 bp, Homo sapiens
gcaggctctcagcaggtgtttcccctggcccacagctcacaacaactaccaggcgcagtctgctgtgcccctgcgccacgagacccacggcggggaggacrtggccgtcttctccaagggccccatggcgcacctgctgcacggcgtccacgagcagaactacgtcccccacgtgatggcgtatgcagcctgcatcggggc

SEQ ID NO: 380254 - DNA, 201 bp, Homo sapiens; identical to SEQ ID NO: 82519

SEQ ID NO: 380255 - DNA, 201 bp, Homo sapiens; identical to SEQ ID NO: 82520

SEQ ID NO: 380256 - DNA, 201 bp, Homo sapiens
agcaggctgattggagaggcaggagcacgagagactgaggcccccactccccactgcagggatgggtgtctccacagtgacggctgcccgcatcctcaagrgtcagctccaccacaaccctggggaggagaccaggctggagatggacaagttccccttcgtggccctctccaaggtgagccccatccccaagcccagttc

SEQ ID NO: 380257 - DNA, 201 bp, Homo sapiens
  misc_feature (1)...(201): n = A,T,C or G
gaagagcttcaaaccgagatacaaggtagcctgtgctggggccatgtggctgcagaggtggcctgtgatggggagaggctgtgtgacccctgctctgaagntctgttgtcctctgtagaaagggcatcggaaatctttcctccatgggctcaaatggcctaagagatatacaagcagtagatagtcagtgactaatcattt

SEQ ID NO: 380258 - DNA, 201 bp, Homo sapiens
cgcggctcacgcctgtagtcccagcactttgggaggccaaggccagtggatcacctgaggtcaggagttcgagaccagcctgaccaacatggtgaaacctygtctctactaaaaatacaaaaattagccgggcatggtggcgcgtgcctgtaatcccagctactccggaggctgaggcaggagaattgcttgaacctggga

SEQ ID NO: 380259 - DNA, 201 bp, Homo sapiens
gcctcccaggttcaagctattctcctgcatcagcctctggagtagctgggactacaggcatgtaccaccatacctggctaatttttgtatttttagtagaratggggtttcaccatgttggccaggctggtctcaaactcctgacctcaggtgatctgcctgcctcggcctcccaaagtgctgggattacaggtgtgagct

SEQ ID NO: 380260 - DNA, 201 bp, Homo sapiens
gccactggggcgaaggcctggccatctcctgaccctcctctcccacctgcagacgtacaacaccaatgcccaggtccctgacagcgccggcaccgccaccrcctacctgtgtggggtgaaggccaatgagggcaccgtgggggtaagcgcagccactgagcgttcccggtgcaacaccacccaggggaacgaggtcacctc

SEQ ID NO: 380261 - DNA, 201 bp, Homo sapiens
ccttctgtagtttggtcaattcgacatttattccatttgtaagtgttctgttttttgctaaacctttaggatgttttcattgtgtgtacgtgttttttttytgttttgtttttttgtttttttgttttttttgagacagtcttgctctgtcacccaggctggagtgtagtggcacgatcactgctcatacagcctcaacct

SEQ ID NO: 380262 - DNA, 201 bp, Homo sapiens
tctgtagtttggtcaattcgacatttattccatttgtaagtgttctgttttttgctaaacctttaggatgttttcattgtgtgtacgtgttttttttttgttttgtttttttgtttttttgttttttttgagacagtcttgctctgtcacccaggctggagtgtagtggcacgatcactgctcatacagcctcaacctccc

SEQ ID NO: 380263 - DNA, 201 bp, Homo sapiens
ccctgggttgtcatgagcatgacatgaacttgtgttgtataagttatctgttgctgtataacaaattatctcaaaacttaggccaggtgcaggccgggtgyagtggctcatgcctgtaatcccagcactttgggaggccgaggtgggcggagcacaaggtcaggagatcgagaccatcctggctaacgaggtgaaacccca

SEQ ID NO: 380264 - DNA, 201 bp, Homo sapiens
ttagttggaaataataaggtttagaaggtggcttcttggaggcattgcagggcccttcaaagaagatcccaggggttaccaagccaccaaggagcctaatmtgggggctggggactgtactcctggggccccagcatgacccctgaacaccccctccctgtgcaggtctggcccccatgctgagtgacacagacaagaagc

SEQ ID NO: 380265 - DNA, 201 bp, Homo sapiens
catttattccatttgtaagtgttctgttttttgctaaacctttaggatgttttcattgtgtgtacgtgttttttttttgttttgtttttttgtttttttgktttttttgagacagtcttgctctgtcacccaggctggagtgtagtggcacgatcactgctcatacagcctcaacctccccaaataaagtgatcctcccac

SEQ ID NO: 380266 - DNA, 201 bp, Homo sapiens
ctgggcttaagcgatcctcctgccgtggcctcccaaggtgctgagatttacaggagtgacctattcaggcatgagattacatgcctgacctattcagtttytttttttttttttttttttgaggcggaatctcgctctgtcacccaggctggagtgcagtggtgtgatctcagctcaccgcaacctctgcctcctggattc

SEQ ID NO: 380267 - DNA, 201 bp, Homo sapiens
tgggcttaagcgatcctcctgccgtggcctcccaaggtgctgagatttacaggagtgacctattcaggcatgagattacatgcctgacctattcagtttctttttttttttttttttttgaggcggaatctcgctctgtcacccaggctggagtgcagtggtgtgatctcagctcaccgcaacctctgcctcctggattca

SEQ ID NO: 380268 - DNA, 201 bp, Homo sapiens
gacctattcagtttctttttttttttttttttttgaggcggaatctcgctctgtcacccaggctggagtgcagtggtgtgatctcagctcaccgcaacctstgcctcctggattcaagcaattctcctgcctcagcctcccaagtagctgggattacgggcatgtgccaccatgcctggctaatttttttttgtattttta

SEQ ID NO: 380269 - DNA, 201 bp, Homo sapiens
gaggcggaatctcgctctgtcacccaggctggagtgcagtggtgtgatctcagctcaccgcaacctctgcctcctggattcaagcaattctcctgcctcarcctcccaagtagctgggattacgggcatgtgccaccatgcctggctaatttttttttgtatttttagtagagatgagatttcaccatattggccagactg

SEQ ID NO: 380270 - DNA, 201 bp, Homo sapiens
gtggtgtgatctcagctcaccgcaacctctgcctcctggattcaagcaattctcctgcctcagcctcccaagtagctgggattacgggcatgtgccaccaygcctggctaatttttttttgtatttttagtagagatgagatttcaccatattggccagactggtctcggactcctgaccttgtgatccacccaccttgac

SEQ ID NO: 380271 - DNA, 201 bp, Homo sapiens
aatttttttttgtatttttagtagagatgagatttcaccatattggccagactggtctcggactcctgaccttgtgatccacccaccttgacctcccaaartgctgggattacagacgtgagcctccgctcccggccgacctattcagtttcttaatggtatgttttgataacaagaggttttcaattttgatgaagtcca

SEQ ID NO: 380272 - DNA, 201 bp, Homo sapiens
caccccgatctgtggataaagccaaacccgcccctcctgcaccccagggaaatctgtgggcattgtgaccaccacgagagtgaaccatgccacccccagcrccgcctacgcccactcggctgaccgggactggtactcagacaacgagatgccccctgaggccttgagccagggctgtaaggacatcgcctaccagctcat

SEQ ID NO: 380273 - DNA, 201 bp, Homo sapiens
ctcctgaccttgtgatccacccaccttgacctcccaaaatgctgggattacagacgtgagcctccgctcccggccgacctattcagtttcttaatggtatsttttgataacaagaggttttcaattttgatgaagtccaatttaccttttttttcttttatggaattagtattctttgcctaacccaaagtcatgaaaata

SEQ ID NO: 380274 - DNA, 201 bp, Homo sapiens
gataacaagaggttttcaattttgatgaagtccaatttaccttttttttcttttatggaattagtattctttgcctaacccaaagtcatgaaaatattatsgagtcagggccgggcgtcgtggctcatacatgtaatcccagcactttgggaggccgaggtgggcggatcacctgaggtcaggagttcgagaccagcctgg

SEQ ID NO: 380275 - DNA, 201 bp, Homo sapiens
atggagtttcattgtgttgcccaggctggtctcaaactcttgggctcaagtaatccacccgccttggcttcctagagtgctgggattacaggtgtgagccmccgcatctggtcctgttaatggtttttctttagaattcattgtgctatggctggtagtggcgtggggtgggattcggggagccatgcacttcttgccctt

SEQ ID NO: 380276 - DNA, 201 bp, Homo sapiens
tacaacaccaatgcccaggtccctgacagcgccggcaccgccaccgcctacctgtgtggggtgaaggccaatgagggcaccgtgggggtaagcgcagccamtgagcgttcccggtgcaacaccacccaggggaacgaggtcacctccatcctgcgctgggccaaggacgctggtgagtcgggggagcagtggggagcaggg

SEQ ID NO: 380277 - DNA, 201 bp, Homo sapiens
accaatgcccaggtccctgacagcgccggcaccgccaccgcctacctgtgtggggtgaaggccaatgagggcaccgtgggggtaagcgcagccactgagcrttcccggtgcaacaccacccaggggaacgaggtcacctccatcctgcgctgggccaaggacgctggtgagtcgggggagcagtggggagcagggccagct

SEQ ID NO: 380278 - DNA, 201 bp, Homo sapiens
aacccgcccctcctgcaccccagggaaatctgtgggcattgtgaccaccacgagagtgaaccatgccacccccagcgccgcctacgcccactcggctgacygggactggtactcagacaacgagatgccccctgaggccttgagccagggctgtaaggacatcgcctaccagctcatgcataacatcagggacattgacgt

SEQ ID NO: 380279 - DNA, 201 bp, Homo sapiens
gggaaatctgtgggcattgtgaccaccacgagagtgaaccatgccacccccagcgccgcctacgcccactcggctgaccgggactggtactcagacaacgrgatgccccctgaggccttgagccagggctgtaaggacatcgcctaccagctcatgcataacatcagggacattgacgtgagtgctcgggggcagccgggc

SEQ ID NO: 380280 - DNA, 201 bp, Homo sapiens
agagtgaaccatgccacccccagcgccgcctacgcccactcggctgaccgggactggtactcagacaacgagatgccccctgaggccttgagccagggctrtaaggacatcgcctaccagctcatgcataacatcagggacattgacgtgagtgctcgggggcagccgggcagggacggggtgaggcggggcctctggtgg

SEQ ID NO: 380281 - DNA, 201 bp, Homo sapiens
tcatctgaggccacagagtactggccagagaggagacatagatccccagaatttcagttggaaggcctttagaagctggctcggtcaactgggctcttggygcaccagggagactgaggcccagagaggagaagaggcttgcccagggtcacacaattgcttagggcagagtggactgggaattcagtctcctggccttaa

SEQ ID NO: 380282 - DNA, 201 bp, Homo sapiens
cccgatctgtggataaagccaaacccgcccctcctgcaccccagggaaatctgtgggcattgtgaccaccacgagagtgaaccatgccacccccagcgccrcctacgcccactcggctgaccgggactggtactcagacaacgagatgccccctgaggccttgagccagggctgtaaggacatcgcctaccagctcatgca

SEQ ID NO: 380283 - DNA, 201 bp, Homo sapiens
gtctcttttaggtgatcatggggggtggccggaaatacatgtaccccaagaataaaactgatgtggagtatgagagtgacgagaaagccaggggcacgagkctggacggcctggacctcgttgacacctggaagagcttcaaaccgagatacaaggtagcctgtgctggggccatgtggctgcagaggtggcctgtgatgg

SEQ ID NO: 380284 - DNA, 201 bp, Homo sapiens
gaataaaactgatgtggagtatgagagtgacgagaaagccaggggcacgaggctggacggcctggacctcgttgacacctggaagagcttcaaaccgagayacaaggtagcctgtgctggggccatgtggctgcagaggtggcctgtgatggggagaggctgtgtgacccctgctctgaagttctgttgtcctctgtagaa

SEQ ID NO: 380285 - DNA, 201 bp, Homo sapiens
cctggctacaaggtggtgggcggtgaacgagagaatgtctccatggtggactatggtgagacctccaggacccagggctgggaggggacagggcacccctyggggatgggcttgggaatagggtgtcagcttgtggtcaaggtcaggggtctcagaatgactggggcttgagtcccagtttgattgttgagtcccaggttg

SEQ ID NO: 380286 - DNA, 201 bp, Homo sapiens
gtgtcagaacaggctcaggttcaaatcccgtggccttaggcaaaatgactttcccacattgagcctccttttcctcttctgtgaaatgggagcattcaagscagcctggaagggagatggaaaagctgcgtgcgcagcgccaggcccctggcaggctctcagcaggtgtttcccctggcccacagctcacaacaactacca

SEQ ID NO: 380287 - DNA, 201 bp, Homo sapiens
gggtcacagcctctcagcatccacatcctcctggcgtcctcctcaggtctcttcgagccaggggacatgcagtacgagctgaacaggaacaacgtgacggwcccgtcactctccgagatggtggtggtggccatccagatcctgcggaagaaccccaaaggcttcttcttgctggtggaaggtagggaccccgggtctgct

SEQ ID NO: 380288 - DNA, 201 bp, Homo sapiens
gccaagcaggccctgcatgaggcggtggagatggaccgggccatcgggcaggcaggcagcttgacctcctcggaagacactctgaccgtggtcactgcggwccattcccacgtcttcacatttggtggatacaccccccgtggcaactctatctttggtaggtgggccttctttggggtggacactcctggggtctcctgt

SEQ ID NO: 380289 - DNA, 201 bp, Homo sapiens
ctggccagcaccttgatggtgggaaccacgcctgctttttaaccacttaatcctggaagtgacatacatcacttccgcccttagtgcattggcaagaaccrgtcctgtgatccttcctggatgcgaggaaagctaggaaatgccgtcttcgcttgggctaccgctgccaccaacaccaacacagcaggttctcatcctggg

SEQ ID NO: 380290 - DNA, 201 bp, Homo sapiens
ggagcagatcttcctcccctcctccctcaccgaggcctttgccttggtgtcccaaggaggcagaattgaccacgggcaccatgaaggaaaagccaagcagrccctgcatgaggcggtggagatggaccgggccatcgggcaggcaggcagcttgacctcctcggaagacactctgaccgtggtcactgcggaccattccca

SEQ ID NO: 380291 - DNA, 201 bp, Homo sapiens
gccctgcatgaggcggtggagatggaccgggccatcgggcaggcaggcagcttgacctcctcggaagacactctgaccgtggtcactgcggaccattcccrcgtcttcacatttggtggatacaccccccgtggcaactctatctttggtaggtgggccttctttggggtggacactcctggggtctcctgtctacccacc

SEQ ID NO: 380292 - DNA, 201 bp, Homo sapiens
tctcagcaggtgtttcccctggcccacagctcacaacaactaccaggcgcagtctgctgtgcccctgcgccacgagacccacggcggggaggacgtggccrtcttctccaagggccccatggcgcacctgctgcacggcgtccacgagcagaactacgtcccccacgtgatggcgtatgcagcctgcatcggggccaacct

SEQ ID NO: 380293 - DNA, 201 bp, Homo sapiens; identical to SEQ ID NO: 82516

SEQ ID NO: 380294 - DNA, 201 bp, Homo sapiens; identical to SEQ ID NO: 82523

SEQ ID NO: 380295 - DNA, 201 bp, Homo sapiens
accgcgaggctcagactggtgggaacagagggctgcctggcgcccaggaccctccaagctgggagtgtccaccaggcagcgccctcctgttagcaagggargtgttcctttaaggtcacagagccctcggctgctgggccaagcctccagccaggcccctgcactcacccggaggtgggaagcgggggcggaggctgcgag

SEQ ID NO: 380296 - DNA, 201 bp, Homo sapiens; identical to SEQ ID NO: 82535

SEQ ID NO: 380297 - DNA, 201 bp, Homo sapiens
ggaggcataaaaaggtggtgcagatggggtatgatgagggcagtgtctatgttttaaggtcccagaaccatccaaagtatttaagagctgaaaacagtgtwcagagcaggaaacctcagccctgctacttgcatgtgttagttggataggtcactcttttcccatatatatatatatatatacacacatacacatatatga

SEQ ID NO: 380298 - DNA, 201 bp, Homo sapiens
ggaagggtgtttaaaaggatgaggggccaggctgtggattcaagaggcctgctctgccagacagccccctgaggatctgggggtgaagggagagaggggcygctcactgacatttacagagccatgcccagtgccaactgcccgagcctgccttggtaccgaactagagagcttctgggtacccaagcaggctgattggag

SEQ ID NO: 380299 - DNA, 201 bp, Homo sapiens
tcatgagcatgacatgaacttgtgttgtataagttatctgttgctgtataacaaattatctcaaaacttaggccaggtgcaggccgggtgcagtggctcaygcctgtaatcccagcactttgggaggccgaggtgggcggagcacaaggtcaggagatcgagaccatcctggctaacgaggtgaaaccccatctctactaa

SEQ ID NO: 380300 - DNA, 201 bp, Homo sapiens; identical to SEQ ID NO: 82538

SEQ ID NO: 380301 - DNA, 201 bp, Homo sapiens; identical to SEQ ID NO: 82539

SEQ ID NO: 380302 - DNA, 201 bp, Homo sapiens; identical to SEQ ID NO: 82540

SEQ ID NO: 380303 - DNA, 201 bp, Homo sapiens
catttgttctcgtgagatggagcaagcggggcactcatttctcttactcttcatggtggggaaaccaaggcccggagaggttgagccctggcgtcagcctrggcttaaatggcgcatagtcgaagactagccaaaccctctgttgggtttcctaagctacaaaacgggggctcttcatccatattgtgagatcagggatgt

SEQ ID NO: 380304 - DNA, 201 bp, Homo sapiens
cctgggttgtcatgagcatgacatgaacttgtgttgtataagttatctgttgctgtataacaaattatctcaaaacttaggccaggtgcaggccgggtgcrgtggctcatgcctgtaatcccagcactttgggaggccgaggtgggcggagcacaaggtcaggagatcgagaccatcctggctaacgaggtgaaaccccat

SEQ ID NO: 380305 - DNA, 201 bp, Homo sapiens; identical to SEQ ID NO: 82543

SEQ ID NO: 380306 - DNA, 201 bp, Homo sapiens
aggagcctctgcgagggggaggggtcctaggggtggggccagcagggaggctctgggttctgaaggctttcccaggtccccaccctctccttgtcctgagyggaggctatgggagaaggcacctgcctccaggccaagcctatctcaatgcctatccctggggccaaaattcagagcatcccagcctgaactggtggcact

SEQ ID NO: 380307 - DNA, 201 bp, Homo sapiens
atccctggggccaaaattcagagcatcccagcctgaactggtggcacttatggaactgctaccatgtgcaagggctcgggatgcagagatgggtaagatgwtggtctttacgttcacagagcttcaggctagcagggaggagagacagaccaataaccggaagaataatcatgtggggctggatgagcctttcagtgctcc

SEQ ID NO: 380308 - DNA, 201 bp, Homo sapiens
tggtctttacgttcacagagcttcaggctagcagggaggagagacagaccaataaccggaagaataatcatgtggggctggatgagcctttcagtgctccygggtcactacacttttatttttctttattcgctcacctgttttggaccctcagtgcagagagagtgggatacgttatctcacttagcacatgacataccc

SEQ ID NO: 380309 - DNA, 201 bp, Homo sapiens
ccctatgctaatgtacttaatatggccttggagttgtaagtgtccttgtacgttacacagcattctgtccgtgggggtggtttgcacttacatacactgcrtttgattctttacattcatcactcagtcctctgcctttagaccccaccacgctgctgtttggacatctagttttaataccactgccacgcagacattgcc

SEQ ID NO: 380310 - DNA, 201 bp, Homo sapiens
ccagagccaaatattcagctgcctccttagtgtctccacttctaaaagacatctccaactcaacatatccaaaaacaagttcctgattgtctccacctcaygcctcaaaagaccaccccaaacgccgaaaggctgaatgcttttttctttttcttttttttttttttctgagatggagtctcactctgttgcccaggctgg

SEQ ID NO: 380311 - DNA, 201 bp, Homo sapiens
agtgcagcacatagacttgctttcattttgtcagtatcctttatagattgttcatgtaagctcccaaagagtagtatttattttattgaaataaaatgcaygtagagaaaaatgtgtgtatcatacattgacagctgaacccaccgtgtaaccagcacccacccacccagatcaatcataaaccgaaccgcaccagcaccc

SEQ ID NO: 380312 - DNA, 201 bp, Homo sapiens
tccctctcttagcttctggctaccctccctaccacgcatggtttatttgaatgaggcaaggccttaggatttttcgatttgtggatggcgaatagccagcrtgtctccttcctctctcctgccctgcacccacatcagacatcactagtcaaccactgcttgctttccttcccagattccttctaagtacagtgctccaga

SEQ ID NO: 380313 - DNA, 201 bp, Homo sapiens
cgtgatctcagctcactgcaaccttcgccacccaggttcaagtgatcctcctgcctcagcctcctgagtagctgggattacaggcgtgcgccgcaacaccyggctaattttttgtattcttattagagacggggtttcatcatgttggccaggctgatctcgaactcctgacctcaagtgatccacccgccttggcctccc

SEQ ID NO: 380314 - DNA, 201 bp, Homo sapiens
gtcttggcctggccccgaacaggcctctgacgccaaggagccagccagaaaccagcggtggtgagcacgggctcccccgggagcggtttcctttgtgagcraggccaggatgggccgcccaggctagctgctcccagagccacaacaaagggaggacacgccctgccagcctgccgggccaccgcgaggctcagactggtg

SEQ ID NO: 380315 - DNA, 201 bp, Homo sapiens
taagctgtgtgaccttgggcaagtgatttctcctctttctgcctcagtttcctcttctataaagtagggataatgatgctcccataaaatggagatagtgrtggggctggagacaacccctgggttgtcatgagcatgacatgaacttgtgttgtataagttatctgttgctgtataacaaattatctcaaaacttaggcc

SEQ ID NO: 380316 - DNA, 201 bp, Homo sapiens
tcccgtgtaggccccacatccctagaaaatcatgccttaagagtgggttttagagtcagtttcacctttaccattcagtggctacgtggtctgtgtgcctyggtgccctcatctgtaaagagggaataacaggaacaaccctggagggagagagcacaggagagccacctccaggaagcaggggctgggagggggggtgcg

SEQ ID NO: 380317 - DNA, 201 bp, Homo sapiens
tttctgcaagttccaggactggcccctggggaggcctcgtgggatgaggctgggccaagaacgaggtgggggtagggactagggaagggcccccgtggggwtggtgggggtgtggaactgagtggctttgaaccctttccatcccttctgagtcagctcaggctgggccagagccccctccaagctcaagccagagagaca

SEQ ID NO: 380318 - DNA, 201 bp, Homo sapiens
cgctgggtggcaggtgctattatccccacattacagatgaggaaacggaaacacaaactcccccagctgggaagtgagaagtagacatgtttgttccctgyggtgacccatccatccattcaaggctactgctttctccgtaatgcaaatgacataacccatcttcctagaagagtcagttccctatttatcttaaaacca

SEQ ID NO: 380319 - DNA, 201 bp, Homo sapiens
gccgccattctggtgagaaaatgtctcatctgaggcccatttcccctcctccactccttctgagcccttctatagctcctcttctttctctgcctcattcygctggtccctgccatgccactactaactaaaagtccatagactataagcccaacatgcacgtactaggcatggtgctcagtgccttgcctgtaattacta

SEQ ID NO: 380320 - DNA, 201 bp, Homo sapiens
cctgcatgaggcggtggagatggaccgggccatcgggcaggcaggcagcttgacctcctcggaagacactctgaccgtggtcactgcggaccattcccacrtcttcacatttggtggatacaccccccgtggcaactctatctttggtaggtgggccttctttggggtggacactcctggggtctcctgtctacccacctg

SEQ ID NO: 380321 - DNA, 201 bp, Homo sapiens
tcagtgggcagtgggcctggtcaaggctatggggtcctctctggttcctcacgccccagtccccatggtgtgagtgtaggcggggtgggtgccactggggmgaaggcctggccatctcctgaccctcctctcccacctgcagacgtacaacaccaatgcccaggtccctgacagcgccggcaccgccaccgcctacctgtg

SEQ ID NO: 380322 - DNA, 201 bp, Homo sapiens
gagcagggccagcttcgtggcctgtccaggcctcagtctttctgactgtgtcatgggaaggggctagaaaaggcttctctgtggggctcccagctctgatrtgctgggagtctgtaatatccatgggattccttccgtgacaggggaagctgagggtttggggttcactcagtggtgggttctggtcccagttcatttctc

SEQ ID NO: 380323 - DNA, 201 bp, Homo sapiens
  misc_feature (1)...(201): n = A,T,C or G
aatctttcctccatgggctcaaatggcctaagagatatacaagcagtagatagtcagtgactaatcatttccttcccttggaggggataccagagagaggnggatggtgaggaggaggctgggccagggaataacctgcgtggacattgagtcaccctgagcacctattgtatgtaggcacctggcggggcatgcgtgagg

SEQ ID NO: 380324 - DNA, 201 bp, Homo sapiens
ctgtggatagctacgggtgtcccatttcctggggcagaaactcttgtccaaaggcaccctgtcgggcagaagggccaaggtgctcccaattcccagtgggkactgcgtggggacatctgaaattgatgccctcagcagacacttccagaagagagagggtggacctggggctgtcgggatgagggtagtgggctgagggat

SEQ ID NO: 380325 - DNA, 201 bp, Homo sapiens
ccaaggtgctcccaattcccagtggggactgcgtggggacatctgaaattgatgccctcagcagacacttccagaagagagagggtggacctggggctgtygggatgagggtagtgggctgagggattggggtggtggtgacgtaaggggaggcctcttggggaggggcgtggggtgtgcttgggtccaaagctagaggtg

SEQ ID NO: 380326 - DNA, 201 bp, Homo sapiens
ccagcaatgtcatttaacaggggaagagactgaggctgagggaggtgacagagctagtacttggagcagctgggggttttttgtttgtttgtttttgagayggagtctagctctgtcacccaggctggagtgcagtggtatgatctcagctcactgcaacctccgcctcccgggttcaagcagttctcctgcctcagcctc

SEQ ID NO: 380327 - DNA, 201 bp, Homo sapiens
aaacattactctcttaattgtgctagcacaattcatttgctgccttagcagctcatctccctactgggtagaaggaatgagcatgggctttggagcgaaayccagccctgccagtgtctgcctgtgctgtgtggccttaggcaagttgctcgttgtctctgagccttggtttcttcattctgagatgtgaggagaagaccc

SEQ ID NO: 380328 - DNA, 201 bp, Homo sapiens
aagctcaacaccaacgtggctaagaatgtcatcatgttcctgggagatggtgaggcccaggggcctgtgggaggggtggaacaggacacctagctaggagmcccgggagccaggctgagttgaagggggctgtgttgaaggggctagggctctggaggaagggtgtttaaaaggatgaggggccaggctgtggattcaaga

SEQ ID NO: 380329 - DNA, 201 bp, Homo sapiens
gtgttcctttaaggtcacagagccctcggctgctgggccaagcctccagccaggcccctgcactcacccggaggtgggaagcgggggcggaggctgcgagrgttcaggcttcggcagggctttgtggaacctgccacaggcactgcccaggcactggggactttcactacctctgggagctccgtgctttctttttagagg

SEQ ID NO: 380330 - DNA, 201 bp, Homo sapiens
ccaggactggcccctggggaggcctcgtgggatgaggctgggccaagaacgaggtgggggtagggactagggaagggcccccgtggggttggtgggggtgyggaactgagtggctttgaaccctttccatcccttctgagtcagctcaggctgggccagagccccctccaagctcaagccagagagacaccagcctcagtt

SEQ ID NO: 380331 - DNA, 201 bp, Homo sapiens
ttttggggtctctgctaaacatccggatgtagggcaaccctgtgatggtggccgcagggcaggtggcagagaagtcggcgctggtcttggccccacccttsccttccccagtccccttccccctcactttcactaccctatccccagaccccccactccttcaagaaggcccctccctctcccttctccaggactcccctg

SEQ ID NO: 380332 - DNA, 201 bp, Homo sapiens
tggccgcagggcaggtggcagagaagtcggcgctggtcttggccccacccttcccttccccagtccccttccccctcactttcactaccctatccccagamcccccactccttcaagaaggcccctccctctcccttctccaggactcccctgctccccaacccctcgctggctcctgcagccccaggcccggagagaggc

SEQ ID NO: 380333 - DNA, 201 bp, Homo sapiens
tccctctcccttctccaggactcccctgctccccaacccctcgctggctcctgcagccccaggcccggagagaggcctccgctgaccccacctgagccccratcttccgccggacacttctctgtactttggagagctaaggtcctgccccagtgctgccagggtgcagggaatgatggcaggaagcaggcagctaggtag

SEQ ID NO: 380334 - DNA, 201 bp, Homo sapiens
cccctcgctggctcctgcagccccaggcccggagagaggcctccgctgaccccacctgagccccaatcttccgccggacacttctctgtactttggagagmtaaggtcctgccccagtgctgccagggtgcagggaatgatggcaggaagcaggcagctaggtagtcctgtggctctggggggcttcagtgggcagtgggc

SEQ ID NO: 380335 - DNA, 201 bp, Homo sapiens
ctcacctgccttcagccctccatgcactgccccccacaaatttctgggggctacttggcccctccacagtagagacccacgtctgcccttttcccagcatrgtggattaagtacccgctttcaggacacacagtgctgttggcccctttcactgaacagacatctgaggccaagccactcatcctggcttgccttcacccg

SEQ ID NO: 380336 - DNA, 201 bp, Homo sapiens
ctggcaagtcacctcacctctcctgtaaagttatgattataggaagccctcccactgggaaccgtggtgcagatacaatgaaataacatttgggaacagartgtagtgagtgtgaatcaaatagcagctgcacgcaatcccttcatctgcaaaagtataatgtgtctgtgtaatgtacatattgcagagagggcaaatggt

SEQ ID NO: 380337 - DNA, 201 bp, Homo sapiens
gtaattaaaaggctgaagaccgagtgctgtagaacagggcttctcaaggtgtggtccgcaaagcagcaaagcagcagcttctcctgggagcttattagaartacaatcggagcctcaccagtgggccgggaatctgttgtaacaagcccttgggggattcagatgcttgctctccttacagtttgagaaacactgcaccaa

SEQ ID NO: 380338 - DNA, 201 bp, Homo sapiens
cctgccttggtaccgaactagagagcttctgggtacccaagcaggctgattggagaggcaggagcacgagagactgaggcccccactccccactgcagggwtgggtgtctccacagtgacggctgcccgcatcctcaagggtcagctccaccacaaccctggggaggagaccaggctggagatggacaagttccccttcgt

SEQ ID NO: 380339 - DNA, 201 bp, Homo sapiens
catatccaagatctacaggctgaagactacagagtgctgataaaaccgaagaactctgactgaatgagtggagagacgtggtgtcttcatgactgggcaaytccatgtggtatagacgtaaaccctcccacattgatctgtggatttaataccatacctatcaaaaacacagtggtggaggacagatcagggatcgccagg

SEQ ID NO: 380340 - DNA, 201 bp, Homo sapiens
ccttggtaccgaactagagagcttctgggtacccaagcaggctgattggagaggcaggagcacgagagactgaggcccccactccccactgcagggatggktgtctccacagtgacggctgcccgcatcctcaagggtcagctccaccacaaccctggggaggagaccaggctggagatggacaagttccccttcgtggcc

SEQ ID NO: 380341 - DNA, 201 bp, Homo sapiens
gacttcagaaatgtgccctgtgtgggaagtggcattttgtgagcaccattgggtaccaggcactttcgcacattacctttgatactcacctaccccctacyctccagcattttgcagttaaggagactgaggctcagagggcagacaccttaggattactcctcccctaggtctctatgcctctctgctttgacccaggga

SEQ ID NO: 380342 - DNA, 201 bp, Homo sapiens
agagagcttctgggtacccaagcaggctgattggagaggcaggagcacgagagactgaggcccccactccccactgcagggatgggtgtctccacagtgayggctgcccgcatcctcaagggtcagctccaccacaaccctggggaggagaccaggctggagatggacaagttccccttcgtggccctctccaaggtgagc

SEQ ID NO: 380343 - DNA, 201 bp, Homo sapiens
agcccctgcagggaagagactcccttgacagcttccaccttaccccttgctccccaagagccctgtgcattggtgcgccacttcaccctgtgctccctaayagccctgtgcatcagtgcataaccacttctcagacaggaaacacgatcttgcactctgaacccacagctctctgttccaccccctttgctgggagccagg

SEQ ID NO: 380344 - DNA, 201 bp, Homo sapiens
gttcctcacgccccagtccccatggtgtgagtgtaggcggggtgggtgccactggggcgaaggcctggccatctcctgaccctcctctcccacctgcagaygtacaacaccaatgcccaggtccctgacagcgccggcaccgccaccgcctacctgtgtggggtgaaggccaatgagggcaccgtgggggtaagcgcagcc

SEQ ID NO: 380345 - DNA, 201 bp, Homo sapiens
caaaacatgtcagctaggcgaaggagcttttttcctgcttcggtggtcctcaggaagagtctgagggctctggaggtttgggggtgatagagcatctacckgtcaaggctcagcgagttgagcccagggtctagctggggacaggcatcgctgggtacttcattctaaagattgcacagcccctgcagggaagagactccc

SEQ ID NO: 380346 - DNA, 201 bp, Homo sapiens
tgtggggtgaaggccaatgagggcaccgtgggggtaagcgcagccactgagcgttcccggtgcaacaccacccaggggaacgaggtcacctccatcctgcrctgggccaaggacgctggtgagtcgggggagcagtggggagcagggccagcttcgtggcctgtccaggcctcagtctttctgactgtgtcatgggaaggg

SEQ ID NO: 380347 - DNA, 201 bp, Homo sapiens
ctttagcggggagggggaggggagggaggaggcctctgggacaccccgatctgtggataaagccaaacccgcccctcctgcaccccagggaaatctgtggkcattgtgaccaccacgagagtgaaccatgccacccccagcgccgcctacgcccactcggctgaccgggactggtactcagacaacgagatgccccctgag

SEQ ID NO: 380348 - DNA, 201 bp, Homo sapiens
ctacgcccactcggctgaccgggactggtactcagacaacgagatgccccctgaggccttgagccagggctgtaaggacatcgcctaccagctcatgcatracatcagggacattgacgtgagtgctcgggggcagccgggcagggacggggtgaggcggggcctctggtgggcaggaggcctcaggcccaggctggcccg

SEQ ID NO: 380349 - DNA, 201 bp, Homo sapiens
cgcccactcggctgaccgggactggtactcagacaacgagatgccccctgaggccttgagccagggctgtaaggacatcgcctaccagctcatgcataacwtcagggacattgacgtgagtgctcgggggcagccgggcagggacggggtgaggcggggcctctggtgggcaggaggcctcaggcccaggctggcccggag

SEQ ID NO: 380350 - DNA, 201 bp, Homo sapiens
cagggtgagaatatgggacacgtggacactagcccctcttccatagcctggcaacatctacaaaacatgtcagctaggcgaaggagcttttttcctgcttyggtggtcctcaggaagagtctgagggctctggaggtttgggggtgatagagcatctacctgtcaaggctcagcgagttgagcccagggtctagctgggga

SEQ ID NO: 380351 - DNA, 201 bp, Homo sapiens
gactccaggagtccaggttccaagccgaggtcactggggcttctgggcatcttggaaccctgcagaagtgatggctcctgtctcttttaggtgatcatggkgggtggccggaaatacatgtaccccaagaataaaactgatgtggagtatgagagtgacgagaaagccaggggcacgaggctggacggcctggacctcgtt

SEQ ID NO: 380352 - DNA, 201 bp, Homo sapiens
cgctggctcctgcagccccaggcccggagagaggcctccgctgaccccacctgagccccaatcttccgccggacacttctctgtactttggagagctaagrtcctgccccagtgctgccagggtgcagggaatgatggcaggaagcaggcagctaggtagtcctgtggctctggggggcttcagtgggcagtgggcctggt

SEQ ID NO: 380353 - DNA, 201 bp, Homo sapiens
ctattggtggtggtgatagtggtgttatgtaataacctccagaccctgggtcaggccccaggctcacttctgggggagtagtggggactatggtgccttcygtgccttcaaggtgctctcaggctggtggggaagggagacaggcaaatagttttggggtctctgctaaacatccggatgtagggcaaccctgtgatggtg

SEQ ID NO: 380354 - DNA, 201 bp, Homo sapiens
  misc_feature (1)...(201): n = A,T,C or G
ggctggacggcctggacctcgttgacacctggaagagcttcaaaccgagatacaaggtagcctgtgctggggccatgtggctgcagaggtggcctgtgatngggagaggctgtgtgacccctgctctgaagttctgttgtcctctgtagaaagggcatcggaaatctttcctccatgggctcaaatggcctaagagatata

SEQ ID NO: 380355 - DNA, 201 bp, Homo sapiens
ctcctgaccctcctctcccacctgcagacgtacaacaccaatgcccaggtccctgacagcgccggcaccgccaccgcctacctgtgtggggtgaaggccartgagggcaccgtgggggtaagcgcagccactgagcgttcccggtgcaacaccacccaggggaacgaggtcacctccatcctgcgctgggccaaggacgct

SEQ ID NO: 380356 - DNA, 201 bp, Homo sapiens
tttgtcagggacagcctgagcaggggacaggaacttgaaggaaattcgaggggagggaagatgtttcaggtgagggggtgggagatgaggagggggggccrcaggggccacgtcaaggggcacaagccagggagtgagtgaggacggaggacctgtgtgaggatccctttctttcctcctcttcctttctctcccagcccc

SEQ ID NO: 380357 - DNA, 201 bp, Homo sapiens
agccaaacagcaagtctgttatttgggagtttaatgagcccgtgtgaagtcgctgccgggctggaaacgatgaggctccctgcaggaagattgggggcttygttttccactctgaagatgccaagaggtcaggttctgtgggaacagttgtggggggcggggcaagggacccgtgacctggggtccccttctccttcttct

SEQ ID NO: 380358 - DNA, 201 bp, Homo sapiens
acaggtggccagggtttattgcagccttggtatgaagttgagtcagaatgtatcttaaatgcttagtgcctgacacacagggaacgctctgtaaatggtcygattcttattcgagtgggagttctgtggattccgggaagccaagtaaggtaagttatcagctcctccaatatccctagaagcgccaaaccaccgtcccaa

SEQ ID NO: 380359 - DNA, 201 bp, Homo sapiens
atctttcctccatgggctcaaatggcctaagagatatacaagcagtagatagtcagtgactaatcatttccttcccttggaggggataccagagagaggcrgatggtgaggaggaggctgggccagggaataacctgcgtggacattgagtcaccctgagcacctattgtatgtaggcacctggcggggcatgcgtgaggc

SEQ ID NO: 380360 - DNA, 201 bp, Homo sapiens
  misc_feature (1)...(201): n = A,T,C or G
taatcatttccttcccttggaggggataccagagagaggcggatggtgaggaggaggctgggccagggaataacctgcgtggacattgagtcaccctgagnacctattgtatgtaggcacctggcggggcatgcgtgaggcacagaggctgagtcagatggccaaggaaacatggaatgctgtgtgcctgcatgggggacg

SEQ ID NO: 380361 - DNA, 201 bp, Homo sapiens
gaggctgggccagggaataacctgcgtggacattgagtcaccctgagcacctattgtatgtaggcacctggcggggcatgcgtgaggcacagaggctgagycagatggccaaggaaacatggaatgctgtgtgcctgcatgggggacgcctggctctgcaggcgccctggggggacagatgacagggaggagccaagaagc

SEQ ID NO: 380362 - DNA, 201 bp, Homo sapiens
  misc_feature (1)...(201): n = A,T,C or G
gggtcctcagggagagatttttaagtgagggaaggaaacaagtaaaggcctcagactctgatagctgctggggtcagtccttccgactctccctagccccnggcatgtgctgacacagcccttcctcctagcactcccacttcatctggaaccgcacggaactcctgacccttgacccccacaatgtggactacctattgg

SEQ ID NO: 380363 - DNA, 201 bp, Homo sapiens
tcccgttcccgactgtttccatagaacctagcacagagatactcagcaggtgctctgtaggtgtttgggagtgaggaatgaatgaacaaagttgaatgaasaagcatcgggccctcccccggggctcaaatgggagagaggagcttcgtagcctgctccccctcccaccccagcaccccgtttcatcccttctgactaatc

SEQ ID NO: 380364 - DNA, 201 bp, Homo sapiens
ctcagcctcctcctcctggggctgatcctgggcctcctttgtttcttcacttgccgcctggccaggccgctcaggtaggggaactcagctggcctgactcsccctgcatcccgccaaattccctgccctaagctcgttcagcttccatttgttctcgtgagatggagcaagcggggcactcatttctcttactcttcatgg

SEQ ID NO: 380365 - DNA, 201 bp, Homo sapiens
gagccttactataatccccagcactggcccactgccctctagggaagtccttccttggatctgacctgcagcccactctgaaaccaccacacattcctgcrcaagcacttcatccagctcttcatgacagccataaataacttcctccagtaatgaatacagtcctggccagcaaggcttgccagagatgctgggcttggc

SEQ ID NO: 380366 - DNA, 201 bp, Homo sapiens
aggggagtggggagagccgggattggccaatgccctgtcttgaggatgagttgaaggaggggattatgggtgggggtggccagggtgcgcccacctggccrggggcagagccaggtcttgaatgccaggtcttgaatctgggatcctcccctccctgccactgcaagccccaagtgagttgcactgcagggctggctacaa

SEQ ID NO: 380367 - DNA, 201 bp, Homo sapiens
actgcctcacacttgcccacctgcctccctgacattacctacctaccttctgagcttgcggtttctgggctagatgcagtgaggccatgtaagaggggctyaaattccacttgaatgattgtgtggggcttgggccagccctcagggggctcagggtgagaatatgggacacgtggacactagcccctcttccatagcctg

SEQ ID NO: 380368 - DNA, 201 bp, Homo sapiens
gagtccaggttccaagccgaggtcactggggcttctgggcatcttggaaccctgcagaagtgatggctcctgtctcttttaggtgatcatggggggtggcyggaaatacatgtaccccaagaataaaactgatgtggagtatgagagtgacgagaaagccaggggcacgaggctggacggcctggacctcgttgacacctg

SEQ ID NO: 380369 - DNA, 201 bp, Homo sapiens
tccaggttccaagccgaggtcactggggcttctgggcatcttggaaccctgcagaagtgatggctcctgtctcttttaggtgatcatggggggtggccggraatacatgtaccccaagaataaaactgatgtggagtatgagagtgacgagaaagccaggggcacgaggctggacggcctggacctcgttgacacctggaa

SEQ ID NO: 380370 - DNA, 201 bp, Homo sapiens
gatccccagaatttcagttggaaggcctttagaagctggctcggtcaactgggctcttggtgcaccagggagactgaggcccagagaggagaagaggcttrcccagggtcacacaattgcttagggcagagtggactgggaattcagtctcctggccttaagctacatgatctttccaaaggcaaccactctcctgaattt

SEQ ID NO: 380371 - DNA, 201 bp, Homo sapiens
gcctcagactctgatagctgctggggtcagtccttccgactctccctagcccccggcatgtgctgacacagcccttcctcctagcactcccacttcatctrgaaccgcacggaactcctgacccttgacccccacaatgtggactacctattgggtaagtggagggggtggaggggaggatgcatggctcggagcctggtg

SEQ ID NO: 380372 - DNA, 201 bp, Homo sapiens
actctgtgttccaagtaacagaaaagccaagacgcacaatggggaaattaattggctcatgtagccaggatgttcagaggaaggcttcaggcatggctgcmtctaggagcccaagtgatgctatcaaagactcaaggtctctacctttctctagtccatctctgagaggttgcttcctcttcaggctatacaaagtgccct

SEQ ID NO: 380373 - DNA, 201 bp, Homo sapiens
ggggagcctgcattccctgagacaccccagcttccttggagtcctcctagccgggtcacagcctctcagcatccacatcctcctggcgtcctcctcaggtytcttcgagccaggggacatgcagtacgagctgaacaggaacaacgtgacggacccgtcactctccgagatggtggtggtggccatccagatcctgcggaa

SEQ ID NO: 380374 - DNA, 201 bp, Homo sapiens
cctgcattccctgagacaccccagcttccttggagtcctcctagccgggtcacagcctctcagcatccacatcctcctggcgtcctcctcaggtctcttcdagccaggggacatgcagtacgagctgaacaggaacaacgtgacggacccgtcactctccgagatggtggtggtggccatccagatcctgcggaagaaccc

SEQ ID NO: 380375 - DNA, 201 bp, Homo sapiens
ctgagacaccccagcttccttggagtcctcctagccgggtcacagcctctcagcatccacatcctcctggcgtcctcctcaggtctcttcgagccaggggmcatgcagtacgagctgaacaggaacaacgtgacggacccgtcactctccgagatggtggtggtggccatccagatcctgcggaagaaccccaaaggcttc

SEQ ID NO: 380376 - DNA, 201 bp, Homo sapiens
cctgagacaccccagcttccttggagtcctcctagccgggtcacagcctctcagcatccacatcctcctggcgtcctcctcaggtctcttcgagccagggkacatgcagtacgagctgaacaggaacaacgtgacggacccgtcactctccgagatggtggtggtggccatccagatcctgcggaagaaccccaaaggctt

SEQ ID NO: 380377 - DNA, 201 bp, Homo sapiens
gagacaccccagcttccttggagtcctcctagccgggtcacagcctctcagcatccacatcctcctggcgtcctcctcaggtctcttcgagccaggggacrtgcagtacgagctgaacaggaacaacgtgacggacccgtcactctccgagatggtggtggtggccatccagatcctgcggaagaaccccaaaggcttctt

SEQ ID NO: 380378 - DNA, 201 bp, Homo sapiens
aggggacatgcagtacgagctgaacaggaacaacgtgacggacccgtcactctccgagatggtggtggtggccatccagatcctgcggaagaaccccaaasgcttcttcttgctggtggaaggtagggaccccgggtctgctgagagggggctgctggaaacacggccctggtgtcaggatggagaagtccagctcttaaa

SEQ ID NO: 380379 - DNA, 201 bp, Homo sapiens
gacatgcagtacgagctgaacaggaacaacgtgacggacccgtcactctccgagatggtggtggtggccatccagatcctgcggaagaaccccaaaggctkcttcttgctggtggaaggtagggaccccgggtctgctgagagggggctgctggaaacacggccctggtgtcaggatggagaagtccagctcttaaaggga

SEQ ID NO: 380380 - DNA, 201 bp, Homo sapiens
  misc_feature (1)...(201): n = A,T,C or G
gaactcctgacccttgacccccacaatgtggactacctattgggtaagtggagggggtggaggggaggatgcatggctcggagcctggtggccggagctgngtgtggccagcacctggggacaaggccctagcctgacgcccacttaggggcctctgctcttgggcttcaggacctgggagaggcaaggaagggggttctg

SEQ ID NO: 380381 - DNA, 201 bp, Homo sapiens
tgtaaatgcacacacactctagcggccccatcgagtccaggctgtgaccctctgccttggggccacagtgctgtgtgctgagccctgcaggctggaggcaractgactgatggatttgaaccccagatctgccacttctcagctgacaatagcaagttatggaacacctctgggcctcagtgctcctcatctgtgaaacgg

SEQ ID NO: 380382 - DNA, 201 bp, Homo sapiens
aggcccctggcaggctctcagcaggtgtttcccctggcccacagctcacaacaactaccaggcgcagtctgctgtgcccctgcgccacgagacccacggcrgggaggacgtggccgtcttctccaagggccccatggcgcacctgctgcacggcgtccacgagcagaactacgtcccccacgtgatggcgtatgcagcctg

SEQ ID NO: 380383 - DNA, 201 bp, Homo sapiens
ggctaaggcaggagaatcacttgaacccgggaggcagaggttgcagggagccgagatcgcaccactgcactccagcctggacaacagagtgagactctgtstcaaaaaaaaaaaagaaaagaaaagaaaaagaaaaaagaaaaaaaaaggaattgggggcctaattctgggcccacaaaaatcacccagataaggatcctc

SEQ ID NO: 380384 - DNA, 201 bp, Homo sapiens
ccacagatcaagttgcatctgactagagagcctgtcctctaccctatttcctgcacaagtctttttctttgtaatgcaacaagcgctactcagctcagatycagtgggacacagggaaaggggctgtagtgtagcccagccttgctgagggagacccctgcctcgccaaagcacttcgctcacaaaggctgaaactggcct

SEQ ID NO: 380385 - DNA, 201 bp, Homo sapiens
gctatccttaccccgccaagtaactgcctctctctgtgtttagagaaagagaaagaccccaagtactggcgagaccaagcgcaagagacactgaaatatgycctggagcttcagaagctcaacaccaacgtggctaagaatgtcatcatgttcctgggagatggtgaggcccaggggcctgtgggaggggtggaacaggac

SEQ ID NO: 380386 - DNA, 201 bp, Homo sapiens
tggggaagggagacaggcaaatagttttggggtctctgctaaacatccggatgtagggcaaccctgtgatggtggccgcagggcaggtggcagagaagtcrgcgctggtcttggccccacccttcccttccccagtccccttccccctcactttcactaccctatccccagaccccccactccttcaagaaggcccctccc

SEQ ID NO: 380387 - DNA, 201 bp, Homo sapiens
agcctaggcagtgatgaggcccagaaacctgcctctcccttgggactgaacatgggcacagctctgtgcctcataaaaggttcctaccccacacctggggygggccctggtacagtctagcttagttcctcctgctttcctccaccgcaggctcagtgcggggcccgcggcctctgcgtctttctctcagcttaccatgat

SEQ ID NO: 380388 - DNA, 201 bp, Homo sapiens
caggttgaatggctgcgtaaaatgcctaggctgtggtgctagctcagagtggtgcccggcgaaggttcctgtccttccctagctaacaaaggttaatccascagcagtgttgtggggctggggagcagatcttcctcccctcctccctcaccgaggcctttgccttggtgtcccaaggaggcagaattgaccacgggcacc

SEQ ID NO: 380389 - DNA, 201 bp, Homo sapiens
gactcctgtgtcagaacaggctcaggttcaaatcccgtggccttaggcaaaatgactttcccacattgagcctccttttcctcttctgtgaaatgggagcrttcaagccagcctggaagggagatggaaaagctgcgtgcgcagcgccaggcccctggcaggctctcagcaggtgtttcccctggcccacagctcacaaca

SEQ ID NO: 380390 - DNA, 201 bp, Homo sapiens
ttgcctttgtacctgccatcccctcccctgcagcaacctctccctgtttgtgttgccagttggcatcatggctgtttttctagagcttgctttggatatcytgaaccctttgtaatctgatcatccacatagcatctggctctgagtttcagttcctggagggtaggagccccatctgagtcactcgtgaattcccatgcc

SEQ ID NO: 380391 - DNA, 201 bp, Homo sapiens; identical to SEQ ID NO: 82525

SEQ ID NO: 380392 - DNA, 201 bp, Homo sapiens
cggccaggtttgtttaaaatatatcatgaaccaggctgtgttctaagcagctcacatgtattttttcatttatccttgcacctgaggctcagagagattawgttcatgtctcctaggtcacctggttggtgtcacgtgcaaatattttaatatctcccaggacatgtgtgttccaaataacataatatgggaaccacctcc

SEQ ID NO: 380393 - DNA, 201 bp, Homo sapiens
ttcaatatgagaaagcagcctcattctctgccccacccaaacctctgcgtgcaccttacagctccctgttctccaggaaagacgttcacggcttctggacyttggcatgggctgttccagcagcttagacttccttccctccacttctgctgaaacacttcagcacatcctcaagactccttccctgaccatgcctcatgg

SEQ ID NO: 380394 - DNA, 201 bp, Homo sapiens; identical to SEQ ID NO: 82526

SEQ ID NO: 380395 - DNA, 201 bp, Homo sapiens
ccaatcatgatctgagcagaagctggcaggagggagccccgaatctgctggaggaaactcggtgctggggggactttagagaagaaatgacagcggtcatraatcattgtaacagtaacagctcatattaactgagtggcaggcactgttcaagcaagtcagatacattaatcatttaatcctcatatcagccctaggagg

SEQ ID NO: 380396 - DNA, 201 bp, Homo sapiens
tactcagcaggcaggtgagcttctgggttctagagtctcagagctggaaggactgtctgcagccatccaggtgaacaggtctctgggaaatcccaaagcayatggtggcttgatcgagtgggcggggaagggtccatccgttctctgctccagcccctcatctgccccacttgcccatctctgccccgcagtccatccacc

SEQ ID NO: 380397 - DNA, 201 bp, Homo sapiens
aaggcctggccatctcctgaccctcctctcccacctgcagacgtacaacaccaatgcccaggtccctgacagcgccggcaccgccaccgcctacctgtgtrgggtgaaggccaatgagggcaccgtgggggtaagcgcagccactgagcgttcccggtgcaacaccacccaggggaacgaggtcacctccatcctgcgctg

SEQ ID NO: 380398 - DNA, 201 bp, Homo sapiens
gaccggtattcaggaaaggaaactgatctgtcacctcacccctgcctggggcagcccagcatgtgtcagccccctaatccccgggtactgcccaggacaarcagtaacagggacaaccaccctccaacatggggaggcctgcaacagctctggggcagaaggaggctcagggaggtagcaacttaccacccagcagctcgt

SEQ ID NO: 380399 - DNA, 201 bp, Homo sapiens
ctcccacctgcagacgtacaacaccaatgcccaggtccctgacagcgccggcaccgccaccgcctacctgtgtggggtgaaggccaatgagggcaccgtgrgggtaagcgcagccactgagcgttcccggtgcaacaccacccaggggaacgaggtcacctccatcctgcgctgggccaaggacgctggtgagtcggggga

SEQ ID NO: 380400 - DNA, 201 bp, Homo sapiens
taaaaaatataagaaaaaaaaatgaatagaagcacaaaggaagggaagggatcacccaaggtcctatagctcatacatgggttaatccagaattggaaccygggcagccttgctccagagtccggtctcacttaatgagtactagataattctctgcatgtcagatgggtacactcttcttgaacctgctagttcttttgg

SEQ ID NO: 380401 - DNA, 201 bp, Homo sapiens
ggggagcaaggcaggagttgagcaaatagcaggaacagactgtgtgacacttgctgggaggctccgaggctccagctccctgagcttagaagtgcggagtktatctatcccctgcgcgattcctgggggaagggaaggacaggcgaaggggcatggcggggcagtcctggtgtctccaggaccagggtcagggggaggcca

SEQ ID NO: 380402 - DNA, 201 bp, Homo sapiens
ccttggcttcctagagtgctgggattacaggtgtgagccaccgcatctggtcctgttaatggtttttctttagaattcattgtgctatggctggtagtggygtggggtgggattcggggagccatgcacttcttgcccttaaaactagcagccagggaaaacgtatggctcctggatcctccctctcaaatcagtcccaaa

SEQ ID NO: 380403 - DNA, 201 bp, Homo sapiens
tttgctaacatctttgctcatttcttttgcatgtttctcacagtttatggagactttttgtttgcttcattttgtttcgtttttttgagacagggtctccwctgttgcccaggctggagtgcagtggcgtgatctctgctcactgcagcctcgacctcccgagctcaagtgatcctcccacttcagcctcctgagtaactg

SEQ ID NO: 380404 - DNA, 201 bp, Homo sapiens
ggacatgcagtacgagctgaacaggaacaacgtgacggacccgtcactctccgagatggtggtggtggccatccagatcctgcggaagaaccccaaaggcytcttcttgctggtggaaggtagggaccccgggtctgctgagagggggctgctggaaacacggccctggtgtcaggatggagaagtccagctcttaaaggg

SEQ ID NO: 380405 - DNA, 201 bp, Homo sapiens
ttcttaatccttccctgcttcctcctggaagcgtcctcaagctaataacttagctctctcctccatcgttcagcagctggatacactctgtaatttattcyacttatgtgtttgttatttcaactggtttttcacatagagtgtttccactggggtcttttaaccattcctctttctgttttgctaacatctttgctcatt

SEQ ID NO: 380406 - DNA, 201 bp, Homo sapiens
agctaacaaaggttaatccagcagcagtgttgtggggctggggagcagatcttcctcccctcctccctcaccgaggcctttgccttggtgtcccaaggagrcagaattgaccacgggcaccatgaaggaaaagccaagcaggccctgcatgaggcggtggagatggaccgggccatcgggcaggcaggcagcttgacctcc

SEQ ID NO: 380407 - DNA, 201 bp, Homo sapiens
ggccatcgggcaggcaggcagcttgacctcctcggaagacactctgaccgtggtcactgcggaccattcccacgtcttcacatttggtggatacacccccygtggcaactctatctttggtaggtgggccttctttggggtggacactcctggggtctcctgtctacccacctgggagcaggagtgggtgggagagccagc

SEQ ID NO: 380408 - DNA, 201 bp, Homo sapiens
gccatcgggcaggcaggcagcttgacctcctcggaagacactctgaccgtggtcactgcggaccattcccacgtcttcacatttggtggatacaccccccrtggcaactctatctttggtaggtgggccttctttggggtggacactcctggggtctcctgtctacccacctgggagcaggagtgggtgggagagccagca

SEQ ID NO: 380409 - DNA, 201 bp, Homo sapiens
aggggttaccaagccaccaaggagcctaatctgggggctggggactgtactcctggggccccagcatgacccctgaacaccccctccctgtgcaggtctgkcccccatgctgagtgacacagacaagaagcccttcactgccatcctgtatggcaatgggcctggctacaaggtggtgggcggtgaacgagagaatgtctc

SEQ ID NO: 380410 - DNA, 201 bp, Homo sapiens
gagtgacacagacaagaagcccttcactgccatcctgtatggcaatgggcctggctacaaggtggtgggcggtgaacgagagaatgtctccatggtggacyatggtgagacctccaggacccagggctgggaggggacagggcacccctcggggatgggcttgggaatagggtgtcagcttgtggtcaaggtcaggggtct

SEQ ID NO: 380411 - DNA, 201 bp, Homo sapiens
ctgtctcctggagagtgattcgcctccattgtgttcagagacataaagtacttggaacggggcccagtaaagaataaaccgtgtttctattattagccttrttatggctacacaatagttaaggcgggaacaataggaagtgtgaggaagtgataaagattccagaaaccttccagtgctaacagcccttgcccaccgcag

SEQ ID NO: 380412 - DNA, 201 bp, Homo sapiens; identical to SEQ ID NO: 82552

SEQ ID NO: 380413 - DNA, 201 bp, Homo sapiens
cctcccgagtagctgggattacaggcatgcaccaccacacccagctaattttgtatttttagtagagacggggtttctccgtgttggtcaggctggtctcraactcccgacctcaggtgatctgcctgcctcagccacccaaagtgctgggattacaggtgtgagccaccacgcccggcccttcttgttcttttctttgaa

SEQ ID NO: 380414 - DNA, 201 bp, Homo sapiens
ggagtgccatagcgccatctcggctcactgcaacctccgcctcccaggttcaagctattctcctgcatcagcctctggagtagctgggactacaggcatgyaccaccatacctggctaatttttgtatttttagtagaaatggggtttcaccatgttggccaggctggtctcaaactcctgacctcaggtgatctgcctgc

SEQ ID NO: 380415 - DNA, 201 bp, Homo sapiens
gacctcaggtgatctgcctgcctcggcctcccaaagtgctgggattacaggtgtgagctaccacgcccggcctactttattaatttttaaccttttttgcygcattatataatttttgatatgtggtgtttttaatcattcagttctaagtaattttaagtttctactatgacttttctttgatccttgaaatttttaggg

SEQ ID NO: 380416 - DNA, 201 bp, Homo sapiens
tctccgtgttggtcaggctggtctcgaactcccgacctcaggtgatctgcctgcctcagccacccaaagtgctgggattacaggtgtgagccaccacgccyggcccttcttgttcttttctttgaacttgaatttgttttgaaaaactaaactttactaaattatttgctcagtcttcagatatcttgaatacaatctgtg

SEQ ID NO: 380417 - DNA, 201 bp, Homo sapiens
tttgcttcattttgtttcgtttttttgagacagggtctccactgttgcccaggctggagtgcagtggcgtgatctctgctcactgcagcctcgacctcccragctcaagtgatcctcccacttcagcctcctgagtaactgggactatagttgtgcaccaccacggccagctaattttttttgtattttttgtagagatgg

SEQ ID NO: 380418 - DNA, 201 bp, Homo sapiens
aaccctcatgtgaccgccaccacaccccaagaaccaggcatccagggatgattccataaattgaaacctggtgctgtgccctcctctgccccccactacaygggaggtggtgatggccaagtgtcgtctgcctgccctgcgtattcacatggtcacagatgggtacatatctgtacactcaaccaccagcatgcccggcaa

SEQ ID NO: 380419 - DNA, 201 bp, Homo sapiens
tggccccagtgtgcaagccatggagggagcggagaagccctccacagtgagtcccccttggctgggggatggaatagattggggaagggaggctggaggamggaatagattggggaagggaggctggagggacctctggaaggaccccaagctccagctccttggagtggcctctggccctttaaatctgagctgctggcc

SEQ ID NO: 380420 - DNA, 201 bp, Homo sapiens
  misc_feature (1)...(201): n = A,T,C or G
ccgcacggaactcctgacccttgacccccacaatgtggactacctattgggtaagtggagggggtggaggggaggatgcatggctcggagcctggtggccngagctgcgtgtggccagcacctggggacaaggccctagcctgacgcccacttaggggcctctgctcttgggcttcaggacctgggagaggcaaggaaggg

SEQ ID NO: 380421 - DNA, 201 bp, Homo sapiens
  misc_feature (1)...(201): n = A,T,C or G
cttcctcctagcactcccacttcatctggaaccgcacggaactcctgacccttgacccccacaatgtggactacctattgggtaagtggagggggtggagnggaggatgcatggctcggagcctggtggccggagctgcgtgtggccagcacctggggacaaggccctagcctgacgcccacttaggggcctctgctcttg

SEQ ID NO: 380422 - DNA, 201 bp, Homo sapiens
tagagagccacaggggctctgggaaagggaggaggattctgggaggacacggagtcagcgaagaggaggattgagtttcaacaaacccagagctgaagctkcagactgaagcctagggtagtggatgtgggctttgccaagagataggcccagagggcagctctggggctgaactctagccccccaccgctgtccctcacc

SEQ ID NO: 380423 - DNA, 201 bp, Homo sapiens
agagagccacaggggctctgggaaagggaggaggattctgggaggacacggagtcagcgaagaggaggattgagtttcaacaaacccagagctgaagcttsagactgaagcctagggtagtggatgtgggctttgccaagagataggcccagagggcagctctggggctgaactctagccccccaccgctgtccctcaccc

SEQ ID NO: 380424 - DNA, 201 bp, Homo sapiens
agagctgaagcttcagactgaagcctagggtagtggatgtgggctttgccaagagataggcccagagggcagctctggggctgaactctagccccccaccrctgtccctcaccctggtgtactcttgagggtctgggtttgtggtttcagtttcttcctctgcaaaagggctgctagtaccccttggtagagttaggggag

SEQ ID NO: 380425 - DNA, 201 bp, Homo sapiens
agcccctggcatattgtggctgctcaataaacagtgttccagcgaatgttggttgaataacatatagggaaagccctaggcatagaaggtgtttagtcaaratcagctggatcttagagacatagggcagacgcctgagaaaggctgggacagctcacttggggtgacgaggtctcccatgaaagcatttggggtctggat

SEQ ID NO: 380426 - DNA, 201 bp, Homo sapiens
gatcttagagacatagggcagacgcctgagaaaggctgggacagctcacttggggtgacgaggtctcccatgaaagcatttggggtctggatttcagggcrgtgctggtttcctctctggccacagcctgcaagcagcgagccatataggagaggaaagtttggctgggtgtggggcctcacccgggagtcccagcacttt

SEQ ID NO: 380427 - DNA, 201 bp, Homo sapiens
aaggcagagcttgtacctgcaagtcctgtcacagggctggcacacaatagatgcatggaacctggtggtcaaagggttgtaaacttcaatggacaacaacytgtcagaaagtgaggatctgagtcctgcagggctattagacaagtccagccccaaaactttctgtaattctagaagtttatagattccaagtagaaagtg

SEQ ID NO: 380428 - DNA, 201 bp, Homo sapiens
aaggtctctacctttctctagtccatctctgagaggttgcttcctcttcaggctatacaaagtgcccttccccaccacttcacaccctcataacccagcargcagacagagtcttccagctggagccagtcagggtccacctggagctggaggcgggatcagtcccacccaaaccaggctgaaagggggagggtcacttcc

SEQ ID NO: 380429 - DNA, 201 bp, Homo sapiens
ctggaaaaaccagaagtgtgacctttattttatttttgcagagatggggccctgctatgttgctcagcctgggttcaagaagtctacccaccttggccccygaaagtgctgagattataggcatgaaccattgtgcctggcccacaagtgcaccctttaaaaagatctaccaggtgacccttttttagactgagtatcgct

SEQ ID NO: 380430 - DNA, 201 bp, Homo sapiens
tttgtcattcaggtgcatgaactttacctggccaggtctgcaaactgctgggcagagctcagcaaatattttatgttctttaaaaaagtttttaggtggcygaagcaaattgcttttactggaaaaaccagaagtgtgacctttattttatttttgcagagatggggccctgctatgttgctcagcctgggttcaagaagt

SEQ ID NO: 380431 - DNA, 201 bp, Homo sapiens
gtgtgggaagtggcattttgtgagcaccattgggtaccaggcactttcgcacattacctttgatactcacctaccccctactctccagcattttgcagttmaggagactgaggctcagagggcagacaccttaggattactcctcccctaggtctctatgcctctctgctttgacccagggaagggaggagaggacaggct

SEQ ID NO: 380432 - DNA, 201 bp, Homo sapiens
gcctgctgtgtgctgggttatgggagatccatcacaaactgccttcctaaggctgcagggggtgggggattgttgacttttgcggtgattaaacaactttwatttagttgctggtgtttttaaaccaggcaatttcattttatataaagataaggatttctggcttctcttgaaagatcagaagatgtggccatatggggc

SEQ ID NO: 380433 - DNA, 201 bp, Homo sapiens
gactggagagcagtggcatgaacatggctcactggagcctcgacatcctgggttcaagcacacctcctgcctcagtctcctaagtagctgggaccacaggygtgcaccaccacatccagatcatttttgatttttttttttttttttttggagacagagtcttgctctgtcacccaggctggagtgcagtggtgcaatctt

SEQ ID NO: 380434 - DNA, 201 bp, Homo sapiens
tggtgaaaccgcccatctctactaataatacaaaaattagccaggtgtggtcgtgggcgcctgtaatcctggctactcgggaggctgaggcaggagaatcrcctgaacctcggaggtggagtttgcagtgagccgagatcgtgccatttcactctggcctgggtgacaagagtaaaactcttgtctcaaaaaaaaaaaaag

SEQ ID NO: 380435 - DNA, 201 bp, Homo sapiens
tggaagccactgccagacacctactgctgtggatggggagactgagacccgggcaatcctcagaactgaagcgggggcctgtctttagcggggagggggargggagggaggaggcctctgggacaccccgatctgtggataaagccaaacccgcccctcctgcaccccagggaaatctgtgggcattgtgaccaccacgag

SEQ ID NO: 380436 - DNA, 201 bp, Homo sapiens
gcctgaacctcggaggtggagtttgcagtgagccgagatcgtgccatttcactctggcctgggtgacaagagtaaaactcttgtctcaaaaaaaaaaaaagaagaagaagaagaagaagaagaagattagactgggacttgggagattaccaaatacaggcagatgggaaagcacagtgagaagtctcccaggctggagtg

SEQ ID NO: 380437 - DNA, 201 bp, Homo sapiens
acacagtgctgttggcccctttcactgaacagacatctgaggccaagccactcatcctggcttgccttcacccgacatgtggcctggggcgagttccttcmcctccctatgcctcagtttccccacctgtgcagcagaaacagagagccacacttgcttgctcccagggccgtgggaggccgtgatgaggtcatggatgtg

SEQ ID NO: 380438 - DNA, 201 bp, Homo sapiens
atatgggttaagagcttgtagtttggagttggacaatttgggctcagaatcccagctctgctgcaggtctgctgtgtgacctcaggcaagttacttaaccyttctgtgcttttttcctcttcataaaatgtgaatgatactaagagtacctacctcaaagtgtaggagcacagtgaatgcagctgtcattctgctggtgac

SEQ ID NO: 380439 - DNA, 201 bp, Homo sapiens
aaaaatgacagtagatgtccactccactcaccagagggagtgcagtggagagccgtagaaacttctgcattgtaccttttgatttgcaaggttccttccctttttttttttttttttttttttgagacggagtcttgctctgtcacccaggctggagtgcagtggcgcgatcttggctcactacaacctccacctcccagg

SEQ ID NO: 380440 - DNA, 201 bp, Homo sapiens
aaaatgacagtagatgtccactccactcaccagagggagtgcagtggagagccgtagaaacttctgcattgtaccttttgatttgcaaggttccttccctttttttttttttttttttttttgagacggagtcttgctctgtcacccaggctggagtgcagtggcgcgatcttggctcactacaacctccacctcccaggt

SEQ ID NO: 380441 - DNA, 201 bp, Homo sapiens
accttgttggctaggctggtctcaaactcccaacctgaagtgatccgtccacctcggcctcccaaagtgctaggattataggcatgaccaccacgcccggscagcctttaacatttgaatggctgtttagctggatagaaaattcccagctcaatctttttttccttctgtagtttggtcaattcgacatttattccattt

SEQ ID NO: 380442 - DNA, 201 bp, Homo sapiens
aaatgacagtagatgtccactccactcaccagagggagtgcagtggagagccgtagaaacttctgcattgtaccttttgatttgcaaggttccttccctttttttttttttttttttttttgagacggagtcttgctctgtcacccaggctggagtgcagtggcgcgatcttggctcactacaacctccacctcccaggtt

SEQ ID NO: 380443 - DNA, 201 bp, Homo sapiens
tggcgcccgccaccacgcctggctaattttttgtatttttagtagagacagggtttcactgtgttagccaggatggtcttgatctcctgaccttgtgatcygcccgcctcggcctcccaaaatgctgggattaaaggcgtgagccaccgtgcccggccaggttccttcccttctaagacgctgatactggaggcagaatgg

SEQ ID NO: 380444 - DNA, 201 bp, Homo sapiens
aaccctgggctgcccccactgatctcagcctctctgtgcaaaattataagcccagaggagctgacccaggagggagaggccaacgtgactgaagcccctcmctttgtggagcgggcactctgtctagatacaagaggcccccaggaagctgcgatcacgggaaagtacacagggagctgagagagcagcatgacatgagga

SEQ ID NO: 380445 - DNA, 201 bp, Homo sapiens
atcctcagctggttagtggggagacctatccctgcccctgatgtgctgtgtgacactggggaggttgtgtaccctctctgtgtcttccttttctttttccttttttttttttttttgagatggagtctcactctgtcacccaggctggagtgcagtggcacgatcacagctcattgcaagctccacctcccgagttcacac

SEQ ID NO: 380446 - DNA, 201 bp, Homo sapiens
agcctagcagtttctctacattgtaaactataagaaatagaggtgtaaacagactatagcctacacttgtgccaatcaccaagttttgggggtttttttgyttttgtttttgtttttgtttttttttaagacagagtctcactctgtcgcccaggctggagtacagcattgtaatctcagctcactacaacctccgccacc

SEQ ID NO: 380447 - DNA, 201 bp, Homo sapiens
cagtgagccaagatcgcaccactgcactccagcctgggtgacagagcaagactccgtctaaaaacaaaaaacaaagaacaaacacgaaaaaacttaggccrggtgcaatggctcgcgcctgtaatcctagcactttgggaggccaaggcaggttgatcacttgagcccaggagtttgagaccagcctgggaaacatagcga

SEQ ID NO: 380448 - DNA, 201 bp, Homo sapiens
ctccaagctcaagccagagagacaccagcctcagtttctctacgtggcacatggggccagagcttcatcctccttgcccaggcagggtgcttacccaggarctcggtctagacctctaagacggggagagagcgtctacaccatggccccgagcctggccacattgggtatcaggtcccgtgtaggccccacatccctaga

SEQ ID NO: 380449 - DNA, 201 bp, Homo sapiens
gtgttagccaggatggtcttgatctcctgaccttgtgatccgcccgcctcggcctcccaaaatgctgggattaaaggcgtgagccaccgtgcccggccagkttccttcccttctaagacgctgatactggaggcagaatggagtttattatccctgctctacagccaaggaaacagcccttgaatattcagcgaggactct

SEQ ID NO: 380450 - DNA, 201 bp, Homo sapiens
gagctgacccaggagggagaggccaacgtgactgaagcccctcactttgtggagcgggcactctgtctagatacaagaggcccccaggaagctgcgatcaygggaaagtacacagggagctgagagagcagcatgacatgaggaccagccacagggcagcagccaggcatggcttcctgcagctctcattgccagaaccac

SEQ ID NO: 380451 - DNA, 201 bp, Homo sapiens
cccactgaggcagggctccctgtgcctgggatggctgaggcacgagctctgccattggtgaccgaggttgtcctggcatgtgactgagatgggggtggcaygtacactggacatggagctggacggacctggcctgaatcccagcgctcccacgtggttgctttgtgaccctgaacctccctcctgttctgagccttggtt

SEQ ID NO: 380452 - DNA, 201 bp, Homo sapiens
atatatctgaggagtaggagtggagagatgagacttccctaagacttggaatgggtctaatgtattcaactggtcctcagatatttatagcctgctgtgtrctgggttatgggagatccatcacaaactgccttcctaaggctgcagggggtgggggattgttgacttttgcggtgattaaacaacttttatttagttgct

SEQ ID NO: 380453 - DNA, 201 bp, Homo sapiens
cctgggcactgcaggccccaggcatggtgtctctgggccctgctatctccctcccctgcgatctccctactgcgcctccctgctgcttctctcctgccacyagtcctctggcttcagtcctctgcccacagagttggtttggggcatcatgaccgtcctggagcctcagggacccccagagaagctttggcttctctgaac

SEQ ID NO: 380454 - DNA, 201 bp, Homo sapiens
agtactcagcaggcaggtgagcttctgggttctagagtctcagagctggaaggactgtctgcagccatccaggtgaacaggtctctgggaaatcccaaagyatatggtggcttgatcgagtgggcggggaagggtccatccgttctctgctccagcccctcatctgccccacttgcccatctctgccccgcagtccatcca

SEQ ID NO: 380455 - DNA, 201 bp, Homo sapiens
cccaggtgctcacatctcaagggccttcggggtgaggggagagggttccagaggcagtgttctggctgctcggctacttggaagccactgccagacacctrctgctgtggatggggagactgagacccgggcaatcctcagaactgaagcgggggcctgtctttagcggggagggggaggggagggaggaggcctctggga

SEQ ID NO: 380456 - DNA, 201 bp, Homo sapiens
aaacatcagaaacatgagaaataaggaaacaagagaaataaggaaaaacatttgcagcataaagtagaatgagagagtgtaaaaaataaaagagctgaaarcaaatattcaatatgagaaagcagcctcattctctgccccacccaaacctctgcgtgcaccttacagctccctgttctccaggaaagacgttcacggctt

SEQ ID NO: 380457 - DNA, 201 bp, Homo sapiens
tgtaggcggggtgggtgccactggggcgaaggcctggccatctcctgaccctcctctcccacctgcagacgtacaacaccaatgcccaggtccctgacagygccggcaccgccaccgcctacctgtgtggggtgaaggccaatgagggcaccgtgggggtaagcgcagccactgagcgttcccggtgcaacaccacccagg

SEQ ID NO: 380458 - DNA, 201 bp, Homo sapiens
aggattccagctccctaggagctcaccacggtgagagggtgacaacctatgattctctaaggctctgattaatttcaccaagggcttcatggcactgggtkctgggagcttggggaggagccgaaactgctgtctgggctggggtagggtagggagagggcagggggagggattcattggttggacagcatgggacattct

SEQ ID NO: 380459 - DNA, 201 bp, Homo sapiens
ctgcctccttgtaccagctcccaacccccccgccaacacttcgttaattgctcccagaaaaactctatgcttaaagttttccatgcttaaattctcagcckcactgtggcatgaaatcaattgtttgcattgaatttgacttctcaaattaaggggtaaaatttgagatgagagtagggggttagggaggagatgaggacg

SEQ ID NO: 380460 - DNA, 201 bp, Homo sapiens
ttatattttattttattttattttgagacagagtctcgctctgttgccaggctggagtacagtggcacgatctcagctcactgcaacctctaactctctarttcaagcgattatcctgcctcagcctcccgagtagctgggattataggcacacaccaccatgcccagctaatttttgtatttttagtagacacggggttt

SEQ ID NO: 380461 - DNA, 201 bp, Homo sapiens
  misc_feature (1)...(201): n = A,T,C or G
cagggaatgatggcaggaagcaggcagctaggtagtcctgtggctctggggggcttcagtgggcagtgggcctggtcaaggctatggggtcctctctggtncctcacgccccagtccccatggtgtgagtgtaggcggggtgggtgccactggggcgaaggcctggccatctcctgaccctcctctcccacctgcagacgt

SEQ ID NO: 380462 - DNA, 201 bp, Homo sapiens
tccaactcaacatatccaaaaacaagttcctgattgtctccacctcacgcctcaaaagaccaccccaaacgccgaaaggctgaatgcttttttctttttcttttttttttttttctgagatggagtctcactctgttgcccaggctggactgcagtgatgcgatctcagctcactgcaaactctgcttcctgggttcaagt

SEQ ID NO: 380463 - DNA, 201 bp, Homo sapiens
ccttccccctcactttcactaccctatccccagaccccccactccttcaagaaggcccctccctctcccttctccaggactcccctgctccccaacccctygctggctcctgcagccccaggcccggagagaggcctccgctgaccccacctgagccccaatcttccgccggacacttctctgtactttggagagctaagg

SEQ ID NO: 380464 - DNA, 201 bp, Homo sapiens
ttttctgagatggagtctcactctgttgcccaggctggactgcagtgatgcgatctcagctcactgcaaactctgcttcctgggttcaagtgattctcctrcctcagcctctcaggtagctgggactacaggtgcacaccaccatgcccagctaatttttgtagagagagtttcaccatgttggccaggctggtctcaaac

SEQ ID NO: 380465 - DNA, 201 bp, Homo sapiens
gggtttcaccgtgttagccaggatggtctcgatctcctgacctcatgatccgcctgcctcggcctcccaaagtgctgggattacaggcgtgagccaccgcbcctggcctttctttctttctttctttctttctttctttctttctttctttctttctttctttctttctctctttctttctttttctttctttctttcttt

SEQ ID NO: 380466 - DNA, 201 bp, Homo sapiens
aaagtgctgggattacaggcgtgagccaccgcgcctggcctttctttctttctttctttctttctttctttctttctttctttctttctttctttctttctctctttctttctttttctttctttctttctttctcttttctttctttctttctttcttttctttttctttcctttctttcctttcttttctctcgcatcc

SEQ ID NO: 380467 - DNA, 201 bp, Homo sapiens
agggaaatctgtgggcattgtgaccaccacgagagtgaaccatgccacccccagcgccgcctacgcccactcggctgaccgggactggtactcagacaacragatgccccctgaggccttgagccagggctgtaaggacatcgcctaccagctcatgcataacatcagggacattgacgtgagtgctcgggggcagccggg

SEQ ID NO: 380468 - DNA, 201 bp, Homo sapiens
aagtgctgggattacaggcgtgagccaccgcgcctggcctttctttctttctttctttctttctttctttctttctttctttctttctttctttctttctctctttctttctttttctttctttctttctttctcttttctttctttctttctttcttttctttttctttcctttctttcctttcttttctctcgcatccg

SEQ ID NO: 380469 - DNA, 201 bp, Homo sapiens
ttacaggcgtgagccaccgcgcctggcctttctttctttctttctttctttctttctttctttctttctttctttctttctttctttctctctttctttctttttctttctttctttctttctcttttctttctttctttctttcttttctttttctttcctttctttcctttcttttctctcgcatccgagtgaagagac

SEQ ID NO: 380470 - DNA, 201 bp, Homo sapiens
tacaggcgtgagccaccgcgcctggcctttctttctttctttctttctttctttctttctttctttctttctttctttctttctttctctctttctttctttttctttctttctttctttctcttttctttctttctttctttcttttctttttctttcctttctttcctttcttttctctcgcatccgagtgaagagacc

SEQ ID NO: 380471 - DNA, 201 bp, Homo sapiens
acaggcgtgagccaccgcgcctggcctttctttctttctttctttctttctttctttctttctttctttctttctttctttctttctctctttctttctttttctttctttctttctttctcttttctttctttctttctttcttttctttttctttcctttctttcctttcttttctctcgcatccgagtgaagagacca

SEQ ID NO: 380472 - DNA, 201 bp, Homo sapiens
ggcgtgagccaccgcgcctggcctttctttctttctttctttctttctttctttctttctttctttctttctttctttctttctctctttctttctttttctttctttctttctttctcttttctttctttctttctttcttttctttttctttcctttctttcctttcttttctctcgcatccgagtgaagagaccacca

SEQ ID NO: 380473 - DNA, 201 bp, Homo sapiens
ccagctgtgggctgccccaaagacctccctggctggagcctctccctgcacgcattcagccttccaccgtgggagaggaggctctgggagtccctgccctyagctgcacgaatacagcagggccctagtgccacagccggaaaagccctgggtttgaatcctgatgctgccacttcctggctctgtggccttcgggggaaa

SEQ ID NO: 380474 - DNA, 201 bp, Homo sapiens
gggtttcaccgtgttagtcaggatggtctcgatctcctgacctcgtgatctgcccacctctgcctcccaaagtgctgggattacaggcttgagccaccgcrcccggcctgtgccttccttttcttgttgtttgtgagagcaaggatgggccggccatgtctcctagtaccagggaggctccccctgcagagggctgaggga

SEQ ID NO: 380475 - DNA, 201 bp, Homo sapiens
taggtgatcatggggggtggccggaaatacatgtaccccaagaataaaactgatgtggagtatgagagtgacgagaaagccaggggcacgaggctggacgkcctggacctcgttgacacctggaagagcttcaaaccgagatacaaggtagcctgtgctggggccatgtggctgcagaggtggcctgtgatggggagaggc

SEQ ID NO: 380476 - DNA, 201 bp, Homo sapiens
gtgtcacttgccttatccggcccagtccttagagcgaccctgaggggatgatgccagcaatgtcatttaacaggggaagagactgaggctgagggaggtgrcagagctagtacttggagcagctgggggttttttgtttgtttgtttttgagacggagtctagctctgtcacccaggctggagtgcagtggtatgatctca

SEQ ID NO: 380477 - DNA, 201 bp, Homo sapiens
gatggagtgcagtgacgtgatctcagctcactgcaaccttcgccacccaggttcaagtgatcctcctgcctcagcctcctgagtagctgggattacaggcrtgcgccgcaacacccggctaattttttgtattcttattagagacggggtttcatcatgttggccaggctgatctcgaactcctgacctcaagtgatccac

SEQ ID NO: 380478 - DNA, 201 bp, Homo sapiens
agatgcccaggcttacattggccaccagagacttgctttgcctgttttgagcctcatataaatggaatcatatagtatgtaccgatcagtgccctttcccyggcattctatcgtgagcattagcacatatcatttagtagtctccaaaaacaatagcctcttggaatccagttgtccagagccattgttgcttaaaccaga

SEQ ID NO: 380479 - DNA, 201 bp, Homo sapiens
cccgccaagtaactgcctctctctgtgtttagagaaagagaaagaccccaagtactggcgagaccaagcgcaagagacactgaaatatgccctggagcttyagaagctcaacaccaacgtggctaagaatgtcatcatgttcctgggagatggtgaggcccaggggcctgtgggaggggtggaacaggacacctagctagg

SEQ ID NO: 380480 - DNA, 201 bp, Homo sapiens
tagacctggctcagatttgacttgaattcacatttcttatgaatgactgtctttctctatcccttccatagctccaaggcaaaatgtgtaccttaaaacarcttcagcagacctggtgtggtggctttagcaggcctggtatggtggctcacgcctgtaatcccagtgcgttgggaggctgaggtgggaggatcgcttgag

SEQ ID NO: 380481 - DNA, 201 bp, Homo sapiens
ggctgattggagaggcaggagcacgagagactgaggcccccactccccactgcagggatgggtgtctccacagtgacggctgcccgcatcctcaagggtcrgctccaccacaaccctggggaggagaccaggctggagatggacaagttccccttcgtggccctctccaaggtgagccccatccccaagcccagttcaggt

SEQ ID NO: 380482 - DNA, 201 bp, Homo sapiens
cctctcccacctgcagacgtacaacaccaatgcccaggtccctgacagcgccggcaccgccaccgcctacctgtgtggggtgaaggccaatgagggcaccrtgggggtaagcgcagccactgagcgttcccggtgcaacaccacccaggggaacgaggtcacctccatcctgcgctgggccaaggacgctggtgagtcggg

SEQ ID NO: 380483 - DNA, 201 bp, Homo sapiens
ccccaaggtctctaattcttgggcttaagcgatcctacagccttggcctcccagtcttgggattacaggcgtgagccaccatgcacggcctatatatgcctttttttttttttttttttgagacagtcttactctgtcttccaggctggagtacagtagcatgacatcagctcactgcaacctctgcctcccgagttcaag

SEQ ID NO: 380484 - DNA, 201 bp, Homo sapiens
cagacgtacaacaccaatgcccaggtccctgacagcgccggcaccgccaccgcctacctgtgtggggtgaaggccaatgagggcaccgtgggggtaagcgyagccactgagcgttcccggtgcaacaccacccaggggaacgaggtcacctccatcctgcgctgggccaaggacgctggtgagtcgggggagcagtgggga

SEQ ID NO: 380485 - DNA, 201 bp, Homo sapiens
cccaaggtctctaattcttgggcttaagcgatcctacagccttggcctcccagtcttgggattacaggcgtgagccaccatgcacggcctatatatgcctttttttttttttttttttgagacagtcttactctgtcttccaggctggagtacagtagcatgacatcagctcactgcaacctctgcctcccgagttcaagt

SEQ ID NO: 380486 - DNA, 201 bp, Homo sapiens
agtccaggttccaagccgaggtcactggggcttctgggcatcttggaaccctgcagaagtgatggctcctgtctcttttaggtgatcatggggggtggccrgaaatacatgtaccccaagaataaaactgatgtggagtatgagagtgacgagaaagccaggggcacgaggctggacggcctggacctcgttgacacctgg

SEQ ID NO: 380487 - DNA, 201 bp, Homo sapiens
aatgaagcaagtcacacattttttggtttcccagtgcatataaaagttatgtttgcaccctacagtagtcttttaagtgtgggatagcattatgtctaaaraaatgtatataccttaatttaaaaatatgctattgctaaaaaacgctaatgaagtgagctcatgtttttggaaaaaatgatgctgatagacttgcttgac

SEQ ID NO: 380488 - DNA, 201 bp, Homo sapiens
aatccagcagcagtgttgtggggctggggagcagatcttcctcccctcctccctcaccgaggcctttgccttggtgtcccaaggaggcagaattgaccacrggcaccatgaaggaaaagccaagcaggccctgcatgaggcggtggagatggaccgggccatcgggcaggcaggcagcttgacctcctcggaagacactct

SEQ ID NO: 380489 - DNA, 201 bp, Homo sapiens
tgggtgccactggggcgaaggcctggccatctcctgaccctcctctcccacctgcagacgtacaacaccaatgcccaggtccctgacagcgccggcaccgscaccgcctacctgtgtggggtgaaggccaatgagggcaccgtgggggtaagcgcagccactgagcgttcccggtgcaacaccacccaggggaacgaggtc

SEQ ID NO: 380490 - DNA, 201 bp, Homo sapiens
tgtactcctggggccccagcatgacccctgaacaccccctccctgtgcaggtctggcccccatgctgagtgacacagacaagaagcccttcactgccatcmtgtatggcaatgggcctggctacaaggtggtgggcggtgaacgagagaatgtctccatggtggactatggtgagacctccaggacccagggctgggaggg

SEQ ID NO: 380491 - DNA, 201 bp, Homo sapiens
ggaggcctctgggacaccccgatctgtggataaagccaaacccgcccctcctgcaccccagggaaatctgtgggcattgtgaccaccacgagagtgaaccrtgccacccccagcgccgcctacgcccactcggctgaccgggactggtactcagacaacgagatgccccctgaggccttgagccagggctgtaaggacatc

SEQ ID NO: 380492 - DNA, 201 bp, Homo sapiens
taaagccaaacccgcccctcctgcaccccagggaaatctgtgggcattgtgaccaccacgagagtgaaccatgccacccccagcgccgcctacgcccactyggctgaccgggactggtactcagacaacgagatgccccctgaggccttgagccagggctgtaaggacatcgcctaccagctcatgcataacatcagggac

SEQ ID NO: 380493 - DNA, 201 bp, Homo sapiens
attgtcctgcctcagcctcctgagtagctgggattataggcgcacatcaccacgcccggctaattttttttttttaaatttttagtagagacggggtttcrccatgttggccaggctggtctcaaactctggacctcaggtgatccgcccgttttggcctcccaaagtgctggcattataggcgtgagccatcgcgcccgg

SEQ ID NO: 380494 - DNA, 201 bp, Homo sapiens; identical to SEQ ID NO: 82827

SEQ ID NO: 380495 - DNA, 201 bp, Homo sapiens
gaactgcttgggtcacagcttcgttttgttcccagtatccacatgcggtggggaagaacaccctcctcattgctgggctccaggccaggaacaatgcccgygtcatcttcagcggctccctcgacttcttcagcgactccttcttcaactcagcagtgcagaaggcggcgcccggctcccagaggtagctgccaggaggct

SEQ ID NO: 380496 - DNA, 201 bp, Homo sapiens
tggcacttccaattttttaaggtagtagtgacttatctagagatccctaacctccaccgttccttttagaaatttgtgtatttgttgtgcagatgacaagmaaccagccatatcttttcgtttgtttcctgcgttccctttaaccatgagtccctaggtgcccaaggcctacaggcagaacttcgctagggtactgtcatg

SEQ ID NO: 380497 - DNA, 201 bp, Homo sapiens
tcactcccaccaatagggttcaaggaatccacctcccaccagggcacttccggcggcgctctccgcgccttatcgccaaagctgcggctctggacgcccakccgcggcgtatcccgatcacttccgggtagtgctccacgggcacgagccgcgattgggctaccgtagatggggtacttccggtgtgcaggtgctgggtcc

SEQ ID NO: 380498 - DNA, 201 bp, Homo sapiens; identical to SEQ ID NO: 82836

SEQ ID NO: 380499 - DNA, 201 bp, Homo sapiens; identical to SEQ ID NO: 82837

SEQ ID NO: 380500 - DNA, 201 bp, Homo sapiens; identical to SEQ ID NO: 82838

SEQ ID NO: 380501 - DNA, 201 bp, Homo sapiens; identical to SEQ ID NO: 82799

SEQ ID NO: 380502 - DNA, 201 bp, Homo sapiens
ctgggtgggccttagctggggagtcagtgagggaaccgttttctcagttcagaatctgactcctggaggcagaataccacactgctgtccaggggtccatytggggctgagcccagctggatgaagctgcagggcactggggctgacagagagggagtcacaaggaagccaaggacacttggcccaaggcccccctgtaag

SEQ ID NO: 380503 - DNA, 201 bp, Homo sapiens
aaataaataaataaataaataaataaaaataaagcgagatgttgccctcaaacttcacctggccccggtcctggtttgctaatggctgtgggtgggggttrctgtgggtgatgactgactggatacaaaatcctaagtggcttcatgaaattttgcctaggactggactgtctttcttttaactgtgaaatgatggttctc

SEQ ID NO: 380504 - DNA, 201 bp, Homo sapiens
ggacgtggccaggcacggtggctcatgcctgtaatcccagcactttgggaggccgaggcaggcggctcacgaggtcaggagatcgagactatcctggctarcacggtaaaaccctgtctctactaaaagtacaaaaaattagctgggcgtggtggtgggcacctgtagtcccagctactcgggaggctgaggcaggagaaa

SEQ ID NO: 380505 - DNA, 201 bp, Homo sapiens
atttttcctatgtgcagtcactcctctcatttctaaaatagggacgtggccaggcacggtggctcatgcctgtaatcccagcactttgggaggccgaggcrggcggctcacgaggtcaggagatcgagactatcctggctaacacggtaaaaccctgtctctactaaaagtacaaaaaattagctgggcgtggtggtgggc

SEQ ID NO: 380506 - DNA, 201 bp, Homo sapiens
gtgcaggtgctgggtccttcggcaggaggaggaagatggagcccagcaccgcggcccgggcttgggccctcttttggttgctgctgcccttgcttggcgcrgtttgcgccagcggaccccgcaccttagtgctgctggacaacctcaacgtgcgggagactcattcgcttttcttccggagcctgaagggtgagagcgggg

SEQ ID NO: 380507 - DNA, 201 bp, Homo sapiens
cttactccttcttcccggacaagcctatcacccaggtaagggcttcacaaccttgaggcttcgaaataaaaatgaagcagaacagcacatttggctgaggygaaggaaatgactagttggtggggtggggcatgggcagaagcggtgtggtctcaggctcccccttcaggtagggccagggtcgttttggtctggcctgct

SEQ ID NO: 380508 - DNA, 201 bp, Homo sapiens
gccaggcacggtggctcatgcctgtaatcccagcactttgggaggccgaggcaggcggctcacgaggtcaggagatcgagactatcctggctaacacggtraaaccctgtctctactaaaagtacaaaaaattagctgggcgtggtggtgggcacctgtagtcccagctactcgggaggctgaggcaggagaaaggcatga

SEQ ID NO: 380509 - DNA, 201 bp, Homo sapiens
aagtgggctccagactagggggcgggaggccggcctgggcggagcaaagggcgctcggcctcgttgattggccgcggctgcagagctgtctctctaggatwgagccttttctttagggggacggggccttgattcactcccaccaatagggttcaaggaatccacctcccaccagggcacttccggcggcgctctccgcgc

SEQ ID NO: 380510 - DNA, 201 bp, Homo sapiens
gcggcccccactgccccaggataccagaggctgtggagccctgtgccaggggcacaaacaaggggacgtgaccacgggcatctgcatctcggcaggaggasgaccgctacaggctcatgctcagtcggagcaacagtgaaaacattgccagcaactacttccgatctaagcgggccagccagatcctcagcacagacgcca

SEQ ID NO: 380511 - DNA, 201 bp, Homo sapiens
gctgtgggtgggggttgctgtgggtgatgactgactggatacaaaatcctaagtggcttcatgaaattttgcctaggactggactgtctttcttttaactrtgaaatgatggttctccctaacgtctcctcaaaggatacaagaaagttgttgttgctagtagaccgaggggtgggaatcactgaaatggaaaatctagat

SEQ ID NO: 380512 - DNA, 201 bp, Homo sapiens
cggcgcccggctcccagaggtagctgccaggaggcttaggggccggggatccgggtggtgcagtgtgtgtatatggggaggactcagaaggggaagaaggmggcttttagctaaaagtgtcagaggctgagtgtttcaggtgctgtcagattatttcagggctttattgctatattgctggtattggcacttccaattttt

SEQ ID NO: 380513 - DNA, 201 bp, Homo sapiens
cacatgcggtggggaagaacaccctcctcattgctgggctccaggccaggaacaatgcccgcgtcatcttcagcggctccctcgacttcttcagcgactcmttcttcaactcagcagtgcagaaggcggcgcccggctcccagaggtagctgccaggaggcttaggggccggggatccgggtggtgcagtgtgtgtatatg

SEQ ID NO: 380514 - DNA, 201 bp, Homo sapiens
ctgtcagattatttcagggctttattgctatattgctggtattggcacttccaattttttaaggtagtagtgacttatctagagatccctaacctccaccrttccttttagaaatttgtgtatttgttgtgcagatgacaagcaaccagccatatcttttcgtttgtttcctgcgttccctttaaccatgagtccctaggt

SEQ ID NO: 380515 - DNA, 201 bp, Homo sapiens
ttgacggtggaggcagtgtgctggtagctgccagctccgacattggtgagtccgacctgggaggttctggtgctttccacttctccagggagttggagagmattacaaacagaagctgccaaattagcattcactgggtgggccttagctggggagtcagtgagggaaccgttttctcagttcagaatctgactcctggag

SEQ ID NO: 380516 - DNA, 201 bp, Homo sapiens
gcaggtcttccttaaacaaccttggcacaagagctcccctcccacattgtccactttgtttttcttctcggctcacaagaattactcatttaatgaataartggattactgagcactgtcttcattaccttaggttgaatatcagagtacactttggggagactctggagcctcaaatagccccacccagtgctagtttta

SEQ ID NO: 380517 - DNA, 201 bp, Homo sapiens
agaggtgtgtgtatttgctatggggggcagcagtgggaggggcttcactgattaactctgcccaggaagttggacttaataagagaaataggtcattaggwtgaatttgttaggcaagagaaagcgaatatggaagcatgaatacttgaaagtgcctggcacatgtcggggcaggagggtggtttgggtccagactttgat

SEQ ID NO: 380518 - DNA, 201 bp, Homo sapiens
cctcctgctgctcactcctttctctccagctaagccacactgggccccttgctggtgaccgtgcccacccccctcggggactttgcacctggtgttcactrtgctgggaatcctctgaccccacagactgcctggctcacgcttacatcttttcagatgccacttgcaggtcttccttaaacaaccttggcacaagagctc

SEQ ID NO: 380519 - DNA, 201 bp, Homo sapiens
ctgccacctctgtcctcctgcaggtatccgtgcggccactccagcacacgcagtatgagcgcttcatcccctcggcctacccctactacgccagcgccttytccatgatgctggggctcttcatcttcagcatcgtcttcttgcacatgaaggagaaggagaagtccgactgaggggctagagccctctccgcacagcgtg

SEQ ID NO: 380520 - DNA, 201 bp, Homo sapiens
aaggtcggctcagcactcttcactgcctagattttcacagtggccttctaacccatcaccatggccactttcaccctcgtaccctagtctctaccccgctkccaggatcgtccttcaaaaataggaatgagatcctgccaggcccctgctcagaatcgtccagcggctccccacggcaggtccctcgtgtggggtgcagag

SEQ ID NO: 380521 - DNA, 201 bp, Homo sapiens
cttccggttgctcagccagactccttggagcttttctaatgcccctgtcgaagcatcagcaggccctgcggctgtgccatcagaaggcgtggaggcctgcygcgcctccctctgttgctgctccaaggtcggctcagcactcttcactgcctagattttcacagtggccttctaacccatcaccatggccactttcaccct

SEQ ID NO: 380522 - DNA, 201 bp, Homo sapiens
tggaatgtccaagactgcctggcctctccaaaggagagtagatagatggctttttgaatgtagcatgagaggcagaggtagagaatataggagcttctgcrtatgcctgaaagtcagtcaggtaaggcgcttttagttttctgctgaagattacccctcaaaaaacagggctcttatattcagatctttacaaagtcattt

SEQ ID NO: 380523 - DNA, 201 bp, Homo sapiens
cagaagggtgaagggatttgcctagttttaactccaggtggtctcgatttcaaagcccgtgttctgtcagctttacaagagtttctcaacaggtgcattcktgacgtttcagactggataattttatagtgaggctgtcctgtgtactgtagggtgtttaacagcaccccgggcctctgcccattaatgccagtggccact

SEQ ID NO: 380524 - DNA, 201 bp, Homo sapiens
gaagcggaggcactgtcagcttgtataggtcagaaggaaaaaagcagtgaatgagactgctcgggagagggctgagagaggatactgttggtgggagaaaygacagagagtgtaaaacagtgtttcccaaactttagtcatttgcacacgtccttcatggtttttaccatgttacgtatctcctgtgctaataactaccta

SEQ ID NO: 380525 - DNA, 201 bp, Homo sapiens
tgcaacatgtgcttttggaattggctttttggaggcaagattagttaggcggatgtcaccccaaattggtagaagttgaaatcttctgatgactgggcttyggtgcagtaactggtgtttgccaagtttttgctgtgtttgaaactttgaaataggtaccttacagtggactgggtgagatcttaaggatagggagtctgc

SEQ ID NO: 380526 - DNA, 201 bp, Homo sapiens; identical to SEQ ID NO: 82840

SEQ ID NO: 380527 - DNA, 201 bp, Homo sapiens
tagccttcacataatcacagcttattcggttgtttctcctccagactgaacatccccagctccttagctatttctcttttgccatacttttttggtgagcrtgttagtcattctcttctttatttgcttcagtttatctttttcttaaaagactcaagttgtccctgtctgggtaagacaggactgccttcctcccttcag

SEQ ID NO: 380528 - DNA, 201 bp, Homo sapiens; identical to SEQ ID NO: 82799

SEQ ID NO: 380529 - DNA, 201 bp, Homo sapiens; identical to SEQ ID NO: 82842

SEQ ID NO: 380530 - DNA, 201 bp, Homo sapiens; identical to SEQ ID NO: 82844

SEQ ID NO: 380531 - DNA, 201 bp, Homo sapiens
tggactgtctttcttttaactgtgaaatgatggttctccctaacgtctcctcaaaggatacaagaaagttgttgttgctagtagaccgaggggtgggaatyactgaaatggaaaatctagatgacagtgctggggaagagaaaactagaacagctcagttgaagacaacctttactgcatgttgacgctgatttaggcaat

SEQ ID NO: 380532 - DNA, 201 bp, Homo sapiens
cccttcaggtagggccagggtcgttttggtctggcctgctgtcctcttgttcgggaggcgtggcagcttttcccttacttggaactgcttgggtcacagcytcgttttgttcccagtatccacatgcggtggggaagaacaccctcctcattgctgggctccaggccaggaacaatgcccgcgtcatcttcagcggctccc

SEQ ID NO: 380533 - DNA, 201 bp, Homo sapiens
gcagaaacctgggggaagaaggggtcacttaatttttttgggaaatcaaggcaaaattgtaattctttaagggtacgtagatgggattaatttgttatatyaaggccgagtatagtggctcaacctgtaatcccagcgctttgggaaggcctaggcaggaggatcgcttgaggccaggagtttgagagcagcctgggcaac

SEQ ID NO: 380534 - DNA, 201 bp, Homo sapiens
ggagcagggagaggagacctctgggtcactgtgtctggtgcctgctttcagattttggaggcaacatcaacgtggagaccatcagtgcctttattgacggyggaggcagtgtgctggtagctgccagctccgacattggtgagtccgacctgggaggttctggtgctttccacttctccagggagttggagagcattacaa

SEQ ID NO: 380535 - DNA, 201 bp, Homo sapiens; identical to SEQ ID NO: 82824

SEQ ID NO: 380536 - DNA, 201 bp, Homo sapiens
gcagtgagtgcgggattgagtttgacgaggagaaaacggctgtcattgaccatcacaactatgacatctcagaccttggccaggtaatcaggcctgtcacyttccaggtttcaggggcatatggcaaagctctgcttagccaaaagccaagagggtgtgaggaggttctccctggcttggggaaccttttcctgaccaccc

SEQ ID NO: 380537 - DNA, 201 bp, Homo sapiens
atttgcacacgtccttcatggtttttaccatgttacgtatctcctgtgctaataactacctaatatttttcttcaaattgacctgcttaaaaaaaaaaaaagaaaaggctaggtatgatagcttatccctgtaatcccatcactttgggaggccgaggcagaaggattgcttgagtccaggagtttgagactagcctgggc

SEQ ID NO: 380538 - DNA, 201 bp, Homo sapiens; identical to SEQ ID NO: 82810

SEQ ID NO: 380539 - DNA, 201 bp, Homo sapiens
tctgctaaaaatacaaaaattagacaggtatggtggtgtgtgcctgtagtcccagctacttgggaggctgatgcaagagaattgcttgaacccaggaggcrgaggttgcagtgagccaaggttgtgccactgcactccagcccaggtggcagagcgaggtctgtctgaaaaacaaaaacaaaaacaagtcagactccattg

SEQ ID NO: 380540 - DNA, 201 bp, Homo sapiens; identical to SEQ ID NO: 82798

SEQ ID NO: 380541 - DNA, 201 bp, Homo sapiens
caggcccgtccatgccatggcccctggagccgtgagcggcaggaaggaggctccaagtgccctgaccctgatcttattcttccaacccctcctccctagaratggtggaggtggggcctagttcctggtcccgagccttcccaggcccagtgaagaccccgccagcaagaaggtggccaaacaccctgtccaggacgcgac

SEQ ID NO: 380542 - DNA, 201 bp, Homo sapiens
cgagctgggcagcacaggcccgtccatgccatggcccctggagccgtgagcggcaggaaggaggctccaagtgccctgaccctgatcttattcttccaacycctcctccctagagatggtggaggtggggcctagttcctggtcccgagccttcccaggcccagtgaagaccccgccagcaagaaggtggccaaacaccct

SEQ ID NO: 380543 - DNA, 201 bp, Homo sapiens; identical to SEQ ID NO: 82847

SEQ ID NO: 380544 - DNA, 201 bp, Homo sapiens
gcccatcaggcaccactggaaaggtggctctggtgcccaagctgctcctgtttccctcctgcaggtattcccagacaggcaactatgaactagctgtggcyctctcccgctgggtgttcaaggaggagggtgtcctccgtgtggggcctgtgtcccatcatcgggtgggcgagacagccccacccaatgcctacactgtca

SEQ ID NO: 380545 - DNA, 201 bp, Homo sapiens; identical to SEQ ID NO: 82796

SEQ ID NO: 380546 - DNA, 201 bp, Homo sapiens
gggtttcccttcgcgtcccgtcttcctcaactacctgttttttcttgtccagaccggggctttgagctcacattcaagaccgctgatgaccccagcctgtmtctcataaagtatggggaattcctctatgacaatctcatcattttctccccttcggtagaaggtaagggttccgcgtcgcccctagcactggaattcgag

SEQ ID NO: 380547 - DNA, 201 bp, Homo sapiens
gtggggtggggcatgggcagaagcggtgtggtctcaggctcccccttcaggtagggccagggtcgttttggtctggcctgctgtcctcttgttcgggaggygtggcagcttttcccttacttggaactgcttgggtcacagcttcgttttgttcccagtatccacatgcggtggggaagaacaccctcctcattgctgggc

SEQ ID NO: 380548 - DNA, 201 bp, Homo sapiens; identical to SEQ ID NO: 82832

SEQ ID NO: 380549 - DNA, 201 bp, Homo sapiens; identical to SEQ ID NO: 82833

SEQ ID NO: 380550 - DNA, 201 bp, Homo sapiens; identical to SEQ ID NO: 82835

SEQ ID NO: 380551 - DNA, 201 bp, Homo sapiens
gcgctttgggaaggcctaggcaggaggatcgcttgaggccaggagtttgagagcagcctgggcaacacagaactcctctctttaaaaaaaaacaaaaaaamaaaaaaaaaaagttggccgagcgcagtggctcacacctgtaatcccagcactttgggaggctgaggtgggcagatcacccgaggtcaggcgtttgagacc

SEQ ID NO: 380552 - DNA, 201 bp, Homo sapiens
taatcccagcgctttgggaaggcctaggcaggaggatcgcttgaggccaggagtttgagagcagcctgggcaacacagaactcctctctttaaaaaaaaamaaaaaaacaaaaaaaaaaagttggccgagcgcagtggctcacacctgtaatcccagcactttgggaggctgaggtgggcagatcacccgaggtcaggcgt

SEQ ID NO: 380553 - DNA, 201 bp, Homo sapiens
gcctgtgtcccatcatcgggtgggcgagacagccccacccaatgcctacactgtcactgacctagtggtaagagatgtttggggtgggagggcccaaaggktttgccaagctgactgagctcagctcagaagcacttattgaacacttctttgctggcctaaagggcataaataaagatgaataagttaatccctacacct

SEQ ID NO: 380554 - DNA, 201 bp, Homo sapiens
ggtcaggagatcgagactatcctggctaacacggtaaaaccctgtctctactaaaagtacaaaaaattagctgggcgtggtggtgggcacctgtagtcccrgctactcgggaggctgaggcaggagaaaggcatgaatccaggaggcagagcttgcagtgagctgagatcacgccattgcactccagcctgggcaacagtg

SEQ ID NO: 380555 - DNA, 201 bp, Homo sapiens
aaataaaaatgaagcagaacagcacatttggctgaggcgaaggaaatgactagttggtggggtggggcatgggcagaagcggtgtggtctcaggctccccyttcaggtagggccagggtcgttttggtctggcctgctgtcctcttgttcgggaggcgtggcagcttttcccttacttggaactgcttgggtcacagcttc

SEQ ID NO: 380556 - DNA, 201 bp, Homo sapiens
ttcagattttggaggcaacatcaacgtggagaccatcagtgcctttattgacggtggaggcagtgtgctggtagctgccagctccgacattggtgagtccracctgggaggttctggtgctttccacttctccagggagttggagagcattacaaacagaagctgccaaattagcattcactgggtgggccttagctgggg

SEQ ID NO: 380557 - DNA, 201 bp, Homo sapiens
acagagtaagactttttctaaaaaaaaaaaaaaaaaaaaaaaaaaagagcaaatttgagttctatatattgaggttatttaagagacagaatgggtggggsggggggaataggattaattgagtgcctggcattgtgcccatgttgcagatgaggaaactgaggctcagagacgaagcagcttctctaaggttgtaggaag

SEQ ID NO: 380558 - DNA, 201 bp, Homo sapiens
atagtaacaaaccctatatatactgtgttttttcctatacacacatacctatggtaaagtttaatttataaattaggcacagtaaaaaattaaagataactaataaaatagaataattatgacaatatactgtaataaaagttatgtgaatgtggtctctctctctctcctctctctaaatatcttcttgtactcacctat

SEQ ID NO: 380559 - DNA, 201 bp, Homo sapiens; identical to SEQ ID NO: 82859

SEQ ID NO: 380560 - DNA, 201 bp, Homo sapiens
actgcactccagcctagaggacagagtgagactccgtctcaaaaaaaataaaaaataaaaaaataaaaaattctgaagccaggcatggtgactcatgcctrtaatcctggtgctttgggaggccaaggtgagagaatctcttgagcccaggagttgaagaccagctgggacaacatagtgagaccttgttcccacaaaata

SEQ ID NO: 380561 - DNA, 201 bp, Homo sapiens; identical to SEQ ID NO: 82860

SEQ ID NO: 380562 - DNA, 201 bp, Homo sapiens
gaagggaagaccctcactaacaaagcaggctttgggttgagactgtgttaacagatgttctagctacagcttcccttcctgttgcagagaccatctgcccragtagccgcaaatgtgcttcatctaagcctctggggtgaacatattctagccctgaagaatctgaagttagacaagatggttggctggctcctccaacaa

SEQ ID NO: 380563 - DNA, 201 bp, Homo sapiens
cacctgcttcggcctcccaaagcgctgggattattatttttagtggagatggggtttcactgttggccaggctggtctcaaactcctggcctcaagtgatycacccacctcagcctccaaaatgttgggattacaggtatgagccaccacgcccagctgggagttggcttttttttttttttttttttttgagacggagtc

SEQ ID NO: 380564 - DNA, 201 bp, Homo sapiens
agcctcctggcagctacctctgggagccgggcgccgccttctgcactgctgagttgaagaaggagtcgctgaagaagtcgagggagccgctgaagatgacrcgggcattgttcctggcctggagcccagcaatgaggagggtgttcttccccaccgcatgtggatactgggaacaaaacgaagctgtgacccaagcagttc

SEQ ID NO: 380565 - DNA, 201 bp, Homo sapiens
tggggtttcactgttggccaggctggtctcaaactcctggcctcaagtgatccacccacctcagcctccaaaatgttgggattacaggtatgagccaccaygcccagctgggagttggcttttttttttttttttttttttgagacggagtctcactctgtcgcccaggctggagtgcagtggcatgatcttggctcactg

SEQ ID NO: 380566 - DNA, 201 bp, Homo sapiens
gaagcaggagaatcgtttgaaccctggaggcagaggttgcagtgagccaagatcgcaccactgcactctggcctaggtgacagtgcaagtctttgtctcaaaaaaaaaaaaaaaaaaaaaaggctattcagagagagaaaaggaggcatttttgagaaatgtttaatggagatgtagctcatggaagcagctgagaactga

SEQ ID NO: 380567 - DNA, 201 bp, Homo sapiens; identical to SEQ ID NO: 82871

SEQ ID NO: 380568 - DNA, 201 bp, Homo sapiens
atatactgtaataaaagttatgtgaatgtggtctctctctctctcctctctctaaatatcttcttgtactcacctattctcaaactgtagataactgaaaytgcagaaagcaaaactgtggataaggttggggctactgcaactcagccaaggacttacagtggcagacctggaatgcaaacccaggcagtctgataccag

SEQ ID NO: 380569 - DNA, 201 bp, Homo sapiens
atcatcatttcacagttaaaagaaagacagtccagtcctaggcaaaatttcatgaagccacttacttaggattttgtatccagtcagtcatcacccacagyaacccccacccacagccattagcaaaccaggaccggggccaggtgaagtttgagggcaacatctcgctttatttttatttatttatttatttatttatat

SEQ ID NO: 380570 - DNA, 201 bp, Homo sapiens
gacgtgagacagttggtgagggcactgctccagcgagaggccagcaaggtgaggctgtccccggcttcgaggggacggtgtgggtagaaacctctgttctygttccagagtgaaggtcaggtttgggccagagccacagtgacagatcctctgtgttaggaaggtaaaggctagttacaagagaacaaaaaacagatttta

SEQ ID NO: 380571 - DNA, 201 bp, Homo sapiens
gtgaagtatcgtggcttcctctccactgcagactggcagatttcttcactcacactcccaaaaagagaatctacttccctcccttcccttcgtccaaccayctgggtctcgagtgtcactgtaggttcactgccgttggggcaggtgactccttgggccagtcagctttggctgaagggcagggctggcacacagctggca

SEQ ID NO: 380572 - DNA, 201 bp, Homo sapiens
tcccgagtagctgggatacaggcacacaccaccatgcctggctagtttttttgtatttttagtagagacaggggtttcaccatgttggccaggctggtctygaactcctgacctcaggtgatctacccgcctcggcctcccaaaatgttggcattacaggccaccacacccggcaataactgattcttaatgcacctggtt

SEQ ID NO: 380573 - DNA, 201 bp, Homo sapiens
gcccaccaccacgcccagctaattttttgtacttttagtagagacagggttttaccgtgttagccaggatagtctcgatctcctgacctcgtgagccgccygcctcggcctcccaaagtgctgggattacaggcatgagccaccgtgcctggccacgtccctattttagaaatgagaggagtgactgcacataggaaaaat

SEQ ID NO: 380574 - DNA, 201 bp, Homo sapiens
gagtgtcgtggcacacgcctgtaattccaggtactcgggaggctgaagcaggagaatcgtttgaaccctggaggcagaggttgcagtgagccaagatcgcrccactgcactctggcctaggtgacagtgcaagtctttgtctcaaaaaaaaaaaaaaaaaaaaaaggctattcagagagagaaaaggaggcatttttgaga

SEQ ID NO: 380575 - DNA, 201 bp, Homo sapiens
taatataaaggaatgcaaaggcagacctatccgaagccataattggagtggcagctggctcaggggcaggcttagtgcaaagagctgagccatacctgcaycccagcactgttctgccactccgttaactgctctctgtacgtggcctgctatcttggtgcgcagtgaaggttagaataacagctgcaaccagttatgaaa

SEQ ID NO: 380576 - DNA, 201 bp, Homo sapiens
tgaacctggaaggtggaggttgcagtgagccaagatcgtgctactgcactccagcttggcgacagagtgagactccatctcaaaaaaaaaaaaaaaaaacrtattgggagtcgtcgatgtgtggtagccagaggccctctcccctctccaccagctatccctgtaccctgcgccagtacctttgtgtgaacacacccagcc

SEQ ID NO: 380577 - DNA, 201 bp, Homo sapiens
gcatctaggctgcaagagtttgaggagtgtgaagaatcctctgagttggcatggatggtacctctgtctgcctcccaggagtaactagtctcagcctgccrgttaagacaggtcatcttatctcgaaggtcagagccaattctaggcagtagctgccctgctccaggttacaggcagggcttacaaggaacttaccattct

SEQ ID NO: 380578 - DNA, 201 bp, Homo sapiens
catatacacacactgcaccacccggatccccggcccctaagcctcctggcagctacctctgggagccgggcgccgccttctgcactgctgagttgaagaakgagtcgctgaagaagtcgagggagccgctgaagatgacgcgggcattgttcctggcctggagcccagcaatgaggagggtgttcttccccaccgcatgtg

SEQ ID NO: 380579 - DNA, 201 bp, Homo sapiens
agaaatgcacgggtagagcgccacctatcggaataaactgaactctgtccccaccagagggaacactcatttcactaatagttatgtgcactgatggtgcyaagagattttaaaaaaaacaaaaagtggtctgttggcccagaggtctcagtgtggcagcagagagcccagggtgtaagtgctagaatcgagtatgcttgg

SEQ ID NO: 380580 - DNA, 201 bp, Homo sapiens
ggccggacgctgttcctcgttatgaagaagtaagtgacagcagcgcggcagggcctggagctgatacatctcccaaggggagctggttcctgccctccatstgcaccttgatcagggggttttggagaacagggtcatcacccttccggagaagaaagccatgcaaagggaacatatctgccctggagagcattttccctg

SEQ ID NO: 380581 - DNA, 201 bp, Homo sapiens
ttcttgatacaggtttcatatgtcctgagagcccttcccaatacaatgaggacaataaggtgctttccccactctttggtttttgtctgtttgtcgtgggrgatggaggaaggctgttctgtgattcagtacaacttcacccagggtggagcatgtcaggctctggcctggctgctgaagggagcctgcagaatgagttag

SEQ ID NO: 380582 - DNA, 201 bp, Homo sapiens
tggggaatgaaggttattagactgttgcactccaagctgggttaatagctaacaagtagccaaatcctttgcctgtgaaacatccagtcttagcatcaaarcatgccctggttggggcatgacagctgttgcattcacagcagctacaagattgttgattcttaccagatcttcttgatacaggtttcatatgtcctgaga

SEQ ID NO: 380583 - DNA, 201 bp, Homo sapiens
ctcactggagagggggaactggatctctttcctttaagctcactctgcaagcccacctccagctcagaggcttgcatgtcaactccctactctcaactctyggaaggactcaagactttgggaaattgaagagtatttttcccccacgaaaacaatttctgtccacttaatttatttaccttgccattgctaggtaggttt

SEQ ID NO: 380584 - DNA, 201 bp, Homo sapiens
cacgctgtgcggagagggctctagcccctcagtcggacttctccttctccttcatgtgcaagaagacgatgctgaagatgaagagccccagcatcatggaraaggcgctggcgtagtaggggtaggccgaggggatgaagcgctcatactgcgtgtgctggagtggccgcacggatacctgcaggaggacagaggtggcag

SEQ ID NO: 380585 - DNA, 201 bp, Homo sapiens
aggattttttccaggaagtaggtaggaaaagacagattatccacaggaaaggtgcctgtatagtcaggttacctccccctgttacacagaagtctaaaccwgaatgtttgaaattgtattctgcccacagatcacccagagatcaggttcaaaggtagattttggccaggcctggtggaccatgcctgtaatcccagcact

SEQ ID NO: 380586 - DNA, 201 bp, Homo sapiens
tctacaaaaaaaaaatatgttttaaattagccggaaaaaaagttagccaggcatggtggcatgcacctgtagccccagctacttgggaggctgaggtcggrggatcacttgagcctaggagttaagagtctgcaatgagctatgaatgtgccactgtactccagcctgggcagcagagtgagatcctatctcaaaaaaata

SEQ ID NO: 380587 - DNA, 201 bp, Homo sapiens
acagccatactcctctgcccctgagctcccatgacacctgctggggccctgacagcctggggctgtgatcatgacttgcccaggggcccgagggtggaaaygatgctctggctcctttgattgcatagaacaggggccactcaggttgactcaagagcaggagcagcgcgtgggcacacgtggactgcagccacacagcct

SEQ ID NO: 380588 - DNA, 201 bp, Homo sapiens
ggttagttcaccatcccctccttcctgcaacctgcctcactggagagggggaactggatctctttcctttaagctcactctgcaagcccacctccagctcmgaggcttgcatgtcaactccctactctcaactcttggaaggactcaagactttgggaaattgaagagtatttttcccccacgaaaacaatttctgtccac

SEQ ID NO: 380589 - DNA, 201 bp, Homo sapiens
caaagagctgagccatacctgcatcccagcactgttctgccactccgttaactgctctctgtacgtggcctgctatcttggtgcgcagtgaaggttagaayaacagctgcaaccagttatgaaatgatagaggagactacttacctggttcaagggaccagatagctgtgcacaagaggcactaggctttccacccagggg

SEQ ID NO: 380590 - DNA, 201 bp, Homo sapiens; identical to SEQ ID NO: 82861

SEQ ID NO: 380591 - DNA, 201 bp, Homo sapiens
cacaagaggcactaggctttccacccagggggaaaggctatttcaacaatgcatgctgccccatgcagaggtgtacacatggaaaagcttggagcacgggyaggggacaggcagtatttgtcacctgagtgaagggcatcagtaggagatagggtagaggaagaattgggttgggaccagagaagggaagaccctcactaa

SEQ ID NO: 380592 - DNA, 201 bp, Homo sapiens
  misc_feature (1)...(201): n = A,T,C or G
ttctgaataatgagaaagaagatggcctggacccaggctgagcagtagaacctggttgggttgtgtttttctggtttattgatctggtcgacgtggaccangccttgctgcacctctctctgcctcccctgtttcccttttcttgggccttcctaggctccctggctcacggtgcattcttttctcgtcacaggcaatttt

SEQ ID NO: 380593 - DNA, 201 bp, Homo sapiens
aaccgcagtaaaaactatgaacggcgagaaaaacagtcctaacattttagttacctgtgtagagttatccctgctgactggatacacaagggttcttaggsttttttaatgcttaaaatagcacaagacttctctttttgcccaaccaaagtctgtattagggttctccaaatggaatcaataggatgtgtctatatagag

SEQ ID NO: 380594 - DNA, 201 bp, Homo sapiens
gacatagtccctgtccctcttcagggactttgttcctttagcagttctcactgtctggcctcaaataacacgtctttttctgttggttcctttttgctccrgctgtactgtaaacactctttgtttactgcataccctcagtaaatacctgttgaatgaccggatagatgtggcagcaggtacattacctcaacttctggt

SEQ ID NO: 380595 - DNA, 201 bp, Homo sapiens
ggacccaggctgagcagtagaacctggttgggttgtgtttttctggtttattgatctggtcgacgtggaccacgccttgctgcacctctctctgcctcccstgtttcccttttcttgggccttcctaggctccctggctcacggtgcattcttttctcgtcacaggcaatttttacccagaaaagcaagccggggcctgac

SEQ ID NO: 380596 - DNA, 201 bp, Homo sapiens; identical to SEQ ID NO: 82863

SEQ ID NO: 380597 - DNA, 201 bp, Homo sapiens; identical to SEQ ID NO: 82864

SEQ ID NO: 380598 - DNA, 201 bp, Homo sapiens
tttgacaaccttatgcagcgtgttaacactgcattccccttgcaccctggagattgagcccagagaagataaggacagaggggacacattccaagatagaycccccagtggatgcctgaagccacagatagtaacaaaccctatatatactgtgttttttcctatacacacatacctatggtaaagtttaatttataaatt

SEQ ID NO: 380599 - DNA, 201 bp, Homo sapiens
atagactgcaaatccatgaggacagggactctgtcttgttctgtgccatagttccacagcattccagcatgatgtctggtactcagcatgcaaacagtgcrtattggttgaatgaataatagtacagctaatagcagctgagagcttcctctgtgctagacacgattctaggtgccttccacactttgacaaccttatgca

SEQ ID NO: 380600 - DNA, 201 bp, Homo sapiens; identical to SEQ ID NO: 82858

SEQ ID NO: 380601 - DNA, 201 bp, Homo sapiens
ttgcagtgagccaagatcgtgctactgcactccagcttggcgacagagtgagactccatctcaaaaaaaaaaaaaaaaaacgtattgggagtcgtcgatgkgtggtagccagaggccctctcccctctccaccagctatccctgtaccctgcgccagtacctttgtgtgaacacacccagcccccgcctcgccgccatgat

SEQ ID NO: 380602 - DNA, 201 bp, Homo sapiens
ttctctacaaaaaaaaaatatgttttaaattagccggaaaaaaagttagccaggcatggtggcatgcacctgtagccccagctacttgggaggctgaggtyggaggatcacttgagcctaggagttaagagtctgcaatgagctatgaatgtgccactgtactccagcctgggcagcagagtgagatcctatctcaaaaaa

SEQ ID NO: 380603 - DNA, 201 bp, Homo sapiens
agctctccaggggcactagagggtgggtcaggagcatttaggactgactcttcaggtcctctctggttttgtgttctaagtcatgtctttatttagctccrcacacaagaggttagcaatctctcccttagaacggggtttttttttctctctttgcagagagacagcacttcccaagttcctttctctagcccacttaaa

SEQ ID NO: 380604 - DNA, 201 bp, Homo sapiens
gcaagactctgactggggggagaaaaagttgttttcactggctacttttgctggaattaatttcacatttaaaaaattctgggccgggcggggtggctcaygcctgtaatctcagcactttgggaggccgaggcgggcggatcatgaggtcaggagatcgagaccatcctggctaacatggtgaaaccccgcctctactaa

SEQ ID NO: 380605 - DNA, 201 bp, Homo sapiens
agtttgagaccagcctggccaacatgatgaaaccctgtatctactaaacatacaaaaattagcctggtgtggtggcgggcacctataatcccagctactcrggaggctgaggtaggagaattgcttgaacctggaaggtggaggttgcagtgagccaagatcgtgctactgcactccagcttggcgacagagtgagactcc

SEQ ID NO: 380606 - DNA, 201 bp, Homo sapiens
tgttttcactggctacttttgctggaattaatttcacatttaaaaaattctgggccgggcggggtggctcatgcctgtaatctcagcactttgggaggccraggcgggcggatcatgaggtcaggagatcgagaccatcctggctaacatggtgaaaccccgcctctactaaaaatacaaaaaaattagccaggcatggtg

SEQ ID NO: 380607 - DNA, 201 bp, Homo sapiens
ccccgcctctactaaaaatacaaaaaaattagccaggcatggtggcaggcgcctgtagtcccagctactcgggaggctgaggcaggagaatggcgtgaacycgggaggcagggcttgcagtgagccaagatcgcgccactgcactccagcctagaggacagagtgagactccgtctcaaaaaaaataaaaaataaaaaaat

SEQ ID NO: 380608 - DNA, 201 bp, Homo sapiens
cgtgaacccgggaggcagggcttgcagtgagccaagatcgcgccactgcactccagcctagaggacagagtgagactccgtctcaaaaaaaataaaaaataaaaaaataaaaaattctgaagccaggcatggtgactcatgcctgtaatcctggtgctttgggaggccaaggtgagagaatctcttgagcccaggagttga

SEQ ID NO: 380609 - DNA, 201 bp, Homo sapiens
agctgtagttgcaacactgcaccccatcctgggcaactagcaggagtgtgctagtagcaagctctaaaaatttatattataaaaatatatatataatgtgwatatatatgtatatgtgtatatatgttgtgtatactataatatgtatgttccatataatagtatatagtatattttatatatatacacacacacgttgct

SEQ ID NO: 380610 - DNA, 201 bp, Homo sapiens
tgtagttgcaacactgcaccccatcctgggcaactagcaggagtgtgctagtagcaagctctaaaaatttatattataaaaatatatatataatgtgtatatatatgtatatgtgtatatatgttgtgtatactataatatgtatgttccatataatagtatatagtatattttatatatatacacacacacgttgcttct

SEQ ID NO: 380611 - DNA, 201 bp, Homo sapiens
  misc_feature (1)...(201): n = A,T,C or G
gtcgacgtggaccacgccttgctgcacctctctctgcctcccctgtttcccttttcttgggccttcctaggctccctggctcacggtgcattcttttctcntcacaggcaatttttacccagaaaagcaagccggggcctgacccgttggacacgagacgcttgcagggctttcggctggaggagtatctgatagggcagt

SEQ ID NO: 380612 - DNA, 201 bp, Homo sapiens
accaagctctagctcctttggtcttggggacagctccaattactagaacatgatttaaattgagccacacagtcctttgcctggggattttgcagcctgtrcttactggaggcatttccgtgttcgcacagcaggcccttctgatcagctctcaggccttgctgacctcctgggccaacactgagccattagcccctgtca

SEQ ID NO: 380613 - DNA, 201 bp, Homo sapiens
  misc_feature (1)...(201): n = A,T,C or G
agctcactcaagctctgggttccttgggacagagttcagattagcccatggatcaggtgatgtgcaggacatgaaaaggttagatgggcgggcagcgtgangtctcacccactgcttctgagcaggtgtccacggcccgtcctggccccagggcagtgattgactacagcaaggctgatgcctgggcagtgggagccatcg

SEQ ID NO: 380614 - DNA, 201 bp, Homo sapiens
  misc_feature (1)...(201): n = A,T,C or G
tctgcctcccaggagtaactagtctcagcctgccagttaagacaggtcatcttatctcgaaggtcagagccaattctaggcagtagctgccctgctccagnttacaggcagggcttacaaggaacttaccattctgctccggcctgtgtaaccctgggttccttgtgggtgttccaggcaggttcctccagcgaagccatc

SEQ ID NO: 380615 - DNA, 201 bp, Homo sapiens; identical to SEQ ID NO: 82866

SEQ ID NO: 380616 - DNA, 201 bp, Homo sapiens
cctcccaggagtaactagtctcagcctgccagttaagacaggtcatcttatctcgaaggtcagagccaattctaggcagtagctgccctgctccaggttayaggcagggcttacaaggaacttaccattctgctccggcctgtgtaaccctgggttccttgtgggtgttccaggcaggttcctccagcgaagccatcttga

SEQ ID NO: 380617 - DNA, 201 bp, Homo sapiens
cagttaagacaggtcatcttatctcgaaggtcagagccaattctaggcagtagctgccctgctccaggttacaggcagggcttacaaggaacttaccattmtgctccggcctgtgtaaccctgggttccttgtgggtgttccaggcaggttcctccagcgaagccatcttgaacacaatgagccaggagctggtcccagcg

SEQ ID NO: 380618 - DNA, 201 bp, Homo sapiens
gtcgatgtgtggtagccagaggccctctcccctctccaccagctatccctgtaccctgcgccagtacctttgtgtgaacacacccagcccccgcctcgccrccatgatgctgctgcagctgctggaaggcgtggaccatctggttcaacagggcatcgcgcacagagacctgaaatccgacaacatccttgtggagctgga

SEQ ID NO: 380619 - DNA, 201 bp, Homo sapiens
tgacagtgtaggcattgggtggggctgtctcgcccacccgatgatgggacacaggccccacacggaggacaccctcctccttgaacacccagcgggagagrgccacagctagttcatagttgcctgtctgggaatacctgcaggagggaaacaggagcagcttgggcaccagagccacctttccagtggtgcctgatgggc

SEQ ID NO: 380620 - DNA, 201 bp, Homo sapiens
tctgatgctggcctcatatgtttgtctcacttggctgactagaaaatccaagagaggtcccaagcaactagcccctcaccccaacatcatccgggttctcygcgccttcacctcttccgtgccgctgctgccaggggccctggtcgactaccctgatgtgctgccctcacgcctccaccctgaaggcctgggccatggccg

SEQ ID NO: 380621 - DNA, 201 bp, Homo sapiens
tccttgggccagtcagctttggctgaagggcagggctggcacacagctggcagagccaccccatccaaaatccagccactgtgcctcagcagggctgtggkttgggggtcggggggcgctccccacaggataaggagcagccagggcaggcagatgacactaccactactagctgcatctggatctattcacttattcaac

SEQ ID NO: 380622 - DNA, 201 bp, Homo sapiens
gtggcttcctctccactgcagactggcagatttcttcactcacactcccaaaaagagaatctacttccctcccttcccttcgtccaaccatctgggtctcragtgtcactgtaggttcactgccgttggggcaggtgactccttgggccagtcagctttggctgaagggcagggctggcacacagctggcagagccacccc

SEQ ID NO: 380623 - DNA, 201 bp, Homo sapiens
cccagcacctgcacctccatctatttctgtctgaactcttgtactcttgctacctttctggacagagtagcctcatcggggccctaagaggcagagagagaaagacagtactgaatccctctgctctggggatgcgcctgatgtcacccacttgcctgagagaccctctgagatcactgtggatcacacactcctgctagt

SEQ ID NO: 380624 - DNA, 201 bp, Homo sapiens
gaatttccatcagttactgattcttgaacttgtaggaacgtggttccactgtccacatgctgttctttcctcgcatctcctgttcctgcttccctttggcytgctcacctctggctcctcatggccccagtgaagtatcgtggcttcctctccactgcagactggcagatttcttcactcacactcccaaaaagagaatct

SEQ ID NO: 380625 - DNA, 201 bp, Homo sapiens
gaatcctagcagttcaactcctgtggcttttttagttgctgaaaaagttgttcagaggccagacacggtggcttacacctataatcacagcactttgggargctgaggcgggtggatcacttgggaccaggagttccagtccagcctggccaacatggtaaaaccccgtctgtactaaaaatacaaaaattagctgagtgt

SEQ ID NO: 380626 - DNA, 201 bp, Homo sapiens
tccagcttggcgacagagtgagactccatctcaaaaaaaaaaaaaaaaaacgtattgggagtcgtcgatgtgtggtagccagaggccctctcccctctccrccagctatccctgtaccctgcgccagtacctttgtgtgaacacacccagcccccgcctcgccgccatgatgctgctgcagctgctggaaggcgtggacca

SEQ ID NO: 380627 - DNA, 201 bp, Homo sapiens
ggtagagcgccacctatcggaataaactgaactctgtccccaccagagggaacactcatttcactaatagttatgtgcactgatggtgccaagagattttaaaaaaaacaaaaagtggtctgttggcccagaggtctcagtgtggcagcagagagcccagggtgtaagtgctagaatcgagtatgcttgggctgagggagc

SEQ ID NO: 380628 - DNA, 201 bp, Homo sapiens
tatgttgtgtatactataatatgtatgttccatataatagtatatagtatattttatatatatacacacacacgttgcttctgctccatgaagtttataarggaagttggattttccttttttttttttgatacggagtctcacaccgtcgcccaggctgtgcaatggcacgatctcagctcactgcaacctccacctccc

SEQ ID NO: 380629 - DNA, 201 bp, Homo sapiens
ccgtcagccaaggtctttgcagagcgagctgtctccataatcagacacctccagaactctgctggagagtgaaggcagcaaggagaggtgcactggctgcrggacgtggggtttctgacctctcagatcattgagtattgtgatcccagtgaagcaacagagtttgagaaaaatcattctgaataatgagaaagaagatgg

SEQ ID NO: 380630 - DNA, 201 bp, Homo sapiens
gctgagtgtcgtggcacacgcctgtaattccaggtactcgggaggctgaagcaggagaatcgtttgaaccctggaggcagaggttgcagtgagccaagatygcaccactgcactctggcctaggtgacagtgcaagtctttgtctcaaaaaaaaaaaaaaaaaaaaaaggctattcagagagagaaaaggaggcatttttg

SEQ ID NO: 380631 - DNA, 201 bp, Homo sapiens
tagctacagcttcccttcctgttgcagagaccatctgcccgagtagccgcaaatgtgcttcatctaagcctctggggtgaacatattctagccctgaagamtctgaagttagacaagatggttggctggctcctccaacaatcggccgccactttgttggccaacaggctcacagagaagtgttgtgtggaaacaaaaatg

SEQ ID NO: 380632 - DNA, 201 bp, Homo sapiens; identical to SEQ ID NO: 82867

SEQ ID NO: 380633 - DNA, 201 bp, Homo sapiens
gacccaggctgagcagtagaacctggttgggttgtgtttttctggtttattgatctggtcgacgtggaccacgccttgctgcacctctctctgcctcccctgtttcccttttcttgggccttcctaggctccctggctcacggtgcattcttttctcgtcacaggcaatttttacccagaaaagcaagccggggcctgacc

SEQ ID NO: 380634 - DNA, 201 bp, Homo sapiens
cccgaatgtgccaggcttctctgtgaccatctcttgagcgtacagctggctatacctgggctgccctcctcccacatttcaggtctcagttcagacaccckcaaccccaccatgtatctccccagtacagccatactcctctgcccctgagctcccatgacacctgctggggccctgacagcctggggctgtgatcatgac

SEQ ID NO: 380635 - DNA, 201 bp, Homo sapiens; identical to SEQ ID NO: 82869

SEQ ID NO: 380636 - DNA, 201 bp, Homo sapiens
ttgcccaggctggagagcagtggcgtgatcttggctcactgcagcctcaacctccctgggctcaagtgatcctcccacctcagcctcccaagtagctgggwctgcaggcacatgccaccatgcccagctaatttttgtagtttttgtagagacagagtttctccatgttgcccgggctggcctcgaactcctgggctcaag

SEQ ID NO: 380637 - DNA, 201 bp, Homo sapiens; identical to SEQ ID NO: 82870

SEQ ID NO: 380638 - DNA, 201 bp, Homo sapiens
tgtagagacagagtttctccatgttgcccgggctggcctcgaactcctgggctcaagcaattgcctgcctcagcctcccaaattgctgggattacaggagwgagccacgggaatttccatcagttactgattcttgaacttgtaggaacgtggttccactgtccacatgctgttctttcctcgcatctcctgttcctgctt

SEQ ID NO: 380639 - DNA, 201 bp, Homo sapiens
acgcctgacctcgggtgatctgcccacctcagcctcccaaagtgctgggattacaggtgtgagccactgcgctcggccaactttttttttttgtttttttktttttttttaaagagaggagttctgtgttgcccaggctgctctcaaactcctggcctcaagcgatcctcctgcctaggccttcccaaagcgctgggatta

SEQ ID NO: 380640 - DNA, 201 bp, Homo sapiens
tagtaacaaaccctatatatactgtgttttttcctatacacacatacctatggtaaagtttaatttataaattaggcacagtaaaaaattaaagataactaataaaatagaataattatgacaatatactgtaataaaagttatgtgaatgtggtctctctctctctcctctctctaaatatcttcttgtactcacctatt

SEQ ID NO: 380641 - DNA, 201 bp, Homo sapiens
aagtgcctaaaccactgatttctaccttgattggttagttcaccatcccctccttcctgcaacctgcctcactggagagggggaactggatctctttcctytaagctcactctgcaagcccacctccagctcagaggcttgcatgtcaactccctactctcaactcttggaaggactcaagactttgggaaattgaagagt

SEQ ID NO: 380642 - DNA, 201 bp, Homo sapiens
aaagtttaatttataaattaggcacagtaaaaaattaaagataactaataaaatagaataattatgacaatatactgtaataaaagttatgtgaatgtggyctctctctctctcctctctctaaatatcttcttgtactcacctattctcaaactgtagataactgaaattgcagaaagcaaaactgtggataaggttggg

SEQ ID NO: 380643 - DNA, 201 bp, Homo sapiens
tcggcctcccaaagttctgggattacaggcgtgagccactgcgcccagccaggaactggctttttaaaggaattttgtgtggacccttttacaaataaccwattctttttttattttttctgagacagagtctcgctgtgttgctcaggctgaagtgattctcctgtctcagcctccttcacctcccaggttcaagtaatt

SEQ ID NO: 380644 - DNA, 201 bp, Homo sapiens
agcaggggaagacccaccagatttttgtcacatggcctctttcccagtgcagcactgcccccagcacctgcacctccatctatttctgtctgaactcttgyactcttgctacctttctggacagagtagcctcatcggggccctaagaggcagagagagaaagacagtactgaatccctctgctctggggatgcgcctgat

SEQ ID NO: 380645 - DNA, 201 bp, Homo sapiens
gcctggccaacatggtaaaaccccgtctgtactaaaaatacaaaaattagctgagtgtcgtggcacacgcctgtaattccaggtactcgggaggctgaagyaggagaatcgtttgaaccctggaggcagaggttgcagtgagccaagatcgcaccactgcactctggcctaggtgacagtgcaagtctttgtctcaaaaaa

SEQ ID NO: 380646 - DNA, 201 bp, Homo sapiens
taattatctgcaccattactttgaatatagggagccccaactcttacttcctaatttgaggatggtgagtgggagggaacagaaaggatgctggggaaaartgggaatcaaagtgctcctggaaggggaagaggaacggcctaaccctaacagtgattaaggttattaggaggccgggaatggtggctgacgcctgtaatc

SEQ ID NO: 380647 - DNA, 201 bp, Homo sapiens
tgaagcaggagaatcgtttgaaccctggaggcagaggttgcagtgagccaagatcgcaccactgcactctggcctaggtgacagtgcaagtctttgtctcaaaaaaaaaaaaaaaaaaaaaaggctattcagagagagaaaaggaggcatttttgagaaatgtttaatggagatgtagctcatggaagcagctgagaactg

SEQ ID NO: 380648 - DNA, 201 bp, Homo sapiens
tctcatcttcatccagaacatacttgtcacctagtccttttggtccatttgactgttaaccttttctgtggctggacttatctgtttttaacataaaaacygttctccttcctcaccctctgtatcccctaactttgctatagtgggtattttattttaaggaaataattatctgcaccattactttgaatatagggagcc

SEQ ID NO: 380649 - DNA, 201 bp, Homo sapiens
ctgaatgcaggagactcgatgccttgtgataacccaacacctccatcttttctgacccataatttggcacaagttccttccctgccactttgctttcctcyggcgttccctcatgttccaggagaatgcaagtcctgtcacataaaccaggtggtctaagcagaccccttctgggtctgagccacagctcactcaagctct

SEQ ID NO: 380650 - DNA, 201 bp, Homo sapiens
cctttctaagtatttaacactgcttggctgtcattgatgtgttagtccctgttgtgcacccctccattgcctttactttttttttttttttttttttcctkaagggagaacccaagctcataatttgagattcttccactttcaaatttaggtagtggtataatttttaatttttagttgttatgagtaagtatgtattta

SEQ ID NO: 380651 - DNA, 201 bp, Homo sapiens
gatctgagtcaaagacactaagattagctttttactaagtagaatcaggaagtcttagtctgtatttctctttataataataaagactataaaggtctttygggacaaagattatataaagcaattgaagtgctctagatagaaaattctgatttgaaatgcaacattttagctaattatactaaagctgagtttgaaata

SEQ ID NO: 380652 - DNA, 201 bp, Homo sapiens
tttcctggtctctttactaatacctagtccaagactcagcgacatcacctccactgaaccagccaggctgaggctggcctaggtgcccttctgtgtattcyatctttaacaatctgagcatcctaatattataggactttgcagaggatattgagatgattcacaagtgttttccatactggattgtaagcacaaaggcag

SEQ ID NO: 380653 - DNA, 201 bp, Homo sapiens
tctctttgtatttacttagaccaaggattgtggagtgtatatgtaatcttgggggtagaaaaggaggcagaagaacatgattttttttcatgcattttttyccccttattcctctgctcttggctttcctttagtaaatacgtaggtacatctaggtaaagcaaatgaacaacccattcagcagtatcaaccagatttggt

SEQ ID NO: 380654 - DNA, 201 bp, Homo sapiens
ttttactgtagttgtgtgtgtagtagtatcacttactataagaaaaaaataattttgctctataagaaagggggctgctacccagcagccgtccgtgcagrtggacttctgtttctttcagggttaactgctacttctatgttatactttaaatcttttctggaggctgtatgtccagtttgccagagagagatgaggtag

SEQ ID NO: 380655 - DNA, 201 bp, Homo sapiens
gtgttgctggtatttttcccactaatgtctaatttggtttgtgatatagtcactatttttaaaaaccagtgtaaatagaacagaggtacaaaaaagggtayctttagttgtgtagttaattttaaaacttactgttctatgaaaatgagtgaactactactacatataacatggaaatgtctcattgtttaataaaagaaa

SEQ ID NO: 380656 - DNA, 201 bp, Homo sapiens
tcttttctctgggtattggctttcccccagcctcctattttttgcgctccccctcctccccagccacctctttccctgggagccaacttgataaaagtaayggcacaagtcttgcagaatactcctaccaatctaaatgctgcagacgccacagtgcttttttctcacccttaatagtcgtaagataagttagaggaagct

SEQ ID NO: 380657 - DNA, 201 bp, Homo sapiens
attaatttatggtgtctaaaaataagaatattgcttacccttgggaaggaaaagaggggatagtgattggaagggacacaaaaatgatttctagagtgttstatttgggtaataacatgggtacttttacagtacttgaataaaatttctagaactgtacactcatgatttattgaagtgtgtacttttatattctttccc

SEQ ID NO: 380658 - DNA, 201 bp, Homo sapiens
atatttgagtttattgggttctggttaatgtatcgtactggtgtattttaataactaatgtatattttaaataattatttaaaacattgcagatttaaatrtactcatattttctactgtccactggttgatgcctgttaaaaatttaattttgtggaatcttggtcagccacttgactatgatgtttaaacagtagctga

SEQ ID NO: 380659 - DNA, 201 bp, Homo sapiens
cccgggttcacgccattctcctgtctcagcctcccaagtagctgggactacaggtacctgccacctcgcctggctaattttttgtatttttaatagagacrgggtttcaccatgttagccaggatggtctcgatttcctgaccttgtgatctgcctgcctcggcctcccgacccttgcccattcttaggcactgttagaca

SEQ ID NO: 380660 - DNA, 201 bp, Homo sapiens
gcacctcacctgagatactcaagactggcaacatgggtctacattctttgttaccacagattcccttgtgtccggagagattccctagctctaatgacagmttttttggggggtaatgaggctatgagaagattgaggatctaggtacttgcctttaactctacagcatacaaggtgtgtggctcttatctctaggacacc

SEQ ID NO: 380661 - DNA, 201 bp, Homo sapiens
  misc_feature (1)...(201): n = A,T,C or G
tcaagtgtttcttactattttgggaagcttgcatttatttgatattgatctactactgttaattgtgcattagttttataacgtcattattaacattaacnttttttattctgtaagtaaaataagtaggtaagattatttggaggctttatagtttgctttgaaagatttatatagcctgggggaaaagtctcataccta

SEQ ID NO: 380662 - DNA, 201 bp, Homo sapiens
cacagatactgcatttttaagaaacatttattttgcgaaacaaatagatggtttgtggcaaccctgtgtcaaggaagtctatcaataaacaccgttttccyaacggcatgtgtttactctgtttttaaagcagtaatgtattgctttaaataatgtatcacatttttaaagcaataatgtacttttaaaataaggtgtgta

SEQ ID NO: 380663 - DNA, 201 bp, Homo sapiens
tatatggaggaaggccaagagaagagagcaagacaggactgaactttcttttataacaagctcactggtgataacctcctcctgagatactgacagtaatmttttcctaatcacctcttattaggccctacctcccaacactgttgcgttggggattaaattacaacatgggagatttggagggggacacagtcaaaccat

SEQ ID NO: 380664 - DNA, 201 bp, Homo sapiens
acaaatgttacccttttttatttgtgccatggtgagaaaaaagtgggaaatgactgacttggataataatgtgtagatttttttcccccttgtaaccaagyaggtagctttggaattaaggataattgattagtcttagttttggttacccttaaatttttctacttttgaagccactgataatagattgttatattcccc

SEQ ID NO: 380665 - DNA, 201 bp, Homo sapiens
cttgggtgtgctctaggctcctccatcacatacagatgttgacagtattttatctaaagtgtggtgtgtgggatattgtgatgacttacatcacggcagcytgtttaaaatttttattgcatacttagttgtttttatataaattgaagtgtcacgttgtatgccgtcctttggtggtggttgaaaataattcttacatgt

SEQ ID NO: 380666 - DNA, 201 bp, Homo sapiens
tggcagaagggggaaacgatagagttggggatttcccaggaaattctttatgggtcagaccttgaaagagcctccttgtctctccacccccttgatcaaasaattagacagaactcaaatcatgtagcataactgactgcaagggaattggtaaattatagtatagttatatcacaggaccaaagagaattgggtttgatg

SEQ ID NO: 380667 - DNA, 201 bp, Homo sapiens
gatattaatgaaaggtatattaaactctgcagggaaaatggagactattaagtagtctcatgtcccagcactttttggaaggctgaggtgggcagatcacstaaggtcaagagtttgagaccagcctggccaacatggtgaaaccctgtctctatcaaaaatacaaaaaaagttagctgggcatggtggcatgcacctgta

SEQ ID NO: 380668 - DNA, 201 bp, Homo sapiens
tctatgatactatcaaaagcatgttgtaagagttgtcagtgaatgggtttactttttccttttcatacctttttgtagagatagatttttaaaaaatgctktccttgaaagcaaagtaattaaaggagttaaattggtggggaggagtggcaggaacgtggtgggaatactcagatattaatgaaaggtatattaaactct

SEQ ID NO: 380669 - DNA, 201 bp, Homo sapiens
gttacatgaaagctttattttactggaaacttggaattttaagtgttactgtaatgtcttataattttgcttaaaacagtagtcatttttgcttattcacmtctgaatattttcatcattatgtaaaatttaatgccagtttttcagttggtaagctctgaaatatttttaaagtttttgtaatgaagtttgtggtatatg

SEQ ID NO: 380670 - DNA, 201 bp, Homo sapiens
actccaacttcacctttgaagatgaaaccagggcgcccacgaataaaaaaagatgagaagcagaacttattatccgttggcgagtgagtaatagtttaaayttcatagttcaaccaaacttattttcgatagtcttcagtggaagcataaaatcactatgataaataacttaaaattattttagtgccattatttatttgg

SEQ ID NO: 380671 - DNA, 201 bp, Homo sapiens
ccatgtccagcttttccacttcagaccatggcagctacctctagtattttggaacttgcagagttcctattcaagaatccgttagtaatgaaaataaagtsagtagatatgtgtaggcttagatgaagagattgccttgtatttcttgtcttaaaatgcctattgtgcttttcttttgttcttagatgtaaaatggggtaa

SEQ ID NO: 380672 - DNA, 201 bp, Homo sapiens
acagtcaaaccatagcaatgtctgtttaatttttgtaattatggcacagatatccatttgaaatatgtgtaatatggaatactataacttccatatcttaygtgtctatgtaagccaaatggaagtattatatgaattaacataatatgatgtcattatctagttatgttaacaacacctttaaaaatttaaccttggaag

SEQ ID NO: 380673 - DNA, 201 bp, Homo sapiens
ttctttctaccaggaaatatttgatgatgcgtcacctggaaagcaaaaggaaatccaagaaccagatcctacctatgaagaaaaaatggtatgttctaggyttgtgaatagagtctataaggaaaactttttatcaggtgattaaatgtactaaacatctatcttagtccattttgtgttacaacaataccacagactggg

SEQ ID NO: 380674 - DNA, 201 bp, Homo sapiens
tcatgtttatattagtcttgtgaaaagtaatccttctgtctgtttgtagacacagaaacgtaaaatggatggcgcacctgatggtcgaggaagaaaaaagragctgaaactatgaatatgtttttgtttcataatcactaactttaaaccagtagttctttaatttacgggtcttcataagatgtactgtacaatgctcaa

SEQ ID NO: 380675 - DNA, 201 bp, Homo sapiens
tagtcacctgtataccaataatgtgatgtcaagatgcctgaagcacattttatttttgtaggttgcatttcatggcattttggaattttgtaaactggacwgggtaggtggctttgtcacttacatatgtagaccagagatttatgatgaacatagggtcacacaagtgccaagggtcttaacaatgaagttagacttgac

SEQ ID NO: 380676 - DNA, 201 bp, Homo sapiens; identical to SEQ ID NO: 82878

SEQ ID NO: 380677 - DNA, 201 bp, Homo sapiens; identical to SEQ ID NO: 82879

SEQ ID NO: 380678 - DNA, 201 bp, Homo sapiens; identical to SEQ ID NO: 82880

SEQ ID NO: 380679 - DNA, 201 bp, Homo sapiens
tttcccctttctaagtatttaacactgcttggctgtcattgatgtgttagtccctgttgtgcacccctccattgcctttactttttttttttttttttttytccttaagggagaacccaagctcataatttgagattcttccactttcaaatttaggtagtggtataatttttaatttttagttgttatgagtaagtatgt

SEQ ID NO: 380680 - DNA, 201 bp, Homo sapiens
cccctccattgcctttactttttttttttttttttttttccttaagggagaacccaagctcataatttgagattcttccactttcaaatttaggtagtggyataatttttaatttttagttgttatgagtaagtatgtatttataggttacatgagatactttgatacaggcatgcaataagtaataaggacatcagggta

SEQ ID NO: 380681 - DNA, 201 bp, Homo sapiens
tccttcgtcgaattaaggctgatgttgaaaagagtttgcctccaaagaaggaagtaaaaatctatgtgggcctcagcaaaatgcaaagggaatggtatgtrttctcagatgtacttgatagcactattgattcttccctaaatttcatgtgtattttgttttcctaatttgtgtcttcatggaattccaatttgctggatt

SEQ ID NO: 380682 - DNA, 201 bp, Homo sapiens
aaaaaggaaactgtgatagcacagtgtgggagatatacggttcacttatagttcataaatactgggtcagtgtaaagtagctgcagaaaaagatactgttrgccttaatgtaaatgtagtgttcaaaggagaggaaataaatatagctacccttttctttactggtctcatcatatttcatgtatatttaactgcatactt

SEQ ID NO: 380683 - DNA, 201 bp, Homo sapiens
attgattcataattaatttagaaatcttgaggtttttttacttcatatttactgtggcaatttttggagcaaaccttcaggctaatagctttcttgtgccrtttgtagacatgttagtcaaacagcaagccttaagtgcatacctttgtgttactgttttttatttgagggacataattaaaaacgagagtacacaagcac

SEQ ID NO: 380684 - DNA, 201 bp, Homo sapiens
tttaaagacgggttgagtcatatatagtaatttggtgatttattatgatatttaacaaaataagttaaaatttcgatcagttgacaacatccttgtgggargaagagatggaaataatgacattagtatataaagctcagatttggaaatttattcagactctactgaatagctgtgtacttgttttttatttcctcttca

SEQ ID NO: 380685 - DNA, 201 bp, Homo sapiens
atgacttgtattgcaaatacagtaaactttagttttgtcattaaaaagatggatttgggctcaggacagttgaggtttgaataatgagtctgccagttagyagttctctctggttacatgaacccatttcctcatctgttaagtggggataaaaataactacacttaaggattttaaaggattaaaggggataatgtatat

SEQ ID NO: 380686 - DNA, 201 bp, Homo sapiens
gtagtatgctgactttttttatgaaaatgggtatgtctgtgttgtgtgtttgggtatatttaaattacacgaatgcagaaagaacttagaagccagcttcygattttaactaataaaaacgtttttagtctgctatacccttcctcctcccagattattcgaagcaaacgccagacactatagcctttcataaattattac

SEQ ID NO: 380687 - DNA, 201 bp, Homo sapiens
agctttctgtcataaaatgtgaagaatgcatctccctcccacacatggttaccagatccattgttagacagtggtggtgtgttcatgatattgttttttarttatttatgtggagttttaatttaataaggtaccatgtacatggacctgaaacatttttatttgtagtatgctgactttttttatgaaaatgggtatgtc

SEQ ID NO: 380688 - DNA, 201 bp, Homo sapiens
caaaggagcactgtactttgaaatgactgctctgatgctttccaaggttgacgtgtagaacattaaaaaaacctgttcattatctgagctctaacccccamtcctgattttaggccttaagtctcttagaaggtaagcaatagttagagcaaccatactcccttgattttgggaagagttcatactttatatatactttcc

SEQ ID NO: 380689 - DNA, 201 bp, Homo sapiens
tcaggaagattatttttagattgagagaattgatactgcagattggcctgacccatgatattggtgaccacaaacccaactttaatctctgtcattagtcmctttctttttttttttttttgagatggagtttcgctcttactgctcaggctggggtgcaatggtgcagtcttggctcactgtgacctttgcctcccaggt

SEQ ID NO: 380690 - DNA, 201 bp, Homo sapiens
taactcttacatcttacaatcagtgtagggggtgatgtgtggttgtttcagtgttagaacctagaatggaatcctgacttaagggagaaagtattctcttrcagttatacaaaatacagtggggggaagaagaattgcataataattaatatagacaagtttttgttgttgtttttgagacagtctcactttgtcgtccag

SEQ ID NO: 380691 - DNA, 201 bp, Homo sapiens
cttaacttcataagtaatacttggtaatatagagataaattgaaaaatacccagagattagaagaaaaaaataattctacccagtgtttttcttgttaatrtttaggtctatatcttcagaattttttgtaggctaattatgtgtctacatttttctcctagtttagatttataccaaacattctgtagcatttctccctc

SEQ ID NO: 380692 - DNA, 201 bp, Homo sapiens
aatgctccatctgattgtcactagttgaggtagttgagaagactacagattttattactctggctcggtagagtgggtatcttttttatcaccttactttraatgttcccgtctttcctatgaattttccacattgctacccagtcaccattttcaactataaatcttggcttggttattttttaaacatcctttggtgtt

SEQ ID NO: 380693 - DNA, 201 bp, Homo sapiens
  misc_feature (1)...(201): n = A,T,C or G
gaactgcaatggtgagtgctcagggcttttttgtgtaatgtagcagagttcagagtaagtgtcatctttggtattctttaaggtgactttaaaaaaatctntgaagtagacttttgttacaatattgttagtatcataaaacctaataccagggatagcttacaagtttattggtcctatcctttagtatcttacgtcttt

SEQ ID NO: 380694 - DNA, 201 bp, Homo sapiens; identical to SEQ ID NO: 82881

SEQ ID NO: 380695 - DNA, 201 bp, Homo sapiens
tatatctttaggtttgatttgttatatattttacatatgtatatatgtaactgtcaccttttttgctatcaaacttagagaaaaaatagatttgccgctckgtttttttaaagtgaatactactttgaatacagtctacatattttaatactgctttaaccctttatagtttagattctgacacactctgctggtgaatct

SEQ ID NO: 380696 - DNA, 201 bp, Homo sapiens
ctttttagtattcccacctctttttatatactagattacttgtcatcagtaaatgtaatgcgtagtttatttctacgtgatgtaatttttttctcttgttmcacaggctgcttttgtcagagacgttttattaccgggagaatgggatgtatgtgtaacatcttatgaaatgcttattaaagagaagtctgtgttcaaaaa

SEQ ID NO: 380697 - DNA, 201 bp, Homo sapiens
tttgtgttggctactatttgtgaagcaaatttttagtagtcttagatgtttattggttatgaaataaacttcagattttgatggagatgagagcatattayaggatagtagtgctgtatttcaaagttatataaaatgtcattgtgtttgttattgccctgaagtatatgtaaatctaaggatcgttttgctttatatttg

SEQ ID NO: 380698 - DNA, 201 bp, Homo sapiens
tgctgaaactttgatttctgaagttttaattgatactctgataaaatgtatcttaaatttttttttttcagcaaactgaccgggcaaatagattcgagtayttattaaagcagacagaactttttgcacatttcattcaacctgctgctcagaagactccaacttcacctttgaagatgaaaccagggcgcccacgaataa

SEQ ID NO: 380699 - DNA, 201 bp, Homo sapiens
ttttctaaataagatgaaaatatttgttgaaagtgtcagaattggggagtaagtattaatagttttactgaaccaagccctttagagattaattggcagtrttaaaactttagaaaatcagtttttaagggggtagtatatctgattctcttaggatgtagaatttagatgtgtatttaaaaatttttttgatgaatccgt

SEQ ID NO: 380700 - DNA, 201 bp, Homo sapiens
gggatagtcagtatgatgtctcgaaaagaaacacttcttttattcttttctattttattattatcctaatttatcttttttataagataaaaaagattctrttggaaatagtaataataaattgttaggcttaatgtattaaatagtgttattagggaaaaaagtcctagttaacagatttctttactcctcaaaccatct

SEQ ID NO: 380701 - DNA, 201 bp, Homo sapiens
tgcacatttcattcaacctgctgctcagaagactccaacttcacctttgaagatgaaaccagggcgcccacgaataaaaaaagatgagaagcagaacttaytatccgttggcgagtgagtaatagtttaaacttcatagttcaaccaaacttattttcgatagtcttcagtggaagcataaaatcactatgataaataact

SEQ ID NO: 380702 - DNA, 201 bp, Homo sapiens
ctcagtgacccgtctggccccgcccaccctcgtcgacgtgattcccgccgtgaggtaagcgccggtggaacctagagccccgcggaagagcagaacgtttrggagtgtgcagctcctgggcccggctcaggcccgtcgcggaggcgcggcgcaggggagcgctcgggtgggagtctcgctcctccaccagtttattgcgac

SEQ ID NO: 380703 - DNA, 201 bp, Homo sapiens
gcctgggggaaaagtctcatacctattactttgtagtagttgttattactaaagtgttataatgtgtctgcaactatatttcatgtttatattagtcttgkgaaaagtaatccttctgtctgtttgtagacacagaaacgtaaaatggatggcgcacctgatggtcgaggaagaaaaaagaagctgaaactatgaatatgt

SEQ ID NO: 380704 - DNA, 201 bp, Homo sapiens
cagcaggcgcacaaacctacacctccgagcgctccctggaggtcccgcccactcttctctcccgagccggctagagatctggaagagggcgggccaagggygaggagggcagtatgcgcatgcgcgctcaggacccagtcagtgagccaataaggaatctcgcgagtgttgaaagtcggtggcgtaggtcgtcgtcctgga

SEQ ID NO: 380705 - DNA, 201 bp, Homo sapiens
gatctcctttggttaatgttttggatttgtgttggctactatttgtgaagcaaatttttagtagtcttagatgtttattggttatgaaataaacttcagaytttgatggagatgagagcatattataggatagtagtgctgtatttcaaagttatataaaatgtcattgtgtttgttattgccctgaagtatatgtaaatc

SEQ ID NO: 380706 - DNA, 201 bp, Homo sapiens
tacctctagtattttggaacttgcagagttcctattcaagaatccgttagtaatgaaaataaagtcagtagatatgtgtaggcttagatgaagagattgcyttgtatttcttgtcttaaaatgcctattgtgcttttcttttgttcttagatgtaaaatggggtaaactgagagattatcaggtccgaggattaaactggc

SEQ ID NO: 380707 - DNA, 201 bp, Homo sapiens
acattacacaactggatgagtgaattcaagagatgggtaccaacacttagatctgtttgtttgataggagataaagaacaaagagtaagtttctagtattycattacatttttgaggctaaaataatttgaattcaggcttgggtatgggtatagctggaagaaggataaatgagacgggatcttcgcaaatattagtatt

SEQ ID NO: 380708 - DNA, 201 bp, Homo sapiens
ttgcatttatttgatattgatctactactgttaattgtgcattagttttataacgtcattattaacattaacattttttattctgtaagtaaaataagtaggtaagattatttggaggctttatagtttgctttgaaagatttatatagcctgggggaaaagtctcatacctattactttgtagtagttgttattactaaa

SEQ ID NO: 380709 - DNA, 201 bp, Homo sapiens
cttgcatttatttgatattgatctactactgttaattgtgcattagttttataacgtcattattaacattaacattttttattctgtaagtaaaataagtaggtaagattatttggaggctttatagtttgctttgaaagatttatatagcctgggggaaaagtctcatacctattactttgtagtagttgttattactaa

SEQ ID NO: 380710 - DNA, 201 bp, Homo sapiens
gcttgcatttatttgatattgatctactactgttaattgtgcattagttttataacgtcattattaacattaacattttttattctgtaagtaaaataagtaggtaagattatttggaggctttatagtttgctttgaaagatttatatagcctgggggaaaagtctcatacctattactttgtagtagttgttattacta

SEQ ID NO: 380711 - DNA, 201 bp, Homo sapiens
acatgttagtcaaacagcaagccttaagtgcatacctttgtgttactgttttttatttgagggacataattaaaaacgagagtacacaagcactttacatytgaaggttccggaaccttcctgcccaacttggaagtagtttgtataagcataagaacattttggtagcaatggtagcatccaatccaaggaaacatacct

SEQ ID NO: 380712 - DNA, 201 bp, Homo sapiens
gaagggagagaaggcccctcccaggcactattccactggaagggaagcaaccaaggcagcagcagctgtctcggatcccccgtctaatttaggggggatgrataagtgtaggaatgaattagagaaccaggcgcagttggttggctctcagtccggcacttttctctttttggcctctggccttaagaaaaaaaaaaatta

SEQ ID NO: 380713 - DNA, 201 bp, Homo sapiens
gtatttcattcatgtggagtacattttctgatttcctccagaatgtttttcttttctaaccaatagatttgtttggcatttattttcttacttatgcaagrgaagatattggttaggccagaatgttactatttaaatttataatgtgtgcattaattcctaggttcttcccactagtaaaagcagccaaatgatcacctt

SEQ ID NO: 380714 - DNA, 201 bp, Homo sapiens
atttattgaggtctttgggccaggttcagtgctaattgctttatataatttatcgcaatctgtacagaaactctcttgagaagataaagtctttatcccarttttacaaatgaggaatctgggccttagagaggccaagccacttgcccaagggcacagagctagtaagtatagagccagaattaatgtctacaatgaaat

SEQ ID NO: 380715 - DNA, 201 bp, Homo sapiens
acctcatggcttcctctttctatatttattttcctagatcacatcctctaatagctttctgagaacaagtaattgggtggtaagtttttggtggcatttargtccgaaaatgtcttattctgtcctcacacttcactgactcacagttttgaaagcattgctccattattgttgggcttccagcattgctattgagcctcc

SEQ ID NO: 380716 - DNA, 201 bp, Homo sapiens
tctactaaaaacacaaaaaattagccgggcgtggtgggggatgcctgtagtcccagctactcgggaggctgaggcaggagaatggtgtgaacctggtaggyggagcttgcagtgagccgagactgcgccactgcactccagcctgggcgacagagcgagactccatctcaaaaaaataaataaataaataaattataatcc

SEQ ID NO: 380717 - DNA, 201 bp, Homo sapiens
tacttggtctttcatagatatcaaagaccaattaagattttccagacctacactatgaacaagggaggatcactcgatattgagtgtggcagtgaagtccrtgttttctgattcactccactaatatttattgaggctcttttatgagcctcttttatgtacctgatctgagcctttctttggggcacctgacaatctgat

SEQ ID NO: 380718 - DNA, 201 bp, Homo sapiens
ctcttagcaattttcaagtatacaatgcatcattattaactatagtcaccgtattgtacaatagatctcttgaacttctcttctgtctagctgaaactttmggccctttgacaagcatctccccaaactcccctcccttatccccacccttccccagtcagcccctggtaaccactattctgctctctgcctctgtgagtt

SEQ ID NO: 380719 - DNA, 201 bp, Homo sapiens
taaaaacacaaaaaattagccgggcgtggtgggggatgcctgtagtcccagctactcgggaggctgaggcaggagaatggtgtgaacctggtaggcggagyttgcagtgagccgagactgcgccactgcactccagcctgggcgacagagcgagactccatctcaaaaaaataaataaataaataaattataatccattcc

SEQ ID NO: 380720 - DNA, 201 bp, Homo sapiens
tgccatgttggccaggcttgtctccaactcctggcctcatgtgatccgccctcctcggcctcccaaagtgcaaagtgctggtattacaggcatgagccacygcgcccagcctggaagctttatttaaaaaaaaaaaacaaaaaaaactccttatggaattttctttgcaaagattcactttataacagtaaatataatcta

SEQ ID NO: 380721 - DNA, 201 bp, Homo sapiens
gtgttgcttacattatggtttctgtaacatttttaaaggttggggtagcagtggcattcagagaatcagtttattttgttttatttgtgaggctgatcacmcagcaatgccccgaaataccagtccaaccacagacctactggcgcatgtgcagcaggcacactggtaggcttgggtcacacaccgatgctcccattatct

SEQ ID NO: 380722 - DNA, 201 bp, Homo sapiens
gctgtcagttttgctcactgccagggctgattctgatcctgctgtactcttgacttgtcattcttacctgtctgtctcctttgtttctctcaggctacttrgtctttcatagatatcaaagaccaattaagattttccagacctacactatgaacaagggaggatcactcgatattgagtgtggcagtgaagtccgtgttt

SEQ ID NO: 380723 - DNA, 201 bp, Homo sapiens
acagaaatgttggaataagaatgcagtgaatacccacacacccttcacttagaccaaactttgtatgtaaagagccagatagtaaatattttaggatttgmagacatgtgatttctgtcaccactactcagctctgctaatgtagtaagaaagcagccatatgtataaaggaatgggcagggctgtgttccagtaaaacta

SEQ ID NO: 380724 - DNA, 201 bp, Homo sapiens
attcctgatgcctttcagatagaatctagcccatccacattgtctaggataatctcctttacttaaaatcaactgatgatagatattaatcacacctacargataccttcacagcatcacaacattagtgtttgaataactggagacactatcctagccaaattgacacctaaatccccaaaagtccccaaaatagctgtt

SEQ ID NO: 380725 - DNA, 201 bp, Homo sapiens
atcacccagctctagcgaaactcaattcatgaccaatctagtttcatctgtatattccttgctccccatctttccactgggcaattctggagcaaatcccrggcctgtcatcatatctgtaagtatttcagtatttatatcagtaaatatttcagtatatataaaagattgggacttgtttacacacactgatagaggcga

SEQ ID NO: 380726 - DNA, 201 bp, Homo sapiens
gtatcaaaaaagattgaatgtcttcataatacatctattcatttttttgtagcacttactcaactctgccttgccagtgtagtgcgtaagcatccaaagakaatacagaaatgcgtgtgacctggctctctgtgcaaatgcaggcggaagaccaggcagtcatttggtgatccctggggtagattgttggacctctttttt

SEQ ID NO: 380727 - DNA, 201 bp, Homo sapiens
caaaagccatcatagatgaaatgtcggcgaaggagtgcagacagaagtgggtggcttgcccataggccatagtttgctgacctgttatagattccatacawgtatgtgattcatacatattcatacatgtaagtgtgtgtgtgtgtgtgtatatatatatatatatatgtatgtttttaaaacttgctcaaaagtcttgaa

SEQ ID NO: 380728 - DNA, 201 bp, Homo sapiens
caaatagtggatatcatacacattgcatatcacatgattcccatcaccactactcacctctcccatgaagcagagaaacatccatcgacaatgcataaacrcaggagcatggcagtgttccagtaaaactttacttacaaaatgggctgtagttaccaacccctgcccgtaaccatgttacataaccctcttttttacttg

SEQ ID NO: 380729 - DNA, 201 bp, Homo sapiens
cgattcttgattaaataatcttttattttcatattcttcttcagactttgtcttttgctttggctgacaaaaccaaggccagaattgttttagctaacgayccggatgctgatagacttgctgtggcagaaaagcaagacaggtaaaattaattgtgattacctatattatagaacatataaaggatgatctcttcattgg

SEQ ID NO: 380730 - DNA, 201 bp, Homo sapiens
tgtttgactcctcaaacccacccggaggctccctattgctgttcattctaggaaggctttatagacaaggctggagcttaggtgccagtagtttgagggcrgacatcatcacaaatgtctgtattctgggagactgaggagttaacagagatgttgtttataaaagtttagcaggatttaatggcaactgacatgaaagct

SEQ ID NO: 380731 - DNA, 201 bp, Homo sapiens
ggtgcttaccttgacaggaaagaaaagaacacttacattataatgtcaaactgacttcatatttcagatttcaaaagcatcagaaaattgaaaggtctacwtatatatatatacatatatatatattttctatagattagaatgattgtgaatttttttacatttctgatttttcattcacttgtctggctgtgtctatac

SEQ ID NO: 380732 - DNA, 201 bp, Homo sapiens
gataataaacaaagctgttattttattattgttcagtttgcttccttactgagatgaatttttccctctctcccatagtgttctatgaaatttgagaaaayttaatttttggctaatttttctatatggtatatataaaaatatgttaaaacatactttttaaatctatggtgtatttgtagggattttgcagatacctgg

SEQ ID NO: 380733 - DNA, 201 bp, Homo sapiens
gttaaaacatactttttaaatctatggtgtatttgtagggattttgcagatacctggaaaaacaattcagtgacttaaagcagaaaggcatcgtgatcagytttgacgcccgagctcatccatccagtgggggtagcagcagaaggtatttaaacatttttacaaaatgatgtttttataatttattttgcagttttattt

SEQ ID NO: 380734 - DNA, 201 bp, Homo sapiens
ctgctctgtgatccaatttctcatttttcctgatttgctagttgaaagtaatagctcacttttatttgtattctttaattaacctatattttctatgtgtytgttcaccttttatatttataaacatctttgtttataatatatatacatatatacatattatatatacatatatgcatatactatatatataaaatatat

SEQ ID NO: 380735 - DNA, 201 bp, Homo sapiens
acttgtaggtttgtctttgatactgtatttgttggatcagctgatggtgcccactccagtgcagagtatgaaagcccagtcctgcctgaagggagcagccrtgccagctgagtgttgcccacatgaaaatataggtcccagttgccagatcatctgagttctcctcttcccaaaataactggaaacctggattttgtgtgt

SEQ ID NO: 380736 - DNA, 201 bp, Homo sapiens
acaggggtggtataatgttgttcattctaagtaaatcgctcatttatttgtggtaacgtattttacaccagcttgaaggaagatttgatgccattttctgygtcttaccctaagcaagtttctgtggaagttgagaaaaatgtcaaagaattaagttttctttcaaaggctgattggaaccaagatgtatatatgtgtatg

SEQ ID NO: 380737 - DNA, 201 bp, Homo sapiens
aatttaaatctcaggttgcctgtgtgtaatcaatgtcatttgccacagtagggggaataatccaaccccttctcccattttgggaagtagtagagatgggwgctaagttgaaatataaatatttaaccctggagtgagagataaatgaggaacctgtaagagcattctccattccctcaaatttttttttttttttttttt

SEQ ID NO: 380738 - DNA, 201 bp, Homo sapiens
actgtgctgctgaataaggttgccttctgtaccagttactagggctatgtaacaaatcattgaaaacataatggtttaaaacaacaaccacatttattttkctcacaaatctgcaattttggtagaactcagtggggacagcttgtctctgctccactcagcaccatctgggccagtttggaggttggaatcatttgaagg

SEQ ID NO: 380739 - DNA, 201 bp, Homo sapiens
aaatcattgaaaacataatggtttaaaacaacaaccacatttattttgctcacaaatctgcaattttggtagaactcagtggggacagcttgtctctgctycactcagcaccatctgggccagtttggaggttggaatcatttgaaggcaccttcattcacacgtctgaaattattactggctattggctgggatcttagc

SEQ ID NO: 380740 - DNA, 201 bp, Homo sapiens
ccaattaatttatgctttatttatgttctattttgggttctgtgttcatagattatttaatttagccatagcataccagtgatgggaaactcactgtcctytgaaagaggccattctatctttggaccattctcattaaaagatggtttcattattttaagccaaaatctgcctttctgtagactttacatattggtctta

SEQ ID NO: 380741 - DNA, 201 bp, Homo sapiens
aaaagaaatggacagtccaactaaacagtccaacttaaggatctgttttttctgtatcttgtcctttccttttcattatctgatgaaaatatatcttatayttcggaaagctttcctttgtaatgataacactatttaaatgtttaaggctttatggtattaacatttttcacatggcttattgagtggacttaaattcaa

SEQ ID NO: 380742 - DNA, 201 bp, Homo sapiens
atggtttcattattttaagccaaaatctgcctttctgtagactttacatattggtcttagttctactttttgaaggtcatacacataaacttgcttcttaygttttataataacattttatttctgaaaacctccctcttcccccactgagtctttcatctagaataagaattcccttttcccttggccattctttcaggt

SEQ ID NO: 380743 - DNA, 201 bp, Homo sapiens
gggaaacagagccaaacagctaatagaccaggggaaaactgttttatttgcatttgaagaagctattggtaagaagtgatcatgaacattaaggaattggytgcaaggcaaaaggaaaaggtttggattgggattcaaagatccacagtgaaacacggtttattttgcctctccagcactcaggttgaatgtcgaactgtc

SEQ ID NO: 380744 - DNA, 201 bp, Homo sapiens
tgtgatgtttcctccactgtggtggttaatatccaggcctaaacactgtggtatttaatgtccctcctcctccaaaagtgctaatgaggatctatgctacrgtctagccagaggaaaggagaaggaaggcatggtttgctgctgtcatcagaatgatactcacccaaaaggatgacccaggtccagccagaatgacagaaa

SEQ ID NO: 380745 - DNA, 201 bp, Homo sapiens; identical to SEQ ID NO: 82890

SEQ ID NO: 380746 - DNA, 201 bp, Homo sapiens; identical to SEQ ID NO: 82892

SEQ ID NO: 380747 - DNA, 201 bp, Homo sapiens
gcgcaagcacctagagttggcaagtggtattctgggattccattctgggggttagactcatatgctaaaatctctactttgatttctccaaaggtgcttaycttgacaggaaagaaaagaacacttacattataatgtcaaactgacttcatatttcagatttcaaaagcatcagaaaattgaaaggtctacatatatata

SEQ ID NO: 380748 - DNA, 201 bp, Homo sapiens; identical to SEQ ID NO: 82893

SEQ ID NO: 380749 - DNA, 201 bp, Homo sapiens
tctgtctcctttgtttctctcaggctacttggtctttcatagatatcaaagaccaattaagattttccagacctacactatgaacaagggaggatcactcratattgagtgtggcagtgaagtccgtgttttctgattcactccactaatatttattgaggctcttttatgagcctcttttatgtacctgatctgagcctt

SEQ ID NO: 380750 - DNA, 201 bp, Homo sapiens
tcagagacgatggcaaacccttctcacacgtgccaggttccagcaacccaccctagccccgcaattcctcctcgctcactcccaccccccgcagcgcaccygcaaacggcaaggaggcgtgcccgccgcggcgcgcgtcactttcccccggaccgactggctccgccgcggctctccccgcccccgcctccgcctccacgt

SEQ ID NO: 380751 - DNA, 201 bp, Homo sapiens
tgtgctttttgtcaataaagcaagagaaaagttatagctctgggggatagatgcacatgaactacattcacaagagaatgatgtggtataaaccagcataycagcttgtcatttacagttagtggatgtacaatcagaactaaatcgtgaccgtgttcctctgccgccccagggcaagtcagatcctttgctcagagcatg

SEQ ID NO: 380752 - DNA, 201 bp, Homo sapiens
tttacagttagtggatgtacaatcagaactaaatcgtgaccgtgttcctctgccgccccagggcaagtcagatcctttgctcagagcatgcaaagtgcacrtatgtggctaagtctgtctgctgagctgcgtaaatttcttcattttgggctgactgccctgcttctggttgatacaaccttcagagatatgttaacatta

SEQ ID NO: 380753 - DNA, 201 bp, Homo sapiens
gctcaaaaatattatgctatttatatattatgtttattaaaagggagcaagttggcatgaacagtataaaatagacattttaagaatatctggttattttygttaaaaactgtttgttcttgtttcctgctatgttacagcccttcacagtatcacatttgaaactttgtgctggaatcatgataactgcatctcacaatc

SEQ ID NO: 380754 - DNA, 201 bp, Homo sapiens
aaaatctttgggaaaaataatgcatattgtctcatggggtgttttgtctaagtcaatagatgtgttccatgcttaagtctctggagttctcttttttttcytatttagtcctcttcttaaggttatattttcattgtcacttggtcaatggggggagcatttaaactgtgctttggaataatcccttgacctggatttttt

SEQ ID NO: 380755 - DNA, 201 bp, Homo sapiens
atgactactttgaagaccttaaaaagtactgtttccacaggtaaatgaattgtgtcttcactgaccttaagtgagttaatgtgattcagccaaattctatyagtgtttgtgaagtttttctctttaatttgctcatgtactacagctgcatctgattttattttattttatttacttattttgagacagggtctcactgtg

SEQ ID NO: 380756 - DNA, 201 bp, Homo sapiens
tataatatatatacatatatacatattatatatacatatatgcatatactatatatataaaatatattttttagatgttttctgttgtctttggaattttytattgaaactgtttgctgaactgtttaaaaatctgtataatatttattagtcttattttatagcttctgggttttatgtcatgcttaggaagacatgctc

SEQ ID NO: 380757 - DNA, 201 bp, Homo sapiens
gtattcctgagctcaagcaatccacccgcctcggcctcccaaagtgctaggattagaggagtgagccactgtgcccggtcaacatgtaatttcatttaatyctcagagtaatgccagtaaattctggtatattatcatgcatgttatagatgaaaaaactacaaggaagagtggttaatagccagcagtcacacagcttat

SEQ ID NO: 380758 - DNA, 201 bp, Homo sapiens
gtgtgtttgtatatgtataatatacttcaaaaccataaataggaatatttgtgtgtgtgtgtgtgtgtgtgtgtgtgtgtgtgtgtggtttgttctgtgcrcttttccccccaattaatttgtcatggacaccttcctgtgttagtccctattagtcctgactttctgtcttaaaggctgctgcaccggtgtatttaactc

SEQ ID NO: 380759 - DNA, 201 bp, Homo sapiens
tatatcagtgttgagaaagttaagctaagatgatacgtcctgataggtgagatttacttctagccatctggactgccaagagaagcagaaattacacatcktttctctgatgttctgaccatttaggactgagcttgatcttaaggggtactgagctgtcccctctcagaatcagcaatactgaccagtccagaaattgag

SEQ ID NO: 380760 - DNA, 201 bp, Homo sapiens
gaagaagctattggtaagaagtgatcatgaacattaaggaattggctgcaaggcaaaaggaaaaggtttggattgggattcaaagatccacagtgaaacayggtttattttgcctctccagcactcaggttgaatgtcgaactgtcctactccaaaattgacatctcagatgatttacagccaaaaggaatgtcttaaaaa

SEQ ID NO: 380761 - DNA, 201 bp, Homo sapiens
cttgctcaaaagtcttgaatagcaaacactggtatttttctatctttccaaaaattttctgtgcatatgcaagcgtatatatatatatatatatatatatrtgtgtgtgtgtgtgtttgtatatgtataatatacttcaaaaccataaataggaatatttgtgtgtgtgtgtgtgtgtgtgtgtgtgtgtgtgtgtggttt

SEQ ID NO: 380762 - DNA, 201 bp, Homo sapiens
aatgtttctgatttaatctccagagaatttaaaccatctcctgcagaaatggagaagaggtggttctgtgacggtgtgggctcagggcaaggaaccgggakggtctaagaacttctttcaaaccctgttcctgctttccacccctgcctcacatctgccttttgcagtacctggtgcctctggttcttgagcttggccagg

SEQ ID NO: 380763 - DNA, 201 bp, Homo sapiens
gtgttctatgaaatttgagaaaacttaatttttggctaatttttctatatggtatatataaaaatatgttaaaacatactttttaaatctatggtgtattygtagggattttgcagatacctggaaaaacaattcagtgacttaaagcagaaaggcatcgtgatcagttttgacgcccgagctcatccatccagtgggggt

SEQ ID NO: 380764 - DNA, 201 bp, Homo sapiens
cattttgggctgactgccctgcttctggttgatacaaccttcagagatatgttaacattatcaattaaggtacagatttttttgccctggccttggagccrtatcatttccttaaagtgagtgatgttactgatttaagcttatggttcaagtctcagagtttgatgggatgggatggagtggaactcaaggctactctct

SEQ ID NO: 380765 - DNA, 201 bp, Homo sapiens
gggaagtagtagagatgggagctaagttgaaatataaatatttaaccctggagtgagagataaatgaggaacctgtaagagcattctccattccctcaaattttttttttttttttttttttttgagacagagtttcgctcttgtctcccaggctggagtgcaatggcaggatcttggctcactgcaacctctgcctccca

SEQ ID NO: 380766 - DNA, 201 bp, Homo sapiens
ggaaataaaattatttagacaatttagaatgtaatacctagctaaaagaaagaaatttcttaaactggcaatattatttttccctctcatttgcctttttwtacataatttttaccctgctattcataaacctcatgacccccttccctctcttgaacgcccacgtcaagctgcatttctgaaacattctcaaaccaatgg

SEQ ID NO: 380767 - DNA, 201 bp, Homo sapiens
ggaagtagtagagatgggagctaagttgaaatataaatatttaaccctggagtgagagataaatgaggaacctgtaagagcattctccattccctcaaattttttttttttttttttttttttgagacagagtttcgctcttgtctcccaggctggagtgcaatggcaggatcttggctcactgcaacctctgcctcccag

SEQ ID NO: 380768 - DNA, 201 bp, Homo sapiens
gaagtagtagagatgggagctaagttgaaatataaatatttaaccctggagtgagagataaatgaggaacctgtaagagcattctccattccctcaaattttttttttttttttttttttttgagacagagtttcgctcttgtctcccaggctggagtgcaatggcaggatcttggctcactgcaacctctgcctcccagg

SEQ ID NO: 380769 - DNA, 201 bp, Homo sapiens
gccactgcacccagctaatttttttgtatttttagtagagacaaggtgttggcatgttggccaggctagtcttgaactcctggcctcaagtgatccacccrccttggcctcccaaagtgctgagattacaggtatgagccaccacgcccacccagctgcatctgattttagaggctgtagatcaagccttggcaaactttt

SEQ ID NO: 380770 - DNA, 201 bp, Homo sapiens
tgcaagcgtatatatatatatatatatatatatgtgtgtgtgtgtgtgtttgtatatgtataatatacttcaaaaccataaataggaatatttgtgtgtgkgtgtgtgtgtgtgtgtgtgtgtgtgtgtggtttgttctgtgcacttttccccccaattaatttgtcatggacaccttcctgtgttagtccctattagtcc

SEQ ID NO: 380771 - DNA, 201 bp, Homo sapiens
tattttgcctctccagcactcaggttgaatgtcgaactgtcctactccaaaattgacatctcagatgatttacagccaaaaggaatgtcttaaaaacaacyaagtcattcatgtcagaatcctttgcctggatgactcaaaacagtgacattgtatgcttggctgccggtacatgtattttgggagttgtgatgtttcctc

SEQ ID NO: 380772 - DNA, 201 bp, Homo sapiens
aactcctggcctcatgtgatccgccctcctcggcctcccaaagtgcaaagtgctggtattacaggcatgagccaccgcgcccagcctggaagctttatttaaaaaaaaaaaacaaaaaaaactccttatggaattttctttgcaaagattcactttataacagtaaatataatctagtttgaggtttttttttgtggtgta

SEQ ID NO: 380773 - DNA, 201 bp, Homo sapiens
tcccaggctcaagcgatcctccctcctcaggactccctccagctcccccaccacgaaatagctgggactacagatgaatgatgcagtattttggggtgacrgggtatgggggtgggtgtttgaactctgtcactcagtgtttgtgagattcattcatgatgttgtgtataacagtagttcacctgcattgctctatcaatg

SEQ ID NO: 380774 - DNA, 201 bp, Homo sapiens
gtcacatgatcagggatgggacttggctgaattttatagtctttagggctattgggattggactgtttgaatgacagaggagttccttggcatgtatgagrcatttccttctctcctggaatgtttctcccacatcttagtaatatttctctggtattcaacttttgattcattggaattggtttttttaaattgcagttt

SEQ ID NO: 380775 - DNA, 201 bp, Homo sapiens
ctgataaaataaattataatccgggccgggtgcggtggcttacacctgtaatcccagcactttgggaggccgaggcaggcggatcacgaggtcaggagatygagaccatcctggctaacacggcgaaaccccgtctctactaaaaacacaaaaaattagccgggcgtggtgggggatgcctgtagtcccagctactcggga

SEQ ID NO: 380776 - DNA, 201 bp, Homo sapiens
tctgttgcccaggctggagtgcaatggtggaatcttagctcactgcaacctctgcctcctgggttcaagcgattcttgtgcctcagcctcctgagtagctragattacagatatgcaccaccacacccagctaattttttggtgttttttttttttttttagtagagacaaggtttcatcatgtcggtcaggctgggctcg

SEQ ID NO: 380777 - DNA, 201 bp, Homo sapiens
agctgataaaagacatttgggaacctgtcgctttggggatgtgtgggtgtgtggagccctggaactgtcccgggctggctgtagcactgtcagggcacctrtcaggccagcagtgagtctcgtgtgggaacatgagcttgaggttcttctttgtatctcactctagatgggatgcataaaacaaaacctgaaataatcaga

SEQ ID NO: 380778 - DNA, 201 bp, Homo sapiens
gcaacctctgcctcctgggttcaagcgattcttgtgcctcagcctcctgagtagctgagattacagatatgcaccaccacacccagctaattttttggtgttttttttttttttttagtagagacaaggtttcatcatgtcggtcaggctgggctcgaactcctggcctcaagtgatctgccagcctcagcctcccaaagt

SEQ ID NO: 380779 - DNA, 201 bp, Homo sapiens
tacaaaattatttgttcctcatgtgcatgaatttgtatttgtttgataggtatggctaccatattactaaagcttcctattttatctgccatgatcaagamaccattaagaaattatttgaaaacctcagaaactacgatggaaaaaataattatccaaaagcttgtggcaaatttgaaatttctgccattagggacctta

SEQ ID NO: 380780 - DNA, 201 bp, Homo sapiens
cattgcatttttttgtgcacatttgtaacagagagagagagtggcgatctgctctttgtgccccagccagccttcagaatagtgtcggcgaagctagtgcycaagaagtatttggggagagtaagaatgatctgattgtttaactcacaggggtggtataatgttgttcattctaagtaaatcgctcatttatttgtggta

SEQ ID NO: 380781 - DNA, 201 bp, Homo sapiens
tttacttgaacacttcctctgttatgatgaatttttaatcattctagagtatcagtattagtagtagcttagaattacacatattgaatattaatgaaaartcttattagctttacagagctggatgagtttatagagtcctatctttgcccatcaggagcttccaatctaagacagaagcactcgtggggacaaacgtgt

SEQ ID NO: 380782 - DNA, 201 bp, Homo sapiens
tatggtagctgctcagatgtttgtaaaatggcagttacatttctgaccagttatttaaagatgatgaataacaagaacagccttgcagaaaatacttagakgctttgtttgctaaattgttttatccccatgacactttagagtcttccttaagattatggaaatgaatggtggttgttgttttttttttctttcagtggt

SEQ ID NO: 380783 - DNA, 201 bp, Homo sapiens
taccaacccctgcccgtaaccatgttacataaccctcttttttacttgaacacttcctctgttatgatgaatttttaatcattctagagtatcagtattartagtagcttagaattacacatattgaatattaatgaaaagtcttattagctttacagagctggatgagtttatagagtcctatctttgcccatcaggagc

SEQ ID NO: 380784 - DNA, 201 bp, Homo sapiens
actctatatatgggggatcttgccagcatatttgttatatttaaaaccaaaggctttgccaaagattaatatagagccattgtgtgtcatgtgtgacatayttattttatacagtcttcaaagacaggatgtctgttcaggcaaactggctgatatatatggtagctgctcagatgtttgtaaaatggcagttacatttct

SEQ ID NO: 380785 - DNA, 201 bp, Homo sapiens
ccccgggaagacccaggagcgtacggccgctgctaggcttccttcgacctggccggcatgcggcacgttcagagttaggccgggaaggcttgtccccggasgaaaccagccatccggccggccggactgcaagttcggagtagaggagcgagccagggtggtgtaagcgcggccagaccctggacgctgtctagttgaggg

SEQ ID NO: 380786 - DNA, 201 bp, Homo sapiens
cacttgagatcaggagttcgagaccagcctggccaacacggcaaaacccggtctctattaaaaaatacaaaaattagctgggcgtggtaagttaaaaaccrcaggctagaactgaaagagactctactaggctgggagcggtggctcacacctgtaatcccagcactttgggaggccgaggcaggtggatcacttgaggtc

SEQ ID NO: 380787 - DNA, 201 bp, Homo sapiens
aagaccagcctggccaacatggtgaaaccccatctctactaaaaatacaaaaattagccaggtgtggtggctcatacctataatcccagctactcaggagsgtgaagcaggagaactgcttgaacccaggaggcagaagttgcagtgagctgagattgcaccactacactctagcctgggtgacagagcaagacttcatct

SEQ ID NO: 380788 - DNA, 201 bp, Homo sapiens
ccccatctctactaaaaatacaaaaattagccaggtgtggtggctcatacctataatcccagctactcaggagcgtgaagcaggagaactgcttgaacccrggaggcagaagttgcagtgagctgagattgcaccactacactctagcctgggtgacagagcaagacttcatctcaaaaaaaaaaaaaaaaaaagaggaac

SEQ ID NO: 380789 - DNA, 201 bp, Homo sapiens
tagccaggtgtggtggctcatacctataatcccagctactcaggagcgtgaagcaggagaactgcttgaacccaggaggcagaagttgcagtgagctgagwttgcaccactacactctagcctgggtgacagagcaagacttcatctcaaaaaaaaaaaaaaaaaaagaggaactagtcatcaaagcctgtgtggtcattt

SEQ ID NO: 380790 - DNA, 201 bp, Homo sapiens
aaatgatcaccttcacctttgctaatggaggcgtggccaccatgcgcaccagtgggacagagcccaaaatcaagtactatgcagagctgtgtgccccaccwgggaacaggtatgatgtggatggcagctggtgtgatttttactccccagacttcctaactggttctattcaaatgccaagtgaaatgttccatctttcta

SEQ ID NO: 380791 - DNA, 201 bp, Homo sapiens
ggcatttattttttcttacagaagcttccttttttttctctttttcttttcttttttggaggcatagtttcactctgttacccaggctggagtgcagtggygcaatctcggctcactgcaacctccacctcccgggttcaagtgactctcctgcatcagcttcctgagtagctgagattacaggcacccgccaccatgcct

SEQ ID NO: 380792 - DNA, 201 bp, Homo sapiens
taacttcaatagaactagggaagtaaaagctaatacacaaagttacttaattttctttatttaaaattaatttagttatgttaattcacaaataaaaattrtatacatttatgatgtacaatccgatgttttaaaatgtatacattgtgatagctaaaatcaagttaattagaatgtgttacctcacatattgatcatgta

SEQ ID NO: 380793 - DNA, 201 bp, Homo sapiens
ttccaggttcttccatattgttgcaaatgacaggatttccttctcttttaaggctgaatagtattccatatagtagagcacatattcataaattactatcrtttagtatttcattcatgtggagtacattttctgatttcctccagaatgtttttcttttctaaccaatagatttgtttggcatttattttcttacttatg

SEQ ID NO: 380794 - DNA, 201 bp, Homo sapiens
tgcaccactgcactccagcctgggtgacagggtgacagagcgagactttgtctcaaaaaaaaaaaaaaaaaaaacaagaagtatgtatatttgttagtcaytaatttcttaaaggatctttcaaattaaacaccccaggatcaggatatgagaactgagctctaaatggtgcttcaaattcagttaatttaatttaattta

SEQ ID NO: 380795 - DNA, 201 bp, Homo sapiens
ttttaaggctgaatagtattccatatagtagagcacatattcataaattactatcatttagtatttcattcatgtggagtacattttctgatttcctccaraatgtttttcttttctaaccaatagatttgtttggcatttattttcttacttatgcaagagaagatattggttaggccagaatgttactatttaaattta

SEQ ID NO: 380796 - DNA, 201 bp, Homo sapiens
acaggtaccatgttttttataattcttagtaactcaatgtatcccctagctcattttctatttggcagacctaatttattctaattatagacatgtcttaycagcttggctagacacaggaagtcaccaccatttactccataaagtaaggcttgcacaataggtcgaagtagcacttattcaggactcatatagccatcc

SEQ ID NO: 380797 - DNA, 201 bp, Homo sapiens
gttcaatgactgcagtgattcttggtgaaagggtggaggggacggacaatttaaatctcaggttgcctgtgtgtaatcaatgtcatttgccacagtagggrgaataatccaaccccttctcccattttgggaagtagtagagatgggagctaagttgaaatataaatatttaaccctggagtgagagataaatgaggaacc

SEQ ID NO: 380798 - DNA, 201 bp, Homo sapiens
gtaaataacctgctagacactctattcacatctaaatgtagttcaggtttcattgtttgatggaaaaattgtcatgtattcaagcatcctaattaccttcygtactaagtgttaatagctattaattttatgtcagacatgaattgaaccagtgtatcatgatcctctgcccacactgaggagtcgtcctccccttttctt

SEQ ID NO: 380799 - DNA, 201 bp, Homo sapiens
caccatgtttcttcattcgctccccacccccttctcccttcataacacttcagagtgccagattcctcagtccttggaactcaaacttccagagagaccayacttcatcacatacctatggcacatgttccagaaatgattctggccaggtgtccacccctgaatagatggccacaggcaggagaatgggatgtctgattg

SEQ ID NO: 380800 - DNA, 201 bp, Homo sapiens
actcaaacttccagagagaccacacttcatcacatacctatggcacatgttccagaaatgattctggccaggtgtccacccctgaatagatggccacaggyaggagaatgggatgtctgattggtctgatttgggaaacatcctatccaccacttggataggatcaactttacccaaacaggactgatcaggatccacatg

SEQ ID NO: 380801 - DNA, 201 bp, Homo sapiens
ttcactgctctgccatcttggggtgtgaccctcatcctcatagtccaagatggcagctagaggactagccatcacatctttattccaggaagcacaatgtwgtaaaagatgtacacaaaggagtcaaaagcaaggtttttacaagagctttattgagatataatttacaaagcgtacaacttatccatttcaagtttacac

SEQ ID NO: 380802 - DNA, 201 bp, Homo sapiens
gtctgattggtctgatttgggaaacatcctatccaccacttggataggatcaactttacccaaacaggactgatcaggatccacatgggaggttcgctcckttggaggaggagatgccagcagaccgtggaggactggctgtgaggcacgaggatgagcgggaggcaagggcggctcctgcttccacagaggcgagcagga

SEQ ID NO: 380803 - DNA, 201 bp, Homo sapiens
atttgttcttttttttttttttaagacagagtctcactctgtcaaccacgctgtgcagtagcacgatcctggcttactgcaaactccgcctccaggttctyctgcctcagcctcccaagtagatgggattacaagcatgcgccgccgcaccctgctaatttctatatttttaatagagacagggtttcgccatgttggcca

SEQ ID NO: 380804 - DNA, 201 bp, Homo sapiens
cacactttcattggcatcctaggatgctcggggccctattttcaaggctgtgtatgttgaatacacatttcagtgatgctttagtctattccacagtgatkctcaaattgtggcccccaggccaacagtatcaccatgccccgggaacttgtttgaaagacaaattctccatcccactcaagacctcctgaatcagaaact

SEQ ID NO: 380805 - DNA, 201 bp, Homo sapiens
gactggccacacatgatgagaaaactgtgagaaaagaagcaggagagactttggaagagggcttggcaggccggaaagcgctaggtgcacacgacgggcagtgggggctcaaacacaggtgggagcccaggggaggagggagcgattagtcatgctggggaggctccaagggccctttgtccttcctagatggctactcag

SEQ ID NO: 380806 - DNA, 201 bp, Homo sapiens
acagtgattctcaaattgtggcccccaggccaacagtatcaccatgccccgggaacttgtttgaaagacaaattctccatcccactcaagacctcctgaawcagaaactctgggtatggggcccggcagtctgggttttaacgcaccctctgggtgattctgaaacaggcaccaaagtttgagaacgtctgcctataaatg

SEQ ID NO: 380807 - DNA, 201 bp, Homo sapiens
acaaggagaaatgcccagcgaaggggtaggggaagctccttataaaaccatcagatctcgtgagaactcactgtcacaagaacaagctgggggaaaccackcccatgattcaatgatcttcacctggtccctcccaggacatgtggggattatgggaactacaattcaatatgagatttaggtggggacacaggcaaatca

SEQ ID NO: 380808 - DNA, 201 bp, Homo sapiens
tccaaggtgctgtggtagatgcaacatcttttttttattgtttgcccaaagtaaatcttttaacagatcacaatatcaaaaatctcaatgtatctctctctctctctctctctctctctctctgtggtcgtatctttcaaatgtcagttgccaaagaatcactgggaagccaaacacatttgcagaattcctggacctacc

SEQ ID NO: 380809 - DNA, 201 bp, Homo sapiens
ccaaggtgctgtggtagatgcaacatcttttttttattgtttgcccaaagtaaatcttttaacagatcacaatatcaaaaatctcaatgtatctctctctctctctctctctctctctctctgtggtcgtatctttcaaatgtcagttgccaaagaatcactgggaagccaaacacatttgcagaattcctggacctaccc

SEQ ID NO: 380810 - DNA, 201 bp, Homo sapiens
caaggtgctgtggtagatgcaacatcttttttttattgtttgcccaaagtaaatcttttaacagatcacaatatcaaaaatctcaatgtatctctctctctctctctctctctctctctctgtggtcgtatctttcaaatgtcagttgccaaagaatcactgggaagccaaacacatttgcagaattcctggacctacccg

SEQ ID NO: 380811 - DNA, 201 bp, Homo sapiens
aaggtgctgtggtagatgcaacatcttttttttattgtttgcccaaagtaaatcttttaacagatcacaatatcaaaaatctcaatgtatctctctctctctctctctctctctctctctgtggtcgtatctttcaaatgtcagttgccaaagaatcactgggaagccaaacacatttgcagaattcctggacctacccgc

SEQ ID NO: 380812 - DNA, 201 bp, Homo sapiens
gcggatcacctgaggtcaggagttcaagaccagcctggccgacatggtgaaatcccgtctctacaaaaatacaaaaattagctgggcgtggtggcgcacamtggtagtcccagctactcggggggctgaggcagaagaatcagttgaacccaggaggtggaggttgcagttagccaagatcgcggcattgcactccagcct

SEQ ID NO: 380813 - DNA, 201 bp, Homo sapiens
agaaaacaggactccactggcctggatcagctgaagaaagcaagtgggactccttacaacagggtgggcagtgttaaggaaaccaacaaggactgaggcgrctccctgcctctaacagcaggacagatggagccagggaagggactagctgtgggaaaaccagagccatggaggaggggctgctgataatcgtgggagggc

SEQ ID NO: 380814 - DNA, 201 bp, Homo sapiens
gggtagaatgataggcaaattgtcttttcttttcttcctttttttttttttaaagaaaaacacttacaaaaatccaaataagagtaaataattaggactgsgtgtggcggctcacacctgtaatcctaacactttgggaggccaatgcaggaggattgtgtgagcccaggattttgagaccagcctgagcaacatacagac

SEQ ID NO: 380815 - DNA, 201 bp, Homo sapiens
aattagctgggcgtggtggcgcacactggtagtcccagctactcggggggctgaggcagaagaatcagttgaacccaggaggtggaggttgcagttagccragatcgcggcattgcactccagcctggatgacagagagagagactccgtctcaaaaaataataataataatagaaaagaaaaggaaggatgctccagcgc

SEQ ID NO: 380816 - DNA, 201 bp, Homo sapiens
aaatgggactgtactgttaaaccaaaatgtggccacgaaaataccgacacatacaggtgttacatacaaaggctaacaaaatcactttccctttttcttcytcactcgcgcctgctctgagttaattcactttcattcagccttgccggcactggctgccttctttgggcagcaacaccctggacaacaccatcctgggcc

SEQ ID NO: 380817 - DNA, 201 bp, Homo sapiens
aatgtttttttattctcctggtgaaatgatttgtggccatgccatgcagagccacattggagcctgaggcaaaaggaaaaatcagtaatagtgaacctgtstttatttatatatttattttttagatgggtctcactctgctacccagactggagtgcagtaacatgatcacagcccattgcagcctcaacctcctgagct

SEQ ID NO: 380818 - DNA, 201 bp, Homo sapiens
ccatgccccgggaacttgtttgaaagacaaattctccatcccactcaagacctcctgaatcagaaactctgggtatggggcccggcagtctgggttttaaygcaccctctgggtgattctgaaacaggcaccaaagtttgagaacgtctgcctataaatgtatttgatccaatccatcaagttcaaagggaccacctacta

SEQ ID NO: 380819 - DNA, 201 bp, Homo sapiens
gtgccttctggatggctctgtctgaatgattcacttctgcctatggtgggtggaagttcatggttttactcccacatggtgaccacagtgcatggcaattytctagtcaacaggtggggttggggcctctgctacacacaagaggcttctttcttcaagtttaagacttctgatgctcacaagaccctcccatgcccttac

SEQ ID NO: 380820 - DNA, 201 bp, Homo sapiens
taactagcacaaaacattaaggaaatattcttccagtgctcaaaaacaatgatttgattgagcaaagaattcatgtcattgttgaatgattgagtttcaaygtgtccttatttcatttttgtcttcttcattaatgtaaataaacctgtcagccaacctacacttgtcatttgccaccataggttgactagtgagacaagg

SEQ ID NO: 380821 - DNA, 201 bp, Homo sapiens
tgctgagtatccaccaatgcaccactgcctgaggggtgtctacataaaaagagacctaacagcccagagcagcacttgttaaggacccaaggcatggtccmgaccccaaggaagggaagggggtcagggatggatagacaatctggaaagttctccaaggtggtctgagaaggcttcatgggggacagagagccgtaaagc

SEQ ID NO: 380822 - DNA, 201 bp, Homo sapiens
gttcttacaggttttgggataggcggtggagtttggagcaatgttttgcgggcagggggtggatctcacaaagtacattctcaagggtggggagagaattrcaaagaaccttcttcagggtgggggagattacaaagtacattgatcagttagggtggggcagaaacaaatcacaatggtggagtgtcatcagttaaggct

SEQ ID NO: 380823 - DNA, 201 bp, Homo sapiens
atgggtagccaatgctaaggcctcctgcccccatgggcctaagtagccctgtccacactggggatctgcccgctacctcatagcctcaggtagatgtctgktctctctttgcaaatgtcccccgcaacccatcacattcataaaggcaacaaattggggaaaacgagaggtcctctgtctttttagggcttcaccactgct

SEQ ID NO: 380824 - DNA, 201 bp, Homo sapiens
tggggaaaacgagaggtcctctgtctttttagggcttcaccactgctgttttcccaactaaagaaatatgtacatatgtttaagtatactttaccatgcgyagaatgggaaaaacagaagttattctagagaacatctcgctcaactcgtttattttactaataagaaaatagaaactatggaggtcaagtggcataccca

SEQ ID NO: 380825 - DNA, 201 bp, Homo sapiens
ccacctccgtgattcacacaattccttttccactctatcccgggcccatgtctccatcctgcccctgatgctggctctgcaggcattttctacatggctgyctgtgtacatgccgtgtggttagtcttaaatcaagggctcctagagtgcataggacataccagtttatactttttctcatcaggaatatgtgtagctgga

SEQ ID NO: 380826 - DNA, 201 bp, Homo sapiens
aacaaggctgtttatttcacctgggtgcaggcgggctgagtctgaaaaaggagtcagcaaagggtggtggattatcgttagttcttacaggttttgggatrggcggtggagtttggagcaatgttttgcgggcagggggtggatctcacaaagtacattctcaagggtggggagagaattgcaaagaaccttcttcagggt

SEQ ID NO: 380827 - DNA, 201 bp, Homo sapiens
ccaccaagcaggctttgtgtgagcaacaaggctgtttatttcacctgggtgcaggcgggctgagtctgaaaaaggagtcagcaaagggtggtggattatcrttagttcttacaggttttgggataggcggtggagtttggagcaatgttttgcgggcagggggtggatctcacaaagtacattctcaagggtggggagaga

SEQ ID NO: 380828 - DNA, 201 bp, Homo sapiens
gaatgagaaggcacaggactgacaccagaccccagggctctctcagacgcctcccttgaacccctgtttcacagaaccaccttctcccctctcctcatccrctattcctcttatgctcacccccttagacatgctaagggatacaaacacaccctgtaagctatcaagcccccacacaaatgagtgggatcacttctgtag

SEQ ID NO: 380829 - DNA, 201 bp, Homo sapiens
ccaaggagcttacttaaggagcaataggttgtcccctttgcctcttctggtctttcgcgtttctgagcgtggtgtggaaactgagtcaggagctaaatcarttaggtcactggttctcaaacttgagtgtgcatcacaacccactgaagagctttttaaaacacagattgtggcccccactctagagctcctgattcaata

SEQ ID NO: 380830 - DNA, 201 bp, Homo sapiens
tgatgggagctgaggtgtggggacccatcccctcaggtacactgcctcatagtatttcttctccccgcttggctgagcctcctctcttcagatggctaaarcaggcacaacccccacgttgccacacagtcccataaactcctatggatacaggtcagtctctctccaaaactccatcctcatatccccagcaccacatgg

SEQ ID NO: 380831 - DNA, 201 bp, Homo sapiens
ggtacactgcctcatagtatttcttctccccgcttggctgagcctcctctcttcagatggctaaagcaggcacaacccccacgttgccacacagtcccatwaactcctatggatacaggtcagtctctctccaaaactccatcctcatatccccagcaccacatgggacctagaatagcaacgtctcagccagcatacagc

SEQ ID NO: 380832 - DNA, 201 bp, Homo sapiens
gaacccctttggctttactcccttcctgggctgggggaaagggtggggatataagctggtacttccaaagcagaaagctggggtttggggctgacagagcygaccttgagcttgagctccatggagtacccagcccaggtcaaatggggtcaggaagccatctgtgccttctggatggctctgtctgaatgattcacttct

SEQ ID NO: 380833 - DNA, 201 bp, Homo sapiens
aacccctgacctcaagtgatccgcccccaccttggcctcccaaagtgctgggattacaggtgtgagccactgtgcccggcctataagtttcatttaaaacmagcttgtccaaccttcagcccaggactgccttggtccagaagctttgaatgcagcccaacacaaattcataaactttcttgaaacgttatgagatttttt

SEQ ID NO: 380834 - DNA, 201 bp, Homo sapiens
gttgtccataagcttcattcattcattcattcattttatgtatttatttattttcgaaatggagtctcgctttgtcacccaagctggagagcagcggcgcwatctcggctcactgcaacctctgtttcctgggttcaagcgattctcctgccttggcgtctcaagtagatgggattacaggtgcctgccaccacacctgac

SEQ ID NO: 380835 - DNA, 201 bp, Homo sapiens
atggcctcccaaccagagagtagccttcaacatctcagcctcgtactgcgtgccagacactctaccaagccctccacttaggtaataatcacgtcttccamcctcactctcaccctgtaagggagctcttagaataacgctgctctccacggctgggaaacccaggctctgatgggtgacatcacttgttcaaggtcactc

SEQ ID NO: 380836 - DNA, 201 bp, Homo sapiens
gaaacccaggctctgatgggtgacatcacttgttcaaggtcactcagccagtaagggccaggctgggctgcaaactcaatggcccactgcagagctcacamaggtccatttcctactcgccatgatgttttccagggagagtttagagaagctctggagctgggaaaagagggcagctgttagagaacagcgagcgagaat

SEQ ID NO: 380837 - DNA, 201 bp, Homo sapiens
gggagtgggtggagcgcctgatttgtctcccaggcgacacggaaagggaggcagtgagacgtgctacctggtcgcttccggctctgatgaaccactgccarccagttattagggaggagggcagcacttgcaaaaatttcaggtctctgagagcccagagcctgagaagtgtggaggatactaattacacccaggtggaag

SEQ ID NO: 380838 - DNA, 201 bp, Homo sapiens
aaatgctctgtcgggttggggttgtctaattgcctgcctctctcagaagagaggggaatttatgagagttctatttccagtcaggtctaaagtagagatawcattgcacaatttctagactttgttttgctgccaaaattttagtctgaggctgaagaatccaacagccgtcctgcctgttttgtttgtaaattcacaaac

SEQ ID NO: 380839 - DNA, 201 bp, Homo sapiens
agcggcaaatgatatgaaagcgattcagatcttcctgagagttaatgtggcatctaatttgcaaccggggagccaggcttgcaatgaaatgctctgtcggrttggggttgtctaattgcctgcctctctcagaagagaggggaatttatgagagttctatttccagtcaggtctaaagtagagatatcattgcacaatttc

SEQ ID NO: 380840 - DNA, 201 bp, Homo sapiens
aggatttctctgtgtatcggaacttttgctctccagtcaggtttccctcccttgagtcaagcaggtctaggaatgacagaaatttcttgtgggtgcgcacrgcatctgaagagtagttggtgtgagggcaggatctttcgggccaaagggtccctccactggctgtcccttagggctggaggagatggcagcacgcaggtg

SEQ ID NO: 380841 - DNA, 201 bp, Homo sapiens
catggaagaaattcagtggaaggtggttttcttcccccaaaggcacaaaatcagggatgagtagggttgtggagatggtgaagagaaagagaagaaattaytggccctacagcaagaccaagtataataactggctaaacctaatgagaagacattcaatttccacagtactcatataaatgcaaaataaaatcaaagaaa

SEQ ID NO: 380842 - DNA, 201 bp, Homo sapiens
taaatgtcccctctcctgctctgtttccacttagataaattaatcctcagcatgagaggaaccaaagccagcaccttagaagtcaggctcctgtcagctcrgtttgctcacctgcacacagcccttgacttcctcctcctgtgtgggaggagcacagccctgactcagaggccactccaggcaatcctctcctcccaggca

SEQ ID NO: 380843 - DNA, 201 bp, Homo sapiens
atccaatcaagtgcccttggacaaagcctgaaaccaggtaagagcctgacttttctccagagatgggcatgaacttttctttttaaaacgtgtgtcacaargaatccaggggtttctgactgtatgggacagagcttgcttcagagcgtgccaggtggttctatacacgacctcacaggttcacagggacacgtagccgtt

SEQ ID NO: 380844 - DNA, 201 bp, Homo sapiens
tcacctgcacacagcccttgacttcctcctcctgtgtgggaggagcacagccctgactcagaggccactccaggcaatcctctcctcccaggcaatcctawaaggaacccactggctgagctctggcctctcggcagagggggcaggcctgaagaaccctttccaagaccagctgagctctgctggtccgctgggccctgc

SEQ ID NO: 380845 - DNA, 201 bp, Homo sapiens
tcgctgctctgtcaacgttgggatattttagtgtcttggagattagtgagtaaagctgatcatgatacctcagagtctgcatttaaatcttgctctaaatyggtgcatcctttttatgtgtagtttttctattactgttatgcctcactgttttaacagaggtttctatttatatggggggaggagcattacttgggagag

SEQ ID NO: 380846 - DNA, 201 bp, Homo sapiens
tggcagacgtttcaacagaatacacttgtgattatgacagctcatttcctcatgcttttttgttcatcttgctggtcactggggaagcctggtcacagacyggcgtgtggcccccatggatttaacccacaatagcctggggatgagcagccctcccactgaagaagcagggccagaggtcagagtccacacccagcgagg

SEQ ID NO: 380847 - DNA, 201 bp, Homo sapiens
aatgctcagctcacaggaatgagaaggcacaggactgacaccagaccccagggctctctcagacgcctcccttgaacccctgtttcacagaaccaccttcycccctctcctcatccactattcctcttatgctcacccccttagacatgctaagggatacaaacacaccctgtaagctatcaagcccccacacaaatgagt

SEQ ID NO: 380848 - DNA, 201 bp, Homo sapiens
tgtaattcatcagccacgttagtgcctccgtttccacatttgtgaaacgtgtatgttttagtctgggacccatttgggttgagggagggagctctgcatcmaaaacttcaccccaaactccatacacactcagaaatggcccaagatatccaggaaggtctgcacatgtgcgaggaaggccttcctcccaggcttccgtga

SEQ ID NO: 380849 - DNA, 201 bp, Homo sapiens
ttccccctcaaaaaaaaaaaaaaaattaagatggagtctccctctgtcacccaggctggagtgcagtggttcaatctctccagggattacaggtctgcgcmactgcacccggctcatttttgtatttttagtagagatagggtttcactatgttggccaggctggtctccaacccctgacctcaggttatccacccgcctc

SEQ ID NO: 380850 - DNA, 201 bp, Homo sapiens
aacggtaactaaaatacctttttcaaatgacagaacagagagtgggggccagtaatctgcactctcagacaaaactgacaagtgggagaaaggcttgtctmccctgaaggacaaaaaccaggcttgggactggccacacatgatgagaaaactgtgagaaaagaagcaggagagactttggaagagggcttggcaggccgg

SEQ ID NO: 380851 - DNA, 201 bp, Homo sapiens
gggggccagtaatctgcactctcagacaaaactgacaagtgggagaaaggcttgtctcccctgaaggacaaaaaccaggcttgggactggccacacatgaygagaaaactgtgagaaaagaagcaggagagactttggaagagggcttggcaggccggaaagcgctaggtgcacacgacgggcagtgggggctcaaacaca

SEQ ID NO: 380852 - DNA, 201 bp, Homo sapiens
aaaaaccaggcttgggactggccacacatgatgagaaaactgtgagaaaagaagcaggagagactttggaagagggcttggcaggccggaaagcgctaggkgcacacgacgggcagtgggggctcaaacacaggtgggagcccaggggaggagggagcgattagtcatgctggggaggctccaagggccctttgtccttcc

SEQ ID NO: 380853 - DNA, 201 bp, Homo sapiens
tttcaggccttctggatttcttctccccaccccacccccaaccccagtagttatgccatagttctggacaaatacaatagccaggcatggggtcaggggartgtgacctagtcctctgtcatcagtccacattggtggccactgaggggcccatcctcccatcaacatgacctgctggccccagagactcactgctctccc

SEQ ID NO: 380854 - DNA, 201 bp, Homo sapiens
attttcaggccttctggatttcttctccccaccccacccccaaccccagtagttatgccatagttctggacaaatacaatagccaggcatggggtcagggragtgtgacctagtcctctgtcatcagtccacattggtggccactgaggggcccatcctcccatcaacatgacctgctggccccagagactcactgctctc

SEQ ID NO: 380855 - DNA, 201 bp, Homo sapiens
atgagaaaactgtgagaaaagaagcaggagagactttggaagagggcttggcaggccggaaagcgctaggtgcacacgacgggcagtgggggctcaaacasaggtgggagcccaggggaggagggagcgattagtcatgctggggaggctccaagggccctttgtccttcctagatggctactcagacgccagtctgcgag

SEQ ID NO: 380856 - DNA, 201 bp, Homo sapiens; identical to SEQ ID NO: 82906

SEQ ID NO: 380857 - DNA, 201 bp, Homo sapiens
gtgagggaagctaagagcacagatgctgctatttgaccttaagcaagtcactttcatctatctgagctccagttttcttatttataaaatgggggtgatamtaacaatgcctacatcatagcgttgtgatgagtaaatgagatgatgcaatgcattcaacaatgcaaaaatgtattatcatttaacgatgccatgtattta

SEQ ID NO: 380858 - DNA, 201 bp, Homo sapiens
tggattaaccattgtctaaacaggaaaggcaaatatgcagcaagtattccataaatcccttatccttttcccaaaccagacactcatcttgccacaagccyggacatggcctcagaatccatctcaacagagggatccaggcagttcttatcaatcaaatggaattaacatgccgtattaaacctgtttgcaatcttggag

SEQ ID NO: 380859 - DNA, 201 bp, Homo sapiens
ggattcgtggattaaccattgtctaaacaggaaaggcaaatatgcagcaagtattccataaatcccttatccttttcccaaaccagacactcatcttgccmcaagcctggacatggcctcagaatccatctcaacagagggatccaggcagttcttatcaatcaaatggaattaacatgccgtattaaacctgtttgcaat

SEQ ID NO: 380860 - DNA, 201 bp, Homo sapiens
tcagttcattcatcccacaaaagtttattaagcacctactgtgtgcaaggcactgttaggattcgtggattaaccattgtctaaacaggaaaggcaaataygcagcaagtattccataaatcccttatccttttcccaaaccagacactcatcttgccacaagcctggacatggcctcagaatccatctcaacagagggat

SEQ ID NO: 380861 - DNA, 201 bp, Homo sapiens
ggcttgctgtatagctaccaacctccggtagaaatagtaccatttaggagttagtagattgattgatgaagagatgaatttccacatgctgggtacaaggratggatagtcaagtggctagttaccgtgatctaattttttgaaattctcctatgacaaagcttgaaactcaggtcttgaatcctcagaggtgatttccat

SEQ ID NO: 380862 - DNA, 201 bp, Homo sapiens
ttgttgtgaacataaataaacatttggtgcttcagagataacccctttagtaaacccaagagatatccccactcacatgagcaaattatatacaaaatccmaatgggaagattagtttatgccaaggataggattgtgtaatctagaaacttggcaatacaggcataccaggacactggagctggcagtaccctctgctgg

SEQ ID NO: 380863 - DNA, 201 bp, Homo sapiens
aaagattggctgcaatagtaacaataaaaaaagctaacatttactgaaggctataccagttatcccaccaagtgctcaactaccaatcctcacagcagccrgctgcaggaattatcattgctcccactttatagataaggaaactgaagtttatagaggcagagaaacttgcccaaagtcacaaagctggcaactcccaga

SEQ ID NO: 380864 - DNA, 201 bp, Homo sapiens
cctattgtgaactgcacatgctagagatctaggttgcatgctccttatgagaatctaatgcctgatgatctgaggtggaacagtttcatcctgaagctatsccccctgcccccacactggtccatggaaaaactgtcttccatgaaacccatccctgatgcccaaaatgttggggactgctggtgtatagggtactgtagt

SEQ ID NO: 380865 - DNA, 201 bp, Homo sapiens
caccacattggccaggctggtctcgaactcctgacctcaagtgatctgcctgccttggcctcccagaatgctgggattacaggggtgagccactgggcccygccacctatgttcttaatccccgtgcaactctgcctcctatctatgtgccgaagaaaggaacaacactcccctccagacctctgcctttcacacccattg

SEQ ID NO: 380866 - DNA, 201 bp, Homo sapiens
caggagagactttggaagagggcttggcaggccggaaagcgctaggtgcacacgacgggcagtgggggctcaaacacaggtgggagcccaggggaggaggkagcgattagtcatgctggggaggctccaagggccctttgtccttcctagatggctactcagacgccagtctgcgagcaccccacgctcagctgctccatg

SEQ ID NO: 380867 - DNA, 201 bp, Homo sapiens
agcccaggggaggagggagcgattagtcatgctggggaggctccaagggccctttgtccttcctagatggctactcagacgccagtctgcgagcaccccasgctcagctgctccatgcttcagccaccatgcaacccatctggataatggactgttatgaagcatgttggcagccatcgattaggactaaactctatgctc

SEQ ID NO: 380868 - DNA, 201 bp, Homo sapiens
tctcttgttattgtacccaaatccacacattctcctcagtgttgtctgggaaatacatcaatccactgtgaatggtttagatagaatagaatccatcaatktcaccagcttcattcctcctcagatgatgagccactttctccactccacctccagggctggccccagtcttcctaaatgttcattaactcctattaggta

SEQ ID NO: 380869 - DNA, 201 bp, Homo sapiens
ggtgtgattagaactcctagcgggtgactcatagagagtgattagaagtaaaaaggttctggaaattcccccacactctttaaggcagcctttgtcaggtrtcttagtttcgtgaaaggtagactgatgttttccatctggtatacaaaacattttctaagtagttatagaaccttgaacaagccacttagctctctgggc

SEQ ID NO: 380870 - DNA, 201 bp, Homo sapiens
gtacagaccatcaggatggtgtatgggctttattttcctggtaaacacatttctgaccaatcattaccatttgctcttttgtgctaaacttcaaagtgacrgaaccaaatgtaggtattcagcttgcccaagcttgggctggtttttctcagtcgtcttcacccctgtgtttgaaagggttcctggggtagttctcccagc

SEQ ID NO: 380871 - DNA, 201 bp, Homo sapiens
caccagcagttcccagctgaccatccagccctcatcccaaacttcaccccacccaacaaagctcagtacagaccatcaggatggtgtatgggctttatttkcctggtaaacacatttctgaccaatcattaccatttgctcttttgtgctaaacttcaaagtgacggaaccaaatgtaggtattcagcttgcccaagcttg

SEQ ID NO: 380872 - DNA, 201 bp, Homo sapiens
tgcccaagtgtcctaagtgttctaggaataagcgacagactctgatctcatggaggctcagacccctgggcttcagggctctattccttccacccctaaaygtgacctgaagtggcccctgcctccctcagtcctagaggctgctgctcaattacagtgaagaatctcttatagactcacggtgacttaaacgctatttgg

SEQ ID NO: 380873 - DNA, 201 bp, Homo sapiens
attctaatatttatacaaatcatataacgatttcacagaaccaaacacttacaagtagaattctactaaaactacttgtgataacagtgaaagctagacaygtggtcattttaataatggaattacaaattaaataaacataattattatatcttactaatgcttgcaacaaaagctaattttaaaaacttggaatgtctc

SEQ ID NO: 380874 - DNA, 201 bp, Homo sapiens
gaaataaagtctaaaacatcaaagcgaaagatcagatgagatttaatgaagacccagtgtaaagaataaatgaatcttactccttatctggaatggctgcyttatttagaagccaaaattacataaagaatctcacacaaagcttaaataaagtttagatttaaggggggtatgtttcactctcataaactgagcttttaa

SEQ ID NO: 380875 - DNA, 201 bp, Homo sapiens
ctccggtgatggaagtctgaacagttacatctgctggtggtgttgcctggagacacgtttcagagaatagaaatgttctctgccttgatggtggtggtggytacggtggttgtaaacataatagacactcacaacactcacagagctatacacttaggattcgtcacctaaaaaaaaaaagaaagaaaaagaaaagaaaag

SEQ ID NO: 380876 - DNA, 201 bp, Homo sapiens
atatatttaacagatgcaattggaaataataacacaaaatggtatctcgggccaagccaacagccaaagcagtctagttgttgtttccaaaacacatagtrgtgtcctctttagtggacaatgtcagctccaatatgaggaaggggcagggcttacagggctgagccaggcagaaaccgatgacactggcctcatgccaag

SEQ ID NO: 380877 - DNA, 201 bp, Homo sapiens
caaaactaatctccggtgatggaagtctgaacagttacatctgctggtggtgttgcctggagacacgtttcagagaatagaaatgttctctgccttgatgktggtggtggttacggtggttgtaaacataatagacactcacaacactcacagagctatacacttaggattcgtcacctaaaaaaaaaaagaaagaaaaag

SEQ ID NO: 380878 - DNA, 201 bp, Homo sapiens
ttgggttaaggggtgataacgtccttcttgccctgtgttccagccatcacccagaccataaaatgctcccacgagcgatcggtgcaccttttcatcgactycttgctgcacgccggcacgcagagcatggcctacccgtgtggtgacatgaacagcttcagccagggcctgtgcctgagctgcaagaagggccgctgcaac

SEQ ID NO: 380879 - DNA, 201 bp, Homo sapiens
gacaggcacatctgccatttttctctgtcttcttcagttccttccaggttctctctgccttgcttaggagctgcccctgtttgcagagctcttcatcaatrgactgaatatttacagaatagcgcagttttgattaaacagttcatttcactggagactggggtggtgtattgtgtctcctccggagttattcttggcatc

SEQ ID NO: 380880 - DNA, 201 bp, Homo sapiens
agcgattctcctacctcagcctcccgagtagctgggattacaggcactcgccaccatgcctagctaattttttttgtatttttagtagagatggggggggsggtggtctcaccatgttggccaagctggtctcgaactcttgacctcaaatgatccaccagccttggcctcccaaagtgctggggttacaggtgtgagcca

SEQ ID NO: 380881 - DNA, 201 bp, Homo sapiens
tcagccctcaacaagttaagcaggttatataagaagtccaggcatggatgacgatgatcataatcatgatggggaggatgacaaagatgactaggaacgcyctgtcatctctctctctctctctctctctctctttccttcctggttgtgtgagtttgcagggagacgggaggttgtgaagaacaataaccagaagagagt

SEQ ID NO: 380882 - DNA, 201 bp, Homo sapiens
ggagcacagggccgcgccactcaggcctcgttctgaagacgatcagagtcaaagcaggagaaacccagcaaaggtgactgctgattcaatctcctattaaygtccattaagcacccacttgtgccaggcagtctcacaatttaatactcacattcatcatgtgaggtgagtattattaggccctagtgatggagtacagaa

SEQ ID NO: 380883 - DNA, 201 bp, Homo sapiens
gcaaaactaatctccggtgatggaagtctgaacagttacatctgctggtggtgttgcctggagacacgtttcagagaatagaaatgttctctgccttgatsgtggtggtggttacggtggttgtaaacataatagacactcacaacactcacagagctatacacttaggattcgtcacctaaaaaaaaaaagaaagaaaaa

SEQ ID NO: 380884 - DNA, 201 bp, Homo sapiens
gaggcagagaaccagtgacactacacgcaaaccaaggccatgctgcaaacagaacaccaaggcaccctcgtcttaggatgcattatattcggggtagatgytgaattctagtaacacattccctggggtgttttcaaatccagacacactggagccttgttccagcctcactgtgggcgaaggccccgggctcacctccag

SEQ ID NO: 380885 - DNA, 201 bp, Homo sapiens
gatgtggatatcggcgagctgatcatgatcaagttcaagtgggaaaacagtgcagtgtgggccaatgtctgggacacggtccagaccatcatcccatggarcacagggccgcgccactcaggcctcgttctgaagacgatcagagtcaaagcaggagaaacccagcaaaggtgactgctgattcaatctcctattaacgtc

SEQ ID NO: 380886 - DNA, 201 bp, Homo sapiens
gagaggaggggtccattcagatggttggagggcttagaattttatttttagtttacatgggcttgagcatttaagcaccaatcacatacagggcactgtgrtaggcgccagatactacctgagctagctcttacctacagcagaaaactcttggtccacaagacaactcttagtgtttggttctttttgtgaacataaata

SEQ ID NO: 380887 - DNA, 201 bp, Homo sapiens
catttgctatggactgaatgtttgagtcaccccaaaattcatatgctgaaatctaatccccaatgtgatggtgtttggaggtggggcctttgggaggtgaycaggtcatgagggtggagccctcataagtgggattagtgcccttataggggataaaggatcagaactctctgccatgtgcggatatgagaaggcaactat

SEQ ID NO: 380888 - DNA, 201 bp, Homo sapiens
ataagctccacctaaaacttaatgctgtgtttgcttcctgttttctattcagaatgacattttgttcagaaaacacagatgacctactacttcgcccaacmcaggaaaaaatcttcgtgaaatgtgaaataaagtctaaaacatcaaagcgaaagatcagatgagatttaatgaagacccagtgtaaagaataaatgaatc

SEQ ID NO: 380889 - DNA, 201 bp, Homo sapiens
aaaccagggctggggtgggacaccagagggtcctccagagaaggcagaggaagaaagacagggaaaaaaaacttggagcgcataaatactccccaaccacrgtcagccaggaggtgccaccttacttcatgcacagacatctgtcacttgaggcccagagctttgagctcccctacttgcacacaacattttcacatacag

SEQ ID NO: 380890 - DNA, 201 bp, Homo sapiens
gtcaggccagctacaactactttattccagacgcaaaccaaaaactatctgagacacatgtcaatcaatttagtttattttgccaaggttaaagacattaycgtgacacagcctcaggaggtcctggtgacctgtatccaaggtggtcaggctacagcttggctttatacattataggaagatataagacatcaatcagta

SEQ ID NO: 380891 - DNA, 201 bp, Homo sapiens
gatttgtctgatttattacccatttgttgggggtgtgctgtttccaacagttccttcttccattagttttggttccattaatctgaattttctcagtctawtctagcagagttgcagtgctggacattaacatatgtatgcatcaaacccatccttagggctgtaggaggtactgcatgcaggttatgggagctataattt

SEQ ID NO: 380892 - DNA, 201 bp, Homo sapiens
cattctttgataggtaggttggaactacttataatgagcatattggctttttttgtatgcaaacagatggtcttgaaagtagcttgagaggtactcaaaaytgatttgctcaagtaaatcaagcattccctcataaccttattcctttttttttttctttttgagacaggatctccctctgttgcctagactgggtcacag

SEQ ID NO: 380893 - DNA, 201 bp, Homo sapiens
agcattccctcataaccttattcctttttttttttctttttgagacaggatctccctctgttgcctagactgggtcacagtggtgcagtcatgattcgctsctacctcaaactcctgggctcaagcaaccctcctgccacagcctcctgagtggctgaaactacaggcacaggccaccacatccacataatttttgtattc

SEQ ID NO: 380894 - DNA, 201 bp, Homo sapiens
attttagagatggggtttcactatgctgcccaggcctcctggcctcaggcatcataaccttgtgtctaccactggagagtttccgcaaacctctttccccrctagctaatgcccagcctgtgtgtcattgttagcaccatgaactactgtggttttactgagaaaaggttacggcgaggttttctagggaaggatcagccc

SEQ ID NO: 380895 - DNA, 201 bp, Homo sapiens
aaacctgtgctcaaggacagggaggcaaaggtcaataagatgcactccctccctggggaggagacctaaaacagaccgcaggtgccctgctgcgtggctgkctcaggctctcagagtgtgaaggagagcacctcactcagcactggcagaggccggcaggcctaagtgggccttcaccatatgccaggcctggctaggagc

SEQ ID NO: 380896 - DNA, 201 bp, Homo sapiens
cctcaggcatcataaccttgtgtctaccactggagagtttccgcaaacctctttccccgctagctaatgcccagcctgtgtgtcattgttagcaccatgarctactgtggttttactgagaaaaggttacggcgaggttttctagggaaggatcagccctacgtgtttcttcttcctgctagttcactgatgtataataat

SEQ ID NO: 380897 - DNA, 201 bp, Homo sapiens
ataataatatccaaaagctaaaaagcacatctctcttcccctctccttgctcccgcgtaacccttacccctgctttcccattagggctggatgccgcgggrcctttgtttgagggaagtgcccccagcaatcgtctttctccagatgatgccagttttgtggatgccattcatacctttacccgggagcacatgggcctga

SEQ ID NO: 380898 - DNA, 201 bp, Homo sapiens
tgcatttggaaacagacaagtgttatacaaaattacataatatgataggaatgctgtcaatggatatctattattatatttaccagtcaaaattttagttsttataactggtatcaccaattaaaaaattttataagaaaggggtttttgtaccattggatctattgaatcattaaaaaaaaagagtttagaaaaagaaga

SEQ ID NO: 380899 - DNA, 201 bp, Homo sapiens
ttcatcagagggctaagcaacacacacctttaaaaagtgagtgagttttggccaggcgaggtggcttatgcctgtaaccacagcactttgggaggccagargcaggcagatcacttgaggttaggagttggagaccagcctggccaatatggtgaaaccccttctctactaaagatacaaaagttagccaggtgtggtggt

SEQ ID NO: 380900 - DNA, 201 bp, Homo sapiens
cgcgtaacccttacccctgctttcccattagggctggatgccgcgggacctttgtttgagggaagtgcccccagcaatcgtctttctccagatgatgccarttttgtggatgccattcatacctttacccgggagcacatgggcctgagcgtgggcatcaaacagcccataggacactatgacttctatcccaacgggggc

SEQ ID NO: 380901 - DNA, 201 bp, Homo sapiens
  misc_feature (1)...(201): n = A,T,C or G
attcaatctcctattaacgtccattaagcacccacttgtgccaggcagtctcacaatttaatactcacattcatcatgtgaggtgagtattattaggcccnagtgatggagtacagaagctcagaaaggtgaagtgactatcccaactttacatagccacaggtgccaggacaaggattcacacccaggtctttgaataca

SEQ ID NO: 380902 - DNA, 201 bp, Homo sapiens
cagaggtttctatttatatggggggaggagcattacttgggagagagtgcatgctgcaggcatactatgttaaacctacagagagctgaactgtccagacrccgttgccaaagccccactgtctccacagcggcttcttcctagaagctaagctagagaaagttaactagatttgttatagtgggacttctcggagccttt

SEQ ID NO: 380903 - DNA, 201 bp, Homo sapiens
ccagggcctctgtgaagccctggggcagtagggggatgtctgacaaagcttcctaactgaggagccccacttcctctcgctctgggcacccctgccaaatragcgggcacctctatgttccagcagccctcgctgcccagcttctgagctgcaagccagcttccttccacagaattctctgcaccttggcttccggtggct

SEQ ID NO: 380904 - DNA, 201 bp, Homo sapiens
cctcttttcctgattaactcccacttttcctgtaagacacagtcccaaacaggtcctcctgcaagccattgctgccttcatcccagcactcccacagggcrttcagtgtcaccgggagttcccgtgtggccctgagcactctccaccactgctctgcagctcggctttctaattgtctgtgtttctctgctctgctaggcc

SEQ ID NO: 380905 - DNA, 201 bp, Homo sapiens
tctgtgccctctgcctagagtgttctttctcctcctcttttcctgattaactcccacttttcctgtaagacacagtcccaaacaggtcctcctgcaagccrttgctgccttcatcccagcactcccacagggcattcagtgtcaccgggagttcccgtgtggccctgagcactctccaccactgctctgcagctcggcttt

SEQ ID NO: 380906 - DNA, 201 bp, Homo sapiens
tcatgcgagactcgcctgtttgaagcagctgctcatgggatactgctatctatataatgttatgttatccaatgtggtagccacaaaccatatgtggctayttaaatccaaatctaagttactttaaattaaatggaaccaaaaattcagtttgtcagttacacaagccacctttcaagtgctcaaatacgtggctgctgc

SEQ ID NO: 380907 - DNA, 201 bp, Homo sapiens
agccttttagtgatgctaaaaattctattactatggaagaaggagagaaaggatattattggcaatagatgaagtcaaaccatgtgagaacttgtctccargaggaaatcctgcctccccagtgtctagcccacccatgatttcaagcatagttcacaatttgaaccctccagagattttggtgtctacttcatgacttag

SEQ ID NO: 380908 - DNA, 201 bp, Homo sapiens
caggcttcagagacaattgattgtaaatgttacttatcagacttaaaaaggtgccagacttagttcattctctcccagatcagtgaaaagacctggatagkgaagggaattctctacagaatgtagattttcccaccacaagacagctgttcagggccctttcaaaatatgtcaaagaaatatattttagggtaaaatagt

SEQ ID NO: 380909 - DNA, 201 bp, Homo sapiens
tttcccatttgatcctcacagcaacccccagacagggagagacacacgcacacacagagacacggtcagggcaaagtcacacaatttgtgagcaggaagcrtcgcattgaatcccagcctttgctccttttactgcacttggcctcggcgtaggaccaaggccctcgactgagtgcctctccctcctgcggcattccagct

SEQ ID NO: 380910 - DNA, 201 bp, Homo sapiens
tgtacaccagaactcgggtaaacactgcgagagtacagcagtagcaagagagaattgggaaacagtcgccgagtgaaacgaggcaatttatcgcccacttycattctcactctctcacaaggaacctttaccagtttgggagcctgtttttaagggagggggagggaaacggatctgtacggagtaaatcctgtttcgcca

SEQ ID NO: 380911 - DNA, 201 bp, Homo sapiens
gtcactttgctgttacgactaaactgattgtgtctgattttctttgtgtattcaaggggcaaaggaattgctagtaataaaacgtattcctttcttatcaygctggatgtggatatcggcgagctgatcatgatcaagttcaagtgggaaaacagtgcagtgtgggccaatgtctgggacacggtccagaccatcatccca

SEQ ID NO: 380912 - DNA, 201 bp, Homo sapiens
gactaggccctttggtgggggaagaggggacggtttcttcaggggcatctcacccctgggaagtgcatcctctctgctgggggcagtaaaaaggctttacrtgggccactgtggctcatgcctgtaatcccaacactttgggggcccaagcagggtgattcacttgagcccagaagtttgagaccagccgggcaatataaa

SEQ ID NO: 380913 - DNA, 201 bp, Homo sapiens
ctcagaagtccccttggcttctttcctggaggtgcttcagctctgctgttgccgtgtttctgaaactgtgcaggctccagacagcaacgttgtcacagccyttctcctgtcccaagagtgtggccaccttgccgccaagggctaggaggagaaacctcgaccatttctgaaacgatccttgggttggcctctctgtccatt

SEQ ID NO: 380914 - DNA, 201 bp, Homo sapiens
ccaaagggctcagaagtccccttggcttctttcctggaggtgcttcagctctgctgttgccgtgtttctgaaactgtgcaggctccagacagcaacgttgwcacagcccttctcctgtcccaagagtgtggccaccttgccgccaagggctaggaggagaaacctcgaccatttctgaaacgatccttgggttggcctctc

SEQ ID NO: 380915 - DNA, 201 bp, Homo sapiens
agctggggagccttcagaagggcaggatgcagtcccctgtccaaagggctcagaagtccccttggcttctttcctggaggtgcttcagctctgctgttgcsgtgtttctgaaactgtgcaggctccagacagcaacgttgtcacagcccttctcctgtcccaagagtgtggccaccttgccgccaagggctaggaggagaa

SEQ ID NO: 380916 - DNA, 201 bp, Homo sapiens
ttatgcatctttatccaatcaagtgcccttggacaaagcctgaaaccaggtaagagcctgacttttctccagagatgggcatgaacttttctttttaaaaygtgtgtcacaaagaatccaggggtttctgactgtatgggacagagcttgcttcagagcgtgccaggtggttctatacacgacctcacaggttcacaggga

SEQ ID NO: 380917 - DNA, 201 bp, Homo sapiens
ttcttcctgctagttcactgatgtataataatatccaaaagctaaaaagcacatctctcttcccctctccttgctcccgcgtaacccttacccctgctttmccattagggctggatgccgcgggacctttgtttgagggaagtgcccccagcaatcgtctttctccagatgatgccagttttgtggatgccattcatacct

SEQ ID NO: 380918 - DNA, 201 bp, Homo sapiens
gcacctcatttctgagcaggcacgaagaacagggtgggcgccacaacacactggaccgcaaaaggctttcatccaggcagctcttctcctgcccccatccygctgctgtcttccaggaatctgtgcaactctctcgaagccatgttcacctaattgggtacagcctgggtgcacacgtgtcaggatttgccggcagttcca

SEQ ID NO: 380919 - DNA, 201 bp, Homo sapiens
gtggaaagagcatgggtttgggtatgtcttccctcatgaaaaccgtggagccagaagcagtagtgttacagtgatgtcatcccctgaggctcagtttcctygtaggtaaggtgggaatggaaatgactgctgcataggctgtgagatgattttgtgagatgtaagcgcccaacagatggtggtgatgacgatgttggaatc

SEQ ID NO: 380920 - DNA, 201 bp, Homo sapiens
gctgtgatcctgaaatgggtagtattggctgtgcagattaggaacctgaggctcacagaagttacacagcttgaggacattgctcaaaattgtcccagtcyagatttgactgggatttgtctgatttattacccatttgttgggggtgtgctgtttccaacagttccttcttccattagttttggttccattaatctgaat

SEQ ID NO: 380921 - DNA, 201 bp, Homo sapiens
tagggctggatgccgcgggacctttgtttgagggaagtgcccccagcaatcgtctttctccagatgatgccagttttgtggatgccattcatacctttacscgggagcacatgggcctgagcgtgggcatcaaacagcccataggacactatgacttctatcccaacgggggctccttccagcctggctgccacttcctag

SEQ ID NO: 380922 - DNA, 201 bp, Homo sapiens
ctagcagggtgggatggggagtgggggctcagggagcctgggctggggagaggcatccgccctcttcaacagaatgattgggactttctggcagcataagmaataaccggcaggagaccaagaaggcgccgtttagctggctcatgtgtgagtgagtgatgaaactcaccctctggcttggcgccttatggaactatcaac

SEQ ID NO: 380923 - DNA, 201 bp, Homo sapiens
gctagcagggtgggatggggagtgggggctcagggagcctgggctggggagaggcatccgccctcttcaacagaatgattgggactttctggcagcataarcaataaccggcaggagaccaagaaggcgccgtttagctggctcatgtgtgagtgagtgatgaaactcaccctctggcttggcgccttatggaactatcaa

SEQ ID NO: 380924 - DNA, 201 bp, Homo sapiens
cgggacttacaatctgcatttctaacaaattcctggtgatgttgccgctgctggtccgaggccctcactctgagaatcactttgagcccctgcgttatcartaggggccatattgcccccaagagggtgaaattgtatcttgaggtgggtgatgaaaaaagtttttattataaagcagatatatatatatacacacacaca

SEQ ID NO: 380925 - DNA, 201 bp, Homo sapiens
tgggtggcctcaacaacagaaatgtattttctcacagttctggaagtgagaagtctgaggtcaaggggtcagcagggtgggtttcttctgaggcctctctycttgtcttctgatggctgcgtctcttctgtctgcacacagtcttctatgtttctgtgtccgatctcctctttttataaagaccccagtcatattggatta

SEQ ID NO: 380926 - DNA, 201 bp, Homo sapiens
cagcctggatgacagagagagagactccgtctcaaaaaataataataataatagaaaagaaaaggaaggatgctccagcgctcctgaagtcctcccagcaraagaaagggctgcccagcacaccctgccatagcaaccgtgcttttcggtcatccgtggttctccacggcagaattccaggcatccccgggccctctcctc

SEQ ID NO: 380927 - DNA, 201 bp, Homo sapiens
cagtctagcagtctgccaggactgccaggacagaggaccacagactgggtggcctcaacaacagaaatgtattttctcacagttctggaagtgagaagtcygaggtcaaggggtcagcagggtgggtttcttctgaggcctctctccttgtcttctgatggctgcgtctcttctgtctgcacacagtcttctatgtttctg

SEQ ID NO: 380928 - DNA, 201 bp, Homo sapiens
agtcacagccagctggaccccacctcgcaaggatgtggttcaataggtctagagcgggacttacaatctgcatttctaacaaattcctggtgatgttgccrctgctggtccgaggccctcactctgagaatcactttgagcccctgcgttatcaataggggccatattgcccccaagagggtgaaattgtatcttgaggtg

SEQ ID NO: 380929 - DNA, 201 bp, Homo sapiens
gtggctctccatactcagagggtggtttctggatgtcagagatttcgccacacaccagctctgtgccaggccttgtgctaggaccccaacatggtcactcratattcacacagtctagcagtctgccaggactgccaggacagaggaccacagactgggtggcctcaacaacagaaatgtattttctcacagttctggaag

SEQ ID NO: 380930 - DNA, 201 bp, Homo sapiens
ctgaaaaaagccaatagtctcccctatctcaaatccaggatcctcggaagggtttgttaagtcacagccagctggaccccacctcgcaaggatgtggttcmataggtctagagcgggacttacaatctgcatttctaacaaattcctggtgatgttgccgctgctggtccgaggccctcactctgagaatcactttgagcc

SEQ ID NO: 380931 - DNA, 201 bp, Homo sapiens
ctaaaaccaaatctagggctctgtcccaccaatctccacctggtgcctggaattcctctatttttgttttttgttctgttttgttttaaagtttcactcayccccctccttaaacccaaatatccctgggacaggatggaaatccataaacaggtgcctgagtaagacatcattcacagagccttttcctcctgacagctg

SEQ ID NO: 380932 - DNA, 201 bp, Homo sapiens
aatactatcttggttgtcaggtttaaaagaccaaatgaatgtcactgcctggcagactacttaaaacaataagaggtgctaaagttactttaaaccaaccytctccaccctctccttccccacctcagtttcataccccagagaccaaattcctgatggattcctaaatgatatctctgccaaatactggtgccaggtgct

SEQ ID NO: 380933 - DNA, 201 bp, Homo sapiens
ggggtttcaccgtgttagccaggatggtctcgatctgttgacctcgtgatccgcccccctcagcctcccaaagtgctgggattacaggcgtgagccaccgygcccggcctcattatatgcttttaattgcatttagcactgggctaaacacacagtagacttccaattaatacatatcatattaaactgaattgaagatcg

SEQ ID NO: 380934 - DNA, 201 bp, Homo sapiens
gatatttcgaaagagctgaagctttttcctccatccaagaatcctctatcttccaggttgtttttatgagctgaagaggaccctccacggctcctcggtgrcttagtagtatcaagacaacacctgagaaagctcctttcatgcaaatctctgtctcacgcatgtgaagagaccaccaagcaggctttgtgtgagcaacaa

SEQ ID NO: 380935 - DNA, 201 bp, Homo sapiens
tttttttttttttttttgagacgtagtcttgctctgtcacccaggctggagcgcagtggcgcgatctcagctcactgtaagctccacctcctgggttcacrccattctcctgcctcagcctccccagcagctgagactacaggcacccaccaccacgccccgctaattttttgtatttttagtagagaacggggtttcacc

SEQ ID NO: 380936 - DNA, 201 bp, Homo sapiens
tgcccctggctacccaaagtcaagcccagaaacacagatgtgagcacaaacccaggcagcccatagaaggcacagccctgtgatgtcaagcttaaaaattytgggctacttttaaggtcaccagggatatttcgaaagagctgaagctttttcctccatccaagaatcctctatcttccaggttgtttttatgagctgaag

SEQ ID NO: 380937 - DNA, 201 bp, Homo sapiens
tggcagctagaggactagccatcacatctttattccaggaagcacaatgtagtaaaagatgtacacaaaggagtcaaaagcaaggtttttacaagagcttyattgagatataatttacaaagcgtacaacttatccatttcaagtttacacaattcaatggcttttggtataaaagagtgttttttaggtgtcccagagcc

SEQ ID NO: 380938 - DNA, 201 bp, Homo sapiens
ttcctccagcattatccaggagctggagaaggaagaagggtgagcggggagaaaggaaactagtgcgaccctccctctgtcccctcctcaggtggacggcrtgctagaaaactggatctggcagatggtggccgcgctgaagtctcagccggcccagccagtgaacgtggggctggtggactggatcaccctggcccacga

SEQ ID NO: 380939 - DNA, 201 bp, Homo sapiens
ttggcagaaaagatgcgcccatcttgacatgccacgccatggaaacgcgccaccttgccaggctctaccaggcctcttggcagaggtgtccgtctctggtscagcaccacagacaggacagctgtcgggctgcctggcagagttggatggccactcacccacccctccaaagtggctcatggtcatagtgaggctccccca

SEQ ID NO: 380940 - DNA, 201 bp, Homo sapiens
atgagcatcccttaattctacaaaaagcaaaataaaatatgaaacagttaaaagtctattgcaacactataatttgaaggggaaaaaaaaggctaaggacmtacagtaggccactgggcagacaaaggagatcattctgagcctgagtcctcagtatttggtgacccagtagagaggcaagagagggcataagctctaagc

SEQ ID NO: 380941 - DNA, 201 bp, Homo sapiens
gcagcctatgcctctcaacctggatcaagggcaatgtggagaaaccacattattgcttgactgtagtgcagtattccaacaatcattttaaatgtgcactygtgtaaccatgatcaccatcaagatgtaggatatttccatctctctttagagattcccttttgccctttgctagttaatccccaccccattccctggacc

SEQ ID NO: 380942 - DNA, 201 bp, Homo sapiens
agacatattgcccagcacggcttcaatggtgagaatgaagtcatgggccgggagcaccggcctacatttcaatggggcctctggaattcagcggaatctascaacatacgggactcagggaagagttcagcaaggataggggcccagggtgtatggtcaccaagcccacccagagagaaggaatgctggagtgggcaaggg

SEQ ID NO: 380943 - DNA, 201 bp, Homo sapiens; identical to SEQ ID NO: 82908

SEQ ID NO: 380944 - DNA, 201 bp, Homo sapiens
ggtcacctccataaggacagccagagcttctgccaggaaagaaagaacgttgatgctattcgttttccaaaagagcgtatctcctccggctaatctgaacrtatttcttacagggctcttgaatgcccctttgtagctgagtgggtgaaacggcatcaccaacatttggccctgctgctccactgagagccggcgccgttc

SEQ ID NO: 380945 - DNA, 201 bp, Homo sapiens
taaattttaagaaataagagatttttaaatttaaaatcactgcttaaattatctctctctttctctctctgtctctctctctagtttatcattaccagttmaagatccagttcatcaaccaaactgagacgccaatacaaacaacttttaccatgtcactactcggaacaaaagagaaaatgcagaaaattcccatcactc

SEQ ID NO: 380946 - DNA, 201 bp, Homo sapiens
aatttattaggaatcatttatgtaagattatgtagaaaatgttactagtcgtgagatatctatccatctcaatgatttgacttttacagcaatgcgatggracgtgctgagggaccatttggtcaactttccacctaatggtggtgtgattagaactcctagcgggtgactcatagagagtgattagaagtaaaaaggttc

SEQ ID NO: 380947 - DNA, 201 bp, Homo sapiens
gacagcttggaggttaaaagcaagatggagtcaactatgtcagatttctctgtcatcatttcacaaaggcagtttcactgtgacctgctaatactgtgggraaaagaaaaaaacagtactcattgggccttaggcatattctaggttctttgcaatacttaattttgtttttaatctcaaaccagtctgagacaggattta

SEQ ID NO: 380948 - DNA, 201 bp, Homo sapiens
attagaatggtcatcgtggtgccaggagatctgcagtggtgaccttccctggtatcagctatttaaatattatcaggaaagagaaatgtggaagcaaagtyctatccattttaagcatgtgaccttttaccctaactgaaccttaattgactcatttgcctctagcaattcaaagattcccagacacccggaggacaaaga

SEQ ID NO: 380949 - DNA, 201 bp, Homo sapiens
tgacctctggccacatgacccctgagcagtaagggatgacagaaaatttgcctatatcttagcagaattcaggcccctttcataatcctgaccttctggcytttcactggttttgcaaaagtggttgagtttggggagtggctattatccttgctgtaaggttcaactataaactaaattcctcccaaagttagcttggcc

SEQ ID NO: 380950 - DNA, 201 bp, Homo sapiens
ggagcaagtctctttgaagttttcttatgaattgctatgcttaacactaaatcatgggaaagattaacacccatgaaactgaagcaggagcacataacagragcttaatatgaatcttccatcttaaaaatatcttattctacatctgaaaagagaaccatttggaaattccacgtcatactcacttatagacttaacagc

SEQ ID NO: 380951 - DNA, 201 bp, Homo sapiens
atcttaggctctacaatagtgatgttatctacagaagcaattaggcaagtcacaaatcttgtgacctctggccacatgacccctgagcagtaagggatgayagaaaatttgcctatatcttagcagaattcaggcccctttcataatcctgaccttctggcttttcactggttttgcaaaagtggttgagtttggggagtg

SEQ ID NO: 380952 - DNA, 201 bp, Homo sapiens
aagctgagcattacttgtaattggtagaaaaataatcattgcaaaagctaattaaccatccaccctgagcggctccttggcaggcctgaaaatatgatcargaaaattcttttcctatgagtgaggcattatcaaagcagggcagagcctatgggttatccgttgactaggactgacctttccgtgactgccaaaaacttt

SEQ ID NO: 380953 - DNA, 201 bp, Homo sapiens
ccttcactcagcgaaagcatagctggctgagtctctagacagagagtgtgttgttcaggctaaactatctccctaccatggacataaaatgacatgggtakagaacacactaaattcttcaaggtaacaaatttaaattcttcaaaaagggagtggctatttaaaatatctctagttcatttttagcattactgaaattca

SEQ ID NO: 380954 - DNA, 201 bp, Homo sapiens
ctcattgtgtgtgtcctgtgattacaactgtgtgaaaatacatgtgtttgagaaaaaatgctggaagaagatgcatgaaaatgtttatacgtccgttgagyttgtatctgaacttttgtctcttcccctctttatgtaatgttatagtatgtatatggtatattgactttcatgatttaaataatcagaaaataaatttac

SEQ ID NO: 380955 - DNA, 201 bp, Homo sapiens
agccctcatcccaaacttcaccccacccaacaaagctcagtacagaccatcaggatggtgtatgggctttattttcctggtaaacacatttctgaccaatyattaccatttgctcttttgtgctaaacttcaaagtgacggaaccaaatgtaggtattcagcttgcccaagcttgggctggtttttctcagtcgtcttcac

SEQ ID NO: 380956 - DNA, 201 bp, Homo sapiens
agccgcggtaagaaaggcagtcgggtcttacattcaggtacctacttggggcgagaagaccaaatccagtcactccagccctggaggagtcagggcgcccrcccggctgccccacagaaggtgcaattcctaaacatggtcacaaagtagcgcagtgacatctcagctgcttcggagttccaggagagggtttctggctca

SEQ ID NO: 380957 - DNA, 201 bp, Homo sapiens
cttatggacattctatgagccaaagcaattttgaagtctaatcatttggagggaaaatatttgtcatgtcattttaaagggtacaaaacaacacagaggaraatgaaagggttagaaaataattggagcgcttctccctttacccttgtagaagacagctctccggttttcagctccactcattctgtcctccattggaag

SEQ ID NO: 380958 - DNA, 201 bp, Homo sapiens
caagagctctattcattccgctgtgtctgctctcttactatatcagaaaagggaacagccaccaacttcctgtgttgaccctagaccaggacttcttgatsacagcacacttaacatttggggctggataattctttgttgtgagaggctgtcctgtgcattgaagggtgttgagcagtatccctggcctctacccactaa

SEQ ID NO: 380959 - DNA, 201 bp, Homo sapiens
ggcaagggtgcctgtcccccagcaggccactcctggcaacaggccaacgccacgccctgaggatgaacagagggcaccaacaggaacccccacttctcacyccagccccatgtgcccaggcaaaccctctcccggggtaccagctcttctgagagttgagtccggatgcctgtggttattcttccttctctggaagtttcc

SEQ ID NO: 380960 - DNA, 201 bp, Homo sapiens
tgttttacaaagaaatgttgcaaatctctctaatatctggcttcccaagacagctggattatcttacctgtttctgtactcagtctgttgtgatgtattgytttgtttgaaatgtaggaagaaaatctggcctcccatagaggaaaagggaggacatcctaaggcgatctccctggggccttggcctgcaaaccactgcgc

SEQ ID NO: 380961 - DNA, 201 bp, Homo sapiens
agaccactcccataaagggccataccctagtgttttctgacaatctagggatgaattccctattacatctcaggatgggagaaaaacaggatttgggagtyctggtttaatcactaaatgaacttaatcttgacttctggttttgtcatctgcaaaaggcaagtggtcctgatggctacttaataaagctgtctgtgagcc

SEQ ID NO: 380962 - DNA, 201 bp, Homo sapiens
ggatttcctttccccatccccacccctggcacctctaacacattaaagctcatcacagcagttattttaaggaaattcagcagaggtacttgcagggcccraggtcatcttgtgttggccctggatagatcatgaaatcctgttgccaaggagcatggtgggaatgtggcaggaaggctaaagtcaggaaagccacctcag

SEQ ID NO: 380963 - DNA, 201 bp, Homo sapiens
ggtaccagctcttctgagagttgagtccggatgcctgtggttattcttccttctctggaagtttcctcgttccagggaccgcctctattctgaaccacatraggatccacttaataggttgtggcttctcgatgaaggtctcactcttcatcccaccccatcagtttaattgaggaaattactcagactctcccaatggga

SEQ ID NO: 380964 - DNA, 201 bp, Homo sapiens
gaggggaatttatgagagttctatttccagtcaggtctaaagtagagatatcattgcacaatttctagactttgttttgctgccaaaattttagtctgagrctgaagaatccaacagccgtcctgcctgttttgtttgtaaattcacaaactagattgatggcgaaagacagatcaaatgccttatcaggaaggtagtaga

SEQ ID NO: 380965 - DNA, 201 bp, Homo sapiens
ttaatgaatttgatctttccttagtgacttgggtgcctattaaaatgcctactgtaacacgctgtcataaaggagtgctctcaggatcccggcagtgcccrggattttgcctgacactacatgactcagagggtctacttcccttagtttcagtcagttgtcacatcctgctcttgtcaaggggtctgccttgacaagccc

SEQ ID NO: 380966 - DNA, 201 bp, Homo sapiens
gaatactaatttgcctttggatctagccctgccgcccactcgagatggatggtccacaaatctcaatgtgattcctaacatgagttaagctgtccaaccctgtgacgttatcaggggatttgtgattaatacatagtgacaccatttaactgtggcagaggttcttacccttggaagctcattagaatcatctagggaact

SEQ ID NO: 380967 - DNA, 201 bp, Homo sapiens
catcagcatcacctgggaacttgttagacatgttagggtctcaccccagacctaatgaatcagaaactctgagaatgagggcccacaatctgggttttagsaagatctccagaagattctgatgcacacccgtttgagaaccaaagctccatggaatactaatttgcctttggatctagccctgccgcccactcgagatgg

SEQ ID NO: 380968 - DNA, 201 bp, Homo sapiens
ttagcagtggttcaaagaaaacagaaatttgttttcatttcgcaaaatattccaaagatatatgtaacccaaaaaccggctagacagctttggtcagtgargtcctccaggccccagctccttccagttcactgctctgccatcttggggtgtgaccctcatcctcatagtccaagatggcagctagaggactagccatca

SEQ ID NO: 380969 - DNA, 201 bp, Homo sapiens
ctgacttatgcaagtaactaccacagaaggcctgctgtgcagcctatgcctctcaacctggatcaagggcaatgtggagaaaccacattattgcttgactrtagtgcagtattccaacaatcattttaaatgtgcactcgtgtaaccatgatcaccatcaagatgtaggatatttccatctctctttagagattccctttt

SEQ ID NO: 380970 - DNA, 201 bp, Homo sapiens
aaacagcctgtcctctcaggcctgcaaaccaggagcagccaggcccagccctgacttatgcaagtaactaccacagaaggcctgctgtgcagcctatgcckctcaacctggatcaagggcaatgtggagaaaccacattattgcttgactgtagtgcagtattccaacaatcattttaaatgtgcactcgtgtaaccatga

SEQ ID NO: 380971 - DNA, 201 bp, Homo sapiens
tcaaacacagaactgactggctccaaagccagtgcccgccccactggccactccactaccctgcctctgccattgctccctatggcaacctggaaactgtsgggtacctgcccgtggtctgaagtgggcaggcagcagtcagctgggcctccagatatgggtggtgaagggaggatacaggtccaaaagaatatcttaggg

SEQ ID NO: 380972 - DNA, 201 bp, Homo sapiens
atctggaaggaactatgttgggttgagacatgagaaggaagagatcttaggcaagtttggaaagggaaacaacacattgaatgccaacccctggactagayatttcatcaacttcgttcatcctcactaccacccacacaagacggtcttcctatttccaacttagaagaaggaagttgaggctcctactggttaagcaag

SEQ ID NO: 380973 - DNA, 201 bp, Homo sapiens
ccagccccattcatcattcagcagaagacaggctgggctggcccaacttggtcctgtacccccaccaccccagaaccccactggtccatagtgaggatccsttctctttgactctcctccttctctgtgactcgcctaagcctgatcctacaccttctctcccagccactgcctcagcttcctccacccccagcttgggac

SEQ ID NO: 380974 - DNA, 201 bp, Homo sapiens
cttagcatccgtttctttacattttaaggtggagcataagaagaactgcagtgaaacagatcagatggggggcaggtgggatttctctttacctttccccsgctatttcttggtggatttatcccgttatcttcgctgctatttgctccttgctatcttttattcttctcttttgaaactggccgagtcagaaggaaataa

SEQ ID NO: 380975 - DNA, 201 bp, Homo sapiens
gaaggatcagccctacgtgtttcttcttcctgctagttcactgatgtataataatatccaaaagctaaaaagcacatctctcttcccctctccttgctccygcgtaacccttacccctgctttcccattagggctggatgccgcgggacctttgtttgagggaagtgcccccagcaatcgtctttctccagatgatgccag

SEQ ID NO: 380976 - DNA, 201 bp, Homo sapiens
ttaaaatcactgcttaaattatctctctctttctctctctgtctctctctctagtttatcattaccagttcaagatccagttcatcaaccaaactgagacrccaatacaaacaacttttaccatgtcactactcggaacaaaagagaaaatgcagaaaattcccatcactctgtgagtaggaggtgtagccccctagggtg

SEQ ID NO: 380977 - DNA, 201 bp, Homo sapiens
tagatggcagatggcagttggctccactagaagtgccacctggtgagcacgggcccacagtgggtgtgaggcgggacaacgggggcacacttccctcctgygtgtgtacctcacactgtgctaggatgattatggttctggcatacaaagtcacttatttttcatgcaacctggtccctaaacttaagaaaatgcctttat

SEQ ID NO: 380978 - DNA, 201 bp, Homo sapiens
caatacaaacaacttttaccatgtcactactcggaacaaaagagaaaatgcagaaaattcccatcactctgtgagtaggaggtgtagccccctagggtgaygacatttatttttcttgcagaacataaatggactctgtaattttcaagagtcaggccagctacaactactttattccagacgcaaaccaaaaactatctg

SEQ ID NO: 380979 - DNA, 201 bp, Homo sapiens
gccaaagaactggttttgcttgtttgtttcatttgccagtcagaagcgtgggggataatttagtggaatcccttcacagataggttttaacttgaaataaytcaactataggtgcttggcaaacaatcaaatagtgaacaggcccaagagagaaggaaataatttagatggcagatggcagttggctccactagaagtgcc

SEQ ID NO: 380980 - DNA, 201 bp, Homo sapiens
aatgctggagtgggcaagggtgcctgtcccccagcaggccactcctggcaacaggccaacgccacgccctgaggatgaacagagggcaccaacaggaaccyccacttctcaccccagccccatgtgcccaggcaaaccctctcccggggtaccagctcttctgagagttgagtccggatgcctgtggttattcttccttct

SEQ ID NO: 380981 - DNA, 201 bp, Homo sapiens
caatttaatactcacattcatcatgtgaggtgagtattattaggccctagtgatggagtacagaagctcagaaaggtgaagtgactatcccaactttacayagccacaggtgccaggacaaggattcacacccaggtctttgaatacacaccagggtctccccactgcccgtggctaacgctgcctgcctctggagcctga

SEQ ID NO: 380982 - DNA, 201 bp, Homo sapiens
tacgagcccagactcagcatatttaggagatggctcctaccacccagcaattagagaggggaggcaacgcaggcggaggacatctaccaatgcagcacatragcaagacacagggcctgagaataactgaaccctggcccacagatgccaaagaactggttttgcttgtttgtttcatttgccagtcagaagcgtggggga

SEQ ID NO: 380983 - DNA, 201 bp, Homo sapiens
atgctgcatgtttgcttatgatgggtgaggagagggaggagtcaatggtggctctgaagattctaggtattcacagggtcgggaagcacttgtttgtcacmggtttgttgggtgccggaggggaagaaagtcccgtgcaacagccacatgcaatgttcatcactcccctggctctcaggctgcttcagggctccagaccct

SEQ ID NO: 380984 - DNA, 201 bp, Homo sapiens
tagcattcagcaccctcactacaggccaagggtcattccgtagttgggttccgcaagaatgataggaacctaacagctttggcaggggtaatagcatcagytatgcatcatccactgatcacttgggctgacatgtagaatgcattggaagaggacggcggggttaagcagggagaccccgggggaggcagcagcaaggag

SEQ ID NO: 380985 - DNA, 201 bp, Homo sapiens
gccagactcagcctcccaaagtgctgggattaccaggcgtgagccaccgcacccggccaaggacatttttcatttgtcactgtgggtagggctggagaacrggtgatctcacggctcactctcaattccttcgccccccaagtagggaaggaaaccagggctggggtgggacaccagagggtcctccagagaaggcagagg

SEQ ID NO: 380986 - DNA, 201 bp, Homo sapiens
caatttgattattctgtggcttggtgtagtttccctcatattttttgtgttttgagatcattgatcatcttggatctatgtatttagtgctttcatcaaaygtagatatttttccaccattattatttctttaagcatttcttctgtcccctttcttgtctcctttggaattttcaattacatatatatgaggcctcttaa

SEQ ID NO: 380987 - DNA, 201 bp, Homo sapiens
atatgaggcctcttaaaattgcccgacagctccctgatgttctgttaatttattttcagcctttattctctgtgtttcaaatggatggtttctgttgctgygaattcaagtccactaatcttttcttctgcaatgtgtaatctgttattcatcccacctaatgtatttcatatctcagacattgatttttgaatctctaga

SEQ ID NO: 380988 - DNA, 201 bp, Homo sapiens
gaccagttatgtggcaggtggggagagctattctaaggttccttctaactccaaggggctcagatcggatatttggcaagtaagcaattggcacactgacsctgcagtttacaaagtgattcctacgatcctgagggtagaagaagattttgctcctggcagaggttttgcaggatgtgggtggggttggagaggaggctg

SEQ ID NO: 380989 - DNA, 201 bp, Homo sapiens
aagaacagggtgggcgccacaacacactggaccgcaaaaggctttcatccaggcagctcttctcctgcccccatcccgctgctgtcttccaggaatctgtkcaactctctcgaagccatgttcacctaattgggtacagcctgggtgcacacgtgtcaggatttgccggcagttccatcggtggaacgcacaagattggga

SEQ ID NO: 380990 - DNA, 201 bp, Homo sapiens
tctgtaaaatgaggcagaaaactatgaaagtgcctccaatctaagttccccaggctcctaagacaaggcctggcccatagaaggcacacagtacatgttgyttgagcaaataagtcagtttcttgtatggtatctggcatgtgatcagcataattaatggttgcttaaaaattaacagtctgttccccaccagtaacattc

SEQ ID NO: 380991 - DNA, 201 bp, Homo sapiens
ccatcttaaagtggcctggtcacagggtcagagcttcagcagacagaggcgccctgggataagttgccaaatatgggttgagcaacagtggcactggaacraggtaggaggcggggaaaggggatggaaggtaaaatcctgcccctgtcctcaaggtacttacagtcaatgtgaggaaggctgacagccataaaatgatga

SEQ ID NO: 380992 - DNA, 201 bp, Homo sapiens
aaggtagacattgtcgagaggcctcagcgttctccagaccatcagagtgccacgggattgtctcgtgtatctagttatattaagagaagaggagtcccacrcaagcctgttccagaaaacccaccctccaggcatcagcacctgggcattttaaattatctcatttgagatagaaatatttctataataaattacactaac

SEQ ID NO: 380993 - DNA, 201 bp, Homo sapiens
attatagataagaatactgggttcaaaagagatcacttggcttacccttgtctatactgcacctgcatgaatcatggacctgaacccaggtcacggccacytcccagacccttgctctctctgcttccccagcagcgcctctcagagtgaacacctatgtccatgacagtgattcccaaagtgttgtccccaaaccagcag

SEQ ID NO: 380994 - DNA, 201 bp, Homo sapiens
gtaatggcatggaaacatgctatgagatcaagccaaaagaaaagaaaaagtagaatgcaaaattttacatttgcattaaggaaaaaacacgttagaagaamatgcacttaaataaattgctctgtgtgatagtatgatagctgattatgtatttatcctcaatgctttctgtaccttcctgttgttctgaagttgtattac

SEQ ID NO: 380995 - DNA, 201 bp, Homo sapiens
tgtacccaaatccacacattctcctcagtgttgtctgggaaatacatcaatccactgtgaatggtttagatagaatagaatccatcaatttcaccagcttsattcctcctcagatgatgagccactttctccactccacctccagggctggccccagtcttcctaaatgttcattaactcctattaggtattccgaaactc

SEQ ID NO: 380996 - DNA, 201 bp, Homo sapiens
agaagtcacagaaacttttgggggcaataatgatgaagttcagaaacaaaagcctattgctggcccctaagcactcacagtttaacaccagggatcttagyacagaggatgggtttccaagagtcgttgagcctcctgagatggtgcccaaggctgtgtgtgtgtgcattttgagtggggagcaggtgtcataactttcag

SEQ ID NO: 380997 - DNA, 201 bp, Homo sapiens
ctgcagaaagcagagctcatgcagagccggccctttctgtcctaactcctgttagccaagccagccccctaaaaacagacctcagaacagcagagggaaayattcagaatcaaaggtgatgggaggaaaaaggaagaggaaacaggtaaatgaaagaaggaggatgaggattggaaagctgactacttaaacttttagcac

SEQ ID NO: 380998 - DNA, 201 bp, Homo sapiens
gtcagagcttcagcagacagaggcgccctgggataagttgccaaatatgggttgagcaacagtggcactggaacgaggtaggaggcggggaaaggggatgraaggtaaaatcctgcccctgtcctcaaggtacttacagtcaatgtgaggaaggctgacagccataaaatgatgacctatgacaacgagggtcgttccaca

SEQ ID NO: 380999 - DNA, 201 bp, Homo sapiens
tagtgggtaatgaagcacctaaaaggctgctttttttgtttgtttgtttttcctgagacggagtcttgctctgtcgcccaggctggagtgcagtggcacartcttggctcgcagcaacctctgcctcccgggttcaagcagttctcctgcctcagcctcctgagtagccgcgattacagacacacaacaccacgcccagct

SEQ ID NO: 381000 - DNA, 201 bp, Homo sapiens
cccatcttaaagtggcctggtcacagggtcagagcttcagcagacagaggcgccctgggataagttgccaaatatgggttgagcaacagtggcactggaaygaggtaggaggcggggaaaggggatggaaggtaaaatcctgcccctgtcctcaaggtacttacagtcaatgtgaggaaggctgacagccataaaatgatg

SEQ ID NO: 381001 - DNA, 201 bp, Homo sapiens
tttttggtttttctgagtctcgctctgttgcccaggctggagtgcagtggcgtgatctcagctcactgcaatccccgcttgcagggttcaagcgattctcmtgcctcagcttcccaagtagctgggattacaggcatgcaccaccatgtccagctaatttttctgtttttagtttagtcggggtttctccatgttggccag

SEQ ID NO: 381002 - DNA, 201 bp, Homo sapiens
agagtggcctctaggacaaatttcagcttgtacaattctggaatacagaaagggtagctggctagcgacctttttccatactccaccaggcactgtgtagrggctaagggaaagcttcccctttgccctctgaaagctcactgaaaactcacagaagacagattagtagaagaaaaggcatacgaatttattttaacatgt

SEQ ID NO: 381003 - DNA, 201 bp, Homo sapiens
ggtgctgggctacagcagggctggcaggagcagacggaggccacatgccaactccagcctctgctacatatggtcccagcccccctactcaccagccatgyggcctcaggcaagtgggataatccccgtgtctcagtttcctcatctttaaaaagtgggataataaaagattcatgtactttatagggttgttgtgaggat

SEQ ID NO: 381004 - DNA, 201 bp, Homo sapiens
gaaaaagacacacacatacatatcccatatgaaagttgtggacatcatgatacttcaattctaaatatttatacgctagtatttctttctttttttgagayagagtctcactctgtcacccacgctggagtgcagtggtatgatcttggctcactgaaacctccacctcctgggttcaagcgattctcatgcctcagcctc

SEQ ID NO: 381005 - DNA, 201 bp, Homo sapiens
gctacaaaaaccacagtcatgcagaagctggaggaaccaccaaggcaaagagaatggaaattcccttatgctagacagcacaggtccccagttttctgggrcatctgaaacttgatgtgacagcactgggagaggccaacagtccacgaataggccaggacctaaggggaaaggctaccactctacagccggccatcaggg

SEQ ID NO: 381006 - DNA, 201 bp, Homo sapiens
aatgcatttgttcttttttttttttttaagacagagtctcactctgtcaaccacgctgtgcagtagcacgatcctggcttactgcaaactccgcctccagsttctcctgcctcagcctcccaagtagatgggattacaagcatgcgccgccgcaccctgctaatttctatatttttaatagagacagggtttcgccatgtt

SEQ ID NO: 381007 - DNA, 201 bp, Homo sapiens
gggaggaggtaaagtgataaataggatgtggtcacggtgtcctaggcagtagcccctcacaatgccagtggatgtcaggatcacgaatcagggaggtctgwttcggtagaagacatgagttggggaggtctgatttggtacaagagatccagaacttgtgtccagctggagtaaggagagtaaggtatagcagagacagga

SEQ ID NO: 381008 - DNA, 201 bp, Homo sapiens
ctctgtcaaccacgctgtgcagtagcacgatcctggcttactgcaaactccgcctccaggttctcctgcctcagcctcccaagtagatgggattacaagcwtgcgccgccgcaccctgctaatttctatatttttaatagagacagggtttcgccatgttggccaggctggtcttgaactcctgacttcaagagatccccc

SEQ ID NO: 381009 - DNA, 201 bp, Homo sapiens
actcggcacaagagaggccaggctggggtgggaagaatggagagacagtgcctgccagtgacaggctggggcagggcgagaacaccagggaacatgcacaycgatcctgatttgagcaagtgttctcagaggcagctctataaattccttcaccacccctaagaattttgtactttgtcgcctgcctctaaacaatgcctt

SEQ ID NO: 381010 - DNA, 201 bp, Homo sapiens
aaccacgctgtgcagtagcacgatcctggcttactgcaaactccgcctccaggttctcctgcctcagcctcccaagtagatgggattacaagcatgcgccrccgcaccctgctaatttctatatttttaatagagacagggtttcgccatgttggccaggctggtcttgaactcctgacttcaagagatcccccctcctcg

SEQ ID NO: 381011 - DNA, 201 bp, Homo sapiens
gacaaggccaaaacagcactgggcgatgtgggctgagcagcccttggcttcgaaaacatgatttttttattattttttgagacggagtttcactcttgttrcccagaatggagtgcaaaggtgcgatcttggctcaccacaacctccacctcccgggttcaagcatttctcctgtctcagcctcctgagtagctgggatta

SEQ ID NO: 381012 - DNA, 201 bp, Homo sapiens
atgtgatgagaggcagaacagagcagttaagatgcaggctctgcacataccacaacgtggatgaatctcacttaatgttgggtgagaagagccaggcccaraagagcatctattgtgtgaatctactaactcgaagttcaagagcaggcaaaactaatctccggtgatggaagtctgaacagttacatctgctggtggtgt

SEQ ID NO: 381013 - DNA, 201 bp, Homo sapiens
atgattcgctgctacctcaaactcctgggctcaagcaaccctcctgccacagcctcctgagtggctgaaactacaggcacaggccaccacatccacataayttttgtattcttttttattttagagatggggtttcactatgctgcccaggcctcctggcctcaggcatcataaccttgtgtctaccactggagagtttcc

SEQ ID NO: 381014 - DNA, 201 bp, Homo sapiens
ctgttccagagaattcagagcaaattatagcctcaattcctattgcctgccctcaaacgaatacctcatgttggtgtgccaaatgggactaaaagatggayttttctagcaagaaagagtcttattttttaatctataatttacaaagtccaatttgggcgagttaaggagtgaagaatcacagccttaatttgctgtaat

SEQ ID NO: 381015 - DNA, 201 bp, Homo sapiens
cacaagattgggagaatcacaggtaaccatgcctaataactcacacactgatctccactccataggggcatccaacaaggacctgcttttccaacaggctyatcattaaaacaccccaacacttattgtgagggatcagcgctcatgagaggacttgtgacattctttcaaacatgaccaatgtcatggattgctgttcca

SEQ ID NO: 381016 - DNA, 201 bp, Homo sapiens
atagaataaagtagaaatgtatgtacttgtgtagaatattctccaagatataagtgaaaagacaaggtgccaaccagtatgcatggcttcatccagcttaygtaaaaagggagatgtacacatgtgcacttgtatgtgcctatcctgtctccagaacaatagcaacggctgacttggggcagcagggaaagagcctggggt

SEQ ID NO: 381017 - DNA, 201 bp, Homo sapiens
gaacccaagcacgctgtcttgggactggattttctttccccatgaagaatgtaaatttcttaatcacaggccctgtttattttacacacagtcagcatctrcaagtctttgttaactgattacaggtttctgtaattctaggcatgttaagcgtagggtcaagcataaactctgtccctacctttccagaacatatgctct

SEQ ID NO: 381018 - DNA, 201 bp, Homo sapiens
aggagagcacctcactcagcactggcagaggccggcaggcctaagtgggccttcaccatatgccaggcctggctaggagcttccctggaagattccaggtracgcccagcaaccctcaaaggaaaatgctagtattgtccccattttaaaaatgggaaaacaggcttaaaaagtcagatgtctggcccaacatcacacagc

SEQ ID NO: 381019 - DNA, 201 bp, Homo sapiens
cctggcacagagaaagcattcaatatatatcagcttttaaaaatgctgaagatcaatttgaatatatatgtatatataaagagatataaataggatcacaygtaaggaactgattctacttttaggaaactacactaagaaaatactaatagattccgataaatatttatacataaagaacatcatcagagaattgtttgt

SEQ ID NO: 381020 - DNA, 201 bp, Homo sapiens
gtaattagcacctacagctaaatataaggcagtgttctagcattggaggaacaaggaaatgggaagaaatacaaagaagaataagacacaggcctttgacycaaatccaactggatatccctttatactacgtctagcattttgcttaagtgggacctaaaaagttactccaagctgcctcccctagggtcttctggctgt

SEQ ID NO: 381021 - DNA, 201 bp, Homo sapiens
gattccgataaatatttatacataaagaacatcatcagagaattgtttgtaatagggcaaataaaaccttgaaacagcatacattttcaacaatagtggartaagtaaataaattacggcactttttccaagtatgttttgaagaatttttgatgctatgagaaaatgataatgataagtgaagaaggatttaaaaccatt

SEQ ID NO: 381022 - DNA, 201 bp, Homo sapiens
tagatttctcttgcccagaacaacctggccaaatggaagatgggaggctgaaatcctcactccaaggaggggcctccttttcttggcacaaaggcaccgcrccaagctacacagctaaggcagtgtgctacctaaagcaggtgcacagaattcacagagaggtaccaaataggctggcaaagaccttggtggataagtacc

SEQ ID NO: 381023 - DNA, 201 bp, Homo sapiens
ctttgagaagcgaagttctaaaggtcacaaaacaacttctcatttcttcagtgaactggtaattagcacctacagctaaatataaggcagtgttctagcaytggaggaacaaggaaatgggaagaaatacaaagaagaataagacacaggcctttgactcaaatccaactggatatccctttatactacgtctagcatttt

SEQ ID NO: 381024 - DNA, 201 bp, Homo sapiens
gtttctgggtctgtaaaataataggacccacttcctataaatgttgagaagattaatgggaatgatgcatgtaaaatgctcggtacatgataaaagcccartgattactcattatcccactcaatgcttggggaaaggcaaagcagctaatattaccccagattatagataagaatactgggttcaaaagagatcacttgg

SEQ ID NO: 381025 - DNA, 201 bp, Homo sapiens
ctattatagagaccccactgggctgttttgagggtgaaatgagaccacgtaagtgaacgcactttgaaactatccattgctggtcacaaaactaacgtgtrtacgcatctatttactaaatagtcatataatactcacccgattcatatgctactcccagtgtttttctctactttttattacaaaagtgttcaactacag

SEQ ID NO: 381026 - DNA, 201 bp, Homo sapiens
gattactattatagagaccccactgggctgttttgagggtgaaatgagaccacgtaagtgaacgcactttgaaactatccattgctggtcacaaaactaaygtgtgtacgcatctatttactaaatagtcatataatactcacccgattcatatgctactcccagtgtttttctctactttttattacaaaagtgttcaac

SEQ ID NO: 381027 - DNA, 201 bp, Homo sapiens
tagaggagctgatgggcacgtcacatttttctcaatgctggatgacattccatcaccttcctcatcttcatggaattttttttttttttttttgagacaargtctccctttatcacccaaactggagtgcagtggtgcaatcatgcctcactgcagtcttgacctcccaggctcaagggatcttcccacctcagactcctg

SEQ ID NO: 381028 - DNA, 201 bp, Homo sapiens
tcagaatgccacttctttctgccaagacctcaggcattgctatggcccagccccatctttattgatgtcggggctctgtccccttgcagagcccatcccaytgccacccacatctgggacagcaaaagacttctcagtttcctccagagttcagtttcttccaaaaagctcggcacatcttagctgccagtgtgaactgtg

SEQ ID NO: 381029 - DNA, 201 bp, Homo sapiens
cttcagccagggggttgcctagactcgcccaggcctcagacgaggggaaagggccaaggccggctgccactttctcatcatgtgcctgcctcccttcccamatagaagggtcaagcccaaattagaagggtgggatgatggctggtgcctgaggacagagctggggctaggaggacaaactcctgggctcctcttcatgtc

SEQ ID NO: 381030 - DNA, 201 bp, Homo sapiens
ctacgtgagccacgttgtagctggagagagaattgaaagaggaagccgagctgagaccaccacagttccggggctggagcccagctttgcagaatgcctgyatagcagtttgaccccaacagatgaggctgttagggacagaaatgaaaagcactgagagaggggaagtgtgggtggagcttatggacattctatgagcca

SEQ ID NO: 381031 - DNA, 201 bp, Homo sapiens
ctttttccttagaatatataaagctagtggtcctgggtataaacatgtaaaagttcaagttctggagtcaggttgtgtgagccgacgccccagccatataygacttactagctgtgtgatccgagaaaagtcacttaacttctctgtccttcagtttcctcttctctaaaatgagataataatcgtatcatttgtttgagg

SEQ ID NO: 381032 - DNA, 201 bp, Homo sapiens
cagcagccctgctgagacacacaggagccggctggccggccgctagcagggtgggatggggagtgggggctcagggagcctgggctggggagaggcatcckccctcttcaacagaatgattgggactttctggcagcataagcaataaccggcaggagaccaagaaggcgccgtttagctggctcatgtgtgagtgagtga

SEQ ID NO: 381033 - DNA, 201 bp, Homo sapiens
atgtagactttcttccagggaggaaagcagctttgctatctcctacctttttaaacaaaatctgccttgattttgtctgccaagatatgtctttggatggsgtaaagcacttctgagggaagctacgtgagccacgttgtagctggagagagaattgaaagaggaagccgagctgagaccaccacagttccggggctggag

SEQ ID NO: 381034 - DNA, 201 bp, Homo sapiens
aggaaatttgaaagtgagtagtaagtccacaccaggcccagacagggggcctgtgctgaaaggtgcaggaagcagcagccctgctgagacacacaggagcyggctggccggccgctagcagggtgggatggggagtgggggctcagggagcctgggctggggagaggcatccgccctcttcaacagaatgattgggacttt

SEQ ID NO: 381035 - DNA, 201 bp, Homo sapiens
atggctgaagattgagtgccagcctttgatccaagatctggatctggcaggacacctcaccgctcactaacatttattgagcacccaccattgtgcccagkgctaccctccatgagttcgctgacaggtggaggaagcacacacctggataaataaatcaccccgctgcagggcaagtgtattaggatcagggaggcagta

SEQ ID NO: 381036 - DNA, 201 bp, Homo sapiens
atttatcccgttatcttcgctgctatttgctccttgctatcttttattcttctcttttgaaactggccgagtcagaaggaaataaacaaatgcaagggtgygtagaaagagcattagatggtaggtccagaaacttggactctacatccagcatctagtgatgtgattgattgatatctgttttagcttttcggcacctca

SEQ ID NO: 381037 - DNA, 201 bp, Homo sapiens
aggccctgctgtgacccgggtcctgggcttggcactgggcatacagtggaaactgcaaatctctctttgttctatttgagcttcagcaactctccggaagscttccgcgttagaaaaaaggcttacaaatacacaggaaatttgaaagtgagtagtaagtccacaccaggcccagacagggggcctgtgctgaaaggtgca

SEQ ID NO: 381038 - DNA, 201 bp, Homo sapiens
aagcagtcacattctgaggtactgagggttagaacttcaatgtatgaatttgagggaacacaaagttcagcccattacacccagcaaacactttgctaggmcctgctgtgacccgggtcctgggcttggcactgggcatacagtggaaactgcaaatctctctttgttctatttgagcttcagcaactctccggaaggctt

SEQ ID NO: 381039 - DNA, 201 bp, Homo sapiens
tttaaaaggatttcctttccccatccccacccctggcacctctaacacattaaagctcatcacagcagttattttaaggaaattcagcagaggtacttgcrgggcccgaggtcatcttgtgttggccctggatagatcatgaaatcctgttgccaaggagcatggtgggaatgtggcaggaaggctaaagtcaggaaagcc

SEQ ID NO: 381040 - DNA, 201 bp, Homo sapiens
agggtgtgtagaaagagcattagatggtaggtccagaaacttggactctacatccagcatctagtgatgtgattgattgatatctgttttagcttttcggsacctcaggttttgggctgtttttttttttttttttttttaatctgttaattgaagtgattggtctagatttgtggtctttgaatgtgtgtcagccatgga

SEQ ID NO: 381041 - DNA, 201 bp, Homo sapiens
acgtgtcaggcagagcaggattactcggcacaagagaggccaggctggggtgggaagaatggagagacagtgcctgccagtgacaggctggggcagggcgwgaacaccagggaacatgcacatcgatcctgatttgagcaagtgttctcagaggcagctctataaattccttcaccacccctaagaattttgtactttgtc

SEQ ID NO: 381042 - DNA, 201 bp, Homo sapiens
cacacaattccttttccactctatcccgggcccatgtctccatcctgcccctgatgctggctctgcaggcattttctacatggctgtctgtgtacatgccrtgtggttagtcttaaatcaagggctcctagagtgcataggacataccagtttatactttttctcatcaggaatatgtgtagctggaggattaagaaatac

SEQ ID NO: 381043 - DNA, 201 bp, Homo sapiens
tggcgagatctcggctcaccgcaacctccgcctcccgggtgcacaccattctgctgcctcagcctccccagtagctgggactacaggtgccagccaccacrcacagctaatttttatatttttagtagacatgggatttcactctattagcagccaggatggtcttgatctcctgacctcgtgatccgcccaagtcaaaac

SEQ ID NO: 381044 - DNA, 201 bp, Homo sapiens
gcacgtgtcaggcagagcaggattactcggcacaagagaggccaggctggggtgggaagaatggagagacagtgcctgccagtgacaggctggggcagggygagaacaccagggaacatgcacatcgatcctgatttgagcaagtgttctcagaggcagctctataaattccttcaccacccctaagaattttgtactttg

SEQ ID NO: 381045 - DNA, 201 bp, Homo sapiens
aagtccttgctgtccttagtagctagggagctttaaaaataaatacataagcacctgtttccgtttttttactcctacagaagcagggaaattgctggagaaaaaaaaaaaatgtaagtccatatattctgtactgtgtcccttggaagaataaaattttaaatgaggtcatcaggaagtgcttcctaaatgtgaagttca

SEQ ID NO: 381046 - DNA, 201 bp, Homo sapiens
agacctcactttggagaatgctcagtgaggggcaaacatttgctggtgacattgtagttctgtcctttgctaagcttgagtgaaaatcttttggagaatcracttttttctttcttttttttttttgatgtcccttagagagctcacaataaataaataaatcaaaacaaagctaaaagttcataaaaaagtctcaggcat

SEQ ID NO: 381047 - DNA, 201 bp, Homo sapiens
agaatgctcagtgaggggcaaacatttgctggtgacattgtagttctgtcctttgctaagcttgagtgaaaatcttttggagaatcgacttttttctttcttttttttttttgatgtcccttagagagctcacaataaataaataaatcaaaacaaagctaaaagttcataaaaaagtctcaggcatggtccagattttca

SEQ ID NO: 381048 - DNA, 201 bp, Homo sapiens
tctaccaagccctccacttaggtaataatcacgtcttccaacctcactctcaccctgtaagggagctcttagaataacgctgctctccacggctgggaaacccaggctctgatgggtgacatcacttgttcaaggtcactcagccagtaagggccaggctgggctgcaaactcaatggcccactgcagagctcacacaggt

SEQ ID NO: 381049 - DNA, 201 bp, Homo sapiens
cacacagtccacaagagcccaagttcccactcaggcccattctcttagctctgtgccacccagctctgcaaatgtagccacccaaagccaatcaagccagwggtagagttctaaaaccaaatctagggctctgtcccaccaatctccacctggtgcctggaattcctctatttttgttttttgttctgttttgttttaaag

SEQ ID NO: 381050 - DNA, 201 bp, Homo sapiens
gcgagatctcggctcaccgcaacctccgcctcccgggtgcacaccattctgctgcctcagcctccccagtagctgggactacaggtgccagccaccacacmcagctaatttttatatttttagtagacatgggatttcactctattagcagccaggatggtcttgatctcctgacctcgtgatccgcccaagtcaaaactt

SEQ ID NO: 381051 - DNA, 201 bp, Homo sapiens
tgaatttcgttttacaaacaaggacaatccaaagaggccaagttacctgcccaaggccacacagtccacaagagcccaagttcccactcaggcccattctyttagctctgtgccacccagctctgcaaatgtagccacccaaagccaatcaagccagtggtagagttctaaaaccaaatctagggctctgtcccaccaatc

SEQ ID NO: 381052 - DNA, 201 bp, Homo sapiens
cactctgtcacccaggctggaatacagtggtgtcatctcggttcactgcaacctctacctcccagattcaagcgattctcctacctcagcctcccgagtarctgggattacaggcactcgccaccatgcctagctaattttttttgtatttttagtagagatgggggggggggtggtctcaccatgttggccaagctggtc

SEQ ID NO: 381053 - DNA, 201 bp, Homo sapiens
cagattcaagcgattctcctacctcagcctcccgagtagctgggattacaggcactcgccaccatgcctagctaattttttttgtatttttagtagagatgggggggggggtggtctcaccatgttggccaagctggtctcgaactcttgacctcaaatgatccaccagccttggcctcccaaagtgctggggttacaggt

SEQ ID NO: 381054 - DNA, 201 bp, Homo sapiens
tcaggaagtccagctggctttttctcctgtctgtctctcaaatgtgtcccctggctcccctccattgccactgccctcttcagtgtctggcctgtgctccyacaacaacaggcttgaagctggctgccctctcccctccatcttccacaccataatccaggtgatccttctaagaggcaaaggtaatcatgtttcttccct

SEQ ID NO: 381055 - DNA, 201 bp, Homo sapiens
agatcaagagtcttgacgatccccaagctagtccactcagtccagttttcctgccagactatagctgttttgcattccttatcttgtgttgaagcaaaccrggtaaggaaactccccaccttttttattaatgactcattttcagccaaaacacattgcagccacatcaggtacatgtgcccactcagcaaagacgtactg

SEQ ID NO: 381056 - DNA, 201 bp, Homo sapiens
gaggcatgcgaatcacttgatcctgggagatggaggttgcagtgagccaagatcctgtcactgcactccagcctgggcaagagagtgagactcttgtctcaaaaaaaaaaaaaaaaatcttgccccttccctcaaggggctcacagcctgtgggagagggaaaatagatataattatatttaaagaattataaaacaaatt

SEQ ID NO: 381057 - DNA, 201 bp, Homo sapiens
ggatcagaaggtcaaggctgcagtgagccatgattgcaccactgcactcaaacctaggcaacagagctagaccctgtctcaggaaaaaaaaaaaaaaaaargaggcttttcacgaatttcacattccaccctccaccatctttgatgtaggtaatttatcagcattttgtagaggaggaaacaaggtctcccctacgttga

SEQ ID NO: 381058 - DNA, 201 bp, Homo sapiens
cagagaaatagcttgtctccaaggccacagagcagctggcaggggagagtttggggcaagggatttccttagggaaaacaccaattcgttctggtcatgcmcagtcacatgggtcccaaccatcaccttcccaggccaaggtcttaggttcccctggaacccctttggctttactcccttcctgggctgggggaaagggtg

SEQ ID NO: 381059 - DNA, 201 bp, Homo sapiens
ccaacaccattttagttactcacatggagctaagacaatcatacaaaactcaggcatggggtcagcccaccagcagtgtggacctcaccctgccggctgcrttccaaatgacagtggcatggtgccacagaaaaaacatgaggtgtgcagctggacccccagaagccctgactctgccaggtgctagctctgggacatctt

SEQ ID NO: 381060 - DNA, 201 bp, Homo sapiens
tgcctctgcccaacacactcccgttctttcaacacccaactcaactattaccttctctccatcagatcttccctgaaccaccccccagaaacaaaggtgastgtcccctctggttccccacagccaccccaccacttacccctgtgctcaggcactcctggagcactgcattgcaaccattggctcacacatctgtctcta

SEQ ID NO: 381061 - DNA, 201 bp, Homo sapiens
cattcattctcactgctgtagcattccactgcgggaccatgccacacttcctttatccattctactgtggattggccaggactgtttttgcaatggagccrtgggaattggaagctgtcagtgctgagatagaggttgaagggagggatggcctcccccaggcttctgggtattgtccagattttccttgagcaatctcat

SEQ ID NO: 381062 - DNA, 201 bp, Homo sapiens
ctcccgccagcactccaccacagcctgcctactgtctgcccgtttggactagcagctggtgctgtgggatctttaactccactgaaattatgtcacaaaaytggggcatcgtagggaacctaggaaaacagacaagaaataaagactccatatgtgcctggcccacacccgagtttggctcactatgcacacattagatcc

SEQ ID NO: 381063 - DNA, 201 bp, Homo sapiens
aaagagaatttctagaccacaagtttcagtgtggagagctgcaggcttagagaattgcagggatgtttgaagccctgcccacagttccaggaaacaccctktgtatatgagctcctttcccacacaaatgtgagaaggaggctatgaccctggaaattgaacacagggcaacagaaaccctgccgaaactattcttgcatt

SEQ ID NO: 381064 - DNA, 201 bp, Homo sapiens
tcctcctgcctcagcctcccaaagcactgggatcacaggcatgaaccaccatacccaccctaaggaatatagttttttgagcatgttggagtactcagaaytctcagctcagctcttggcccacttgggtctcaaccatttagagtactgattaccaaaggaagagcacaaaggaagaaaatcagcttttctcctcttcct

SEQ ID NO: 381065 - DNA, 201 bp, Homo sapiens
gatctgcccacctcagcctcccaaagtgctgggattacaggcctgaaccactgtgcctggccgagatatcccattttggataggggagcctgggacatatyctcaacttccgtgggtctggccactacttatcagaagtttctgctcaccttacacaactgtgagtgatggccaggagcagcctcagtggcccaaggggaa

SEQ ID NO: 381066 - DNA, 201 bp, Homo sapiens
atctccccctcattgcaatgtaccaagctgcctccaataagatcaagagtcttgacgatccccaagctagtccactcagtccagttttcctgccagactayagctgttttgcattccttatcttgtgttgaagcaaaccgggtaaggaaactccccaccttttttattaatgactcattttcagccaaaacacattgcagc

SEQ ID NO: 381067 - DNA, 201 bp, Homo sapiens
ctctcctgtgtattcacaaggcaaagatccccaaggttttgaccaatacccaatgttgttttggtgccagcttgcacagcaccagggctcttgcctctcakagagaattgtgccccctctctccactatgtggcacagcacattgagctcaacaacgttctatcagactgatgttgccataacactgcatatcttcaccca

SEQ ID NO: 381068 - DNA, 201 bp, Homo sapiens
ggctggttcagctatagatttggctaaaattacctgtgtacttactagacgccaggcagttagggggctttgcttaaatcactctcctgcattcttcacayagcacttgatgaaggaggaaagtgagtcttggaggttaagtgacttgtccaaggttacacagctgggaagggagaaagacatggctccatcccaggttcc

SEQ ID NO: 381069 - DNA, 201 bp, Homo sapiens
gtgttgcaaactctccttagaccactcagctaataatttcctctctggtatagctgaaacatgggcttgcctgaagggcagaggcagaagaagcctccaarcctcccaaggtcctgtgattctcattgatgcctacttctagtggttctggtgtccctctcagagcccacatgggtatctgagccttcagagatatctcat

SEQ ID NO: 381070 - DNA, 201 bp, Homo sapiens
ttttcttctgcaatgtgtaatctgttattcatcccacctaatgtatttcatatctcagacattgatttttgaatctctagaagttcagtttagacttcttrtatctcccatatttcttcttagcatgcttacattttcttctaccatcttgaataaatgaaatatagttataagaactgttttaatgttcttgtggactaa

SEQ ID NO: 381071 - DNA, 201 bp, Homo sapiens
tgccagggaatcagtgatgagccccaggaaatgctttttgtctaaaaatatgccatttccgaaaggaaaacagtcattagagggtgtgagaagccctcgtrgtgaggaaagcaaaactgtaagactcaatgggaggccagtggaacaacagagaagcccattacccacccacttcctgtgcgattaacaagacgtttggag

SEQ ID NO: 381072 - DNA, 201 bp, Homo sapiens
ttcattcccacctgcattatatgacttgattcttacagtagccctgtaaagaatattgggtaggaattcttattcccattttagagacgtaaacattcacyatccgcggaccatggggaacacagctgacatcaattgcaagtcagtttctgtggtttactgcagcaagggagagctcactccagacttgggcttgtgctg

SEQ ID NO: 381073 - DNA, 201 bp, Homo sapiens
gttgggaattcttgagattttggggtggccctggatggggtacataaaaagaagtggccagagggaaggacaggaagggccatcctcagaagttttgtccycatcctggaggcagggcagaccactgatgaggggggttgtttttaaaaggctgcctttcccagatggattgatagacttatctcagcctggctaaaaccc

SEQ ID NO: 381074 - DNA, 201 bp, Homo sapiens
atgtattcagtgtgttctagaactcggatctcttcttagtgtcactgtgaaattttccattacttcatctcacttcctgttctctcataagcgcgaacacrgggctgtaatcatcgtctgaccaccacatgttagtgcactgtgtttcttgctgacacctggctaggctttgaggatgagtttccatcccaacatctacca

SEQ ID NO: 381075 - DNA, 201 bp, Homo sapiens
aaatgtaggggtcaagggtgcctaaagttcatggcttggggatgtcactcacagagctggggacagatagaggaaagacacttttgagggaaaatatgtaktcagtgtgttctagaactcggatctcttcttagtgtcactgtgaaattttccattacttcatctcacttcctgttctctcataagcgcgaacacggggct

SEQ ID NO: 381076 - DNA, 201 bp, Homo sapiens
cttttgtctcttcccctctttatgtaatgttatagtatgtatatggtatattgactttcatgatttaaataatcagaaaataaatttactacgaaatgatraaataaaggagtttgactagatcagtgatcctggaactgtagtgggtaatgaagcacctaaaaggctgctttttttgtttgtttgtttttcctgagacgg

SEQ ID NO: 381077 - DNA, 201 bp, Homo sapiens
caacactttgggaggccaaggcgggaggatcacctgaggtcaggagtttgagaccagcctggcaaacatggcaaaaccccatctccagtaaaaatacaaawattagccaggcatggtggtgcacacctgtaatcccagctacttcggaggctgaggcaggagaacagcctgaacccaggaggcagaggttgtggtgagcca

SEQ ID NO: 381078 - DNA, 201 bp, Homo sapiens
cttaggggtctatttccagaagcattcctcatttcattttttccccagtggggcttggctaggggtggggaggcatggggaaaaagtgaagagaagagaasgaaatgcatggaatgcaagcggaggcctctttgtctacagcgttttcacctccacttgtgcaggttcatattcagggcctggtgaagtcagttctggcac

SEQ ID NO: 381079 - DNA, 201 bp, Homo sapiens
aaacacaaagcatcaacgaaaaaaaaaaaaaagtaaaagtacatagaaaaggagacacagaggaatacagaaaagcaaaaacctccttcaaactggtggaygtttcatcccaaaggacgctcgacctttctcaggcatcctgccactgaagaagtcaattactcacggcccacagtccctaggttccgctcagcacagtct

SEQ ID NO: 381080 - DNA, 201 bp, Homo sapiens
catgctgggtcatcacagttggcacagcagggagagaggcagaaagaggctgggccccgagacagggcagaacagtccccatttcatcatgaggggaatgyaaccacccaggcctcagcctgggtgtccctgacagccacgggctccacgtagaacagaggtcacagcgattctcacagccaggaaggtactgtgcgctgg

SEQ ID NO: 381081 - DNA, 201 bp, Homo sapiens
tcttggtcctgctgtcccctgaaaccaaaagcccaagacatattatttgagaagcctgaatgattttattctcagaaagaatgatcagggtccttattaawtgggctgaattgagttcactgaccaaaaaggtcagagcggccttgtgtctgctcctcagccgcaggggagcccaccttctaccagaaggaagggatgaga

SEQ ID NO: 381082 - DNA, 201 bp, Homo sapiens
caaggttgcatgcctgtgagcctcgactcatgttgctccctcagccacccctgacccccgcaacaaaacacacacacacactcaatcatcctgcaaggccrgggtcaacatcacattccctgaaaagccctccctgaatgccacaccctccctcaagcggcatccactactccctctgtgattcccccaaccctgccccac

SEQ ID NO: 381083 - DNA, 201 bp, Homo sapiens
aaggcccagcacaagtgtctttgctctgtaaatccattaggagtgccctgcaaattggttctcaaacaaggcacacacacagaacaattctctgtaaacawtttttacctcctactatgtcaggctcacagtgcccatcccgctaagtccagcataacgcagtctgcagggcagagccagtgctatgggtttaggggtgag

SEQ ID NO: 381084 - DNA, 201 bp, Homo sapiens
gacctgatttacacatatttctccactgttttaaggtttagaaagtccctaagaggaaaaacattaagataattgttctcgggagggggcgggggggaacrtttggaaaaatctggagacatttttggttttcaaaacctggggcagtgggtgggtgttgctggcatctagttggtgaaggccaggaatgctgctaaacat

SEQ ID NO: 381085 - DNA, 201 bp, Homo sapiens
acacctgtactcccagcactttgagactgaggcaggcagatcacctgaggtcaggagttcaagaccagcttggccaacatggcgaaaccccatctcttctaaaaaaatataaaaattagccaggcctggcacctgtaaccccagctactcgagaggctgaggcagggagaattgcttgaacctgggaggcagaggttacgg

SEQ ID NO: 381086 - DNA, 201 bp, Homo sapiens
tgggagaaagcttccattgacctcaccaccctctccagctcatgctctgttctccagagccaagctttcacacagggttgtctacgtgtatggagtggtgaaaaagagttccttgggctttggagtcagacaaacctgagtcttcaatagttgacctaacctctctaggtcttatggcttcatccataaaatggacaattc

SEQ ID NO: 381087 - DNA, 201 bp, Homo sapiens
ttttatttacgtcacaaatgcttctacagcacctactatgggccaggcatcatgctaataagggctttaccaatattaattcatttaatcctcacagcaacccactgagatgaatactattcttatcctttggtactgtggggaaactgaggcacagagcagggaaataacttgcccaaggttacacagccagtcagctcc

SEQ ID NO: 381088 - DNA, 201 bp, Homo sapiens
acagcttggaggttaaaagcaagatggagtcaactatgtcagatttctctgtcatcatttcacaaaggcagtttcactgtgacctgctaatactgtggggaaaagaaaaaaacagtactcattgggccttaggcatattctaggttctttgcaatacttaattttgtttttaatctcaaaccagtctgagacaggatttac

SEQ ID NO: 381089 - DNA, 201 bp, Homo sapiens
cttggaggttaaaagcaagatggagtcaactatgtcagatttctctgtcatcatttcacaaaggcagtttcactgtgacctgctaatactgtggggaaaaraaaaaaacagtactcattgggccttaggcatattctaggttctttgcaatacttaattttgtttttaatctcaaaccagtctgagacaggatttactatt

SEQ ID NO: 381090 - DNA, 201 bp, Homo sapiens
tccctcatccctggcctgacctaagagggctggggtaccacaggactgttgaccccactgagagctcagggtgccagaaacactgcctgccacgtgattcytattggtccttccagagatgctaacaggcctggaggctggaggtctctctgcccacactttcacacatgacctggagcagggggtcccagctctgtagct

SEQ ID NO: 381091 - DNA, 201 bp, Homo sapiens
acagacaagaaataaagactccatatgtgcctggcccacacccgagtttggctcactatgcacacattagatcctgccattcacaatttaaaatatatatwtatttttttgtgtatatatacatatatacacacctagaaaaaaagtatgtattttgtatatatacaaaatttattacgtataaataaaatttatacaaaa

SEQ ID NO: 381092 - DNA, 201 bp, Homo sapiens
cacattagatcctgccattcacaatttaaaatatatatatatttttttgtgtatatatacatatatacacacctagaaaaaaagtatgtattttgtatatatacaaaatttattacgtataaataaaatttatacaaaatttattacgtataaataaaatttatacaaaatttattacgtataaataaaatttatacaaaa

SEQ ID NO: 381093 - DNA, 201 bp, Homo sapiens
ttattccaggaagcacaatgtagtaaaagatgtacacaaaggagtcaaaagcaaggtttttacaagagctttattgagatataatttacaaagcgtacaamttatccatttcaagtttacacaattcaatggcttttggtataaaagagtgttttttaggtgtcccagagcctctgtgaaattctcccagttacatccatt

SEQ ID NO: 381094 - DNA, 201 bp, Homo sapiens
attcacaatttaaaatatatatatatttttttgtgtatatatacatatatacacacctagaaaaaaagtatgtattttgtatatatacaaaatttattacrtataaataaaatttatacaaaatttattacgtataaataaaatttatacaaaatttattacgtataaataaaatttatacaaaatttattacgtataaat

SEQ ID NO: 381095 - DNA, 201 bp, Homo sapiens
aaaaagtatgtattttgtatatatacaaaatttattacgtataaataaaatttatacaaaatttattacgtataaataaaatttatacaaaatttattacrtataaataaaatttatacaaaatttattacgtataaataaaatttatacaaaatttattacgtataaataaaatttatacaaaattttgtatatatttgt

SEQ ID NO: 381096 - DNA, 201 bp, Homo sapiens
atcatacaaaactcaggcatggggtcagcccaccagcagtgtggacctcaccctgccggctgcgttccaaatgacagtggcatggtgccacagaaaaaacrtgaggtgtgcagctggacccccagaagccctgactctgccaggtgctagctctgggacatcttgggcaagccatttggcccgagtctttttccccaccta

SEQ ID NO: 381097 - DNA, 201 bp, Homo sapiens
gaaggaagaaaacagctcaagaagaggctaaaacatgagcagcaaccatagcattcagcaccctcactacaggccaagggtcattccgtagttgggttccrcaagaatgataggaacctaacagctttggcaggggtaatagcatcagttatgcatcatccactgatcacttgggctgacatgtagaatgcattggaagag

SEQ ID NO: 381098 - DNA, 201 bp, Homo sapiens
ctcaaatgatccaccagccttggcctcccaaagtgctggggttacaggtgtgagccatcacacccagctgataagtagctttaaacacaagtgaggattcyattccatcaggaatggctgctttatgcagaagaactctaagattacatcaggctaagggtgacagaatgctgtaatccattagccttatctgtcatggtc

SEQ ID NO: 381099 - DNA, 201 bp, Homo sapiens
tttattatgtgagatatcaatatttccttcattagaaattaaaactgagaaatctttaaaatctgctaacactttttaaaatgataataaacccttgcatrttaacacatataatgtaattttatgaaaaataacttgtattttccaaataagttttaaatggagaagagtgacattgttttacaaagaaatgttgcaaat

SEQ ID NO: 381100 - DNA, 201 bp, Homo sapiens
ttcacacgtttcctctcttaaaaatcactgaggaccccaaacagtgtttattatgtgagatatcaatatttccttcattagaaattaaaactgagaaatcyttaaaatctgctaacactttttaaaatgataataaacccttgcatgttaacacatataatgtaattttatgaaaaataacttgtattttccaaataagtt

SEQ ID NO: 381101 - DNA, 201 bp, Homo sapiens
ctggcagttaagtgccttgccggcggtcgcatagctggtcagggcagagcagggagaggtacctgcagcctcaatctgtctactgaggccgcagtgctctstgtcgagcccacacccagtgatttgacagccagaggtttctagaaaaacattctgctcagttcctctcacagagagggagatttagacagttgttcctgc

SEQ ID NO: 381102 - DNA, 201 bp, Homo sapiens
aatcatcctcggattaaaagtcttctaagagtgcctgcagctagcagtgaagtctcttgcgtatctgatatggaaacagtcatgctaaaagttattcagcrgcaaatgatatgaaagcgattcagatcttcctgagagttaatgtggcatctaatttgcaaccggggagccaggcttgcaatgaaatgctctgtcgggttg

SEQ ID NO: 381103 - DNA, 201 bp, Homo sapiens
cacctggctgtttttctctaagttttctacaatgttttattttgctttttaagacagaaagtccacgcaaaccagtcaggaatagatgtgaaaaatggggatggggcctttgaaccaggagcaatatgagaaggtgagaaggatggcctgggccggctgggtctgcgagactacctggaaaagccacgggaatcacagccc

SEQ ID NO: 381104 - DNA, 201 bp, Homo sapiens
acacacacagcattttaaaacctagaaggaaatcacaaccataatacaatagttatctctgattatgggaatacaggtaattttggtgattttctctatgytttcttttttttctttttcttttttttttttgagacggagtctcaatctgttgccccaggctggagtgcaatggcatgatctcagctcactgcaacctcc

SEQ ID NO: 381105 - DNA, 201 bp, Homo sapiens
gtagagggttgttcaaatattataattctggtacaaccacacgttaggattctctcttgccaattattgatgtcgtgggggagtgttcaagacaaaacatwgagttataaaatcaggattctaaattatatatatacacacacatacacacaattaaactcaaacatacacatggagacacacacagcattttaaaaccta

SEQ ID NO: 381106 - DNA, 201 bp, Homo sapiens
gctcctaaccgcttctgctgtgcagtaacaagccacgctcagggcatgggcccaacttgagtttcttccatccacgggtccagactggaaaggaagcagcratcttctcttcttttctcactgagtataaggcacccaattcatcttctggcagctgacctggaggacggagtggccctgattttccttttacaggtacaa

SEQ ID NO: 381107 - DNA, 201 bp, Homo sapiens
ctctcccaccttcacttgtcgcgaaggccatgtttctctttggcttgtcctcagagaggtggaaaacagcaggtttctaacctctgaactaccctcttccstcaccccctgggtttcactgccaggtgccggcctgtggcagatgtatgcccctgagtccctttatacaaccgcactctgagattttatctccctgggatg

SEQ ID NO: 381108 - DNA, 201 bp, Homo sapiens
tccagaaatactttagtatacaaagtgctgtcacgtgatgacgtctcatttcagcatctcaacaaccgcacctggaaggccttattattttgtatatttayggatgaagagactggatctcaaatagcttaagagacttccctaacataactcagctaatgcctggaagacccaaaactagaatccagggctcctgactct

SEQ ID NO: 381109 - DNA, 201 bp, Homo sapiens
ccccattttccaggtgagaaaactgaagcacagagaaaaataacttgcccaaggttactcagctagaaactaggagagcctagatttgaacccaagatgcyccatgcacatagaaggcacttggtaaatatctagtaaaggaatgcatcttaccctggaatggcatgacaggccctcaggggagctctccagcttcacccg

SEQ ID NO: 381110 - DNA, 201 bp, Homo sapiens
atatgtctcctcctcctattactgctaatattaataacaacaacaactgcagtaacgaacatttgttgagtccttactatgttccagacactgctctaagygctttagatctattaacgtatttctccttcataacaatcctggaaggagagcattattaaccccattttccaggtgagaaaactgaagcacagagaaaaa

SEQ ID NO: 381111 - DNA, 201 bp, Homo sapiens
ccagggattacaggtctgcgccactgcacccggctcatttttgtatttttagtagagatagggtttcactatgttggccaggctggtctccaacccctgacctcaggttatccacccgcctcagcctcccaaagtgctgggattacaggcataagccaccgcgcccggcccttttaaagtaaatcttgattgatggacatg

SEQ ID NO: 381112 - DNA, 201 bp, Homo sapiens
tttaaggtggctcagcctatgtatattcacatgtctccacctactcccaatgtgatcattacctagaggcctctcatacttttttttttttttttttaatrcctgaagtttttttgtttattcctttttgttttccagctctacccaccagtatttttttgttgatgacagatcttctcctaaaatgacaaagaatttaga

SEQ ID NO: 381113 - DNA, 201 bp, Homo sapiens
ccactgccaaccagttattagggaggagggcagcacttgcaaaaatttcaggtctctgagagcccagagcctgagaagtgtggaggatactaattacaccmaggtggaagcctggccacagctcacctcctaaggaaagagcgagcccattaaatagccaggaaggaatggagttcacaggggattagatttctagattat

SEQ ID NO: 381114 - DNA, 201 bp, Homo sapiens
gtacattaacttgccgtgaatatatttaccagtttttacaataccatttttaaatctctacagaagccaattttcttacaagaaaattaccctaccaagattttttttagaacaagcaaacccaaatttctttcttaccctaacccagttcatccagctctgacactgtggcctgaggacagacactgatgctatcttgga

SEQ ID NO: 381115 - DNA, 201 bp, Homo sapiens
agggtttcactatgttggccaggctggtctccaacccctgacctcaggttatccacccgcctcagcctcccaaagtgctgggattacaggcataagccacygcgcccggcccttttaaagtaaatcttgattgatggacatgatgaagtccgtgaggtacaaatgcactgccttttacaaaagtaactggttccttggagg

SEQ ID NO: 381116 - DNA, 201 bp, Homo sapiens
taccaaaatgcactcttcattatcaaaattctgtccaacctagtatatgtctcctcctcctattactgctaatattaataacaacaacaactgcagtaacraacatttgttgagtccttactatgttccagacactgctctaagcgctttagatctattaacgtatttctccttcataacaatcctggaaggagagcatta

SEQ ID NO: 381117 - DNA, 201 bp, Homo sapiens
tttcctcagatggacatttttcagaagaaagccaatgacactagcaagtccatgacccatttcaagatatgacaggacatcattttccaagtggagaaaasaaaaattctcagaaagccctgtataccacagaaatccatacaccagtttcaagtctcatccaacagaccagccagagtgcagggccacagggcaccctgg

SEQ ID NO: 381118 - DNA, 201 bp, Homo sapiens
caggaatggatggggaagtgggggaagtcaggctgtgtttattgggcaaggagaaggggtctctgagcccaaagaccttcttgggaaatgcagctcctgcmctccacagcaaataatgctcaatgaccagtcagggagagcttgtctgggctctcttcaagctatggggagcatctagaaaatgccttgaaaccgtcagat

SEQ ID NO: 381119 - DNA, 201 bp, Homo sapiens
acagggcattcagtgtcaccgggagttcccgtgtggccctgagcactctccaccactgctctgcagctcggctttctaattgtctgtgtttctctgctctrctaggccgtaagcttctccctgggaaggattctgtcctattctcatctaatagactactgtgggccactatccattatgtaatcagtgctccaaaatgtt

SEQ ID NO: 381120 - DNA, 201 bp, Homo sapiens
atttaccctgcttggtggccaagaatcacttctgtccctattactagtgatatcatgtctgcatttggaaacagacaagtgttatacaaaattacataatmtgataggaatgctgtcaatggatatctattattatatttaccagtcaaaattttagttcttataactggtatcaccaattaaaaaattttataagaaagg

SEQ ID NO: 381121 - DNA, 201 bp, Homo sapiens
taggggaaggggagatgggggaaatgtggcaatttgagggatggtaaatgatttttagggggagacgagtggacttggggaacttacaatggccatggacraagtctgttgggacttcagagcagacaagggctggtaaatgattctctttgaaatactgaatgagcaccaaaacagaagacgatggtttgtgacaaaata

SEQ ID NO: 381122 - DNA, 201 bp, Homo sapiens
ctatgacaacgagggtcgttccacacacatcctccagaccccggcacaagacctccgcctttcatctccattatattgggcaaaacacaaagcatcaacgaaaaaaaaaaaaaagtaaaagtacatagaaaaggagacacagaggaatacagaaaagcaaaaacctccttcaaactggtggatgtttcatcccaaaggacg

SEQ ID NO: 381123 - DNA, 201 bp, Homo sapiens
gatgagccactttctccactccacctccagggctggccccagtcttcctaaatgttcattaactcctattaggtattccgaaactctcaggttttctgagycagcatagaatggttggaaaagcaattgctgtagaatcaagaagactgaaattggaatactggagcaactacctactagccacaggcaggttactctctc

SEQ ID NO: 381124 - DNA, 201 bp, Homo sapiens
acattcataactcataacctcctcctctctggatataaccacatcagaatcgagcttcattagtgtgatataaaagaggtctttgcatatacacacacacatatatatatatatatatatatctcaaaatatcaccaaaacccatactttaaaaaacaaaaagggcctttggagatcatcagccaatccccttattctata

SEQ ID NO: 381125 - DNA, 201 bp, Homo sapiens
ccacctctgtgcaggccttgtgctgggaccacacagatgcataagacacgtacagcttagagcctagtcatgaaatgggaaataaacagccccatcctcamggtctgaacaggggattggggagcacagagaagggccccaccccgaccagctgtcaagagaactatccatacattctaattcctccaaggttgagggcta

SEQ ID NO: 381126 - DNA, 201 bp, Homo sapiens
cattcataactcataacctcctcctctctggatataaccacatcagaatcgagcttcattagtgtgatataaaagaggtctttgcatatacacacacacatatatatatatatatatatatctcaaaatatcaccaaaacccatactttaaaaaacaaaaagggcctttggagatcatcagccaatccccttattctataa

SEQ ID NO: 381127 - DNA, 201 bp, Homo sapiens
gtgatgctagggtgtcacaagaggtgaaggacaatacaaagtttagtaactattgtgcacattcagaaattgagacacagaattactttcaagaaaaaagkaaatgggagggtcaggtgtccaggtcagggcaaaattcaagatggtgggagtgggagaaacattcctcaccatggccttgggcagaatctgcttatctcc

SEQ ID NO: 381128 - DNA, 201 bp, Homo sapiens
agagtgggaagcattagagaccaatcatgggagagatgaggctgctggcagtgtttggcacttgggaaaaagaacagcaccgtctaaaggagaattttatyaagtttcagtgaacaatgtgcaatttaaatctttttgtaggaaatcgtcagttaaaggtcaatttccataagtatgtggatctatgtattttggaaatgc

SEQ ID NO: 381129 - DNA, 201 bp, Homo sapiens
tgccccattgtcttctggtaggcctcgtttctgggaagacgtctattgaattcttatctttgtcactgagtatgcagtttgactttttacctctagcttcttttttttttttttttttttttttggtcactggttttcagcaatttgattattctgtggcttggtgtagtttccctcatattttttgtgttttgagatcat

SEQ ID NO: 381130 - DNA, 201 bp, Homo sapiens
gctccaattggtacttattctaacaacgctctcttctctaggttctaattacatgtcaggcattgttctgagctctttacaaatatcttatttaatcctcmtaacaacctcataagataggcactatttttatccccattttattttcatatgaccctcttaacatttgaggcagctatcctaaaatgaagaaaggtgtag

SEQ ID NO: 381131 - DNA, 201 bp, Homo sapiens
gcctggtattgataagagcccaccgtgctagtttttaccaatggtccctaagcgattttccctgcagcagtcagggtttacaggtaaaactgggcccaggscaataaaggggtacagtctaaggactctgggagtttcctgatgaatactagaggtctttggaggcagacaactttttctttgcagcgggacttcacatta

SEQ ID NO: 381132 - DNA, 201 bp, Homo sapiens
ttagatggtaggtccagaaacttggactctacatccagcatctagtgatgtgattgattgatatctgttttagcttttcggcacctcaggttttgggctgtttttttttttttttttttttaatctgttaattgaagtgattggtctagatttgtggtctttgaatgtgtgtcagccatggaaaccttcctacaaacagaa

SEQ ID NO: 381133 - DNA, 201 bp, Homo sapiens
tgttgttaacatattaatatctatccaaactcttccctctgcatgtttaaattttaagaaataagagatttttaaatttaaaatcactgcttaaattatcwctctctttctctctctgtctctctctctagtttatcattaccagttcaagatccagttcatcaaccaaactgagacgccaatacaaacaacttttaccat

SEQ ID NO: 381134 - DNA, 201 bp, Homo sapiens
tcattagaatcatctagggaacttataacagaaaggcccaccccagaccagttcagatctaaagacagcctggactgacaaccacagaactacagagctgmcacccagactccatggaactctgctaggctggtaatatttttaattcattaagggtttatgtgtttaacaacccaggtccagtaaattggctcctttcct

SEQ ID NO: 381135 - DNA, 201 bp, Homo sapiens
cctgaaaggacctctcagcaagagtgacacattgccaagtaatgcacattgttccacatggagttggtgaggataacagcacttccttccagaaatacttyagtatacaaagtgctgtcacgtgatgacgtctcatttcagcatctcaacaaccgcacctggaaggccttattattttgtatatttacggatgaagagact

SEQ ID NO: 381136 - DNA, 201 bp, Homo sapiens
acccactcatccctgaccgtaggctcttgttcacagcggccaaaacgtgcatgtctctcaggggcttcctgcttgtggagcagaacctttgcttgcgggcyccttgtgtctgtgagctcctcagaaccgctcttgagctcacagtgcctgatttgcacgtattggtttccgctccgttgcttattctggtcccctcataga

SEQ ID NO: 381137 - DNA, 201 bp, Homo sapiens
gtagaccaatgaagcatgaatccaactcacagagggtggttagaactaaaagctgaaatggacttccgtgatcacctgacccactcatccctgaccgtagrctcttgttcacagcggccaaaacgtgcatgtctctcaggggcttcctgcttgtggagcagaacctttgcttgcgggctccttgtgtctgtgagctcctca

SEQ ID NO: 381138 - DNA, 201 bp, Homo sapiens
caaataaaatcatttaaaatgtctgatattaaacacttctgacccgaaaagcaaaaagccttttaacagatagttacattgatacaagagtccacaatgayaggtttcaaagatgaaagtaatggatcagtaaatagaacagtagagaaaacacagatgaaaggcaaataaccccacctgaaaaatccaaagctttcattt

SEQ ID NO: 381139 - DNA, 201 bp, Homo sapiens
taactttcaagtttgaggtcaatacaaataaaatcatttaaaatgtctgatattaaacacttctgacccgaaaagcaaaaagccttttaacagatagttayattgatacaagagtccacaatgacaggtttcaaagatgaaagtaatggatcagtaaatagaacagtagagaaaacacagatgaaaggcaaataaccccac

SEQ ID NO: 381140 - DNA, 201 bp, Homo sapiens
tgtatatatatatgtatatgtgtgtgtgtgtgtgtatatatatatacatatatatatacatatatatgtatatgtgtatatatatatatatgtatatgtayatatatatatgtatatgtatatatatatatagtgaacagacagagtccttggtctcatgaagtttacattatcacatgtttaaatatgcatactactttg

SEQ ID NO: 381141 - DNA, 201 bp, Homo sapiens
gcgcccaacagatggtggtgatgacgatgttggaatcaggtgactctagcctcttcactgtcacgcttgctctcgtctgaacgtgcttccatgtctccatrttgctcttgtgtccacaagcaaaagcaataatccattgccatttaaccagcacaaaactgaatgaggctgtcaccttccttttctgaaacacatgcttca

SEQ ID NO: 381142 - DNA, 201 bp, Homo sapiens
cttccctcatgaaaaccgtggagccagaagcagtagtgttacagtgatgtcatcccctgaggctcagtttcctcgtaggtaaggtgggaatggaaatgackgctgcataggctgtgagatgattttgtgagatgtaagcgcccaacagatggtggtgatgacgatgttggaatcaggtgactctagcctcttcactgtcac

SEQ ID NO: 381143 - DNA, 201 bp, Homo sapiens
cagtcaggtctggcagccctgggagccattctgtctctctaaggcagaggctttacccattttttgacaacacatcttatccccaatatctatttatttgyttataaataatatagcactagtatattccgtagtaccacctgcaaattatatagtacttatatgctataaacattatacgtgcacaaacatgaactgtct

SEQ ID NO: 381144 - DNA, 201 bp, Homo sapiens
tagatggtaggtccagaaacttggactctacatccagcatctagtgatgtgattgattgatatctgttttagcttttcggcacctcaggttttgggctgtttttttttttttttttttttaatctgttaattgaagtgattggtctagatttgtggtctttgaatgtgtgtcagccatggaaaccttcctacaaacagaat

SEQ ID NO: 381145 - DNA, 201 bp, Homo sapiens
aggtattcacccgctccactcccatctccttgacctctttcttgccctgtttctcggcgacctaggcattgggtcctggtcagttttccacttttccatcwctcccttaggacccctcaacctctctgctcatcaaaaaagtccaataaaggcattcatctctttgaatacttaattttacagtacctcttgcataacttt

SEQ ID NO: 381146 - DNA, 201 bp, Homo sapiens
agatggtaggtccagaaacttggactctacatccagcatctagtgatgtgattgattgatatctgttttagcttttcggcacctcaggttttgggctgtttttttttttttttttttttaatctgttaattgaagtgattggtctagatttgtggtctttgaatgtgtgtcagccatggaaaccttcctacaaacagaatc

SEQ ID NO: 381147 - DNA, 201 bp, Homo sapiens
gatggtaggtccagaaacttggactctacatccagcatctagtgatgtgattgattgatatctgttttagcttttcggcacctcaggttttgggctgtttttttttttttttttttttaatctgttaattgaagtgattggtctagatttgtggtctttgaatgtgtgtcagccatggaaaccttcctacaaacagaatct

SEQ ID NO: 381148 - DNA, 201 bp, Homo sapiens
ctcccaggaagcagttgcaggcggtcatgctacagtgagttgctgatagtaggaggggaagaaagaggaagggggagtggaagatgactcagtggggggtgagccagtgcctggaagagaggaatgtgtgagcagaatgaggaagttagcaaaagctggttgaaggtaggaggtggaaagacaagttcagccctcaacaag

SEQ ID NO: 381149 - DNA, 201 bp, Homo sapiens
tcccaggaagcagttgcaggcggtcatgctacagtgagttgctgatagtaggaggggaagaaagaggaagggggagtggaagatgactcagtggggggtgagccagtgcctggaagagaggaatgtgtgagcagaatgaggaagttagcaaaagctggttgaaggtaggaggtggaaagacaagttcagccctcaacaagt

SEQ ID NO: 381150 - DNA, 201 bp, Homo sapiens
ccaggaagcagttgcaggcggtcatgctacagtgagttgctgatagtaggaggggaagaaagaggaagggggagtggaagatgactcagtggggggtgagccagtgcctggaagagaggaatgtgtgagcagaatgaggaagttagcaaaagctggttgaaggtaggaggtggaaagacaagttcagccctcaacaagtta

SEQ ID NO: 381151 - DNA, 201 bp, Homo sapiens
ccagggcaataaaggggtacagtctaaggactctgggagtttcctgatgaatactagaggtctttggaggcagacaactttttctttgcagcgggacttcmcattataagccatgatgaggctgcaattgcgatttatcagtgctgccttccttccccaggcaacgtactaggaagaatcatggtttactgaaggcaggct

SEQ ID NO: 381152 - DNA, 201 bp, Homo sapiens
caggaagcagttgcaggcggtcatgctacagtgagttgctgatagtaggaggggaagaaagaggaagggggagtggaagatgactcagtggggggtgagccagtgcctggaagagaggaatgtgtgagcagaatgaggaagttagcaaaagctggttgaaggtaggaggtggaaagacaagttcagccctcaacaagttaa

SEQ ID NO: 381153 - DNA, 201 bp, Homo sapiens
aggcagacaactttttctttgcagcgggacttcacattataagccatgatgaggctgcaattgcgatttatcagtgctgccttccttccccaggcaacgtrctaggaagaatcatggtttactgaaggcaggctaccctccccatcaaagcctagtggactgggcaagcaatcggttgggattcattacttggaggcatgt

SEQ ID NO: 381154 - DNA, 201 bp, Homo sapiens
tcaacaagttaagcaggttatataagaagtccaggcatggatgacgatgatcataatcatgatggggaggatgacaaagatgactaggaacgctctgtcatctctctctctctctctctctctctctttccttcctggttgtgtgagtttgcagggagacgggaggttgtgaagaacaataaccagaagagagtttgcgtc

SEQ ID NO: 381155 - DNA, 201 bp, Homo sapiens
caacaagttaagcaggttatataagaagtccaggcatggatgacgatgatcataatcatgatggggaggatgacaaagatgactaggaacgctctgtcatctctctctctctctctctctctctctttccttcctggttgtgtgagtttgcagggagacgggaggttgtgaagaacaataaccagaagagagtttgcgtct

SEQ ID NO: 381156 - DNA, 201 bp, Homo sapiens
tatgaggagttctacccggttttgtcagtctttttaattttagccattctaaagggagagaagtgatattccgttgtgttttaaatttgcatttctcccaygactaatgatgttaagcacattttcttgtacacatgtgccctttgtgtatcttcttttaaggatatctgttcagttctctcaccctaccttgaacctaca

SEQ ID NO: 381157 - DNA, 201 bp, Homo sapiens
ttgcaccattgcactccaccctgggcaacagagtgacatttggtctcaaaaaaaaaaaaaaaaaaaaaaagaaatcttagcaggattacatctgtaacccyggcactttgggaggccgagggaggtgaatcacatgaggccaggtgttcaagaccagcctgaccaacatggtgaaaccctgtctctaccaaaacatacaaa

SEQ ID NO: 381158 - DNA, 201 bp, Homo sapiens
ggaaaaagtacattaggtcaaccccaaaatctgccatcgataacatcagagtatgtccatggctttattagttttctagtgaatatttaagagaaaaaggwgctaggtcatagaacattgagaaggctatacatctccccttggctataggtgcaatacattccaagagggagagatggtagtcatgcctcctattttttt

SEQ ID NO: 381159 - DNA, 201 bp, Homo sapiens
cttagtttcagtcagttgtcacatcctgctcttgtcaaggggtctgccttgacaagcccacccttgcctgttctgtgtgctactgctaacctcctgtgggmtgagaaccaaggtgatcctctgagttgaggctgctttgggttaaggggtgataacgtccttcttgccctgtgttccagccatcacccagaccataaaatg

SEQ ID NO: 381160 - DNA, 201 bp, Homo sapiens
acaatagtcaccctcaaatcttcgatgagctgtcataggggagaacaaaggagggctgccccaggactttccttcttacagaactgaaatcaccccagtgwagaactccaggaagtcttacactgatggctttcactgacttgggttttgtttttctctgaagttacaaaaatatttgcgaacataagaatctaacttaaa

SEQ ID NO: 381161 - DNA, 201 bp, Homo sapiens
agagccccactttctttaacaattgctcgtggatatgagctcttaaagagtctttcctccatctagacttgactgatgctttatcttctctcgacctcttccctaaagcccctacgcagggcattcctccgctgcaacacagcaaccacttttaatagttgcttttcaagcttgcatcccccaccccaccatggggctggg

SEQ ID NO: 381162 - DNA, 201 bp, Homo sapiens
attctctggcccaaaatgtcaactgtgcatggctgagaaacgtcatagcaagcccttcctccagcattatccaggagctggagaaggaagaagggtgagcrgggagaaaggaaactagtgcgaccctccctctgtcccctcctcaggtggacggcgtgctagaaaactggatctggcagatggtggccgcgctgaagtctc

SEQ ID NO: 381163 - DNA, 201 bp, Homo sapiens
tccccacgcattagctcattgattatctcgattccatgagtaagcagcgtgagaaaatataattatctccatgtttcagatagaatgtggctcaaagaggycacacagcccattggggcccacaagggattgcagtccgtgcaggaagaagcctccttcctgaatctgcatgttacacacagggggacataggaagccaga

SEQ ID NO: 381164 - DNA, 201 bp, Homo sapiens
caaaaacacacagctggtgagattgttccccagtccaagtctgaggcccactgataccacaggtataaaacccgggaggcacaggcaaggcctttctcggwgtggaagccccagagtgccccagcctctcctcctgctgatcccttcccatagctctaggcttcaacgacacaaggtttttctctacttcacaaacacacc

SEQ ID NO: 381165 - DNA, 201 bp, Homo sapiens
tgacctgccactccttgacatggacggctctattctaacagtgccactctctcatgtcactgtccctctgcctggttcctcctcctctcttatctgcctgsagagtcccactccttggatgagtctcacccagagcatccctcccccatctcctcaggctgggtgtagggtgaccagctgtcctagtatgactgggcctaa

SEQ ID NO: 381166 - DNA, 201 bp, Homo sapiens
tcactggataactgcagattcaccttcactacctcctgggtggatgagcttgggtgagttagtggatgtcttggaagctcagttttctcgtcgaaaacagyggcctcaaggagctgcagtgaagatgcaggcagtggaggagcggagggcacgcagcatacacagcctcctagtaggtgcccaaggaatgcagccgctagc

SEQ ID NO: 381167 - DNA, 201 bp, Homo sapiens
gggaagcatcaagagaaggaagaaggggaaacaagagcagtaggcatgaaccaggctgagcttctcccatttgccaacggccccactgcccgaccaccatrcactgctgatgtgaactcacaaggatccctttgttattaaggaagaccaaagaattgcattagggcatcattatctcacccaccagctaccaaaaccaac

SEQ ID NO: 381168 - DNA, 201 bp, Homo sapiens
caaacaggtgtttagtcttctctggagtcatattaagcaatttttacatttatggaaaagcaaacactccccccacatagggtgtggcccacactgggatkgaaaatcagcctcgtgctctgcaccgtgttctggtggcttctgcagctgtcacaggaaggaatccacacccgtccccaaggacgcctgcacgggaacaga

SEQ ID NO: 381169 - DNA, 201 bp, Homo sapiens
gtgattctcctgcctcagcctcctaagtaggtgggattaccagcgtgcaccaccacgcccagctaatttttgtatttttagtagagacggggtttcgccaygttggccaggctggtctcgaactcctgacctcaagtgatccacccgcctctgcctcccaaagtgctggaattacaggtgtgagctactgtgcccagccca

SEQ ID NO: 381170 - DNA, 201 bp, Homo sapiens
ggaagtggagaacagctcatggtgagaggaaaggctggggccgacttgggatgtggatgtgcaaaaggaaaggtgaaggctggatgggaggcagggtgggyacagttaaggtgggccctgggccaggatggcctcccaaccagagagtagccttcaacatctcagcctcgtactgcgtgccagacactctaccaagccctc

SEQ ID NO: 381171 - DNA, 201 bp, Homo sapiens
ggaagctaagagcacagatgctgctatttgaccttaagcaagtcactttcatctatctgagctccagttttcttatttataaaatgggggtgatactaacwatgcctacatcatagcgttgtgatgagtaaatgagatgatgcaatgcattcaacaatgcaaaaatgtattatcatttaacgatgccatgtatttaacaac

SEQ ID NO: 381172 - DNA, 201 bp, Homo sapiens
aatcaatttagtttattttgccaaggttaaagacattatcgtgacacagcctcaggaggtcctggtgacctgtatccaaggtggtcaggctacagcttggytttatacattataggaagatataagacatcaatcagtacttgtaagatgtacactggtttggtccagaaaggcaggagaactcaaagtggtttggggttg

SEQ ID NO: 381173 - DNA, 201 bp, Homo sapiens
agtgtctggattaagataaggggttgtggagaccaaggttcttattatgcagaagaagcctccaggtagcaggcttcagagacaattgattgtaaatgttwcttatcagacttaaaaaggtgccagacttagttcattctctcccagatcagtgaaaagacctggatagggaagggaattctctacagaatgtagattttc

SEQ ID NO: 381174 - DNA, 201 bp, Homo sapiens
gcattagagaccaatcatgggagagatgaggctgctggcagtgtttggcacttgggaaaaagaacagcaccgtctaaaggagaattttattaagtttcagkgaacaatgtgcaatttaaatctttttgtaggaaatcgtcagttaaaggtcaatttccataagtatgtggatctatgtattttggaaatgcattgaaatgt

SEQ ID NO: 381175 - DNA, 201 bp, Homo sapiens
caatgtgcaatttaaatctttttgtaggaaatcgtcagttaaaggtcaatttccataagtatgtggatctatgtattttggaaatgcattgaaatgttacrtgggtctgggaccacacaagctacccactggtggtctgctatacctaggtactaggaaggtcaaggtactgagtaggtcacagtcttgccaccgggatgc

SEQ ID NO: 381176 - DNA, 201 bp, Homo sapiens
tgccaccgggatgctttgctaactttattgagtgaaagtagtaagaaatgcctggtattgataagagcccaccgtgctagtttttaccaatggtccctaakcgattttccctgcagcagtcagggtttacaggtaaaactgggcccagggcaataaaggggtacagtctaaggactctgggagtttcctgatgaatactag

SEQ ID NO: 381177 - DNA, 201 bp, Homo sapiens
ttttttaaagaaaaacacttacaaaaatccaaataagagtaaataattaggactgggtgtggcggctcacacctgtaatcctaacactttgggaggccaakgcaggaggattgtgtgagcccaggattttgagaccagcctgagcaacatacagacctcatctctacaaaagaggaggaggaagaagaagaaggaggagga

SEQ ID NO: 381178 - DNA, 201 bp, Homo sapiens
ctccctctcgggcctccacgtctctcttggtgggcccaagcagccatggtggatgtgtagttacaggctgtaaggaagaggaagggccacgtgagtcctcrcaatagcctcagcaaaaggcctagaagcagaaggagtgagccccagagctcttggccaggacaagaggaggccatggctctggagacaggtctcaggccg

SEQ ID NO: 381179 - DNA, 201 bp, Homo sapiens
tggagacaggtctcaggccgagccagcccgcccctagtcagctgccctgctgctcgactgcgtgccctgtgaagaagcagggcactgtcaccttctcctgrccccaaggtatgagtgtgtgcgttcaggcataagtgacatctcgcctgccggtgtcagaagccagaaagtgccaggcaggcaggtgtgaaatatgaatgg

SEQ ID NO: 381180 - DNA, 201 bp, Homo sapiens
agtgtgtgcgttcaggcataagtgacatctcgcctgccggtgtcagaagccagaaagtgccaggcaggcaggtgtgaaatatgaatgggcagccttcatgrccggcgagcagccccgcagggccctcatggccttgctggagccctgccttggagcagcaggcaggagagtctgaagggcagtgggacacaggtgaggagg

SEQ ID NO: 381181 - DNA, 201 bp, Homo sapiens; identical to SEQ ID NO: 82926

SEQ ID NO: 381182 - DNA, 201 bp, Homo sapiens
aaacaggctagatggggactgctgccccagggcttggctggtggtcggcgacctagagcacgcagtaggcactccatcagcgtgtgttctctggcatgcckcctgtttcctggaggccagaggtcgggtcgcagcacagggtgctctggtgaggcccgggcaccaggcctgccagtggggccacagtgatgacatcctgga

SEQ ID NO: 381183 - DNA, 201 bp, Homo sapiens; identical to SEQ ID NO: 82927

SEQ ID NO: 381184 - DNA, 201 bp, Homo sapiens
ggatcacctgaagtcaggagttcaagaccagcttggccaacatggcaaaaccccatctctactaaaaatacaaaaattagctgggtatcatggagccttakcctcggaaggctgaagcaggagaattgcttgagcccaggaggcaaaggttgcagtgaccaagatcacgccactgcattccagcctgggcgacaaagcaag

SEQ ID NO: 381185 - DNA, 201 bp, Homo sapiens
ggaccacagccatgcccccacccacccttccaccagtcagagcagtaggctcccagagttggtcactgaccaataccaacagacgcctccctacctgtggkgggtgcaaggatgggggtcaccccctttgccagagggacttagctcggcagcctaagaggattgcgtggaagcttcgggccgccaagaagccggagcttt

SEQ ID NO: 381186 - DNA, 201 bp, Homo sapiens
gcagaggcacagaggtggggctcaagcagccttgtccccaccctgccacttcctgccttgcagggacacacaggcctgcccccgacatgccctcctgcctyggggtctctgcccatctggcttcccagcaggggctggcagtgccattaggacgctggcggagctgccctcagctcctcaggccgcagcccagctctgcac

SEQ ID NO: 381187 - DNA, 201 bp, Homo sapiens
aggtcaaggcctttcctcccgcgcgggctgcggggacgtgggcggctgggacttggggaggagggggtacggacccaggctccagaagcgccagccgccgmgccccctcaccgcggcccccgccaggagagcctcccacgcctcggctccgcactgccggttggtcccccactcccctgagggcggaatcacttcccagtc

SEQ ID NO: 381188 - DNA, 201 bp, Homo sapiens; identical to SEQ ID NO: 82928

SEQ ID NO: 381189 - DNA, 201 bp, Homo sapiens; identical to SEQ ID NO: 82929

SEQ ID NO: 381190 - DNA, 201 bp, Homo sapiens; identical to SEQ ID NO: 82932

SEQ ID NO: 381191 - DNA, 201 bp, Homo sapiens; identical to SEQ ID NO: 82930

SEQ ID NO: 381192 - DNA, 201 bp, Homo sapiens
ccctgacaaggagtggcgggtgtgctgtggtctctgcgggcatagctgcccctcccagtggggtctcacaccacgtcccaagggcggggtgctttgcacargtgcaggaggctcagtgaggaaagtcccattaagtaaggcattctgaaagaaaaaatgggactttgtcatcaccataaagagtaaccgtttattaatcat

SEQ ID NO: 381193 - DNA, 201 bp, Homo sapiens
tgcaatggagaagcatgccatttatgtattgttttttttgtccagatgcttcaagggtcaactttttagtcctctgttcattccccacattcatttgctcrgcacttggtcagccatttcagtctccgtgaatgatgtactccaattctggttatttctgtcatcatctcctctattttctctctcccctctttctggaag

SEQ ID NO: 381194 - DNA, 201 bp, Homo sapiens
tcagaaaccaaagagtaaattgctcacggcttctctaagtggctcacacacaaaaaacccgagtcatttcaatggctggacccagaaaatcgagccctctyctctcctccctgtctctggcccccaactctgcctcagttgccctggggtctcactgtcccctcaagacactgcccctgcaggcgcaggcagagaggcctt

SEQ ID NO: 381195 - DNA, 201 bp, Homo sapiens
ttctatagaccattcaggaggctgttgctgcatgtacccaagcacccaaaagcccagactcctcaaactttgtgacccagggctcccattcctttcttttsccctccccagctaatgacaatgacagaggcactcatttcttaggcatgtgccattgcacccacccccaccacacacagcacacggtggcggctctccctt

SEQ ID NO: 381196 - DNA, 201 bp, Homo sapiens
cagggtgaagagccttggcctcctttctctggagtttgtccatgagagtgggaggaccaggtggggccgatggggccccaggtgctacaccaggaaggccmggctccccctgcccagggagcatgtgtggagcaagaatggaaaacgcagatgcctctggcggaggtgggctgccagcctggaaattgctagctcagcagc

SEQ ID NO: 381197 - DNA, 201 bp, Homo sapiens
acatgccctcctgcctcggggtctctgcccatctggcttcccagcaggggctggcagtgccattaggacgctggcggagctgccctcagctcctcaggccrcagcccagctctgcacccgcagcgttttcaaccatctgccgcgggccggtgggggctgggtagggctgtgagggaccagacagaccctgtccaggaggcc

SEQ ID NO: 381198 - DNA, 201 bp, Homo sapiens; identical to SEQ ID NO: 83024

SEQ ID NO: 381199 - DNA, 201 bp, Homo sapiens
ccctctccagacctgggtatgtttggaagcagattgagttaatgaaaaaaaaaaaatctgactactcttctacagacgtcaccaagaagggacagccttarcccagcattttctgtgttgcatttgtagaggggctccccagcctgctgccgccagctcagaacttgatgatctgggtttttctgcaggcagaggggaggg

SEQ ID NO: 381200 - DNA, 201 bp, Homo sapiens
acccagggtggtctccagggctcttttgcagtaggagtggcaacagagttggggaggctgacaagtgggaggcctgcctaggctctccccgaccgctgccytcccccacaccccatgtctcaggtgccctcctgtgagtcgagccgtcttttccagcaggagcccgtcagctgatagcacccctgcctgcccttcctgctg

SEQ ID NO: 381201 - DNA, 201 bp, Homo sapiens
gggagcgggtcgtctcctctgggctgtctcccaatcccctgccctcctggacctgcaggtgccccctctcagaaggaatgacaccatggacagccagcccrgccttgtggccctggagagctgcgcctgagggctgcttcctgccacaggaaagaggaggcagccacccgccccaagtggggcgctcagcggcttccaccc

SEQ ID NO: 381202 - DNA, 201 bp, Homo sapiens
actgcctcagggtgtcctgagggatgggactggcttcagggctctggcgggaatgtcttctcattggggcatgactttatccagggagaggagctggcggyaccatggagagcccagtcctctgccttccctcccctcaggccaagctggagcctctgagctgttcccactagggagacaccggccagcatggtgtccctg

SEQ ID NO: 381203 - DNA, 201 bp, Homo sapiens
gggagggaggcctggtgtggcggagcagagcagggaccagctccaccaggcccatgggtggaaccacacaggctgtgggcagcggggggctgcagccacgscaaggaccccagacccagggtggtctccagggctcttttgcagtaggagtggcaacagagttggggaggctgacaagtgggaggcctgcctaggctctcc

SEQ ID NO: 381204 - DNA, 201 bp, Homo sapiens
gagggtgagaggctggagaactcccagggttgaccaggggctgacaaagcacgcacgctctcccacacacgcacgctcacgctcatatacacacatccccrgcagtagctcatgctttggcgccagtggtgactcagaaacattctggaacaagaattccttttttccttacaagtggttggcacttggggatgtttcttc

SEQ ID NO: 381205 - DNA, 201 bp, Homo sapiens
catggaacccacccccgcacccccatcagcttcgggcatgggaggggaggggcctgaggacagggctcaccctggacaaatgcagtgcaagcaggactggygcggccggccccgtctaatggcccctttgcagcctacaccctgtcccatgcagcggggaggcttttgtgatcttcattacattatttcttataaatcatt

SEQ ID NO: 381206 - DNA, 201 bp, Homo sapiens
tgccatgtctcagcccttccctccagggccagcaccttcccagaggtggagttactgcaccagcccctcaccaggctccaatctcctgtgcccctccttcrcccgccccagacttcccacatgccctgaaccaggtttgaagtctcatttctggctggagtcctgagcttccggaaggcagagtcagcaataagaagatgc

SEQ ID NO: 381207 - DNA, 201 bp, Homo sapiens
cctgctcctgacaggcccagtgggatgttttgctgacatcctggaaccgtcccctgggttggagctcctggcttccaagtttgtttgtttgtttgtttgtkctgttttttcttttccttttttgctaaatgagatgcctactccaggatcttcctaaaataagattcacagaaggtaaatttcctaagtctttgtatgtct

SEQ ID NO: 381208 - DNA, 201 bp, Homo sapiens
aggactcttcctctgagccacggaaaaccattcattttctttcagtaactgagtcagaagtaatgcaacagtatttcttaaaaaaaaaaaaaaaaaaaaaaggttctgtcattctgactctaaatgacagcgtcctcacccacatttagggagcttcccctctgttggcactggtataaaaattgccattgtttcagggtc

SEQ ID NO: 381209 - DNA, 201 bp, Homo sapiens
ctgtgcccctccttcgcccgccccagacttcccacatgccctgaaccaggtttgaagtctcatttctggctggagtcctgagcttccggaaggcagagtcrgcaataagaagatgcaggcatgagtttgggtcagatcagcactcgaaggcagaggagacaaaatgaagccgcctgcagccatgggcatgacccactggag

SEQ ID NO: 381210 - DNA, 201 bp, Homo sapiens
aaggactcttcctctgagccacggaaaaccattcattttctttcagtaactgagtcagaagtaatgcaacagtatttcttaaaaaaaaaaaaaaaaaaaaaaggttctgtcattctgactctaaatgacagcgtcctcacccacatttagggagcttcccctctgttggcactggtataaaaattgccattgtttcagggt

SEQ ID NO: 381211 - DNA, 201 bp, Homo sapiens
acacaggtgacccccactacagatagggcgcctcggggatggccacacatcacagctgctgctcactgactggatggtggtagtgagcagccagtggtgcrgacagggtctccccgtcaccctcaagtgaccagtgtgtgccccattcaggggtgaacgctgggagccctgagtctgtcccagtacatggcacgtataggt

SEQ ID NO: 381212 - DNA, 201 bp, Homo sapiens
caaggactcttcctctgagccacggaaaaccattcattttctttcagtaactgagtcagaagtaatgcaacagtatttcttaaaaaaaaaaaaaaaaaaaaaaggttctgtcattctgactctaaatgacagcgtcctcacccacatttagggagcttcccctctgttggcactggtataaaaattgccattgtttcaggg

SEQ ID NO: 381213 - DNA, 201 bp, Homo sapiens
tagtgagagagtcccacacatgcactcccacatgtgaacacaccacgtacacatcagtaaacatgcagacacacatgcacgccagccttggctgcacagcyccagctcagcctgacccatgtgtgctgcccatggcattctttgacctcaaggtccccagtttagcaggcggccagtgagtcatggggcctgagaccaggt

SEQ ID NO: 381214 - DNA, 201 bp, Homo sapiens
tccacttcctgggttcaagtgattcttacgcctcagcctctttataggtgcgtgccaccatgcatgctaaattttttttttttttttttttttttttttgkatttttagtagagacggtgtttcgccatgttggcaaggctggtcttgaactcctgacctcaagtcatccacctgcctcagcctcccaaagtgctgggatt

SEQ ID NO: 381215 - DNA, 201 bp, Homo sapiens
acatgccctcctggccctgcctttactgtcctctgtgatgctgcaaagcacctcttggctgcatgtttggtctgcatcttggggcatcctttcagagaacrtcgagagtggaggtgtcctggctgtgtgcctcgcccttgggcatcaggggtggggcaggcccaggccccagaaaagcctggcatttcctcctgggaatgg

SEQ ID NO: 381216 - DNA, 201 bp, Homo sapiens; identical to SEQ ID NO: 82948

SEQ ID NO: 381217 - DNA, 201 bp, Homo sapiens
tctttgtcttattcatgatcttagagggaatgcatctgactcttccccatggggaccatgcttgctctaggttttggggatactttatcaaattaaggaastttttttttaatttgagacagtttcactcttttgcccaggctggagtgctatgacacgatctccgctcactgcaacctccacttcctgggttcaagtgat

SEQ ID NO: 381218 - DNA, 201 bp, Homo sapiens; identical to SEQ ID NO: 82950

SEQ ID NO: 381219 - DNA, 201 bp, Homo sapiens
ctcaggtgccctcctgtgagtcgagccgtcttttccagcaggagcccgtcagctgatagcacccctgcctgcccttcctgctgcccttgttcctctgcccrcccccatggccttgtgagtcaccgcccctcccctccgccccattccccccgtgccatttgccctggcctgctgcacactgaatgccctgaatctggagcc

SEQ ID NO: 381220 - DNA, 201 bp, Homo sapiens; identical to SEQ ID NO: 82951

SEQ ID NO: 381221 - DNA, 201 bp, Homo sapiens
cctgtgccatcagccggcaacatctcacggtgttcacagtagcccttcaggacagagggacccagggctcagagggcactggatctgcgcatggtcactcrgttgctggttcctcactgggcacatccagacccctctgccttcagactcctgcatttctgccttgccacacaggaaaaccaagagggggaggtggtttgg

SEQ ID NO: 381222 - DNA, 201 bp, Homo sapiens
ccttggcctctggtcctctcattccgagagccgaggagtaccccacacagtcatgcaggagggagagggagtgaggggtgggttaggcctgggccagccccactggtgggcccagggtggccgcgcccagggacgtgctgctttccctcctgagaagctgttgggacttggctcttgaggacactcgttgtgggaaagcct

SEQ ID NO: 381223 - DNA, 201 bp, Homo sapiens
ctcacgctcatatacacacatccccggcagtagctcatgctttggcgccagtggtgactcagaaacattctggaacaagaattccttttttccttacaagyggttggcacttggggatgtttcttcgtatttgaaattccttcccactggtccctttaagagctgagcaattttccattctgagctgggctgctcttccat

SEQ ID NO: 381224 - DNA, 201 bp, Homo sapiens; identical to SEQ ID NO: 82959

SEQ ID NO: 381225 - DNA, 201 bp, Homo sapiens; identical to SEQ ID NO: 82960

SEQ ID NO: 381226 - DNA, 201 bp, Homo sapiens
ttgcaatggagaagcatgccatttatgtattgttttttttgtccagatgcttcaagggtcaactttttagtcctctgttcattccccacattcatttgctyggcacttggtcagccatttcagtctccgtgaatgatgtactccaattctggttatttctgtcatcatctcctctattttctctctcccctctttctggaa

SEQ ID NO: 381227 - DNA, 201 bp, Homo sapiens
tagaccctgctggatagtgataggcacaaagcccctgctttgtggggtcccaggtgtcagtgcagggaagactgctctggggcacagacccttcagcaggrggtgcgaggcagggattagatgagcctgggctcctgagggcaggggctggggaccaccgtgagtgtgcagaccattcctcaaacctctgagccgtgagcc

SEQ ID NO: 381228 - DNA, 201 bp, Homo sapiens
agcaggaggtgcgaggcagggattagatgagcctgggctcctgagggcaggggctggggaccaccgtgagtgtgcagaccattcctcaaacctctgagccrtgagccgcccccttggcacctccagagagcacatgtcagagagctgcctagatctggggtgggccatttggggagtcctctgcacctcgccacaccccgc

SEQ ID NO: 381229 - DNA, 201 bp, Homo sapiens
aggcagtggtcctggtcctgaggggctagaggccctcctctcaccaggcctgtaccatgcaccatctctgtccctggggagcacccacacagggagacccrgtttctaaaggctcggacacacttcaagaggacgagcatggctggcagcatcccccagcgtaggggtcggggagggggagctatattagggttctccaga

SEQ ID NO: 381230 - DNA, 201 bp, Homo sapiens
cgccttttggcagatgacagactggagagtaaacagcagatgcgtctggcaacgcatgcaatggaggaaagaggacggagcacaggaggtgggacagggcraggcgcagctggggcaccaggccagaggatggccaggacgtgcctgtggccagcagtgcctgcagtgtttggcagagggaaggggacaaggcagagggga

SEQ ID NO: 381231 - DNA, 201 bp, Homo sapiens
gctgagtgctccagggtgggtcctctcactgacccagtgagggctgccactgctgtgcgacactgctgtgagcactctgatgggacacagtgtcactgtcmctgttctctggtacatgggtgcctccatatcttcccagtggcagagggtttttggccagcatctgactacagcggctgtgtgcattgctgcagtgctggg

SEQ ID NO: 381232 - DNA, 201 bp, Homo sapiens
ctggagagtaaacagcagatgcgtctggcaacgcatgcaatggaggaaagaggacggagcacaggaggtgggacagggcaaggcgcagctggggcaccagrccagaggatggccaggacgtgcctgtggccagcagtgcctgcagtgtttggcagagggaaggggacaaggcagaggggaggggagggctctgcgtgttgg

SEQ ID NO: 381233 - DNA, 201 bp, Homo sapiens
ctggagaacaagggcctcagccagccgggctccaacccttgccacagcctccttccttcccgcccactgcagaccccagggctcccggttggaggggctcrgcccctcctcttctgcctctgttccctcctggcaggcaggaaggtgagcaggtctgagcagttggtttagctcacgcaagtccaggcagggccgcttgtc

SEQ ID NO: 381234 - DNA, 201 bp, Homo sapiens
gtggcagagggtttttggccagcatctgactacagcggctgtgtgcattgctgcagtgctgggctctcccgagaggggacccacgggcagaggtcaccagcagacggggagggccagggtttgcaccagccaacccagggacctttctggagtcctgtgcagctgtccattagcaaggcagcctccgagggatgccagggc

SEQ ID NO: 381235 - DNA, 201 bp, Homo sapiens
ggcagaggggaggggagggctctgcgtgttgggcatgggactggacgcctctggctcctaaagagtcccaccggctatggaggggcgtgccaggtagtggyttccataccgttcaggcaggtgtaggtaggaactggacggtggccaagggcaggtcaccctgcctggatcagctgtcacatctgcagaaaggggcaggaa

SEQ ID NO: 381236 - DNA, 201 bp, Homo sapiens
cagggtggaggctgttagaggacatttaggatccgcaggtgggcagagggaggatgtccagccaccagagaccacacacatcctaccccagccgtggtgtgaagatggggctgttttccttgaccatggagcaaaaaccatccaggacagctctccccctccatgccaccagttgctcctgagccagctctgtgggtgctg

SEQ ID NO: 381237 - DNA, 201 bp, Homo sapiens
cctgcagcgggaggccttggtccagaagggttatgtgggacatgggcgcaggaaggacaggtgaggctgacaggcttggtcattccagggaccatgagggytttcgctggctcaggtgcccctttcccctgccgttgcccctgttggtgcctgctagacctcctgtgcacagaaggccttggcagaggagagagccaggcc

SEQ ID NO: 381238 - DNA, 201 bp, Homo sapiens
ccagggtggaggctgttagaggacatttaggatccgcaggtgggcagagggaggatgtccagccaccagagaccacacacatcctaccccagccgtggtgtgaagatggggctgttttccttgaccatggagcaaaaaccatccaggacagctctccccctccatgccaccagttgctcctgagccagctctgtgggtgct

SEQ ID NO: 381239 - DNA, 201 bp, Homo sapiens
aaagcttcccctccagtcctctgagggccccggacttagatggctttcaaatgagtgtctgtcttcagcagctcaccctcccagctttttcagaaaccaargagtaaattgctcacggcttctctaagtggctcacacacaaaaaacccgagtcatttcaatggctggacccagaaaatcgagccctctcctctcctccct

SEQ ID NO: 381240 - DNA, 201 bp, Homo sapiens
gcccagaagcagcccttccaccgaggggcctcacaccacttctgcctgctccctcagtcattaggcccagcgctggctaggtggctccagacatgaccagsaggctctaaggctcatcagcgtcttctggagcctgcacgatacacacacaggcacaggctacaccatgggagaccccatctgcagggtgccaagcccttg

SEQ ID NO: 381241 - DNA, 201 bp, Homo sapiens
tgtcgtcctggagcagggagccaggctgtggagcgtgcagctgcgttctccctggaatcctggtccacattccctggcagagaaatcttcgcagcggcgcrgccacgtcctccagcccgaccacagttgatggagggaaagccagggaaggcactgtcctgtggagtgacaccagcgtgctagccctgctgaggagcggag

SEQ ID NO: 381242 - DNA, 201 bp, Homo sapiens
ttgccctcagagtcacccttggggccagagtccttgtggctgtaactcacagggtcattggctggggctaggagggcaagcttctctgttggtggacacaycacactgtggttttttgtgttcagaagaaacctgccacactggcctgtctccatccatttggtcacggccccacaggagtggggagcggaggtccatgcg

SEQ ID NO: 381243 - DNA, 201 bp, Homo sapiens; identical to SEQ ID NO: 82933

SEQ ID NO: 381244 - DNA, 201 bp, Homo sapiens; identical to SEQ ID NO: 82931

SEQ ID NO: 381245 - DNA, 201 bp, Homo sapiens; identical to SEQ ID NO: 82934

SEQ ID NO: 381246 - DNA, 201 bp, Homo sapiens; identical to SEQ ID NO: 82935

SEQ ID NO: 381247 - DNA, 201 bp, Homo sapiens; identical to SEQ ID NO: 82938

SEQ ID NO: 381248 - DNA, 201 bp, Homo sapiens; identical to SEQ ID NO: 82939

SEQ ID NO: 381249 - DNA, 201 bp, Homo sapiens; identical to SEQ ID NO: 82940

SEQ ID NO: 381250 - DNA, 201 bp, Homo sapiens; identical to SEQ ID NO: 82941

SEQ ID NO: 381251 - DNA, 201 bp, Homo sapiens
ctaggagggcaagcttctctgttggtggacacatcacactgtggttttttgtgttcagaagaaacctgccacactggcctgtctccatccatttggtcacrgccccacaggagtggggagcggaggtccatgcggccctatgcctcccctggacacagggtcagctaggaaggatatggatagcctcttctgagcagtcag

SEQ ID NO: 381252 - DNA, 201 bp, Homo sapiens
agctgagtcacatgccaagaagaggtatgcctgctgacctctgaaccccatgggaccctgctggtggtgagagctcagctgggggcttgttagtgtgagcrggtggacagatggcagctgaccagcatcctccctgcagcgtgcaccccccagggccttccctggagatcctcagcagtgcccacggtggcacctgcacag

SEQ ID NO: 381253 - DNA, 201 bp, Homo sapiens
gccccacaggagtggggagcggaggtccatgcggccctatgcctcccctggacacagggtcagctaggaaggatatggatagcctcttctgagcagtcagkgcctcgtgagcctgaggcaggagacagaagcctgccccggccgcctcgggcccttactccctggcccttggtcattattgtttctaaaacgtttgtctca

SEQ ID NO: 381254 - DNA, 201 bp, Homo sapiens
cccaggtacatcccatcttccagctgagtcacatgccaagaagaggtatgcctgctgacctctgaaccccatgggaccctgctggtggtgagagctcagcygggggcttgttagtgtgagcgggtggacagatggcagctgaccagcatcctccctgcagcgtgcaccccccagggccttccctggagatcctcagcagtg

SEQ ID NO: 381255 - DNA, 201 bp, Homo sapiens
cggccaggcagcagtccaagccccccacttgccaacaaccccacgtcacacgcgagggcagggggccagccagggggaggtcaccgagccagcagggcggsgggggcgggcaagggccggggaagcccaggaccacgctgcccctacgaattgctcaggttctcctcttctgtttatcctaccctcttcccctaaggactg

SEQ ID NO: 381256 - DNA, 201 bp, Homo sapiens
taccaggcaggctgtgggtgcagggtgcttggggagggccaggtgtgccttgggacgtgtgaagtgggagcctggagcagggaaactgaggcctgctctcrcccctgctgcccacagcttatctgccccctggagaccagccgtgcctgaccctggggtcgtcagctcagtcctgctgggtccttcctccaccccatctgc

SEQ ID NO: 381257 - DNA, 201 bp, Homo sapiens
ctctaagaatgactgcagcctcccccggggctgagcccacacacacacaccgggcatatccacagccgccaccacgttttacccacctgtccagtgtcctsacgcctccagcccagcgtcatagcgagcctggcaaggacatgcttcatgctgggctcctgccgcgcaggggagggtgggaggtggagtcttccttgggtc

SEQ ID NO: 381258 - DNA, 201 bp, Homo sapiens
gcattagaggcgaagcccaaactcctgtagtggggactttgactcagagcagccctggtagcccccctcatgctgcgtcacagccctcacctcctctcccygtctccttgcaggaagttctactacatcaccctgctacgagaccccgtgtcccgctacctgagcgagtggcggcatgtgcagaggggtgccacgtggaag

SEQ ID NO: 381259 - DNA, 201 bp, Homo sapiens
tgggacctctgtgctcttagtgcatgtttccccatggcagagagatagcatcttaccatgtgtttatcggtcagtgaggtctcttccaccgacctgttcaygtctttggcctgttttcccctacagggttgtttgtgcttcgcgtattggttcgtaagcgttctttatgtgtcctggtgccaggttccatgggtagcatgc

SEQ ID NO: 381260 - DNA, 201 bp, Homo sapiens
atccttcaccctccacagcaaactaggacagaaggttctatgggtaacccagcaacaaggagggcaggtgaggctggccaagacccacctcggggctgggraaccccgggaccataccaggggtgtcagcagagcaaaagagaggccccaggcttgcagtcagaccagctgggccaaatcctggctttgcatctcacaggc

SEQ ID NO: 381261 - DNA, 201 bp, Homo sapiens; identical to SEQ ID NO: 82949

SEQ ID NO: 381262 - DNA, 201 bp, Homo sapiens
aaactctggagttaattgtttacgaagctttgaaggccacagaggtcagtggccgtgggtgaccgcccccggtggtcatgggcaggggcaggggcctgttrtctccctgtgacagggcctcctgctggggcaggcctggtccttgtccaggatcccagctgttccctaggaggggctctccactggtcagcccaggccgct

SEQ ID NO: 381263 - DNA, 201 bp, Homo sapiens
catagctatttggtgcaaaaagaaacgtggtcactgagagattccaggaagtgtcaaggccagccaggtttaccgctgccgtgctgagccctggcctaggracaggtgagccccctccccacagtgccacaggggcgggcagggcctgctccataaagccatcattgtgtcccacctctgtgcccccacccagggcccggg

SEQ ID NO: 381264 - DNA, 201 bp, Homo sapiens; identical to SEQ ID NO: 82952

SEQ ID NO: 381265 - DNA, 201 bp, Homo sapiens; identical to SEQ ID NO: 83033

SEQ ID NO: 381266 - DNA, 201 bp, Homo sapiens; identical to SEQ ID NO: 82954

SEQ ID NO: 381267 - DNA, 201 bp, Homo sapiens; identical to SEQ ID NO: 82955

SEQ ID NO: 381268 - DNA, 201 bp, Homo sapiens
agagcatgggaggggtgccggggcagctcttctgggaagccgtttgtaggggaacctggggtgctgctgggtttccagcagttaaagttggggttattttyctcctgttcctgttggtgcccattcgtcctgcagggatgccctgcggggcctttctccccaaagtctgggctgggaagggccaggagcagggcttcttgt

SEQ ID NO: 381269 - DNA, 201 bp, Homo sapiens
cttgcaggaagttctactacatcaccctgctacgagaccccgtgtcccgctacctgagcgagtggcggcatgtgcagaggggtgccacgtggaagacgtckttgcatatgtgtgatgggcgcacgcccacgcctgaggagctgccgccctgctacgagggcacggactggtcgggctgcacgctacaggagttcatggact

SEQ ID NO: 381270 - DNA, 201 bp, Homo sapiens; identical to SEQ ID NO: 82965

SEQ ID NO: 381271 - DNA, 201 bp, Homo sapiens; identical to SEQ ID NO: 82925

SEQ ID NO: 381272 - DNA, 201 bp, Homo sapiens
ttctcctctccttccttagtagtagaaccactacatatcagcggtgacacagcaagccagaatcaagactacacttcccagccccctttacaatgacatgygctgtcactacaccctgtggccaacagtttgcaagaggaaatgttccttgcagctttgggagacaatcctgaaacagaagcaacttcctccctttctcct

SEQ ID NO: 381273 - DNA, 201 bp, Homo sapiens
ggcagggaatccatagggattcagctgcctgctcaggccctgggctgtgtgttgggtgggcttctggaaagctctgctgggagtccaaggaagagaggagygccctgggcagcccctcctaccttgtggctggagccggtgggtctcatgggcccagatagatacctgtctgagcctcagtcttcccatctctaaaagggg

SEQ ID NO: 381274 - DNA, 201 bp, Homo sapiens
cttcttgtattgtttgttgctagtgaatagaaatacaactgatttcttttaatttttactttaacaacattgttaagttagtttattagctctaacaggtwtttgtgtgtggaagtggattctttagcattatctacatataagattatgtcatctgagaagagagataactttccttttttctttccaatctgaatacct

SEQ ID NO: 381275 - DNA, 201 bp, Homo sapiens
ctgaggctgcggtggagggcagggaatccatagggattcagctgcctgctcaggccctgggctgtgtgttgggtgggcttctggaaagctctgctgggagyccaaggaagagaggagtgccctgggcagcccctcctaccttgtggctggagccggtgggtctcatgggcccagatagatacctgtctgagcctcagtctt

SEQ ID NO: 381276 - DNA, 201 bp, Homo sapiens
gatgtcttcctggaatatggtttggaacttctagtggctgttagtgcttggctgccttggtagaaaggaacaagagtgagcagagcattggcgggtccctstttagtcctgtgttcaccatgggggctgcctcatctgccgacatcagccagggtgcttgtaagactccactggaaggacgtttgctggctggccttaaag

SEQ ID NO: 381277 - DNA, 201 bp, Homo sapiens
ttgaccatggagcaaaaaccatccaggacagctctccccctccatgccaccagttgctcctgagccagctctgtgggtgctgggagctgcgctaaggattkgcacctgtccccaccagcttgtggccttctgctgccgcggtgcctctgccctgaactccctctagggctcaggacctttggggcctcacacctaccccac

SEQ ID NO: 381278 - DNA, 201 bp, Homo sapiens
caccataaatgttgtctgttgtcattaaaaacttaatatttgagtggctgcagctgctccgctctgagtgtgccaccgctggttggcagtgggtgagtgcrcaggttgctcattctgtactctgtggggactgctgcaggactgctccttgtgtgtaaatgttctgcatagctctgatttcctctggagattcctaggagt

SEQ ID NO: 381279 - DNA, 201 bp, Homo sapiens
aaggctgtctgcaggtgggggcgattgccgctggcccagaccagccagatgtagaacactagggcttctgagacctgggcagacatgggcagtttcacatktaggcctgtgtcgttgcgtttactggaagacacctggcagccttcactcagagcagaaggacaggcatcatgcctgggctctgggctctgcaaaggtagt

SEQ ID NO: 381280 - DNA, 201 bp, Homo sapiens
tcaggtactcctctggtcctgcaccaccgatgccaccaccggcccagggaggatcagccctgcaggaggcagtgctgtgagcctgtgtgggtgcaggtggrtctaggccatccctctgctccagtgtccttgctctgccccagtgaatgctggagggtgaggagatgggaaacccaggagtctccccaacccctcagcttc

SEQ ID NO: 381281 - DNA, 201 bp, Homo sapiens
tggaaaaacatggcaggtacacgcccacacaggagtgttcaagtgctgatcccagaccacccaacccagggtggaggctgttagaggacatttaggatccrcaggtgggcagagggaggatgtccagccaccagagaccacacacatcctaccccagccgtggtgtgaagatggggctgttttccttgaccatggagcaaa

SEQ ID NO: 381282 - DNA, 201 bp, Homo sapiens
tcagcctggagggccaggagctagcatgtggacatctgtctgtctgtcctgaaggctgtatgccgcacccagccctctgctcccagcaacccctgcatgckcatggaaggctgtctgcaggtgggggcgattgccgctggcccagaccagccagatgtagaacactagggcttctgagacctgggcagacatgggcagttt

SEQ ID NO: 381283 - DNA, 201 bp, Homo sapiens
ggtgggcagagggaggatgtccagccaccagagaccacacacatcctaccccagccgtggtgtgaagatggggctgttttccttgaccatggagcaaaaascatccaggacagctctccccctccatgccaccagttgctcctgagccagctctgtgggtgctgggagctgcgctaaggatttgcacctgtccccaccagc

SEQ ID NO: 381284 - DNA, 201 bp, Homo sapiens; identical to SEQ ID NO: 82936

SEQ ID NO: 381285 - DNA, 201 bp, Homo sapiens
ggtggctgagtttcacccctgctgagagaggggtgcagctcccaggggcctggggtgcaccctctctgggtgcccatcaccatcccatgtggcattttgcrggactgaattccgcctctatgaggaacaggcgtgacaagccatgggggcatgtagagaggctggcagggtgactcttgtcccctgcacacttagcaggca

SEQ ID NO: 381286 - DNA, 201 bp, Homo sapiens; identical to SEQ ID NO: 82937

SEQ ID NO: 381287 - DNA, 201 bp, Homo sapiens
acacagcgtgtggtctggggctggggctggggcccagctcactgcggggggatgcctgtgggggtgacacgccgcaagttccacggggccacctcgggagstcttgggtcctctctgtgcagaccaggcgctgaggctgcggtggagggcagggaatccatagggattcagctgcctgctcaggccctgggctgtgtgttg

SEQ ID NO: 381288 - DNA, 201 bp, Homo sapiens
gaccgcatgatccctcagccacggactgtgtccatgtcttatgggagccatggccactcataaccccttagcattctgcagcctagtgcaggcccagttcytcatctggagagcgagccgtcagcagctgtccgcgtgccatggggagactgaccgcggggccagggcttcagtgagaggcagctcccgacagcctgcacc

SEQ ID NO: 381289 - DNA, 201 bp, Homo sapiens
cccacagttccactgtggcctctgtactataagaggctagaatctgacccatctgtcctggagacagggaagagacctccagagccagctaggaagtcagytcttgttctcactccatgaattagttggtttgcagggagcttccctcaaagcagctgaagtctgtgcaggttgggtcctgttatctgggacatcaccaag

SEQ ID NO: 381290 - DNA, 201 bp, Homo sapiens
ctgttatctgggacatcaccaagtgtcatcactggccttccaaggtgatgacctggagcatgctgtgttttggctgtgggggtctcctgctcaccttgggmtatggccttgggaccacccagtgccttcctgactgtgcccatttgacaaaaggctgtctctaccaggatctccagaaagctctggccctctctggccagc

SEQ ID NO: 381291 - DNA, 201 bp, Homo sapiens
cccaggctggagtgctatgacacgatctccgctcactgcaacctccacttcctgggttcaagtgattcttacgcctcagcctctttataggtgcgtgccaycatgcatgctaaattttttttttttttttttttttttttttgtatttttagtagagacggtgtttcgccatgttggcaaggctggtcttgaactcctgac

SEQ ID NO: 381292 - DNA, 201 bp, Homo sapiens
gagaggagattcacccttcctccaccttcctgttctgttgaggcgtgcggtagattggaagatctctgctcacgctggagaagtcagtcttcttttctcartccacccattcaaatgccaatcacagacatacccagaaacaaagctttaccagcaatcttggtgtcttttaacccagtgaagttgacacctaaaagtagc

SEQ ID NO: 381293 - DNA, 201 bp, Homo sapiens
cttgccaggcactgtgcctccctccctgcagggaggtgtgcggtcagatcaggcagttgccagcggacaccaagaagcgctttgtgctccccggggtcccyccatgccccccacccccacccctgcccagggcagtgtgaggggaggaggggagcagtgtgggtacacttccatgttgccatctggggaatcctggcgggg

SEQ ID NO: 381294 - DNA, 201 bp, Homo sapiens
ggctgcctgcctggccctggttctacttggcctgaagcccacccaccccagcgtggacaggagccaggaggaggagccctctaagaatgactgcagcctcycccggggctgagcccacacacacacaccgggcatatccacagccgccaccacgttttacccacctgtccagtgtcctcacgcctccagcccagcgtcata

SEQ ID NO: 381295 - DNA, 201 bp, Homo sapiens
gcagaactgcccacaaaacaaggctgtgaacttttcgggaactggaactgtttaacttgaacccaggattgtttaaagctttatttatttatagcttcttyttaaaaaaaagtgttgaagaaattttttggttattcatacaaaaaaatgagttgatgatggaaaagcaagtcataatcatctaattgtttttgtctaggt

SEQ ID NO: 381296 - DNA, 201 bp, Homo sapiens
ggccatggctctggagacaggtctcaggccgagccagcccgcccctagtcagctgccctgctgctcgactgcgtgccctgtgaagaagcagggcactgtcaccttctcctgaccccaaggtatgagtgtgtgcgttcaggcataagtgacatctcgcctgccggtgtcagaagccagaaagtgccaggcaggcaggtgtga

SEQ ID NO: 381297 - DNA, 201 bp, Homo sapiens
agtcgcacaatcacagctcactgcagccttgaactcctgatcctgagctcaagtgatcctcccacctcagcctccaggtagctgggactacctggaggtgygcatcaccgtgcctgacctggagtagggtttttaaaactaatcactgagatgcaaccttcatggtgtggcctctgtcctcatggtgggacccctggtccc

SEQ ID NO: 381298 - DNA, 201 bp, Homo sapiens
ccatgcccagtcacccacatgtcgccacctgctcacaggtggctgagtttcacccctgctgagagaggggtgcagctcccaggggcctggggtgcaccctytctgggtgcccatcaccatcccatgtggcattttgcgggactgaattccgcctctatgaggaacaggcgtgacaagccatgggggcatgtagagaggctg

SEQ ID NO: 381299 - DNA, 201 bp, Homo sapiens
ccttcatggtgtggcctctgtcctcatggtgggacccctggtccctgggagatcaaagcacaccattggaatagagcccctctcagagctttcctcaccasgccatgtccttgtccttgggggctagaatgtgacaggcatgcttgttgtttcgctgaagccggccccccaaggactcttcctctgagccacggaaaacca

SEQ ID NO: 381300 - DNA, 201 bp, Homo sapiens
cagggtctgagtttagaaacttgtgggttagacccttgtttcatggaacccacccccgcacccccatcagcttcgggcatgggaggggaggggcctgaggacagggctcaccctggacaaatgcagtgcaagcaggactggtgcggccggccccgtctaatggcccctttgcagcctacaccctgtcccatgcagcgggga

SEQ ID NO: 381301 - DNA, 201 bp, Homo sapiens
tgagaacctcgagacccaaccaagaggaacccagggtcaagaggaggaaggggtggatgccacgtgatgctggccctgcacagaggctcgcctggctgagrgcccaggccttgttcctcggatgcagtggttcctcccttccctagaccccaccagctgctatcaccccctacatggtatctccaggggtgtaactgggga

SEQ ID NO: 381302 - DNA, 201 bp, Homo sapiens
cagtcttgagtgtcatggtgttccctgagaacctggggactccttggtggggcagaccaggtaggggtgggcttggatgagagccttcgtttctgtggcaygcgacagtttccaccttaccttcataatcgctttcttctttgagatcaagggagaaaccctcatctgctgtgatggggacagatgttacccagagcatgt

SEQ ID NO: 381303 - DNA, 201 bp, Homo sapiens
agttcaggcctcccaagtcatgctttaaaactgtccaagcaggcccatcgggaagccaggcccagcaaggaggggtttgttactctgctttcctggaagckgggctggcaacgttcccagcagagaacatcattcttacaaagtagaggggtgtcaggtttcagccaagtgggtaaaaggcaggtattgggattggtgtgg

SEQ ID NO: 381304 - DNA, 201 bp, Homo sapiens
gcccgggccaccctggaaatgtccctgaaatcatgtgggcttcatttggggccacggagggcatctggagcccaagtgtggcatctgggccaccttggccsggaacccgggaccagctcacatcctctctgcaccagggcctctctggagcccttagtgggctcgcagcctctgtgacgttgccctgcagagaccagtgct

SEQ ID NO: 381305 - DNA, 201 bp, Homo sapiens
cccctgcccagggagcatgtgtggagcaagaatggaaaacgcagatgcctctggcggaggtgggctgccagcctggaaattgctagctcagcagcatgcgscagggttgggaggggcttccagggccgtcaggaggccccctctgccacccactctggaagtgggttgtgctaccgggcaggtgacagcaccccaccctcc

SEQ ID NO: 381306 - DNA, 201 bp, Homo sapiens
aggcactacatagagctgtcctcagccctcagggtggccccatgggtgttgtgctgttagggtcagggtcagcctgctcccagctcctctgcatggccccrtgtccctgagcacttcacatgccctcctggccctgcctttactgtcctctgtgatgctgcaaagcacctcttggctgcatgtttggtctgcatcttgggg

SEQ ID NO: 381307 - DNA, 201 bp, Homo sapiens
cctccgcgaacacacggcccccttgacgtggcccaggtgcagggctgggggcaggcgtactgtggaagccacacctggtcaccagcatggcccaaggcggygctggtttgggagagggtgggtggtccccccctcttctccagtgtcccatccctgccagggtccaggtagggatggtagctgtgtcctggggctgcaggc

SEQ ID NO: 381308 - DNA, 201 bp, Homo sapiens
agccctctgcccaccagagccaccctgccttgctggcgctggtgtttgtgctgccacaagctgtgtttcctccgtctgctcagagcccaggggtctgctgycctcgccagcacccccagcctccgcctggcagatgggctgtgttagcagggccgggatgggggaggggttatgagcctctcagccacagctccctaccct

SEQ ID NO: 381309 - DNA, 201 bp, Homo sapiens
gtgtggtcagaccactgtgtgcggctgaggaatgagttcctcccaggaggggaaagccctcgggtcaatcggggccctcgtgcccacccgtcactgcaggscaggatcgtggcaggtggcaaccccagctttgagtgctgcgtcttctggggctgcagccgcccactgtgagcaggagggtgagggcaggtagagtctgtc

SEQ ID NO: 381310 - DNA, 201 bp, Homo sapiens
gcccaccagagccaccctgccttgctggcgctggtgtttgtgctgccacaagctgtgtttcctccgtctgctcagagcccaggggtctgctgccctcgccwgcacccccagcctccgcctggcagatgggctgtgttagcagggccgggatgggggaggggttatgagcctctcagccacagctccctaccctgtgtgcct

SEQ ID NO: 381311 - DNA, 201 bp, Homo sapiens
tcaatgtgccttcagctgctgctgtggctcttcctcattgggcctggagtgtccagcgtaggggtctggaggatagggcatgacctgccatccactcagtytccccacatgtcacactgagactggggccagcagagcctcagcagcataatttgcaatctgtgttgtgttgacctcttatagtttgctaagagtgggccg

SEQ ID NO: 381312 - DNA, 201 bp, Homo sapiens
ctcagtttccccacatgtcacactgagactggggccagcagagcctcagcagcataatttgcaatctgtgttgtgttgacctcttatagtttgctaagagygggccggccagggcagagggctcgctcctgctgatgggcctgtgtccaagggtgcagctgtggcctcagtttgctcctttggaggacgggagagcagaac

SEQ ID NO: 381313 - DNA, 201 bp, Homo sapiens
tgtcacactgagactggggccagcagagcctcagcagcataatttgcaatctgtgttgtgttgacctcttatagtttgctaagagtgggccggccagggcrgagggctcgctcctgctgatgggcctgtgtccaagggtgcagctgtggcctcagtttgctcctttggaggacgggagagcagaacaccacctcccatgct

SEQ ID NO: 381314 - DNA, 201 bp, Homo sapiens; identical to SEQ ID NO: 82958

SEQ ID NO: 381315 - DNA, 201 bp, Homo sapiens; identical to SEQ ID NO: 83042

SEQ ID NO: 381316 - DNA, 201 bp, Homo sapiens; identical to SEQ ID NO: 83043

SEQ ID NO: 381317 - DNA, 201 bp, Homo sapiens; identical to SEQ ID NO: 82964

SEQ ID NO: 381318 - DNA, 201 bp, Homo sapiens
gcagcataatttgcaatctgtgttgtgttgacctcttatagtttgctaagagtgggccggccagggcagagggctcgctcctgctgatgggcctgtgtccragggtgcagctgtggcctcagtttgctcctttggaggacgggagagcagaacaccacctcccatgctgttggggtgcgtcggggagttgtggtgcagagc

SEQ ID NO: 381319 - DNA, 201 bp, Homo sapiens
ttggcctctggtcctctcattccgagagccgaggagtaccccacacagtcatgcaggagggagagggagtgaggggtgggttaggcctgggccagccccaytggtgggcccagggtggccgcgcccagggacgtgctgctttccctcctgagaagctgttgggacttggctcttgaggacactcgttgtgggaaagccttt

SEQ ID NO: 381320 - DNA, 201 bp, Homo sapiens
tttttagggctgagtaatactccatcgtctatatgtaccatattttgctcatcatcccttcatctgtcagtggactcttggctgctcccttcttgctattrtgaatgatgctgctgggaacatgggtgtacaaatatctgtttaagtctctgcttttagattgtttgggaatatatctaaaagaggaattgctagatcata

SEQ ID NO: 381321 - DNA, 201 bp, Homo sapiens
gcaggtgcagagaggagagggcagggccctgccctcaaggaggtacagagccaagcctactggcttcgggacccacatggtgcccctgtgtccctgcagcrtggtctcagcatggacccccaacctgtggtgaaaccattgccctgggatgttcagcaggactgggtcagcttctgcctggctcagcatggccattccaca

SEQ ID NO: 381322 - DNA, 201 bp, Homo sapiens
cccagaggacccccaaaacaggtgcttggtataaatgtaactcgccttccttcactggtgacctgaggccacctgatggtctctctttgccctctgtcccygtgggccccaaagaatctgggagcatgttcctcctctgactccgggccctccaggccataccagcccctggttttgctaaacatcccccaaagctgtggc

SEQ ID NO: 381323 - DNA, 201 bp, Homo sapiens
ccccaaagctgtggccccgggaagcgcccctcggaccatggtctgctgctgctctccttccaacttcgaaggtcccctcccgtcctggggtatgaggaacrgtggtttctgggaaatctggagccaccccagtgtttgcaaggaaagtgcccagcaggtggtggcagccgccacagttactcctcagactagctttactca

SEQ ID NO: 381324 - DNA, 201 bp, Homo sapiens
aggtggtggcagccgccacagttactcctcagactagctttactcatggctttagggagtgacggtcatgcttcattccaggcctcaaagccttagccatycccaggccttgctctgcccaggcccaggctggcccttgggcaggcttatggggagccaggccagaagaggagaaaagcgccatattgtgtgacatgcccc

SEQ ID NO: 381325 - DNA, 201 bp, Homo sapiens
tactcatggctttagggagtgacggtcatgcttcattccaggcctcaaagccttagccattcccaggccttgctctgcccaggcccaggctggcccttggscaggcttatggggagccaggccagaagaggagaaaagcgccatattgtgtgacatgcccctggctcagagcgggctgtgcctgggagcggtgcccttccg

SEQ ID NO: 381326 - DNA, 201 bp, Homo sapiens; identical to SEQ ID NO: 82942

SEQ ID NO: 381327 - DNA, 201 bp, Homo sapiens
aacctcagttttctcttctgtaaatggatatcacagcctacccccgcagatttgctgatggaattggaaatgacacctctacaatgcctggcacccagcargtctccaaaagagcagccttaattatgatgtagcacgaggatccttatctgggtaaggacatctggggggtggacccggggcagctgtgctcccctaggc

SEQ ID NO: 381328 - DNA, 201 bp, Homo sapiens; identical to SEQ ID NO: 82945

SEQ ID NO: 381329 - DNA, 201 bp, Homo sapiens
gaaacaggcagggagtggagctaacagcttagtcaccaggacccccagacctgcaaacgtcccctcctggaaggggaagccaggaacagcagaactgcccmcaaaacaaggctgtgaacttttcgggaactggaactgtttaacttgaacccaggattgtttaaagctttatttatttatagcttcttcttaaaaaaaagt

SEQ ID NO: 381330 - DNA, 201 bp, Homo sapiens
aagccccgggcctcttccagcgcggtcctcgaaccgaaccgcaggacccctgctgtccccgggcagcggccggagcgcgtccctcgggtcctgggaagacstgccgcgtctgcgggctgcctgggagcccaggcgccccgcggtgctgggggaggagcccggcacggggccgctgggcggcaaaggggccgcgggctccct

SEQ ID NO: 381331 - DNA, 201 bp, Homo sapiens; identical to SEQ ID NO: 82947

SEQ ID NO: 381332 - DNA, 201 bp, Homo sapiens; identical to SEQ ID NO: 83025

SEQ ID NO: 381333 - DNA, 201 bp, Homo sapiens; identical to SEQ ID NO: 83027

SEQ ID NO: 381334 - DNA, 201 bp, Homo sapiens; identical to SEQ ID NO: 82956

SEQ ID NO: 381335 - DNA, 201 bp, Homo sapiens; identical to SEQ ID NO: 82961

SEQ ID NO: 381336 - DNA, 201 bp, Homo sapiens
gtgttggagtccctttgagattgagttggaaggaaacccaactaaaaccgcctaaaaccagagcctggaacccacggctctgaagtcacagggaccccccsaccccaactcccagtgaaaatctgggtgggcgtttcccagagggaagcctgcctgtgtcaccccccaagcccggccaaagagctgaatgtccacgccctg

SEQ ID NO: 381337 - DNA, 201 bp, Homo sapiens
ctggcccttgggcaggcttatggggagccaggccagaagaggagaaaagcgccatattgtgtgacatgcccctggctcagagcgggctgtgcctgggagcrgtgcccttccgcaggagacagggtgtgcgggtgggacgctggagtgcctggctggtttgggccccactgcatgcagagcaaggcccagcctttggggagg

SEQ ID NO: 381338 - DNA, 201 bp, Homo sapiens
gttctacagaacagccatggttttctttccttatgtattatatacattttttctttgtgagtaacaatccaaactcttaaactttcactaagcttcaaackagactacttctccacaatatttatcccagcaaaatggcccaagccttaggatataaatccttgtgccatctttctccagatgcaggattgtgacccagca

SEQ ID NO: 381339 - DNA, 201 bp, Homo sapiens
tgtctttgttaagcggggagctgaccgtggagcagcgagcttccatcattcagaggtttcgggatgggaaagagaaggttctcataacaactaatgtttgygcccgaggtgtgtgttaaaagtcaggtcttgagttctaatttgcatatgataaaatgcattccttttaagtgtacagtttcgcgagtttcgacaaacatg

SEQ ID NO: 381340 - DNA, 201 bp, Homo sapiens
aattctgtgtggatgttcaagtgatgtatgccattcgagggaatcgaagtatgtaccagtaagccagtcctggctgatttttcaaatcctggcttcaccaygaataagcattttatataacttcttggcattctcatctctaaatgggggaaataataccactcatgtcatagagttgttattagaattgagatgacgttg

SEQ ID NO: 381341 - DNA, 201 bp, Homo sapiens
caaatctgtcaactattaaactgtatccaattaaaaatatttcattcaaccaaaaccttcaatttcctttctgtgcctctccctgtacaaatttttattgyagttgaaatttgaaagatgcctgtaagaacctttctcctcccctcttctctctctatcccacagtgcctctgcctagctcctacttatgaattggctctg

SEQ ID NO: 381342 - DNA, 201 bp, Homo sapiens
ggcaagttaataaatctgagtctgttaatccttgtctgtaaagatagcatctgtaaaggaatgtatcatagttgatctgttcacccttaaatcctaatacytagcacagtgcctggcttgtagaaaccactcattaaacattgaataaagtcatcatgtggatttaatgaagtaatttacgtttttagcacagtgcctggc

SEQ ID NO: 381343 - DNA, 201 bp, Homo sapiens
tagagggactgcttctaacacttccccatttcagcttatgtttattgtaccttgtacagataccctttatcaggtgaaggatgttattcactattaacaamaccccgtttttatgtttgttttttgctttctgacattctcatgttcatctgttttattttctcactaccccgtaaacactttaagcttcacgacagcagg

SEQ ID NO: 381344 - DNA, 201 bp, Homo sapiens
gtgttggcaatgttaagcagagttaatgccttggaattgttcccacaggtaagggaaggctgagagaagactgggaatgcttgcactaccagtgctaattwagtaataggtgatattcctgtgcaatgatatggttactatggtgatgaaatatttagaaaagacatgttttcataaaatcatagagcattgggtagcagc

SEQ ID NO: 381345 - DNA, 201 bp, Homo sapiens
attctacttggttatgtttagtttcttattttcagtttatgcccactctcttgtattcagtttatgcccagtggtcttctcttttctacagaccccagaayctcatagcacagagccagtctggaacaggaaagacagcggcatttgtgttggcaatgttaagcagagttaatgccttggaattgttcccacaggtaaggg

SEQ ID NO: 381346 - DNA, 201 bp, Homo sapiens
caggggtgcgtgcagcggctgatggcagtggcatgaagtgcttgaagaagagtgatgggatggcagcttggtgacagccttctctcctctatcacagagckctaccctccgaatgccaaatgctcctcttttcagcaacctttgaggactctgtgtggcactttgctgagcgaatcatccctgaccctaatgttatcaagt

SEQ ID NO: 381347 - DNA, 201 bp, Homo sapiens
ccaagctctgtgcaacatttatggcagcatcaccattggtcaggccatcatcttctgccaggtacactctgtggatgtgtcttcatcgagcccagatatgsctacaggccgaggtgggggacgacaataagtgccctagagccaggcaccatgttcagcacttcttgtgtgtctccagtttaatcttcagaacagctctaa

SEQ ID NO: 381348 - DNA, 201 bp, Homo sapiens
ctctgaaaattactgttaaaaatgtcaatatcgttcgtgaaaaggaacaaaacagtaaatgtcacttagttttctgcttaggcagaaaatataactctctkggcaagcagatatattctttttatgcgatgagtttttccatttttgctttgttcaacagaaggtttgacttaaggcctttaccactgtccttcgcctagg

SEQ ID NO: 381349 - DNA, 201 bp, Homo sapiens
attttgtttcaaatgatattaaactgaataactttcccaaatgggtttgcattccctagggatttatcatttgacgctaaaaaatgtatttttacagaacragaaaagcactgaaacctacttatgtaaagggtaaaaatccaaaatcctagttcccagacattttctaaatggtagaagaagcctacccatgatttaaga

SEQ ID NO: 381350 - DNA, 201 bp, Homo sapiens
ccgacctttcagggaagtaggttaagtgcccctgtgttaggctaactggggaggacagggtgaggaagatgtgttaaggccactgtcgctatggtgagctyctaaggccctggtctcaggaagtgactgcagtagaagagcctcagtccctcccaggctctcctcacttccactctggccttctctgccccagcgtatcta

SEQ ID NO: 381351 - DNA, 201 bp, Homo sapiens
gctgaggtcgcacaactgcactccagcctggcgaaagagtgagactgcgtctcaaaaaaataaaatttgagctcagatttacatgttataactcattctgsagtcagaatttcacatcttgtgaaggcagagcagattacagaagcagattttcgtatcttataaagaaattccctaagcaaagtagtaacatcctttaag

SEQ ID NO: 381352 - DNA, 201 bp, Homo sapiens
agcatgcaagcaaacttcctaaccaaagtacctgtctcaattacataagccctggttggatttctaaattttctctataaataggaattcccttggcagaygtggtacttgaatggcccgtgtactgaggaaagcattgcaggaccctacagtgtttttcctcttctagggattgatgtgaagcaggtcacaattgttgtg

SEQ ID NO: 381353 - DNA, 201 bp, Homo sapiens
gggccgcggggcggcgcggggggcgctctccactctgcggaagctgccccctctgccctccggtccgcgccctttcgccccgctctctgccctccgccccsctctctgccctccgccccgctctctgccccccgccccgctctctgccctccgccccttccgcgcgccacccagccttccagcgcctgcgcgccgcaccgc

SEQ ID NO: 381354 - DNA, 201 bp, Homo sapiens
gattcgtgtgtttgtcctggatgaagcagatgtgatgattgacactcaaggattctcagatcatagtattcgtattcaaaggtaatcttcagagtcttccyctcttcctcagccttctgtccagatggggaatttcatttgtttactcctccacattatctttattgcttaactcctcaccaccttcacctctaaaataaa

SEQ ID NO: 381355 - DNA, 201 bp, Homo sapiens
aagctgaaatgaatatgataatctcaaaacaaacgactaggtgccctgagagtgaccgaacagagcggggagcgttgcttcagcaccacggagagatcatsactgcagtttcgtgtgggtttttgtatttttgcccccaattccagaaatgctgatcaaaatctcaaaattacaattagaaaactggggggcgggggggag

SEQ ID NO: 381356 - DNA, 201 bp, Homo sapiens
gcaatgggatttaataggccatctaaaatccaagagatggctctccctatgatgctggcacatccgtgagtttccagggtagtggtattctacttggttaygtttagtttcttattttcagtttatgcccactctcttgtattcagtttatgcccagtggtcttctcttttctacagaccccagaacctcatagcacagag

SEQ ID NO: 381357 - DNA, 201 bp, Homo sapiens
gtaggtgcaattgcttggtatacaaccactgaaagagaaagagcaacttatttgatgtcattcaggaagcttgatgtcctcttttttatttttgcttttcyagtggatttggcagctaattcactcttaaacaagttaatccatcaatccttagtagaatccagtcaccgtgtggaagttttacagaaggatcccagctct

SEQ ID NO: 381358 - DNA, 201 bp, Homo sapiens
acagatggcactaatataaagggctgtttttcttgtaaagctttttcttctagaagtaatcattgcttttgctttttttttttcattttgttagtatcackgtgtaaggatctttaattttcccttagctattctatcgtatgtgtcatatgtctgtgatatctccaaatagtaaaataaaatttaaaaatccatccattt

SEQ ID NO: 381359 - DNA, 201 bp, Homo sapiens
aactactgatcagatttctgtctccatatttttggagacacagaatcaaatcatactgtatatagcctttgtgtaacttcctccacctgacataatgctcrtaataatactaatgaatttcattagtattgttccatgcaccagcagttcatttccttttcattgctgatagtattctattgacagttcgtctgtccacca

SEQ ID NO: 381360 - DNA, 201 bp, Homo sapiens
cataaagatttcagccagatgcctggcacatgggaagcaagcactcttagagtgtctgttgttgccattgttacatgatatcattttgtcatcatagcacmtgtgaggcagatgtagcacatttatctccatttcatgcgtgagaaagccagaggtctgactggtggagaggatgtgagccttagaaacacaggcggaggg

SEQ ID NO: 381361 - DNA, 201 bp, Homo sapiens
tcctgcctcagcttcccgagtagctgagactacaggcgcctgccaccacacctggctaatttttgtatttttttagtagagacggggtttcaccatgctgrccaggctggtctcgaactcccgacctcaggtgatccacccgccttggcctcccaaagtgctgggattacaggtgtgagccaccgcacctggcctgttttt

SEQ ID NO: 381362 - DNA, 201 bp, Homo sapiens
atggtgtagcttcatccactttctcatttaccaccccttccgtcttccaaaaatgtatttagataacttatccaccagtttcttctctcccattctccacrttttccgtggattctttttatctctttatgatcacattagtgggatttgggcagctaagaagataacacaggtagacggtctgacatcattgaccagagg

SEQ ID NO: 381363 - DNA, 201 bp, Homo sapiens
ccagggttctaatatgagacagatgattaaataatgcttatatggtaattaaaaattattttgatcaagcagaattaatatgagctcaggccgggtgtggyagctcacacctgtaatcccagcactttgggaggccgaggtggtcagatcatgaggtcaggaaatccagaccatcctggccaacatggtaaaaccccatct

SEQ ID NO: 381364 - DNA, 201 bp, Homo sapiens
ctcctagacctcccggtggttctgagggaacagttagctgcgttttcatcaactctgtgttctgcagtgctcatggtgtagcttcatccactttctcattyaccaccccttccgtcttccaaaaatgtatttagataacttatccaccagtttcttctctcccattctccacattttccgtggattctttttatctcttta

SEQ ID NO: 381365 - DNA, 201 bp, Homo sapiens
cttgtgatgtggaggcggaaatttccagggaaaccgacacggggcgtaaagcgcggcggggagtctggggggctcccgcctggagggctgtgtgagcggckggccgcggggcggcgcggggggcgctctccactctgcggaagctgccccctctgccctccggtccgcgccctttcgccccgctctctgccctccgccccg

SEQ ID NO: 381366 - DNA, 201 bp, Homo sapiens
tagctgcgttttcatcaactctgtgttctgcagtgctcatggtgtagcttcatccactttctcatttaccaccccttccgtcttccaaaaatgtatttagrtaacttatccaccagtttcttctctcccattctccacattttccgtggattctttttatctctttatgatcacattagtgggatttgggcagctaagaag

SEQ ID NO: 381367 - DNA, 201 bp, Homo sapiens
cactttcctaaccaattcgctaacctttctgacatcttgtgatgtggaggcggaaatttccagggaaaccgacacggggcgtaaagcgcggcggggagtcyggggggctcccgcctggagggctgtgtgagcggcgggccgcggggcggcgcggggggcgctctccactctgcggaagctgccccctctgccctccggtcc

SEQ ID NO: 381368 - DNA, 201 bp, Homo sapiens
ctcagcctcaagagtagctgtagctgggatcacaggcacgtgccaccacacccagctaatttttgtacttttagtaaagatggggtttctccatgttggcyagtttgtttatgaccaaaaaatggtcataaacaaaagcctggatatccgggtgacattaagttcaaggccaggtctcaagttcctggcctcaagtgatcc

SEQ ID NO: 381369 - DNA, 201 bp, Homo sapiens
cagtggcgccaccttggcttactgcaacctttgcctcctgggttcaagcagttctcctgcctcagcctcaagagtagctgtagctgggatcacaggcacgygccaccacacccagctaatttttgtacttttagtaaagatggggtttctccatgttggctagtttgtttatgaccaaaaaatggtcataaacaaaagcct

SEQ ID NO: 381370 - DNA, 201 bp, Homo sapiens
tgtaaccactgaggcaagggctcaaaagacctgaccaggacagtagccatgaaacggagcagagccagagccccatgacgggcaagcgggtgtgagactayggggcctgctggggacttggcacagcaggagcagagaggagagggtggctctgtgggcttggtgagggcacctctccaccacacacacacatacacacac

SEQ ID NO: 381371 - DNA, 201 bp, Homo sapiens
ccaggaccccttgcacgtgccaaaatctgtggatgttcaagtccctgatgtaaaatgttgtagtatttgcatgtaacttatacacatcctcttgtgtactktaaatcatttctagattatttataatgacaagaaaaaagtccatatacattcggtacaagcacaattttttccaaatatttttgatccacagttgtttga

SEQ ID NO: 381372 - DNA, 201 bp, Homo sapiens
aaaactttaaaagacaaaaagattaaaagtgaaagttgttcttcattgccttccagaaacgtaatgccaaagatcacatagtaaacaggcaagcctttgtkttttgctttttttttttttgagctcatacatgcacatacaaatgcccatatttatatttgttttcactgagtgtttacaaaaatagaaggactttttttc

SEQ ID NO: 381373 - DNA, 201 bp, Homo sapiens
ctggctaatttttttgtatttgtagtagaggtggtgttttgccattttggccaggctggcctcaaactcctgacttcaggtgatccgcccacctcagcctsccaaagtgctgggattacaggtgtgagccaccgtgcccaacctcaaaaatagacagacttttaatagcaaatgagaggctatgggatagagctcgaactg

SEQ ID NO: 381374 - DNA, 201 bp, Homo sapiens
tctaaataaccctttagagaggaatatgtaaaaggtagctgtttctccattccttggccccttccccttctcatactcaacattcacctcaaatctgtcamctattaaactgtatccaattaaaaatatttcattcaaccaaaaccttcaatttcctttctgtgcctctccctgtacaaatttttattgcagttgaaattt

SEQ ID NO: 381375 - DNA, 201 bp, Homo sapiens
ggaacagcagttagagcttgaacagttctgcttcctttccgcaactgtggcattcgaggtcattcgtcatatcaaattcatcagattttgtctccactttsctaaccaattcgctaacctttctgacatcttgtgatgtggaggcggaaatttccagggaaaccgacacggggcgtaaagcgcggcggggagtctgggggg

SEQ ID NO: 381376 - DNA, 201 bp, Homo sapiens
tggctctccctatgatgctggcacatccgtgagtttccagggtagtggtattctacttggttatgtttagtttcttattttcagtttatgcccactctctkgtattcagtttatgcccagtggtcttctcttttctacagaccccagaacctcatagcacagagccagtctggaacaggaaagacagcggcatttgtgttg

SEQ ID NO: 381377 - DNA, 201 bp, Homo sapiens
tcaggtatgtatttctgatgctactgaccaactataatctgtaagtgtttgatttttttttttgacagaaaggaagagttactaaaaggaatctatgcaakgggatttaataggccatctaaaatccaagagatggctctccctatgatgctggcacatccgtgagtttccagggtagtggtattctacttggttatgttt

SEQ ID NO: 381378 - DNA, 201 bp, Homo sapiens
gctcagctgcaaagtgacttaatttagaaatgcacctttcaggtatgtatttctgatgctactgaccaactataatctgtaagtgtttgattttttttttkgacagaaaggaagagttactaaaaggaatctatgcaatgggatttaataggccatctaaaatccaagagatggctctccctatgatgctggcacatccgt

SEQ ID NO: 381379 - DNA, 201 bp, Homo sapiens
tgccaaagatcacatagtaaacaggcaagcctttgtgttttgctttttttttttttgagctcatacatgcacatacaaatgcccatatttatatttgtttycactgagtgtttacaaaaatagaaggactttttttcatactgtttgttcctttgactagctgcccaatatttcatgatttatttaatgtaacctattgat

SEQ ID NO: 381380 - DNA, 201 bp, Homo sapiens
ttaaggcctttaccactgtccttcgcctaggcttatggcgtagcttattattttagtggtccagctctacaggcatgattgtttatgtttggaagttgagktatgaatgatctatctccaaatactagttttaaagctcagctgcaaagtgacttaatttagaaatgcacctttcaggtatgtatttctgatgctactgac

SEQ ID NO: 381381 - DNA, 201 bp, Homo sapiens
gagcattccgtttctgtctgtctcaatcacactggtggtggtctctgatttttttttatagagcttcctcttcttgcattacagatgcagtatcttcagtkgtctctctgagaacattaattctagtatttaaaaattttttctgttttaacattgtgaattatccaagtttcctttttgtttgctacagcctctttcaca

SEQ ID NO: 381382 - DNA, 201 bp, Homo sapiens
tattaacaaaaccccgtttttatgtttgttttttgctttctgacattctcatgttcatctgttttattttctcactaccccgtaaacactttaagcttcaygacagcagggtctcctctctctcattcactcccatatccactgcactagaccagcacctatctggcacatggacagcaccaaaaacatatgtgtagaata

SEQ ID NO: 381383 - DNA, 201 bp, Homo sapiens
ttttaaaaataacttcaatatataattaatatcctcagcttccactgttgttactgaaaagtttaatgtcaccctgatctccaagcttttgtttatgaccytttttttttctctcgcgagaagcctttggagtcttctttctttatggtattctgaaacttttcagtgacatactttggttcaggtcttttttcattcatc

SEQ ID NO: 381384 - DNA, 201 bp, Homo sapiens
aaacacagggccttcttttagagggactgcttctaacacttccccatttcagcttatgtttattgtaccttgtacagataccctttatcaggtgaaggatrttattcactattaacaaaaccccgtttttatgtttgttttttgctttctgacattctcatgttcatctgttttattttctcactaccccgtaaacacttt

SEQ ID NO: 381385 - DNA, 201 bp, Homo sapiens
tgttgaaaacagaaaagtttttaaaaataacttcaatatataattaatatcctcagcttccactgttgttactgaaaagtttaatgtcaccctgatctccmagcttttgtttatgaccttttttttttctctcgcgagaagcctttggagtcttctttctttatggtattctgaaacttttcagtgacatactttggttca

SEQ ID NO: 381386 - DNA, 201 bp, Homo sapiens
ggatgttcaagtccctgatgtaaaatgttgtagtatttgcatgtaacttatacacatcctcttgtgtactttaaatcatttctagattatttataatgacmagaaaaaagtccatatacattcggtacaagcacaattttttccaaatatttttgatccacagttgtttgaatccacagatgcagagcccacagatacaga

SEQ ID NO: 381387 - DNA, 201 bp, Homo sapiens
ggggggcggatcacgaggtcaggagatcgagaccatcctggctaacacagtgaaaccccgtctctactaaaaatacaaaaaattagccaggcgtggtggcrggcgcctgtagtcccagctactcgggaggctgaggcaggagaatggcgtgaacccgggaggtggagcttgcagtgagctgaggtcgcgccactgcactcc

SEQ ID NO: 381388 - DNA, 201 bp, Homo sapiens
tttcctgatgtatagtcattgtcaactgatttcccattataggaagtgggaattgagttctttgaaaacaccacccattctacctttcctatccccccatyacctctctgtaattatgtcatgaattaggttacagtaactgtcagtattgatatcatgtgacagtgtaagtattgttcactgctgagccaaacagcgtat

SEQ ID NO: 381389 - DNA, 201 bp, Homo sapiens
gttggcaatgttaagcagagttaatgccttggaattgttcccacaggtaagggaaggctgagagaagactgggaatgcttgcactaccagtgctaatttaktaataggtgatattcctgtgcaatgatatggttactatggtgatgaaatatttagaaaagacatgttttcataaaatcatagagcattgggtagcagcat

SEQ ID NO: 381390 - DNA, 201 bp, Homo sapiens
tgaggcaggagaatggcgtgaacccgggaggtggagcttgcagtgagctgaggtcgcgccactgcactccagcctgggcgacagagcaagactccgtctcaaaaaaaaaaaagttgaagtgttgtagtccacttgatttatcctcattctggcatttttcttaagaccctcaggaaagctgcattttaaaatattgcctca

SEQ ID NO: 381391 - DNA, 201 bp, Homo sapiens
tatttgttttcactgagtgtttacaaaaatagaaggactttttttcatactgtttgttcctttgactagctgcccaatatttcatgatttatttaatgtamcctattgatggacattttggttgttttctgtttggggaagtgccatttttcacagttaagaaaaagtcagaaatttatcctaaaaattctgcagaatcaa

SEQ ID NO: 381392 - DNA, 201 bp, Homo sapiens
tagttttaaagctcagctgcaaagtgacttaatttagaaatgcacctttcaggtatgtatttctgatgctactgaccaactataatctgtaagtgtttgatttttttttttgacagaaaggaagagttactaaaaggaatctatgcaatgggatttaataggccatctaaaatccaagagatggctctccctatgatgctg

SEQ ID NO: 381393 - DNA, 201 bp, Homo sapiens
agatggcactaatataaagggctgtttttcttgtaaagctttttcttctagaagtaatcattgcttttgctttttttttttcattttgttagtatcactgkgtaaggatctttaattttcccttagctattctatcgtatgtgtcatatgtctgtgatatctccaaatagtaaaataaaatttaaaaatccatccatttct

SEQ ID NO: 381394 - DNA, 201 bp, Homo sapiens
gtctcaccctgtcaactaggctggagtgcagtggcatgatcttggctcactgcaacctttgcccccccgggttcaagtgagtctcctgcctcagcctcccragtagctgggattacaggcacccgccatcacgcctggctaatttttttgtatttgtagtagaggtggtgttttgccattttggccaggctggcctcaaac

SEQ ID NO: 381395 - DNA, 201 bp, Homo sapiens
tcgttaaaatattataagcttataatggggaaaaaactttaaaagacaaaaagattaaaagtgaaagttgttcttcattgccttccagaaacgtaatgccmaagatcacatagtaaacaggcaagcctttgtgttttgctttttttttttttgagctcatacatgcacatacaaatgcccatatttatatttgttttcact

SEQ ID NO: 381396 - DNA, 201 bp, Homo sapiens
gggttcaagtgagtctcctgcctcagcctcccaagtagctgggattacaggcacccgccatcacgcctggctaatttttttgtatttgtagtagaggtggkgttttgccattttggccaggctggcctcaaactcctgacttcaggtgatccgcccacctcagcctcccaaagtgctgggattacaggtgtgagccaccgt

SEQ ID NO: 381397 - DNA, 201 bp, Homo sapiens
aagaggatgcctttgtccgtaattcaacacttggttgttttgtgcaggacagcttttatttttggatttttcgttaaaatattataagcttataatggggraaaaactttaaaagacaaaaagattaaaagtgaaagttgttcttcattgccttccagaaacgtaatgccaaagatcacatagtaaacaggcaagcctttg

SEQ ID NO: 381398 - DNA, 201 bp, Homo sapiens
gggcacggtggctcacgccagtagtcccagcactttgggaggccgagacgggtggatcacaaggccaggagatcgagaccatcctggctaacacggtgaawccccatctctactaaaaatacaaaaaaattagctgggcatggtggcagacgcctgtagtcccagctacttgggaggctgaggcaggagaatggcgtgaac

SEQ ID NO: 381399 - DNA, 201 bp, Homo sapiens
ggtcaggaaatccagaccatcctggccaacatggtaaaaccccatctctactaacaatacaaaaattagctgggcgtggtggcacatgcctgtagtctcakctgctggagaggctgaggcaggagaatcgcttgaacccaggaggcggaggttgcagtgagctgaggtcgcacaactgcactccagcctggcgaaagagtg

SEQ ID NO: 381400 - DNA, 201 bp, Homo sapiens
ggattacaggtgtgagccaccgtgcccaacctcaaaaatagacagacttttaatagcaaatgagaggctatgggatagagctcgaactgtaatttgcctcrcattcattgattcccagcttccctacatcccattcttccccctcctatgcctcccccactccaaaaagggtgactagtaacttgtgtttctaaataaccc

SEQ ID NO: 381401 - DNA, 201 bp, Homo sapiens
cacgccactgcactacagcctgggtgacagagcaagactccatttcaaaaaaaaaaaaaaaaaaccatccatttctcttttttcctgccaatattccaagytccctctctccagcttcagtctggtagatctgctgtacagctgtcatcatgggtctttcctttgctcacttaagttttaaatctcctatatcttgggtcg

SEQ ID NO: 381402 - DNA, 201 bp, Homo sapiens
tttatataacttcttggcattctcatctctaaatgggggaaataataccactcatgtcatagagttgttattagaattgagatgacgttggtaaagcattktacacaatgcctggcacgtagtaaggacccactaaatgttagccacatcatttccacatcctgcaagaggatgcctttgtccgtaattcaacacttggtt

SEQ ID NO: 381403 - DNA, 201 bp, Homo sapiens
acctgggcctgccacttctgggaaaatttcttcagttatctctttccccaaagtgaccaactttttagagagcccatctgggacacaatcataacaatccaaaaaaaaaaatgatataaaatagaagaaataatcatacacagggttattattttgttgtgtgtttccttccatttgtcattaaaataacacagtcattga

SEQ ID NO: 381404 - DNA, 201 bp, Homo sapiens
cagagcagataaaagtagcccatataaagaaatcttatgactagcaaattgaacaaatacagtgagaaatcaaatggaaatgttttagagaaaaaaatctstaacatcagtcctcaatcaattcagtgaagatagagaaatgaaatctatagacattctccctgaattttgactgctttaatgaaaccttaataatgacaa

SEQ ID NO: 381405 - DNA, 201 bp, Homo sapiens; identical to SEQ ID NO: 83056

SEQ ID NO: 381406 - DNA, 201 bp, Homo sapiens
gcaatttggaagtatcatctgataccaatgtgatatatagctaggaaagaccaatgataggtgaagtccttaccataaaatgtttcgaagagcttctcaasacagttgtttctatttaaaagggaagatataaagagctaggttatctcaaacaatcctgtgaaagaagtttaaaaagatttaagaaggagaaagagggaa

SEQ ID NO: 381407 - DNA, 201 bp, Homo sapiens
tattccactgttggtggacagtttgcagtttctacttttttgcggtgagtatatcctacatgtacctgagtcattgattacttcttttccagacaaatgcstaacaaatagaactgggtgaatgtgtgaattatgtggctttaaatgttacagggaaaatgattttcgcagatagtaacggtcaaggtcattcacctttat

SEQ ID NO: 381408 - DNA, 201 bp, Homo sapiens
tttggaagtatcatctgataccaatgtgatatatagctaggaaagaccaatgataggtgaagtccttaccataaaatgtttcgaagagcttctcaagacarttgtttctatttaaaagggaagatataaagagctaggttatctcaaacaatcctgtgaaagaagtttaaaaagatttaagaaggagaaagagggaaggga

SEQ ID NO: 381409 - DNA, 201 bp, Homo sapiens
ttttaccatgttagccaggctggtctcaaactcctgacctcaggcaacccacccgcctcggcctcccattacaggggtgagccaccgcgcccagctgtctkggtagttttaatgcatcttcagttgccagctaaatctgtttattctagtgtctgaaataacttggtatccacatcaatcagccacatacccaatgctagt

SEQ ID NO: 381410 - DNA, 201 bp, Homo sapiens
cccttacctgtgggaacaattccaaggcattaactctgcttaacattgccaacacaaatgccgctgtctttcctgttccagactggctctgtgctatgagrttctggggtctgtagaaaagagaagaccactgggcataaactgaatacaagagagtgggcataaactgaaaataagaaactaaacataaccaagtagaat

SEQ ID NO: 381411 - DNA, 201 bp, Homo sapiens
cctccaaagaagctgtactgaccatacattaatagagcttgtgtctctattccctctccaaagtggtatactatcaaactttgtctttgcagtcacttccytgaaaaatagttcatatccttttgcatttatctcagctgagtaaaattgagcatttaaaattttttttaaaaaatttttataagcttttttctttttgtt

SEQ ID NO: 381412 - DNA, 201 bp, Homo sapiens
ttgcatttatctcagctgagtaaaattgagcatttaaaattttttttaaaaaatttttataagcttttttctttttgtttgaaatgcttggtctttgcccmtttgactctcaggttgctggattttttttttttactttttcattaaaactgatgtatatattcatgaaatatatattgaggaaggtcgcactttaccatc

SEQ ID NO: 381413 - DNA, 201 bp, Homo sapiens
tgaataacaaacagttctttccctctgtgaactggccagacaggatggaaaagaatgctatctgtggatgatcaacccacaataaagctaatgcttgtatycctggaaaagcaaaagtatattctttgggcattaaattaaatcttatataccattagaacatcatcaaaggaactagcattgaaactgttgtatcccttt

SEQ ID NO: 381414 - DNA, 201 bp, Homo sapiens
ttaaattaaatcttatataccattagaacatcatcaaaggaactagcattgaaactgttgtatccctttgctctcttttcagacagggcagacctgtatgrttggtttattcctggggttgtcatatcatggctgataatgacacagacagaaaccagactgagaagctcctaaaaagagtacgagaactggagcaagagg

SEQ ID NO: 381415 - DNA, 201 bp, Homo sapiens
aattaaatcttatataccattagaacatcatcaaaggaactagcattgaaactgttgtatccctttgctctcttttcagacagggcagacctgtatgattsgtttattcctggggttgtcatatcatggctgataatgacacagacagaaaccagactgagaagctcctaaaaagagtacgagaactggagcaagaggtgc

SEQ ID NO: 381416 - DNA, 201 bp, Homo sapiens
caaaggaactagcattgaaactgttgtatccctttgctctcttttcagacagggcagacctgtatgattggtttattcctggggttgtcatatcatggctkataatgacacagacagaaaccagactgagaagctcctaaaaagagtacgagaactggagcaagaggtgcaaagacttaaaaaggaacaggccaaaaataa

SEQ ID NO: 381417 - DNA, 201 bp, Homo sapiens
tttctcggaaacgcggcgcggccggctgccggaaagtaagtgtgggatttttggagtgggttactttctgggttccacaggggaagggacaaatggacacrctgctgaacggttgtctgttgtcttctttttgccctctttcacatactttggtcttttcaggaaagcattgccgtatggaaatgagacctcgcttaagac

SEQ ID NO: 381418 - DNA, 201 bp, Homo sapiens
tgcacttcaccctgaattagggtaaggtgtgctggaaaaagcactgtagtgtaccaagtcctgtttttgccacaaatctgccttatgaccaactagactcrctccctggcctagttctttagttagcacgggagttgaactttggagactttggtaatgttggactttgagatccaaataatcactggagtgttttgcatg

SEQ ID NO: 381419 - DNA, 201 bp, Homo sapiens
tttaattggtaagtgtaatgcccagcaacttaaaaaacacacactgaagcacagcaactcatattgataggtaaaaaaagttacaggacacaaagggcccktactaatttgacaaaatagaaagaccaggtctgttgttctttctctgatatgatttatcttgcaattgctggatttgagtggcaatttggaagtatcatc

SEQ ID NO: 381420 - DNA, 201 bp, Homo sapiens
caggtgtgggccaccacgcctggctaatttttgaatttttagtagagatggggttttaccatgttagccaggctggtctcaaactcctgacctcaggcaayccacccgcctcggcctcccattacaggggtgagccaccgcgcccagctgtcttggtagttttaatgcatcttcagttgccagctaaatctgtttattcta

SEQ ID NO: 381421 - DNA, 201 bp, Homo sapiens; identical to SEQ ID NO: 83062

SEQ ID NO: 381422 - DNA, 201 bp, Homo sapiens
gcggtgcggcgcgcaggcgctggaaggctgggtggcgcgcggaaggggcggagggcagagagcggggcggggggcagagagcggggcggagggcagagagsggggcggagggcagagagcggggcgaaagggcgcggaccggagggcagagggggcagcttccgcagagtggagagcgccccccgcgccgccccgcggccc

SEQ ID NO: 381423 - DNA, 201 bp, Homo sapiens
ctcccccccgccccccagttttctaattgtaattttgagattttgatcagcatttctggaattgggggcaaaaatacaaaaacccacacgaaactgcagtsatgatctctccgtggtgctgaagcaacgctccccgctctgttcggtcactctcagggcacctagtcgtttgttttgagattatcatattcatttcagctt

SEQ ID NO: 381424 - DNA, 201 bp, Homo sapiens
attccctctctgtggttacttcgcagccctggccagggtgttactttaaacgtctgcttgggaactcctgcacttcaccctgaattagggtaaggtgtgcyggaaaaagcactgtagtgtaccaagtcctgtttttgccacaaatctgccttatgaccaactagactcactccctggcctagttctttagttagcacggga

SEQ ID NO: 381425 - DNA, 201 bp, Homo sapiens
agagctgggatccttctgtaaaacttccacacggtgactggattctactaaggattgatggattaacttgtttaagagtgaattagctgccaaatccactrgaaaagcaaaaataaaaaagaggacatcaagcttcctgaatgacatcaaataagttgctctttctctttcagtggttgtataccaagcaattgcacctac

SEQ ID NO: 381426 - DNA, 201 bp, Homo sapiens; identical to SEQ ID NO: 83054

SEQ ID NO: 381427 - DNA, 201 bp, Homo sapiens
tcaatcttttagttttcgtataaggatagcagaatttgaaaaattaccttttttctattattttagcgtagcactacaattcctccttttattgctgtccygccacaggcccagattctgccctgtgggcggagaaacggtagctggactagaaaacctcaggtagattctagcaccaagctcggttctcagaactacatt

SEQ ID NO: 381428 - DNA, 201 bp, Homo sapiens
ctctgtgctatgaggttctggggtctgtagaaaagagaagaccactgggcataaactgaatacaagagagtgggcataaactgaaaataagaaactaaacrtaaccaagtagaataccactaccctggaaactcacggatgtgccagcatcatagggagagccatctcttggattttagatggcctattaaatcccattgc

SEQ ID NO: 381429 - DNA, 201 bp, Homo sapiens; identical to SEQ ID NO: 83055

SEQ ID NO: 381430 - DNA, 201 bp, Homo sapiens
ttagccaggatggtctcgatctcctgacctcgtgatccgcccgcctcagcctcccaaagtgctgggattacaggcgtgagccaccgcgcccggcttgttcyttcttttgagctctcatcatagcccaggttcaagatcatcttaggcaagtatttcatgaaataatgttcaagttcatgaatttccaaaattctttaattg

SEQ ID NO: 381431 - DNA, 201 bp, Homo sapiens
ttaaaattttttttaaaaaatttttataagcttttttctttttgtttgaaatgcttggtctttgcccatttgactctcaggttgctggattttttttttttactttttcattaaaactgatgtatatattcatgaaatatatattgaggaaggtcgcactttaccatcacttatttttttcttctcagtttgtcatttgcc

SEQ ID NO: 381432 - DNA, 201 bp, Homo sapiens
gcaacctccacctcctgggttcaagcgattatcctgtctaagactccggagtaactggactactacaggtgtgggccaccacgcctggctaatttttgaakttttagtagagatggggttttaccatgttagccaggctggtctcaaactcctgacctcaggcaacccacccgcctcggcctcccattacaggggtgagcc

SEQ ID NO: 381433 - DNA, 201 bp, Homo sapiens; identical to SEQ ID NO: 83057

SEQ ID NO: 381434 - DNA, 201 bp, Homo sapiens
cacctcgcccggctaattttttgtatttttagtagagacggggtttcgccgtgttagccaggatggtctcgatctcctgacctcgtgatccgcccgcctcrgcctcccaaagtgctgggattacaggcgtgagccaccgcgcccggcttgttccttcttttgagctctcatcatagcccaggttcaagatcatcttaggca

SEQ ID NO: 381435 - DNA, 201 bp, Homo sapiens
ggaccggagggcagagggggcagcttccgcagagtggagagcgccccccgcgccgccccgcggcccgccgctcacacagccctccaggcgggagccccccrgactccccgccgcgctttacgccccgtgtcggtttccctggaaatttccgcctccacatcacaagatgtcagaaaggttagcgaattggttaggaaagtg

SEQ ID NO: 381436 - DNA, 201 bp, Homo sapiens
cacgccattctcctgcctcagcctcccgagtagctgggactacaggcgcccgccacctcgcccggctaattttttgtatttttagtagagacggggtttcrccgtgttagccaggatggtctcgatctcctgacctcgtgatccgcccgcctcagcctcccaaagtgctgggattacaggcgtgagccaccgcgcccggct

SEQ ID NO: 381437 - DNA, 201 bp, Homo sapiens
tctcgatctcctgacctcgtgatccgcccgcctcagcctcccaaagtgctgggattacaggcgtgagccaccgcgcccggcttgttccttcttttgagctstcatcatagcccaggttcaagatcatcttaggcaagtatttcatgaaataatgttcaagttcatgaatttccaaaattctttaattggtaagtgtaatgc

SEQ ID NO: 381438 - DNA, 201 bp, Homo sapiens
ctttagtaatgaggctatccatgttgttaacctctcccatcctttaggactatgtaaaaggcaggtttttgttccttctttttttttttttttttgagacrgagtctcgctgtcgcccaggctggagtgcagtggcgcaatctcggctcactgcaggccccgccccctggggttcacgccattctcctgcctcagcctccc

SEQ ID NO: 381439 - DNA, 201 bp, Homo sapiens
ctagtttgaatttctactggagtaggaatacccttccaaatgatgcataattcctacaaaaatctcaggggcaaattataaaaagaatggtattccagaartaacagctggcaggcaaaatattaatgaaataattctgaaataaaacaagtttgaatcctgtatgttatatggtactgttttggggcatttgttaaaaag

SEQ ID NO: 381440 - DNA, 201 bp, Homo sapiens; identical to SEQ ID NO: 83059

SEQ ID NO: 381441 - DNA, 201 bp, Homo sapiens
atcactggctttcggagtctttgggaggcctcagagactgtttctgaagggacattactttctacatgtgggtactgtagttgcacaggaagagcaggtcrcttccctggggctactgaagctttactgtagggatcatattggatagattgggcttctctcctgacatctccttcaccctgccctgcacagatgtgggta

SEQ ID NO: 381442 - DNA, 201 bp, Homo sapiens
caggagctcagaaaggccaccggggcaaagaccgcggcggcggccagcgcacaccgtgacctccaggggctgcggcccgccgcgcacatcgcctgtagctyacgctgccccggccgcctccctcaggaacgcagacgttggggacggctcgccaggcaggacctggaatccacggagggaagctgccactctgcaccgtcc

SEQ ID NO: 381443 - DNA, 201 bp, Homo sapiens
ccccccagactccccgccgcgctttacgccccgtgtcggtttccctggaaatttccgcctccacatcacaagatgtcagaaaggttagcgaattggttagsaaagtggagacaaaatctgatgaatttgatatgacgaatgacctcgaatgccacagttgcggaaaggaagcagaactgttcaagctctaactgctgttcc

SEQ ID NO: 381444 - DNA, 201 bp, Homo sapiens
caacacaaatgccgctgtctttcctgttccagactggctctgtgctatgaggttctggggtctgtagaaaagagaagaccactgggcataaactgaatacmagagagtgggcataaactgaaaataagaaactaaacataaccaagtagaataccactaccctggaaactcacggatgtgccagcatcatagggagagcca

SEQ ID NO: 381445 - DNA, 201 bp, Homo sapiens
aaacataaccaagtagaataccactaccctggaaactcacggatgtgccagcatcatagggagagccatctcttggattttagatggcctattaaatcccmttgcatagattccttttagtaactcttcctttctgtcaaaaaaaaaaatcaaacacttacagattatagttggtcagtagcatcagaaatacatacctga

SEQ ID NO: 381446 - DNA, 201 bp, Homo sapiens
tgcatttttcattattgtaataaaggtgttcaaggttagggatggtgagatattttctcagctattaggcaatattaacatcaatggtggcgccctacccrgctcccttaacgcaactaacccttagtttttaaagaactgttagatggatgttatgtattctcaaactttcttttctctttttctctagtatggctgtag

SEQ ID NO: 381447 - DNA, 201 bp, Homo sapiens
gacatttaccttacatagatcaggttgatctatgatttgttgcatttttcattattgtaataaaggtgttcaaggttagggatggtgagatattttctcasctattaggcaatattaacatcaatggtggcgccctacccggctcccttaacgcaactaacccttagtttttaaagaactgttagatggatgttatgtatt

SEQ ID NO: 381448 - DNA, 201 bp, Homo sapiens
tggctttaaatgttacagggaaaatgattttcgcagatagtaacggtcaaggtcattcacctttatgttagaactttttctctgtgaacaagcaaactgtrctatcattcttctggcctctggtgttaaaactgacaactttcagattttagatggtccccgttgggtcagaaatatcaagaacagataaattacaattta

SEQ ID NO: 381449 - DNA, 201 bp, Homo sapiens
agaaataacagctggcaggcaaaatattaatgaaataattctgaaataaaacaagtttgaatcctgtatgttatatggtactgttttggggcatttgttaraaagtattttaaagctacttggatttgttgtacacctttagtaatgaggctatccatgttgttaacctctcccatcctttaggactatgtaaaaggcagg

SEQ ID NO: 381450 - DNA, 201 bp, Homo sapiens
ctttctactgtcttgccaccttcaggtcctaaaacaggacagtatagttctggcataagaaaagcttgaaactacatgatatggggcatactgcttaatgyacattatgtaacaggtacttagggagtactttatgtgcctgccattgttctatgtgctttacatttattaattcatgtaattttcagctgtgggattatc

SEQ ID NO: 381451 - DNA, 201 bp, Homo sapiens
aagtagtggagctgaaattctaactcaagcagtttggcttcagactgagtccctgcttttaaccataaaagagtgatttgatctaaaaaaaaaaaatcacmaaagcagtgttgtgttctctcacacacatataatgtgtatatacgtgcatacatataatttctatgctttaataatttttttttttgagatggagtcttg

SEQ ID NO: 381452 - DNA, 201 bp, Homo sapiens
ttatcttgcaattgctggatttgagtggcaatttggaagtatcatctgataccaatgtgatatatagctaggaaagaccaatgataggtgaagtccttacyataaaatgtttcgaagagcttctcaagacagttgtttctatttaaaagggaagatataaagagctaggttatctcaaacaatcctgtgaaagaagtttaa

SEQ ID NO: 381453 - DNA, 201 bp, Homo sapiens
  misc_feature (1)...(201): n = A,T,C or G
agagcaggtcgcttccctggggctactgaagctttactgtagggatcatattggatagattgggcttctctcctgacatctccttcaccctgccctgcacngatgtgggtaaaagctgtagcagctgccaacattcgttcttctggatccatattagcccatatttgtccatcaggtagaagttcttccattgcttcccct

SEQ ID NO: 381454 - DNA, 201 bp, Homo sapiens
gaaccaggatggtcccaagaagagatgaggagtcagcagaccattgcaggcacacagcagaggggcaggtgcacacgaagtcaggtagcaagaataagaaygtaggtgcttgtgaaacctcagcacatcagtgtgatggagccaaaaacgggcagagaactggatggggcacgttaggaatgtggacattttatgaaaggc

SEQ ID NO: 381455 - DNA, 201 bp, Homo sapiens
tttctcacttcccaccagacagattgacttgagcacacaggacacaacattgactgaaaaaacaaatagctgagtgttgtaatggagttcaggctgtgcartgcactgcaaataatttaaaacctgcactcgaggcccggccttcataagtcattttgcccagctcaggctggggctgctctcctgccgtctggcgtggtc

SEQ ID NO: 381456 - DNA, 201 bp, Homo sapiens
tgtaaaggaattgaattttaccaaatgccttttcagcatcaattaagataatcatgttgtttttcaccctatgttctattatgtatagttcaattccagtrtacctatatgaacatttcagaagcattaacctgttgccctgttaacttataccactgtgggaaagaagtgaacaacaagcatgcagtacttaccagcagt

SEQ ID NO: 381457 - DNA, 201 bp, Homo sapiens
aaagcagaaagggatgatggtcaccaggctggagcttcccattctgaccttcagggatcttcagtccagagccagtttctgtcttttaaggaaaaaaaaaragagagagagagagagaaaagaccaatgcctggggctctcttcctgggctttttggggtctctactgaaggaagcctgagaacagcagggagggtgagga

SEQ ID NO: 381458 - DNA, 201 bp, Homo sapiens
ttgacacaggtgctgtttgattctccctccccaattaaattctgcagttccaccagtcatggacatcattttgtaaaaacaaacatgcaattaagttgctyagtgtctaagctagcttgtaatgtaaaatgggatcgtttatactggtaattctggaaggggaaaaaagagaagaattctttctgcttccagttcaggtcc

SEQ ID NO: 381459 - DNA, 201 bp, Homo sapiens
cagccatcactcttctgcattcctctttatttcatttgcacgtggctttctcaatataatatcattaccattgtgatggtttaaaacatggctccaaaacsctttgacattcttctccccttgaatctgggcttggtgactgcctgatcagtattatgcagaagtcatgctgagccaagatccaggtccagcccttaggaa

SEQ ID NO: 381460 - DNA, 201 bp, Homo sapiens
tttggggtgggagggggagggatctgatctccaaagttgccacattgcagtatctaaaatgtctcactttcaacaaaactatatgaaacatacaaggaaayaggacagtatgggccatcaaccgggatggggagagcagtcaacagatactttctattaggatgctgaggtttcaaaaaaaaaaaaaaaccacttaaataa

SEQ ID NO: 381461 - DNA, 201 bp, Homo sapiens
cttggctgactgcaacctccgcctcccaggttcaagcaactctcctgtgtcagcctcctgagaagctgggatcacaggcgcacgccaccatacttggctatttttttttttttgtattattagtagagacggggtttcactatgttgcccaggctgatctcaaactcctgacctcaggtaatccacccgcctcagcctctc

SEQ ID NO: 381462 - DNA, 201 bp, Homo sapiens
gatgtgggtaatatttccatgactttagctgcaggcatggctgtgccagaatgctgacttcatcatttccaacaattggtaaagaaaaaggaaaaaagggraaaaaaaggaaaaagatacccaggatactagaaccagccagaacagatacgtaaattggaggaagagccagtgctgttgcttctgggattctccatgact

SEQ ID NO: 381463 - DNA, 201 bp, Homo sapiens
gaagtgagatcatgaagtattggtctttctgtgtctgccttattttacttagcataatatcctccatgtttatctgtgttgttacaaatggcagaatttcwttccttattaagtctgaatagaatgtatattccatacacatcacatttggctttatcaattcattcatcaactgatgcttaggctgtttccatatctggg

SEQ ID NO: 381464 - DNA, 201 bp, Homo sapiens
ggatcatacaccatgatcaggtaggatttattattgggatgcaaggatactttaccttaagcaaatgaacaaatgtgatatatcatattgaaataatgttaaaaaaaaaactctctcaaaaaattatgtgatcatctacgatacggaaaaatttgtgatgaaattcaacatcattcttggataaaaaaaactctcaaaaaa

SEQ ID NO: 381465 - DNA, 201 bp, Homo sapiens
caccaacggactgatgccagtgctgactttgggcctccagaactagtgaaatctatttcccagcagcttaagtgaattcctcccttttggccaaaaaagcktcctcttactggtcgtcactggtcacacctatggcttgccatggtatattccagattgtaatcctcttttctatttatcaataaatttaacacatttgga

SEQ ID NO: 381466 - DNA, 201 bp, Homo sapiens
atatacagaccagagaccatgtttgtccacccgctgtacagatgggaaagctaagcaaaaagtgattcattgagtggcctaaggtcacatgacccgcatgcagcatggggtcaactcagagccatgttctgacagtcagtgtgctttgcggccattccttttgtttccttttgggggtgtggggagaactggtagtagtgt

SEQ ID NO: 381467 - DNA, 201 bp, Homo sapiens
tcttttaaatggacatgagtgtccctttgtgtgtttaatggcacatgcatgtgctccactgatctacatggccctggaagaccacagcagcatccccagarcaaagtcgcactacagcgtgttcttcctgagtgtgtgcaggtgacagcagtgtgaaaatcagcctaagagtcctgggacttctgccccttgtcaaatgat

SEQ ID NO: 381468 - DNA, 201 bp, Homo sapiens
gagaccctgtctcaaaaaaataaaaataagaaagctgactgggtaaggctgagtttatcaaattattgcattaaggaagaatactaccttgacagaattcyagcaacatctcaaaaaggagacccctaggaggatatctgtaggattttagggtatgagccagattactttaagcctggccttttgaggaaagaaatagac

SEQ ID NO: 381469 - DNA, 201 bp, Homo sapiens
ggcctgcggaagagatggaaagctgcaccctaagtgggaggaaaatgcagaccatccctacagatgcttggactcctctttccatggccacatccagaacyactccttctgtgacctgctgctcaggccccagctaagtgacataatgcacattcaggtctgcttgaggagggccacatgtgatctagttcacaactatta

SEQ ID NO: 381470 - DNA, 201 bp, Homo sapiens
ataggcaataggaaagatgtacgtgacagttttcagataccatatctaactttctaagaacttttcttcaaataattaagatgaaattaggaatgctttcraagtgaaatgcattcttccaggtaacacatggttccctggaacacattcttccaggtaacatatgctcgaaagcccttcacatccaccctgtgggttaaa

SEQ ID NO: 381471 - DNA, 201 bp, Homo sapiens
cccagtccaggtccttttcactgtgccaccaactcccttctcccagctgcctcccagtcttgatgctgggacactcctcagaacatcagaaatctctgttyctccccagacaattcaagactctgcctggttttatgttgactttctttcagtatcttccaatgctgattgttccccataattctaaaatgccatcaattc

SEQ ID NO: 381472 - DNA, 201 bp, Homo sapiens
caaataattaagatgaaattaggaatgctttcaaagtgaaatgcattcttccaggtaacacatggttccctggaacacattcttccaggtaacatatgctygaaagcccttcacatccaccctgtgggttaaacaaggctgatgtcttaaactattttgattttgtccttttggccaaagaagccatacagacttgggtaa

SEQ ID NO: 381473 - DNA, 201 bp, Homo sapiens
gcagtgtttaggccaaccatggaaaggaagtcttctgtagaaagttctggctccagagaaggaagacacagaaggtgtcttctatggtgacacacaacacrtggccaagcccaagcaaggcccaggggagggatcacaatacatgtctggtgttgtgggatgagttgggtattcaagcaagagggagccctaaagaggcgg

SEQ ID NO: 381474 - DNA, 201 bp, Homo sapiens
gagttcaggagtgatctgcttcacttctatagataaagttccctaatcagctccccagctgtgcagggaggcactcactagctcccttgccaagaatgccrtctctactccttgtgcccggtgagtagaggatgattcatgtgaatcctggcatcactgcagaaggattgcagaaccatagccctgtggagcccagagcaa

SEQ ID NO: 381475 - DNA, 201 bp, Homo sapiens
cctcctaaattattttttaaaaatttgtatacattaagttttactctctatgctgttaaagttctaaggtttttaaaaaatgcataatgttatgtttttascaatacagcatcatacagaatagtttctctgccctaaaaaaatcccctgtgttgcatctattcaaccctctcttctcctcaaactggtggcacccactta

SEQ ID NO: 381476 - DNA, 201 bp, Homo sapiens
agggaagcagatgcattattcaaagttctggggaaataagactataaaccgataattcgccattgagaaaatatatttttcaaaaaataggaaaaaaaatwagacattcgcagataaacaaaaacacaatttgtcactagccctacaaagaaataataaagggagtaattcaggctactttgaaagcatactataaagtca

SEQ ID NO: 381477 - DNA, 201 bp, Homo sapiens
gacaagcgtgagtttaaggagaggacaagcagggtccagtggaaagcctcacagagacctgggagaaggtgctgtctcaggctggcctggagaatccactrcctccacaagcgtgccctgcttggcgaccggccgcctaggaggaggccctggggtttctccagagctcctcacaagctgagttcagggtggaaatccctg

SEQ ID NO: 381478 - DNA, 201 bp, Homo sapiens
ttaattgtaatatccagggtgaccattaagactaactcaaaactcataataaaggaaacaaaaagggaattgaaatgctacattagaaaatttttacttamgacaaaaaagtcagtagggcagcaatagaaaaacgaagaaataagacacacaaaacacacatagcaaaatgataaaagtaaattttaccttatcagtaat

SEQ ID NO: 381479 - DNA, 201 bp, Homo sapiens
agagcatagttctgtgtctcaagaagctaggaatctagtggggacaaaagaatgacagtacttgtaacgtgttcaaaaatgggcttttactagacagggtragtgtccatttgatattttgtttttgttttgtgtgtttcttttgtggggagaaggggatggttgtggggtccagcaaagaggagaagtagggaaaattta

SEQ ID NO: 381480 - DNA, 201 bp, Homo sapiens
tctctactcctggggtcattgaataacaagaacaccaataataccaacaatcattcatcagatttctaccacgtgccaagtataacatcagcctttcaaartaggtagagattgttctccccacttatagatgggattacaaatgctaagaaagatcaaataacttgtcaatgtacctacagtccatggcaggaatttcag

SEQ ID NO: 381481 - DNA, 201 bp, Homo sapiens; identical to SEQ ID NO: 83073

SEQ ID NO: 381482 - DNA, 201 bp, Homo sapiens
tggtggtgcacacctgtaatcccagctatagggaggctgaggcaggagaatcacttgaacctgggaggcggaacttgtagtgagctgagatcgcgccactrcactccagcctgagcaacagagcaaaactccatctaaaaaaaaaaaaagtttatctaacttccctgtggttgtgaatttatcaaggaagtctgaagacat

SEQ ID NO: 381483 - DNA, 201 bp, Homo sapiens
tggaaccagaagtattttgaaattttaattttttttgaattttggaatatatgccctacatttatgggtcgagatcccaaatctgaagatcaaaaattcaratgttccaatgaacattttctttgagtgtcatgttgatgataaaaaaatggagtttttaatttttggatttgtgatgcccaacctgtatcatgtaaacag

SEQ ID NO: 381484 - DNA, 201 bp, Homo sapiens
tgaacttggctgggaaccaggatggtcccaagaagagatgaggagtcagcagaccattgcaggcacacagcagaggggcaggtgcacacgaagtcaggtarcaagaataagaatgtaggtgcttgtgaaacctcagcacatcagtgtgatggagccaaaaacgggcagagaactggatggggcacgttaggaatgtggaca

SEQ ID NO: 381485 - DNA, 201 bp, Homo sapiens
agtgagctgagatcgtaccattgcactccagctctgggcgacagagcaagactccatctcaggggaaaaaaaaaaaattctgggcgtggggtctactcacrgctggtgtgttggaaatagtccataacctcccgcaatgcactccttacctggtgggggtgaccaggtgctccccatgtcccacaccacccctctgaaaat

SEQ ID NO: 381486 - DNA, 201 bp, Homo sapiens
gtgctgtctcaggctggcctggagaatccactgcctccacaagcgtgccctgcttggcgaccggccgcctaggaggaggccctggggtttctccagagctyctcacaagctgagttcagggtggaaatccctgctacagcatcctaatcatccagattcttgaacactcattcaacccaggtagtccaatctgcaaaggga

SEQ ID NO: 381487 - DNA, 201 bp, Homo sapiens
ttattattgggatgcaaggatactttaccttaagcaaatgaacaaatgtgatatatcatattgaaataatgttaaaaaaaaaactctctcaaaaaattatrtgatcatctacgatacggaaaaatttgtgatgaaattcaacatcattcttggataaaaaaaactctcaaaaaattaggtatagaaagaatatacctcaac

SEQ ID NO: 381488 - DNA, 201 bp, Homo sapiens
gtattccatggtgtatatgtgccaaattttcttaatccagtctatcattgttggacatttgggttggttccaagtctttgctattgtgaatagtgccacartaaacatccgtgtgaatgtgtctttagagcagcatgatttataatcataagttgtttttaaatgaacaattaggaaaaataaaaacagtagcaagaacag

SEQ ID NO: 381489 - DNA, 201 bp, Homo sapiens
caatcatatcagattagggcccaccctcagcctcattttaacttcatcacctctttacctaccctgtctcctaatacagtcacattctgaggttctggggkttagggcttcaacatataaacttgggggacacagtgtagcccataacaccccccattgagctctcccccttctcagttcagtataaatgcagggtggggt

SEQ ID NO: 381490 - DNA, 201 bp, Homo sapiens
ttctctgccctaaaaaaatcccctgtgttgcatctattcaaccctctcttctcctcaaactggtggcacccacttatctgtttactttctctatagttttrtcttttccagcatgccatataaatggaataataaagaaagtagccttttcaaagactggcttctttcacttaacaacatgcacttaacacttatctgcct

SEQ ID NO: 381491 - DNA, 201 bp, Homo sapiens
ctagaataattcatacagtaatggagcataattggagacatgaggatgaatttgtgtttattttagtatacagatgaaaacatttagaaatacttgatgawatatatgtaagtgggtcagtatacatatattttcttgctctgataacgagaagacctagaagcaatgacatcccagtagcagtgagcacactcagtgacc

SEQ ID NO: 381492 - DNA, 201 bp, Homo sapiens
tgcctgtgttttatcctaaaagcttgctgtataaaggatactttctggagggcaggagcggagatccaccatcttgcagctgcctgagacatggcttctgyttgtaagtctctattaagggtttctttctgagaaactggatttgtcagcttctttcttcagcttctcagttcccttagccttgtggggatatgtgtgcat

SEQ ID NO: 381493 - DNA, 201 bp, Homo sapiens
atgagacatttttaaggatttgcccaaatgcatggctgtgccattcttgccactgtgccctttgattagttcgtactcctccaccccaggtgggactctcyccttctatgagttattaagaagaatgaagcattcaaggtgttttgaagcaaactttctgtgttattactgtctctgacgagcagcattaacacagaaagc

SEQ ID NO: 381494 - DNA, 201 bp, Homo sapiens
gacaggcattggtgagcacccagagcctctgggcctcccccagtcactctgcagggagggaacccaatatgccccattgagctctcttcttggaagacccygcgaatctgccaaagcacgcgctctcctgcaggcaggaaacctacagagctgccgtgggggcacatcacatctgcccacccagggcaggtaaggcagcaa

SEQ ID NO: 381495 - DNA, 201 bp, Homo sapiens
taggagggaagctggaatgttccccaagccagtgctgaagcccagaaccaagaggaagaagagaaaaggaggccagatcatgcagtagcagcagtttctaygtcttcaggcagtgcagaaccactgagaacagtgagaaaaattgatagaccatctacttattgactttttgcaggtgagaatttatgccctcatttgcca

SEQ ID NO: 381496 - DNA, 201 bp, Homo sapiens
tttaaggagaggacaagcagggtccagtggaaagcctcacagagacctgggagaaggtgctgtctcaggctggcctggagaatccactgcctccacaagcrtgccctgcttggcgaccggccgcctaggaggaggccctggggtttctccagagctcctcacaagctgagttcagggtggaaatccctgctacagcatcct

SEQ ID NO: 381497 - DNA, 201 bp, Homo sapiens
ttttaaggatttgcccaaatgcatggctgtgccattcttgccactgtgccctttgattagttcgtactcctccaccccaggtgggactctccccttctatkagttattaagaagaatgaagcattcaaggtgttttgaagcaaactttctgtgttattactgtctctgacgagcagcattaacacagaaagcttccttcca

SEQ ID NO: 381498 - DNA, 201 bp, Homo sapiens
caaccagaggagcagtctaccagttattttctatgcatttgtgaaagttacagacaccaggatgaaatcactcttgtcagacagacccagacaaaacaggrcaaactagacatgaaggagggtgctcatgcttgcctgtataagaacagtttccaaggactttctcaaaccccacaagaaaacccttcacatctttcatgc

SEQ ID NO: 381499 - DNA, 201 bp, Homo sapiens
tctcctgcctagtgggaaaaaaactcactgtttccctgagacaactgggacagggtcacagcagtgcctgggccctccagctgagactgcagtcgacaagygtgagtttaaggagaggacaagcagggtccagtggaaagcctcacagagacctgggagaaggtgctgtctcaggctggcctggagaatccactgcctcca

SEQ ID NO: 381500 - DNA, 201 bp, Homo sapiens
catgtcacagggtgtggtggcgattccagggtcaaacgatggattgtatgtgacgaccttggagattattccagttgtaggcacttgactgttcagctatmggaagctttggtctcactgtcttctatctcactgtctcttccttgcttatgtccccactcccactcccactggcacaggctatggagaaggggacaggca

SEQ ID NO: 381501 - DNA, 201 bp, Homo sapiens
aaagttacagacaccaggatgaaatcactcttgtcagacagacccagacaaaacagggcaaactagacatgaaggagggtgctcatgcttgcctgtataaraacagtttccaaggactttctcaaaccccacaagaaaacccttcacatctttcatgcatctcccactctgcatggcttgcacatttcacgtgcatgcgta

SEQ ID NO: 381502 - DNA, 201 bp, Homo sapiens
aggaacccacaagacaatggaaaaagttgtcaatggccaaaggtggaacaatctgagcaacaaaataaataacatagtattggactatgacccaacatacraaataaatatctaagtatccatactgatataaataaatgattgaataaataaatgaataaatgtggaacaacaggcaaatctcttactcagaaaaattcc

SEQ ID NO: 381503 - DNA, 201 bp, Homo sapiens
tttaaggagtggaattatcaatttcactaaaagaacacattttactgccaaaataccctgaggtccagagccaagccccagctcgggacctacggagttgrgctggtgcctgggcctccctgtggactgccctttctaacatccaggaggtgctctgtgaaagcggccaccatgttggacttcaccctggaaggaaggcca

SEQ ID NO: 381504 - DNA, 201 bp, Homo sapiens
gcaagactccatctcaggggaaaaaaaaaaaattctgggcgtggggtctactcacggctggtgtgttggaaatagtccataacctcccgcaatgcactccytacctggtgggggtgaccaggtgctccccatgtcccacaccacccctctgaaaatgcaggagagctaagcaggggagatgttaggacccctccttaccag

SEQ ID NO: 381505 - DNA, 201 bp, Homo sapiens
agagctgtggaccccctcaccacacacacaaggaagaaaaggaatctctttcctcactacatccaccccgggtgcctgccacctagccctgtggctcaggkttccacaaaagtgggagccactccaaacagctgccaacagctccagacaactggaaccatatcccggccatgacttggttggggcgggggagagttgcca

SEQ ID NO: 381506 - DNA, 201 bp, Homo sapiens
aacataaaataaaaataaaggaaggttatcatccctgtacacattgcatcacctgggaggttttgcaatattgttttaaatatatataacataggccaggygtagtggctcacgcctgtaatcccagcactttggaaggccaagatgagtggatcacttgaggtcaggagttcaagaccagcctggtcaacatggtgaaac

SEQ ID NO: 381507 - DNA, 201 bp, Homo sapiens
cccagtgcagggttggcccatggagacagcaacaccaggaccaccatgaaattaccacgtcctggaggatgcctttgcctgaagagtctgctgttgcgtgrtcgcagcatctgcccaggccgacggagacacactgggcctctctgtccccaaacctgaacttgcccttctagggttctgtcctctaaggaaggagtgctc

SEQ ID NO: 381508 - DNA, 201 bp, Homo sapiens
caattccagctgcacattagaatcatttggcgaacttgggaagctcagactccctgatgccaatccatcacatcagggtttctaggagtggggctagctcrgtatttttaaggccaagtgattctaaagggcagccagggttgggctaatgggttttaattgagaagtggcgccatttgatttgtagctaggcagagtcac

SEQ ID NO: 381509 - DNA, 201 bp, Homo sapiens
tctaaggaaggagtgctctcaggtctagcacactcaaggacagacttacccaggctgtcattgttctgggtgcaaaaggacaaatgtgcttctcacctcgycttggttacatctttgcatgtcaggccacagcagtgacctccagggaacaatttcctgcggagtaacttgttactgagtgctgaggaggccaacattcct

SEQ ID NO: 381510 - DNA, 201 bp, Homo sapiens
aatctgtcaaaggtcaagagtctggtaaggaatgaggccagtactgaagccaaagtgtgctgatttttaagtcgctgatacctctagccacgcgccacttkgtgtaagcgctatctcttgaataaatcacattttcacaaaatcaagatgtagcttattgtgcaacttcccagcactaggcatgatgctagaggctggtta

SEQ ID NO: 381511 - DNA, 201 bp, Homo sapiens
aacctttcttttaaatggacatgagtgtccctttgtgtgtttaatggcacatgcatgtgctccactgatctacatggccctggaagaccacagcagcatcmccagaacaaagtcgcactacagcgtgttcttcctgagtgtgtgcaggtgacagcagtgtgaaaatcagcctaagagtcctgggacttctgccccttgtca

SEQ ID NO: 381512 - DNA, 201 bp, Homo sapiens
cctgagaaatagcttcaactctgcttaagccattctcaaacacaatctgctccttcctcctccgcttcctccatatgtatctctattatagcacactgtcyctcagaccatgctcctggcattcagtgtcttgagggctctgatttattcactttggattcccacaccagctctgagagagtggctgctgactgtgaaggc

SEQ ID NO: 381513 - DNA, 201 bp, Homo sapiens
ccagggagaggagatcgcatcaagctacagtgtgggcttatgaaaagtcccttttctccccgggcttgacaggaaggcagagttattgctaaatcagaccrtagatcaggaggctgacattcccagtgtcagcatcctgaggaataattcctactctgtagccaaagaaatgattctgttagccttttcttggagatgaga

SEQ ID NO: 381514 - DNA, 201 bp, Homo sapiens
gtacaaatgcagttatacaagagagtgaactccttcccctctctgtccaaaatcacttgaaaattaagaaaaataatttaaaataaggaaaagttcctcarggggccttatttagatcacaatactacatagaaaataagggagttcttagcaaaccaaaattttttagattcctggaagatgctaaatagagaggctcat

SEQ ID NO: 381515 - DNA, 201 bp, Homo sapiens
ctcattcaacccaggtagtccaatctgcaaagggacagtttatgagaaaggcctttcttcatttgagcccataactgctgtacactgctatgtgtgtgtgygtgtgaacctgcaggtaataggcagcaccgtgtgaagtatgtatacccctgctcagccgttccacagacacctatccttcagaaatacccacagcagtgt

SEQ ID NO: 381516 - DNA, 201 bp, Homo sapiens
atgcaattattgcattaggcaggatgcactgggactgtccagatgaccatgtcacagggtgtggtggcgattccagggtcaaacgatggattgtatgtgaygaccttggagattattccagttgtaggcacttgactgttcagctataggaagctttggtctcactgtcttctatctcactgtctcttccttgcttatgtc

SEQ ID NO: 381517 - DNA, 201 bp, Homo sapiens
cacccagtcacaggagtctgtggccattcttggaaggaatgacagtcaagtcagggcccaaaaaatgagcagaagtgaacttggctgggaaccaggatggkcccaagaagagatgaggagtcagcagaccattgcaggcacacagcagaggggcaggtgcacacgaagtcaggtagcaagaataagaatgtaggtgcttgt

SEQ ID NO: 381518 - DNA, 201 bp, Homo sapiens
tcctcaagggggacttttgcctgcgggggtcaaagacagataagttttggtggggacccagaggttcccgctccagtttgctgcgtgaccttggcaagtgyctttgccctccgtgggctgtagcttccctgtctgaatatgagtgcagtggctgaggtttccctaaagcccttccactgtatatattccagtaatctgtga

SEQ ID NO: 381519 - DNA, 201 bp, Homo sapiens
tttttattatttgtggagacagggtttcaccatgttgcccagctggtcttgaactcctgccctcaagtgatcctcccacttcagcctcccaaagtgctggwattacaggcgtcagccaccacatccagccttacaaccttaattttagaatattttcattatcttaaaaaggaaccctatacccattagtagtcacttcct

SEQ ID NO: 381520 - DNA, 201 bp, Homo sapiens; identical to SEQ ID NO: 83077

SEQ ID NO: 381521 - DNA, 201 bp, Homo sapiens
ctggctatcccagagagctgtaaccaaggatccaaagtcagtaggacgagttctgcagcattcacgcgcctctgtctgcccggcacaggaggcctcgcccyggaagcacacgttgccatctcttcagtttttccacaacctccctggagtgggtcgccatagcaatggaagggctgctccaggcctgtggcccaggccttg

SEQ ID NO: 381522 - DNA, 201 bp, Homo sapiens
ggcagcagagccaccacagtgtccgagatcatagagaagaaggatgaggccgtgtaccaggccatcgaagaggggatccggagggtcaacatgaacgcggyggcccggccctaccacatccagaagtgggccattctcgagagagacttctccatttcgggtggagagttgggtaggtttttccttttcaccattgcaagg

SEQ ID NO: 381523 - DNA, 201 bp, Homo sapiens
aaatattctttttgtactttattttaatggctgcatgggaatccatgatacggctctaccataatgaactgaataagagaccagtcccctgttggacattygggttgtttccaatggctttgctaatagacacgttgctgtatggatatccatctccacattctcgctgtacatgtctctgattgcttcccttgagtaact

SEQ ID NO: 381524 - DNA, 201 bp, Homo sapiens
agcagccagtgagggggtctgtgggtctggctggcagaagccacattcagcacagggcacatccagatctcatggcttcattctggaatgactcaagtccrtgctgcctgcactgtaggaaaaactgtggcacgtggaaattccttctgtcccacataagccaccgtgatgatcctttacatgttactggcactttcccgt

SEQ ID NO: 381525 - DNA, 201 bp, Homo sapiens
gagaactattatctgtcactgtccctttcactcagataaaacacatggaagcaatgcattttacccagcacaagtaaatcaagattcctgttacctttccrtccttaattgtagcaaaacacgcagcctcaattcttgcagcatggtcaaaaagtcccatgtggcgcagcatcatcacggcactgagcaggagggctgtgg

SEQ ID NO: 381526 - DNA, 201 bp, Homo sapiens
cagggacagcttggtcccgggagcctcccacgttcatcctcccaggattccaaggcatcttgctgacttgctgagccacctggggcaggtcccaccaactsgcttaggctcagacaccccagactttataatcccttctctggggtgctcaaagagcaggtgttggcaccaggggcctgggccacagcaaaaccgtggagc

SEQ ID NO: 381527 - DNA, 201 bp, Homo sapiens
ctggggctggcccccagggtggccacagttgtgagcaccgccagggctggcttgtggacgctgctgggatccatctacttgtcctccagatcacgtggacrgcacggtacggcagccaggccggtgacatccggccggcagaagtccagcaggaggtggtagtcagctacctgcccctcagccatattgccgcccagatct

SEQ ID NO: 381528 - DNA, 201 bp, Homo sapiens
gccaggaggccttgtcacccttcccaagggtgacaaggggtcctccagagctagggctcttgtccctgtcatgaaacagctggactaataggagactgacmttgcagacctatgaaccttccttcccttcccatgcctcattccctccttccaggaaggatatgagatgacctgacacaaaagcacaggctccatggaaga

SEQ ID NO: 381529 - DNA, 201 bp, Homo sapiens
tgtctttatagcagtatgatttatagtcctttgggtatatacccagtaatgggatggctgggtcaaatggtatttctagttctagatccctgaggaatcgscacactgacttccacaagggttgaactagtttacagtcccaccaacagtgtaaaagtgttcctatttctccacgtcctctccagcacctgctgtttcctg

SEQ ID NO: 381530 - DNA, 201 bp, Homo sapiens
tcaatttccctaatttctctgtatctcagtttcctcatctgtaaagtgagggtggtaatagtacctcattgggctgttacgaagattgcatgtgtaaggtrcataaaacattgtctgagacgcagtgctggttatgtgttagttacaagctagtactgtgattattcctgtctggttttcttttgcatccttgggcctggg

SEQ ID NO: 381531 - DNA, 201 bp, Homo sapiens
agtggtttgtacttctccttgaagaggtccttcacgtcccttgtaagttgaattcctaggtattttattctctttgaagcaattgtgaatgggagttcackcatgatttgactctctgtttgtctgttattggggtataagaatgcttgtgatttttgtacattgattttgtatcctgagactttgctgaagttgcttatc

SEQ ID NO: 381532 - DNA, 201 bp, Homo sapiens
tgtctctgccaggctttggtatcaggatgatgctggcctcataaaatgagttagggaggattccctctttttctgttgattggaatagtttcagaaggaayggtatcagctcctccttgtacctctgatagaattcggctgtgaatccatctggtcctggactctttttggttggtaagctattgattattgccacaattt

SEQ ID NO: 381533 - DNA, 201 bp, Homo sapiens
cacttgcccaagtatatattgtgactctgctaaccaaaggaccttgtcaatttccctaatttctctgtatctcagtttcctcatctgtaaagtgagggtgstaatagtacctcattgggctgttacgaagattgcatgtgtaaggtacataaaacattgtctgagacgcagtgctggttatgtgttagttacaagctagta

SEQ ID NO: 381534 - DNA, 201 bp, Homo sapiens
agaaattgtgagatagtgtttgttttttttaagccactacattttgggatatttgttacataataatagattcctaatatactagatcctttgtacttctrtgtaaaatgtagaatcatcttgtcagttgattaaaaaaagactgtttgaaatttgactgggaataaattgactctatatttcaaattgggtgaatcatct

SEQ ID NO: 381535 - DNA, 201 bp, Homo sapiens
tataatcccagcactttgggaggccaaggcagaaggatctcttgagcccaggagttcaagatcagcctgggcaacatagtgagacccccctgtctctacawaaaaaaaaaggaaaaatttaattagcgacatgtggtggtgtgaacatgtagtcccagctactcgggaggctgaggcaggatcatgggagcccaggggttt

SEQ ID NO: 381536 - DNA, 201 bp, Homo sapiens
cacctgggctggagtgaagttgcataaacctggctcactggctgggctcaagtgatcttcctgcctcagcctcccaagtagctgtgaccgcaggcacctgycaccatgtctggctaatttttttattatttgtggagacagggtttcaccatgttgcccagctggtcttgaactcctgccctcaagtgatcctcccacttc

SEQ ID NO: 381537 - DNA, 201 bp, Homo sapiens
aggttcaatattcaaaccaaccaactggaacagacaactggaatggccgagccagggtgttctcactgaataccaccataccacccttttaatgtgtgtatgtgtgtgtgtgtgtgtgtgtgtgtgatttcttctgtgaaccattctccctctcccaccagcgacctgaagcccttcacaaccagactggcagattacctg

SEQ ID NO: 381538 - DNA, 201 bp, Homo sapiens
catctttgttcatcgatcccatcatctctaaatcttcgaggcagggactgtgtccatttttgtcactttataccccctcgtcccatgcaacatccggcacrgaggaggtgctaaatcaatactcatagaaggaaggaggatcctcagggaactgtcagtcactggggcaggaagaaatcaattccaactttgggaatgagg

SEQ ID NO: 381539 - DNA, 201 bp, Homo sapiens
ggggcaaggcttggagaggtctgaggagtgattggacggggcctagtggcccttgactcacgccactacctgaaggctcagggctccctcatggccagtgscaggggcatccatcccagaaggtcttaacctctgccatacagaggtgccaagcacctctctggcaccctcccctgtcccgcctgcatttcctgcaggctg

SEQ ID NO: 381540 - DNA, 201 bp, Homo sapiens
gattacaggcgtgagccactgcgcccagctgatatgtgctagaactttctaatctgaacatgacatttaacttggccttgactatgggactgttttctccgaaaatcacaatggaactaccaggccaacaccaaggccctgctagtgttcagcctggagtcacgtggttctaggggtgagagtactgtgatcttccggaaa

SEQ ID NO: 381541 - DNA, 201 bp, Homo sapiens
gggcaaggcttggagaggtctgaggagtgattggacggggcctagtggcccttgactcacgccactacctgaaggctcagggctccctcatggccagtggsaggggcatccatcccagaaggtcttaacctctgccatacagaggtgccaagcacctctctggcaccctcccctgtcccgcctgcatttcctgcaggctgc

SEQ ID NO: 381542 - DNA, 201 bp, Homo sapiens
gtttttaggatatggggaactagttaggcaacaccttccatggagaacattctccagccattggggagtcagttctgctttgcccgctgagcagagagagrtgggaactaccagaagtgatggggaggctggtgaatggtagccagaagtctctgcaaagcaggagtcctggagattttatttgctcatcagttggctgtg

SEQ ID NO: 381543 - DNA, 201 bp, Homo sapiens
gccttgcctccccagaattaatcatcacagctggtggggagaatgtgccccctgtgcccatcgaggaggccgtgaagatggagctgcccatcatcagcaaygccatgctcattggggaccagaggaagttcctgtccatgctgctcaccttgaaggtgtgtctggggggctccagctcagaaggagcagccagtgaggggg

SEQ ID NO: 381544 - DNA, 201 bp, Homo sapiens
gctgagtcagacctcctcctctaggcggtctcccagcctaccccagtctaccccagtctaccctggcctgccagcctcaaggccgaggacccaaggcattrtcagcaccagacgggctgcgagctctgcccagggcaggacaagtgtccccaggctggcatgatccaagctgtggtctcccccaccccacagaggaggcgc

SEQ ID NO: 381545 - DNA, 201 bp, Homo sapiens
ttcaagactagcctgggaaacatagcaagaccttgtctctccaaaaaaaatttaaaaattagccaggcatggtgatacatgcctgtagccccagccactcaggaggctgaggtgggaggatcactggagcctgggagtttgaggctgcagcgagctacggtcgcaccactgcgttccagcctaagcaacagaatgagatcc

SEQ ID NO: 381546 - DNA, 201 bp, Homo sapiens
tcaagactagcctgggaaacatagcaagaccttgtctctccaaaaaaaatttaaaaattagccaggcatggtgatacatgcctgtagccccagccactcaggaggctgaggtgggaggatcactggagcctgggagtttgaggctgcagcgagctacggtcgcaccactgcgttccagcctaagcaacagaatgagatcct

SEQ ID NO: 381547 - DNA, 201 bp, Homo sapiens
cggaggctcccagatctctttgaggtcccaaaaagtttgaggtcctgagctctggtccccaggctgagctctgagctctccagatggctgtactcccaggragcagctgtgcgaagtcaggccaccgagacactggaatctgaccttcacacaaaggcagccttgtactgggccctggagacacattactttttactttct

SEQ ID NO: 381548 - DNA, 201 bp, Homo sapiens
caagactagcctgggaaacatagcaagaccttgtctctccaaaaaaaatttaaaaattagccaggcatggtgatacatgcctgtagccccagccactcaggaggctgaggtgggaggatcactggagcctgggagtttgaggctgcagcgagctacggtcgcaccactgcgttccagcctaagcaacagaatgagatcctg

SEQ ID NO: 381549 - DNA, 201 bp, Homo sapiens
gggagtcccagagagggtcccttcagacagggctggagtagaggcatctgagcagccaggggccagatgagggacagggagaaggccctgagtttaatggygaggcagggcctgggtgggcaactgtaagggaggtgacaaggccatcacgatctagtgtatcaggactttgggaaactggcagggacggccaaggtgggc

SEQ ID NO: 381550 - DNA, 201 bp, Homo sapiens
ctcctggtaaagcaacatttaaactgagacatgaaacaggagtaggagttggctaggggaagaactttctaggaaatgggcacagcatgtgcaaaggcccygaggtgggatggagcttgtagtgttcaagagactaaaagccagtgggaacagggcagatttgggactatcatgtaaaagccacaggaaatcaaggtgctg

SEQ ID NO: 381551 - DNA, 201 bp, Homo sapiens
gtaacattgcggcccaaagtggaggcagcttctacctggctatcccagagagctgtaaccaaggatccaaagtcagtaggacgagttctgcagcattcacrcgcctctgtctgcccggcacaggaggcctcgccctggaagcacacgttgccatctcttcagtttttccacaacctccctggagtgggtcgccatagcaat

SEQ ID NO: 381552 - DNA, 201 bp, Homo sapiens
aggtggagattgcagtgagtcaagatcgtgccactgcactccagcctgggccacgagagcaaaagtccttctcaaaaaaaaaaaaaagaagaaaaagaaakaaatgtgcccagagcaggggtagacaggcatgaggacagccagggccaggggagtctttgaaaacaaaatcaaggtctgcaggatctcagggtcttctgc

SEQ ID NO: 381553 - DNA, 201 bp, Homo sapiens
cccgtactttgggaggccgaggtgggcagatcacctgaggtcaggagttcgagaccagcctgacccacatggagaaaccccgtctctactaaaaaaatacaaaaaaaaaaaaattagccaggcgtggtggcgcatgcctataatcccagctacttgagaggctgaggcaggagaactgcttgaatctgggaggcagaggtt

SEQ ID NO: 381554 - DNA, 201 bp, Homo sapiens
tagtagagacagggtttcaccatgttgctcaggctggtctttaactcccggcctcaagtgatccgcccactttggcctcccaaagtgctaggattacaggygtaagccaccatgcgggccctctctctgtttttcttaagtagctttattgagctataatttatatgccatgaaatttacccattttaagtgcacaatttg

SEQ ID NO: 381555 - DNA, 201 bp, Homo sapiens
ataaaacaagcacttggaaaaagttctttgaaaacagacctagggacatccacctgcatcttttgcacagattttgttaagaaaaggccagatctaaaaaygtactgtcaagaaacaagcaaaccaatgcatacatacgtaggtattctaaacagaggttcatgtggtgtccatttagagtgactgatgtaaatgccagtt

SEQ ID NO: 381556 - DNA, 201 bp, Homo sapiens
aagtcttctttatcacatctggtgcctgaaatagactcattaagctaggatttggaatagctgggcccttcgtgtctctatttttttaatttattttcatytttggttttgtggtacatgtgcaggatgtgcaggtttgttacataggtaaatgtgtgccatggtggtttgctgtacctatcaaaccatcacctaggtatt

SEQ ID NO: 381557 - DNA, 201 bp, Homo sapiens
ctgggccccgtactgagcttttatttgctgagcccctaccatgtgccaagcacttgttactcacttttcatttgtgatcacattcagggtgggctggaagsccagtgtgctgggctgaggggccggacagactcgctgggaaggccctgggaggggcagtgagggctgttgagtgaccaaccccttctcctccaaggggat

SEQ ID NO: 381558 - DNA, 201 bp, Homo sapiens
gtgccaagcacttgttactcacttttcatttgtgatcacattcagggtgggctggaagcccagtgtgctgggctgaggggccggacagactcgctgggaargccctgggaggggcagtgagggctgttgagtgaccaaccccttctcctccaaggggattctctgactgaggggaccctgggagggtggagcctgcaggtc

SEQ ID NO: 381559 - DNA, 201 bp, Homo sapiens
ccttgcgtgcaggtgtgtgtgggtgcccgttggagcatgtgtgtgccaccggcatgcctggctggtaagaggggacccctgggccccagatgcccctgacycaacaggcctgcctcttctggtgtgaacaggggagcctggtgaacacgctgcgggaggtggagcccacatcacacatgggggtgccccgggtatgggaga

SEQ ID NO: 381560 - DNA, 201 bp, Homo sapiens
tatgtgccacccttgcgtgcaggtgtgtgtgggtgcccgttggagcatgtgtgtgccaccggcatgcctggctggtaagaggggacccctgggccccagaygcccctgactcaacaggcctgcctcttctggtgtgaacaggggagcctggtgaacacgctgcgggaggtggagcccacatcacacatgggggtgccccgg

SEQ ID NO: 381561 - DNA, 201 bp, Homo sapiens
tagtaaatggcagagctggaaatcagacccctagagaaacaaggcaagtctttccagaagattcaggagcgtaagtattatgtatttttatatgcaaacayggatatgatggggaatagaatgcaaattggatataaaatttaaaataagacaaacttcccacagagacagaaatagttggggatgcctctgtggaagaat

SEQ ID NO: 381562 - DNA, 201 bp, Homo sapiens
gtggcaggtgcctgtagtcccagctactagggaggctgaggcaggagaatggcgtgaacccaggaggtggagcttgcagtgagccgagatcacgccactgyactccagcctgggcaacagcgtggcccagtctcaaaaaaaaaaaaaaaaaaaaaaaagaaacctgatgccattacataaggtcgagtcagagtggttcgc

SEQ ID NO: 381563 - DNA, 201 bp, Homo sapiens; identical to SEQ ID NO: 83084

SEQ ID NO: 381564 - DNA, 201 bp, Homo sapiens
tcaagaccagcctagccaccatggccaaaaccccatctctactaaaaatacaaaaattagccaagtacggtggtgcacacctataatcccagctactcagkaggctgaggcaggagaatcacttaaacctgggaggtggagtttgaaataagccaaaatcgggccactgcactccagcctgggcaacagagtgagactttg

SEQ ID NO: 381565 - DNA, 201 bp, Homo sapiens
gagcattggggtgcaaagtgcattgatgggggtctatgggggggctcccagcagcttctcaaaaggggtcctaacgcatcagaggctcaggaccagtattygagtcaaactgttagggtgtcctgaagtggcaataggcaagaattgctgagatgtaattgaaatttggtgaagggtagaattcttttgaagttaagagtg

SEQ ID NO: 381566 - DNA, 201 bp, Homo sapiens
gcacagtatttgcagggtgagtggcgggggcagggacggggtctccagggggttggcagtgggcagagggtaggggagggtccttatctctttttagcagyccccacccactccccaccatcctgcctcctccctggggccttctggtggacctgcatctggcgccctctctgcaggggaggaggtgctcaggtgccttgg

SEQ ID NO: 381567 - DNA, 201 bp, Homo sapiens
ccctgggcataggtcaggtgcacagagggtcaagggcccctggaagaaagctggactgacttcctcacccaagggcagattcaggatctcctctgggcccyggtgtcctggcacctcccctcctccctggggtctgtgggctcagagagcaggaaggccaggcgagatgctcagaggagcacatcgaaatatgtccagagg

SEQ ID NO: 381568 - DNA, 201 bp, Homo sapiens
aagcccattgtggaggaagggcttggaaggaacctcagaagaggacagtccatcctgtgtttgaaaggctgtggatgcccggatggcaagcagggcgctgygctgaccaaaggcatgattgtgaagatgttacgggtggccatgagactggtcaggttggggaccggctaactcctgggcctagagaggctgacgtggcca

SEQ ID NO: 381569 - DNA, 201 bp, Homo sapiens
gaccccagcatgctggacagcagagagaccccacaggagagccggcaggacatgattgtgaggaccacccaagaaaaattgaaaaccaggtaagtcattgkttgggtttctgcacactgcacctgtgggccgagttctagactttgctctgctgtgtgaacttgggcaagctgcttctctctctgagcctcagtttcttca

SEQ ID NO: 381570 - DNA, 201 bp, Homo sapiens
taattttctagtcagttgctgttagtataaatataattgattttttaatattgaccatatatcctgcaaccttactaaatttatttattaattccaacacttttttttgtagatcccctaagacttttatgttcaaaattttggtagctattaataaaaagttttacttcttcctttccagtcattttcccttttaattct

SEQ ID NO: 381571 - DNA, 201 bp, Homo sapiens
tctaccttctgctgtcctgccaccacctggcattggcctgacaaccagaggccagaggccgggagcccaagggaggctcacacagggcagctctggggacrgaaccaggggagagagtagagagggaatctggacataactggcatattgcttgtatttatttttcaaaatgaaatgaaccatttaaaaagttcagccaaa

SEQ ID NO: 381572 - DNA, 201 bp, Homo sapiens
actatgcgcatattgtaaacttccttttttcacttaataatatatcctagaaaccactcactctctgcacatagaattctctccctctctcctctgccctstgctcctctccctctttctcctacagtcacatagcactactccattgtgtggctggatcatggtttgttcaaccaagccccagcttgtttggtggttttc

SEQ ID NO: 381573 - DNA, 201 bp, Homo sapiens
aattttctagtcagttgctgttagtataaatataattgattttttaatattgaccatatatcctgcaaccttactaaatttatttattaattccaacacttttttttgtagatcccctaagacttttatgttcaaaattttggtagctattaataaaaagttttacttcttcctttccagtcattttcccttttaattctt

SEQ ID NO: 381574 - DNA, 201 bp, Homo sapiens
atagcatactatgcgcatattgtaaacttccttttttcacttaataatatatcctagaaaccactcactctctgcacatagaattctctccctctctcctstgccctctgctcctctccctctttctcctacagtcacatagcactactccattgtgtggctggatcatggtttgttcaaccaagccccagcttgtttggt

SEQ ID NO: 381575 - DNA, 201 bp, Homo sapiens
cagttgctgttagtataaatataattgattttttaatattgaccatatatcctgcaaccttactaaatttatttattaattccaacacttttttttgtagmtcccctaagacttttatgttcaaaattttggtagctattaataaaaagttttacttcttcctttccagtcattttcccttttaattcttgccttattgca

SEQ ID NO: 381576 - DNA, 201 bp, Homo sapiens
aagaagtgactgctagtcacagaggagaggattaaaaactaaaaaatggccgagcatggtgacttgcgcctataatcccagtactttaggaggccaaggckagaggatcgcttgagcccaggagttggagaccaggcctggcaacatagcaagaccctgtctctacaaaaaatacaaaaattagccaggttttgtggtgct

SEQ ID NO: 381577 - DNA, 201 bp, Homo sapiens
gcaaggcttggagaggtctgaggagtgattggacggggcctagtggcccttgactcacgccactacctgaaggctcagggctccctcatggccagtggcakgggcatccatcccagaaggtcttaacctctgccatacagaggtgccaagcacctctctggcaccctcccctgtcccgcctgcatttcctgcaggctgcca

SEQ ID NO: 381578 - DNA, 201 bp, Homo sapiens
caaatcctcccatcttctatttaaataaaaatgtcattctttcaccttatttttcaaggatatatttactggaaaagaattcttgcttgatcatttacttygtactttaaaatgtactgttacagtatcttttgatcttcattgtttcttaggaaaagtcagttatcatttctatcagtttccttttatgtaatatgtcct

SEQ ID NO: 381579 - DNA, 201 bp, Homo sapiens
cggaacctgcagtgccgacaaggagtgaggctgaatgtgagaagcaggtaattggcccggcttcctgggaactgggcagggatggggctagccccaccctractgacagacagacagggctccctggagccagggtcctaccctcagggacaccatgaccagctgcacaggttgcatgctgcacaactccagtggattctg

SEQ ID NO: 381580 - DNA, 201 bp, Homo sapiens
tactgtaggttttcaatgttttgaaatcaggaagtgcaaatccttcaactttgttctttttcaagaatgttttgactattttaggtctcttgaattttttktttgtttgtttgttttttgagacggagtctcactctgttgcccagattctggagtgcagtggtgtgatctcagctcactgcaagctccgcctccaggttc

SEQ ID NO: 381581 - DNA, 201 bp, Homo sapiens
tttccatatgtcattaaatattctttttgtactttattttaatggctgcatgggaatccatgatacggctctaccataatgaactgaataagagaccagtsccctgttggacattcgggttgtttccaatggctttgctaatagacacgttgctgtatggatatccatctccacattctcgctgtacatgtctctgattgc

SEQ ID NO: 381582 - DNA, 201 bp, Homo sapiens
agctattcgggaggctgagacaggagaatttcttgaacccggcaggcagaggttgcagtgagccaagatcgcgccactgcactccagcctaggcaacacarcgatactccgtcaaaaaaaaaaaaaaaaaaaaaaggagagcgatactccgtctcaaaaaaaaaaagggagatgcaatctgaagtcagattgcctcgattt

SEQ ID NO: 381583 - DNA, 201 bp, Homo sapiens
gtctccagcctccatgcaggacctgggggagggggactgagtgggtgagatccctcccagggcagcattcggcagaccgcaagtcaaggttgcagagtgtrtgcagccaggggtagcagccacttcaggatctgggtctggatttgtgctgagaaccactatgaccttttaaagccagtgaggaggttttctgggggccca

SEQ ID NO: 381584 - DNA, 201 bp, Homo sapiens
tgaataaaaaaaaaaaagggaatataatcaatgccactgaattatacacttaaaaacatttcaaatggaaaattttatgttatgtgtattttaccacaatrcaaacatttttttaaaatgtcggtaattaaaaaaaatagaatataacgaagatctgacttggtcttgagggttggtgcaggctctcctggtaaagcaaca

SEQ ID NO: 381585 - DNA, 201 bp, Homo sapiens
cagtgagccaagatcgcgccactgcactccagcctaggcaacacagcgatactccgtcaaaaaaaaaaaaaaaaaaaaaaggagagcgatactccgtctcaaaaaaaaaaagggagatgcaatctgaagtcagattgcctcgatttgaaactcaatcatccccattactatctgtataacctttagcaagttacttcatct

SEQ ID NO: 381586 - DNA, 201 bp, Homo sapiens
accagctatgagggctttggcatatctctttgcggcgggttgtggagggggagacaattcaacccatggcagcaccatataagtgcttttaaatcattatrtcaccccataggtgataccatgtccttcataatgcaccgcctcaagaggcacatgatggcaggtggtactactttcagttatgttgggcttcttcatgac

SEQ ID NO: 381587 - DNA, 201 bp, Homo sapiens
acagttctagcatttaggtttagatcttttatacatttgagttaattttgtgtgtgatatgaggaaagaatctaactttatttatttatttttggcacatrtcccagcattatttgttgaaaagacaaatattttcccattggattgtcttggtagccttcttgaaaatctgttcactttaaatgtgagttgatttctgaa

SEQ ID NO: 381588 - DNA, 201 bp, Homo sapiens
gaccaagtctgtgagccagaaccagcccactgcagagcacaatgcccccacaatgcctccactggcagaagcctcaccccagcttcacccctacccccacycccacccccataaagttcctctggagtctgaggaataggcagtgttctttcttctcatctccctggaagaaaggtagagaattacctatcttgagagctg

SEQ ID NO: 381589 - DNA, 201 bp, Homo sapiens
gaaccaggacgcagagggcattggcgagatctgcctgtggggccgcaccatattcatgggctacctgaacatggaggacaagacttgtgaggccatcgacraggaaggctggctgcacacgggtgatgctggccgcctggacgccgatggcttcctctacatcactgggcgcctcaaaggtgagcaccccaggccaggcac

SEQ ID NO: 381590 - DNA, 201 bp, Homo sapiens
atatgaggaaagaatctaactttatttatttatttttggcacatgtcccagcattatttgttgaaaagacaaatattttcccattggattgtcttggtagscttcttgaaaatctgttcactttaaatgtgagttgatttctgaattcttaattctatttcattcacctatatatctgtccttatgccagtacctcattgt

SEQ ID NO: 381591 - DNA, 201 bp, Homo sapiens
tgagggtggtaatagtacctcattgggctgttacgaagattgcatgtgtaaggtacataaaacattgtctgagacgcagtgctggttatgtgttagttacwagctagtactgtgattattcctgtctggttttcttttgcatccttgggcctggggggcctggcagcacccaactttgcagccttgtccctacctgatgca

SEQ ID NO: 381592 - DNA, 201 bp, Homo sapiens; identical to SEQ ID NO: 83080

SEQ ID NO: 381593 - DNA, 201 bp, Homo sapiens
actctgggagtctcaggagtgtgggaaaaggccggtggctggaggtcatggctgcccaaggtcacccagcctgaacctgtcacaggacttggcgggaggcrtgatagtcctttcccagaggagatgggagatgtggtgccggggtcttccttgaagttcaccgtgagaggcagcacccctgtgggaacagcagacttgggt

SEQ ID NO: 381594 - DNA, 201 bp, Homo sapiens
gcaggttcaatattcaaaccaaccaactggaacagacaactggaatggccgagccagggtgttctcactgaataccaccataccacccttttaatgtgtgratgtgtgtgtgtgtgtgtgtgtgtgtgatttcttctgtgaaccattctccctctcccaccagcgacctgaagcccttcacaaccagactggcagattacc

SEQ ID NO: 381595 - DNA, 201 bp, Homo sapiens
ggccccgtactgagcttttatttgctgagcccctaccatgtgccaagcacttgttactcacttttcatttgtgatcacattcagggtgggctggaagcccsgtgtgctgggctgaggggccggacagactcgctgggaaggccctgggaggggcagtgagggctgttgagtgaccaaccccttctcctccaaggggattct

SEQ ID NO: 381596 - DNA, 201 bp, Homo sapiens
gccagcctatcacagtgctccaagttctaccattaccatttcatttgttccttccttccttcattccctaaaaccctttacttggctctacctttcagctstaagtcccctgtaaaaatacaaaagccctgtgaggggataccttctagcaatcagtgaagaccgagcagttgggaccccggctccccagtgggggcttgg

SEQ ID NO: 381597 - DNA, 201 bp, Homo sapiens
gatttgccaagtgtcaaaagaacttctatggagcggcccccatgatggcagagacacagcacttcttcctgggtctcaacatccgcttgtatgcgggctayggcctcagtgagacctcaggcccccacttcatgtccagtccctacaactaccggctgtacaggtgaggctcgaggctgccacacacatgcacacccatgc

SEQ ID NO: 381598 - DNA, 201 bp, Homo sapiens
ggaagggcattgcaggcagagtcgcagcacaggcaaaggcacagagacggggaaccaaagggaactgggagcagttcaggttggctgtaaggaaaggtgtrtgttgaggctgggaaaggtaagcgagccccttggggagggcctgccttagaagccctggtatagacgtctccctgtggtcaatgagagccatcgggggct

SEQ ID NO: 381599 - DNA, 201 bp, Homo sapiens
gtgtgctgttcctgtgcatgtatcagtcagaattctgtcagctgcagtgggcacagcctgactcgaatgaccaaacaagaagggaaactaggccgggcacrgtggctcacgcctgtaatcccagcactttgggaggccgaggcaggcacatcacgaggtcaggagatcaagaccatcctggctaacacggtgaaaccccat

SEQ ID NO: 381600 - DNA, 201 bp, Homo sapiens
gggttttcagagcctgcagaatcgccacagggggcaccacactggggctggcccccagggtggccacagttgtgagcaccgccagggctggcttgtggacrctgctgggatccatctacttgtcctccagatcacgtggacggcacggtacggcagccaggccggtgacatccggccggcagaagtccagcaggaggtggt

SEQ ID NO: 381601 - DNA, 201 bp, Homo sapiens
gctcccagggaccccaccaagccccttccttcatggctgccatcagggccaggcgtgatggaaaggaatgagggatggggagatttcttcttcaagaaagytgggaagaagagaggccagagatagagagacaggtaggacatcatctgggcccaggccttgggaacttggggctccagcaaagggttgctgagggacagg

SEQ ID NO: 381602 - DNA, 201 bp, Homo sapiens
gtcaccacctacagggagcactcccactgagcagtgctcctgcacagcaacctcatgagcctctggccagggcttgcagctccggtctcatgcatgttgtyggggtcgcagggccaatgtccaaggctcaacagctgtgggcaaccccttctgaccgttctgccttgcatttggcgtaccttgccagtagctaaaacccag

SEQ ID NO: 381603 - DNA, 201 bp, Homo sapiens
tctgtcaccacctacagggagcactcccactgagcagtgctcctgcacagcaacctcatgagcctctggccagggcttgcagctccggtctcatgcatgtkgttggggtcgcagggccaatgtccaaggctcaacagctgtgggcaaccccttctgaccgttctgccttgcatttggcgtaccttgccagtagctaaaacc

SEQ ID NO: 381604 - DNA, 201 bp, Homo sapiens
tgctgcaattcagtttctccctgccctgctgccgccacctgcttctgtgcactccactcactatgctgtgacttccaccaccccattgtctcagctcagcyatcctgatctctgcaagtggcttccaaactctgcaggagagactctaattttctgtcaccacctacagggagcactcccactgagcagtgctcctgcaca

SEQ ID NO: 381605 - DNA, 201 bp, Homo sapiens
gtccatccagggagtaggggatcctgagaagatgagactcagtcccagccctgggatgccctggccagaaggcaggaagaaggcaggcgcacgcgcacacrcacacacacggaactccaggaccccaacatctgtgatttgtgtccaggaggggcgcaggcgaaggggcagagagaaggaggtttctaactggggcgcctg

SEQ ID NO: 381606 - DNA, 201 bp, Homo sapiens
ctgttgaagtttccttccttccatccttcctttctctctttctttctctttctttctttctttctttctttctttctttctttctttctttctttctttctttctctttctttctttctctctttccttctttttcttttcccttcccttctcttcttttttcttttctttctttttcgaagttttgctcttgttgcccag

SEQ ID NO: 381607 - DNA, 201 bp, Homo sapiens
tgttgaagtttccttccttccatccttcctttctctctttctttctctttctttctttctttctttctttctttctttctttctttctttctttctttctttctctttctttctttctctctttccttctttttcttttcccttcccttctcttcttttttcttttctttctttttcgaagttttgctcttgttgcccagg

SEQ ID NO: 381608 - DNA, 201 bp, Homo sapiens
gttgaagtttccttccttccatccttcctttctctctttctttctctttctttctttctttctttctttctttctttctttctttctttctttctttctttctctttctttctttctctctttccttctttttcttttcccttcccttctcttcttttttcttttctttctttttcgaagttttgctcttgttgcccaggc

SEQ ID NO: 381609 - DNA, 201 bp, Homo sapiens; identical to SEQ ID NO: 83075

SEQ ID NO: 381610 - DNA, 201 bp, Homo sapiens
ttgaagtttccttccttccatccttcctttctctctttctttctctttctttctttctttctttctttctttctttctttctttctttctttctttctttctctttctttctttctctctttccttctttttcttttcccttcccttctcttcttttttcttttctttctttttcgaagttttgctcttgttgcccaggct

SEQ ID NO: 381611 - DNA, 201 bp, Homo sapiens
cctgattatctggcttaattcctgagttatatataggactgagtgtgagtctttaccacacacattctcagagttctcagagcctgggcctcactcatttmttctcatttcccttttaggtcccacgatgaaactgaaacggctcacagttttggagaagtacaaaggtatcattgactccttttaccaagagcaaaaaat

SEQ ID NO: 381612 - DNA, 201 bp, Homo sapiens
gtgatccacccgcctcggcctcccaaagtgttgggattacaggcatgagccaccatgcctggccactgttgaggttttcaaacctcatcagtttggacactgtgcatccagagctagccttgaaggacatttgaggacatttcttttgtcattctctaccaacgtcaagtatcagtgacaattccattcattaacatcatg

SEQ ID NO: 381613 - DNA, 201 bp, Homo sapiens
tgatccacccgcctcggcctcccaaagtgttgggattacaggcatgagccaccatgcctggccactgttgaggttttcaaacctcatcagtttggacactgtgcatccagagctagccttgaaggacatttgaggacatttcttttgtcattctctaccaacgtcaagtatcagtgacaattccattcattaacatcatga

SEQ ID NO: 381614 - DNA, 201 bp, Homo sapiens
agaatgtgtactctgcagttgttggctagaaggttctataaatgttaattaaatcaagttggttggtagtattttaatgttgtcttctgtatctctattgwttttctgtcttcttgctctatcaaatactaagaaagggaatgtggaaatctccaattattatggtagacatctatttttccttccggttctattaggttt

SEQ ID NO: 381615 - DNA, 201 bp, Homo sapiens
gaaatgagggtcctcctcaacttatgtgtcacacacatagtgacaacttgagaaggtttaggtccaaccaacatgtactgagctccaacagtaagtactcrtggccagaggacagagctgaatcagaagcggccccagctgtcaagccatgtgtgaccatcaaagcccaaacctgagtatccaagggccacaggggtgaga

SEQ ID NO: 381616 - DNA, 201 bp, Homo sapiens
acatcatatttgctcaaacacgccctttgttttcttgttcccatgctgctgggtagctgctgataaagtgtttttgttttctgtgaaaggagagcaaggcratgagcttaaagtgtgcttatgtgagctgaggtcagagaatgaatccttgttctcgtcctcaaagacgagtgaaaagggccaaccttgtaagctcttctt

SEQ ID NO: 381617 - DNA, 201 bp, Homo sapiens
tcttgttgggtaaggcttggtcctcatctgatctctggcttttcagtgcactctggacccagacacctctgaccagactgataatctgactgaacaagctrtggagttctgccagagggtgggcagcagagccaccacagtgtccgagatcatagagaagaaggatgaggccgtgtaccaggccatcgaagaggggatccg

SEQ ID NO: 381618 - DNA, 201 bp, Homo sapiens
agctttcctgagttctgatcttggtcacctcaactcagtaagacaactgggttctgtattcctctctctctctctctctctctctctctccctcccctccscccctttctctccctctctctccctctctctccctctgtctgtctctcccatagctcaaaaattgcccctgggcagaaagctggggcacacttagaggct

SEQ ID NO: 381619 - DNA, 201 bp, Homo sapiens
gggagaagggtacaagcaaggggagagccatcctagcagggcaggtgagagcatgggctctggaaatggactggatttaaaaccttagctctgccacttaktagcatgtgagcttggacaagttactgaacgtctctgtgcctcagtttcctcatctgcaaaacaataagagtgtctgcttcattattggtttattgtgac

SEQ ID NO: 381620 - DNA, 201 bp, Homo sapiens
gtgaatcatctgatccatgaacatggtatgcatttccattaattgaggtctttgatttgtctcaaccatgttttatacctttcagtgtaggtatcttgcasattttttcttaaacatttctagaaattttatgtttttgttgctatgaaaactgtaatttattttattttttaatttatttttatttatttatttatttat

SEQ ID NO: 381621 - DNA, 201 bp, Homo sapiens
taatagattcctaatatactagatcctttgtacttctgtgtaaaatgtagaatcatcttgtcagttgattaaaaaaagactgtttgaaatttgactgggartaaattgactctatatttcaaattgggtgaatcatctgatccatgaacatggtatgcatttccattaattgaggtctttgatttgtctcaaccatgtttt

SEQ ID NO: 381622 - DNA, 201 bp, Homo sapiens
ctccctctgaccagtctcccggcccctccctcgccagctcaggcaagttggtgcccggctgtcgggtgaagctggtgaaccaggacgcagagggcattggygagatctgcctgtggggccgcaccatattcatgggctacctgaacatggaggacaagacttgtgaggccatcgacgaggaaggctggctgcacacgggtg

SEQ ID NO: 381623 - DNA, 201 bp, Homo sapiens
acagtaatatcaactcacctgtaggatcatttacagccacctgtccttcctggaatagcagcaagaatcaggagaagggcccaaaatgcttttgaggagtyaagacagagtaggggcagcttcccaaaccttagcttcttttcttcaaagaaaacatgataggttccattgtggaacttgtcccccaatgtaacctaagtt

SEQ ID NO: 381624 - DNA, 201 bp, Homo sapiens
gctctgctgtgtgaacttgggcaagctgcttctctctctgagcctcagtttcttcacctgggaaatgaagggaaggatctgggcgatccgtaagatggaaraactggtcatttggagggctacttagcatggctaagaaaggctcatcaaagaatgaggcacatcccaggggtatgagctggggctgcagttggagaccag

SEQ ID NO: 381625 - DNA, 201 bp, Homo sapiens
actaagcacttccattggatctgccctccttggaaggcaagaggtgtgcagaatagaagaaaaaattattgcaaattgtgtttgctgtttatttgtctgcyctattccctccctctctgaaactctcagaagcaaactgaagctgttcccgcatgaacttccctaaattctcctctctccttctgttgtcactcattctcc

SEQ ID NO: 381626 - DNA, 201 bp, Homo sapiens
tcaccacaaacggagtggcttaaaacatcagaaattttttctttcgtagttctggaggccagatgtctaaaccaagtgttagcagggctgtgctccttctygaggctctgggaaagaatctgtccttgcctctttcagctattggtggccctaggtgtgccttggcttgggcaacataacccaaatctctgcttccatctt

SEQ ID NO: 381627 - DNA, 201 bp, Homo sapiens
atctccctggtttctttcctcatctttccctctccttccttctcccataaccagcacgttcatatcacatccatctactcttagctgctcaataaactaarcacttccattggatctgccctccttggaaggcaagaggtgtgcagaatagaagaaaaaattattgcaaattgtgtttgctgtttatttgtctgctctatt

SEQ ID NO: 381628 - DNA, 201 bp, Homo sapiens
tttgtcatcataccagctgcaataggggagccaaagaaggcagaagcaaatgaagctacactgtgggaatgagcaagaacattgctcacctgggctcaggsggccttgcctgcctttgtctgcccaagtcactgataccagttcctacatacagtagacactgattaaatatttattggatgaacaaatgaacatttctaa

SEQ ID NO: 381629 - DNA, 201 bp, Homo sapiens
gaagacattctaagagacattgcagatttttctggtgccctgaaataaagatagctaaatcatactgcatgctagattagcagattttaagtgctttatgygcattatctcccttaatcctcacctgtgaagtaggcatcataatagccccatcttgcagtgagaaaatggaggctcagagaagttaaggaagttccaaag

SEQ ID NO: 381630 - DNA, 201 bp, Homo sapiens
atctcctgtgcagaattccaaataatgtatagagctattccaccctaaagaaggaagagcataactccccactttctcttttcttttctttttttttttttgagagagagtccccctccgtcaccaggctagagtgcagtggcgcaatctcggctcactgcaagctccgcctcctgggttcaagcgattctcctgcctcag

SEQ ID NO: 381631 - DNA, 201 bp, Homo sapiens
cataggttggaaaaatcaatattgttaaaacgtccatactattcaaggaaatctatagattcaatgcaatccatatccaaataccaatgacattcttcacmgaaatagaaaaagaaatcctgaaatttatatggaaccacaaaagactcagaagagccaaagatatcctgagcagaaagaacaaaactggaggaatcacat

SEQ ID NO: 381632 - DNA, 201 bp, Homo sapiens
cccacccaaacctgtttaacaatgtataatccattagtttcatactaggtttctttatttggcttcagagcttattttcatctaaaagtttgagcagatastcagagtaacatttattagtcttttgctgccattggccaagaaggtttccttccccagcttctttatatttcagaaacaatatttttctccttccctctg

SEQ ID NO: 381633 - DNA, 201 bp, Homo sapiens
tccatgtgaggaagtggaggttccacatggttatatgtgactttcccaaggcttgtaagtggaagagaagaatcaggcagtctgagtcttaaccaagatgytcagctgacagtcagtagaggcaaactctacatttaccaatattgtgagtggaaacatctgaaaattaaaataaagacacagttttattttttaaaaaga

SEQ ID NO: 381634 - DNA, 201 bp, Homo sapiens
ttagcccattttacaggtaaggaagcagaggcagagagtaattagaaaggctctctagggttacacaggcaggaatagcagggctagactcgcacccattygcctatgccacactgcctcatgggtaaacacaagcagatggtctcccgtgatctttggcttcattaatttactgccaaacaaaaaaaaacctcagattta

SEQ ID NO: 381635 - DNA, 201 bp, Homo sapiens
ttatccaagggacagggccttatgctgctagaaactgtgctggagtttcgttaagtctcttagtgcagggggttgggaaggggttgtcatgcatccagagytctccagctctcagtgtccacccagcagggcttgggttgcatgggcctcttctaagtgccatgctctccatgtatggcttcacccctgcttcctttcaca

SEQ ID NO: 381636 - DNA, 201 bp, Homo sapiens
tcatcctggaaggaaccccgaaggtcctcttggtctgacagagcacacattgaacccctcattgttgtcaaagatgagcacagccagagatcagttaaagkggtgaaaacaggtttgattcagtaactgctgacagtaggggaaagagctaagctccattctgatttgtgcgaaggtgttttaaacattttaaaaggaaaa

SEQ ID NO: 381637 - DNA, 201 bp, Homo sapiens
ttgtatgatgcattttaaatgtataactgtaaaatgaacaaagagcagaccaacacgattgtaataacatctcaaccacaacatagtgggaaaaaactttsaagacacacaggcttgggtttgaatcctgcatctaccttgccttaggctaggtccccagaggcagtgctttctgtgaggatttgtgggaaagatttatta

SEQ ID NO: 381638 - DNA, 201 bp, Homo sapiens
ttctggtcctttggggaaagaatcgcaggtgctggctgctgggagtcaaagtgcaccatggattgatgcacacaacagtgggagggttctgggggaatagsatcttatttgctgcatctttattactagctgtgtggacagctgtgtaaactttggtgctcggttttggattttgggactctgttttctcctctgtaaatg

SEQ ID NO: 381639 - DNA, 201 bp, Homo sapiens
tcttccacctcggctatcccaatgccctccttgcaacccatctttccttccccattactttccagagactcatcttcacagcattcacattctacagtgcsatccatctcctaaaaacctttagacatacagagcctccacgtgttggggtccgcccatgtggcatgcccgtgatggggaatttatcagtggtttgttggt

SEQ ID NO: 381640 - DNA, 201 bp, Homo sapiens
ccttgcaacccatctttccttccccattactttccagagactcatcttcacagcattcacattctacagtgccatccatctcctaaaaacctttagacatrcagagcctccacgtgttggggtccgcccatgtggcatgcccgtgatggggaatttatcagtggtttgttggttccctatcagtggttccctatctaagca

SEQ ID NO: 381641 - DNA, 201 bp, Homo sapiens
aagggatgggctctggatcctaggatcctgccttcaaatagaggagtaccactcttcactgttggatcaattaattctaagtaaaatttcttaaaataaakggtatgactatgctgtttttgtttgtttgcttgacttttgtgttttgtgctttttttggtaatgtgaatatcagttctagaatgatttggtcagggaggg

SEQ ID NO: 381642 - DNA, 201 bp, Homo sapiens
aaagcagatacaaaggtcaatggaacagaacagagaacccagaaataaaacaatacacctacaacatctaatctttgacaaacctgaaaaaaacaagcaaygggggtaaggattccctattcaataaacgatgctggggtaactggctagccataggcagaacattgtaactggaccctgacttctttctgccctagtctt

SEQ ID NO: 381643 - DNA, 201 bp, Homo sapiens
catgtcctggagaaactctagaaatgagtttatttgtaggactcagaaaccacccaaggtactttataaagctactaaaacagtaacaagaaatcaagtamcaatatcagaagagatgggaggcatatgtactcaacagggccgggagtttgtgtaaagacagaaacaaagcgctgtcaagataggaaaaagatatttcat

SEQ ID NO: 381644 - DNA, 201 bp, Homo sapiens
ctaacatccacagaatgcagatattaattaattttctagatcaagcactctgtaacccaagtttgtgtaactggtaagtgataaagtcaggatatgaaccrggatctgttttactccaagtactatgtgctttctacttttccaggctgttaagcaagaacatgtcagacaaggaggggcataaaaaaaaaaaccctaact

SEQ ID NO: 381645 - DNA, 201 bp, Homo sapiens
aactaagtatataccaataaattggagaacctagaagagatggataaattcttacagagagcctaccaagattgaaccatgaaggaatccataacctgaayggatcaataacaagtaacgagttcgaagcagtagtaaaaagtctgcaagcaaagaaaaggctgggacctcatggcttcactgctgaattttaccaaactt

SEQ ID NO: 381646 - DNA, 201 bp, Homo sapiens
caaaaaattagccaggcatggtggcatgtgcctgtagtcctagctactcaggaggctgaagtgggtggatcacttgagctcagggagatagaggctgcagmagactgtgatcacaccattgcactccagcctggatgacagagtgagaccctgtttcaaaagaaagaaagaaagaagaaagaaagaaaagaaagaaagaaa

SEQ ID NO: 381647 - DNA, 201 bp, Homo sapiens
tggctagtgcaagcagacaaaagaaagaaataaagaacattcaagctggaaaggaagaagttgaattatccttgtttgcagatgatatgatcttatatttrgaataaactaaagactccatcaaaaacaattaaaactgataaacaaattcagtcaagttgcaggatacgaaatcaacatacaaaaatcagtagcatgtac

SEQ ID NO: 381648 - DNA, 201 bp, Homo sapiens
agcatgtacttctttttattttagacagagtctcgctctgttgccaggctggagtgcagtggcgtgatctcggctcactgcagtctccacctcctggattyaggtgattcttctgcctcagcatcccgagtagctgggactacaggtgtgcgccaccatgcccagctatttttttgtgtgtgtttttagtagagacagggt

SEQ ID NO: 381649 - DNA, 201 bp, Homo sapiens
ctgaattttaccaaacttttaaagaagaactaataccgattgtactcgagtattctgaaaaataatggtggagggaatacttccaaactcatcctatgagscctatatcattctgatagcaaaaccagaaaatacatgttaaaaaaaaaaaaaaaaagaaaagaaaactacaggccaatatacctcatgaacgttgatgta

SEQ ID NO: 381650 - DNA, 201 bp, Homo sapiens
caagagcaaaccaacctcaaaattagtagaagaaaagaaatcataaatattagagcagaaataaataaaattgaaaagaagaagacaatacaaaagatcarcaaaatgaaaagttggtttctggaaaagataaacaaaattgacaaacttttaatgagactaagaacaagactaagaacaagactaagaacaagagagaag

SEQ ID NO: 381651 - DNA, 201 bp, Homo sapiens
caacaccttcactcatatgagttcactttagttattgccaaaatgtgcagtatgtgctgtaggcccagtgtctggcatgcaccagcagctcagttaatcartgaagaaatgcaagtgtatgaacgagtgaaaaatggaaaatggattaatgaatgggtaagtgaaaagcttacagtacaaggccaggtgcggtggctcaag

SEQ ID NO: 381652 - DNA, 201 bp, Homo sapiens
ttgtatttctctaacattttattataccttaatctattttatggggaacaggcaatgtcaacatgagggtggcaatctgatggattgcctaagtcttaaamtaaagggtggggaaagtccacttcccactagtttcccacaggctttctaccagctaaacagctttgattcagatgacctttgtaagtgggaaactgtagg

SEQ ID NO: 381653 - DNA, 201 bp, Homo sapiens
gcaatcttagagattcttacaagtctacaaattaaaagatctagaagagttcacagtttcagccttgagttctgtctcagtccagactgtgggatcattcytggacttttccttgctgagccagctgccttaaaagaatcatttggcaagtcattcagccagtctctcagctgctcagtggcaagatgggaagcctaggct

SEQ ID NO: 381654 - DNA, 201 bp, Homo sapiens
tctgttttactccaagtactatgtgctttctacttttccaggctgttaagcaagaacatgtcagacaaggaggggcataaaaaaaaaaaccctaactctgktctgtttaaatggtaatcaggaagtgttggcaatttagggctgtctcttactccattgcttctcaacactgacatatgtgggtatcacttggagatcttg

SEQ ID NO: 381655 - DNA, 201 bp, Homo sapiens
aaaggagaatcaacacacagtgcatggatgaatgtcacaaatatactgttgaataaagaagctgatgctaaacaatgagtgctattcatacgattccattyatataaatgttcaaaaccagccaagatgaatctgtcctattaatcaggaaaatggttactgagaagtgggctgaaaggagagattttaaggctggtcctg

SEQ ID NO: 381656 - DNA, 201 bp, Homo sapiens
attagattaatcttccacataggtaggacaaatgaagctctgaaacctaaaaagatatctgagagacgagtgtagacagagattaggacagggcactgggyggtggggtccactcatacctataggataggaggtggaagggagacctgggtggtgtagggttccaaggaaaatagttacaaacaacatccagtatggagg

SEQ ID NO: 381657 - DNA, 201 bp, Homo sapiens
agtatagaatttagttaataataatgtatcaatattgggtcattaattgtagaagatgtaactacatcatactaatgtaagattgttgttgttgttaattktttttttttttttttgagatagggttttgctctgtcgcctaggctggagtgcagcagtatgagcatgctcactgcagcctcaacctcctgggctcaggtg

SEQ ID NO: 381658 - DNA, 201 bp, Homo sapiens
aaaatattatatcttttgtttgagacatgttgaatttgacatgccaaggttgtattcaggtggtggtgtccaaattaaattggagaaatgaggctaaaatmcaagaaacagcccaagatggaagataaaattagattaatcttccacataggtaggacaaatgaagctctgaaacctaaaaagatatctgagagacgagtg

SEQ ID NO: 381659 - DNA, 201 bp, Homo sapiens
tccagatggaccatgagctccatgcagggaggcactatggccccagtgaaaaacatggtgtccacaacaggctcaaggaatgaatgcatagacaaaggaaygtagagaatgattctgagggtctgagggtgatttttacaatgaagagaaaccataggtcttgcgagactgaggaagaggagctgactttgcgaaaaatat

SEQ ID NO: 381660 - DNA, 201 bp, Homo sapiens
atcatatgccctttctgattcttcttttgactgcctggatttccagatggaccatgagctccatgcagggaggcactatggccccagtgaaaaacatggtrtccacaacaggctcaaggaatgaatgcatagacaaaggaatgtagagaatgattctgagggtctgagggtgatttttacaatgaagagaaaccataggtc

SEQ ID NO: 381661 - DNA, 201 bp, Homo sapiens
acaacatccagtatggaggagagagaaaatgagatgagctgatagctctgctttcactgccttggggataccgattagagagaattctttcaggaaagggyacaggaaggagtcccagtgcaaaggcagcaaggagatgatgttagtgagcaactctgaaaatttgagaattttggtggaaaagggaaggagaagatgggg

SEQ ID NO: 381662 - DNA, 201 bp, Homo sapiens
tctttggcctcccttattagtaatagaaaggagttggatttcaaacgctaagatttcatgaaactataaatcacttacataaaaatccgctggccatctgyggcaagattaaccagtttaatgagagtctgcttgatgccagacatcgtgttaaaattatatcagttaagccttgggaccttttgtgtttaagtgacaggg

SEQ ID NO: 381663 - DNA, 201 bp, Homo sapiens
ctttgtgcaagtatctggatgagctgggcttcacggtatttgccggagttttgaatgaaaatggcccaggagctgaggaattgcgaagaacctgctctccrcgcctctcggtgctccaaatggacatcacgaagccagtgcagataaaagatgcttacagcaaggttgcagcaatgctgcaggacagaggtactgccgcca

SEQ ID NO: 381664 - DNA, 201 bp, Homo sapiens
acgatcctatgatgcatggaccatcattattaatttacagataaaaaggcagagaccaaatataaagtgactatcctgctaacaggtggctaatcaatggyagagctaggatttgaatgcagtcagtgttggctcctctgctaacctgtttgtcttctatctgaccaaccttcaacatctataaaggtcatggagaagtga

SEQ ID NO: 381665 - DNA, 201 bp, Homo sapiens
tagaattaagatgagcactacatatatttaaggatgactgaaatgtcactttcacgttctttgttattttcaagttctctgtcatttttatgaggaatgcyatgtgctcatatcatcctagacaaggcctcaagacctttgtatgaaatcgagaaatttaaaatgaattcattttgttagaccacaactctttaaagaatg

SEQ ID NO: 381666 - DNA, 201 bp, Homo sapiens
tatcagaggcatgggaggcaactctgatggtacaaagagcagttggaaaatctttctctttgaggcctaaagtcgccagttttgctcttcagaaatgttcrcataaacacttgtgtgcaattgcatgctatgctcaaaaacaagccctgctaaaatgacccaggcctcagagattttgtgtcattgtggcttaaatcttgc

SEQ ID NO: 381667 - DNA, 201 bp, Homo sapiens
cttgacttctgctccagcactgccgaccatactttctttcttttcatggcctcgttagccttgcaggaactgcatttccatgcttctttgtcctttgactmttccgggttcttcctacacttcctccaaggtaatctctgactctgtctttactccaccttcttatatggctgcattctctacccagcagcaaagtcatac

SEQ ID NO: 381668 - DNA, 201 bp, Homo sapiens
aatcaacccaattgcccatcgatgatagattagataaagaaaatgtggtacatatgcagcatggaatactacacaggcataaaaaggaatgagatcatatyctttgcagggacacggatggagctggaagccattatcctcagcaacctaacgcaggaacagaaaaccaaataccacatgtcctcacttgtaagtgggagc

SEQ ID NO: 381669 - DNA, 201 bp, Homo sapiens
actgcacattggactctccctatcatggctctcatcatatgccctttctgattcttcttttgactgcctggatttccagatggaccatgagctccatgcarggaggcactatggccccagtgaaaaacatggtgtccacaacaggctcaaggaatgaatgcatagacaaaggaatgtagagaatgattctgagggtctgag

SEQ ID NO: 381670 - DNA, 201 bp, Homo sapiens
aagtgggagctgaacaataagagcttctttacccctttttccctgagctccttcaaaagttaggtgacttgcagcctctacttcttggcaacctcattaayccattaaagtttggctcctttgttttccgttaaagactgctcagttccctgtgcccactggccacttcttatcctccttgctgtctctatcaggcagaat

SEQ ID NO: 381671 - DNA, 201 bp, Homo sapiens
attgcaggacagtataatgtgtgagagttcagagaagtgggcagaagtgagaagaggcaagaggatgtaggagactggggtagaggccatgagttggaagrgcaagcagccaactggagggactttatgaaggaagccctgtaggacttgctgtcttattggacctaggcagagaagaaaaggagagacccactgcacatt

SEQ ID NO: 381672 - DNA, 201 bp, Homo sapiens
tgctttctactagctccactgttagatgcttgttccagcccaactcccattcttgtgtggaaataaagtcaacataacccatgtcttctaaatacactccyacgggtgggaagttccaggagtgggatggggagaaacattacttctttaagttcttctctaagaaatgcaatctagagtcaaccatgtccttccctccgg

SEQ ID NO: 381673 - DNA, 201 bp, Homo sapiens
tgcagtatagaggagcaggtaggcaagaagccagtatattgcaggacagtataatgtgtgagagttcagagaagtgggcagaagtgagaagaggcaagagsatgtaggagactggggtagaggccatgagttggaagggcaagcagccaactggagggactttatgaaggaagccctgtaggacttgctgtcttattggac

SEQ ID NO: 381674 - DNA, 201 bp, Homo sapiens
tttctctactgatttgtcttgtaggccaatatctccttctgagatctccaagatcattggtggacatggcagaactggatgggtgtttctgaatcccagtrcaatagccagctcagaattccacatcaagaaatagaagcaaaaggaagagagaaattggggaaagatgtgaaggctcaagatagggagacctcaatatgt

SEQ ID NO: 381675 - DNA, 201 bp, Homo sapiens
tattattttgaaaagcctgagtagcactaatggtagaaagcccttatatggagctactttgtgccaggcactattctaatatattattaatttaactttcrcaacgatcctatgatgcatggaccatcattattaatttacagataaaaaggcagagaccaaatataaagtgactatcctgctaacaggtggctaatcaat

SEQ ID NO: 381676 - DNA, 201 bp, Homo sapiens
ctgtgttcagttccctgtaagctgagtaggcaataccttccctctgtttgtgccatcaaacaaaagctgcctgctattgttaacccgaagattgtccccartgttgagcagcctcaatccagctaggtcaggatgtgatgacactggatagtttgtctctctctgtttccaagaacaaatagtacacaacttgagtcaagg

SEQ ID NO: 381677 - DNA, 201 bp, Homo sapiens
tactacttcagaacctacctggtatgttgttaaagaatgaagtttagggaagagctagagaagaagacaatggcataggagggttttaaaaaagaactctrattagcagtgtggaaaggggattagaatccattcattcgttatttcaccaacacttattgagcaactctgtgcctggtactgggaatatagtggcaaata

SEQ ID NO: 381678 - DNA, 201 bp, Homo sapiens
cttatagttacttcttgattatattctagacaaggagtggattattcatgagttttctgggaaagtgggagggatggcctggaactgtgggttcctccccyttttagaccatacagagcaacttctggacattgccatggcatttataaactgtcctggtgctggtggaagtgtcttttagcatgctaatgcattataagt

SEQ ID NO: 381679 - DNA, 201 bp, Homo sapiens
gaagataaacccctctaaaacaggtctccctctggtgcccaggttggagtgcagtggcacgatagtagctctctataaccttgaactcttgggctcaagcsatcctcccacttcagtctcctgagtagctgggaatacaggcacatgccatcacatctgctaatttatttttgccatggggtctcactttgttgcctagga

SEQ ID NO: 381680 - DNA, 201 bp, Homo sapiens
tcagacctgctcagctgacccaagcaccttccgcattcagacacagaatcttatgcaaagctgactttcattccttaagaaagagaactccttaccccatrgcaccagagaacactaaagactgaacagccaggaacttcctgatctccctccattagcaggggtggcacttctccagtgagcaatcataagtgctctgtg

SEQ ID NO: 381681 - DNA, 201 bp, Homo sapiens
ctctgaggagcaggtttcattgacattattctccaggtgatggtgctgagttggggtggataacatgcccttgggtggggatctggtatcccacgtacacygtgatggtggaaaatttgagatcagatcctgagatgcagtgcctgggttcttccttttatatcaggctgccccccagtttaaagctatttgatgagctct

SEQ ID NO: 381682 - DNA, 201 bp, Homo sapiens
ttcctccagaaatcgcagagtaaacacctgtgtataattgcatgctatgcttgaataagaagagttgaagataaacccctctaaaacaggtctccctctgktgcccaggttggagtgcagtggcacgatagtagctctctataaccttgaactcttgggctcaagcgatcctcccacttcagtctcctgagtagctgggaa

SEQ ID NO: 381683 - DNA, 201 bp, Homo sapiens
aggagcaggtttcattgacattattctccaggtgatggtgctgagttggggtggataacatgcccttgggtggggatctggtatcccacgtacactgtgawggtggaaaatttgagatcagatcctgagatgcagtgcctgggttcttccttttatatcaggctgccccccagtttaaagctatttgatgagctctctgaa

SEQ ID NO: 381684 - DNA, 201 bp, Homo sapiens
cctagaattagaggaagtggaaaacaattctaattgtacaaaggacagttggaaaattgttctgtttgaggcccaaaacctttctcgggccagttttcctycagaaatcgcagagtaaacacctgtgtataattgcatgctatgcttgaataagaagagttgaagataaacccctctaaaacaggtctccctctggtgccc

SEQ ID NO: 381685 - DNA, 201 bp, Homo sapiens; identical to SEQ ID NO: 83090

SEQ ID NO: 381686 - DNA, 201 bp, Homo sapiens
agaacctacctggtatgttgttaaagaatgaagtttagggaagagctagagaagaagacaatggcataggagggttttaaaaaagaactctgattagcagygtggaaaggggattagaatccattcattcgttatttcaccaacacttattgagcaactctgtgcctggtactgggaatatagtggcaaatagtatgcgtt

SEQ ID NO: 381687 - DNA, 201 bp, Homo sapiens
gggtaatttataatgaacagaaattgattggctcttggttctagaggctggaaagtccaagatcaaaggggtggcatcttgtgagggtcttcttgctgtgytgttccacagcagaaggtggaagggcaagagagagggagaaagagaaagagagcgaaagggggccaaaatcccctttttatgacgaccccactctcaaga

SEQ ID NO: 381688 - DNA, 201 bp, Homo sapiens
gagtagctgggattacaggggcccacaaccatgcctagccaatttttgtattttttagtagagagggggttacgccattttgaccaggctgggcttgaacmcctgacctcaagtgatcttcccgcctcagcctcccaaagcgctgggattacaggcatgagtcaccacgcccagcctcccacagtgctaggatgacaggcg

SEQ ID NO: 381689 - DNA, 201 bp, Homo sapiens
acacacacacacacacacacacgcacaaacacacacacacccctgcatatgttatactactatagatggagttagcagatgagagagagagagagagagagggagagagagagagagagagaatgactgtattggggtggtgaggggaaagcttgagtagttaggaagaacatgaaggaacaaaaagaacaaaagaaaacg

SEQ ID NO: 381690 - DNA, 201 bp, Homo sapiens
ggtttccttccccagcttctttatatttcagaaacaatatttttctccttccctctgaagaatatgacccacctcccctccaccccaagaggagaaggccmttctctccactcccctccctgcatatctgaactctgggaagaggcagcctaccccaaggctcagtcttcagttctgggccatcaaacatttaaccgatga

SEQ ID NO: 381691 - DNA, 201 bp, Homo sapiens
cacacacacacacacacacacacgcacaaacacacacacacccctgcatatgttatactactatagatggagttagcagatgagagagagagagagagagagggagagagagagagagagagaatgactgtattggggtggtgaggggaaagcttgagtagttaggaagaacatgaaggaacaaaaagaacaaaagaaaac

SEQ ID NO: 381692 - DNA, 201 bp, Homo sapiens
ttaccaggaacctcagaaggtatgttggtcaggctagaagatcagggcctggtcggtaggtgctcttcatcttacctaaactacattgttttttttttttktttttttttttttttttttttgagacggagtttcactctttcgaaaggctggagtgcagtggcgtgatcccagctcactacaacctctgccccctggggt

SEQ ID NO: 381693 - DNA, 201 bp, Homo sapiens
acacacacacacacacacacacacgcacaaacacacacacacccctgcatatgttatactactatagatggagttagcagatgagagagagagagagagagagggagagagagagagagagagaatgactgtattggggtggtgaggggaaagcttgagtagttaggaagaacatgaaggaacaaaaagaacaaaagaaaa

SEQ ID NO: 381694 - DNA, 201 bp, Homo sapiens
gaaattttttctttcgtagttctggaggccagatgtctaaaccaagtgttagcagggctgtgctccttctcgaggctctgggaaagaatctgtccttgccyctttcagctattggtggccctaggtgtgccttggcttgggcaacataacccaaatctctgcttccatcttcatgtggccttctcccttgtgccttctctt

SEQ ID NO: 381695 - DNA, 201 bp, Homo sapiens
tgggcacctgtaatcccagctactcggggaggctgagccaggaggatcgcttgaacctgggagtcagatgttgcagtgagctgataatggaaaaaaaaaaatcatgaaaatctttaagtgtacacaagaggagccaatgtacacagtatactcaatacccctattctagagtgatcatggtccagatactgatgaaatggt

SEQ ID NO: 381696 - DNA, 201 bp, Homo sapiens
tacacacacacacacacacacacacgcacaaacacacacacacccctgcatatgttatactactatagatggagttagcagatgagagagagagagagagagagggagagagagagagagagagaatgactgtattggggtggtgaggggaaagcttgagtagttaggaagaacatgaaggaacaaaaagaacaaaagaaa

SEQ ID NO: 381697 - DNA, 201 bp, Homo sapiens
atctaccaaaaatacaaaaattagacgggcatggtggtgggcacctgtaatcccagctactcggggaggctgagccaggaggatcgcttgaacctgggagycagatgttgcagtgagctgataatggaaaaaaaaaaatcatgaaaatctttaagtgtacacaagaggagccaatgtacacagtatactcaatacccctat

SEQ ID NO: 381698 - DNA, 201 bp, Homo sapiens
gttgggctaatttttgtatttttagtagagacagggttgtatgatgcattttaaatgtataactgtaaaatgaacaaagagcagaccaacacgattgtaawaacatctcaaccacaacatagtgggaaaaaactttgaagacacacaggcttgggtttgaatcctgcatctaccttgccttaggctaggtccccagaggca

SEQ ID NO: 381699 - DNA, 201 bp, Homo sapiens
ggttgcagtgagctgagatcacaccactgcacttaagcctgagagacagagaaagactctgtatcccaaaaataaaaaaataaaaaaataaataaataaasgtcatttgcaaagggccatccttcccaacagagacaagcgcctgctccctgacttccttggccttcccaggatctgactcttccctttcctttcacccca

SEQ ID NO: 381700 - DNA, 201 bp, Homo sapiens
atacagtgtggagcaaaaacagaataaggccctgcctcatgaagcttaattctagcggaggaagacataacacaacaaaccaatgaatggataagatgatstcggtgccacaaaaccctcatggccaggacagtggtgtgactgtgctgttgagagccaccttgtatcagaggcttcctatgtgtcagatactgtaaggag

SEQ ID NO: 381701 - DNA, 201 bp, Homo sapiens
accaacttggcatcgtgtccaacattcagttgcctgttagctgagctgccagtttttcccttgtttgtgtgtgtgtgtgtgtgtgtgtgtgtgtgtgtgtttccccattgcaagtgtgaggccaaattaaatttctttgagttgtaaaatttttgcttggttatggagtttaagcttggatagggctgtaattaggattat

SEQ ID NO: 381702 - DNA, 201 bp, Homo sapiens
gaccaacttggcatcgtgtccaacattcagttgcctgttagctgagctgccagtttttcccttgtttgtgtgtgtgtgtgtgtgtgtgtgtgtgtgtgtgtttccccattgcaagtgtgaggccaaattaaatttctttgagttgtaaaatttttgcttggttatggagtttaagcttggatagggctgtaattaggatta

SEQ ID NO: 381703 - DNA, 201 bp, Homo sapiens
ctgtcactctggtttgacctcactccctactcccctgaccctatgcaggtggtgattgcgggcttggccatgctttgtgcaagtatctggatgagctgggyttcacggtatttgccggagttttgaatgaaaatggcccaggagctgaggaattgcgaagaacctgctctccgcgcctctcggtgctccaaatggacatca

SEQ ID NO: 381704 - DNA, 201 bp, Homo sapiens
gaaatgctgaaacctataggaacaactggaaggtcattggatagggaagtgattggctaaaagctgttcaatgggaaattctgttgctctggtttaatccrtagacattgacaagaagggaggtctgtgatttattactaagccaaaacaaattcatggaaaatataaacaccatagtatgatcctttttgtttttgttat

SEQ ID NO: 381705 - DNA, 201 bp, Homo sapiens
gaatgacacttcatacttatatttatttgaaggtaggggcaagaaaaggaatcttcagggacacagacaaggagcttctgaagacattctaagagacattscagatttttctggtgccctgaaataaagatagctaaatcatactgcatgctagattagcagattttaagtgctttatgtgcattatctcccttaatcctc

SEQ ID NO: 381706 - DNA, 201 bp, Homo sapiens
tggccaggacagtggtgtgactgtgctgttgagagccaccttgtatcagaggcttcctatgtgtcagatactgtaaggagcactttccatgcctaatttcmtttaattctcacaaacgccttataagataatttaaaaaaatattatgggccaggcacggtggctcacgcctgtaatcccagcactttgggaggctgacac

SEQ ID NO: 381707 - DNA, 201 bp, Homo sapiens
ttctgagtgacaagaattttggtggcatagatttatcatggaactttgcaccagccaggaaaaactgagctggaattgatgactctgttccagttattcaytgctgcagagtaaataaccctgaagaaactatctcaggctgttgtgagtaggcagctggtctgggaggcagaataatgggtccccagaaacatacacgtc

SEQ ID NO: 381708 - DNA, 201 bp, Homo sapiens
accactcttatgatcccgtttaaccctaatcatctttttaaaggttctatcttcaaatgcagtcacgttccaagatactggaggttagtactgccacatayaaacttttctgggtggtggggggagcaattcagtccataacactgtaattgataagggacaggggaattcagcagagaacacagtgaggggctctctagc

SEQ ID NO: 381709 - DNA, 201 bp, Homo sapiens
tgactgggagcaggatgtgtgattgatgtgagccgtggctggggccgaagctggttgttttcacagctcatgttttcagtaccaattgcctactatgcacrctcgagatacagtgtggagcaaaaacagaataaggccctgcctcatgaagcttaattctagcggaggaagacataacacaacaaaccaatgaatggataa

SEQ ID NO: 381710 - DNA, 201 bp, Homo sapiens
aatccacagaaattaacatccaatgtgatgctgacttgttgatatatctttggcaaaatcaatgtaatagtaactttggaaacatgcttatctgggagttyattgctgttattttcattttgaagcaaggtgcatggagggagagaagcagtcagtcactaataagggctccagaagaagcacgtggttgccctgacccac

SEQ ID NO: 381711 - DNA, 201 bp, Homo sapiens
gaaaagtcaaagtatgtgtaaaaggcaatatataaccaacaaatccacagaaattaacatccaatgtgatgctgacttgttgatatatctttggcaaaatyaatgtaatagtaactttggaaacatgcttatctgggagttcattgctgttattttcattttgaagcaaggtgcatggagggagagaagcagtcagtcact

SEQ ID NO: 381712 - DNA, 201 bp, Homo sapiens
aatccattagtttcatactaggtttctttatttggcttcagagcttattttcatctaaaagtttgagcagatactcagagtaacatttattagtcttttgytgccattggccaagaaggtttccttccccagcttctttatatttcagaaacaatatttttctccttccctctgaagaatatgacccacctcccctccacc

SEQ ID NO: 381713 - DNA, 201 bp, Homo sapiens
tcacaaaggaattgcgttggcttataagtcatcagcaagcagaggccacactgggttagaaccctggtcccctggtgcctgctctgagcgggacctttctrggacacacactccctccctcaatggtagagttgtatttggtctgtgggaacgcagctcaaaaatggtccctaactgactctcaccaattttgattatttt

SEQ ID NO: 381714 - DNA, 201 bp, Homo sapiens
aaggcccttctctccactcccctccctgcatatctgaactctgggaagaggcagcctaccccaaggctcagtcttcagttctgggccatcaaacatttaaycgatgattcaagtgaagatgtaaaaagtatgtctaataaaagaccacagactgggaggtattgctaaatgcacgaaagaacaaaccctaaaggtttgaat

SEQ ID NO: 381715 - DNA, 201 bp, Homo sapiens
attactaagccaaaacaaattcatggaaaatataaacaccatagtatgatcctttttgtttttgttatttcctggtaaaaaaaattaaaccaaattcttcyatgtgtatgtatgtttgtatgaacaaggaaggaatgtagaagggcacacaaaactgttagttaccttagaggagattaattttaaaaatatgcacatctc

SEQ ID NO: 381716 - DNA, 201 bp, Homo sapiens
ggaccaacttggcatcgtgtccaacattcagttgcctgttagctgagctgccagtttttcccttgtttgtgtgtgtgtgtgtgtgtgtgtgtgtgtgtgtgtttccccattgcaagtgtgaggccaaattaaatttctttgagttgtaaaatttttgcttggttatggagtttaagcttggatagggctgtaattaggatt

SEQ ID NO: 381717 - DNA, 201 bp, Homo sapiens
tgccccaccatttcccaggatgtatgttattcctcgttgcaacaagtattgagcacaatctgttcgattacaggtgctgtagtgggttgaatagtggaccytcctccccacaaaaagatatgtttaccaggaacctcagaaggtatgttggtcaggctagaagatcagggcctggtcggtaggtgctcttcatcttaccta

SEQ ID NO: 381718 - DNA, 201 bp, Homo sapiens
aactccgtttgcatttccataagtataattggatttcactggcctacatttccaagtgagcatccctccttctctgcagtcctgatatccaggagtcaccsaagctagcaagggctcatccccacagctatgtgaacaaccaagcactttgcaggagacagcgtgggagaccgcaagctttttggaaagtaatctggcagt

SEQ ID NO: 381719 - DNA, 201 bp, Homo sapiens
ttggagatgacacaaacaaatggaaaaaatctcatgttcatggataagaagaatcaatatagttaaaatggccactctgcccaaagcaatttatagattcratgctattcctattaaactaccattgaggttcttcacagaactagaaaaaaagatttaaaaattaatatggaaccaaaaaagaacatgaatagtcaaggc

SEQ ID NO: 381720 - DNA, 201 bp, Homo sapiens
agtcccttctagtttgaacaagtatgaacaatgcagctatgaactttctggtacatgtactttggtttttgtgtgcttgaattttcccatgacacatgctrcagagtgaaattgttaccaaaaagggctcctgatccagattccaagagagggtttttggatcttgtgtgagaaagaatttggggtgaatctgtagagtaa

SEQ ID NO: 381721 - DNA, 201 bp, Homo sapiens
ttggaccaacttggcatcgtgtccaacattcagttgcctgttagctgagctgccagtttttcccttgtttgtgtgtgtgtgtgtgtgtgtgtgtgtgtgtgtgtttccccattgcaagtgtgaggccaaattaaatttctttgagttgtaaaatttttgcttggttatggagtttaagcttggatagggctgtaattagga

SEQ ID NO: 381722 - DNA, 201 bp, Homo sapiens
tttttatgacgaccccactctcaagataatggcattaatccattcaccccatcctcaacgcctaatcacctcttggtgcaccccacctcctaacactgttkcattggggattaagtttcaacatacgcttttggagggacacattcaaaccacagcgcttacccataaggcagtgcattatcacaaaagctcatgtgcaca

SEQ ID NO: 381723 - DNA, 201 bp, Homo sapiens
ggactttgtcaaatctggcttaaaaataaaatacttggcatggagtaaatgaaagccctcacccaagtatttttcatgacactgttttcgttccgttttttccaggaggtgcatttgaaggggctggtagtgggagggaaggagaggatgaagtgcacccagacaatgattttgttaaaatttcccaggaataaatattaa

SEQ ID NO: 381724 - DNA, 201 bp, Homo sapiens
cacctacaacatctaatctttgacaaacctgaaaaaaacaagcaatgggggtaaggattccctattcaataaacgatgctggggtaactggctagccatasgcagaacattgtaactggaccctgacttctttctgccctagtcttttgagtttcagatctttgagtcatcttggatttgtttttccccatgcctctctct

SEQ ID NO: 381725 - DNA, 201 bp, Homo sapiens
gaaaaagctagaatgtaacacaaggattagaaaagtcaaagtatgtgtaaaaggcaatatataaccaacaaatccacagaaattaacatccaatgtgatgmtgacttgttgatatatctttggcaaaatcaatgtaatagtaactttggaaacatgcttatctgggagttcattgctgttattttcattttgaagcaaggt

SEQ ID NO: 381726 - DNA, 201 bp, Homo sapiens
tttgtcactcacagagacagctttggggactctggataggttacccacaagagtggccagaaattccatgaggtgtttaaagaagaatgaggtgtcagccyacgaagacagggacaggggagaggtaggaggaggaatagtagctcacgaaaacatgtttttcaggacctagaaacctccagagtaattgtcatgataatc

SEQ ID NO: 381727 - DNA, 201 bp, Homo sapiens
tatgcgtcatgaagccagggagtatttgtcttctgtgggtgggtgtttttaggacctaacacaatgatatctgaatgaatgagggaacaaaagaatgaagstgaagacaggtaggaagatgtgtcagaagttaaaagtggcaccgggacagtacaggaatgtgttttgcaaagagcaaacctgggtttcacggctgactct

SEQ ID NO: 381728 - DNA, 201 bp, Homo sapiens
gatggtggaaaatttgagatcagatcctgagatgcagtgcctgggttcttccttttatatcaggctgccccccagtttaaagctatttgatgagctctctsaaggcaagaagcccaagagcagaaggctgagaactcatgtttggagaatgacacttcatacttatatttatttgaaggtaggggcaagaaaaggaatctt

SEQ ID NO: 381729 - DNA, 201 bp, Homo sapiens
tgccattggccaagaaggtttccttccccagcttctttatatttcagaaacaatatttttctccttccctctgaagaatatgacccacctcccctccaccscaagaggagaaggcccttctctccactcccctccctgcatatctgaactctgggaagaggcagcctaccccaaggctcagtcttcagttctgggccatca

SEQ ID NO: 381730 - DNA, 201 bp, Homo sapiens
cgagagcggtcaaataggaagtgccttggtatttatgttgaagtgcacactggtttaaattacccactgggaatatgattatgcttaatctatgctcagtygaaaggggctggggctgctttctcccctcccttcttgactctctgttcacagaactcaggctgcctccagccagcctttgcccgctagactcactggccc

SEQ ID NO: 381731 - DNA, 201 bp, Homo sapiens
ggaacacagcccagggaacaaattgactgaatagttcacagaggcattcaggggaatatgacttagaagaggggatgatttttcgtgcctatgctaagtawggatagaaagggtgcagtctacgtctaggaagagtggaaagagtccatagttctgtacattattgattaaggcaggtcttgttgttgactacgtatgtca

SEQ ID NO: 381732 - DNA, 201 bp, Homo sapiens
aatacttggcatggagtaaatgaaagccctcacccaagtatttttcatgacactgttttcgttccgttttttccaggaggtgcatttgaaggggctggtaktgggagggaaggagaggatgaagtgcacccagacaatgattttgttaaaatttcccaggaataaatattaataggcaaaatggcaatatttcatgtgttc

SEQ ID NO: 381733 - DNA, 201 bp, Homo sapiens
cacttagaacataaagaaacttcctcaggaacccctctcttcagagagcatggagaatcgtaaacaacgtaatatgttttccttgttaaatattttctcckgtcactctggtttgacctcactccctactcccctgaccctatgcaggtggtgattgcgggcttggccatgctttgtgcaagtatctggatgagctgggct

SEQ ID NO: 381734 - DNA, 201 bp, Homo sapiens
tacatgtatcaagttcattcccttttatggctgagttgtgttccatcatatggctggactacagtttgcttatccattcacccagtggatgcttctttcasttgggaaatctttgccaagcctgggagccctgttgttatgggtctagtcttcgtgtgagacttcatgaggcactgtgagccctactgtctttgctccttc

SEQ ID NO: 381735 - DNA, 201 bp, Homo sapiens
tggcatggggatgtggttgggagaaaatctggggcttgacaatttgcagagaaacagactttgtttttgggttaaagtaaaatgctttcttgaaacaaaaygcaaattggtgcttgttggggttagacaagccacagaaaagaagcttctttaaattaatttttgaaagtttagagggagaaaattcagtcaatgggatgt

SEQ ID NO: 381736 - DNA, 201 bp, Homo sapiens
aactgtgtaatcttccctgctctctcccagaccccacgggctttggatgcttcttcatgtgcccttggcacctggtgcaggtctctatcaagggctcaccrtcaccaaggataggatcacactgtgccgtcagtgccttatacagagccaaccacatcataggtgctcaggaaataatgtctgtgcggtgtatgaccagga

SEQ ID NO: 381737 - DNA, 201 bp, Homo sapiens
agaaatagtttgtatatggttggattagtgtgctggaaatagtttgtaaatgaaaggaaatagtttataaaggaaatagttggttaatggttggattagastatttacgtgttattttctcccctggatttcaaatttctctggtgtgattacattactcatacaataaaaatacttaaaagagaacacaaaacagctaaa

SEQ ID NO: 381738 - DNA, 201 bp, Homo sapiens
ttctttatcctctgcatttcaagatgcaggtgttaattaatgctcacaaaatatgcacccaactcagtgagcccacatcagccactgaaaggtgccgtgcwtttagtgttgagtgaggatgattgaatcaattaggcaactcaagctcaaggactaatccctgcatgaaatgcttatggcaatgaagaaagcttagaatta

SEQ ID NO: 381739 - DNA, 201 bp, Homo sapiens
agtttgtatatggttggattagtgtgctggaaatagtttgtaaatgaaaggaaatagtttataaaggaaatagttggttaatggttggattagactatttrcgtgttattttctcccctggatttcaaatttctctggtgtgattacattactcatacaataaaaatacttaaaagagaacacaaaacagctaaagctcct

SEQ ID NO: 381740 - DNA, 201 bp, Homo sapiens
ctgacctcaaatagagaatgtttctctctagctatgccaaagtccagcctttatcacaaccttgcctccctccagccaggcatgtggcccacatggggcaygccctgagcccaggtgcggtgacccctctctggcttagcacggttaggtggtgctgtagttgcagagtgctggcttttaagccgcttgtgagtaagggat

SEQ ID NO: 381741 - DNA, 201 bp, Homo sapiens
cagctaaagctccttttagtttgtatttaattttggacccaggtgagaggcaattacaaagacaaatttaaaaaaatgacttttttctcccctttgagccytttatttcattttgctaagatgttcaaaagtctgttgcctcagagacaatataattacagtaagaaaaagtaagcaagcatagagtgtttgaatacatat

SEQ ID NO: 381742 - DNA, 201 bp, Homo sapiens
ctaccatcacagccgtctccaacctcccaataggtaatcacctcttactttttgtaatgatcatttatttgcttttctttgtagagtcacatccagcccamttaatagcatttgactttaactgcttttgcactttcaatggaatcaatatgtatgtatccttttgtgtctggcttctttcactcaatattctgattagac

SEQ ID NO: 381743 - DNA, 201 bp, Homo sapiens
aaaggctggagtgcagtggcgtgatcccagctcactacaacctctgccccctggggtccaagcgattcttacgtctcagcctcatgagtagctgggattayaggcatgcgccaccacgcctggctaatttttgtgtttttagtagagacggagcttcaccatgttggccaggttggtctcaaactcctgacctcaggtgat

SEQ ID NO: 381744 - DNA, 201 bp, Homo sapiens
gagatcttgctaaaaggcagaatctgactgggttggtctgggtggagcctaagattctgcatgtctataactagttcctgagtgatgttggcggtactaayccccggaccacattttcaagcttgagatgcatcagaatcaccggagggcttctaaatacacaattgctagaaatcaaaacctcaataagataacataccc

SEQ ID NO: 381745 - DNA, 201 bp, Homo sapiens
cacagaaaaaacacatgttggtgagaatgtggagaaattggaaccctcttatactactggtagaaatataaaatggttcagcagatgtggaaaacatttgrcagttccccagtaagttaaacttagaattactgtgtgacctagcaattctactcctgggtgtatatgtaagagatagaaaagaggtgttcaaacaaaaac

SEQ ID NO: 381746 - DNA, 201 bp, Homo sapiens
tatgaaccgggatctgttttactccaagtactatgtgctttctacttttccaggctgttaagcaagaacatgtcagacaaggaggggcataaaaaaaaaaaccctaactctgttctgtttaaatggtaatcaggaagtgttggcaatttagggctgtctcttactccattgcttctcaacactgacatatgtgggtatcac

SEQ ID NO: 381747 - DNA, 201 bp, Homo sapiens
gggctcaagcgatcctcccacttcagtctcctgagtagctgggaatacaggcacatgccatcacatctgctaatttatttttgccatggggtctcactttsttgcctaggacggtcttgaactcctggcctcaaacaatcctcttgtcttggcctcccaatgtattgggatcataggcatgagctactgaggccgtcccaa

SEQ ID NO: 381748 - DNA, 201 bp, Homo sapiens
tgatcttgccttccattacttccttatagctggtccagtgacaaactcagtttaaggctcaatctcaccagcttctaagctaaatatgatttaggtgggawacagagcatctgctctagccctagaataagtcctttctcacatcctcttaaagagatgccccaccatttcccaggatgtatgttattcctcgttgcaaca

SEQ ID NO: 381749 - DNA, 201 bp, Homo sapiens
cccaaaacctttctcgggccagttttcctccagaaatcgcagagtaaacacctgtgtataattgcatgctatgcttgaataagaagagttgaagataaacscctctaaaacaggtctccctctggtgcccaggttggagtgcagtggcacgatagtagctctctataaccttgaactcttgggctcaagcgatcctcccac

SEQ ID NO: 381750 - DNA, 201 bp, Homo sapiens
gatatttcccatgatctttggggtgcaaaatcacccccagttgaaaacctctgatcttggctgcagatttaaatgaaccatgggttttgagtgcttagcamagttactggtatataggaaatatccaagtaaaagggacctctcaacggagagagagtaatcacagttgcctgccacatcaaactgttctttttattatta

SEQ ID NO: 381751 - DNA, 201 bp, Homo sapiens
ctctaataggctgattgggacatttcttattctcttaccccaagtgaaagcccctcagggaaaaaaccagaagtcctttgtcttcatcctggagcccaagsagcagggcgatcctccggtggagtttgccacagacagggtggaggagctctttgagtggtttcagagcatccgagagatcacctggaagattgacaccaa

SEQ ID NO: 381752 - DNA, 201 bp, Homo sapiens
atcatgcccggctaatttgtgtattttggtagagatagggtttcactatgttggccaggttggtcttgaactcatgacctcaggtgatcctcccgcctcarcctcccaaagtgtggggattatgggcatgagccaccgtgcccaacccgattggttatttttattgcatttactgcagatgtcccttgagctgggtggagg

SEQ ID NO: 381753 - DNA, 201 bp, Homo sapiens
ctgggtccacgcttcccaggagtgatgaggctatgatttacttgagctggaacatggttaaggattttatttttatcatcgtcactttattttcacatttrccttcatttctattgagtgacgtgatttcctatttatggaagtgacatagctgcctttagaataattttgtttcatagtaaatgccatgcacaagcctca

SEQ ID NO: 381754 - DNA, 201 bp, Homo sapiens
gtgatgaggctatgatttacttgagctggaacatggttaaggattttatttttatcatcgtcactttattttcacatttaccttcatttctattgagtgaygtgatttcctatttatggaagtgacatagctgcctttagaataattttgtttcatagtaaatgccatgcacaagcctcagatggattcttggtgggaaaa

SEQ ID NO: 381755 - DNA, 201 bp, Homo sapiens
tttatttataaataaccatctgggacatggagatatctttggcctcttttataagggcaccattcccattgatgagagctctaccctcattcccattcackggagctctactctcattcccacttatgagagctctaccctcattcccattcataaaagctctaccctcattcccgttcatgaggactctaccctcatgac

SEQ ID NO: 381756 - DNA, 201 bp, Homo sapiens
tgggccactgtacccagccaaaaatggcaatatttaagtaaagaattaagttgggccaggcgcgatggctcatgcctataatcctagcaccttgggaggcygaggaaggcagattacgaggtcaggagatcgagaccatcctggctaacatggcgaatccccgtctctattaaaactacaaaaataagttgggcatggtgg

SEQ ID NO: 381757 - DNA, 201 bp, Homo sapiens
gtcccagctactcaggaggctgaggcaggagaattacttgaacccgggaggcggaggtttcagtgagctgagattgagccactgcactccagcctggtgasagagacagactctgtctcaaaaaaaaaaaaaaaaaaacagtgcagcacaccaacatggcacatgtatacatatgtaagaaacctgcacggtgtacacatg

SEQ ID NO: 381758 - DNA, 201 bp, Homo sapiens
ctcattctatctttaaaccttccaagggggtgggagcatgacttgtcgggagcaaggtcctcactgcgtccattgtgatctgcggatgccatgttgggtcytggggttgaggatgacaaaatcctcctcctggagggagcctctattccgcagaaaattcaagtacagcctcagagatgatctctgccatggggcatttgg

SEQ ID NO: 381759 - DNA, 201 bp, Homo sapiens
ataaaacgaggactctagggctgtccttttgaagccgtcataggctgtgatgagcttgtgcattcattcatccacccacttatccatgtctcagtgcattmaaagatacttcttgagggcgtgccctgtgctagacacagtacttatgccagacagacaatgtctttgtcctcctggacactagcgtcttttgaaggagat

SEQ ID NO: 381760 - DNA, 201 bp, Homo sapiens
ccactgcggccaccccccttgcagctgcttcttggagccctgctgggagctctgagaatacgcctgtcttgttcccatttttagtcaagtgagtttttgcyatgtgaatttaccttccttcttaaactttatttatttatgttgtgggacagggtctcactctgtcgcccaggctggagtgtagtggtgtgattgcggctc

SEQ ID NO: 381761 - DNA, 201 bp, Homo sapiens
gaggacaagaaggacgaacacaagcaacagggggagctgtacatgtgggattccattgaccaggtgggccttggtcccttcccgtagccactgcggccacsccccttgcagctgcttcttggagccctgctgggagctctgagaatacgcctgtcttgttcccatttttagtcaagtgagtttttgctatgtgaatttacc

SEQ ID NO: 381762 - DNA, 201 bp, Homo sapiens
ttattcaccgagtatcaacagagcacttactgtctgctaagtgctcttctagcacaggagactcaacaggaagcaaaacaacatccctgccctcatggggyttatattctagcagtgaggacagaagacaaacacatggtgtgtgtagggctagacaagtgagaggaataaagcaggcttggggctagagagtggcaggat

SEQ ID NO: 381763 - DNA, 201 bp, Homo sapiens
agaagcaagtgaaaggggaaacccttataaaaccatcagatctcgcgagacttattcagtaccacaacaacggtacaggggaaaccacccccatgattcarttatctcctatcgggtccctcccataacacgtgggaattatgggagctacaattcaaggtgagatttgggtggggacacagccaaaccatatcacccact

SEQ ID NO: 381764 - DNA, 201 bp, Homo sapiens
cgtgggagtccaggtgtcatcactgtcttaatcttgcagatgagaagcctgaggctcagagaagtgcagccacttgcccggggtcacacagctggtagaayagctgcagtgctgtttgcaccccggtcgccttagtctaatccccattgggtcccccgccaccctgcccagcctgttccctctggactgcggcctgccttt

SEQ ID NO: 381765 - DNA, 201 bp, Homo sapiens
cccgattttacgagacagattactgagactctgatgatgactcagccaaggtcacatggccagtaaggtaataggccctgaattcaaatctggatctgacyccccatcctgagctccttcaccaggttacatgaccctcaacttacagacgcttgcctgcgtgggagtccaggtgtcatcactgtcttaatcttgcagatg

SEQ ID NO: 381766 - DNA, 201 bp, Homo sapiens
atacgctgtggcccacttctttctatttcaagaaatgaggtggaaatagcgttggccacacggtcactttgtaccatgcactgggctaggcatggtcataygtatcttcttattcagtcttgtcaagacactgcaggacgaataacctcagcccttgcccactttacagatgtggacattgagattcagaggttaaatagc

SEQ ID NO: 381767 - DNA, 201 bp, Homo sapiens
ttgcagagatgtcagagttgatgataaaacctcgttaccttaatgggcatcaaagtgtgtcaattcatctgcagaatgcaatgacttagcttggagatttrgaaaaaacaaaggtcaaaacctcaagggagattaaaaatgtgaccttgtcctcccccgactgtgagatactctcagcagggacctttcctcacttctttc

SEQ ID NO: 381768 - DNA, 201 bp, Homo sapiens
cccacattgcaaccctacctgtgggctttggcaggtgattctcagtttgttcatcttgtgtctgtggtctctctggatcttcccctcccaagatcttctcytacccaaaaccattcccattctccctcttctataactgtaccacttttgtgttttcttgttcaaggatggtgatagtttaaaaaaaaaagtaaattacag

SEQ ID NO: 381769 - DNA, 201 bp, Homo sapiens
tgtgtgagggctttctgctcagactttcttccagagacatttacatgctggcataactaacatacacaaacttctggacacaaagtgatcgcataaatcayggggctttgtgcttttgttgttgttatttaagacctctttcgagggatctattcatcagtagcgtcctttacattctttttatagccacatcggattcca

SEQ ID NO: 381770 - DNA, 201 bp, Homo sapiens
gactggagggcagtggcacagtcatagctcgctgcagccgtaaagtcctgggctcaaacgatcctcccgcctcagcctcctgagtagctgggaactacagstgtgtttcaccatgcctggcttatttactattattattattattattattattattatttttttttttttttgtaaaggtgaagtcttacccagacattt

SEQ ID NO: 381771 - DNA, 201 bp, Homo sapiens
agagggcaattttcaaatctgagcatgcaccggaatcccctggaggatttgtgaaagtggaggctgctgggctccatctcacagtggctgattgagtaggwggtgggcagggctcaagaatttgcatttcaaccaatccccaggtgatgtagatgctgctggtctgggagctacttagagaagcagaactctggggctgcg

SEQ ID NO: 381772 - DNA, 201 bp, Homo sapiens
attctcctgcctcagcctcctgagtagccgggactacaggcatgggccaccgtgcctggctaatttttgtatttttagtagagctagggtttcgccatgtkggccaggctggtctcaaactgctgacctcaagtgatctgcctgccttagcctcccaaagtgctgggattacaggcatgtgccaccatgcccagcctgctt

SEQ ID NO: 381773 - DNA, 201 bp, Homo sapiens
tctgcagcagcaagccttgttggcactgtgggcagcaggaaatggttgaaataacttccatcatgatgccccttgtcatgagtttccatggaaactgaggsctgctgagcctgtcactctggcataagggaggagtgtggagggcagcctcatgagaactggtatttaggtagaatatgaatagggggatttgattccttt

SEQ ID NO: 381774 - DNA, 201 bp, Homo sapiens
taattaattttttgaggcagggtcttgctctgtcacccaggttggtgtgcagtggtgtgaccataggtcactgtagccttgaactcctggcctcaagagakcctcccatcttggcctcccaaagtgctgggattacaggtgcaagccactgagcctggcctgttattaatttttttttttttttttgagacagagtctcgc

SEQ ID NO: 381775 - DNA, 201 bp, Homo sapiens
aatctttttgtccaacaaaactttattcacaagacattttcacaacatgcgacccttttgtaatgtactttagtaatctgcctttttcattttgtactacwttgtgaccatgttagtattattaactaatttattttagttaatgaattaattaattttttgaggcagggtcttgctctgtcacccaggttggtgtgcagt

SEQ ID NO: 381776 - DNA, 201 bp, Homo sapiens
ccacctcacctggctaatttttgtatttttagtagagatggggttccaccatgttgaccaggctggccttgaacttctgacctcaagtgatctgcctgcaytggcctcccaaagtgttgggattacaggtgtgagtcaccgcgcctggcctgagtctcagttttcttatctataagatggggtaatagtggagcttacccc

SEQ ID NO: 381777 - DNA, 201 bp, Homo sapiens
cagcctcctgagtagctgggattacaggtaccctccacctcacctggctaatttttgtatttttagtagagatggggttccaccatgttgaccaggctggycttgaacttctgacctcaagtgatctgcctgcattggcctcccaaagtgttgggattacaggtgtgagtcaccgcgcctggcctgagtctcagttttctt

SEQ ID NO: 381778 - DNA, 201 bp, Homo sapiens
ttaggcaatctacttggcctctttgagtctcagttttcttttttcttgtcttttttttttttgagatggagtctcactctgtccccaggctgaagtgcagyggcacaatttcagttcactgcaacctctgcctcccgggttcaagcaattattctgcctcagcctcctgagtagctgggattacaggtaccctccacctca

SEQ ID NO: 381779 - DNA, 201 bp, Homo sapiens
caactcaaatatttctcctccctaaaccatcctgctgaggcaagctcattaccagttacttttatcttccaaaatagtctatgcttgcataatgtgtgggyttaaaaagaaaacaattgggaactcttgtacacttctgcaccttgacttctttttgttaattaataatgatgttggcggtggtttcttatcagcacacat

SEQ ID NO: 381780 - DNA, 201 bp, Homo sapiens
cctgagactgggtaatttataaagaaaagaggtttgattggctcacagttctgcaggctgtacaggcttttgtttctggggaggcctcaggaaatttacartcctggtagaaggggaacaagcacatatttacatggccagcaggaggaaaagagagctagtgaagggggaggtactacacacttttattaaacaacccca

SEQ ID NO: 381781 - DNA, 201 bp, Homo sapiens
agagctgacatttatgtagtatatgtttatgtacctgttacagctctaagagctttccctgtattattgcttacttaattccacaactgtatgtgttcaawacgcattatttccattttacagatgagaacattgaggcatagcccagggtcactgtattagtctgttctcacggctataaagagctaccaaagactgggt

SEQ ID NO: 381782 - DNA, 201 bp, Homo sapiens
agtatcatgaggtcaacatcagggtgccagcagggctgtgctccctccggaggggaaagccattcccttcttccagtttctgggggctgctggcattcctyggccttctcctcttctgcttccctattataaggacccttgtgatgcattaggtccacctggatattccagaataagcctcccatttcaagctccttaatc

SEQ ID NO: 381783 - DNA, 201 bp, Homo sapiens
tgccagaaaacctttaggttaagaggttaacaagacaagccacagataggggaaaatatttatgaaacaagagctgataaaggacccatatccaaaatagrcaactcttaaaactcaacaataaaaggccaggctcggtagctcatgcctgtaatcccagcactttgggaggccaaggtggatggatcacaaggtcaggag

SEQ ID NO: 381784 - DNA, 201 bp, Homo sapiens
agagcttagtcacgttacctgcaaggactgtggaatctgaagtccctagcggggcagcctttcatggaaggagcgagtgtgaattttgttgacattccacragctcatggggaaggacaaacagctgtttcctaggtatttcagtctgttcctgcagctatcacaaaataccctaagctgggtgggttataaacaacagga

SEQ ID NO: 381785 - DNA, 201 bp, Homo sapiens
agaagctataactcaagcaacttggaagtgaaattcaagtgcctgacagctgtctaggtgcccctgaaactgcctctagtcacaacaaagatacctccatyaaagagcataggaagggtttgaatcagatagcttcatgcaacacacgaacggaaaaataaatttcttaaagaacatattagcttcttcccatgagatcag

SEQ ID NO: 381786 - DNA, 201 bp, Homo sapiens
aaaagaagtgtcattttacattagagtcctcccagaacagcgcctgccgccttgatgatgacgacgattgttaattctgagatggagtcttgatctatcayctatgctggagtgcagtggcaccatcttggctcactgcaacctctgcctcctgggttcaaacgattctcctacctcagactcgtgagtagctgacactac

SEQ ID NO: 381787 - DNA, 201 bp, Homo sapiens
ggaaaatattatgaaagattccttgtgtagggtaccaggaccgtggcattttgtatgcaagtcctggtagtgtagctgtcagagttggctcttttttcttytgtttctccaaccatccatccttccatacatcattaaatttattttgttgtgtaatcaagttattggtgggtctgggcagtaaagccactccatgagtga

SEQ ID NO: 381788 - DNA, 201 bp, Homo sapiens
agtaagacctactgatgaatgcaaaatgaaagttggaggagaaatatatttccattgtcccaaaagtgtcttccgccaagaaatttatcaattagaaagamaaaaatagcagctttacagcggatagaccctgcaggtaccatcttaatcagatgatcaacgttaccaaccacctggaataaggcaggttgaaatcacgta

SEQ ID NO: 381789 - DNA, 201 bp, Homo sapiens
tttcaaggttcatccaccttgcagcttgttaccttgccttttaaggcccttaaaagattttaaattatctgcctcctgcctgccttttagttctcatgtcrtgctgtttttttctcctctgctgggttccactttaagcgtgcagctgcttagacacttttgcagtcaggtaaaggccagaaggtgacatgtagaccaaag

SEQ ID NO: 381790 - DNA, 201 bp, Homo sapiens
gtagaaatttataccaacccttccaaaattaatgttggattggaattggaggtatcaatataaactcaagttacatatatatttatatatatatattcacrcgtagatgaataaatgtgtgtgtttacatgttactacaaatacatacatatcctagctcactctgctgagtgcctagaacttatgacaccccagtcattg

SEQ ID NO: 381791 - DNA, 201 bp, Homo sapiens
taccattttcatccattagattggcaaaaatctttaaccatgacagagctgtgggcaaaatgtagagaaatggtgttcatatgccttcctggtggaaatgygaatggccataagtttgattggaatttgatctgagtctgttaaaaaagtgcaactcactctactgcattatttcattctgaaaggaaatttagcaaatgg

SEQ ID NO: 381792 - DNA, 201 bp, Homo sapiens
atacaaatttaaactgtacaaattctgattgtatagtttacaaaacaggaagacttcaattttaaagagactgatgtttatttttcttgtatttattgaaygtaaccacttctgtctgttctagaagtaacaaacagaaatgtggtgtgggaggaagggacaaatgggacatcccatttgtgatactgacaaaaaccataa

SEQ ID NO: 381793 - DNA, 201 bp, Homo sapiens
aattttctaaatatactaaaacaagtaaattacttagaaagtaaaacatttatgccatagttacatttagaagaggaaagtgcttgccttaaaacttcacraagaatgaagacgtatgtactactaagtattcatcttcagaacttttaaaacaccaataaaatagaacaaaggaataaaagagatagaaaccaactgaat

SEQ ID NO: 381794 - DNA, 201 bp, Homo sapiens
aagcataccattttcatccattagattggcaaaaatctttaaccatgacagagctgtgggcaaaatgtagagaaatggtgttcatatgccttcctggtggwaatgcgaatggccataagtttgattggaatttgatctgagtctgttaaaaaagtgcaactcactctactgcattatttcattctgaaaggaaatttagca

SEQ ID NO: 381795 - DNA, 201 bp, Homo sapiens
gcttgttttctaaagggatataaaagtcattagcaaatagcatagtacctaagtatataagacaaaaattcctacatatacaaagacaactgtataaagaraaaatctttcagaatttggaaagtcttgtatataagaaatcagcaaagacataatatcaaaataatttgccttaagaaatatacaactttgtgtcctaca

SEQ ID NO: 381796 - DNA, 201 bp, Homo sapiens
cctaagaaacccacaagaagtgttgaatctccattttagtcaaggaaacataaatgagaatgatgaaagcataccattttcatccattagattggcaaaawtctttaaccatgacagagctgtgggcaaaatgtagagaaatggtgttcatatgccttcctggtggaaatgcgaatggccataagtttgattggaatttga

SEQ ID NO: 381797 - DNA, 201 bp, Homo sapiens
ataaactatactgcagagggagatttaatgctacatctgatgttaaaggaaactgtgattttagttagcattgttagactgagggtaaccactgtcagaaytgaaaaacagacaagaaataaggaggaaaaaaggagatcaacataaacttgaccaagagagtaaaaataatgtaaagaatcagaataagttaaagcaagg

SEQ ID NO: 381798 - DNA, 201 bp, Homo sapiens
agcccctgaatcgatgattattttagtcagaaaagaaaacttttagatagggaggtgaagagagggaaaccagtgaataattaattttgcagtacagttasatcttacaggatgatgacagtgtgataaaaattttgtcatggtaaatatcaaataaggatttttgaattggaagaaatataccatgataaaaaatgacaa

SEQ ID NO: 381799 - DNA, 201 bp, Homo sapiens
tcagtaaaaatgttaagttccaaggataaatttaaaaacctggacttccagcacactagttgtgtataaaggaaactgaataagtctaatatcagacttgycctctttggtgctgaaaactaaaagactcccaaagtgggtagaatgtggactaggaagacggaataattcagtgtccagcccccgacatgtcaaggaatt

SEQ ID NO: 381800 - DNA, 201 bp, Homo sapiens
aaagataatgtgaaggaaaagtctcacaatctagggcaaccccaccatgagatggaaagaaaggaaaaggtgggctgggaggacagatgccaaggacctamtatgaaagcatgtcccaaaggacaaagttaaacagacggtggagagctattaatgaaatagcgaataaaggaagtgtttctctaatctgctgcttctgag

SEQ ID NO: 381801 - DNA, 201 bp, Homo sapiens
aacctcagatgatgagaactgtaacacataactcataggatctttcaaagacatccaaggagagcactggagaaagctttctggaattcagagaatagacstgatttgttgcattaaaaaattcagtatataaagagatctgcattagtgacaccaaagataatgtgaaggaaaagtctcacaatctagggcaaccccacc

SEQ ID NO: 381802 - DNA, 201 bp, Homo sapiens
cgcccaccattatcgagaggtagttggcttttgcctgttgatttgcgtagttgctcattcctttattctgctgcctttagccaacatgggctacagggggraaaaaaaaaaagggacattggttttttgaggctcgttgagtgtcttgtatgcaatgggtgcctagtagcggtgtgggctctacagtttttcaaataagag

SEQ ID NO: 381803 - DNA, 201 bp, Homo sapiens
acgcccaccattatcgagaggtagttggcttttgcctgttgatttgcgtagttgctcattcctttattctgctgcctttagccaacatgggctacaggggggaaaaaaaaaaagggacattggttttttgaggctcgttgagtgtcttgtatgcaatgggtgcctagtagcggtgtgggctctacagtttttcaaataaga

SEQ ID NO: 381804 - DNA, 201 bp, Homo sapiens
aggaaataacccacttgtcatccctgtggtacaaagctcatcatgaatgtgtggccccatctcagacaaaaagcaggtcctagggccatgacggtgtgaaaggggatgctttctttgccttctgcaaaactagaaaccagcataggcttctcccatcttcgtgatctgtatggggcagggctttgtaagcagacgtcttcc

SEQ ID NO: 381805 - DNA, 201 bp, Homo sapiens
agtgctcaaatgatgttaacaatgtcatagtgatagttcccaccactccctccattcttagctgattccatttggcacaggaaataacccacttgtcatcsctgtggtacaaagctcatcatgaatgtgtggccccatctcagacaaaaagcaggtcctagggccatgacggtgtgaaaggggatgctttctttgccttct

SEQ ID NO: 381806 - DNA, 201 bp, Homo sapiens
aagagagggagggtgctccagggaaaggctgtggtgtgtgccagggcttggaggagggaaatagcatgtcggatgtaggaaatgaggagcgaatgtctgaytgatgatatggagggggagttggtagagatggggtaggagggcaaggcccgtggcggtgaagcttcacacctctgtctccttagccccacctgcaggctg

SEQ ID NO: 381807 - DNA, 201 bp, Homo sapiens
gcaaagagaagggatgcaacgtgcctggttcctgtgcacccctggggagcataagccaggatttgaaccaaggtctttgtactccagaactccctacaaakggaggctttctcctcttcttcccaggtgagctccagtctgcagaactcagccaggatgcatgtgctcagagaagcctttcttccccttgctggggaggag

SEQ ID NO: 381808 - DNA, 201 bp, Homo sapiens
atcctctgaaacagatgaggcaaaacatcctcatcctccccctgcattgaaacccaaactccctaccctgagtggcttttgtctttttttctcccctagcrtaatggactattttggttcctgcaactgaaaagtttaggggtaggtcttgtttcagtcatggctgaatctctgtgctcactcagtggctgttttcctctt

SEQ ID NO: 381809 - DNA, 201 bp, Homo sapiens
ggtgtgacgggggatgagtcctttctctactttctctcaccttcatccctaatactctaccccacaaggtttagagataccacccccctaataatagggcyacccataattgagaagtgtctttagttactttttattttgaaataattttagactcttgtggacctggcaaaaatagtacagtttctgtgaaccattcat

SEQ ID NO: 381810 - DNA, 201 bp, Homo sapiens
ttctccaaagtcacagttccagctgttaccctggggactgttttgttaggtcattaaaggaggaaaaaaccttgcagagtatggtctgagtccgtgttttyctaaaagtaaatgacaaaggatcttgtttgtgcacctcaacagatgtttttgtagcacaggagtctttcacttgaactccatcgggaaaggccaattgac

SEQ ID NO: 381811 - DNA, 201 bp, Homo sapiens
ccttcttcagggcactgctctcactagaagaaatctgcatcacctaggaggttgtagtggctgtaagccaagccaatgactgactggcagggaggacaagaggactggcctcccttccttcaggaggacctacttttccggtgtgattcatgctccagacatccccccgccactccctatacagtcagggtgaagcccatc

SEQ ID NO: 381812 - DNA, 201 bp, Homo sapiens
gtttctgttttccatgtatttccaagtctggcatgttcctaagaaacccacaagaagtgttgaatctccattttagtcaaggaaacataaatgagaatgaygaaagcataccattttcatccattagattggcaaaaatctttaaccatgacagagctgtgggcaaaatgtagagaaatggtgttcatatgccttcctggt

SEQ ID NO: 381813 - DNA, 201 bp, Homo sapiens
acctggtcttaccttagctttacaaaggcagtttattttgggggaagggctggtatttaaactataaactaaatgttttccaaagttagcttggcccaagmccaggaataattaagggcagtttggaggttaaaggcaagatagaggttggttagatcagatctgtttcactgtcataattttcttgttgttctgattttg

SEQ ID NO: 381814 - DNA, 201 bp, Homo sapiens
gattgcacactttagaatcctggaggtccaggactgggagctgcactctggcactgagctggtcctggtttttgaggttgggaaagatttccttacacctrgggagacctggagggacacaaaggccctccttatgcctcatcagctaaagttggtcagtttgcctaatgctggctccaaagagcaaaaactgctgtgttt

SEQ ID NO: 381815 - DNA, 201 bp, Homo sapiens
gcaatcttgggaaagatactgttaaccgtggttccttttaggacagagaggaggattgggtgggagtgaccgttctgtttcagccctgtgttcttttataytaaaacaagccagcaaaccaacctttgagatgtgttgccttaaacattactgaatgggggtgggggagattcggctccaacttgcccccctcagccccaa

SEQ ID NO: 381816 - DNA, 201 bp, Homo sapiens
cgtacttggccaactatgtcattttatatcagggacttgagcctccaaggattttggtatctggggaggtcctgaacgagtcccccatagatatcaagggmcaactgtagagtaaaagtttcgtacaatctaggtggtgggtatacaagtaatccttgtaattttttttagtgttgctgtatgtttaagaattttatatta

SEQ ID NO: 381817 - DNA, 201 bp, Homo sapiens
agatgatgagcatccagccattaaaaaatataaatttgtacatttccttatgtataaaattgtgtatcagaagaggaacactgtaaagtaatactgagctstgggtggtgagatgcatgctggggaaagtatattgatgtctttgtcatactttgaattgtatacataaataagatggattgatgggtagataaatccatg

SEQ ID NO: 381818 - DNA, 201 bp, Homo sapiens
cacaggtgattcacatttgcattaatgttggcatatcactgggctagactgcaagaattctgagtctctatcaaggcaaaaaacaaactagcagcaaaaaycacattgtagcgatagggaaaaataggtcagaaaacttctttacagcagtatattcaatgagagcaatgtccccataaaccctaccaggaaatgagtggg

SEQ ID NO: 381819 - DNA, 201 bp, Homo sapiens
caagattcacaggtgattcacatttgcattaatgttggcatatcactgggctagactgcaagaattctgagtctctatcaaggcaaaaaacaaactagcarcaaaaatcacattgtagcgatagggaaaaataggtcagaaaacttctttacagcagtatattcaatgagagcaatgtccccataaaccctaccaggaaat

SEQ ID NO: 381820 - DNA, 201 bp, Homo sapiens
aattaaagcatctttggagttctcttctccaggcctgttgctgtgtgagggctttctgctcagactttcttccagagacatttacatgctggcataactamcatacacaaacttctggacacaaagtgatcgcataaatcatggggctttgtgcttttgttgttgttatttaagacctctttcgagggatctattcatcag

SEQ ID NO: 381821 - DNA, 201 bp, Homo sapiens
tcagtagtgagtgccaaatcgctctctagggggcttattctacctctcggtggcatccccactaggtgccaggcactttcctgctgtggacccatgaacgrgcagtgctgtcttgccttcaaggagtggagagattaaatatataatagtggccgggtgcagtggctcatgcctataatctcagcactttgggaggctgag

SEQ ID NO: 381822 - DNA, 201 bp, Homo sapiens
ggcctcccatagtgctgggattatagacatgagccactgtgcctggcctagcttttctattgatgagattttacccttggccttccagaaccaaatggttkctacagcctaagtaccactgagtgcgtaagaccagcttcggttgtgaaagggcgtgtgccttcagccacgtgggaaaactccattcctttccctcccttt

SEQ ID NO: 381823 - DNA, 201 bp, Homo sapiens
cctgcctttctctccgtcctcttcttctcatccaaaatgccctgcctgctccgccacgctgggccaccctctcgtgttactgaggtggatcaaatgaggtscttgtgttggaagatttggtacacactggtctctttcagcctcggaggtgatgcctcttctgacttttctttctctgtggcttatgatgattcatagctg

SEQ ID NO: 381824 - DNA, 201 bp, Homo sapiens
tgcccgggtagggtcttagccctttgtccatttccagaaggaggggacactgagtccagacgcagagatagctttgcgggatcctgttggggaaggaaggmgccaggctgtgcctgggctgcagttgtgtggctgcatcctcaggtggagggaactccagcttctaattggctcatgttaatttcattttagtggatatca

SEQ ID NO: 381825 - DNA, 201 bp, Homo sapiens
ccctagaaaactcaataggcaagaggatgccatagtcgaatggaacctctattaaccccaaagtcagacaggaccagcccatgggtgctcagggcactgtrgcacaaacaaggccggcctgctggataaagggaggtagaaacgctttcagccctccccggtgcttcccggtttataacttcatctactcgtgacacgtgg

SEQ ID NO: 381826 - DNA, 201 bp, Homo sapiens
caaagagaagggatgcaacgtgcctggttcctgtgcacccctggggagcataagccaggatttgaaccaaggtctttgtactccagaactccctacaaagrgaggctttctcctcttcttcccaggtgagctccagtctgcagaactcagccaggatgcatgtgctcagagaagcctttcttccccttgctggggaggagc

SEQ ID NO: 381827 - DNA, 201 bp, Homo sapiens
tgagggtatatgcaagtgcagagacagcgtgactagaatgtccaggcaggagaggggagatggacaggcactgcgggtcatgagggtttcagagagcataygcagtgtgtcccagctggtgacaaccttgctcttcctacaaccaaccatacacatttccatcttggggcctttgcatttactatttgctctgcctgaaat

SEQ ID NO: 381828 - DNA, 201 bp, Homo sapiens
ctcagatccttgtgttagggggaacttaggccagaagtgcctgggctagagggtaatggggaccccaggaggctccccgctcttgccccaatcctgccttstctgaaagggaaggaaggctcttaccttctagctgtctgcaacaggaactgccgggaggccacgctagccatcccccaactttggtttgcaaaactctga

SEQ ID NO: 381829 - DNA, 201 bp, Homo sapiens
agacagctggtcatgagggcagagctcatgtctccgatttaagaggcacacgcctagtgtcagatagtactgtccagcctggaaccatgctattggagtgkaggggctacctgatagcctcccggaacgccatggagcaaacagtcattccagttcattctaacagtcaatcagcagctagactgtattagtccgttctca

SEQ ID NO: 381830 - DNA, 201 bp, Homo sapiens
ccagatgcattgatcttactttaaaaggtgtctgtatttccctttccccagtgaaatgactagaaacaagaagaagaaaaacaattattttttttttttttatacaaggagggctgcccagtgcataaaaatgggacttgggcagcgagagaaggtacatagagctggagacagctggtcatgagggcagagctcatgtct

SEQ ID NO: 381831 - DNA, 201 bp, Homo sapiens
tgcaaaccaattcatacctagattccacagaatcaaagatgcagccgagttacccattgagctggagtgggggcgtagaattgccctgtttggcctccttsctgacattgctgttcctactgcagcctctgatgcttccccttggaggctcccagacccagttgggcaaccacagtgttgtccgtctgcttctcccagttc

SEQ ID NO: 381832 - DNA, 201 bp, Homo sapiens
ctccattcatctgctaagtccttccctgtcctcttgcaagatgccttaatccagggattatcaaactttttcttaaaatcaggagaacctcattgcaaacsaattcatacctagattccacagaatcaaagatgcagccgagttacccattgagctggagtgggggcgtagaattgccctgtttggcctccttgctgacat

SEQ ID NO: 381833 - DNA, 201 bp, Homo sapiens
ctgaagccttcagaagtgcagtcacttgtccagggccacatagcaggctgagatttgaaccgccaggccttttgactccagagcttacactcttaactccrttcatctgctaagtccttccctgtcctcttgcaagatgccttaatccagggattatcaaactttttcttaaaatcaggagaacctcattgcaaaccaatt

SEQ ID NO: 381834 - DNA, 201 bp, Homo sapiens
aactgaagccttcagaagtgcagtcacttgtccagggccacatagcaggctgagatttgaaccgccaggccttttgactccagagcttacactcttaactycattcatctgctaagtccttccctgtcctcttgcaagatgccttaatccagggattatcaaactttttcttaaaatcaggagaacctcattgcaaaccaa

SEQ ID NO: 381835 - DNA, 201 bp, Homo sapiens
atcatatcatatattgtatattattataattacaacagcagctaccatttattgaagtctttctaagtggcaagcagtctgctaattgctttccatgcatygtctaaccaaatcttcaaccaaatcttcattactccctgtgacaaaagatgcggcaaatgagactttccaagtcacacaaataaatactaaatactaaat

SEQ ID NO: 381836 - DNA, 201 bp, Homo sapiens
gaccccctttgtcatcctgggctggctttgacctcttgtgttaagtcccttcttaggaaggtggcttggtgcatgctctatttgagaaaatggataaacawcaatattaacaggtatcgacatatcatatcatatattgtatattattataattacaacagcagctaccatttattgaagtctttctaagtggcaagcagt

SEQ ID NO: 381837 - DNA, 201 bp, Homo sapiens
aggctgagtggaggctgggctgctcggcaggtgggcttgacttgtcccttcttggtgataagactcaggtgctggccaagtctgaccccctttgtcatcckgggctggctttgacctcttgtgttaagtcccttcttaggaaggtggcttggtgcatgctctatttgagaaaatggataaacaacaatattaacaggtatc

SEQ ID NO: 381838 - DNA, 201 bp, Homo sapiens
gaactgaggatcagagagactcaaacttatatcattattcaagggcagagcaatgatttgaacctacatatctgactctgtagcctgtgttctgaggaaawattttactgggttccctgtgaaattcctgttcccatttcctttgggtgggaggagaaggaagctgctcatttaaacaggtttgacaacgtcagagctttt

SEQ ID NO: 381839 - DNA, 201 bp, Homo sapiens
tctaatgaaaagtctttcaaatgtttttggctcgctgatagagcctgtggtgtttataaattccatttggttcactgacctccttgcagtgcaaatgctawctcatattcccaccctgactctgttgtgtaatttcatgcaggtagggatggattttactttcagccctcggctcctccttgccatgctttcatctcaaat

SEQ ID NO: 381840 - DNA, 201 bp, Homo sapiens
ttctaatgaaaagtctttcaaatgtttttggctcgctgatagagcctgtggtgtttataaattccatttggttcactgacctccttgcagtgcaaatgctrtctcatattcccaccctgactctgttgtgtaatttcatgcaggtagggatggattttactttcagccctcggctcctccttgccatgctttcatctcaaa

SEQ ID NO: 381841 - DNA, 201 bp, Homo sapiens
ttcatcctcatttctatgcagaggaaccatttgccaaagtctccatggatgattctgaaggtttagtttgtttttcgtttatttcattttttttttttttttgttcttaattttgctcaggaataaagagatggttagaaatctctagacaggatagagaaggatgttggagattaggggtgagaggtgggagccaggctg

SEQ ID NO: 381842 - DNA, 201 bp, Homo sapiens
tttcatcctcatttctatgcagaggaaccatttgccaaagtctccatggatgattctgaaggtttagtttgtttttcgtttatttcattttttttttttttttgttcttaattttgctcaggaataaagagatggttagaaatctctagacaggatagagaaggatgttggagattaggggtgagaggtgggagccaggct

SEQ ID NO: 381843 - DNA, 201 bp, Homo sapiens
ctttcatcctcatttctatgcagaggaaccatttgccaaagtctccatggatgattctgaaggtttagtttgtttttcgtttatttcattttttttttttttttgttcttaattttgctcaggaataaagagatggttagaaatctctagacaggatagagaaggatgttggagattaggggtgagaggtgggagccaggc

SEQ ID NO: 381844 - DNA, 201 bp, Homo sapiens
ccgtatttcccattgagataaatgagacgaaccagacacaacaggtgcttggcacctggggaagggcccaataaatggctgcttaacaaggatgaaatggrccatgggggcaccttgttcatccctttgtcctggctaatgatcaggaggtcattttgggtttctcctgataaggtaagatgcacattaactctcagcagg

SEQ ID NO: 381845 - DNA, 201 bp, Homo sapiens
tgctcaaagccagatgcattgatcttactttaaaaggtgtctgtatttccctttccccagtgaaatgactagaaacaagaagaagaaaaacaattattttwtttttttttatacaaggagggctgcccagtgcataaaaatgggacttgggcagcgagagaaggtacatagagctggagacagctggtcatgagggcagag

SEQ ID NO: 381846 - DNA, 201 bp, Homo sapiens
tgggatgaagagtcgctcttggaagccgagctgaattgcattcggtagacctgggctttctccttaatgcccacggtcataccttttatttatcaccatakcctctggaagccagggagaaactctggtaaacagcctcaaggcagacttttctgagcaaatgattgatccagtaagggctaagatggagtttactcataa

SEQ ID NO: 381847 - DNA, 201 bp, Homo sapiens
atcctgtactggcttaccatgcacagagcactgaagagacaaaaacttccttgatttctggttttgggtcctcgcatctcatttcatgtcctttccccccmccccgcccccgagacggagtcttgctctgtcgcccaggctggagtgcagtggcgcgatctcggctcactgcaagctccgcctcccgggttcacgcctttc

SEQ ID NO: 381848 - DNA, 201 bp, Homo sapiens
tgcttcttttagattagtctaataaggcttaggaatgacaccaattcttctggtgcaggaagtgtagcttttggtacacctttacgttcctagccttgackctgtaacagatttctttttatggtaactgcctgccagttcctctactgaactcatccagcagagaggggcagctgtgctgaaaccccttggttaccccga

SEQ ID NO: 381849 - DNA, 201 bp, Homo sapiens
atgtctccgatttaagaggcacacgcctagtgtcagatagtactgtccagcctggaaccatgctattggagtgtaggggctacctgatagcctcccggaaygccatggagcaaacagtcattccagttcattctaacagtcaatcagcagctagactgtattagtccgttctcacactgctataaagacatacctgagact

SEQ ID NO: 381850 - DNA, 201 bp, Homo sapiens
agcgttccagaccagcctcaccaacatggtgaaaccccatctctactaaaactacaaaaattacctgggcgtggtggtggccgcctgtaatcccagctacycaggaggctgaggcaggagaatcacttgaacccaggaggtggaggttgcagtgaacccagatcatgccactgcactccagcctgggtgacaagagagact

SEQ ID NO: 381851 - DNA, 201 bp, Homo sapiens
ctagctgcccatcagaaacacccaggggggatcttgtaagtatagggtattaaccatggcatgtgtatacacctgtgtaacaaacctgcatgctcttcacrtgtatcccggaacttaaagtaaaataaaataaaataaatatatacaaaaaagaaattacagggtattagaaccttcttctgaagctcattgtgatgggca

SEQ ID NO: 381852 - DNA, 201 bp, Homo sapiens
gaacattgctactctagcaataataatgagtattcatttgtaagaggcctgatatttggcaacccttctgggttaactcacccacactgtaaactcccccyttttttttttttgagatggagtcttgctctgtcgctcaggctggagtgcagtgggtgatctcggctcactgtaacctctgcctcagcctcctcagtagct

SEQ ID NO: 381853 - DNA, 201 bp, Homo sapiens
gcagccactttcagcgtgctggcaccccaccaaggatgatatctttgtaatgaggattttaagatcccgttagacccccaggtgtttattttctaagggakgtagggcaatctgggaaggcttcctggaggaaggagtatttgacccttaaaagtcaagttagagttcaacagcaagagactggcagaagagaggtgcaag

SEQ ID NO: 381854 - DNA, 201 bp, Homo sapiens
ttcctctggaagtggaaaagcacagaccccatgaatagcccttttgcactcattgggtagagtcaatgaaaagctgctggtgagaaaacttttgaaaacayttcttggtcaggcacggtggctcacacctgtaatcccagcactttgggaggccgagctgggctgatcacttgaggtcaagcgttccagaccagcctcacc

SEQ ID NO: 381855 - DNA, 201 bp, Homo sapiens
gctgcctatcttaccattgaggaaatgaattccttagcaagttactagatgaaacaagactttgggaaaatgtttaaagtttctgatttttttttttttttgtactctagaaatgttcattttcatgaacattgctactctagcaataataatgagtattcatttgtaagaggcctgatatttggcaacccttctgggtta

SEQ ID NO: 381856 - DNA, 201 bp, Homo sapiens
acagctgtaagccattgcacctggctgaaaattagaatactaataacacgcaaataatcctggacacctaaatgatgcttaccatgtgctgggcagtattygagacaccttgtgtgtgtggtctcgtttactcttcaggatgcctctttgaggtggatactgttatcattcctgtcagaccgctggggtagtaatacagtg

SEQ ID NO: 381857 - DNA, 201 bp, Homo sapiens
gggacaatcgtcattgtgagcctcactgatgtttaagtcacctaatgatgcagctgccttcccccaccagcgactggagtatgggcagttcctctggaagwggaaaagcacagaccccatgaatagcccttttgcactcattgggtagagtcaatgaaaagctgctggtgagaaaacttttgaaaacatttcttggtcagg

SEQ ID NO: 381858 - DNA, 201 bp, Homo sapiens
ggctgcctatcttaccattgaggaaatgaattccttagcaagttactagatgaaacaagactttgggaaaatgtttaaagtttctgatttttttttttttttgtactctagaaatgttcattttcatgaacattgctactctagcaataataatgagtattcatttgtaagaggcctgatatttggcaacccttctgggtt

SEQ ID NO: 381859 - DNA, 201 bp, Homo sapiens
tttacctactctttgttgacctaatggctgaatgaacggacgtgaccatcatcgtgagaatctgtggataatagcagcaaacatttaaacacaggctgtgygccaggcactgcactaagcacttggccatgaacttggtctccttaaatcctcatgtcaatgccacgaaactggccctctctatttgtctcagttttacac

SEQ ID NO: 381860 - DNA, 201 bp, Homo sapiens
gaggttcgctgagaatcggggcgcatccatggagagtccttgggcagttcctgactctctggttcaagggcattctctggggcatgggccctcgtccttgrctacagttctgcggggaagttttacagaattttgaagtctatgccagcctcaagcagtttctcttgcaaaggtgtgtgtgcagtcacgtgtataccagct

SEQ ID NO: 381861 - DNA, 201 bp, Homo sapiens
tgtatttttctgcaaccaagccaagctgggtcatacgaccagctcttaagaaccctgctgaatcccagatgactgagcccttcctacacagctgagatagdcacttccaggtgaggggatttgggaccctgctgcttctagagccagtcatttacaaaaacaaaaaaaactggctctccttagcttctatatagtttctct

SEQ ID NO: 381862 - DNA, 201 bp, Homo sapiens
tccctagctagggctaagtctggtttgatctccccctcctgctctctggctggcagtgtgagagggtggcaagggagagacctttggcatcttggggggggagtaacaatctcgagggtccaactccccaaacccttcagaattcaccttcttcttctataaaattgggtgggttaatttacttctttgagttgttacagt

SEQ ID NO: 381863 - DNA, 201 bp, Homo sapiens
caaagagggcattacccgcacagcgcaagagttcaggttaaagacgtgccccgtttggacggggagctcctggattccagcaggacggtggggcggggctstcttggtaccctaatcttgaactagggtgagaaactatggggggcggggtggtaaaggggtgacatggcgcgagggaaacaggtggccttgcccgtcgga

SEQ ID NO: 381864 - DNA, 201 bp, Homo sapiens
caaagctaccatctccaaataccattacattggggattaggtttcaacatataaattttgggaggacacagacattcagaccatagcagtaggcagagaarggggatgtccttccaggttgggacaataggacacacaagggtgtggtggtgtcaacacgtggcatgtaccctatattatcactgggccaccaagatacat

SEQ ID NO: 381865 - DNA, 201 bp, Homo sapiens
  misc_feature (1)...(201): n = A,T,C or G
tactttggtttggctgctggcttcaaaaagaatgaaaaatgatttttcctggtttggatggaatcactgtaaaaccgattgggtggcttggagagcaggtntacagcctgtcgtgtagcacacaggtgggaggaagtgggtgacaggggaggctatgcccctcaaagtgggatgtttacaagcaaaactggattgttagtg

SEQ ID NO: 381866 - DNA, 201 bp, Homo sapiens
attctgagacacgcacaaagtgtgggaaatgagactcatgcgatgcacacgtgttcagctgagggtgagcaaagcagcgctccccttcctggtctacagcrtgaaagcttcaacaagtgtcctcaccatctgttgactgccatgtttttcctgtttttgagctttttcttggtgatcttgctgttcaaatggcccgaagca

SEQ ID NO: 381867 - DNA, 201 bp, Homo sapiens
gttgtactttggtttggctgctggcttcaaaaagaatgaaaaatgatttttcctggtttggatggaatcactgtaaaaccgattgggtggcttggagagcwggtgtacagcctgtcgtgtagcacacaggtgggaggaagtgggtgacaggggaggctatgcccctcaaagtgggatgtttacaagcaaaactggattgtt

SEQ ID NO: 381868 - DNA, 201 bp, Homo sapiens
agggcggttgtgatgattaaatgagatgccattacagcaagtgcttaaccctgcacctggcatagagtaactgttgagtcaataagatcgattattttttytctttttttcttttcttttcttttctttttttttttttttgagatggagtctccctctgtcgcccaggctagagtgcaatggcaggatctcggctcactg

SEQ ID NO: 381869 - DNA, 201 bp, Homo sapiens
gttcgatttgggctggcgttgtactttggtttggctgctggcttcaaaaagaatgaaaaatgatttttcctggtttggatggaatcactgtaaaaccgatygggtggcttggagagcaggtgtacagcctgtcgtgtagcacacaggtgggaggaagtgggtgacaggggaggctatgcccctcaaagtgggatgtttaca

SEQ ID NO: 381870 - DNA, 201 bp, Homo sapiens
aacccgggaggcggagattgcaatgggccgagattgtgccactgcactccagcctgggcaacagagcgagactttgtcttaaaaaaaaaaaaaatgaaaaraaaagcagcattgaaactagcttgtcttggacagctgcacttgcattatgtaagcgcacagggaaccctgcggatacagggaaagccatgtcctcgtgtt

SEQ ID NO: 381871 - DNA, 201 bp, Homo sapiens
atgctgttttgtttaccatagccttgtagtatagtttgaagtcaggtagcatgatgcctgcagcttgttctttctgcttagggttgtcttggttgtgtggkctcttttttggttccatatgaaatttaaagtagtttctaattctgtgaagaaagtcaatgatagcttgatgggaatagcattgaatctataaattacttt

SEQ ID NO: 381872 - DNA, 201 bp, Homo sapiens
aaacaaatgtttaaaagtaaagcttgaagcagtcagctcctgtgccctccaggggtccaaaagattggggatgttcatcttccacatgacccatttctgtwtgaaaatattactgtgaacctttacaaataaatttctcattgctctgtatcatttccacgggcagaaaaggcagtcaaggttttcaacaggtaaagtcag

SEQ ID NO: 381873 - DNA, 201 bp, Homo sapiens
agtaccatgctgttttgtttaccatagccttgtagtatagtttgaagtcaggtagcatgatgcctgcagcttgttctttctgcttagggttgtcttggttrtgtgggctcttttttggttccatatgaaatttaaagtagtttctaattctgtgaagaaagtcaatgatagcttgatgggaatagcattgaatctataaat

SEQ ID NO: 381874 - DNA, 201 bp, Homo sapiens
tctcaccaaaggctcatgggtgcatttggctgagaaaaggcaacaaccagcttgtcgtggtgtctcatgcctgtaatcccagcactgtgagaggtcgaggygggcggatcacttgagatcaggagcttgagatcagtctggccaacatggcgaaaccctttctctactaaaaatacagaaattagccaggcgtggtggtgc

SEQ ID NO: 381875 - DNA, 201 bp, Homo sapiens
agatcagatggtggtagatgtgcgatgttatttctaaggtctgtgttctgttgcaatggtctatatatctattttggtaccagtaccatgctgttttgttkaccatagccttgtagtatagtttgaagtcaggtagcatgatgcctgcagcttgttctttctgcttagggttgtcttggttgtgtgggctcttttttggtt

SEQ ID NO: 381876 - DNA, 201 bp, Homo sapiens
atcctttccccgttgcttgtttttgtcaagtttgtcaaagatcagatggtggtagatgtgcgatgttatttctaaggtctgtgttctgttgcaatggtctrtatatctattttggtaccagtaccatgctgttttgtttaccatagccttgtagtatagtttgaagtcaggtagcatgatgcctgcagcttgttctttctg

SEQ ID NO: 381877 - DNA, 201 bp, Homo sapiens
gacctacccattcagccactgatactatggatgggttgtggtttgtcataacggaatttaagaggcgttgctttcttccacgtgtcatgttattttctagmtgcgttggttctggcctgggccctgagggtgtaagagggaatacagtgtagtgggtaaacgagggaggcagcatttgtccctcaaaatagcaccaagttc

SEQ ID NO: 381878 - DNA, 201 bp, Homo sapiens
gagggaaccgagccacagatttagagcagcttggcagaaggctgagcccggctggaagcacagacagccctggctgaacaccagcctctcactcctccttstttggatcctgggagggtctctctagtgctactctgtaaccttgagagctacagagtaacaactccaggcacctccagggacttggagggaaaggaggag

SEQ ID NO: 381879 - DNA, 201 bp, Homo sapiens
gctttgaatggggaccgggaggaaggtcaggggtcgtgtgggggctggcgttcaaaactcctcttttcgagcggctctgcgtggggtggcgccgtctctcytgaccgcccttgtgcccagagctcgcggacgctcggagccacacttccctgtctcacttcggtggttgcgggtggcgggtgggagcgataccgcgggagg

SEQ ID NO: 381880 - DNA, 201 bp, Homo sapiens
ctttagtctccaagcagggagagtgagttgttgaacgttttgtagctttcaaatgcaggtctggtcttggtagaggtgtccctcctcccctacctccgttwgattgggcagctggttcagatcctaaagtttctaagactgtttttaacaaatagagtaaaggcacttaagcaattttcagttgcaaatatttgctctaat

SEQ ID NO: 381881 - DNA, 201 bp, Homo sapiens
gtgacagagtgagaccctgcctcttagaaaacagaagctataactcaagcaacttggaagtgaaattcaagtgcctgacagctgtctaggtgcccctgaarctgcctctagtcacaacaaagatacctccatcaaagagcataggaagggtttgaatcagatagcttcatgcaacacacgaacggaaaaataaatttctta

SEQ ID NO: 381882 - DNA, 201 bp, Homo sapiens
gaactcctggactcaaacaattcttccgcctcagcctcccaaagtgctgggattacaggcatgagctactgctcccagcccaggaattggaattttttagrgcatctggagaggtgaaaaagggggccaacaggctggatgctgcaggaaggaaggggaaaggaagaagggttggtttttctggattcaaagtgtctcatc

SEQ ID NO: 381883 - DNA, 201 bp, Homo sapiens
cgtccaggtgatcatggagacgcggcaggtggcctggagcaagaccgccgacaagatcgagggcttctgtgagtactcgctgggtggggcagtgtggcccrtcctctggggccctggcctgagcacctgtccaccttcctgtcttgtcattactgtgattgttgttggtttgatgtgttcttttattcgtcttaaaatgaa

SEQ ID NO: 381884 - DNA, 201 bp, Homo sapiens
aggccatatggtaattaccagctggatgtcaaccccaagtctgctccctattatgggctgcatgtagttggctcctggggatacagagataaattatgtgsatttactgttctcaaggtgggcagtctggtagcttctgtaagaaaaagtaggttaggtctagaatgccaatgtttcgcattttccctgtaaatctcaggt

SEQ ID NO: 381885 - DNA, 201 bp, Homo sapiens
cttagctctctgagtggccagcgatgccttgccactagaaccttctcctaaaactcatcctgattgacatgagacaggattttggttcctgaagttcatgscctgttaactaaacccctttcagtactaaaatcagttcactctttaattctgccctttcagcttcctgatttctcccgattccttccttctccctggagc

SEQ ID NO: 381886 - DNA, 201 bp, Homo sapiens
gccacacaacacagtgagatccttctgtgtagctgagcctctgattcccagaggtgaagatacagtcttagagtgtatcccagggaccctgtctttccagygggaaactgcaggggctgagagaccaccccctagaggcttcctcatttgcatctttaacactgccatggttgggggctgttttcttcttcagcctgccct

SEQ ID NO: 381887 - DNA, 201 bp, Homo sapiens
tcctttgtgcagcgtctctccctgttctgtggctagtttgggcttccttacagcatggtggtctcatagtagctagtcttctctgtgatggcttccaaggsacagaaagcagaagcctgaagcttttgctgtgttaaaaggaagtcacaaggccagccctgacacagggaagggaaatagattctacctgttgatgggaag

SEQ ID NO: 381888 - DNA, 201 bp, Homo sapiens
ggtagcctcccctcgggttgcctcagtttcttctttggcacgcagaggcggggctccaggcctgggccgctccatggcggggagggcgcggggacgctgcrctcggggtgcgctccgagaggcggacccggctgggcgcgcctggggcggggcgaggcggggcgaggctgggcggtgcggggggcggcccccgaggatcac

SEQ ID NO: 381889 - DNA, 201 bp, Homo sapiens
ggccggctctccaggaatgccatgatattggggaattccctttgcacctggccaagtggcctcgggcaggtagcctcccctcgggttgcctcagtttcttstttggcacgcagaggcggggctccaggcctgggccgctccatggcggggagggcgcggggacgctgcactcggggtgcgctccgagaggcggacccggct

SEQ ID NO: 381890 - DNA, 201 bp, Homo sapiens
ttgagatttggctttcctgggaagatgttccaaaactgtctttgaaataatactctcctcctctgcagatcagtggacagggtgttgaagggtcggcatargtggtaagcatgattgatggcccccagagatgtccatgtcctgctccccggaacctgtgggtatgtcatgttacttggtaaagaggaccttgcagatgaa

SEQ ID NO: 381891 - DNA, 201 bp, Homo sapiens
ctcggccacacccatcctagctcattgctgtctcgaactctcgagctcagacgatcctcccgtctaggcttcccaaagagctgggatgacaggcgtgagcycgggcgcccggccgggagtgtgttaagtatacggcaaacacctggactgcggccggctctccaggaatgccatgatattggggaattccctttgcacctg

SEQ ID NO: 381892 - DNA, 201 bp, Homo sapiens
tgtattggcccacgtgtcagccatggactcgtattcccactggtggagccaagaggtttttgctgtctgcaggggagagcactttggatcttggcttctcrtttcatccttcccttggtagtggttaagagtgcaagctttgggccgggcaaggtgactcatgcctgtaattccagcactttgggagggtgaggtgggtgg

SEQ ID NO: 381893 - DNA, 201 bp, Homo sapiens
ggcatagatgcatatttatttacatggttgctaaggggattcacagctgaaggatgcggagattgtcttaccagaagggggcagctccaatgtggcctctmatgagctttgatctccttccagatgataatggcctcagccctatctgggctccaacacaggagaaggtgacatttgaaatttatgacccaaacctggcat

SEQ ID NO: 381894 - DNA, 201 bp, Homo sapiens
tgaacttctcagtgtaccttgtctgcaccccaaccactcctgggcttccagcaatgtgagatcattgatagcctttttgtggaagctgaatacgtcctagkggagactccagacatgagaacgaggggcttttgtcttcagcagtgcagattgggaaactgaggctcagagactattacattgttggagacacaggggggt

SEQ ID NO: 381895 - DNA, 201 bp, Homo sapiens
cccctgccagctgtagaaccccctgctggtggatgtggctcccaggctctcctccccttttgtcttttccaaaatccaccttcctgctctgcaaacaaacacctcccccgttcccttgtccctgatcctggggcggggagatgggaggtggtctccttcctctgctcaccaagggaccagcctgcaacagcagcttccagg

SEQ ID NO: 381896 - DNA, 201 bp, Homo sapiens
aggccgaggtgggtggatcacctgaggtcaggagttcaagaccagcctggccaacatggtgaaaccctgtttctactaaaaatacaaaaaaaaaaaaaaaagctgggtgtggtggtgcatgcctgtaatcccagctactcgggaggctgaggcaggataaccagggaggtggaggttgcagtgagccaagatcatgccact

SEQ ID NO: 381897 - DNA, 201 bp, Homo sapiens
tcccctgccagctgtagaaccccctgctggtggatgtggctcccaggctctcctccccttttgtcttttccaaaatccaccttcctgctctgcaaacaaacacctcccccgttcccttgtccctgatcctggggcggggagatgggaggtggtctccttcctctgctcaccaagggaccagcctgcaacagcagcttccag

SEQ ID NO: 381898 - DNA, 201 bp, Homo sapiens
gaggccgaggtgggtggatcacctgaggtcaggagttcaagaccagcctggccaacatggtgaaaccctgtttctactaaaaatacaaaaaaaaaaaaaaaagctgggtgtggtggtgcatgcctgtaatcccagctactcgggaggctgaggcaggataaccagggaggtggaggttgcagtgagccaagatcatgccac

SEQ ID NO: 381899 - DNA, 201 bp, Homo sapiens
ctcttccccaccatgcccatcattttaagagtttgtgtttcagcatggtgaattctagaaaacctagaagacagttaagaaatacaaacttaaaaaaaaaacttttattttcagttcagaggtacatgtgcaggtttgttaaacgggtcaacttgtgtcatggaggtttgctgtgcagattattttgtcacccaggcatta

SEQ ID NO: 381900 - DNA, 201 bp, Homo sapiens
ctcccctgccagctgtagaaccccctgctggtggatgtggctcccaggctctcctccccttttgtcttttccaaaatccaccttcctgctctgcaaacaaacacctcccccgttcccttgtccctgatcctggggcggggagatgggaggtggtctccttcctctgctcaccaagggaccagcctgcaacagcagcttcca

SEQ ID NO: 381901 - DNA, 201 bp, Homo sapiens
tgtgaacccgggaggtggagcttgccgtgagccgagattatgcccctgcactccagccttggtgacagagcgagactccatctcaaaaaaaaaaaataaawaaataaataaataaaaggcccagatcataagtacagagctcagtacattttcataaagtgactaacccatgtgaccacaagatcaaaacctagaacatcg

SEQ ID NO: 381902 - DNA, 201 bp, Homo sapiens
cgcctcttgggttcaagcaattctcttgcctcagcctcctgagtagctgggattacaggcacctgccaccacgccaagctgatttaaagaaaaaaaaaatktttgtattttagtagagatggggtttcaccatgttggccaggctggtctcaaactcctgagctcaggcagtccacccgcctcggcctaccaaagtgggtc

SEQ ID NO: 381903 - DNA, 201 bp, Homo sapiens
tctcccctgccagctgtagaaccccctgctggtggatgtggctcccaggctctcctccccttttgtcttttccaaaatccaccttcctgctctgcaaacaaacacctcccccgttcccttgtccctgatcctggggcggggagatgggaggtggtctccttcctctgctcaccaagggaccagcctgcaacagcagcttcc

SEQ ID NO: 381904 - DNA, 201 bp, Homo sapiens
tccgcctcttgggttcaagcaattctcttgcctcagcctcctgagtagctgggattacaggcacctgccaccacgccaagctgatttaaagaaaaaaaaaatgtttgtattttagtagagatggggtttcaccatgttggccaggctggtctcaaactcctgagctcaggcagtccacccgcctcggcctaccaaagtggg

SEQ ID NO: 381905 - DNA, 201 bp, Homo sapiens
ggggctgggccgatgctgtcttgagagcagggaacccatgtctagggaggctggttgtcttgtttaaacgatccccattcaggcagtgtttgaggatcttyctttcttacagtacactccagggtcgttctgggagaagagggaagagaggggaaacctcctcaaacccacttccccttgtcctctgtgggggtgaggtat

SEQ ID NO: 381906 - DNA, 201 bp, Homo sapiens
gagaatggtgtgaacccgggaggtggagcttgccgtgagccgagattatgcccctgcactccagccttggtgacagagcgagactccatctcaaaaaaaawaaataaataaataaataaataaaaggcccagatcataagtacagagctcagtacattttcataaagtgactaacccatgtgaccacaagatcaaaaccta

SEQ ID NO: 381907 - DNA, 201 bp, Homo sapiens
gcaacctccgcctcttgggttcaagcaattctcttgcctcagcctcctgagtagctgggattacaggcacctgccaccacgccaagctgatttaaagaaaraaaaaatgtttgtattttagtagagatggggtttcaccatgttggccaggctggtctcaaactcctgagctcaggcagtccacccgcctcggcctaccaa

SEQ ID NO: 381908 - DNA, 201 bp, Homo sapiens
aacctgggaggtggaggttgctgtgagctgagattgtgccattgctctctagcctgggcgacagagcaagactcggtctcaaatataataataataataatcataataataatgataataattgaagataataggaaaaccatgttattacctatattagtgtcctgtggttgccataacacaagtgccacaaaatgaggg

SEQ ID NO: 381909 - DNA, 201 bp, Homo sapiens
tgtgacaggttaatagtttttttttttaattacaaaaactaatgttaatgatcaaataagtgaaaaattccttgttaaacaggtttaactgaattaaaatsagttcaggtgtataaactgcttcacatgatgcttggcacccatgaggggctgatagatagtaatattattactaaaaagtcagagttgcaggacttatca

SEQ ID NO: 381910 - DNA, 201 bp, Homo sapiens
aagatcctgatgacgctgacagtcaaggtaaagccagccctcccttcctgccaggggagccagccgccctccctgggggctgggccgatgctgtcttgagrgcagggaacccatgtctagggaggctggttgtcttgtttaaacgatccccattcaggcagtgtttgaggatctttctttcttacagtacactccagggtc

SEQ ID NO: 381911 - DNA, 201 bp, Homo sapiens
cgctctgtcacacaggctggagtacagtggcgcgatctctgctcaccgcaaactctgtctcctgggttcacgccattctcctgcctcagcctcccgagtasctgggactacaggcacccgccaccacgcccagctaattttttgtgtttttagtagagacggggtttcaccgtgttagccaggatggtctcgatctcctga

SEQ ID NO: 381912 - DNA, 201 bp, Homo sapiens
cggtgagcaacttttccctctgtcacttttgaaatcagaaactccaagactccaaagtataaataaaatgaatctaatttttatatagtatgtatattcgrgacggagcctccctttgtcgcctaggctggagtgcactggcgcaatcttggctcactgcaacctccaccttccaggttcaagcgattctcctgcctcatc

SEQ ID NO: 381913 - DNA, 201 bp, Homo sapiens
aatatgacccgatgccacccgagtcccagaggaagatcctgatgacgctgacagtcaaggtaaagccagccctcccttcctgccaggggagccagccgccstccctgggggctgggccgatgctgtcttgagagcagggaacccatgtctagggaggctggttgtcttgtttaaacgatccccattcaggcagtgtttgag

SEQ ID NO: 381914 - DNA, 201 bp, Homo sapiens
agtttgagggaggaagtaaaatgaaggtaataagttaattttattgggcacagtcacgttaggtctgagctggtgctagagtgaggtagagagaaattcaygcacttttttcccttcattattttccttccactaaattattcagtttagtagggaacgattaaagttaaattggttaaattcttggggacaagtagcctc

SEQ ID NO: 381915 - DNA, 201 bp, Homo sapiens
cttaatcacacctgcaaagtctgttctgccatataaagtgacatgcacaggctccagatattagggcctggacatctttgggggccatttaaaaaaaaaaagaccttctaccacattctccaggtagcaagctttttgatgatgctgtacgtatttttttctttgggtgttttgagctgcttccatatctttcatcttaga

SEQ ID NO: 381916 - DNA, 201 bp, Homo sapiens
ggatgtggtgagctatgatggcaccactgcactccagcctgggtgacagagtgagaccctgcctcttagaaaacagaagctataactcaagcaacttggargtgaaattcaagtgcctgacagctgtctaggtgcccctgaaactgcctctagtcacaacaaagatacctccatcaaagagcataggaagggtttgaatca

SEQ ID NO: 381917 - DNA, 201 bp, Homo sapiens
ttttgcacaaggccatccacactgagggctcaggaaagggtcgtagctaccctagtaggctgataaatggtgaatgaggatgttgatgcgtgttgtaatcmtcatgccttcctagtgccggggttgaatgatgatgatcaaaagaaggcttatttgcccaacctgagactaagtttgagggaggaagtaaaatgaaggtaa

SEQ ID NO: 381918 - DNA, 201 bp, Homo sapiens
tggcttctgaggaggcccttgggtctggctcctgtcctttctccaacaccagctctccctctacgggcgggtggtgtgtcgagccctgtctgggtattggrtaggcacactcacatccctgtgttccccacaccttttgctctgcaatccctccctctggcctgcgttccctcgctcctactcctctttctttcctcccct

SEQ ID NO: 381919 - DNA, 201 bp, Homo sapiens
tgccattaccacaaacttggtggctgaaaacaacatttattcttgcacagtcctggaggccagagtctgaaatcagtatcatgaggtcaacatcagggtgycagcagggctgtgctccctccggaggggaaagccattcccttcttccagtttctgggggctgctggcattccttggccttctcctcttctgcttccctat

SEQ ID NO: 381920 - DNA, 201 bp, Homo sapiens
ttcattttgtagcgtggatcagcaaatcgtttctttttattgctgagtaatattccattttatggatagatcacatctggttcatttgttcatcagttgayggacatttgggttgcctctccttttggctattataaataatgctgctgttaacatttatgtgtaagtgtttgtgtggatgagctttcatttctttttggt

SEQ ID NO: 381921 - DNA, 201 bp, Homo sapiens
gtctgggtattggataggcacactcacatccctgtgttccccacaccttttgctctgcaatccctccctctggcctgcgttccctcgctcctactcctctwtctttcctcccctcccttctcttttttcctcgaggccgctgcttctctggtttccttgccaggtactctctgcacctccttcttgctcaccccacctcat

SEQ ID NO: 381922 - DNA, 201 bp, Homo sapiens
agcacatggcctccaatctgtcctcgaccaaaccctgactccaggccagtcagcagcaccgagcctggcctgtttccatggagaacaggaaaggcaccagygtgtctgggaggaaagacggcttcctgttcaaagccacagataggatggccataaagcagggtagtagaattgtcattattccgcaagatcaaatagggc

SEQ ID NO: 381923 - DNA, 201 bp, Homo sapiens
tggccgtcaccccaggtgctttgctggggcatttctgaacactcccattttaaaaaggctaaaactgaggcacagagaggtcaagcagtctacccagagcyacacagtcagcaggaaccttctctagggtttgaacgtgaagctgccaagacctgacatttcctgcctttcatcctcatttctatgcagaggaaccatttg

SEQ ID NO: 381924 - DNA, 201 bp, Homo sapiens
ccctccctctggcctgcgttccctcgctcctactcctctttctttcctcccctcccttctcttttttcctcgaggccgctgcttctctggtttccttgccmggtactctctgcacctccttcttgctcaccccacctcattcttgctcaccccacctcattctggctcaccccacctcgttctggctcatcccacctcact

SEQ ID NO: 381925 - DNA, 201 bp, Homo sapiens
caacctccaccttccaggttcaagcgattctcctgcctcatcctccgaatagctgggactacaggcatccatcatgtccagctattgttttttttttttttgtatttttggtagagatggggtttcaccatgttggccagtctggtgttgaactcatgacctcaggtgatccacctgccttggcctcccgaagtgctggga

SEQ ID NO: 381926 - DNA, 201 bp, Homo sapiens
agcaatgtcaaaggcctgtctgaagtatgtgtgggagggatccccaaaagggacaccaataactgctctgggatatttaataaaatatgctatgaagattraatggaataatgtgtaggaaatgcctgctacattgtaggtattcaaactttagttatcattattatcttttattttaaagaataatctgattctggatca

SEQ ID NO: 381927 - DNA, 201 bp, Homo sapiens
tttttacaggcaaagtctcactatgttgcccaggctgatcttgaactcctggactcaaacaattcttccgcctcagcctcccaaagtgctgggattacagrcatgagctactgctcccagcccaggaattggaattttttagggcatctggagaggtgaaaaagggggccaacaggctggatgctgcaggaaggaagggga

SEQ ID NO: 381928 - DNA, 201 bp, Homo sapiens
ggattcctccaaggttttgggcccaagcacctctctgacactgaccacccacaagcataaacagcaatcaaggacacctcctaggtgctggccgtcacccmaggtgctttgctggggcatttctgaacactcccattttaaaaaggctaaaactgaggcacagagaggtcaagcagtctacccagagctacacagtcagca

SEQ ID NO: 381929 - DNA, 201 bp, Homo sapiens
aggatggtccagaaagttctgtagaaaagcctgtgtgcctcagggcctcctttccccgaatgtgcctcatgagatgtgacaggttaatagtttttttttttaattacaaaaactaatgttaatgatcaaataagtgaaaaattccttgttaaacaggtttaactgaattaaaatgagttcaggtgtataaactgcttcaca

SEQ ID NO: 381930 - DNA, 201 bp, Homo sapiens
gtcgtgagagagtccacgcaaggattcctccaaggttttgggcccaagcacctctctgacactgaccacccacaagcataaacagcaatcaaggacacctsctaggtgctggccgtcaccccaggtgctttgctggggcatttctgaacactcccattttaaaaaggctaaaactgaggcacagagaggtcaagcagtcta

SEQ ID NO: 381931 - DNA, 201 bp, Homo sapiens
gttcttttttttgtgtgtgctttccatttcagattctcgatgaattcaaaaaggattcgtccgtgttcatcctggggtgaggcagctcttgtgtgtcgttyggggcggctgtgccggacctcggtgcctggtgcccagccggcctccaggaggggatgcctgtgtgtgcaggcgctgacctccaaaggggcagggggcccc

SEQ ID NO: 381932 - DNA, 201 bp, Homo sapiens
gttggaagtggtcgtgagagagtccacgcaaggattcctccaaggttttgggcccaagcacctctctgacactgaccacccacaagcataaacagcaatcmaggacacctcctaggtgctggccgtcaccccaggtgctttgctggggcatttctgaacactcccattttaaaaaggctaaaactgaggcacagagaggtc

SEQ ID NO: 381933 - DNA, 201 bp, Homo sapiens
tgtcctgctctgcgtcccaggggccgattcctgcaaacacgttcccaggtgcctgtgccaatgagcttccggttgcttcaacaagcagagtgtccgggcakggagttgcaagacctggcagaggaggggaagccaggtctttcctggttctgggagcatctgtaccatggtggtacctctgccattgtccgagctccctga

SEQ ID NO: 381934 - DNA, 201 bp, Homo sapiens
tgagggaatggtacagagtgagggctcagggagggactaagggattttgagcagaggagtgacatgatttgattcatgttctaaaaggatccttctggctmtgcatctgagaattgaccctagcaggtcagggaagaagtggggagagcaggattagaatagttcaagtatgagatcctaggaggagccggtgaaagggtg

SEQ ID NO: 381935 - DNA, 201 bp, Homo sapiens
cctggtggttcagctccagggcctggggagcgccttcactctaagtcctattttgggggcaggcaatgtgtttctggggatttgggaggcagaatgagggratggtacagagtgagggctcagggagggactaagggattttgagcagaggagtgacatgatttgattcatgttctaaaaggatccttctggctctgcatc

SEQ ID NO: 381936 - DNA, 201 bp, Homo sapiens
accaaaaaaaccaaaaccaaaaccaaaaccaaaccctaccatttattgaacaaccgtgtatttggcatgccagggattgcattgagctcttcagtccttgyctcatgttagcctcacgtgaggcaccttatttttttggtaaaatattcctttcattcattcttgatttatttatgtcattatcctatgtggatatgtcat

SEQ ID NO: 381937 - DNA, 201 bp, Homo sapiens
gggtccctggtggttcagctccagggcctggggagcgccttcactctaagtcctattttgggggcaggcaatgtgtttctggggatttgggaggcagaatragggaatggtacagagtgagggctcagggagggactaagggattttgagcagaggagtgacatgatttgattcatgttctaaaaggatccttctggctct

SEQ ID NO: 381938 - DNA, 201 bp, Homo sapiens
ccaaaaccaaaccctaccatttattgaacaaccgtgtatttggcatgccagggattgcattgagctcttcagtccttgtctcatgttagcctcacgtgagrcaccttatttttttggtaaaatattcctttcattcattcttgatttatttatgtcattatcctatgtggatatgtcattatcccatctagatgtgtcatt

SEQ ID NO: 381939 - DNA, 201 bp, Homo sapiens
aggatgagggccttgagcctcataacccctcccagtgccttgcagagatgtcagagttgatgataaaacctcgttaccttaatgggcatcaaagtgtgtcmattcatctgcagaatgcaatgacttagcttggagatttagaaaaaacaaaggtcaaaacctcaagggagattaaaaatgtgaccttgtcctcccccgact

SEQ ID NO: 381940 - DNA, 201 bp, Homo sapiens
cttttatgggactggaaatgagcccagaggatctaagtgacttcttgcagcctagctggcaagggggtccctggtggttcagctccagggcctggggagcsccttcactctaagtcctattttgggggcaggcaatgtgtttctggggatttgggaggcagaatgagggaatggtacagagtgagggctcagggagggact

SEQ ID NO: 381941 - DNA, 201 bp, Homo sapiens
atttttttggtaaaatattcctttcattcattcttgatttatttatgtcattatcctatgtggatatgtcattatcccatctagatgtgtcattatcctarttaatatccaataactaaactctgtcagctctcttattttgttcctgaaaatctttccatcttgaaggtgacttcgtgtctggtcagtgtcctctgttac

SEQ ID NO: 381942 - DNA, 201 bp, Homo sapiens
ctcatccagcagagaggggcagctgtgctgaaaccccttggttaccccgacgtcctcttgaaggatgagggccttgagcctcataacccctcccagtgccktgcagagatgtcagagttgatgataaaacctcgttaccttaatgggcatcaaagtgtgtcaattcatctgcagaatgcaatgacttagcttggagattta

SEQ ID NO: 381943 - DNA, 201 bp, Homo sapiens
tggtggatactgttaccttcttttatgggactggaaatgagcccagaggatctaagtgacttcttgcagcctagctggcaagggggtccctggtggttcasctccagggcctggggagcgccttcactctaagtcctattttgggggcaggcaatgtgtttctggggatttgggaggcagaatgagggaatggtacagagt

SEQ ID NO: 381944 - DNA, 201 bp, Homo sapiens
ctggccgagcatggtggctgacacctgtaatcctaacagtttgggaggccaaggcgggtggatcgcttgagctcaggagttggagaccagcttgggcaacrtggggaaaccctgtctatacagaaagtacaaaaaagttagctgggtgtagtggtgcacatttgtagtcctgctacttgagaggctgaggtgggaggatca

SEQ ID NO: 381945 - DNA, 201 bp, Homo sapiens
gcaaatcctgggcccctccccattcccctcatttgcatcctagtccccacctcagtgcctggcatagagttgacatttgattaatgccttccccaatggcygattaatgctaactgagaccctggtaaatgctgcaggctgtgcatacattgtagctttttgtcttcccagctgccccttgtgggcatttaacctccattt

SEQ ID NO: 381946 - DNA, 201 bp, Homo sapiens
ctctactaaaacaatacgaaaattagccaggcatggtggcatgtgcctgtaatcctagctactcgggaggctgaggcaggagaatcacttgaacccgggasgtggaggttgcagtgaaccaagatcatgccactgcactccagcctgggcaacagtacgagactctgtctcaaaagaaaaaaaaaagacaccctgggggac

SEQ ID NO: 381947 - DNA, 201 bp, Homo sapiens
tggatcgcttgagctcaggagttggagaccagcttgggcaacatggggaaaccctgtctatacagaaagtacaaaaaagttagctgggtgtagtggtgcasatttgtagtcctgctacttgagaggctgaggtgggaggatcatctgagcccagggaggtcaaggctgcagtgaaccatgattgtgccactgagctccagc

SEQ ID NO: 381948 - DNA, 201 bp, Homo sapiens
ccaggagtatgaattctgctccaggagagcacgggggactttgtcatattttgggagttgtaatttcattaaattccagccaaaattcataggcaaaaacktaaggaaatcttgtcacataaagggattcagcaaaggtacaccaaccaccttgctagccaggacacagtgagatgaaagttaaaagcatatgacaagctt

SEQ ID NO: 381949 - DNA, 201 bp, Homo sapiens
tttcttattgccattgttgctacaaaagagccgggggcagtggaggtgccggcccagcctcagcatggctggtaagtgtcacggggctgccatccttaatsgtttggtgatggctgcctgggtgcgggagttgaagaaccctgggggcctcccgggctgagcagggaggacactgtgattgttcagtgctgtctgccatgg

SEQ ID NO: 381950 - DNA, 201 bp, Homo sapiens
gttacagttttcttccctgctgaagaaaacacaagatcccttcatggtataagaagggtcattttgtatttttctgcaaccaagccaagctgggtcatacraccagctcttaagaaccctgctgaatcccagatgactgagcccttcctacacagctgagatagacacttccaggtgaggggatttgggaccctgctgctt

SEQ ID NO: 381951 - DNA, 201 bp, Homo sapiens
agtctggtttgatctccccctcctgctctctggctggcagtgtgagagggtggcaagggagagacctttggcatcttggggggggagtaacaatctcgagrgtccaactccccaaacccttcagaattcaccttcttcttctataaaattgggtgggttaatttacttctttgagttgttacagttttcttccctgctgaa

SEQ ID NO: 381952 - DNA, 201 bp, Homo sapiens
aaacctgggaggtggaggttgctgtgagctgagattgtgccattgctctctagcctgggcgacagagcaagactcggtctcaaatataataataataataatcataataataatgataataattgaagataataggaaaaccatgttattacctatattagtgtcctgtggttgccataacacaagtgccacaaaatgagg

SEQ ID NO: 381953 - DNA, 201 bp, Homo sapiens
taaacctgggaggtggaggttgctgtgagctgagattgtgccattgctctctagcctgggcgacagagcaagactcggtctcaaatataataataataataatcataataataatgataataattgaagataataggaaaaccatgttattacctatattagtgtcctgtggttgccataacacaagtgccacaaaatgag

SEQ ID NO: 381954 - DNA, 201 bp, Homo sapiens
cagctctgggaaactaatgcatgttttcagtgacattttagccccttctgaatggtctggatggctggttgacagctaagttcagacccgatgcaaaagcscagtctatgtaggaatgtcccctgtggacagctgctgtgtagccaaggtgggttacatactaggaaagggccctgggggcccccacagggagctaactct

SEQ ID NO: 381955 - DNA, 201 bp, Homo sapiens
gaggtcagggtagctggtcttctaacgtcatcttggggctcctaagttgtgtgcctcaagccaggcagaagctgtcacacattgtcccttttactacattytattgaggcagctataaaaagttacaaagggggccgggtgtggtggctcatgcctgtaatcccagcactttgggaggctgaggtgggtggatcacctgag

SEQ ID NO: 381956 - DNA, 201 bp, Homo sapiens
gtactagtctctggctggaagtgttttgggaaggtgtgagcttctggataagaataggaggtctggaattgggcagactggagtttgcatcctggcaggggctggaccctgggcaagtaaccacacttctctgggcctcagtttccttgtctgcaaaatgaggagccaaattcctaactcacaagtacttaatcactgcct

SEQ ID NO: 381957 - DNA, 201 bp, Homo sapiens
ggaggatcccttaagcccaggagttaaaggctgcagtgagatatgatcatgccactgtattctagcctgggcaacagagtgagaccctgtctcttaaaaayaattaaatcaacaaaaaataagataaaatacaaaagataaaaatacttgcttgctcagatttgatttagaggagactgaagaagaggccttacagaaggc

SEQ ID NO: 381958 - DNA, 201 bp, Homo sapiens
ccaagcgaagcgatgagctgagcttctgccgtggtgccctcatccacaatgtctccaaggagcccgggggctggtaaggctgagtggaggctgggctgctyggcaggtgggcttgacttgtcccttcttggtgataagactcaggtgctggccaagtctgaccccctttgtcatcctgggctggctttgacctcttgtgtt

SEQ ID NO: 381959 - DNA, 201 bp, Homo sapiens
gaggctgaggcatgagaatcgcttgatcctggtaggtggaggttacagtgagccaagattgcatcactgcattccagcctgggcaatagagtgagactccrtctcaaaaaaaaaaaaagtgtataaaattgtctgtattttcctttaacataaggaacagagtcctatagatgaaacagaatcattaggttgaggggagag

SEQ ID NO: 381960 - DNA, 201 bp, Homo sapiens
aaaggcatgtcctttctttgttgaggaaattgagcaatattgtgtcactacaatatagggtcactcccaccctaaccctaagcctaaccctaaccccagcsctaaaccctagccccaaaccctaactcctaacccctaacccttaaccccaacccaggtacccttggctctgactaggccagttctccttcactccctggt

SEQ ID NO: 381961 - DNA, 201 bp, Homo sapiens
catggctggttctgctgggctcagggtgctgcaccctctggttctctccctccagataccaggtgtttctgccactacctttgccagatatgtaccctctracacctgcttctcttgttggtggcttttggacacaagcctgatgctggtacgtctgactatggggcagagctgagcgtccctacccaagctgcaagggag

SEQ ID NO: 381962 - DNA, 201 bp, Homo sapiens
gccactgcactccagcctgggtaacagtgagaccccatctctaaagaaacctggcagtgaggatatagaaaaaggtatgtgtaccccagtggaggtgcctrtctcaactgttttgagagcaccttggcagaatttatcaaagccaatgtgcctacaatgtgctgtgtctacgcgcttttccttctaggactctactctgta

SEQ ID NO: 381963 - DNA, 201 bp, Homo sapiens
aaatgcaacagtgttttgctaaaattctgaggtttgacgaaccacctttgggccaaatggcttctaatgaaaagtctttcaaatgtttttggctcgctgayagagcctgtggtgtttataaattccatttggttcactgacctccttgcagtgcaaatgctatctcatattcccaccctgactctgttgtgtaatttcatg

SEQ ID NO: 381964 - DNA, 201 bp, Homo sapiens
tgttgaactttttgccgtttgcacaactgagaggtgaaaactgatacatcgtcgtccattagagcttcttcttgtaagggacattaaccagtttttccctyatttagggagcagtggcattttcttttctggaaactatttgtgcttcttacctgatgtatctactgcagtaggtatttatagcatagatgtatcagaact

SEQ ID NO: 381965 - DNA, 201 bp, Homo sapiens
cctgatgggtgaccactggccgtgggactttggatgtatctgagttagagaaatgggagggccatttcctatctgcccagatttggggaaaacatatttcwtagagtggatcattgaattgcaatgtgttcattttttctcatatataataattagttatttgtttgccaaatgaaatagaaagattgcaggcttgggagt

SEQ ID NO: 381966 - DNA, 201 bp, Homo sapiens
caactcctctatcaaaggataggtaaccataaggaagcctagaacccttgttatatgtaagggctattccaggagcatggattattccatttctttctttstttttttttccaggaaagagatataaactccctctacgacgtcagcagaatgtatgtggatcccagtgaaatcaatccgtccatggtacggtgccgaacc

SEQ ID NO: 381967 - DNA, 201 bp, Homo sapiens
tgggaccacaggcgctcgccaccaggcctggctagatttttgtattattttgcagagatggggtttcgcggtgttcctcaggctgatttcaaagtcctggkctcaagcgatctgcctgcctgggcctcccaaagtgctgggattagaggtgtgaaccctcgtgcccaggctcacttagcattgcattttcaacgtttattc

SEQ ID NO: 381968 - DNA, 201 bp, Homo sapiens
gccacacagtgaggccacctgatgggtgaccactggccgtgggactttggatgtatctgagttagagaaatgggagggccatttcctatctgcccagattwggggaaaacatatttcttagagtggatcattgaattgcaatgtgttcattttttctcatatataataattagttatttgtttgccaaatgaaatagaaag

SEQ ID NO: 381969 - DNA, 201 bp, Homo sapiens
gtaatcccagctacttgggaggctgaggcaagagaatcgcttgaatccaggagacagaggtgcagaagagccgagaaagcgccactgtactccagcctggstgacagagtgagactctgtctcaaaaaagaaaaaagacaagaaaaaagaaaaaaagctgttgtttcacattttcctccagcacttcctattttttacatt

SEQ ID NO: 381970 - DNA, 201 bp, Homo sapiens
ctccttgatgttgtaacttgcctttgggatgcccgactgtcttccttatcttgcctctcactgttggttctcttgcagcgtttgtggctcttggctttcakttgttctttttcattctctgtcctgctctgcgtcccaggggccgattcctgcaaacacgttcccaggtgcctgtgccaatgagcttccggttgcttcaac

SEQ ID NO: 381971 - DNA, 201 bp, Homo sapiens
cctagttccctaggaagctcctaaagtcaagtcctgtagttggggaggagaggaagggtaagaggagctgttgagtcactcggccatatttcttctgagasacagattcttctagatctgttttgaaaatacccacatcattgttttcttattgtcttgtattccataggaggactataccctgtttatttacccacttct

SEQ ID NO: 381972 - DNA, 201 bp, Homo sapiens
tgttttacagataaggagctgagagcccagagagacagtgagttgcccaaacaacaaagctgcgtttgagcctagatgtgtctactgcacagcctggctcktcagtgagcttgctgccttatcctgcttcttcagcagtttgttccgagtctgatctgtcttgagagccccacagcctggggcacaggcctggaacacaca

SEQ ID NO: 381973 - DNA, 201 bp, Homo sapiens
ctttctgcatgcagagctgtgggctggccacacagtgaggccacctgatgggtgaccactggccgtgggactttggatgtatctgagttagagaaatgggrgggccatttcctatctgcccagatttggggaaaacatatttcttagagtggatcattgaattgcaatgtgttcattttttctcatatataataattagtt

SEQ ID NO: 381974 - DNA, 201 bp, Homo sapiens
gtgtttcaataaagctttatttataaaagcaggtggtgggacacatttggcctactcttgacctagttccctaggaagctcctaaagtcaagtcctgtagytggggaggagaggaagggtaagaggagctgttgagtcactcggccatatttcttctgagacacagattcttctagatctgttttgaaaatacccacatca

SEQ ID NO: 381975 - DNA, 201 bp, Homo sapiens
ttgcttattgcagcattacttatgctggcaaagtacctgggcaccatctgaatgtctctcaatggaggaattgctgggtaaattatggtctatccatattrtgtgacattatgcagctgattaagaagcatgtgtcagttctctttccattaatctgagatgatatttgtgacattttgtgatgaaagccagcagcagatt

SEQ ID NO: 381976 - DNA, 201 bp, Homo sapiens
acagtgtgaaaacagtcccagacaatgtataaacaaatgaactgtagctgtgtttcaataaagctttatttataaaagcaggtggtgggacacatttggcstactcttgacctagttccctaggaagctcctaaagtcaagtcctgtagttggggaggagaggaagggtaagaggagctgttgagtcactcggccatattt

SEQ ID NO: 381977 - DNA, 201 bp, Homo sapiens
gattgcttattgcagcattacttatgctggcaaagtacctgggcaccatctgaatgtctctcaatggaggaattgctgggtaaattatggtctatccataytatgtgacattatgcagctgattaagaagcatgtgtcagttctctttccattaatctgagatgatatttgtgacattttgtgatgaaagccagcagcaga

SEQ ID NO: 381978 - DNA, 201 bp, Homo sapiens
ataaaagctaataaaaccaaggaggctcttctgttttggattttttctgcttcatgtttcaaacagatgaaggaatgaaagacttgtttcttttttttttwaaaaaaagtcactgttttgctagttgagtcaccgaagacaagatttaataattttgaggtgggggggattggcaaacattttctgtgaaggaccacagag

SEQ ID NO: 381979 - DNA, 201 bp, Homo sapiens
attatcggattgcttattgcagcattacttatgctggcaaagtacctgggcaccatctgaatgtctctcaatggaggaattgctgggtaaattatggtctrtccatattatgtgacattatgcagctgattaagaagcatgtgtcagttctctttccattaatctgagatgatatttgtgacattttgtgatgaaagccag

SEQ ID NO: 381980 - DNA, 201 bp, Homo sapiens
tactcctcttgtctaactgaaattttgtatcctttgaccaacatatccccaacactccctacctccccctgccccggaccctggtaaccaccattctactytccacttccgtgagtttaaacctttttaggtttcacgtatgagatcctgtggtatttgtttttctgtgcctggtttatttcacacagcacaatgtcctcc

SEQ ID NO: 381981 - DNA, 201 bp, Homo sapiens
gcatgactttttcctttcaaaagccatgacactgaaacaatgtggtcatagctgtctcttcagcatgccaataaaatagcatgccatttctgaaacaaaaattattctataaatagcatggagccattcttacggtggacatcaaaaatcatgtggtcacttttttcatatttacaggaaataggagcacacaaagatgag

SEQ ID NO: 381982 - DNA, 201 bp, Homo sapiens
ggcaaagggcaaatcctgggcccctccccattcccctcatttgcatcctagtccccacctcagtgcctggcatagagttgacatttgattaatgccttccycaatggctgattaatgctaactgagaccctggtaaatgctgcaggctgtgcatacattgtagctttttgtcttcccagctgccccttgtgggcatttaac

SEQ ID NO: 381983 - DNA, 201 bp, Homo sapiens
tcttgctgctctctgcccgccgtgcccccagtgcatgcttctgctgctgcacttgtaactacattagaattctcagttgattagtctgtttccccatgggyagagagcaggtgtaattatctcctgctgctggcatggctgaccgaggaggtccctttggtatgggtgtgcagtagagggaggtgggggcaaagggcaaat

SEQ ID NO: 381984 - DNA, 201 bp, Homo sapiens
catcttttttgaaagattgagttcagatgcctgcttttttcccctgaaagctttttctgagccctttaagtgcctagccacactccagattaaatttaggrttccttcttgctgctctctgcccgccgtgcccccagtgcatgcttctgctgctgcacttgtaactacattagaattctcagttgattagtctgtttcccc

SEQ ID NO: 381985 - DNA, 201 bp, Homo sapiens
cttgggactcaggtgagggttttgatctttgtgctgctgctggtctacatgactttgatcaagtaatgtgacctcttgggatttcagttttccgctgccgyatttcccattgagataaatgagacgaaccagacacaacaggtgcttggcacctggggaagggcccaataaatggctgcttaacaaggatgaaatgggcca

SEQ ID NO: 381986 - DNA, 201 bp, Homo sapiens
ttattatgctttaagttttagggtacatgtgcacaacgtgcaggtttgttacatatatatacacgtgccatgttggtgtgctgcacccattaactcgtttygctactttctatctgtgtgacctcggataagtcccttaacctcttttgagaggggcaagtactggcaaatcagttaatatctggccagatgctgccacag

SEQ ID NO: 381987 - DNA, 201 bp, Homo sapiens
ctggaagtaactgggaccctggggaaggttaagtccaaggccctcccagagtgagggctggaaagaactgaggagcctggtcccttgtcctggtttctgtytaattgaaggtgttataatggggcttgtgtttcctacttatgttccagtggacaatggcctagagacctgggagtggggaactccaggatgcatggctgg

SEQ ID NO: 381988 - DNA, 201 bp, Homo sapiens
ttcaaaggaacggtgtcagccactgcaggtgagagtgtaaattccacccctgctcctttagggcaacctgtgagcagctattacaaagcaattggtgagasgcagcatggaagtctggtgtttatggctgagttgatccactgggcttcgaagctggaagtaactgggaccctggggaaggttaagtccaaggccctccca

SEQ ID NO: 381989 - DNA, 201 bp, Homo sapiens
tgaatggacattactgctgcaccttacacccaccctgcagcatcagaggggatacagtgttttcaaaggaacggtgtcagccactgcaggtgagagtgtamattccacccctgctcctttagggcaacctgtgagcagctattacaaagcaattggtgagacgcagcatggaagtctggtgtttatggctgagttgatcca

SEQ ID NO: 381990 - DNA, 201 bp, Homo sapiens
tgaagataattattcagattttcttagatcttggcatagatgcatatttatttacatggttgctaaggggattcacagctgaaggatgcggagattgtctyaccagaagggggcagctccaatgtggcctctaatgagctttgatctccttccagatgataatggcctcagccctatctgggctccaacacaggagaaggt

SEQ ID NO: 381991 - DNA, 201 bp, Homo sapiens
aattccagggctttttaaaattcatctgactttcagagaaagtgttgttgctttgtaagaatttttgaaaagtagagaaatgaattgcatttctcctaagrttaagggcgggcgggtggtagggggaagaagcatacgtaaacacaggcctttaaataaacagcagttataaaaagaatgccacactgttcctcagccttt

SEQ ID NO: 381992 - DNA, 201 bp, Homo sapiens
aggcagagagtgccataaagattttgtctcaggccaggtaaaacttattaccaaaagcttcattttctaataaaacaaactaaatttttaagtgaaaactyagactcaaaagaaatccaggaaataagtatcacaaaatgctttctcttgactagagtggtggttcctcaagtcaagagggctggttcatttgctgtagag

SEQ ID NO: 381993 - DNA, 201 bp, Homo sapiens
cagcacaatgactaaaggttctgtgggatcccggattggatgtgggaacaggaaaaggagactggtggaaaacccagtgaaatatgaataagatctgtagktttagtattgcaccgatattaatttcttagttttgatacttgtactgtggttgtgcgagatgttaacactgtggagtctaggtggttggggtatgtgaga

SEQ ID NO: 381994 - DNA, 201 bp, Homo sapiens
atttatcaattagaaagacaaaaatagcagctttacagcggatagaccctgcaggtaccatcttaatcagatgatcaacgttaccaaccacctggaataasgcaggttgaaatcacgtacttcctgaggtgagacgctgagaagggtacattgcttctgtgacattcttgccaaaactgcatcgcctcaaacaaattataa

SEQ ID NO: 381995 - DNA, 201 bp, Homo sapiens
caggtcccaagtgaacccctcattaatactggtgttgaagaggcgtggacttcgtgaggcgggtgttattggcactgttttacagataaggagctgagagyccagagagacagtgagttgcccaaacaacaaagctgcgtttgagcctagatgtgtctactgcacagcctggctcttcagtgagcttgctgccttatcctg

SEQ ID NO: 381996 - DNA, 201 bp, Homo sapiens
taggatggccataaagcagggtagtagaattgtcattattccgcaagatcaaatagggctgctaagcccaggaaccgtcggggaggcccaatggatgggcyacatttcccctgcaaggccaactggcaagtggccactgccccctaccgcctttcagatagggcttcctgtaggagtatgctgctatgccgggctattatt

SEQ ID NO: 381997 - DNA, 201 bp, Homo sapiens
tatatttttttgtagaggtgggaacttacagccaaggtgagggtgttgcctaggctggtctcggaattcctgggctcgagctgtcctcctgccttggcctyccaaagtggtggggttacaagcatgagccacggcgcccggcctcctgtgtgtcttgcctaacgattgcctttggcgatgggagtgctgaatgcttctggc

SEQ ID NO: 381998 - DNA, 201 bp, Homo sapiens
gcccctggcctctcctgttaatcactgacaaggtaaaaggatactcctgcctgtttttttttttttcaatttcaaaatttaaaaaaatcttttttttttttgagtcaggatttcactctgtcacccaggctggagtgcggtggtgtgatcacagctcactgtaccttccacctcctaggatcaagaaatgctcctacctca

SEQ ID NO: 381999 - DNA, 201 bp, Homo sapiens
acagatgcggagagacaagggggaacttcaggtggaggctcacctgcagtgctctgcccccccagcatcagcgacaacaacaaccaccacagcaaaagcckctgcgagaatgtgcgctcctgcgtgccaggcacagtctgcgttctccagggcaggatgttctgtagtaactcactttggcttccagtaactctgtggggt

SEQ ID NO: 382000 - DNA, 201 bp, Homo sapiens
tgggtgcgagggtgggaggcacatgctctacagaggggcttggcaaggacagatgcggagagacaagggggaacttcaggtggaggctcacctgcagtgcyctgcccccccagcatcagcgacaacaacaaccaccacagcaaaagcctctgcgagaatgtgcgctcctgcgtgccaggcacagtctgcgttctccagggc

SEQ ID NO: 382001 - DNA, 201 bp, Homo sapiens
ctctcacattaacgtcatgcatgacaataaaacagtgaccaaagctaagaacttaacactggtactttacaataaaaccagagactaaatttcatcggggraaaaaaaaaagaagtcattaagccacaaataaatattgaacgtaaggtctccagacaaactggctgggaaatcctgaaagttttaaaaggtagatggaat

SEQ ID NO: 382002 - DNA, 201 bp, Homo sapiens
attacaggcataagcccccatgcctggtaagactgtgtcttaaaaaacaacaacaaaaaaatgtgtggggtgtgtgtgtgtgtgtgtgtatatatatatayacacacatatattttatatatgtatatatatgaatgaaatggcaaaatcatctgccaagggctgcagctgactccagaggaccctggaggagactgacag

SEQ ID NO: 382003 - DNA, 201 bp, Homo sapiens
ccaaagtgctgggattacaggcataagcccccatgcctggtaagactgtgtcttaaaaaacaacaacaaaaaaatgtgtggggtgtgtgtgtgtgtgtgtrtatatatatatatacacacatatattttatatatgtatatatatgaatgaaatggcaaaatcatctgccaagggctgcagctgactccagaggaccctgg

SEQ ID NO: 382004 - DNA, 201 bp, Homo sapiens
aaaaatacaaaagtagccaggcatggtggcggatgcctgtaatcccagctctttgagaggctgaggaaggagaattgcttgcacctgggaggcggagcttscactgagccgagatcatgccattgcactccagcctgcgcaacaagagcaaaactccgtctcaaaaaaaaaaaaaaaaaaaaaagttgactcattgaaaca

SEQ ID NO: 382005 - DNA, 201 bp, Homo sapiens
ctccgtctcaaaaaagcaaaacaaaaccaaccaaacaaaaaacaacaaaaaaacccaccacgacaagaaaaaaccaaaaaaaccaaaaccaaaaccaaaamcaaaccctaccatttattgaacaaccgtgtatttggcatgccagggattgcattgagctcttcagtccttgtctcatgttagcctcacgtgaggcacctt

SEQ ID NO: 382006 - DNA, 201 bp, Homo sapiens
atcctcccgcctcagcctcctgagtagctgggaactacaggtgtgtttcaccatgcctggcttatttactattattattattattattattattattattwttttttttttttgtaaaggtgaagtcttacccagacatttttttttaaaaaaagcaaacgcagttttggtttttctttagattaatgcattgtcatttcg

SEQ ID NO: 382007 - DNA, 201 bp, Homo sapiens
gaggccaaggtgggtggatcacctgaggtcgggagttcaagtccaacctgatcaacatggagaaaccccgtctctactaaaaatacaaaagtagccaggcrtggtggcggatgcctgtaatcccagctctttgagaggctgaggaaggagaattgcttgcacctgggaggcggagcttgcactgagccgagatcatgccat

SEQ ID NO: 382008 - DNA, 201 bp, Homo sapiens
tggttcttttttttttttgagacggagtctcgctctttcgcccaggctggagtgcagtggcatgatctcagctcactgcgagctccgcctcctgggttcaygccattctcctgcctcagcctcccaagtacctaggactacaggcacccgccaccatgcccggctaattttttttgtatttttagtagagacagggtttca

SEQ ID NO: 382009 - DNA, 201 bp, Homo sapiens
acagatcctacgtcatgctgcaggctcagggtccacagatctgcagttggaaatgtaggttgttactgtgaaatctcctcatttaaaaaaaagcgttgackccgccaggcacggtggttcatgcctgtaatcccagcactttgggaggccaaggtgggtggatcacctgaggtcgggagttcaagtccaacctgatcaaca

SEQ ID NO: 382010 - DNA, 201 bp, Homo sapiens
ctcctccttttggttccagttccttttgtgcacattccgtaggactcacttagacttgtgctattttctaattttctctttctctctttcttttgtctcawatttctttccagttggctgagaaagcagatatattctgtggatcaaaccagaagaaacaggtaagagtcattcagtttttttctgatcactttggatttc

SEQ ID NO: 382011 - DNA, 201 bp, Homo sapiens
tcagtgcatgtgtgcctggtgtaaagtggacagatcctacgtcatgctgcaggctcagggtccacagatctgcagttggaaatgtaggttgttactgtgamatctcctcatttaaaaaaaagcgttgacgccgccaggcacggtggttcatgcctgtaatcccagcactttgggaggccaaggtgggtggatcacctgagg

SEQ ID NO: 382012 - DNA, 201 bp, Homo sapiens
atcgagaggtagttggcttttgcctgttgatttgcgtagttgctcattcctttattctgctgcctttagccaacatgggctacaggggggaaaaaaaaaaagggacattggttttttgaggctcgttgagtgtcttgtatgcaatgggtgcctagtagcggtgtgggctctacagtttttcaaataagagcatttccctgt

SEQ ID NO: 382013 - DNA, 201 bp, Homo sapiens
aaacacaggctgcacactgggaaagttctaagggtggtgggaaccgtggttaacggggagtcagtgcatgtgtgcctggtgtaaagtggacagatcctacstcatgctgcaggctcagggtccacagatctgcagttggaaatgtaggttgttactgtgaaatctcctcatttaaaaaaaagcgttgacgccgccaggcac

SEQ ID NO: 382014 - DNA, 201 bp, Homo sapiens
tatcgagaggtagttggcttttgcctgttgatttgcgtagttgctcattcctttattctgctgcctttagccaacatgggctacaggggggaaaaaaaaaaagggacattggttttttgaggctcgttgagtgtcttgtatgcaatgggtgcctagtagcggtgtgggctctacagtttttcaaataagagcatttccctg

SEQ ID NO: 382015 - DNA, 201 bp, Homo sapiens
ttatcgagaggtagttggcttttgcctgttgatttgcgtagttgctcattcctttattctgctgcctttagccaacatgggctacaggggggaaaaaaaaaaagggacattggttttttgaggctcgttgagtgtcttgtatgcaatgggtgcctagtagcggtgtgggctctacagtttttcaaataagagcatttccct

SEQ ID NO: 382016 - DNA, 201 bp, Homo sapiens
cagtggctgacaccattcctttgaaaatagtgtattccctctaatgctgcagggtgggtgtaaggtgcagcagtaatgtcccttgaactgttggaggggcscttaccactcaagtatttgcctgtgctccattttaacacaattgtcttgtgggatttttggatgaaatcctgtactggcttaccatgcacagagcactga

SEQ ID NO: 382017 - DNA, 201 bp, Homo sapiens
tcaaatctgctctccttactaacactgtgaccttaggcaaagtcattaacctttgggagcctctgttgtcaccagtctctgggggagataatactggaacycatctggctagcttgctgggagcatgatgtgagggaaggcgtgcagaatgcgtgcaactgcgcctgtcatgtggttggtgctacgttaagtgctaacctg

SEQ ID NO: 382018 - DNA, 201 bp, Homo sapiens
ccaccattatcgagaggtagttggcttttgcctgttgatttgcgtagttgctcattcctttattctgctgcctttagccaacatgggctacaggggggaamaaaaaaaagggacattggttttttgaggctcgttgagtgtcttgtatgcaatgggtgcctagtagcggtgtgggctctacagtttttcaaataagagcat

SEQ ID NO: 382019 - DNA, 201 bp, Homo sapiens
cagagctcatgcccagtgtgaccgtgggattgtgtatttctgtcctaggccttagctttgagtctttctacatggaagaactcagagctttggcggctcgsgcggagaagttcccccacaacaccctgaggtgcaggcttgccccccaacccctgtggctgccactctcacacggccacctgccttctctcctgcaggtac

SEQ ID NO: 382020 - DNA, 201 bp, Homo sapiens
cagaagcttctggaaggggctgggaacacacttccctttgtcagctggcattgtaataataatctcttttctgtggccctaaaaagctagtaaaaacaaargtaacttagtttatgtaacttagtaactaaagtaacatagtaaacttagtttttcacgatttgggcatctcacagtagccacagcaaagcaattcagtga

SEQ ID NO: 382021 - DNA, 201 bp, Homo sapiens
gaggttggttagatcagatctgtttcactgtcataattttcttgttgttctgattttggaaaggcagtttcatagccctttcttactcttctctactgacygtgttgcctgggtgggattattgattttgccactagagggcatctgccaccagggagagttgaaccattgcaagcacagaaacagaatgcgaaggtgtct

SEQ ID NO: 382022 - DNA, 201 bp, Homo sapiens
agttagcttggcccaagaccaggaataattaagggcagtttggaggttaaaggcaagatagaggttggttagatcagatctgtttcactgtcataattttyttgttgttctgattttggaaaggcagtttcatagccctttcttactcttctctactgactgtgttgcctgggtgggattattgattttgccactagaggg

SEQ ID NO: 382023 - DNA, 201 bp, Homo sapiens
tcagtgggtgaatttttccatgtgctgcttgtggtctctgtggagctctggatcagggaagacacagtgatgatagggaaattgagattgagttgttgtgsgtgagttgctgtgacaagccggccgtgttttaatcaggttgtgctgggcttggaaggatttgaatatgcaggagaattcccgctggagtgaaagtgacca

SEQ ID NO: 382024 - DNA, 201 bp, Homo sapiens
gctctggatcagggaagacacagtgatgatagggaaattgagattgagttgttgtgcgtgagttgctgtgacaagccggccgtgttttaatcaggttgtgytgggcttggaaggatttgaatatgcaggagaattcccgctggagtgaaagtgaccaaatggggaatttgtcctttgcttaagcaacttgcagatgaaaca

SEQ ID NO: 382025 - DNA, 201 bp, Homo sapiens
gcgctgaaataagactcaggggatgcccctcaacgggatgtgtggtaaggtgcatggttaatctcatacattatagaggattgctgggtttttttttttttggggacagggtctcactctgccactgaggctggagtgcagtggtgccactatcgctcactgcagcctcagcttcccaggatcaagtgatcttatctcagt

SEQ ID NO: 382026 - DNA, 201 bp, Homo sapiens
acaattcttttcttttcttttttttccttccttcttttcttttcttttttcttccttcttttctttcctcccttccttcctttccttccatcctttcttcyttccttcctcccttcctcctttccctttccctttccttccttccttcttttccttctttttctgtttctttttctttttcctttcctttcctttcctttc

SEQ ID NO: 382027 - DNA, 201 bp, Homo sapiens
ctagggaagatgagactagactctccagtgtgtatgcaaagcacccttacgctgcagagatgctgcaaatagggagtgtcttttttttcttcctttttcawttttatcctctgtgcttgccctagagcttgttatcaatttctcttagctttgtcaattgtggtggggtgtgggggattgagatttggctttcctgggaag

SEQ ID NO: 382028 - DNA, 201 bp, Homo sapiens
atactgaactatctggcatatcctattttgggaccatgaaaagggtgacctggcaagtctgagaaggagaccttgtccctcattataatttttttttttttgagacacggtctcattctgttgcccaggttggagtgccatggtgcaatcacagctcaactactgccttgacctcctgggctcaaatgatcctcctccctc

SEQ ID NO: 382029 - DNA, 201 bp, Homo sapiens
ttttccagttcccatgcaggtggtggcttcttcgactctcgcggtcttcttggtggaaacctttgtaggtcttaagtgcgctataattgagcactcttaartgaccagacacagtggctcacgcctgtaatcccagcactttgggaggccaaggtgggcggatcacttgaggtcaggagttcgagaccagcccggccaaca

SEQ ID NO: 382030 - DNA, 201 bp, Homo sapiens
gacactctgccttcctgttttagctttctttttgcaaacaggtgtcctttctgccgtccacttagtgccttattttctgcaatttctttttttttttttttgctggtgatgttgctctttaaaatggccctgagcaaagtgcatttatttctcattaattcattcttcctgttattgatttattcagtgactatctatgga

SEQ ID NO: 382031 - DNA, 201 bp, Homo sapiens
caagatgacactctgccttcctgttttagctttctttttgcaaacaggtgtcctttctgccgtccacttagtgccttattttctgcaatttcttttttttwttttttgctggtgatgttgctctttaaaatggccctgagcaaagtgcatttatttctcattaattcattcttcctgttattgatttattcagtgactatc

SEQ ID NO: 382032 - DNA, 201 bp, Homo sapiens
gtcacactggaccgtctccagggcagcggctgggcagtgacgtgctacttccttccgcatgccacagcagaagctgggaggatggtacagggaaactaggyggttttctcctgcaaggtggggcgagcttcctctcttgaccactctgtctcagctctgctggacacttggctccagccagaagggtctggatctcatatt

SEQ ID NO: 382033 - DNA, 201 bp, Homo sapiens
agaccgtttttctctcagcatctatgcttggccttcgttatttgcagcatcagtattggtgaatttgcctttctgctccaacttatttgcaacctgcaaascagtagttctggcccttctgtggtcattcttggtgatgcagactggtgaaaaatttgggtcacccattcacacatgccctgctgaggtcaaacaagatga

SEQ ID NO: 382034 - DNA, 201 bp, Homo sapiens
cctcagtttcctccgcatctgtgtgggaagatgagagcagcagtctctgccatgggtgtacggactgataaagtacctggtgcttaaggagaggcttcatmgttccatgaggtgtttgcactgttagcttcattttacaggtgagatgaggcacagagtagggttaagtaacctcctgaatgttacacagccctgaagtgg

SEQ ID NO: 382035 - DNA, 201 bp, Homo sapiens
attaccagcaggagggtgaaaaacaccaagtttaaatggcaccaaaatgatgaacatttaggctgggcatggtggctcatgcctgtaatcccaacacttgsggaaaccaaaatgggaggatcacttgaggccagggatttgagaccagcctaggcaacatagtgagaccttgtctctactaaaaagagaaaacttaggtag

SEQ ID NO: 382036 - DNA, 201 bp, Homo sapiens
ggctgtggcccattagtaacagtccattactctggactgttaccagagtcatagtttaccactctcttctcacaggccctgtgatatccagaacccctgtkaccatccccaacgctggggttggcctcttattattatttttaatttgaatcagttagtgccttcatttcctcttccccctttaattgagccacagagcat

SEQ ID NO: 382037 - DNA, 201 bp, Homo sapiens
gcagttgcaccatttactttcccaccagcaatgtatgagggctccaacttccccatgtcctcgccaacacatgttagtatctgtctttttggttatcaccrtcctagtggaggtgaagtgttatgtcattgtggttctgatttgcattttcctgattgctcattgctctatcttaaatagttgatgtaataatttccttct

SEQ ID NO: 382038 - DNA, 201 bp, Homo sapiens
cctttcagcctcggacttccggtttcttcctaaccatggcagcagtatctggggttgagatagggcacctctgtgacaacttcctctttaaccatacaccrtggttccactcgtggtcctggcacttagtgactgtgtgaccttaggcaatctacttggcctctttgagtctcagttttcttttttcttgtcttttttttt

SEQ ID NO: 382039 - DNA, 201 bp, Homo sapiens
taacatccatgacccaagagtgtgacatgactactgaacacacaaaaccatgagcatgcagtggaaaaagaggaagacagactaaggtacacacctggaayagatggctggcagttgaaactgagccagtggaaacctcagatgatgagaactgtaacacataactcataggatctttcaaagacatccaaggagagcact

SEQ ID NO: 382040 - DNA, 201 bp, Homo sapiens
gattcatacaggtgcccttttctacttcacagacgactttaaatgattttcaaagccattgatgcctgtttcatcaggtatgggtccctaattcacttatkctcctactaacggagagtcaagtcgttggcagttctttactttataaataatataggtcttcatgtaatattttctgattaaaaattatttcccaaggct

SEQ ID NO: 382041 - DNA, 201 bp, Homo sapiens
gcactttacacaccttctgaagaagccatttacatgtcacaattactttatcaagtcgcagtcctttactttgctagcagtatgtttgtttagtttataargagtatttttagcaccattttattacctactgtattttatttaagatgtaagaaaggtgggggagttgaaaagagtcccccagatagcctgtatctaacg

SEQ ID NO: 382042 - DNA, 201 bp, Homo sapiens
attttacgagacagattactgagactctgatgatgactcagccaaggtcacatggccagtaaggtaataggccctgaattcaaatctggatctgactcccyatcctgagctccttcaccaggttacatgaccctcaacttacagacgcttgcctgcgtgggagtccaggtgtcatcactgtcttaatcttgcagatgagaa

SEQ ID NO: 382043 - DNA, 201 bp, Homo sapiens
ctgcattggcctcccaaagtgttgggattacaggtgtgagtcaccgcgcctggcctgagtctcagttttcttatctataagatggggtaatagtggagctyaccccatcagatcactgggaggattcagtttgtaagtgattgtcacaagtccagtatgtacttaacacagggtgcctcccagccatgctgccatatgtct

SEQ ID NO: 382044 - DNA, 201 bp, Homo sapiens
gtagcatattatcaacacttcattcctttttaagactaatattccattgcatggatagaccatattttgtttatccattcatcacttgatggacatttagrtagttctctctttttggttactgttttcattttctttgttctttctttcctttctttcttttctttctttcctttctttccttcctttcctttcctttcc

SEQ ID NO: 382045 - DNA, 201 bp, Homo sapiens
aatgacaaatctactttttgcctttacagagtttcctattctggacatttctcacaatacatggctttttgcatttcactttttttttttttttttttttgtgagacggaatctcactctgtcgcccaggctggagtgcagtggcatgatctcggctcactgcaagctctgcctcatgggttcatgccattctcctgcctc

SEQ ID NO: 382046 - DNA, 201 bp, Homo sapiens
tgggattacaggcgcccgccaccgcgcccagctaattttttgtatttttagtagagatggggtttcaccgtgttagccaggatggtctcgatctcctgacstcgtgatccacccgcctcggcctcccaaagtgctgggattacaggcgtgagccaccgcgcccggcctcaggtgggtacagtcttattcatgtctgtactt

SEQ ID NO: 382047 - DNA, 201 bp, Homo sapiens
gcaatttcactcaacagtacaccacgatagattgatctgtcctgtcaatgctggacatttaggttgtttccaatcatgatactcccgattccagcaaacaygtcttcgctattgtttgaaattactataggattctaccttattttttaaaaacctatctcccattttttcgatattagatagttgttttttattttcttt

SEQ ID NO: 382048 - DNA, 201 bp, Homo sapiens
cctggcctcaagagatcctcccatcttggcctcccaaagtgctgggattacaggtgcaagccactgagcctggcctgttattaatttttttttttttttttgagacagagtctcgctctattgcccaggtgcaatggcaccatcttggctcactgcaagctccgcctcccaggttcacaccattctcctgcctcaacctcc

SEQ ID NO: 382049 - DNA, 201 bp, Homo sapiens
tggagcttaccccatcagatcactgggaggattcagtttgtaagtgattgtcacaagtccagtatgtacttaacacagggtgcctcccagccatgctgccwtatgtctcctcaggcagcaggtgcctgcatttgtgtttgcgtgggggacatgggacaggctgagacatagctcgcatgtgtagggggtgtcctcctcctg

SEQ ID NO: 382050 - DNA, 201 bp, Homo sapiens
gttccactcgtggtcctggcacttagtgactgtgtgaccttaggcaatctacttggcctctttgagtctcagttttcttttttcttgtcttttttttttttgagatggagtctcactctgtccccaggctgaagtgcagcggcacaatttcagttcactgcaacctctgcctcccgggttcaagcaattattctgcctcag

SEQ ID NO: 382051 - DNA, 201 bp, Homo sapiens
atcagagagactcaaacttatatcattattcaagggcagagcaatgatttgaacctacatatctgactctgtagcctgtgttctgaggaaaaattttactrggttccctgtgaaattcctgttcccatttcctttgggtgggaggagaaggaagctgctcatttaaacaggtttgacaacgtcagagcttttcccactaac

SEQ ID NO: 382052 - DNA, 201 bp, Homo sapiens
agtgatgataccacatcacagcctgggggccactccactgtcacagggctgttgggaagaagctgtaaggtgctgctttcatctatacaagttgtgctggwggccaggggtaggcgtgagttttgggaggtgaagtatctgtgtgtgtgaaggattctgttttgagaaagaaggaaatgggaacttactaatttgtagaat

SEQ ID NO: 382053 - DNA, 201 bp, Homo sapiens
gacaagtcagtgcaggtccaacgtcttagggattgtgctgagttgggggagggatctagttaaagatgtcccttggtgaatcatttttgaaaaaaaaaaaattatctccactacctgtcccctagtctgtcttagatataaatgcgggtttttgtatatcaggctcgcaaaattatgtgtcttgatttgtcttgggagaga

SEQ ID NO: 382054 - DNA, 201 bp, Homo sapiens
taggaaggtgtcagcgtgtgaggcccaggcagccagtggtcagccgatacttgaaggcctcctgtgtgcccagcttgctgctggggccatgacagtaactsagggaaacaagtcacgcttgtgagatgtgatgaggacctggaaagggaagtccagaagcggaaggcaacctctcagagagggggtgtcttgtggggactt

SEQ ID NO: 382055 - DNA, 201 bp, Homo sapiens
aatcttgtaggaaaagcagaaaaagtcagactaacacattcaatcatgttggatcgtgatagacgctaggaaggaaaggaacagggtactgtaataaggartcattagtcaggagcactagcctagctggggaaggcctcagggtggcctctctgtagaggtgatgtttgagctgagacttgaagggtgagaaggagggag

SEQ ID NO: 382056 - DNA, 201 bp, Homo sapiens
tctctgtctcctcctattagaatgtaattcttcgaggccaggaatttggtctgttttattcatagctgtatccccagctcccagaacagtgcctggcacgytggcttttacctactctttgttgacctaatggctgaatgaacggacgtgaccatcatcgtgagaatctgtggataatagcagcaaacatttaaacacagg

SEQ ID NO: 382057 - DNA, 201 bp, Homo sapiens
acagaggatgtgcttaagtattttttgctcttgctgtcgttgatgtcatcattatcatcatccagcataaaggcaagatggcattgtagaaaggatgggawaaatactacattttccatttatatgaggattttccttcctgcacccgatggattgtcctgctccccctggagtatgtgtcctccactttggagcatgcca

SEQ ID NO: 382058 - DNA, 201 bp, Homo sapiens
gtcggctcgtgtcccctgatctgtgaagtgagaattacaacacctactttacagggctctcgtgagtattcagccagctagtgtgttaagctcttactccygttaggattgcttcggccctctgtgcctcagtttcctcactggtgaggtcctttctgcctgatcaagtctgtggctcagtcagctcctcacttcctgccc

SEQ ID NO: 382059 - DNA, 201 bp, Homo sapiens
agtatagggtattaaccatggcatgtgtatacacctgtgtaacaaacctgcatgctcttcacatgtatcccggaacttaaagtaaaataaaataaaataaatatatacaaaaaagaaattacagggtattagaaccttcttctgaagctcattgtgatgggcatgagacaggattttggcttgaaatctatgccctgtcat

SEQ ID NO: 382060 - DNA, 201 bp, Homo sapiens
tgggatggaggaagaatcaggggatgtgtctttggaaagtgcaattgcccacagctggcatctgaatagattcactctcctcaaaggcacttttgcgacaytgatcactggccaagcatgccccgtgcaggtctcaccctccagcccatgcagttgtctttcagccacaggctgaacactggccatcccagctgtgtcaga

SEQ ID NO: 382061 - DNA, 201 bp, Homo sapiens
gggagagacggatggtaaacagggaggtgaagacaaagccctctctttacaagcgaagtcagcacaagggacaggaagagcgcgcatgatgggtggtcagraaaggcctctctgaggagctgatatttaggccgagatccgatgggaagaatcctctaggtggagaaggactatgcatccatcccccatgtataaaatggg

SEQ ID NO: 382062 - DNA, 201 bp, Homo sapiens
caggggatgtgtctttggaaagtgcaattgcccacagctggcatctgaatagattcactctcctcaaaggcacttttgcgacattgatcactggccaagcrtgccccgtgcaggtctcaccctccagcccatgcagttgtctttcagccacaggctgaacactggccatcccagctgtgtcagaggactttggcaagccta

SEQ ID NO: 382063 - DNA, 201 bp, Homo sapiens
ggatttgctgttctgtctcacttggtgttgcctggagtcccttacctgaatatattcatcggatggccaggctggaagttcccaggcagctttctgggccrccagtgttcctttgtgcagcgtctctccctgttctgtggctagtttgggcttccttacagcatggtggtctcatagtagctagtcttctctgtgatggct

SEQ ID NO: 382064 - DNA, 201 bp, Homo sapiens
acaattctgtgggtcaggaatttgggcagagctcagtcagtggatttgctgttctgtctcacttggtgttgcctggagtcccttacctgaatatattcatyggatggccaggctggaagttcccaggcagctttctgggccgccagtgttcctttgtgcagcgtctctccctgttctgtggctagtttgggcttccttaca

SEQ ID NO: 382065 - DNA, 201 bp, Homo sapiens
catggtgtagaaatggttgtgatttttgcacattgattttgtatcccgagactctgctgaaattgcttatcagctgaaggagatttttctataacagtgtraaaacacaggagcttaaaacaacaattctgtgggtcaggaatttgggcagagctcagtcagtggatttgctgttctgtctcacttggtgttgcctggagt

SEQ ID NO: 382066 - DNA, 201 bp, Homo sapiens
gttattaactattttaaatgtcgatgttggtttaaaaaataatatgacagaccccacatactcaagagcaagggatccagggtctgactgcctgggttcaratcttggctatgccacttatcccatttgtggccatggacaagttacttaacttttcattgcactcatctgtaaaataggataataatggtacctattaca

SEQ ID NO: 382067 - DNA, 201 bp, Homo sapiens; identical to SEQ ID NO: 83100

SEQ ID NO: 382068 - DNA, 201 bp, Homo sapiens
aagtatagggtattaaccatggcatgtgtatacacctgtgtaacaaacctgcatgctcttcacatgtatcccggaacttaaagtaaaataaaataaaataaatatatacaaaaaagaaattacagggtattagaaccttcttctgaagctcattgtgatgggcatgagacaggattttggcttgaaatctatgccctgtca

SEQ ID NO: 382069 - DNA, 201 bp, Homo sapiens
taagtatagggtattaaccatggcatgtgtatacacctgtgtaacaaacctgcatgctcttcacatgtatcccggaacttaaagtaaaataaaataaaataaatatatacaaaaaagaaattacagggtattagaaccttcttctgaagctcattgtgatgggcatgagacaggattttggcttgaaatctatgccctgtc

SEQ ID NO: 382070 - DNA, 201 bp, Homo sapiens
tgtggaccaggttgaacagtgtcccccaaatttatgtccagctggaacctcagaacatagctgtatttggaaagagggtctttgcagatgtaatcaagttratatgtggtcatactgcattagggtacatcctaaattgatgaggctgggtgtggtggttcaatcccgtaatcccagtactttgggaggcctaagtgggca

SEQ ID NO: 382071 - DNA, 201 bp, Homo sapiens
gtaagtatagggtattaaccatggcatgtgtatacacctgtgtaacaaacctgcatgctcttcacatgtatcccggaacttaaagtaaaataaaataaaataaatatatacaaaaaagaaattacagggtattagaaccttcttctgaagctcattgtgatgggcatgagacaggattttggcttgaaatctatgccctgt

SEQ ID NO: 382072 - DNA, 201 bp, Homo sapiens
gagttcgagaccagcctggacaaaactgagaccctgtctctacaaaaaatataaaaaattagccgggcatagtagtgtgcacctgtggtcccagctactcrggaggctgaggtgggagcattggtttagcctagaggtgaaggccgcagtgaaccgtgatcaccccattgcactccagcctgggtgacagagtgagatgag

SEQ ID NO: 382073 - DNA, 201 bp, Homo sapiens
tgtaagtatagggtattaaccatggcatgtgtatacacctgtgtaacaaacctgcatgctcttcacatgtatcccggaacttaaagtaaaataaaataaaataaatatatacaaaaaagaaattacagggtattagaaccttcttctgaagctcattgtgatgggcatgagacaggattttggcttgaaatctatgccctg

SEQ ID NO: 382074 - DNA, 201 bp, Homo sapiens
gttgacggacccttgggttgttgccaccttttggctaatataaatagtgctgctaagaatgtttctctacaagtttttgtgtggatgtctgtttttatttsttttgggtatatacctaggagtggaattgctgggtcatacactaactcagtttcatcattttaggaactgtcagactgttttctaaagtggctgcaccat

SEQ ID NO: 382075 - DNA, 201 bp, Homo sapiens
tacccttccctccctagagaaatcagtatcatgatttaataattataattcccatttcaaaaattttcatccatgattaacatataatatgttttgcaggyctttacataaaagacactgcgtggtgtgtatccctcaagcaacttgcatgtttttgcttgaccttgtgaagattttccatgttgatgtagctttatttta

SEQ ID NO: 382076 - DNA, 201 bp, Homo sapiens
acatagtatacatagaattcacccattgtatgcagcatgtatagtgtggtggttttagtatatttatataaatgtgcaagcaccactccaatcaaaagtakaacctttatatcacctcaagatgaaaccccatacctttcaccatcaccccatcccctcatcccccctaccagacgtaagcaaccgttaaatttaattctg

SEQ ID NO: 382077 - DNA, 201 bp, Homo sapiens
tggctagctggttttcccaacaccatttattaagtagggaatcctttccccgttgcttgtttttgtcaagtttgtcaaagatcagatggtggtagatgtgygatgttatttctaaggtctgtgttctgttgcaatggtctatatatctattttggtaccagtaccatgctgttttgtttaccatagccttgtagtatagtt

SEQ ID NO: 382078 - DNA, 201 bp, Homo sapiens
agacataattcacatagtatacatagaattcacccattgtatgcagcatgtatagtgtggtggttttagtatatttatataaatgtgcaagcaccactccmatcaaaagtagaacctttatatcacctcaagatgaaaccccatacctttcaccatcaccccatcccctcatcccccctaccagacgtaagcaaccgttaa

SEQ ID NO: 382079 - DNA, 201 bp, Homo sapiens
gactctagtctatagaacacgtaacgtggccatgagcagcctcataagagaccgtttttctctcagcatctatgcttggccttcgttatttgcagcatcartattggtgaatttgcctttctgctccaacttatttgcaacctgcaaagcagtagttctggcccttctgtggtcattcttggtgatgcagactggtgaaaa

SEQ ID NO: 382080 - DNA, 201 bp, Homo sapiens
gattacaggcatgagccacctcacccagccttgcactctttttttttttttttataatagattgattgagacataattcacatagtatacatagaattcayccattgtatgcagcatgtatagtgtggtggttttagtatatttatataaatgtgcaagcaccactccaatcaaaagtagaacctttatatcacctcaaga

SEQ ID NO: 382081 - DNA, 201 bp, Homo sapiens
gaatggggaccgggaggaaggtcaggggtcgtgtgggggctggcgttcaaaactcctcttttcgagcggctctgcgtggggtggcgccgtctctcctgacsgcccttgtgcccagagctcgcggacgctcggagccacacttccctgtctcacttcggtggttgcgggtggcgggtgggagcgataccgcgggaggcgcag

SEQ ID NO: 382082 - DNA, 201 bp, Homo sapiens
cacttaagcaattttcagttgcaaatatttgctctaatttgtgtttttaaattaactagtttttaattgaaatatatattcctgggggttaaggagtcaamtcaaatatttctcctccctaaaccatcctgctgaggcaagctcattaccagttacttttatcttccaaaatagtctatgcttgcataatgtgtgggttta

SEQ ID NO: 382083 - DNA, 201 bp, Homo sapiens
tcatcctcatttctatgcagaggaaccatttgccaaagtctccatggatgattctgaaggtttagtttgtttttcgtttatttcattttttttttttttttgttcttaattttgctcaggaataaagagatggttagaaatctctagacaggatagagaaggatgttggagattaggggtgagaggtgggagccaggctgg

SEQ ID NO: 382084 - DNA, 201 bp, Homo sapiens
ctggtttcaaactcctgacctcaagtgatctgcccacttcggcctcccaaggtgctgggattacaggcatgaaccactgcgcccggctgtaaactttactktttgcaaagttttttttcagatatatctctatagggtgtatgttctttttccatttcatagatgagaaaatagacagtaagccagaatagaggcttcttc

SEQ ID NO: 382085 - DNA, 201 bp, Homo sapiens
cctaaaactcatcctgattgacatgagacaggattttggttcctgaagttcatgccctgttaactaaacccctttcagtactaaaatcagttcactctttmattctgccctttcagcttcctgatttctcccgattccttccttctccctggagcggccgacaatgtccaccacggtcaatgtagattcccttgcggaata

SEQ ID NO: 382086 - DNA, 201 bp, Homo sapiens
cttctgccagttctcagactacctcaactccttgctgacattcctaggaattgtggtcccagctggcttctatagctgtgtgacctttgccttttccaaaygagtgggcaccctgcaggccacttcctctgggtttcagtgcccagcttatcaggaggctgcatgaacatctatttctagctgggcgggaaataggacggg

SEQ ID NO: 382087 - DNA, 201 bp, Homo sapiens
gaatttattccaggccatccaagttaaggtagttgtctgtattttgagaacctttctcttgctgtaaaaagcaaacaaaaacaaaaaaagacaaactagcraactcaaagaacgagaatacatatacatgcagtgctgcttcagatggaagtcagaaaagtgtgtgatcaaatgaaaggctgttgttgaaagggaagtctg

SEQ ID NO: 382088 - DNA, 201 bp, Homo sapiens
tttatactttctttccagggccaccaaggacaagaccagagtcattttcatcctgaattggtgtcaactagtgttttcataccctagagactatccaaatracacagctgacccaatccctgcatttctcagagggggaaactgaggcccagggaggtaaaatgactctcccaaggtcacacagtaaggtagtggcagtgg

SEQ ID NO: 382089 - DNA, 201 bp, Homo sapiens
tactaccttacgtacagctaacacttagtaagtagctgttataataataatgaagatggccgggtgtggtggctcacacctgtaatcccagcactttgggwggccaaagcgggcagatcacctgaggtcaggagtttgaaagcagcctggccaacatggcgaaaccccatctctaccaaaaatacaaaaattcgccgggtg

SEQ ID NO: 382090 - DNA, 201 bp, Homo sapiens
gcaacttggaagtgaaattcaagtgcctgacagctgtctaggtgcccctgaaactgcctctagtcacaacaaagatacctccatcaaagagcataggaagsgtttgaatcagatagcttcatgcaacacacgaacggaaaaataaatttcttaaagaacatattagcttcttcccatgagatcaggaaaacgggacatcaa

SEQ ID NO: 382091 - DNA, 201 bp, Homo sapiens
acccccaaggcctggcctctggcagagaagactgagtctgaagcacaacacctcacttcctggcctccaggttccctattgctttccaggggtgttggatwagatggtgctgggattccttccatccccagccttctgcatagagttaaggagctggttgtctctgaatgtcgggagggagcttgtggtactgttgggcat

SEQ ID NO: 382092 - DNA, 201 bp, Homo sapiens
cctccaggttccctattgctttccaggggtgttggataagatggtgctgggattccttccatccccagccttctgcatagagttaaggagctggttgtctstgaatgtcgggagggagcttgtggtactgttgggcatgttggttttctttcctttctgagggacctagttgagcagtcttcaggtgggaaggggtctgct

SEQ ID NO: 382093 - DNA, 201 bp, Homo sapiens
ctgataagcaggttgatggtaagggtttgggagtcttgtaggaatccaggagaatgaacagtctcatcgctgggctgcatggaaagggaagtggtgagccrctggcactgaggactttcctgtctgtaactagagctgctgatggtgatgtctcttagacagcctcatctgccctcttgggtttctctcacagatgtggcc

SEQ ID NO: 382094 - DNA, 201 bp, Homo sapiens
aaatatgtacatatttatacatgtctgtatctatggaaaatatatggtgccattttgtgtctgggtattttcattctatttttagaaaatacaaatgggawcattctgcagcttttctactcagcagtgtttcttttctttcctctgtttttttagaaggaataaatatttaataaaatatcactggaaataaaccactga

SEQ ID NO: 382095 - DNA, 201 bp, Homo sapiens
acattgaggcatagcccagggtcactgtattagtctgttctcacggctataaagagctaccaaagactgggtaatataaaaaggaaagaggtttaattgastcacagttcagcatggctggaggggccccaggaagcttacaatcatggtggaaggtgaaggcggggctggcatgtgacatggagaaagcaggagcaagag

SEQ ID NO: 382096 - DNA, 201 bp, Homo sapiens
gtcactaacgccaccataagagctgacatttatgtagtatatgtttatgtacctgttacagctctaagagctttccctgtattattgcttacttaattccwcaactgtatgtgttcaatacgcattatttccattttacagatgagaacattgaggcatagcccagggtcactgtattagtctgttctcacggctataaag

SEQ ID NO: 382097 - DNA, 201 bp, Homo sapiens
tgcccggccccctcccaccttctattgaacagaatttggcatgtgaccaagtgcaagggatgctgggaaacatgccctagccgcatgctagaagaacaggrcctaagttggggggcatccttccaggcttttctgtaacccctaattttggagggtacagaggcagctctaggtgccccagtgaaggctgataagcaggtt

SEQ ID NO: 382098 - DNA, 201 bp, Homo sapiens
gtgatttgtccgagggactgcacggttcagcagagtaatggttagtatgaggtccagcagctgaatggagggatgagaggaccgaaggctgcttggcttasgcaggcttcgtgattgtaagtaagtgacagaggctgagttagtctggcttagaaaaagaaaatgcattagttcatgtaattaaagcatctttggagttct

SEQ ID NO: 382099 - DNA, 201 bp, Homo sapiens
tccctggtctctacccactgcatgtctgtctgggaccctaagtcattgtaacaatcaaaaataacatccctgccccaggacacacactttttcaaaccctstctggtcagggtatggggtgaagcgtcactgtccttcactgagaagcactgaggaggtttgagcacataaggaaatcagtgtagtattttgtgatgagtg

SEQ ID NO: 382100 - DNA, 201 bp, Homo sapiens
ttgaggccgagagactatgacttaacttgctcaaggtcacacacctgtaggaccagagctgagattcaaacccaggaatgtctaattaatttcgaaccccrtgttcctcctctgcaggctgccctctcactgggtgctcaaagccagatgcattgatcttactttaaaaggtgtctgtatttccctttccccagtgaaatg

SEQ ID NO: 382101 - DNA, 201 bp, Homo sapiens
ctctctcatgaagccgtggcttgcctttgagttccgtggaatagtgcacaagaaaatcctttgcctccagagtacatcttagttcagacagagggatcatrgacatatctgaggaccatcgtctcaatcctagcagagaatgtaatcaataaagaccatgtttactgagctcttggacttggaacatctaccctcagacct

SEQ ID NO: 382102 - DNA, 201 bp, Homo sapiens
aagataagtttgtggtaagtttcatggctcagcctgggaattttatgaatgcggagtgacttagcctctctcatgaagccgtggcttgcctttgagttccrtggaatagtgcacaagaaaatcctttgcctccagagtacatcttagttcagacagagggatcatagacatatctgaggaccatcgtctcaatcctagcag

SEQ ID NO: 382103 - DNA, 201 bp, Homo sapiens
aaataactgttgaccaggctctctcatagagggctgcctgaggtgggaactgatgggagcagctaaatcctgtgctgttgaaaaccctcaaggtgacagarctgggtctccctcttttgcagcatcagtctccgagagttgaagaccatcttgcccctgatcaactttaaagtgagcagtgccaagttccttaaagataag

SEQ ID NO: 382104 - DNA, 201 bp, Homo sapiens
ctgtacgctataaatctcttatgtgacctatgtccctggacatacctgaagggtggagaccagccctccttattggggcatcaccctaccctgtgagtctsctatgtgacccatgtccatggacattgcttgagccttgctcattgaagtgtcacccttaccttgactcaatgtcttgttcccagttagtggtccataaat

SEQ ID NO: 382105 - DNA, 201 bp, Homo sapiens
attcttgtgcctcagcctcctgagtagctggtattataggcgcacgccactgggcctggctaatttttgtatttcctttttttttttttttttttttttttgggacagagtcacattctgttgcctaggctagagtgcagtggcatgatctcggctcactgcaacctttgcctcctgggttcaagtgattctcctgcctca

SEQ ID NO: 382106 - DNA, 201 bp, Homo sapiens
aggctggagtgtagtggtgtgattgcggctcactgcagccttgacctcccaggctcaagtgatcctcccacctcaacctccctgagtctctgggaccgcaygtgcgcaccaccatgcctggctaattttttgtatttttgcagagatgggatttagtggcgttgcctagggtgatttcaaactcctgggctcaaacagtcc

SEQ ID NO: 382107 - DNA, 201 bp, Homo sapiens
agaggcagatgaaggctgctggctcaaaggcctaaacttgggtctccatggagacagcctatgtatatgttttcccctcagcataagaagctgggcccccsaggcgatgtggatgtcaacatggaggacaagaaggacgaacacaagcaacagggggagctgtacatgtgggattccattgaccaggtgggccttggtccc

SEQ ID NO: 382108 - DNA, 201 bp, Homo sapiens
cacctcccacccggccccagctccaacagtggagatcacaattcaacatgagatttgggtggggacacagagccaaaccataacatagatttcttcaccamtgtccacagattagctcattagagatgcagaatctcaggcctcaccccagacttcccaagtcagaatctgcattttaacaagattcacaggtgattcaca

SEQ ID NO: 382109 - DNA, 201 bp, Homo sapiens
gacgcacctgcgctgcgccgagttcgagctgcggctcacggaccctgtgcccaaccccaacccccacgagtccaagccgtacgtgtctgagggtggagcargaggcaggcggtggtcgggttagctccaccaggcagagaagctggcctggtggttcagccgggccagtcccccaggacaccctctccccagcccaccggc

SEQ ID NO: 382110 - DNA, 201 bp, Homo sapiens
tgtcttcaaaatccagtgtgtgttttatacctataacacatcttgattcagacagattcaattctgagtgttcaaaagccacatgtggctagtggctaccrtattggatagcacagatctagattatacctcttttgtccttttgcattacctgcttccgtggtccccaagcagcaaaggcattctccatgtggcaggtac

SEQ ID NO: 382111 - DNA, 201 bp, Homo sapiens
ctgatatggcccctcgggctgctctggttggctttctcctgagtcgtccattctaccttctcgccaaggcttcctaggtcatgtttcaagtctgttcaatrcatttccttctccaggtggtcagtggagacctcacagcagaggcttatcttgttgaacgtggtgattcatgtggtgatttcacagggtcagctccccatg

SEQ ID NO: 382112 - DNA, 201 bp, Homo sapiens
ttaggtgtgacatctgattgctgggcccgagcatccagtgccagctgtacttctgcagattactgggtaatcacagtagaacctttcttgggggttgcttktgacccaggcagcactgctcagcttgtggccagggagcttcatgaccattgagagtaggagtctgcaccattacatgatcataggatagcctgcagacat

SEQ ID NO: 382113 - DNA, 201 bp, Homo sapiens
ccaggtagccaccagaacctatttattgcacctggcatctcccccaacccctctcagctctgttaggacttccacacagcagagctcaggtgttgctgtcrttacctcctttcagctcctcacttcattctactttaaagccacagtgctaaggcctgcatcccctttctgcccaaatgggttttttgctaccatatcaaa

SEQ ID NO: 382114 - DNA, 201 bp, Homo sapiens
tctgttcagcctctttatttccttcttctttctccctggagagaccaagaatgatgatatttcaccactttggctggggcgtattattataataagtcccycggatggtctgataactaggcaggtttcacacatatgccactggagagacactgcccttcctccaccttccccctcctctccctcctcttctccctccca

SEQ ID NO: 382115 - DNA, 201 bp, Homo sapiens
atcaaagtgtgtcaattcatctgcagaatgcaatgacttagcttggagatttagaaaaaacaaaggtcaaaacctcaagggagattaaaaatgtgaccttstcctcccccgactgtgagatactctcagcagggacctttcctcacttctttctagctcctagcagtgcctggcacatccatattcatgggaggaatgaaa

SEQ ID NO: 382116 - DNA, 201 bp, Homo sapiens
atttccttcttctttctccctggagagaccaagaatgatgatatttcaccactttggctggggcgtattattataataagtcccccggatggtctgataaytaggcaggtttcacacatatgccactggagagacactgcccttcctccaccttccccctcctctccctcctcttctccctcccactttccctttctttct

SEQ ID NO: 382117 - DNA, 201 bp, Homo sapiens
acaggacatggggagccacagaaggttcttgagccgggctttagtaggcaaaatagtctcattttctaataaggtcagataaatagtctaggatgtgtttkgaaaccagatctgaggaagcattatgaaacctgttctagaattcacaaggcacgtttttacggattggaaaatgaaactccgaacctcctggcaccctct

SEQ ID NO: 382118 - DNA, 201 bp, Homo sapiens
gggtgttggattcccaggtgtggagtgacaacactgcctcatatccattttcagagctcatttctgaggcttcatctggtaccaaccctgtgaggcgaggrtgctcctgcgaatccccttgtgcagccaggcttggagaagtcaaggatttggcttggggcacccaggaagcctgaggcttagctgggtggacctcctggc

SEQ ID NO: 382119 - DNA, 201 bp, Homo sapiens
tgaggctcagagaggtccagtgacttgctcaagtctacacagcggggcatggcagagttcagatccacattctggtcggcctgactgtggggttcagtggrggttggcggtgcttgagcatggaagacaaagaccttgttgggtgccgggctgcttctagagatggatgtggtgggtggaggatggtttgtgttctttcca

SEQ ID NO: 382120 - DNA, 201 bp, Homo sapiens
gttgaagagtctgggctggattctggaggccctggggagccatcatgtggtgtggtcagaggtgcattttggagagtccctggctgcggaaaatggctcargagatgggcaggttgaaggagggggtttgcatgtctgggcacggccttgccgggaggaatcttagaggtgctcaccgtctggtggggtccaggaacattc

SEQ ID NO: 382121 - DNA, 201 bp, Homo sapiens
ggagagacactgcccttcctccaccttccccctcctctccctcctcttctccctcccactttccctttctttctccttcccttcccacctttgcccccccyccattgcctcccctctgtcatttggatgcccactgtaggcgccgccctaggcgctagagatacagcagttattaaattggattcaaatctccgtggagcc

SEQ ID NO: 382122 - DNA, 201 bp, Homo sapiens
cctaaccagaggtgagatgaggccttcctggtgactttgcaaacctggtggttgttccctcgccgcctcttgtttagagagcagccactttcagcgtgctrgcaccccaccaaggatgatatctttgtaatgaggattttaagatcccgttagacccccaggtgtttattttctaagggaggtagggcaatctgggaaggc

SEQ ID NO: 382123 - DNA, 201 bp, Homo sapiens
ccagaggtgagatgaggccttcctggtgactttgcaaacctggtggttgttccctcgccgcctcttgtttagagagcagccactttcagcgtgctggcacyccaccaaggatgatatctttgtaatgaggattttaagatcccgttagacccccaggtgtttattttctaagggaggtagggcaatctgggaaggcttcct

SEQ ID NO: 382124 - DNA, 201 bp, Homo sapiens
caagtgggaggtacagtctaagcaaaggtgtggcagtgggaatgtggttgtgttccgtgtgcttgggctgaggcagagactggaagcccttgcttcctctstactgagttgcccttacctgtacatcagcatttacctggtgcagggggtgggggttggggtggtgcaggcaaggagtggatgcctggttctgccacctct

SEQ ID NO: 382125 - DNA, 201 bp, Homo sapiens
ccgtgtgcttgggctgaggcagagactggaagcccttgcttcctctgtactgagttgcccttacctgtacatcagcatttacctggtgcagggggtggggkttggggtggtgcaggcaaggagtggatgcctggttctgccacctctcccccaggatattcttcatctcagccagaccctgggatggttcaagggtgcaat

SEQ ID NO: 382126 - DNA, 201 bp, Homo sapiens
gcttgtagccagctgcgctgtccttctggctttcccagtgaaaccatctcttctgccctccagtgtctctgatgccacagtacagctctgaggcacagggrggtgccacgaccctgaggtttatttaaaaaatctccaaatagtgcactccagctctctctactttgcttaatgtggaaaagtgttatttccctagaaggc

SEQ ID NO: 382127 - DNA, 201 bp, Homo sapiens; identical to SEQ ID NO: 83102

SEQ ID NO: 382128 - DNA, 201 bp, Homo sapiens
agtgctaaaacaaggtctcgtacataagtgctagatggtggttagcggatattattaccagcgtcactcttattatttcaggatccatctgtgtttcccaygcgttgcgaaggaaagctgagctgtcagcctggctgaaatgccgcgtggagttgggagtcttgggttctaaacccagctctgcctctctctcgctatgag

SEQ ID NO: 382129 - DNA, 201 bp, Homo sapiens
gtgtttcccatgcgttgcgaaggaaagctgagctgtcagcctggctgaaatgccgcgtggagttgggagtcttgggttctaaacccagctctgcctctctstcgctatgagactacaggcctgtcacttctcctctttgaacctctgcttcctggttgctcggctggggcccaggaaacccagcccgcccacgttgaccat

SEQ ID NO: 382130 - DNA, 201 bp, Homo sapiens
ctttgaagtgggtgtggtgcagctcccatgtgaagggactctgtagcgggcctccttgttctgggcagcccatgaccctccctgggcaggcacgggcatgstcccctaggactcaggtgacagcagccccaggaacttcctgcttctattgccaatgctctgctttacacattcattcatttattattatttcttttcgcg

SEQ ID NO: 382131 - DNA, 201 bp, Homo sapiens
tgcttctccctagctagggctaagtctggtttgatctccccctcctgctctctggctggcagtgtgagagggtggcaagggagagacctttggcatcttgsggggggagtaacaatctcgagggtccaactccccaaacccttcagaattcaccttcttcttctataaaattgggtgggttaatttacttctttgagttgt

SEQ ID NO: 382132 - DNA, 201 bp, Homo sapiens
ttttgatcaagacgaacacatgtctataactaaagtggacaagagggtatttttttcaggttctctcatgcattttaatgtttgtttttttttcctgcatsttaagtgtccctctcctttctcttataaggatactcatacttgttggatgttggaattgccctaaatccaggataatctcatattgagatccttaaccta

SEQ ID NO: 382133 - DNA, 201 bp, Homo sapiens
ccacacctgatacgctgtggcccacttctttctatttcaagaaatgaggtggaaatagcgttggccacacggtcactttgtaccatgcactgggctaggcrtggtcatacgtatcttcttattcagtcttgtcaagacactgcaggacgaataacctcagcccttgcccactttacagatgtggacattgagattcagagg

SEQ ID NO: 382134 - DNA, 201 bp, Homo sapiens
cctgacacatcttttcggaggaccctactgaatctactgcatcccttgagtagtcatctgtgatgtgtacttaccccgatggaaagtagacgtccccatcrgtgctaaccgtggtcatagcagtggtggttggtccatgagagaaacagctcaggcagggtgcagtctggtctttgtggccctctaataggctgattggga

SEQ ID NO: 382135 - DNA, 201 bp, Homo sapiens
cattggacacaatccttatgttccaggaagtcgtggtttggtagggagacaaacccgtcaacagagaaacaccaaacagtgcaaggagctttggccaagcrcaaccagaggaggggatgttggtgcccccatgggtaagagcatcagtgcacggggagtgtttggccaagactgtgacccttaaggtacagatgtttgcct

SEQ ID NO: 382136 - DNA, 201 bp, Homo sapiens
caagtacttaatcactgccttatcattatatcagagcgacatgggaaagtgccaccctgtcttcgatgatggagtaagggctgtctgttcttgtggctgcmgaactggaaagaaattgtagggtttcccatgcacccatttgtttctaaggtagaacttgacccaaagggctgattaaagccttcctggggcctcttgtgc

SEQ ID NO: 382137 - DNA, 201 bp, Homo sapiens
aagtctatgccagcctcaagcagtttctcttgcaaaggtgtgtgtgcagtcacgtgtataccagctcagggacaatcgtcattgtgagcctcactgatgtktaagtcacctaatgatgcagctgccttcccccaccagcgactggagtatgggcagttcctctggaagtggaaaagcacagaccccatgaatagccctttt

SEQ ID NO: 382138 - DNA, 201 bp, Homo sapiens
ttacagaggcccttagaaccagaggaaaggctggaggtggggacacaggatggccagagtcacactggaccgtctccagggcagcggctgggcagtgacgygctacttccttccgcatgccacagcagaagctgggaggatggtacagggaaactaggtggttttctcctgcaaggtggggcgagcttcctctcttgacca

SEQ ID NO: 382139 - DNA, 201 bp, Homo sapiens
aggtagaacttgacccaaagggctgattaaagccttcctggggcctcttgtgccctctgacttctggctagagtcagtgagtctctcctccaagatagtcrcccaccagtggccaggtcatttttttccccttgggagggcctcacatcttggccagtccctggtcacgagaggatccttgactcactcaactcttctgca

SEQ ID NO: 382140 - DNA, 201 bp, Homo sapiens
atatcatggaaataaaagaaatccgcccagggaagaactccaaagatttcgagcgagcaaaagcagttcgccagaaagaagactgctgcttcaccatcctrtatggcactcagttcgtcctcagcacgctcagcttggcaggtaggtgcatgtttctgtgcctttctccttccctgtgccttagtgtcttcctgaagaagt

SEQ ID NO: 382141 - DNA, 201 bp, Homo sapiens
tctattgttgatgggcatttgggttgattccctatcttcgctattgtgatactattgctattattattattattattattattgttatttccaaccctctrtgataggcagaataaacgctctctgctcccaagatgcccttgtcttaatccctggagcctgtgaatatattactctatacggcaaaatgctccttgcaga

SEQ ID NO: 382142 - DNA, 201 bp, Homo sapiens
caaaaaagggatttcaaggcttttttttttctttttttgaaaaaaccaaaaaaagcagaagcaaaatggaagttgctgtggtggctggtgctctctcctgsgctcaaggtcttggagacctccctgccatagttgataaagcgtggaacgctggagacctgagctgggtgctggcaggatttgaatggtggactccaggga

SEQ ID NO: 382143 - DNA, 201 bp, Homo sapiens
gcccaccaccacgcctgtctaattttttttgtatttttagtagagatggggttttgctgtgttagccaggatgcatctcacttctttagcctaacataagkttcgttcatattgtagcatattatcaacacttcattcctttttaagactaatattccattgcatggatagaccatattttgtttatccattcatcacttg

SEQ ID NO: 382144 - DNA, 201 bp, Homo sapiens
gtgttgtgtgatcatagctcatggcagcctcagactcctgggctcaagcaatcctcctgcctcagtcttcctagtagctgggactacaggtgtgcatcacygtgcccagctaaattttttattttattttatttcttgtagagatgggggtcttgctatgttgcctaggctagtcttgaattcctggcttcaagtgatcct

SEQ ID NO: 382145 - DNA, 201 bp, Homo sapiens
aagtgtacagtacagaggcttcagcacattcacagagctgagcagccatcgtcacaatccattttagaacattcttatcatcccaaagagcagccctgtaycccttatcttttaccttccgataggcccgctctctgctttcctggtccttggcaaccactgatctacgttctgtctctgtagatttgctaattctgcata

SEQ ID NO: 382146 - DNA, 201 bp, Homo sapiens
gacaggaccacacttactctttcagctgatcccaagaaaagaaactctaccaagagcaccaacgaaagtcccacggatgcgtctagttggccttgcttggstcatgtgcctggaggttgtactggtgggggaagtagaaatcattactggctacaggtgaggcacatgcccatctctgcaagatgtaatttatgatacctt

SEQ ID NO: 382147 - DNA, 201 bp, Homo sapiens
gctgctctggcaccccaggcccctcagtctctctgttcctggacatgggatggttcctttgccctgctgctgtctgggctcctggggggccctggcctctyccttgctcccaggatgggctccactggggcaccagcatgagaggacgctggcctctcccttgctcccaggatgagctccactggggcagcagcgtgagag

SEQ ID NO: 382148 - DNA, 201 bp, Homo sapiens
tgaaataaatacaagctgaagttctaaaaaaaaaaaaaaaaaaaaagtgaggcaaaggaattgcccctagatgtagtcatttttcctggggaattggcccmatgacttcaagtggttgatgtcataatgagtccttccaagatctctttaaaaaattgatgtgttaagtgatctgtggtgatgagcacagctatacacgcc

SEQ ID NO: 382149 - DNA, 201 bp, Homo sapiens
aataacctcagcccttgcccactttacagatgtggacattgagattcagaggttaaatagctcagccagggtcacacatttagtatttgctgaggaaattrttcaaggccaaggtggtctgccctcagagcctgttttcccatgcctgtatcatgctgccattcacaagggacactgaggtcctgcttcactgttgacact

SEQ ID NO: 382150 - DNA, 201 bp, Homo sapiens
gaattggcccaatgacttcaagtggttgatgtcataatgagtccttccaagatctctttaaaaaattgatgtgttaagtgatctgtggtgatgagcacagstatacacgccagttgggagtgctgaaagaaatgaatccacagatcttgtgaagtcacaaacgagtcctatggcttgggatacaacattgacagtgagagt

SEQ ID NO: 382151 - DNA, 201 bp, Homo sapiens
tctcaggcctcaccccagacttcccaagtcagaatctgcattttaacaagattcacaggtgattcacatttgcattaatgttggcatatcactgggctagwctgcaagaattctgagtctctatcaaggcaaaaaacaaactagcagcaaaaatcacattgtagcgatagggaaaaataggtcagaaaacttctttacagc

SEQ ID NO: 382152 - DNA, 201 bp, Homo sapiens
tctccccgccaggtccctatcagctccatgcttcattatttagctctctccccatggacgtatctggtaatgaaaatgcattttaaacagttccacaggcmgtatctctgctaaacggtgtgctttggaaacgggttttctttttattattcccgttacaactaacgtgagttatgtcttgtttcttcacagattattgaa

SEQ ID NO: 382153 - DNA, 201 bp, Homo sapiens
agttttgaaggctggtggggagagacggatggtaaacagggaggtgaagacaaagccctctctttacaagcgaagtcagcacaagggacaggaagagcgcrcatgatgggtggtcaggaaaggcctctctgaggagctgatatttaggccgagatccgatgggaagaatcctctaggtggagaaggactatgcatccatcc

SEQ ID NO: 382154 - DNA, 201 bp, Homo sapiens
tgcagccttgaactcctcggatcaagtgatcctcctgctttggcctcccaaagagctgggatcacaggcatgggccactgtgcccggccccctcccacctkctattgaacagaatttggcatgtgaccaagtgcaagggatgctgggaaacatgccctagccgcatgctagaagaacaggacctaagttggggggcatcct

SEQ ID NO: 382155 - DNA, 201 bp, Homo sapiens
cctgattttttccagttcccatgcaggtggtggcttcttcgactctcgcggtcttcttggtggaaacctttgtaggtcttaagtgcgctataattgagcastcttaaatgaccagacacagtggctcacgcctgtaatcccagcactttgggaggccaaggtgggcggatcacttgaggtcaggagttcgagaccagcccg

SEQ ID NO: 382156 - DNA, 201 bp, Homo sapiens
ccactcagaacacaagtccctcttcagctgctgggagtctgagcatgggaaaatccagcctgattttttccagttcccatgcaggtggtggcttcttcgaytctcgcggtcttcttggtggaaacctttgtaggtcttaagtgcgctataattgagcactcttaaatgaccagacacagtggctcacgcctgtaatcccag

SEQ ID NO: 382157 - DNA, 201 bp, Homo sapiens
ggtgaggcccatcccaagggagggagagtggcgagatgaagaaagactaagtcccaatgacattgttggagccccttgatccagctgtgactgtggccctkggttttcagttacatgaggggataacctccttttttttctttttctttttttttttaagacagagtcttgcactgttatccaggctggagtgcagtggtg

SEQ ID NO: 382158 - DNA, 201 bp, Homo sapiens
ctgaagttctcctggccctttcagaggccatgggggctcaaaagccactcagaacacaagtccctcttcagctgctgggagtctgagcatgggaaaatccwgcctgattttttccagttcccatgcaggtggtggcttcttcgactctcgcggtcttcttggtggaaacctttgtaggtcttaagtgcgctataattgagc

SEQ ID NO: 382159 - DNA, 201 bp, Homo sapiens
tggcacagacttgctggaacactggtcacccaggcaaagagcccaggtagagcgacctgcgtggtcaaaagccaggaggctggaaggagtgagggacattyccggagccagaggccacagtggccagaggggagtgaaaggggtgaggttgggctcaggaatgggcacctcatgcaccctgagctgatgagaaccagactt

SEQ ID NO: 382160 - DNA, 201 bp, Homo sapiens
gaagtcacaaggccagccctgacacagggaagggaaatagattctacctgttgatgggaagaagtttgtggctatcgtgaatccaccagagatggagaccmtggtattcaggggcatctctctgagccttgaccttgggtgtgttgagtgatctagaaggcaggtctggtacttggatattagaaggctgccctccataag

SEQ ID NO: 382161 - DNA, 201 bp, Homo sapiens
gaggaaatccacctacagggactcaggcctttctctccaagtggggccataaactgttattcaccaaaacatgggggaggcataggagggaaacacagcckctcctaggggaagccactctgtttctcctctgcagggctggagacacaggtggacacctggctgtgcccccaaccctgccctcaagctctgcaccatttt

SEQ ID NO: 382162 - DNA, 201 bp, Homo sapiens
tgtagaagagcatgtgggatggaggaagaatcaggggatgtgtctttggaaagtgcaattgcccacagctggcatctgaatagattcactctcctcaaagrcacttttgcgacattgatcactggccaagcatgccccgtgcaggtctcaccctccagcccatgcagttgtctttcagccacaggctgaacactggccatc

SEQ ID NO: 382163 - DNA, 201 bp, Homo sapiens
ggtgaaaactgatacatcgtcgtccattagagcttcttcttgtaagggacattaaccagtttttccctcatttagggagcagtggcattttcttttctggraactatttgtgcttcttacctgatgtatctactgcagtaggtatttatagcatagatgtatcagaactaagaggttaaaaatttatattcacatatttgt

SEQ ID NO: 382164 - DNA, 201 bp, Homo sapiens
tgtcacatctgtctatgcctctttccaattattaatgcatgttaattttaatgcatttcaaagtaatggcaaatgcatacatatgttgctattattttttwaaaaagaaactgtcaactgttaaaatggtctgggcatggtggctcacgcctgtaatcccagcactttgggaggtcaaggtaggcggatcacctgaggtca

SEQ ID NO: 382165 - DNA, 201 bp, Homo sapiens
gaggctgcagtgagccacagtagcaccacggccttccagtctggatgacagagacagaccctatctcaaaaacaaaaacaaaacaaaagaaccggtgtgcyctgtctcttgactggaccgactggcacagacttgctggaacactggtcacccaggcaaagagcccaggtagagcgacctgcgtggtcaaaagccaggagg

SEQ ID NO: 382166 - DNA, 201 bp, Homo sapiens
ctactagcgaggctaaggtgggaggttcacacgagcatgggaggttgaggctgcagtgagccacagtagcaccacggccttccagtctggatgacagagasagaccctatctcaaaaacaaaaacaaaacaaaagaaccggtgtgctctgtctcttgactggaccgactggcacagacttgctggaacactggtcacccag

SEQ ID NO: 382167 - DNA, 201 bp, Homo sapiens
aagaaaaagatagctgggcatggtggtgcacacctgtagtcacagctactagcgaggctaaggtgggaggttcacacgagcatgggaggttgaggctgcastgagccacagtagcaccacggccttccagtctggatgacagagacagaccctatctcaaaaacaaaaacaaaacaaaagaaccggtgtgctctgtctctt

SEQ ID NO: 382168 - DNA, 201 bp, Homo sapiens
cacacacacacacacacacacacacacacacacacacacacaaatcatctgggtgtagtggcatgtgcctgtggtcccagttacttgggaagctgaggtgrgaggattgcttgaacctggcaggcagaggttacagtgaggtcacattgcgccactgcactgcagcctgggcaacagagcgagaccctgtctcaaaggaaa

SEQ ID NO: 382169 - DNA, 201 bp, Homo sapiens
gggcaacatagtgagtctctgtctctactaaaaaaagaaaagacagaaaaggagaggaaagaaggaaggaaggaaaggaaaggaagaaaaagatagctggrcatggtggtgcacacctgtagtcacagctactagcgaggctaaggtgggaggttcacacgagcatgggaggttgaggctgcagtgagccacagtagcacc

SEQ ID NO: 382170 - DNA, 201 bp, Homo sapiens
tgctgaagtggggggatcactttagcccaggagtttgagaccagcctgggcaacatagtgagtctctgtctctactaaaaaaagaaaagacagaaaaggaraggaaagaaggaaggaaggaaaggaaaggaagaaaaagatagctgggcatggtggtgcacacctgtagtcacagctactagcgaggctaaggtgggaggt

SEQ ID NO: 382171 - DNA, 201 bp, Homo sapiens
tataatcatttgttaccccacggtgggtgctatgaaggaaagagccaggtgctacgagacgggagtgaacaggggccgggagcctcacttcccatctggcsagacttcctcaggttctgggacccagcttcacagggcccctcgtcctcccagctttgaagttcttatcattggtcccgctcctcttgttcttccagacgt

SEQ ID NO: 382172 - DNA, 201 bp, Homo sapiens
catcaacagtggtttcaggagcgcttagtatgtgctgggaactggggtggacaggagtgaccacaggcatcccactgctttcagggagctggtggggagarctcaagacagatgatagcacatataatcatttgttaccccacggtgggtgctatgaaggaaagagccaggtgctacgagacgggagtgaacaggggccgg

SEQ ID NO: 382173 - DNA, 201 bp, Homo sapiens
tccaggtgcagagttgaggatggtgctgcttcacaggtgatgaccctgcctgtgtatgactctaagagtgactgccatcttccatcctactcctggggccsagcctatctccctggagccccagcccccatgcagggtgaaggagggtttagatgacttggcagagtcttagtccagccaggaaaggaacgtcccatgcac

SEQ ID NO: 382174 - DNA, 201 bp, Homo sapiens
atatggcttattacttgcaggaggaagattttttttccgtcaaaaatttttgccctttggattttccccaatttgtacatatttatgggttacagagtgayattttgatacacatataaaatatgtaatgatcaggccagacgtggtggctcacacctttgatcccagccctttgggaggccaaggcgggcagatcagttg

SEQ ID NO: 382175 - DNA, 201 bp, Homo sapiens
cacctgctgccccgacatccaggcccagcctcacaccgagacactggcccactctcagggaggtgggtcctccaggtctgatgtgattagagctcgcttayaagaggaaacaaacaaacttgtattaaatacctgctgtgtgccaggtattgtgctggggctttgaggttattttagttgtattttacagatgaggaaact

SEQ ID NO: 382176 - DNA, 201 bp, Homo sapiens
cgtgagccaccgcacccggctatcgtccatctttttaaatttagcctttctagcaggtgtgaagtgaaacctcattatggttttaatttacatttcccagraagtatctttacgtgttattatcagtcatttgtatattttctttgaagaaatgtccatttggattctttacccactgttaattgggttgtcttttcatta

SEQ ID NO: 382177 - DNA, 201 bp, Homo sapiens
ctgcttcaccatcctatatggcactcagttcgtcctcagcacgctcagcttggcaggtaggtgcatgtttctgtgcctttctccttccctgtgccttagtstcttcctgaagaagttcgctaatagcagaatgctcacccctgcctgctcactgatgtgtatttggggtcatggttttgaatcccagccctgcccctttct

SEQ ID NO: 382178 - DNA, 201 bp, Homo sapiens
caggctggagtgcagtggcgcaatcttggcccactgcagcttccgcctcccaggttcaagcaatcctcccacctcagcctcctgagtagctgggattacargtgcacaccatcatgcctggctaatttttgtatttttagtagaggcagggtctcatcatggtggctaggctagtctagaactcctgacgtcaaatgatcc

SEQ ID NO: 382179 - DNA, 201 bp, Homo sapiens
ctcatcatggtggctaggctagtctagaactcctgacgtcaaatgatccgcccacctcagcctcctgagtaggtgggattacaggtgcacaccatcatgcstggctaatttttgtgtttttagtagagatgggggcctcatcatgttggctaggctggtctagaactcctgacgtcaaatgatccgcccacctcagcctcc

SEQ ID NO: 382180 - DNA, 201 bp, Homo sapiens
ggtgaaaccccttctctaccaaaacacacacacacacacacacacacacacacacacacacacacacacaaatcatctgggtgtagtggcatgtgcctgtrgtcccagttacttgggaagctgaggtgagaggattgcttgaacctggcaggcagaggttacagtgaggtcacattgcgccactgcactgcagcctgggca

SEQ ID NO: 382181 - DNA, 201 bp, Homo sapiens
cagggctcctgggctccacagttgatgaggtagaggacttggggggcactaataccagtttcactttctagaaatggactcggcactactgcgccattgcygatgccaagctgtccttcagtgatgacattgaacagactatggaggaggaagtgccccaggtagggggacaccctagccacatagggaggaggtccccag

SEQ ID NO: 382182 - DNA, 201 bp, Homo sapiens
tctcctcctctgcagatcagtggacagggtgttgaagggtcggcataggtggtaagcatgattgatggcccccagagatgtccatgtcctgctccccggarcctgtgggtatgtcatgttacttggtaaagaggaccttgcagatgaaattaagtgaagaaggttgagatgggagagtattctgggttacccaggtggatc

SEQ ID NO: 382183 - DNA, 201 bp, Homo sapiens
actttgggaggccaaagcgggcagatcacctgaggtcaggagtttgaaagcagcctggccaacatggcgaaaccccatctctaccaaaaatacaaaaattmgccgggtgtggtgacactacttgggaggctgaggtatgagaatcgcttaaacctgggaggtggaggttgctgtgagctgagattgtgccattgctctcta

SEQ ID NO: 382184 - DNA, 201 bp, Homo sapiens
gacattgaacagactatggaggaggaagtgccccaggtagggggacaccctagccacatagggaggaggtccccaggaaccccgaggaccagccagtcccygggacctccttcccatgtggcttctctggccggctggcaaggggatgctccgctgaagaagctgttgatactctgggtaccatgtcctggctggcttgtc

SEQ ID NO: 382185 - DNA, 201 bp, Homo sapiens
ggttggaatgatgtgcttcaaaggcagaggaagaggccacacggccacgattgcaggcggccactgcaaggtgaaaatggccaggaagcaggttttccctsggagcctccagaaggagccagtgctgccgacaccttggttttagcccagtgagactggttttgacctaggagctgaaagctgataaatgtgtgttgcttt

SEQ ID NO: 382186 - DNA, 201 bp, Homo sapiens
gggagtaaagcttccttttccctggccaggtgcagtggctcacacctgtaatcccagcactttggagtcccaagcaggcagatcgcctgaagtcgggagtktgagaccagcctgggtgaaaccccatctctaataaaagtacaaaaaattagccgggtgtggtggtatgtgcctgcaatcccagctacccaggaggctgag

SEQ ID NO: 382187 - DNA, 201 bp, Homo sapiens
cttgtacacttctgcaccttgacttctttttgttaattaataatgatgttggcggtggtttcttatcagcacacattgatctcattctttcttggacacaygacatgtaatggcgcaggcctcaatgtaacagtttaactccagagaagggcatttcatgctatttccaggcttttgttattattcgaagtgactatcatt

SEQ ID NO: 382188 - DNA, 201 bp, Homo sapiens
cctgggtaacaaagcaagactctgtctccaaaaaaaaaaaaaaaaaaagaaagaaaagaaacaaaaagaaaagaagaaaaccagtgtgtggcaggtacgcwggtagtaaggtttacttttcttctagtgacatttactgtcttccttaggaagctggttcagtggggctgtcgaccacaggtaccaaccctgccctcccct

SEQ ID NO: 382189 - DNA, 201 bp, Homo sapiens
tctttttgttaattaataatgatgttggcggtggtttcttatcagcacacattgatctcattctttcttggacacatgacatgtaatggcgcaggcctcartgtaacagtttaactccagagaagggcatttcatgctatttccaggcttttgttattattcgaagtgactatcattgtactcttttttttttaaaacaaa

SEQ ID NO: 382190 - DNA, 201 bp, Homo sapiens
ctgaggtccagctgctcccccgtactcctccagggaagggctgggaccccttctcctgcggctgcccctaagaggacagattgttgcttctgtgggatgakgagaggcaatgtggcatggtggttaagcgcgtggacttggagccagacggcctggggctgaatcctggctccgcctctcaccaactgtgaccttgggcaa

SEQ ID NO: 382191 - DNA, 201 bp, Homo sapiens
ggatgggtcacctgaggtccagctgctcccccgtactcctccagggaagggctgggaccccttctcctgcggctgcccctaagaggacagattgttgcttytgtgggatgaggagaggcaatgtggcatggtggttaagcgcgtggacttggagccagacggcctggggctgaatcctggctccgcctctcaccaactgtg

SEQ ID NO: 382192 - DNA, 201 bp, Homo sapiens
ggcctagggggccagcgtgctcatgcctgacttacagcaggcgttcactttccttcccagataagtacatgcagatgaatcacgcattgttttctctcaaygggcgcacgggctacgttctgcagcctgagagcatgaggacagagaaatatgacccgatgccacccgagtcccagaggaagatcctgatgacgctgacag

SEQ ID NO: 382193 - DNA, 201 bp, Homo sapiens
agagagcaacagtggcgggtctgcagtcacacagccaacttgcgcttgtggcagtggcaaggttggtgagtatctgagtcttcaggccacggcattttccsctcgagtggagcctggtaagtggcctctatttctggtacattctctgggagcccccagtattttccagacagagggcactgaagacaggctttgtgctga

SEQ ID NO: 382194 - DNA, 201 bp, Homo sapiens
gtgcaagcggaagaaataggcccagagagcaacagtggcgggtctgcagtcacacagccaacttgcgcttgtggcagtggcaaggttggtgagtatctgartcttcaggccacggcattttccgctcgagtggagcctggtaagtggcctctatttctggtacattctctgggagcccccagtattttccagacagagggc

SEQ ID NO: 382195 - DNA, 201 bp, Homo sapiens
ttaaacaatgcggatggctggcgcctgtcctagagcagctgcatcagattctgggctgggggagaggtggggctagccaggaattgagttccttgcagcgygggggagggcaaggtgtgcagaattatttcccagtctctgctgcctcctggtggcacaattgacaacagtctggtagtgacgcctgtcagcatggttcct

SEQ ID NO: 382196 - DNA, 201 bp, Homo sapiens
tcccattctgagatggcttgaggggtgacagctgcaggcctggagagtaattgtcatgctgttttttgttttttttttttgagacagagtctcactctgtygcccaggctactcaacttctttgttaaatggagataattctccctgtcagggtgtggattgacttaggtaatatccctcaagtgcttagcctgtgacggc

SEQ ID NO: 382197 - DNA, 201 bp, Homo sapiens
ctaggtatttcagtctgttcctgcagctatcacaaaataccctaagctgggtgggttataaacaacaggaactgatttctcacggttctggaggctggaarttcaaggtcagggtgctggtatgagagtcctcttccaagttgtaggctgccgacttctagttatgtcctcacatggtggaaagggtgaggcagctctctg

SEQ ID NO: 382198 - DNA, 201 bp, Homo sapiens
cattacacaaaaacggtgaagggactttgctttgtccttgtttatgtggtggacgcttggtctcaggcacatccgagttccagctcagagcacgggaagtscaagggtgtccagggcaaatggtttctggtaagcaagtcagctgtcccgtccttttctctactgttctgtgcatgagagcttagtcacgttacctgcaag

SEQ ID NO: 382199 - DNA, 201 bp, Homo sapiens
tatgaatagatggaaaaaaatacagagaaaaggtgcattctggggtatggggaagctcctgaatcagatcgcagctgttctgagtcccaagacttgtgccytcacacccaggatgaggtcctctccttctgggagggcagatgtgggggttgtgccccccgagcagcgcccggtttctgtcgtcccagggagctgccctgg

SEQ ID NO: 382200 - DNA, 201 bp, Homo sapiens
aaggtttttttcaattcacattcaatacagcacgaaacacttcacctcagagaaaggaaaaatcaaggtgtgttttttttctctttctctttcctcttccstctgtactcaacacttttgacaccagatgtgtatggttttccccccacgcatcaagcaaacaattctccattggacaccagtttggtgtcctctagttca

SEQ ID NO: 382201 - DNA, 201 bp, Homo sapiens
ggagtgcagtagtacaatgtcagctcactgcaagctccgcctcccggattcatgccattctcctgcctcagcctcccgagtagctgggactacaggcgccygccaccacgcccggctaattttttgtatttttagtagagacggggtctcactgtgttaggcaggatgggggtatggcatattttaactttaaagggaagt

SEQ ID NO: 382202 - DNA, 201 bp, Homo sapiens
tggcaggcgtctgtaatcttagctactcgggaggctgaggtgggagatttgcttgagcctgggaggcggaggttgcagtgagccgagattgtgccactgcrctccagcctggccaacaaagcaagagtctatctcaaaaaataaatataaaaaaaatataatatatgtatataatatatataaaagagctaggatttgaac

SEQ ID NO: 382203 - DNA, 201 bp, Homo sapiens
ggggccgagacccaggctgatgctgaggaactgtgggatctaccacagtccaccttcatccactgcagaaggttgctccggcttttccagtgaatctaggmaaattagggctggcattgaactcatccagtgtcactctagaacccagctgcaatccacgctaggctgcctgttcaggaccccaggggggttccaatgctt

SEQ ID NO: 382204 - DNA, 201 bp, Homo sapiens
ttgagagcagggaacccatgtctagggaggctggttgtcttgtttaaacgatccccattcaggcagtgtttgaggatctttctttcttacagtacactccrgggtcgttctgggagaagagggaagagaggggaaacctcctcaaacccacttccccttgtcctctgtgggggtgaggtatgaccctatctttctggggtc

SEQ ID NO: 382205 - DNA, 201 bp, Homo sapiens
tcgcataaatcatggggctttgtgcttttgttgttgttatttaagacctctttcgagggatctattcatcagtagcgtcctttacattctttttatagccrcatcggattccacagaatggaacaatcatttatttaataagtccccgtggaggcacatgtaggtattccccattatttgctgtcatagacagcactgcct

SEQ ID NO: 382206 - DNA, 201 bp, Homo sapiens
tctgttccactggtctgtgtgtctgtttttatgccactgttgtgctatttttattactatagctttgtagtatattttgaagtaagatagtgtgctatctscagctttgttatttttgctcaaaattgctttggctatttggggtagacatttttaaaaagaccctcttggctgtaaacttagggtcaaaaatatttttcc

SEQ ID NO: 382207 - DNA, 201 bp, Homo sapiens
ttgacaccagatgtgtatggttttccccccacgcatcaagcaaacaattctccattggacaccagtttggtgtcctctagttcagttcaattctgatactrtctacttggagctagaatcagattccacaggttgagagctcagtccctcaagactctgtcccatttcaggtgccagtcacaagcccaagttgtggcctat

SEQ ID NO: 382208 - DNA, 201 bp, Homo sapiens
cctgcctggagtcacacagcctcatagtcaactgagtttgaggttcagatgcaggcctgtccgtctccaaagcctaagctcttcactccagagtctctagmcagaggcctgggggccaaatctccagccagaggcctgtgggcgtcttttgtacactgatgtgaaaaactgagaaatttcactgaaaaactcagattgctt

SEQ ID NO: 382209 - DNA, 201 bp, Homo sapiens
gtgccacactggtgagataacggggtgtgggagagactgggcattcagattcagcggttataattaaagggcaacactgaggccaggatggctgggatccwctcgtagctgccatgtgacctctggcctttttgtccttccccatgatgtcacctttcattggatggtgactccctgcacatacccccaaaggtgtccatg

SEQ ID NO: 382210 - DNA, 201 bp, Homo sapiens
gttcagttcaattctgatactatctacttggagctagaatcagattccacaggttgagagctcagtccctcaagactctgtcccatttcaggtgccagtcwcaagcccaagttgtggcctatgcttttgactgactggctataaattggggttccaataacccactccttggatttgattaatttgctagaatggctgaca

SEQ ID NO: 382211 - DNA, 201 bp, Homo sapiens
acagcctctggggttgtgactgctggaaagcacctccagcttttgtggagccaggtgtggctggcacttttcgttgggatcatgtttggatctccctcagrccttctcaccatgttcctcgtgtgccacactggtgagataacggggtgtgggagagactgggcattcagattcagcggttataattaaagggcaacactg

SEQ ID NO: 382212 - DNA, 201 bp, Homo sapiens
ccctcaagactctgtcccatttcaggtgccagtcacaagcccaagttgtggcctatgcttttgactgactggctataaattggggttccaataacccactscttggatttgattaatttgctagaatggctgacacaactaagggaaacatgtataccagtttattaaaatgatattacaaaagataaagatgatcagcct

SEQ ID NO: 382213 - DNA, 201 bp, Homo sapiens
taagtgaagaaggttgagatgggagagtattctgggttacccaggtggatccagtgtgttcacagggtccttttaagaaaaaggcggggctgggggcagtrgctcatgcctgtaatcccagcactttgggaggccgaggcgggtggatcacctgaggtcagcagttcgagaccagcctggccaatatggcgaaaccccgtc

SEQ ID NO: 382214 - DNA, 201 bp, Homo sapiens
agactctgtcccatttcaggtgccagtcacaagcccaagttgtggcctatgcttttgactgactggctataaattggggttccaataacccactccttggrtttgattaatttgctagaatggctgacacaactaagggaaacatgtataccagtttattaaaatgatattacaaaagataaagatgatcagcctgataga

SEQ ID NO: 382215 - DNA, 201 bp, Homo sapiens
ggtgttggattcccaggtgtggagtgacaacactgcctcatatccattttcagagctcatttctgaggcttcatctggtaccaaccctgtgaggcgaggawgctcctgcgaatccccttgtgcagccaggcttggagaagtcaaggatttggcttggggcacccaggaagcctgaggcttagctgggtggacctcctggct

SEQ ID NO: 382216 - DNA, 201 bp, Homo sapiens
tgtggtgttggccatggaaatggatagacgttgacagattccagagcaatttcagaagtagaattgttaaaatctggctattgctggaagacaatgttacmttgtctaaaaaagtttttctttagttatgtataatttttctgtaaggacagatgctcaccataggccagttcaaagatcccctcttggctgggcgtggta

SEQ ID NO: 382217 - DNA, 201 bp, Homo sapiens
ctttcatgtggcctgggctcggtcacttcctctctgtcggctcgtgtcccctgatctgtgaagtgagaattacaacacctactttacagggctctcgtgastattcagccagctagtgtgttaagctcttactcctgttaggattgcttcggccctctgtgcctcagtttcctcactggtgaggtcctttctgcctgatca

SEQ ID NO: 382218 - DNA, 201 bp, Homo sapiens
gtgcagggctgcttgtatcattagaatggctgttagaatttcattctttctttcttaccatgctctgtctctctgcctttgtacatgtgcgtttgcatttmtctccctccttgtctgggtaacctgtgcttttctgtacctggtctctctgtccctctctgtctcccttggtctcccttgtctcctcctctgtccttcttc

SEQ ID NO: 382219 - DNA, 201 bp, Homo sapiens
agtatgatgaataagctaatacttgtcttgggaagaagcaagagaggggtgttcaggatgataaagtcctggttgatgaaggcagatgcctgcagctcttycctggggcagggctggcttccaaagggtgcttgtttgggccctttggaagggggtgtgcggatgtgcagggctgcttgtatcattagaatggctgttaga

SEQ ID NO: 382220 - DNA, 201 bp, Homo sapiens
cactggagattccaagggtgttaggggttgtgtgccagaaaatggggttggagaccaaatatatgcagtcagtcctctgtatttgtggattctgcgtctgyggatttaagctatggtcgattgaaaatatttgagaaaattgcatcttactgaacatggacaaacttttttgttgtcattattccctgagcaatacagtat

SEQ ID NO: 382221 - DNA, 201 bp, Homo sapiens
tcgggcttatggctaatgcttaaaaagatcatgagtagatagtccatgttcatggataggaagactcaatattttcaagataacagttcttcctggcttcrtctatagattcaacacaatcccaaccaaaatctaatagagatacaagaaaaggtttttttcaattcacattcaatacagcacgaaacacttcacctcaga

SEQ ID NO: 382222 - DNA, 201 bp, Homo sapiens
atatttaggccgagatccgatgggaagaatcctctaggtggagaaggactatgcatccatcccccatgtataaaatgggaataatattagtacctgtgccrtgaggcagttgtgaaggtaaaatgaattagtgcgtgtgaagcacctatcttccactaaaaacagaaagctgttttagatgttgatattactattattatt

SEQ ID NO: 382223 - DNA, 201 bp, Homo sapiens
tgggtatgtctaccaccgtacatgcacaggatgtagatgacgtgctgtttttttactcttttcacatggcctttttgttgttgttgttgttgttgttgagrcgaagtctcactctgtcacccaggctggagtgcagtggcgtggtctcggctccctgcaacctccgcctcccgagttcaggcgattcttctgcctcatcct

SEQ ID NO: 382224 - DNA, 201 bp, Homo sapiens
ttccatggtagacaaggtggtccctgccactcccaggctcatgttttaccagcttgggagcagccgtggaggggaggttttaccagtagtcctggccaaayaagtcccaggaggatgctgatggtgcagctgggccatgtgtctgtccccgaaccagtcactgagccagggcacttgggtcattccctggcccctgctgtc

SEQ ID NO: 382225 - DNA, 201 bp, Homo sapiens
cccaatcaccatgtgccagaaaacctttaggttaagaggttaacaagacaagccacagataggggaaaatatttatgaaacaagagctgataaaggacccrtatccaaaataggcaactcttaaaactcaacaataaaaggccaggctcggtagctcatgcctgtaatcccagcactttgggaggccaaggtggatggatc

SEQ ID NO: 382226 - DNA, 201 bp, Homo sapiens
gctctaatttgtgtttttaaattaactagtttttaattgaaatatatattcctgggggttaaggagtcaactcaaatatttctcctccctaaaccatcctrctgaggcaagctcattaccagttacttttatcttccaaaatagtctatgcttgcataatgtgtgggtttaaaaagaaaacaattgggaactcttgtacac

SEQ ID NO: 382227 - DNA, 201 bp, Homo sapiens
caaataagtcccaggaggatgctgatggtgcagctgggccatgtgtctgtccccgaaccagtcactgagccagggcacttgggtcattccctggcccctgytgtcgccttcagcttgtggttgaaggtggtgggggtgaatcagctctatctaaagcacatggaatgggtgcatcccatgaaaagatgattgttgttgtag

SEQ ID NO: 382228 - DNA, 201 bp, Homo sapiens
gaagtatatgtatattaattaagaaaataaatacgattaaaatagaccaaagtgggtgaggcagctgtcaaagttgagcaatatagggacatttacttttsggtcaaataacttattaatttctcattcattcttttactacatgtcttttgagcctatactctgtgttaggttgtgtacatgccagtgagctaggaagat

SEQ ID NO: 382229 - DNA, 201 bp, Homo sapiens
tctgtgttaggttgtgtacatgccagtgagctaggaagatgaatgggacctggtgccgcctttaagaagctctcagtcgacttggggagacagatgtgtgyactgggataagacctagtgcaagcatgatacagtgtgctgtgaatgtttaattccagggaagcttggcagagaaggtgacttttacattgggttttgagg

SEQ ID NO: 382230 - DNA, 201 bp, Homo sapiens
ggacggtgatgactgtgttcagcttccgcaagtccacccccgagcggagaaccgtccaggtgatcatggagacgcggcaggtggcctggagcaagaccgcygacaagatcgagggcttctgtgagtactcgctgggtggggcagtgtggcccatcctctggggccctggcctgagcacctgtccaccttcctgtcttgtca

SEQ ID NO: 382231 - DNA, 201 bp, Homo sapiens
tggcaaccacggatttgctttctgtctgtacaacactgcctcttccagaatgtcatatataaaatcacgctgtttataacctttaatgctggtgtcttttktggggggagtcggtgagggagtgggacgaagttttgctcttgttgcctaggctggagctcaatggcacaatctcagctcactgcaacctctacctccagg

SEQ ID NO: 382232 - DNA, 201 bp, Homo sapiens
tgtgttaggttgtgtacatgccagtgagctaggaagatgaatgggacctggtgccgcctttaagaagctctcagtcgacttggggagacagatgtgtgtastgggataagacctagtgcaagcatgatacagtgtgctgtgaatgtttaattccagggaagcttggcagagaaggtgacttttacattgggttttgaggct

SEQ ID NO: 382233 - DNA, 201 bp, Homo sapiens
gagcgaatgtctgactgatgatatggagggggagttggtagagatggggtaggagggcaaggcccgtggcggtgaagcttcacacctctgtctccttagcmccacctgcaggctgagccctgaccccctgttcttaatttggtaaggagaccagaagaacccgggtcttggaagccaggatgtgaactttgatatatatcc

SEQ ID NO: 382234 - DNA, 201 bp, Homo sapiens
gtagagatggggtaggagggcaaggcccgtggcggtgaagcttcacacctctgtctccttagccccacctgcaggctgagccctgaccccctgttcttaayttggtaaggagaccagaagaacccgggtcttggaagccaggatgtgaactttgatatatatcccactcttggtccctcttccggaaccctaaattcaagg

SEQ ID NO: 382235 - DNA, 201 bp, Homo sapiens
aggcccgtggcggtgaagcttcacacctctgtctccttagccccacctgcaggctgagccctgaccccctgttcttaatttggtaaggagaccagaagaasccgggtcttggaagccaggatgtgaactttgatatatatcccactcttggtccctcttccggaaccctaaattcaaggtcagcacagtgatggtcaagat

SEQ ID NO: 382236 - DNA, 201 bp, Homo sapiens
tgaatgttacacagccctgaagtggtgcagtgggacttgagctatgatcttccttttgccagatgccaagctcttaaccactcctcaatgccgcttattarcaagggtaatagcaaccatgggtattagcaagccatactctcctgggtattagcaagctctacttgctgtccctctgtgccatcttgattagaagcaggg

SEQ ID NO: 382237 - DNA, 201 bp, Homo sapiens
agtacatccagcagaacatcgggcttatggctaatgcttaaaaagatcatgagtagatagtccatgttcatggataggaagactcaatattttcaagatawcagttcttcctggcttcatctatagattcaacacaatcccaaccaaaatctaatagagatacaagaaaaggtttttttcaattcacattcaatacagcac

SEQ ID NO: 382238 - DNA, 201 bp, Homo sapiens
acagaaaagtcaagtgataaaaatggttttagattgtggtagggcagcatttgcctaggcccgctgctctgcaaggctgttgtaaacaaccggaaacattrtaaataatttaagtgattaggtatcaccagcagcagagaaaattagtatatttaaaagaaaattgtgttgatgcagatttgacttccttgatgagggaag

SEQ ID NO: 382239 - DNA, 201 bp, Homo sapiens
tagtagcaattgtgaatgggagttcactcatgatttagctctgtgtttgtctgtcatggtgtagaaatggttgtgatttttgcacattgattttgtatccygagactctgctgaaattgcttatcagctgaaggagatttttctataacagtgtgaaaacacaggagcttaaaacaacaattctgtgggtcaggaatttgg

SEQ ID NO: 382240 - DNA, 201 bp, Homo sapiens
tcatgacttggatagctcctgggaacatgaatttgcagcccctgcactagaatcttgttcccagcctcgggtcagaaaggtggcttgaatgcactgcgttsagcgcagtgggcctgaccgctctctgtgcagctctgcacccctgtgggtagtgggatcatcattcaccaagatgcccctgcctgatgtaagatcaagggg

SEQ ID NO: 382241 - DNA, 201 bp, Homo sapiens
agctgggactccaggttccagagtctgtccacctcatcagtagcgacactgctcctcatgacttggatagctcctgggaacatgaatttgcagcccctgcrctagaatcttgttcccagcctcgggtcagaaaggtggcttgaatgcactgcgttgagcgcagtgggcctgaccgctctctgtgcagctctgcacccctgt

SEQ ID NO: 382242 - DNA, 201 bp, Homo sapiens
gacaccatgttctttctttttttctgagacagggtcttgctctcttgccaggctggtgtgcagagttgtgattacagctcattgcagcctcaaactcctgrgctcaagcaattctcctccctcaacttcttgagtagctgagactaccagtgtgcaccagcacacttggctaactgcgtttattttttgtattttttttta

SEQ ID NO: 382243 - DNA, 201 bp, Homo sapiens
gataaattaagtattttggggtgcaacatcatgaagtctgtaaaagtactcaagcttcccccagataaatgaaacaaacaaacaaaaaagtttcagtgcaygaaaaggatctttctgtttgtttgtttttgaggagtgaagataaagagaagagataaggaagactcagatttctggtttgggtgaagagtggcgacatgt

SEQ ID NO: 382244 - DNA, 201 bp, Homo sapiens
tccccgaagacagtcaggagaggaattttaaaggggctaaagtaggcagggagtgatatttaagcatgtagaagcggggaacttctggcacctgcacagtrtaacagcatagagagcttcttcctgtgttgcatatctcattagcgtgttaaatccccacccctaggcatgatgtttagtattataatgcagccaaggtgg

SEQ ID NO: 382245 - DNA, 201 bp, Homo sapiens
ttcatgtaattaaagcatctttggagttctcttctccaggcctgttgctgtgtgagggctttctgctcagactttcttccagagacatttacatgctggcrtaactaacatacacaaacttctggacacaaagtgatcgcataaatcatggggctttgtgcttttgttgttgttatttaagacctctttcgagggatctat

SEQ ID NO: 382246 - DNA, 201 bp, Homo sapiens
ttgttacctgcattttaccgatgaggaaactgaagccttcagaagtgcagtcacttgtccagggccacatagcaggctgagatttgaaccgccaggccttytgactccagagcttacactcttaactccattcatctgctaagtccttccctgtcctcttgcaagatgccttaatccagggattatcaaactttttcttaa

SEQ ID NO: 382247 - DNA, 201 bp, Homo sapiens
agtattataatgcagccaaggtggaggactggtcattcttcagatctcctgcacatgcgggcaatagggttaactcccttgagtaagatttaagatggggsccgcttatttttgtttcctcgaggtctgcaatcagtgggaatggccctttgaacaagatttatagtgcaaggtctggatggggtccccacttgttatggg

SEQ ID NO: 382248 - DNA, 201 bp, Homo sapiens
cacaaacttctggacacaaagtgatcgcataaatcatggggctttgtgcttttgttgttgttatttaagacctctttcgagggatctattcatcagtagcstcctttacattctttttatagccacatcggattccacagaatggaacaatcatttatttaataagtccccgtggaggcacatgtaggtattccccattat

SEQ ID NO: 382249 - DNA, 201 bp, Homo sapiens
ccctaattccaaagaaggtcatgcccatgggtactgggtattaggacttggacatatattcccggggacaccatcctatacataatactagctataacttyttctatctttagaacgtcttccttgatcacctgtgccccatactgtcaactacagccccatttatctgccccctttaaagtaacctactccaagagctgt

SEQ ID NO: 382250 - DNA, 201 bp, Homo sapiens
tggtaggacccacctgggacagggtgagatctgagcagggtggggaggagaacccactggaccaaggcatggctgccctttacaagggctcccaggacgasgacaatctcctttaacaaaacctcctgccagtccccagagcttcttggccatgagctgaggagtttttatttgttcctttggtcttttatggctaactct

SEQ ID NO: 382251 - DNA, 201 bp, Homo sapiens
ccccaatattccacattaatccaataatagaaaaagagaaaagggtaggtcagaagaggagagagatgggagaagcatttaccattgattgctacacagtygccatttaattctttatcaagtatttactgaaccaggtgttttgcaggtatgttgttcactttcagggaagccctaggagcatagtagtggttctcccat

SEQ ID NO: 382252 - DNA, 201 bp, Homo sapiens
aaatagcatgactttttcctttcaaaagccatgacactgaaacaatgtggtcatagctgtctcttcagcatgccaataaaatagcatgccatttctgaaayaaaaattattctataaatagcatggagccattcttacggtggacatcaaaaatcatgtggtcacttttttcatatttacaggaaataggagcacacaaag

SEQ ID NO: 382253 - DNA, 201 bp, Homo sapiens
tgaagaagttcgctaatagcagaatgctcacccctgcctgctcactgatgtgtatttggggtcatggttttgaatcccagccctgcccctttctagctgtrtgtctttaggtgagtgacttaacctctctgagctgcagtttgctcagctgtgaaatggggagaataataatgcctatttcatgggggtattgtgaggagt

SEQ ID NO: 382254 - DNA, 201 bp, Homo sapiens
tcatggaacgattgcagtctgccagatgccagagacttcagattgctgtctgatgccactgaaactctggatgagaagagcctcatgtcgggcctcttttsaaggcacacattgaggatgagaagactgagaagatggcagggcaggaggggtgagggcctgaggatggggctgccctcacctggctgggtgcaccttttc

SEQ ID NO: 382255 - DNA, 201 bp, Homo sapiens
tgaataagtgatgattagatagttttaacactgaaggccaggctctgttggatgaaaaatgtacgctgggctcatccctgtaatcccagcactttgggagsctgaggcgggcagatcacttgaggtcaggagtttgagaccagcatggccaacatggtgaaaccctgtctctactaaaaatacaaaaactagctgggtgtg

SEQ ID NO: 382256 - DNA, 201 bp, Homo sapiens
ccaaaccattcacttactgagtcctgcctgagtgccagacactgtgccgacagcttaccctgaataagctaatagacgatgatcctaatgctccccatgcracgggttgtggatccccgatgctgtggatcgggaagctgaggcttaggggtcccctgtggaaggagccggaacctgaccttggctctgtacctcggcacc

SEQ ID NO: 382257 - DNA, 201 bp, Homo sapiens
ccccatgttgctcaggctgatctccaactcctgggctcaagtgactcacctgtctcagctccccaaattgctgggattacagatgtgaggcactgtgcccsgcccactttgccagttttatttcatccacttctaactttacactcctgtatctccctacccttcccctttcttcatttctttgctgaagaattctaaagc

SEQ ID NO: 382258 - DNA, 201 bp, Homo sapiens
tagttgtgggttgatttcatttatgttttccaaaccattcacttactgagtcctgcctgagtgccagacactgtgccgacagcttaccctgaataagctartagacgatgatcctaatgctccccatgcgacgggttgtggatccccgatgctgtggatcgggaagctgaggcttaggggtcccctgtggaaggagccgga

SEQ ID NO: 382259 - DNA, 201 bp, Homo sapiens
ctgggctcatccctgtaatcccagcactttgggagcctgaggcgggcagatcacttgaggtcaggagtttgagaccagcatggccaacatggtgaaacccygtctctactaaaaatacaaaaactagctgggtgtggtggtgcgcacctgtagtcacagctatttgaaaggctgaggcacaagaattgcttgaaccagtga

SEQ ID NO: 382260 - DNA, 201 bp, Homo sapiens
ccaagattgcatcactcccctacagtctgggtgacagagcaagactctgtctcaaaaaaaaaaaaaaaagagaagaaaaagaaaaatgtaacctgttttcytccagcagatgtggctcagcaaatctgattgatctgaaggaactgtcctgagatcttctgttgcacacacacatgcactttcctcactttactcaggggc

SEQ ID NO: 382261 - DNA, 201 bp, Homo sapiens
atgcagccactaagtggtggggctgggattcgagcccagacagcccaggcagcccaggcctgtgatgatatagatctggtttcctcccaactgcagctgcwgcccaaccacctctaggcctgtggttctctaatgttaccccaaaacgccagattctcccacttccactaatgacaaggagccgaggagtgactcagactc

SEQ ID NO: 382262 - DNA, 201 bp, Homo sapiens
tttttttttgagacagaatcttgctctgtcacccaggctggaatgcagtggtgtgatctcggctcactgcaagctccgcctcccaagtacacgccattctyctgcctcagcctcctgggactacaggtgcctgccaccacgcccggctaatttttttgtatttttagtagagactgggtttcaccatgttagccaggatgg

SEQ ID NO: 382263 - DNA, 201 bp, Homo sapiens
ggtgacagagcaagactctgtctcaaaaaaaaaaaaaaaagagaagaaaaagaaaaatgtaacctgttttcttccagcagatgtggctcagcaaatctgaytgatctgaaggaactgtcctgagatcttctgttgcacacacacatgcactttcctcactttactcaggggcagaagcttgtatctactttcaagttcagt

SEQ ID NO: 382264 - DNA, 201 bp, Homo sapiens
aaaaaaaaagagaagaaaaagaaaaatgtaacctgttttcttccagcagatgtggctcagcaaatctgattgatctgaaggaactgtcctgagatcttctrttgcacacacacatgcactttcctcactttactcaggggcagaagcttgtatctactttcaagttcagtcctagaatttattgacttagaagtatatgta

SEQ ID NO: 382265 - DNA, 201 bp, Homo sapiens
cctcaggggttagagattcaacatatgaattcggaaggaatgcaaatattcagtctgtaatggctgctatgagctgtgtggccttggacacatgactgaasctgtcttaggttcagtggtttctccatgtgttaaatgggaatataatagtacttcccttgtgggatcaatataggaaaaacacttagaacaatgtctagt

SEQ ID NO: 382266 - DNA, 201 bp, Homo sapiens
aaatattcagtctgtaatggctgctatgagctgtgtggccttggacacatgactgaacctgtcttaggttcagtggtttctccatgtgttaaatgggaatrtaatagtacttcccttgtgggatcaatataggaaaaacacttagaacaatgtctagtatatatatgtagttagtgctcaaatgatgttaacaatgtcata

SEQ ID NO: 382267 - DNA, 201 bp, Homo sapiens
ataggaaaaacacttagaacaatgtctagtatatatatgtagttagtgctcaaatgatgttaacaatgtcatagtgatagttcccaccactccctccattyttagctgattccatttggcacaggaaataacccacttgtcatccctgtggtacaaagctcatcatgaatgtgtggccccatctcagacaaaaagcaggtc

SEQ ID NO: 382268 - DNA, 201 bp, Homo sapiens
acaaaaagcaggtcctagggccatgacggtgtgaaaggggatgctttctttgccttctgcaaaactagaaaccagcataggcttctcccatcttcgtgatstgtatggggcagggctttgtaagcagacgtcttcccaggaattaacacagcatttctgttccctttctccactccagctgactctaaagaggatgcagtt

SEQ ID NO: 382269 - DNA, 201 bp, Homo sapiens
ggcctagctggatttctcaggctcctgcaggagacagagctatttatggtgacttataatccccagaactaaatccagggagtgggttcatgcttatcagyagccaaatggtttccatcgtgagcttgctagttcctctttgtgtctaaccacctgcctacgttccacctctcgagcttcagagtttccaaaagtttggca

SEQ ID NO: 382270 - DNA, 201 bp, Homo sapiens
tctctggcttgaaaatcttacaccaggaagcgatgaatgcgtccacgcccaccattatcgagaggtagttggcttttgcctgttgatttgcgtagttgctsattcctttattctgctgcctttagccaacatgggctacaggggggaaaaaaaaaaagggacattggttttttgaggctcgttgagtgtcttgtatgcaat

SEQ ID NO: 382271 - DNA, 201 bp, Homo sapiens
ggtttccagagcctcaccaactgtattgtgacttcccattctgagatggcttgaggggtgacagctgcaggcctggagagtaattgtcatgctgttttttkttttttttttttgagacagagtctcactctgttgcccaggctactcaacttctttgttaaatggagataattctccctgtcagggtgtggattgacttag

SEQ ID NO: 382272 - DNA, 201 bp, Homo sapiens
tttccctatgtggtggctagggttgtctggaactcctgacctcaggtgacctgtgtacctcgtcctcccaaagtgctcagattacaggcatgagccaccaygcatggcccctgaacatttactctgtttgctttgtcacatctgtctatgcctctttccaattattaatgcatgttaattttaatgcatttcaaagtaatg

SEQ ID NO: 382273 - DNA, 201 bp, Homo sapiens
gcacagcaagattaagtaacttgctgaagcatgcagccactaagtggtggggctgggattcgagcccagacagcccaggcagcccaggcctgtgatgatayagatctggtttcctcccaactgcagctgctgcccaaccacctctaggcctgtggttctctaatgttaccccaaaacgccagattctcccacttccactaa

SEQ ID NO: 382274 - DNA, 201 bp, Homo sapiens
ataccaaaggttgacccctggtggccagaatgccacattgagcctgcccctggttgtacttgatctaatggtttaaatatgttaaaaattaattgcctacrtttaaaacttgagagattatattatatattaaaatctagatatttggcttcccttaggaaaaaaatcgagatctggctataaatagggtcacatctcgcc

SEQ ID NO: 382275 - DNA, 201 bp, Homo sapiens
tgtatggcaaagattctgccgataccaaaggttgacccctggtggccagaatgccacattgagcctgcccctggttgtacttgatctaatggtttaaataygttaaaaattaattgcctacgtttaaaacttgagagattatattatatattaaaatctagatatttggcttcccttaggaaaaaaatcgagatctggcta

SEQ ID NO: 382276 - DNA, 201 bp, Homo sapiens
tcattgtgttggccaggctggtctcaaactcctgaccccaagtgatcctcctgcctcagcctcccaaagtgctgggatttcaggtgtgaaccactgtgctyggcccaatgtattattttgggcttgaaacagacccctggggtcttccactattcttttcacaaattctctttgctgaggtgcctttgtctggggaagccc

SEQ ID NO: 382277 - DNA, 201 bp, Homo sapiens
atattaaaaattaaaaaaagaagatttgcacaaaagctgtttcacctgctaccagattaacccattcattgatggtttccactgtggtaacattccacatragaggtatttcaacctgtactttaattatggctcttattaaggctagtctgtgtgtttgtgtctatgagggagaaacataaattggaatcagagttttac

SEQ ID NO: 382278 - DNA, 201 bp, Homo sapiens
cagtagctcacgcctgtaatcccaccactttgggaggccaaggcaggaggatcctttgagctcaggagtttgagactagcctgggcaacatagtgagaccyagtctgtattattaaataatattaaaaattaaaaaaagaagatttgcacaaaagctgtttcacctgctaccagattaacccattcattgatggtttccac

SEQ ID NO: 382279 - DNA, 201 bp, Homo sapiens
aaagcttatcagaatactttttaaggttaaaacctgtaactttaaaaatagtccttgagaacaatgacgtgtgtcattgaacatagaacatgtcatagaayaatgatgacagtgtgcgtatgaaatttggaatggtgacgattgtcatcttatgcaattgaccaggattgagaaaagctcgatttactcaagataagtagt

SEQ ID NO: 382280 - DNA, 201 bp, Homo sapiens
gggctcaagtgactcacctgtctcagctccccaaattgctgggattacagatgtgaggcactgtgcccggcccactttgccagttttatttcatccacttmtaactttacactcctgtatctccctacccttcccctttcttcatttctttgctgaagaattctaaagcaaaccccagactttgcgtcattttgtttgtaa

SEQ ID NO: 382281 - DNA, 201 bp, Homo sapiens
tgggggaagccatctctgtcctctcacttagccttttctataaaatgaaggtattaaatgagatcaatggttataaaacttttaatactctttaatcccckctcctttagacaggaaactgtaacaaccacaacaaaaaccatgattcataaaagcttatcagaatactttttaaggttaaaacctgtaactttaaaaata

SEQ ID NO: 382282 - DNA, 201 bp, Homo sapiens
cacaaggccatccacactgagggctcaggaaagggtcgtagctaccctagtaggctgataaatggtgaatgaggatgttgatgcgtgttgtaatcatcatrccttcctagtgccggggttgaatgatgatgatcaaaagaaggcttatttgcccaacctgagactaagtttgagggaggaagtaaaatgaaggtaataagt

SEQ ID NO: 382283 - DNA, 201 bp, Homo sapiens
atgtgttcattttttctcatatataataattagttatttgtttgccaaatgaaatagaaagattgcaggcttgggagttgggagaactggattctagaccmacttgacctctaactgaccaagtaatgttgggggaagccatctctgtcctctcacttagccttttctataaaatgaaggtattaaatgagatcaatggtt

SEQ ID NO: 382284 - DNA, 201 bp, Homo sapiens
taaatggtgaatgaggatgttgatgcgtgttgtaatcatcatgccttcctagtgccggggttgaatgatgatgatcaaaagaaggcttatttgcccaacckgagactaagtttgagggaggaagtaaaatgaaggtaataagttaattttattgggcacagtcacgttaggtctgagctggtgctagagtgaggtagagag

SEQ ID NO: 382285 - DNA, 201 bp, Homo sapiens
ttctgtaaaatgacaatggcaataaatgacttgcggagttgtgtggactaagtgagatgaccataggaggaagaaagatgcttgtttgcacaagctgccayggtcagagtactttctttttttttgagacagagtttcactctgttgtccaggctggagtgcaatggtacaacctcggttcattgcaacctccgcctcttg

SEQ ID NO: 382286 - DNA, 201 bp, Homo sapiens
tgccttttctagaaaacactttggctgtatgcaatgaaaagaaagctttacaactcgattctatatctggagtaaatagttgccctcccagacacttatcytaaggaaataatggcagcatttttaataggaatgaaaacttggaagtaatctaaatttctttagaggattggttaagtacgccatagtacagctctggga

SEQ ID NO: 382287 - DNA, 201 bp, Homo sapiens
cattccttctgtttccattaggatggcttgctgcctgttcccagggagttttcagctcttgttctaagatgcaaagtactgaaggccccttttagagcacmctctgccccacacctgatacgctgtggcccacttctttctatttcaagaaatgaggtggaaatagcgttggccacacggtcactttgtaccatgcactgg

SEQ ID NO: 382288 - DNA, 201 bp, Homo sapiens
aacactttggctgtatgcaatgaaaagaaagctttacaactcgattctatatctggagtaaatagttgccctcccagacacttatcctaaggaaataatgrcagcatttttaataggaatgaaaacttggaagtaatctaaatttctttagaggattggttaagtacgccatagtacagctctgggatggatgggtgatgg

SEQ ID NO: 382289 - DNA, 201 bp, Homo sapiens
gttaaaggcaagatagaggttggttagatcagatctgtttcactgtcataattttcttgttgttctgattttggaaaggcagtttcatagccctttcttaytcttctctactgactgtgttgcctgggtgggattattgattttgccactagagggcatctgccaccagggagagttgaaccattgcaagcacagaaacag

SEQ ID NO: 382290 - DNA, 201 bp, Homo sapiens
tgctcagtgttgatggccatcgccatttatttttattttcatccttattctttgccattttcactattacaggtatctagtgcaataccctacaccaagtkgatgcattttataacccctagaatattgacatttcagtcttctttaggtagaagatttctttctttgcagccagtccagggccaggttatattagctaag

SEQ ID NO: 382291 - DNA, 201 bp, Homo sapiens
tagtgaaatgaatgcatgtatgtcttttggaaaatattatgaaagattccttgtgtagggtaccaggaccgtggcattttgtatgcaagtcctggtagtgwagctgtcagagttggctcttttttcttctgtttctccaaccatccatccttccatacatcattaaatttattttgttgtgtaatcaagttattggtgggt

SEQ ID NO: 382292 - DNA, 201 bp, Homo sapiens
cccctggggcaacttccctagcctgctggccgctgtgcccagccagccccagctggcccaacagggactttttctgccctcaaggtctgtctgtgaaagcygtgggtgctgtccctgtggtaccagtaagtgggtggggagcatcttgtcatttgaagtctgtgctgttacagaggcccttagaaccagaggaaaggctgg

SEQ ID NO: 382293 - DNA, 201 bp, Homo sapiens
tggtaaagtgacagggaaagccaattatgtgtgaagagcttagaaatggtgcttctccctcacaccttgagagagcaggccttcaggccctgggtggggaytgtcagtgtcaccgctcagtctcctgctgagaagggtgacgttttatctcaagaagaactcccagctctggcaatttcctcacggggttctggttagcag

SEQ ID NO: 382294 - DNA, 201 bp, Homo sapiens
tttttttttttatttgagacagagtctttctctgttgcccaggctggagtgcaatggcacgatcttgattcactgcaacctcttccttccgggttcaagcrattctcctgcctcagccttctgagtagctgggattacaggcatgcaccatcacgcctggctaatttttgtatttttaattgaaacggggtttcaccgtgt

SEQ ID NO: 382295 - DNA, 201 bp, Homo sapiens
tttcccaccttcctagctgttttgggcccctgatccaggcatatttgcaagagtcaacagcagttcatttttgtcttgcacccatgcatgtcaccagcctsctggtcaccacctgatttgtgtctgttcttctatttttcattgtttcggacattgcatccagcccttcccatctaagcacacacacatctggtcgcatat

SEQ ID NO: 382296 - DNA, 201 bp, Homo sapiens
caggtgcttggatgctcaagcccctggttcctgggttttctccacttgttcttgagcagctgctctggcaccccaggcccctcagtctctctgttcctggrcatgggatggttcctttgccctgctgctgtctgggctcctggggggccctggcctcttccttgctcccaggatgggctccactggggcaccagcatgaga

SEQ ID NO: 382297 - DNA, 201 bp, Homo sapiens
gtcaccgctcagtctcctgctgagaagggtgacgttttatctcaagaagaactcccagctctggcaatttcctcacggggttctggttagcaggaacttgstggttactgtggggtctgcaggggcaggtgcacatgagaggagcaccggcacctggttttggaatagttggcaaatggtgtgtgacttttggacaggtgt

SEQ ID NO: 382298 - DNA, 201 bp, Homo sapiens
ggtgtgagttattttccttccactaaatcaaagtcctctactttttactatttttctttctagctttttggggattaatgactatcatcagaaggaattgwcaatgtaaagaaacctggcctttttgagttgaaatcttggcttagataggccttttccacactaggaggaaactgcttcccaagctgcccttgttagaaa

SEQ ID NO: 382299 - DNA, 201 bp, Homo sapiens
cgggttcaagcgattctcctgcctcagccttctgagtagctgggattacaggcatgcaccatcacgcctggctaatttttgtatttttaattgaaacgggktttcaccgtgttggccaggctagtctcgaactcctgacctcaggtgatcctcccgccttggcctcccaaggtgctgggattacaggtgtgagccatcatg

SEQ ID NO: 382300 - DNA, 201 bp, Homo sapiens
cagcctgctggtcaccacctgatttgtgtctgttcttctatttttcattgtttcggacattgcatccagcccttcccatctaagcacacacacatctggtmgcatatttgcttctattagtcataaagataaagttgttagaatatttgaagtgaagaaagcattgatcaaagttgaatttacatgtcatatttcatcccc

SEQ ID NO: 382301 - DNA, 201 bp, Homo sapiens
acagaggcagaggaaagactgaaggcgagagggggcaggctcagggctggcccagcccgggcaatggacaagtcttaggtgttttgcttggcccaagcacsctgtttcattttttgacttttctagaggcaaatggtagcagcgggcatttgtttacagccttctttgcagccgtggctgtaataagcactttacatcctt

SEQ ID NO: 382302 - DNA, 201 bp, Homo sapiens
ctgccctgatcctgtgggattaatgggtgtcatgtaatataaacaagcagatttgtgggtcatagatctgggcagagctcagctgggcaattcttctactytttgtagcctggactgaggtcatttggtgtcacctcgcctggaaggttccagaatcttcactcacacatctgataccttagtggtgatggctggaagact

SEQ ID NO: 382303 - DNA, 201 bp, Homo sapiens
tttgtggggtggcagcaaatgcccgggtagggtcttagccctttgtccatttccagaaggaggggacactgagtccagacgcagagatagctttgcgggaycctgttggggaaggaaggagccaggctgtgcctgggctgcagttgtgtggctgcatcctcaggtggagggaactccagcttctaattggctcatgttaat

SEQ ID NO: 382304 - DNA, 201 bp, Homo sapiens
agcgattctcctgcctcagccttctgagtagctgggattacaggcatgcaccatcacgcctggctaatttttgtatttttaattgaaacggggtttcaccrtgttggccaggctagtctcgaactcctgacctcaggtgatcctcccgccttggcctcccaaggtgctgggattacaggtgtgagccatcatgcccaacct

SEQ ID NO: 382305 - DNA, 201 bp, Homo sapiens
tgagcggaaaccccaaactcttcagactccaggggtttgtggggtggcagcaaatgcccgggtagggtcttagccctttgtccatttccagaaggaggggrcactgagtccagacgcagagatagctttgcgggatcctgttggggaaggaaggagccaggctgtgcctgggctgcagttgtgtggctgcatcctcaggtg

SEQ ID NO: 382306 - DNA, 201 bp, Homo sapiens
gcaccatcacgcctggctaatttttgtatttttaattgaaacggggtttcaccgtgttggccaggctagtctcgaactcctgacctcaggtgatcctcccrccttggcctcccaaggtgctgggattacaggtgtgagccatcatgcccaacctgctctatgtgttttgtatacatttaattcccccctagaggcctgtgc

SEQ ID NO: 382307 - DNA, 201 bp, Homo sapiens
ctgctacctcctgatcaaacctgtgaagtcccctgtggttacagcattcttacataaaaatagaaagcacttgcaaaaaatcaaaaagaaaattgagaagsctgctaacgtatctctggttgttcctatgatccagtaaggcattgaaggattattctgccggattttacatgggtgtgagcatgggggaagtgagtgatg

SEQ ID NO: 382308 - DNA, 201 bp, Homo sapiens
tctcccacctcagcctccggagtacctgggaccacaggcgtgtgccaccatgcaggctaatttttgtattttttgtagagacagtttcaccatgttacccrggctaggcttgaactcctgggctcaagtgatccacccgccttggcctcccatagtgctgggattatagacatgagccactgtgcctggcctagcttttct

SEQ ID NO: 382309 - DNA, 201 bp, Homo sapiens
cagaagaaattagtttatctattattttagtcactcatccagtaaatgtgtgcgtgacccaagaggcacagtggttaacaatacagctgtttctcctgacytcactggccctttgctggggtgggaaggtcctgggatgttgcccagagtgacataaggcccagtgccacccctgtcccttggttaggtagaatctgacca

SEQ ID NO: 382310 - DNA, 201 bp, Homo sapiens
aagtgtcgggcacggtggctcacgcctgtaatcccagcactttgggaggccaaggcgggcggatcgcgaggtcaggagatcgagaccatcctggctgacayggtgaaaccctgtctctactaaaaatacaaaaaaaattagctgggcatagtggcgggtgcctgtagtcccagctacttgggaggctgaggcaggagaatg

SEQ ID NO: 382311 - DNA, 201 bp, Homo sapiens
cactctgccccacacctgatacgctgtggcccacttctttctatttcaagaaatgaggtggaaatagcgttggccacacggtcactttgtaccatgcactkggctaggcatggtcatacgtatcttcttattcagtcttgtcaagacactgcaggacgaataacctcagcccttgcccactttacagatgtggacattgag

SEQ ID NO: 382312 - DNA, 201 bp, Homo sapiens
agactccgtctcaaacaaacaaaacaacaaaacacagaagtttattccctcactgtactggaggttaaaagtccaaaatccaggtgttggcagggccacasccctcggaaggctccagggaaggatgtgttccagacatctttcatggcttctagtggctgccagcaatgcttcaagcattcctcggagtgtggacaccgc

SEQ ID NO: 382313 - DNA, 201 bp, Homo sapiens
catccccatttaacagatgagtaaattgagacaaggaggggttaaatgggtgagaacatttaggttcatttcaagggtttctgacctcaggtgtaatcctyttctgtcccaccagaagatcttggtctgggctggaggtcaacgaaattgttctataaagagccagatacaaatgtttcaggctttatgggccctgtggtc

SEQ ID NO: 382314 - DNA, 201 bp, Homo sapiens
atcttggtctgggctggaggtcaacgaaattgttctataaagagccagatacaaatgtttcaggctttatgggccctgtggtctctgttgcaactattcakccctgttgctgaagtgcaaagcagccatgggcaagaggtaaacacatgagtctggctgtgttccagttaaaacttgaattacacattacaaaaatagatg

SEQ ID NO: 382315 - DNA, 201 bp, Homo sapiens
tgtctcagcctcccgagtagctgggattataggcatccaccatcatgcccggctaatttgtgtattttggtagagatagggtttcactatgttggccaggytggtcttgaactcatgacctcaggtgatcctcccgcctcaacctcccaaagtgtggggattatgggcatgagccaccgtgcccaacccgattggttattt

SEQ ID NO: 382316 - DNA, 201 bp, Homo sapiens
aatgagactcatgcgatgcacacgtgttcagctgagggtgagcaaagcagcgctccccttcctggtctacagcgtgaaagcttcaacaagtgtcctcaccrtctgttgactgccatgtttttcctgtttttgagctttttcttggtgatcttgctgttcaaatggcccgaagcacagtggtgagggctgcctggtgttcct

SEQ ID NO: 382317 - DNA, 201 bp, Homo sapiens
atgcacacgtgttcagctgagggtgagcaaagcagcgctccccttcctggtctacagcgtgaaagcttcaacaagtgtcctcaccatctgttgactgccaygtttttcctgtttttgagctttttcttggtgatcttgctgttcaaatggcccgaagcacagtggtgagggctgcctggtgttcctgagcaggagaaggct

SEQ ID NO: 382318 - DNA, 201 bp, Homo sapiens
cagtgatgctggctgtgagcccagtgtcagtcaataatatataccaaatcaggtgtctttaaacagaaacacacataaaacaacgtcagatattgattcaytgaggaaaatgttgtgaccacacgctcaaaaggccctgatcctgtatttccccttaggagcaatggctcaggtatttgccaatcagtgttggtggtgact

SEQ ID NO: 382319 - DNA, 201 bp, Homo sapiens
catatgaggtcgttctcacgcagcagaaattaggcccagatcgctaaagcatttttttttaaggggccaggaattgtaacttgaaatttcctgccctttcracattctgatatggataacactctgtttcttaagttgggtcgtgggttcacaaatattcatgctactattatgctttaaattgtatatatgaggccgggt

SEQ ID NO: 382320 - DNA, 201 bp, Homo sapiens
ttagtaacagtccattactctggactgttaccagagtcatagtttaccactctcttctcacaggccctgtgatatccagaacccctgttaccatccccaaygctggggttggcctcttattattatttttaatttgaatcagttagtgccttcatttcctcttccccctttaattgagccacagagcatttgtagcttttg

SEQ ID NO: 382321 - DNA, 201 bp, Homo sapiens
cggggagaccctgacgacttttaaccagaagatgagatgctcacagggggctcttgggatggttactctgattgcaacagaaggaggatacaggatgttgygctgatgttccagtatttagtctgtcttattgggtgaggggtgaagtccttgggtgatggcccccacagctgtgggtggggactttcctaagtgacattc

SEQ ID NO: 382322 - DNA, 201 bp, Homo sapiens
gctaacttgggcttcttacagcatggtggtctccaggtagtctgacttcttacacagaggctggcttcccccagagcacaaaatggaaggtaccaggcctycttaagtattaggccccaggctgggcccgctggctcacgcctgtaatcctagcactttgggaggctgaggtgggcagatcacttgaggtcaggaattcaa

SEQ ID NO: 382323 - DNA, 201 bp, Homo sapiens
gtgggtggggactttcctaagtgacattccagggggtcatctgggaaaaggctttttatggtgttatgctccaggcatttgggaaggtaaaatgtctttcagggggaaattgatttcacagttctctcttccccaccatgcccatcattttaagagtttgtgtttcagcatggtgaattctagaaaacctagaagacagtt

SEQ ID NO: 382324 - DNA, 201 bp, Homo sapiens
gaaaaatcaactacagatacacacaaatgatctataaatacacagacaccttatagaaatatacatatatacacatacaaataataaatgtatgcatgcayacatatgcaaattacatatgtgtgcatatgaatgagaatatataaaaccaatatactttataaatagaggaagtaataaacatactaaagtaggtggatg

SEQ ID NO: 382325 - DNA, 201 bp, Homo sapiens
agtcggggtttcacaatgttggtcagcctggtcttgaactcctggcctcaggtgatccacccgccttggcctcccaaagtgctgggattacaggtgtgagmcaccacgcccagccccgactaatttttgtatctttagtagaaacaggatttccccatgttgctcaggctgatctccaactcctgggctcaagtgactcac

SEQ ID NO: 382326 - DNA, 201 bp, Homo sapiens
gtctgccacaacacctgtatttttgtatttttaatagagtcggggtttcacaatgttggtcagcctggtcttgaactcctggcctcaggtgatccacccgycttggcctcccaaagtgctgggattacaggtgtgagccaccacgcccagccccgactaatttttgtatctttagtagaaacaggatttccccatgttgct

SEQ ID NO: 382327 - DNA, 201 bp, Homo sapiens
gatagagtcttgctctgtcaccaggctggagtacaatggctctgtcccatgttcaagtgattctcctgcctcagcctcccaagtagctgggattgcaggcrtctgccacaacacctgtatttttgtatttttaatagagtcggggtttcacaatgttggtcagcctggtcttgaactcctggcctcaggtgatccacccgc

SEQ ID NO: 382328 - DNA, 201 bp, Homo sapiens
tatttcaaaataatgttgtgctcgtcatcactttggaattatggaggttattaggtctgcctctagatcttatttaagatgttaatgaagaaacccatctwttagtgtattgcaaatatttatttaatatcttaatcatgtttcaatataattgagtttcctttgtaattttatgcattattattctgagaaaagggtctg

SEQ ID NO: 382329 - DNA, 201 bp, Homo sapiens
gctgcagcccattgcagcctgagccttcggtattgaaaacgtgggtaactgaggtctggagaccgcctgttgatttcccgcatcagagctgttcttccccyctggtgggcgcagaccagaaacaagcagacaccatcctgcccgtcaacgtgatgattcggtcttcgtgtttgactcttttagttcctcacgtacctgttt

SEQ ID NO: 382330 - DNA, 201 bp, Homo sapiens
ttctacttcacagacgactttaaatgattttcaaagccattgatgcctgtttcatcaggtatgggtccctaattcacttatgctcctactaacggagagtyaagtcgttggcagttctttactttataaataatataggtcttcatgtaatattttctgattaaaaattatttcccaaggctagatatttagcaatggaat

SEQ ID NO: 382331 - DNA, 201 bp, Homo sapiens
tcggtagacctgggctttctccttaatgcccacggtcataccttttatttatcaccatatcctctggaagccagggagaaactctggtaaacagcctcaakgcagacttttctgagcaaatgattgatccagtaagggctaagatggagtttactcataaaacctttgctgagatagagtttacagccccagaaaactgtc

SEQ ID NO: 382332 - DNA, 201 bp, Homo sapiens
gctcaggctggagtacactggtgttgtcacagctcactgcagccttaaacgcctgtgctcaagggatcctcccatctcagcctcccaagtagccaggactmttctgacttctaaaagcactgatgagttttgtgaaacacagccttgttttagacaaagcttccctctctctggtgctgttggagaactcttgctcatccc

SEQ ID NO: 382333 - DNA, 201 bp, Homo sapiens
tggttgcttggatcagaggtgtagcagtggaatggtgagaaacagtccaatcatgagtagaatttgaagtataaaaaaaaccaatttgccaatcaggctaratgtgtgtggcatatgaaggaaaaggtggatcatttggaaagatgggtttgccagtaactgatgtggggaagactttatgggaggagcaaaggttgggga

SEQ ID NO: 382334 - DNA, 201 bp, Homo sapiens
tctggtcacatgttaaaggacttcccaaggtcagaggcttcattattgcctcttgagctttttaatactctaaaaatgttttagtttgaacctaaagaacwtgtcagtttctcacttgctcttacatcgccatgatcaaaacaaaaaactagtcttaaaataccagagacattacctaaaatggccatgggtttaattaac

SEQ ID NO: 382335 - DNA, 201 bp, Homo sapiens
taagtgctcccaatccagatgatccattagcaaatgatgtagcggagcagtggaagaccaacgaagcccaagccatagaaacaggtatctaatattcattytccttcacaccacttccacttttacaaatttgtattaccacttaaacttttctaaagctcttggcaaggaaaagaaatagaaaaaagtataataagtgag

SEQ ID NO: 382336 - DNA, 201 bp, Homo sapiens
gttctggtcacatgttaaaggacttcccaaggtcagaggcttcattattgcctcttgagctttttaatactctaaaaatgttttagtttgaacctaaagawcatgtcagtttctcacttgctcttacatcgccatgatcaaaacaaaaaactagtcttaaaataccagagacattacctaaaatggccatgggtttaatta

SEQ ID NO: 382337 - DNA, 201 bp, Homo sapiens
ttcttaattttattgtagtgttttggtaattggacatttacaaaatctttcagccctgatccaatttatagaaaaaggcgtgaatttaacagattacagcrtgacatttccataattaatagtggttgtttgccatttatagtttggaaagtaacatattgaactaagtaaaataataatcgtatgtttgtttctgtctac

SEQ ID NO: 382338 - DNA, 201 bp, Homo sapiens
aggggcaaaagaagtgataaggctggtatctctggtgcttcgtaattggtccatttaagtgtatgacctgtaggaatagtgtcaaagctaaggcttttggwcagacgtgtgaaatagtttgtaaagattcggtttggagtcttgcaagtctttttttctgcatactcctgctctttgcagtcactgcttggctaggcctac

SEQ ID NO: 382339 - DNA, 201 bp, Homo sapiens
atcctcttgaattttctagaacttcttaattttattgtagtgttttggtaattggacatttacaaaatctttcagccctgatccaatttatagaaaaaggygtgaatttaacagattacagcatgacatttccataattaatagtggttgtttgccatttatagtttggaaagtaacatattgaactaagtaaaataataa

SEQ ID NO: 382340 - DNA, 201 bp, Homo sapiens
tagaatcacaaaattcatttaagggttattctgtttttctgtaaacaactatggccttcctatgtgatctcatttgtcaacttttttttttttttttttttggtagtgatggggtctcactatgcttgcccagcttggtctggaactcctagcctcaagtgattcccctgcctgcctcagcctcccaaagtgcagggatta

SEQ ID NO: 382341 - DNA, 201 bp, Homo sapiens
ttaaagtccctaaccaagctgtttcatttcagattcttcccaaaaccttgaggtaggggaaagaatcatctttaatatgtcaactcgtgattattgaggcwatgatcacttttttaaattgaggaaaatgcttattagattgttgaagctgcctagaggggcaaaagaagtgataaggctggtatctctggtgcttcgtaa

SEQ ID NO: 382342 - DNA, 201 bp, Homo sapiens
ccagctggatctcttaagactgttcaaatttcagacctaattgataatctgtgaaatattaaagtccctaaccaagctgtttcatttcagattcttcccamaaccttgaggtaggggaaagaatcatctttaatatgtcaactcgtgattattgaggcaatgatcacttttttaaattgaggaaaatgcttattagattgt

SEQ ID NO: 382343 - DNA, 201 bp, Homo sapiens
ctcagcctcccaagtagctgggattacaggcatgcgccaccatgcctagctaattttatatttttagtagaggtgggatttctccatgttgatcaggctgrtctcgaactcctgacctgagccgatccacccgcctcggcctcccaaaatgctgggattacaggtgtgagccaccatgcccagactttttttgagatggag

SEQ ID NO: 382344 - DNA, 201 bp, Homo sapiens
tctcataccataaaattcacccactcaaagtgtacagtttagtggttttttcatgtattcacaaagtagtacaacatcatcacttgctaattccagaagakttttgtcaccccaaaaagaaaaaccctgtgctcattagcagtcactctaccttcaacccctggcaaccatttatctgctttccaattctatggattttcc

SEQ ID NO: 382345 - DNA, 201 bp, Homo sapiens
tccattagaacttgagagcagcatatattataaggactatttcaaaatgttttctacacacgaaagcttattttagaatgtgttccaattaaatctaggcytgatcaggtcacatgatgtgcttaatatgtacattctttacaaagaatatctgattttgagggtgaactgaagatgagaaagtaaatgccatacctatct

SEQ ID NO: 382346 - DNA, 201 bp, Homo sapiens
gcttcatttatttttttgaggtataattctcataccataaaattcacccactcaaagtgtacagtttagtggttttttcatgtattcacaaagtagtacarcatcatcacttgctaattccagaagatttttgtcaccccaaaaagaaaaaccctgtgctcattagcagtcactctaccttcaacccctggcaaccattta

SEQ ID NO: 382347 - DNA, 201 bp, Homo sapiens
aaatagtcaagtaatagatatttattttcccttcacttacttttactattccaatctctaattcatcggtaagattccaaaatctcactgaatattgaagraaaactcaaatgcttcatttatttttttgaggtataattctcataccataaaattcacccactcaaagtgtacagtttagtggttttttcatgtattcac

SEQ ID NO: 382348 - DNA, 201 bp, Homo sapiens
atgcgttctataagatgagataccttcctttagacttaattttgtggacatttaaatccataccctattcctttaccaacttacctgtctattttagtaastaacttcctgaacatagtctacattaactaatttcctgaacatagtctacagtgctttctattatgcatggccctaaactcacttctgtttgggattcaa

SEQ ID NO: 382349 - DNA, 201 bp, Homo sapiens
taaatagtcaagtaatagatatttattttcccttcacttacttttactattccaatctctaattcatcggtaagattccaaaatctcactgaatattgaargaaaactcaaatgcttcatttatttttttgaggtataattctcataccataaaattcacccactcaaagtgtacagtttagtggttttttcatgtattca

SEQ ID NO: 382350 - DNA, 201 bp, Homo sapiens
tcactatcgcccaggctggggtgcagtggtatgatcacagctaactgtaaccttgaactcctgggctcaggcagtactcccacctcaacctcccaagtacrctaggactatagtcatatgccagcatgcccagctaatttttttagttttttggtttgcagagatggggtcttgctatgttgcccaggctggtggtaacat

SEQ ID NO: 382351 - DNA, 201 bp, Homo sapiens
ttgtagcttttttttttttttttttggatgcagtttcacataataacattgctggctcgtgttgctagcaagaactgattccagcatttatgttctttgartgtattgtcgcattctttcggagactcaagctgtccacatgaagtggatgaatttgacccagtattattgtccatcgtactctattgtaatacatcagcc

SEQ ID NO: 382352 - DNA, 201 bp, Homo sapiens
acactattcaaattagttattctcagggctatttttatgactttgtagcttttttttttttttttttggatgcagtttcacataataacattgctggctcktgttgctagcaagaactgattccagcatttatgttctttgaatgtattgtcgcattctttcggagactcaagctgtccacatgaagtggatgaatttgac

SEQ ID NO: 382353 - DNA, 201 bp, Homo sapiens
ggcaggagaatggtgtgaacccgggaggtggagcttgcagtgagctgagattgtatcactgcactccagcctgggtgacagagtgagaatctgtccccccmgcccccccaaaaaaaaaagaaagaaaaagattaagaaacacatcctgaaaccagactgaatagagcccagcagcttggatttgaatcttcactctgtcat

SEQ ID NO: 382354 - DNA, 201 bp, Homo sapiens
taccttataggatagtttacctgtgtaaatggatttaagaagaaaatatgctacagattcaagttgtatggattctgaacacacattatgttttctgttayaatgaactatggatgcatatgtgctatagaaataaatactagaaacaaggaaatgaggacagcagcatccagcaggggcttttgacattacaattatagt

SEQ ID NO: 382355 - DNA, 201 bp, Homo sapiens; identical to SEQ ID NO: 83113

SEQ ID NO: 382356 - DNA, 201 bp, Homo sapiens; identical to SEQ ID NO: 83115

SEQ ID NO: 382357 - DNA, 201 bp, Homo sapiens
atagagggtgaacttgcagattctcataagtaacttacagttgtgtacataatgaagaattgacttgctttattagtgatcccaaaaaaggagcccgtttkttttatcttacaaatttttcataatttttttctttatttaaattttttttctataacacacaactttgtccagaaccctgtttgttaatattttagaatc

SEQ ID NO: 382358 - DNA, 201 bp, Homo sapiens
gaaaggtggtgaaataagtagatgatgtcttatgtccactagggggtagtgtgtactgtaaaaattaaaatagttcctcagtgaactctttacttcatcaytcagttagcttgtttgaattaatttttgttcatttaatgtgttttgaaattgccataaatttttttcaaacacaatcttgtgagtgtagcaaacagcaac

SEQ ID NO: 382359 - DNA, 201 bp, Homo sapiens
tgactaaatgcgccagttaaagtgactcaattgcagcatcattttgcttgatataacctggtgaacgtgtatgttaatcttgctcattcttgtgaaatctrtggggagatgcatactaagtggaagacctgttaggcttcgaggatgatgtactgtatactgcttcatccaattgcatttaaatatatctgagatgaggga

SEQ ID NO: 382360 - DNA, 201 bp, Homo sapiens; identical to SEQ ID NO: 83111

SEQ ID NO: 382361 - DNA, 201 bp, Homo sapiens
acccgatttccttcctcaagaaaactgtttacttacactattcaaattagttattctcagggctatttttatgactttgtagcttttttttttttttttttggatgcagtttcacataataacattgctggctcgtgttgctagcaagaactgattccagcatttatgttctttgaatgtattgtcgcattctttcggaga

SEQ ID NO: 382362 - DNA, 201 bp, Homo sapiens
acacatggagctgtcatctcctgtgacaacagtgccttctggaatacctcctgaaggacctgcctgaacctgttttacagtcaacttttttttttttttttaacaagcagaaggaatacactctaaaataatcaataaaagtatagtatagtaaatactaggcaataggaatttttcagttccattataatgttgtgggac

SEQ ID NO: 382363 - DNA, 201 bp, Homo sapiens; identical to SEQ ID NO: 83112

SEQ ID NO: 382364 - DNA, 201 bp, Homo sapiens
ctctttcagagctgttccgaggaaatagttttaacacaaggctgggggagggccgcagttatgggggattctctttctctctcctcttctctcctctcctytctttttcgtagatatgaggcctcgctatagtgcccaggcggcttccaaaactcctggcttcagagatcttcctaccttggcctctgtgggggatctcgt

SEQ ID NO: 382365 - DNA, 201 bp, Homo sapiens
gctgtgaatatgttatatactaaatagtcaagtaatagatatttattttcccttcacttacttttactattccaatctctaattcatcggtaagattccaraatctcactgaatattgaaggaaaactcaaatgcttcatttatttttttgaggtataattctcataccataaaattcacccactcaaagtgtacagttta

SEQ ID NO: 382366 - DNA, 201 bp, Homo sapiens; identical to SEQ ID NO: 83119

SEQ ID NO: 382367 - DNA, 201 bp, Homo sapiens
tgacaaagtgagatcttgtctcaaaaacaaacaaacaagccaaaaaaaaccaccaaaaaagctaattttactttttaaatagcttggttttggttgagtttagagcaagttgccttacttatgtaatcctaatgttactttattttacttgagtaaaaaatcagttttattaagctaattttattaacatatttgtagaca

SEQ ID NO: 382368 - DNA, 201 bp, Homo sapiens
actacacctggtttaacaaatactgagtgcataccatttatctagttatatgtaaagaatactggaaaacttgaactgtttttgtaacccatttgattaargtattcagctgtttatggctacggaatttggagtcaagaagcttctgctacagattttaagaaaattagtggggagaattgtgtatctagaaatggacaa

SEQ ID NO: 382369 - DNA, 201 bp, Homo sapiens
aggctggtctcgaactcctgacctgagccgatccacccgcctcggcctcccaaaatgctgggattacaggtgtgagccaccatgcccagactttttttgaratggagtctcgccctgtcacccaggctggagtgcaatggcacgatctcagctcactgcaacctccgcctcctggcttcaaatgattctcctgcctcagcc

SEQ ID NO: 382370 - DNA, 201 bp, Homo sapiens
tctcttgtaactacacctggtttaacaaatactgagtgcataccatttatctagttatatgtaaagaatactggaaaacttgaactgtttttgtaacccawttgattaaagtattcagctgtttatggctacggaatttggagtcaagaagcttctgctacagattttaagaaaattagtggggagaattgtgtatctaga

SEQ ID NO: 382371 - DNA, 201 bp, Homo sapiens
gtctcttgtaactacacctggtttaacaaatactgagtgcataccatttatctagttatatgtaaagaatactggaaaacttgaactgtttttgtaacccmtttgattaaagtattcagctgtttatggctacggaatttggagtcaagaagcttctgctacagattttaagaaaattagtggggagaattgtgtatctag

SEQ ID NO: 382372 - DNA, 201 bp, Homo sapiens
ccagcccaggatagatagggatgggtaagaagcccttgagatgtggcagtatgtggcttgacttcagacttgtcagattaggggttttatagggtttttttagctcttgttttgattaagcttgtttgacttgcagggtgtctcctacctgtgttccagccacccgatttccttcctcaagaaaactgtttacttacacta

SEQ ID NO: 382373 - DNA, 201 bp, Homo sapiens
tacttcaagtggaatagagagtacttacctatttgttacctatcaacccataaataaagcttttcccaaaaaaggaatactctggtctaaagtactctgaratttagtctttggtacgcagaatcttagaaatagatttttcttccgtttttccttctctgaatctgccacctaagaaattttgagatttaaatatgtggg

SEQ ID NO: 382374 - DNA, 201 bp, Homo sapiens
gttggggatagggaggtcatgttaagtttgggatgcttattagacattcaagagtgtatatcaagcaggtagttatagaggcaagaggcacgatgaggggwgaggtctgggctagatatgaattaggggaggcttcagcttatagagtgtgtttagtatttaaattcattgcattacatgagatcactgtggaaatgtata

SEQ ID NO: 382375 - DNA, 201 bp, Homo sapiens
tcgcccgccttggcctcccaaagtgctgggattacaggcatgagccactgcgcttggctgtgtttttttttttaagatagggtctcactgtgttgcccaggcatgatcatggctcactgcagcctcagcatcccgagtagctgggatcacaggcatgcactaccatccccaactaatttaaaaaaattttttatatatata

SEQ ID NO: 382376 - DNA, 201 bp, Homo sapiens
taaaaatagcagtcagttcagtattcttttttaagctcctctgtgtcaagcagttcctttagtccagattgatcaactcctgcacaagtgaaattaagttktgtcaaattatcaagtactttagtattcactgtgctaaatgactgtgactggaaatgttatgcatttgctttgctcaagtttggaattttttccacacgt

SEQ ID NO: 382377 - DNA, 201 bp, Homo sapiens
cagtaatttacactgggcatttacattttgctgttgaaactaagacagtagtaactcatactgtgatatataatcttaattttacggtatcttgttgacarcatctatctaatgaatgacaccttgatttgggttttatcttactagtttagtgtcatttatagcttaaaaggatggttttctctaatccttaaacagaag

SEQ ID NO: 382378 - DNA, 201 bp, Homo sapiens
attggtgatttttttattgctctgtaactttcttaagattatagcttatactcgggaaaatgttagtaagtagctgttttgttttgtttttttttttttgkgactcttaaagacaactagattaccatcttactatgaggcagggacaaagtggttttagtaacataggccgatcccaaggccaaatttcagttttctgta

SEQ ID NO: 382379 - DNA, 201 bp, Homo sapiens
cttttgcccgtggacgatgcaatcaatgggctaagcgaggagcagaggcaggtgaggagactgacccccttcctggccccaaggcctccttcctgcctggtccccaaggcctccttcctgcctggtccccatcggcccagcgcccacccagccttggcttttgcccgtgggccgttgggagcgccagcgcgggggcgggac

SEQ ID NO: 382380 - DNA, 201 bp, Homo sapiens
ttccaatgaaaagttaggagtttgggtttgtttttagaaatgagagaactgagcagattttttggtcagaaggaaaaaaaagggaagaaaaaagaaaataragggagaaattgaaaagtgtgggaatgagtgggcagaacacaatggtgagctggggcagaagagagaaggatgggttacaggtgatggtgcaggaaccac

SEQ ID NO: 382381 - DNA, 201 bp, Homo sapiens
acggcattcagtgttttggtgagtgatccccacttcccagtcccggggctccctcactcctggggcctgtggctgcttcagaaagcagtttcagggcgggygtggtggctcacacctataatcccagcactttgggaggccgaggtaggcagatcacctgaggtcaggagttcaagaccagcctggccaacatggtgaaac

SEQ ID NO: 382382 - DNA, 201 bp, Homo sapiens; identical to SEQ ID NO: 83127

SEQ ID NO: 382383 - DNA, 201 bp, Homo sapiens
ctgacatggtggagcactgtgggagagccagcacagccatcatgtactaaccagaccaggggcatggatttgttgtttggggtttttttttgttttttttktttgtttgtttgtttgttttgagaaggagtcttggctctgtcacccaggctagagtgcagtggcgtgatctcagctcacggcagcctccacctcctgggt

SEQ ID NO: 382384 - DNA, 201 bp, Homo sapiens
ttctctgccagcatctcatctgccctctgctgtacagctcacctcaagattttccctgaggctgtggctctcctgtcctgtcaccagtcctgcttctttctttttttttttttttttttgagacagaatctcactctgtcgcccaggctggagtgcagtggcgcgatctcggctctctgcaagctccacctgccaggttca

SEQ ID NO: 382385 - DNA, 201 bp, Homo sapiens
tggggaaatatcattaagtaacagacaaaaggcctgaggagcagggtggcttactcggctgtgaaacgacacctgggctgtcacgcccctgcacctctggycagtcagtgccgtaactgtggcaagactttctgaagttgcttttctcctccctgggattctggccttcccacgctagcattttgccaccacacccggtgg

SEQ ID NO: 382386 - DNA, 201 bp, Homo sapiens
ctcctgacccccttccaggctgatctggctgttctcaagttgagaaagcctctgggttagagaggcttggcattgttagcgcttcagtgacatgtggctargctgtgagctggggctgctggacagcgctccttcctggccagggccctgcagcggcatgcctaactggcatcacacactccgcatagggtctgtactcag

SEQ ID NO: 382387 - DNA, 201 bp, Homo sapiens
ctgagctgcactgctgcctggaagagctcacacagttttctggtaaatgaagtctctctaagaatgcagcccctctctctgaagtgtttgggtctcattgytccagccacatgtgactggctgccttcccctcaacacttattccactctgctccattctgttggcaggaattttggaagcagctggggaacctgggcgta

SEQ ID NO: 382388 - DNA, 201 bp, Homo sapiens
gggtggcgtgtggcgagctggaggctgcggccgccgcttgccggcttcgtttcccagcgggcccactcgcttttgcccgtggacgatgcaatcaatgggcyaagcgaggagcagaggcaggtgaggagactgacccccttcctggccccaaggcctccttcctgcctggtccccaaggcctccttcctgcctggtccccat

SEQ ID NO: 382389 - DNA, 201 bp, Homo sapiens
agtctctctaagaatgcagcccctctctctgaagtgtttgggtctcattgttccagccacatgtgactggctgccttcccctcaacacttattccactctrctccattctgttggcaggaattttggaagcagctggggaacctgggcgtattgggcatcacagcccctggtgagtatagtgtctttccctaaaaagaact

SEQ ID NO: 382390 - DNA, 201 bp, Homo sapiens
ctgtttggggaagttacttgtggccttttctcttgaatgtgtctgggtagtggagatgctgtctgcagtggcatctgtttacctctctcctattagcttcstcagaccatggctaagttccttcaggagcacctggcccccaaggcccaggagatcgatcgcagcaatgagttcaagaacctgcgagtgagttgggaggcc

SEQ ID NO: 382391 - DNA, 201 bp, Homo sapiens
gcctcagtcggggagaggcgggggcagtgggccagctgctgagacttgctgtctgcgtgcctcgcagggccctgctgaccccagcttcctcccgtaggacygtgcaggtgtgattctttactcagctgagtgtgccacacaggtagccctggacggcattcagtgttttggtgagtgatccccacttcccagtcccggggc

SEQ ID NO: 382392 - DNA, 201 bp, Homo sapiens
cagccctatgctataaaatctcaccttcctcaggccttttgcagacacatcagatcctctggctttgtatctgttcttggtgctttggacaccacctccaycccaatgcctttgtttttctccaggccctctttcttcatttattcatctgcctctgcatttctgtaactttctgagtagtgggtgctcaggttgttcacg

SEQ ID NO: 382393 - DNA, 201 bp, Homo sapiens
ctagagagaatttggagtaggtgctacaaggtgcttcccttctgccgtcaaatgtaagattcttaatgaatgtcccgatttaatctgggctgcgttttccrctcccttgtaccacaccactcacagttcagtatggcggctccggcctgggctacctggagcatgtgctggtgatggaggagatatcccgagcttccggag

SEQ ID NO: 382394 - DNA, 201 bp, Homo sapiens
taaatccatataatctagtgataacaatcccttgcccatgtaaccctctcaagtctgagatccttgatctttgcacaaccgagtgcaggaggcaaggtttygcgcagggccccctttcagaagaccggtaaggtgagttgccctcggtggaatgggactagacctggtgtcaacacaccgcgcggtctggagagaggttcc

SEQ ID NO: 382395 - DNA, 201 bp, Homo sapiens
agaaagagtcagggagggattgggtgacttctagaccaattaacttttcttctttcccatccaagggagtccagagagggaagggaaagatctaacaactstagcctttgtggttggcctcgtggatggggtgggagtcctggcagctccacttctgactggaaggggttcacttgatccttttctttcacctggaacctt

SEQ ID NO: 382396 - DNA, 201 bp, Homo sapiens; identical to SEQ ID NO: 83137

SEQ ID NO: 382397 - DNA, 201 bp, Homo sapiens
gttattattgttgatctgttactatgcctagctcataaattaaactttctcataagtatgtatgtatagggaaaaaaacaacatatatatgggtttcggtwctatctacggtttcaggcatccactggggtcttggaatgtatcctccaaggataaggaaggactagtgtattccccacacccctccctcttgctaccttt

SEQ ID NO: 382398 - DNA, 201 bp, Homo sapiens
agtatttgttattattgttgatctgttactatgcctagctcataaattaaactttctcataagtatgtatgtatagggaaaaaaacaacatatatatgggkttcggttctatctacggtttcaggcatccactggggtcttggaatgtatcctccaaggataaggaaggactagtgtattccccacacccctccctcttgc

SEQ ID NO: 382399 - DNA, 201 bp, Homo sapiens
tgcgatgagggccattgcactgctaaggtgagggccagcctcagtcggggagaggcgggggcagtgggccagctgctgagacttgctgtctgcgtgcctcrcagggccctgctgaccccagcttcctcccgtaggactgtgcaggtgtgattctttactcagctgagtgtgccacacaggtagccctggacggcattcagt

SEQ ID NO: 382400 - DNA, 201 bp, Homo sapiens; identical to SEQ ID NO: 83135

SEQ ID NO: 382401 - DNA, 201 bp, Homo sapiens
gttgcaggtggcaatggctacatcaatgactttcccatgggccgctttcttcgagatgccaagctgtatgagataggggctgggaccagcgaggtgaggckgctggtcatcggcagagccttcaatgcagactttcactagtcctgagacccttcgcccccttttcctgcacctagtggcctttcttgggaagtagagatg

SEQ ID NO: 382402 - DNA, 201 bp, Homo sapiens
ctttcctttaccaggcccccttggggctaatctgcaaccaggaccaccttttgtttcctgtaaagggtatgcctggctttagcacctctaagaagctggayaagctggggatgaggggctctaacacctgtgagctaatctttgaagactgcaagattcctggtaagtagcaccgggaatcggggagcccctctcctgacc

SEQ ID NO: 382403 - DNA, 201 bp, Homo sapiens
ggttagagaggcttggcattgttagcgcttcagtgacatgtggctaggctgtgagctggggctgctggacagcgctccttcctggccagggccctgcagcrgcatgcctaactggcatcacacactccgcatagggtctgtactcagtagccggaggagaagggtcagacctaccctttcccattgatgtccttcagtctt

SEQ ID NO: 382404 - DNA, 201 bp, Homo sapiens; identical to SEQ ID NO: 83140

SEQ ID NO: 382405 - DNA, 201 bp, Homo sapiens; identical to SEQ ID NO: 83128

SEQ ID NO: 382406 - DNA, 201 bp, Homo sapiens
caccatgcccggctaattttttgtatttttagtagagacggggtttcaccgtgttagccaggatggtctcgatctcctgacctggtgatctgcccacctcrgcctcccaaagtgctgggattacaggcgtgagccccatgcctggcctccagtcctgcttctttgggttcagccctatgctataaaatctcaccttcctca

SEQ ID NO: 382407 - DNA, 201 bp, Homo sapiens
atggagtgtcgctcttgttgcccagggctggagtgcaatggcgcgatcttggcttactgcaacctccgccccctgggttcaagtgattctcctgtctcagccttctgagtagctgggatgacaggcacacaccgcccagctaattttgtatttttagtagagacagatggggtttcaccatgttggccaggctgctctcga

SEQ ID NO: 382408 - DNA, 201 bp, Homo sapiens; identical to SEQ ID NO: 83129

SEQ ID NO: 382409 - DNA, 201 bp, Homo sapiens
gctgtttggggaagttacttgtggccttttctcttgaatgtgtctgggtagtggagatgctgtctgcagtggcatctgtttacctctctcctattagcttygtcagaccatggctaagttccttcaggagcacctggcccccaaggcccaggagatcgatcgcagcaatgagttcaagaacctgcgagtgagttgggaggc

SEQ ID NO: 382410 - DNA, 201 bp, Homo sapiens
cgagtgagttgggaggcccgggcagtcgggggcagtcagggagtggggctgagctgcactgctgcctggaagagctcacacagttttctggtaaatgaagyctctctaagaatgcagcccctctctctgaagtgtttgggtctcattgttccagccacatgtgactggctgccttcccctcaacacttattccactctgct

SEQ ID NO: 382411 - DNA, 201 bp, Homo sapiens
tcctggggcctgtggctgcttcagaaagcagtttcagggcgggcgtggtggctcacacctataatcccagcactttgggaggccgaggtaggcagatcacytgaggtcaggagttcaagaccagcctggccaacatggtgaaaccgcatgccgggcatgatggtgcatgcctgtaatcccagctacttgggaggctgaggc

SEQ ID NO: 382412 - DNA, 201 bp, Homo sapiens
aatcccagctactcaggaggctgaggcaggagaatcacttgaaccttggatgcggaggttgcagagagccaatatcatgccactgcactccagcctaggcsacagagcatgactccaaaaaaaaaaaaaaaaaagctaaatggaaatttctagaaatagttcataagtttcaaatccacaccatcctgaatagcttgaagt

SEQ ID NO: 382413 - DNA, 201 bp, Homo sapiens
cggcattcagtgttttggtgagtgatccccacttcccagtcccggggctccctcactcctggggcctgtggctgcttcagaaagcagtttcagggcgggcrtggtggctcacacctataatcccagcactttgggaggccgaggtaggcagatcacctgaggtcaggagttcaagaccagcctggccaacatggtgaaacc

SEQ ID NO: 382414 - DNA, 201 bp, Homo sapiens
ggactacaggcgcccgccaccatgcccggctaattttttgtatttttagtagagacggggtttcaccgtgttagccaggatggtctcgatctcctgacctsgtgatctgcccacctcggcctcccaaagtgctgggattacaggcgtgagccccatgcctggcctccagtcctgcttctttgggttcagccctatgctata

SEQ ID NO: 382415 - DNA, 201 bp, Homo sapiens
acctggagcggctggtgctggccggggggcctcttgggtaagtgtgagaggcttgagggaagctgggctctgtcggcctcctcggcaggtgacccaccatragcagcagcagccttccccttgcggggccaaagggagctgcctcttggccctgctctctcctgggagatgaaaggaacctcctcttcccatgttgaattt

SEQ ID NO: 382416 - DNA, 201 bp, Homo sapiens
ccgccccctgggttcaagtgattctcctgtctcagccttctgagtagctgggatgacaggcacacaccgcccagctaattttgtatttttagtagagacasatggggtttcaccatgttggccaggctgctctcgaactcctgacctcaggtgatccacctgtctcagcctcccaaagtgccaggattataggcctgagcc

SEQ ID NO: 382417 - DNA, 201 bp, Homo sapiens
ctcccgagtagctgggactacaggcgcccgccaccatgcccggctaattttttgtatttttagtagagacggggtttcaccgtgttagccaggatggtctygatctcctgacctggtgatctgcccacctcggcctcccaaagtgctgggattacaggcgtgagccccatgcctggcctccagtcctgcttctttgggttc

SEQ ID NO: 382418 - DNA, 201 bp, Homo sapiens
gagggccagcctcagtcggggagaggcgggggcagtgggccagctgctgagacttgctgtctgcgtgcctcgcagggccctgctgaccccagcttcctccygtaggactgtgcaggtgtgattctttactcagctgagtgtgccacacaggtagccctggacggcattcagtgttttggtgagtgatccccacttcccagt

SEQ ID NO: 382419 - DNA, 201 bp, Homo sapiens
tggccctaactcccacacctgcccccatctccatcatcctgagtaaatcccatctcctctccatgcccctgcttcctcatccttggctgtcttgttgccaytgctgacctgcttttggtaactgagagagtgttccagcatgttgacctgtgacatccctttgtgcccagttgatgcaggggaagatggctgacatgtaca

SEQ ID NO: 382420 - DNA, 201 bp, Homo sapiens
agagtaggactagcttcctttgcaaagggaatggaaaaaggagaggcattttcagccttgtagccattgggcttagaagagacttctaggactttaccgayaccctggtctgagagcgaagtttgaaggggtttaatgtggacaggaagaggcagtaccagtgagctgctctagggtactctgaggttgtaacaaggcctg

SEQ ID NO: 382421 - DNA, 201 bp, Homo sapiens
cctggctgagacaggccaagatggcttgagcaaatagccaacatcctgcccttaggaaatcactacatcctgaatggcaacaagttctggatcactaatgkccctgatgctgacgtcctgattgtctatgccaagacagatctggctgctgtgccagcttctcggggcatcacagccttcattgtggagaaggtgagtata

SEQ ID NO: 382422 - DNA, 201 bp, Homo sapiens
ccaaatgtggttaggaaggggccatggattgctttaaaatacttgagccaaaaataataaaaataggaccagaactcttgcattgaacaacagacagacarcatttgaagagaactctaagaaatggaagagtaggactagcttcctttgcaaagggaatggaaaaaggagaggcattttcagccttgtagccattgggct

SEQ ID NO: 382423 - DNA, 201 bp, Homo sapiens
aggctctgatgttgtctctatgaagctcaaagcggaaaagaaaggtgaggccactctcaacttgggagccaaaatgggcagaggtacagacattatcaggrtaatggagcaacaattgtgggtggcccctgctgggtttccagaactttctcaaaggtggacagcttcttgctcagcagaaggtctatggcctggctgaga

SEQ ID NO: 382424 - DNA, 201 bp, Homo sapiens
cgcgatctcggctctctgcaagctccacctgccaggttcacaccattctcctgcttcagcctcccgagtagctgggactacaggcgcccgccaccatgccyggctaattttttgtatttttagtagagacggggtttcaccgtgttagccaggatggtctcgatctcctgacctggtgatctgcccacctcggcctcccaa

SEQ ID NO: 382425 - DNA, 201 bp, Homo sapiens
ctgtgagctaatctttgaagactgcaagattcctggtaagtagcaccgggaatcggggagcccctctcctgacccccttccaggctgatctggctgttctyaagttgagaaagcctctgggttagagaggcttggcattgttagcgcttcagtgacatgtggctaggctgtgagctggggctgctggacagcgctccttcc

SEQ ID NO: 382426 - DNA, 201 bp, Homo sapiens
tgtcggcagtatgtctacaatgtcgccaaggcctgcgatgagggccattgcactgctaaggtgagggccagcctcagtcggggagaggcgggggcagtggrccagctgctgagacttgctgtctgcgtgcctcgcagggccctgctgaccccagcttcctcccgtaggactgtgcaggtgtgattctttactcagctgagt

SEQ ID NO: 382427 - DNA, 201 bp, Homo sapiens
cccggctaattttttgtatttttagtagagacggggtttcaccgtgttagccaggatggtctcgatctcctgacctggtgatctgcccacctcggcctccyaaagtgctgggattacaggcgtgagccccatgcctggcctccagtcctgcttctttgggttcagccctatgctataaaatctcaccttcctcaggccttt

SEQ ID NO: 382428 - DNA, 201 bp, Homo sapiens
aggctggtctcaaactcccaacctcaggtgatcctcctgcctcggcctcccaaagtgctgggattacaggcatgagccaccatgcccagccgccaagaggmgtttctaatctctttgggtaatcagacccttttagccaaaggttcgggggcttaaaagagcctgacaactattgagatctggcagctgcctggaatgcag

SEQ ID NO: 382429 - DNA, 201 bp, Homo sapiens
accactcacagttcagtatggcggctccggcctgggctacctggagcatgtgctggtgatggaggagatatcccgagcttccggagcagtggggctcagtyacggtgcccactccaacctctgcatcaaccagcttgtacgcaatgggaatgaggcccagaaagagaagtatctcccgaaggtgaggaaatggaaatgtaa

SEQ ID NO: 382430 - DNA, 201 bp, Homo sapiens
caatcagcaccttgtaaaatgggccaatcagtgctctgtaaaatggaccaatcagcaggatctgggcggggacaaataagggaataaaagctgccccccarccccgccaccaccccccaaccccagccagcggtgtctagcagctcggctccccatccaggttgtggaagctgttcctttgctcttcagaataaatcttgc

SEQ ID NO: 382431 - DNA, 201 bp, Homo sapiens
cgtcagaccatggctaagttccttcaggagcacctggcccccaaggcccaggagatcgatcgcagcaatgagttcaagaacctgcgagtgagttgggaggyccgggcagtcgggggcagtcagggagtggggctgagctgcactgctgcctggaagagctcacacagttttctggtaaatgaagtctctctaagaatgcag

SEQ ID NO: 382432 - DNA, 201 bp, Homo sapiens
ctgggatcaatctggggcgttagcaccggaaggtcccggggggagcatgggactaggatgctgccatgctgtgcaggtacagggactcaataggaaggtgrgtgccttcttcccagaggcctttcctttaccaggcccccttggggctaatctgcaaccaggaccaccttttgtttcctgtaaagggtatgcctggcttta

SEQ ID NO: 382433 - DNA, 201 bp, Homo sapiens
aggatgctgccatgctgtgcaggtacagggactcaataggaaggtgggtgccttcttcccagaggcctttcctttaccaggcccccttggggctaatctgyaaccaggaccaccttttgtttcctgtaaagggtatgcctggctttagcacctctaagaagctggacaagctggggatgaggggctctaacacctgtgagc

SEQ ID NO: 382434 - DNA, 201 bp, Homo sapiens
cactcgcttttgcccgtggacgatgcaatcaatgggctaagcgaggagcagaggcaggtgaggagactgacccccttcctggccccaaggcctccttcctgcctggtccccaaggcctccttcctgcctggtccccatcggcccagcgcccacccagccttggcttttgcccgtgggccgttgggagcgccagcgcggggg

SEQ ID NO: 382435 - DNA, 201 bp, Homo sapiens
gaagttaggttgcatctggattgtgcagggccttggatgctggtgcaggagtttgggctcttggctctcgctgtgtcaatctctcctgggtggtagtaggsagtctcgctctatgagatgaggtaggggccaagatcctctttagggtctagagggagaatgtctatttgggctttagaggggaaaacccttctcttccag

SEQ ID NO: 382436 - DNA, 201 bp, Homo sapiens
catatgggaagttaggttgcatctggattgtgcagggccttggatgctggtgcaggagtttgggctcttggctctcgctgtgtcaatctctcctgggtggyagtaggcagtctcgctctatgagatgaggtaggggccaagatcctctttagggtctagagggagaatgtctatttgggctttagaggggaaaacccttct

SEQ ID NO: 382437 - DNA, 201 bp, Homo sapiens
agaaatagatgagatcttcacttcttagtgagtttcttgggttgtgctggtcatgggaaaagggtggtggctaacaatcccctcctcccacctgccatgcygggagtcaggaggcttcactggacaagggggttgtctaagcctccaggcccaagggatatggacctgtgctcttctctctggcttgaagccatgctaagg

SEQ ID NO: 382438 - DNA, 201 bp, Homo sapiens
gcaccaagctcaaggtctagcacaggcttgttgtcctggagtccatgagtccctggggatttcctaggtgggcttgtaagtctgtgactcacatccccccrgttactgtagcacatttcaggaagggttttcagaagttggggggcttgggttgtccttgaagttatttcaagcagaggagatttgggcacttaggtttgg

SEQ ID NO: 382439 - DNA, 201 bp, Homo sapiens
acattcaagtgccaagcaccaagcaccaagctcaaggtctagcacaggcttgttgtcctggagtccatgagtccctggggatttcctaggtgggcttgtargtctgtgactcacatccccccagttactgtagcacatttcaggaagggttttcagaagttggggggcttgggttgtccttgaagttatttcaagcagagg

SEQ ID NO: 382440 - DNA, 201 bp, Homo sapiens
catcgtatattaaaaaaaaaaaaaaaaaaaaaaactctctcttggcatcctcgtgaaagtgacattgtctttaaaccctgcgtggcaatccctgatgcacygccgtgatgcccagggaagacaggatgacctggaagtccaactacttcaagatcatccagcttttggatgattatccaaaatgtttcatcgtgggagcag

SEQ ID NO: 382441 - DNA, 201 bp, Homo sapiens
ggcctcggtgcagtttgtggagtatccttgaggtttcagtggccagggtccttggcttgggtggggagccagaggagggcctggggacagggcccccaggktaagctgttaggttctcctggtgcagatggccttggctagggtcctaaactcagggacagctacaacaagcgccagatgagccgcatttaccccaaggga

SEQ ID NO: 382442 - DNA, 201 bp, Homo sapiens
ggacaagctgctgctccaccacgacatgacgcagccactcaatcattacttcatcaactcgtcccacaacacctacctgacaggtgggccctgataacatyggtgccaacctctgctttcacaggggttccctgcatcctccacaggggttgcccacatgctgctggccctgagaataacacagaccatgatggagtggcg

SEQ ID NO: 382443 - DNA, 201 bp, Homo sapiens
tgaccaaagtcaccacagacaagatggcccaggagaggtgagccctggaggggaggcccagggctgggcagaccccacttcaggtggaaaggggcctctctacaaatggatcctgactcacttcccaaagatgcatctgtcccctggctctccaaaaagcggatcccacctgtcacctttgatcagagtgtcctcctcaga

SEQ ID NO: 382444 - DNA, 201 bp, Homo sapiens
gggggaaaagtgctatcacgagacaggcagtcggaacgctgaccttctgttcatggagtctccttctcctccaggaagcaattgaggctattgcagaaagygcctttaagacctccccctatcccatcatcctgtcgtttgagaaccatgtggactcgtgcgtatccaggcccattcagccacattctcacccagccccca

SEQ ID NO: 382445 - DNA, 201 bp, Homo sapiens
caaagagatgaagaaaaagctggagacaaagagactggagcggatccagggcatgaccaaagtcaccacagacaagatggcccaggagaggtgagccctgraggggaggcccagggctgggcagaccccacttcaggtggaaaggggcctctctacaaatggatcctgactcacttcccaaagatgcatctgtcccctggc

SEQ ID NO: 382446 - DNA, 201 bp, Homo sapiens
gtgctgtgccatgttgaataagcagaatacataggatgtaagcaaatcccaactttatttcatctcccatggcctctttacaatatatttggtaggagaarctctccccctggccatggaaagaaactctgcaaggccacaagacattatatttactctcaggtaacacagtccagtggtcacttttcatcacaaaatcca

SEQ ID NO: 382447 - DNA, 201 bp, Homo sapiens
ccctgctgttcccgccagcacggcctgaccaggtgcagggcctcatcgacaagtatgagcccagtggcatcaatgcacagaggggtgaggactaagggaaycccttgtcccctgtggtcctgtcctgccttggcagcggggttgtagcctgacagctatctcctgtcccccaggccagctgtcacctgaaggcatggtctg

SEQ ID NO: 382448 - DNA, 201 bp, Homo sapiens
atgaccaaagtcaccacagacaagatggcccaggagaggtgagccctggaggggaggcccagggctgggcagaccccacttcaggtggaaaggggcctctctacaaatggatcctgactcacttcccaaagatgcatctgtcccctggctctccaaaaagcggatcccacctgtcacctttgatcagagtgtcctcctcag

SEQ ID NO: 382449 - DNA, 201 bp, Homo sapiens
ttcctacacggggctgctcccaggctctggttctcctggcccctgaaaatgttaccttaggccagggattctcttaggctggagagaacaatatggagatyctccttcagggaggggaggctgctgggctcgcccagtctgagagttagagtgctgggcttgtcccaggaagggaaatgaaggcttggtgggggagggaag

SEQ ID NO: 382450 - DNA, 201 bp, Homo sapiens
ttgggaagtttgccaagatgcccaaggtaggtgtgtccagtagcagcccaggctcaagcacagctactagctccatggggcaagggcaggggtccctgtgsgggtgggaagcctgacttctgaagcacggggaatggttccttggctgggcagcaaggaccgtggctggaagccaaggaaggggagcggcagctcctgggc

SEQ ID NO: 382451 - DNA, 201 bp, Homo sapiens
aagggaagtttgggtccagctggccctgggcagcctggcatctagagagaggtgttggccaagatttgaagggtgtggaagctcccttctccctattgctyattcttgacctggactttttgtcccacatcccttctttgctcccaccgggatccgcaccctgcccccaggagatggagtttctggatatcaccagcatcc

SEQ ID NO: 382452 - DNA, 201 bp, Homo sapiens
tcctccttcagggaggggaggctgctgggctcgcccagtctgagagttagagtgctgggcttgtcccaggaagggaaatgaaggcttggtgggggagggargacagcccttagtgctgacttgtccacctgatgggaggtgggatgagggggtctgggtctaggcccttcggggctgggctaggctaggggatctcgctgc

SEQ ID NO: 382453 - DNA, 201 bp, Homo sapiens
agtcccagtgttgtcttcttaagaggtggaacgtctcgcacccagaaccgagattctgtctctctcttacccgctgccggcaacaaaatgtgcggctcatraaaagtctcagtaaattctgcagctgataactgctttactccttactttacaaatatccattccaaccctactcacaccctccccaccacccacacccag

SEQ ID NO: 382454 - DNA, 201 bp, Homo sapiens
gggcacttaggtttggaggtgggaaggcttggtatctttatgggacagttgaatggacagggtaggaggtgttcatggagggaagaaggggcatatgggargttaggttgcatctggattgtgcagggccttggatgctggtgcaggagtttgggctcttggctctcgctgtgtcaatctctcctgggtggtagtaggcag

SEQ ID NO: 382455 - DNA, 201 bp, Homo sapiens
aatatggagatcctccttcagggaggggaggctgctgggctcgcccagtctgagagttagagtgctgggcttgtcccaggaagggaaatgaaggcttggtrggggagggaagacagcccttagtgctgacttgtccacctgatgggaggtgggatgagggggtctgggtctaggcccttcggggctgggctaggctagggg

SEQ ID NO: 382456 - DNA, 201 bp, Homo sapiens
ggagagccaatcaaccctggagctgctggttactgacactaggcacaggggtggagccagggcaagggagtgagaccctgagctccaagcaggtttgtctrtatcccctaccctgggtggtgggggcgctggggctgtggttgatggactgtgttcagggcaggcagcagaaacggcatgcattcccagtctagtgttggg

SEQ ID NO: 382457 - DNA, 201 bp, Homo sapiens
ccgcaccctgcccccaggagatggagtttctggatatcaccagcatccgggatactcgctttgggaagtttgccaagatgcccaaggtaggtgtgtccagkagcagcccaggctcaagcacagctactagctccatggggcaagggcaggggtccctgtgggggtgggaagcctgacttctgaagcacggggaatggttcc

SEQ ID NO: 382458 - DNA, 201 bp, Homo sapiens
gatttgaagggtgtggaagctcccttctccctattgcttattcttgacctggactttttgtcccacatcccttctttgctcccaccgggatccgcaccctrcccccaggagatggagtttctggatatcaccagcatccgggatactcgctttgggaagtttgccaagatgcccaaggtaggtgtgtccagtagcagccca

SEQ ID NO: 382459 - DNA, 201 bp, Homo sapiens
gggcgcggcgcagctggcggagctcgggccaccgggcgtggggggcgtcggggcctgcaagctcggtcccggcaagggctctcgcaagaagaggtaaggcycgtggcggtgccctgccctctgcagcgcgggtggcgcaggatctcagggcctgtccccacgtggcctccccaggagcctgccccgcgaggagagcgccgg

SEQ ID NO: 382460 - DNA, 201 bp, Homo sapiens
  misc_feature (1)...(201): n = A,T,C or G
gcagaccccacttcaggtggaaaggggcctctctacaaatggatcctgactcacttcccaaagatgcatctgtcccctggctctccaaaaagcggatcccncctgtcacctttgatcagagtgtcctcctcagacaaaacacggaggccaacactacatgggcagagctctggaggcagccaagcctgcagggagggagct

SEQ ID NO: 382461 - DNA, 201 bp, Homo sapiens
caacactacatgggcagagctctggaggcagccaagcctgcagggagggagctgaggccttgggattgtagcctgtccactgtggtggcactgtttcccamggaaggacagtgtgttttgatggggaaatggttccctcagagggccccaggactcccagtggcccctacatactccttgggtccccacacctgcccccag

SEQ ID NO: 382462 - DNA, 201 bp, Homo sapiens
ctccagaggctcccctgtaggcaggggctctttgctctggaaaggaggatgcagtcactccaacctgtggctacccaaatgttccatccttagcatccctyggggagagagagagacaggcgaaagcactgctgctgaaggctgatgctctgcctgtggctgtgggttgacttggggctctgggagatgagagataggccc

SEQ ID NO: 382463 - DNA, 201 bp, Homo sapiens
tgctcgcccccaccctcctgccctatactggcctagcgaggcggcggggttgggggcgggggtccggcgggacgggtgcgctaggaccttgcggaagcgcyagcacgtgtgtcagtgcgcctggcccgcggggaggcggcaggtggggctcttttgtgaaccctgagggtggaacttgaagcctttcacctgcctgcagta

SEQ ID NO: 382464 - DNA, 201 bp, Homo sapiens
ctagttagctgggattacagctggattctgacccagcttgcctgtctgtgttgtcctgattctctgccatccactcccacccagatgacggagaacttggrgaggcaccaggagaagctggaggagaagcaggcggcttgcctggaacagatacgggagatggaaaagcaggtaacaggttcactactgggacccccagca

SEQ ID NO: 382465 - DNA, 201 bp, Homo sapiens
gccttttcatgacaccaggaaagaaaattggcagatccctgaccaaaggcttaacaaatgcaaaaagagaaaaggggggcttcgtagtggatgcaggtacrcatcacacgctcctcacgtgacagaggggagtgggagcctctgctccatggcctgggtgccaaattcaaggtggacatccccggagcctgggagctggag

SEQ ID NO: 382466 - DNA, 201 bp, Homo sapiens
taagaagatgcagtcggatgaggtgtgtgggggtagccccaggcccctctgtgtcatcctccaccgttaagccccctggatgggggccttgggccccattyctgggctctgcaccatcctcctcttctttgccctcccctcttctccttagggcacagcgggcctggaagtgacggcttatgaggagatgtccagcctagt

SEQ ID NO: 382467 - DNA, 201 bp, Homo sapiens
aaacagctccttcatgcctgtctctctgcagcgacaccaaagagatgaagaaaaagctggagacaaagagactggagcggatccagggcatgaccaaagtmaccacagacaagatggcccaggagaggtgagccctggaggggaggcccagggctgggcagaccccacttcaggtggaaaggggcctctctacaaatggat

SEQ ID NO: 382468 - DNA, 201 bp, Homo sapiens
gcctggtcggggaggcgccagggcccgagagtggcccggagttagaggccaacgctctgcctgtctcggtgcctgggccgaacccttggcaggcgggcacmgaggctgtggtgctgcgtgctcagcggtaaacggcgccaaggcccgaggcctgcttcccctaccctcccgtttctactccactggtatttctctcttcta

SEQ ID NO: 382469 - DNA, 201 bp, Homo sapiens
cagaaatgaagctcagttgtctcagggaggaggggctcttcaggaccaagaaagtgcccattctgggtttctgctgcttctctcctccacctgggggggtrtgagtcatggcttgtcaggctggtgggccacacacaggttccaggggtacaccctcctctgaccttggaaatagaagggaagaaagcaatttccctcaca

SEQ ID NO: 382470 - DNA, 201 bp, Homo sapiens
cctgggtttgcgccgacgctccacagccccagatatccccagcctggtcggggaggcgccagggcccgagagtggcccggagttagaggccaacgctctgyctgtctcggtgcctgggccgaacccttggcaggcgggcaccgaggctgtggtgctgcgtgctcagcggtaaacggcgccaaggcccgaggcctgcttccc

SEQ ID NO: 382471 - DNA, 201 bp, Homo sapiens
gcagaactgaatgggttccgggttgtaaaggggccttgccccagggagctgccagtgagagggtaggggaagggggccatcatccttcactgtggggtccygaggccctttcaaatgaggcagctctgcagatctccgcctggttaggatcccctttcctgagaggctcctgatgggctctaccactcccccaccctgcct

SEQ ID NO: 382472 - DNA, 201 bp, Homo sapiens
ccccaccagccccaccgaccccaccccccatggaccccattcgcccctctcaccgacccaaccccctcaccgactcccctccaccgacccccgccccccgyactccctctgaacaacaaagggcttctcgccaagcttacttcctctccctgcagcaaatctccaaaatgatggagctggccagagagaaacaggcggcag

SEQ ID NO: 382473 - DNA, 201 bp, Homo sapiens
tcaattacatccagcccaccaagttcgtctcctttgagttctctgcccgtaagttagcatgagtaacttacgggtgggtaagaagaagggggatctccccyttccttggacttggggccctgcctataaatatccagccacggagtcaggcaaagggcttgcttaagtggcagtggctcccagtttctctagtgaggaact

SEQ ID NO: 382474 - DNA, 201 bp, Homo sapiens
cagcaaatacccatgcatccattgtcccaagggtgcaggcttgtccaacaggccagcaccccctgctctgcctcacacagttagctcgctgtagtccactwggtctcctgggcaggagtccgacctctgtctgttatgcctacaacttcaaggatcacaggggcctgttgtggggtggggggaaaggggagggagagcatt

SEQ ID NO: 382475 - DNA, 201 bp, Homo sapiens
atgtggcgttggggagaggtaggaatgggctcctgcggctcccctacagccagcaacacttacctgtggtcagcacacatccaccctccctctctcctgcygcctgagctcctcccttggctaagtcctccttatctatctgctttccttgtgtctcagtagaggctactgacccaactttgcttggagctgaagctccag

SEQ ID NO: 382476 - DNA, 201 bp, Homo sapiens
gtctgtgttgcctgcactgctgccaggggctcaccagagattagccctatttatgggagaggctggggagagggccgagtcccaggctcggggagagaggkctgtcaagccaccttcctgacctgctctccctacacagaagcccttcccactggcgagtccagttgccagccaggtcaatggggcgttggccccaacgag

SEQ ID NO: 382477 - DNA, 201 bp, Homo sapiens
gtagctgacacttatgggcatttaaaatttgctaagggcttataatacattctcacttcatcctcacaataaccacatgagtagacactcatcccctcttyatagatgagtaaagtctcagagagttaaagtaacctggctgaagtcacacagccaggatggtgcagtgccagactcagacccttgggtcctaggctgtgt

SEQ ID NO: 382478 - DNA, 201 bp, Homo sapiens
cctatctgagccaaggggagcgcttcatcaaatgggatgatgtaagtggggcaggggcctcagctgctggagcaccaggtggtgggggccgggctgctacrgggctttgcttgggtgggaggattggtttatgtctcctaggatccaggcgcctgtgtggtttggccaggcagctgacaccactgcttggataaacaaacc

SEQ ID NO: 382479 - DNA, 201 bp, Homo sapiens
aggatctcaggggcaagatcctcatcaagaacaagaagaaccagttttctggccccacctcctccagtaaggataccggtggggaggctgagggcagcagyccacccagtgcccctgcaggtgagggcacaggtgagtcggggaggactatggtggggggtattaggagcatctggaacaggagaggggctggacctggag

SEQ ID NO: 382480 - DNA, 201 bp, Homo sapiens
caggtgtccccctgcccagccctgaggatctcaggggcaagatcctcatcaagaacaagaagaaccagttttctggccccacctcctccagtaaggatacyggtggggaggctgagggcagcagcccacccagtgcccctgcaggtgagggcacaggtgagtcggggaggactatggtggggggtattaggagcatctgga

SEQ ID NO: 382481 - DNA, 201 bp, Homo sapiens
aatggagcgaatctcagcccctgtccctgcttggccagtgctcttgtgtgggtcccagcctataccccatggagtattttctcctggtaagaatttggaaygttataaataaataaaaccacgacccccattgatcacctgcccacatgaatcccaggaggagcatttaccccacagccacagctctgcagagttggtgac

SEQ ID NO: 382482 - DNA, 201 bp, Homo sapiens
tcctccacaggggttgcccacatgctgctggccctgagaataacacagaccatgatggagtggcggtagggggagagctgggctgcctttgggtgatgccstcacctcttccccatcctctggctcagccggccagttctcaggcctctcctcggctgagatgtaccgccaggtgctgctctctggctgccgttgcgtgga

SEQ ID NO: 382483 - DNA, 201 bp, Homo sapiens
gggacatttgagccttgggcctgggaacctggggcagggtgagaaccaggttagggagggagacactcccagaggatgctagggttcacttggttagatgygggtctgggatcctgtcaccttccgtgtgtcaggcactgggctgggcttcagggtatgctagtgacaaagacacagtcactgccctcaggtgtattaccc

SEQ ID NO: 382484 - DNA, 201 bp, Homo sapiens
tgtggcgttggggagaggtaggaatgggctcctgcggctcccctacagccagcaacacttacctgtggtcagcacacatccaccctccctctctcctgccrcctgagctcctcccttggctaagtcctccttatctatctgctttccttgtgtctcagtagaggctactgacccaactttgcttggagctgaagctccaga

SEQ ID NO: 382485 - DNA, 201 bp, Homo sapiens
ctcacttcccaaagatgcatctgtcccctggctctccaaaaagcggatcccacctgtcacctttgatcagagtgtcctcctcagacaaaacacggaggccmacactacatgggcagagctctggaggcagccaagcctgcagggagggagctgaggccttgggattgtagcctgtccactgtggtggcactgtttcccacg

SEQ ID NO: 382486 - DNA, 201 bp, Homo sapiens
tctgcaaggccacaagacattatatttactctcaggtaacacagtccagtggtcacttttcatcacaaaatccagtccgatgtcagaaactggctataatmaaaactccaacctttatttacactgacatcttctacccttctccttctaggaatggtttcaggtaggctgcaggccccctggaaagggccttggtgggat

SEQ ID NO: 382487 - DNA, 201 bp, Homo sapiens
aacctaagagaggcgggaactctgcccacctaacagaattgctgtaattttctgaaacggctggggcagtttctcaagtagctgacacttatgggcatttmaaatttgctaagggcttataatacattctcacttcatcctcacaataaccacatgagtagacactcatcccctcttcatagatgagtaaagtctcagaga

SEQ ID NO: 382488 - DNA, 201 bp, Homo sapiens
cccattcagccacattctcacccagcccccagtctcctgtctgcaactgtcctccccacaactgccccagcctctaaccattgcctacagcttctcccacrtctcagtataatcaccctaaggcctcatgttctcctgctcgagtcccagcctccctgacctcctggcccctgatctgggtcatcaagggcacaaaaggat

SEQ ID NO: 382489 - DNA, 201 bp, Homo sapiens
ccccaaaggggaggccaagactgagggaggggacagcctgataaaactcctcccctccctttctcccctatatagaaaagaaccgaagttatgtcatctcrtccttcacagagctcaaggcatatgacctgctctccaaggcctcggtgcagtttgtggagtatccttgaggtttcagtggccagggtccttggcttgggt

SEQ ID NO: 382490 - DNA, 201 bp, Homo sapiens
atttaacaatttgagaaaccgccaaactgttttctaaagtgagagcattgtgtagggatttatttatttatttttgagacagagtctcactctgttgcccrggctggagtgcagtggcgtgatctcagttcactgcaacctctgcctcccaggttcaagcaattctcctgcctcagcctcccaagtagctgggattacaag

SEQ ID NO: 382491 - DNA, 201 bp, Homo sapiens
aaatgccttcagatttctgggatgggcacctcctgggaagataatgagctctgaaacccctggcctggaccagggaggcttggcctgaggtcttggaacaragtgctggctccttctctctgcaggaaactacagttgcctctccagttatcctccgtgtggatcctaagggctactacttatactggacgtatcaaagta

SEQ ID NO: 382492 - DNA, 201 bp, Homo sapiens
gggtggtagtaggcagtctcgctctatgagatgaggtaggggccaagatcctctttagggtctagagggagaatgtctatttgggctttagaggggaaaayccttctcttccagaaatggcatccccaatcctctgtccctcctggtgcttagctctagacaacaaaaggaaatgccttcagatttctgggatgggcacct

SEQ ID NO: 382493 - DNA, 201 bp, Homo sapiens
ctcagggacagctacaacaagcacaagatgagccgcatttactccaagggataagctggatttatctcagtgagaatggggatgataagcagtagtgagasgcaggtcaagaggagtgggggaggccgagggagcatgcctggtaataaggagctcaggctatgccatgaaggtgagaagatggtgctgacctgctctcca

SEQ ID NO: 382494 - DNA, 201 bp, Homo sapiens
cctgctcgagtcccagcctccctgacctcctggcccctgatctgggtcatcaagggcacaaaaggatgcataatagggttggtgctgagcggctgaacccyatccccgcttttgctccccgcagaccccgccagcaggctaagatggctgagtattgccggacgatctttggggatatgctgctcacagagcccctggaaa

SEQ ID NO: 382495 - DNA, 201 bp, Homo sapiens
aagctttgaggggttggagggctgaagctagagaagatgaatggctggaaggcctcagaccattggggaccagcagggattgggggccaatggcggccatscagttatatgtgtgtattgaaactaggcaggggggaaaagtgctatcacgagacaggcagtcggaacgctgaccttctgttcatggagtctccttctcct

SEQ ID NO: 382496 - DNA, 201 bp, Homo sapiens
cccacatccaggaagtagtgcaggtgatcaagcaggtgtgtaagggctgtgtccttcctaaacacacacacacacacacacacacacacacacacacacactctctctctctctctctctcttcacaagtaggaaggggtggccccaggccctgactttgcccttaggagatgcactgcctagcgctgtccatgcagctgg

SEQ ID NO: 382497 - DNA, 201 bp, Homo sapiens
tcccacatccaggaagtagtgcaggtgatcaagcaggtgtgtaagggctgtgtccttcctaaacacacacacacacacacacacacacacacacacacacwctctctctctctctctctctcttcacaagtaggaaggggtggccccaggccctgactttgcccttaggagatgcactgcctagcgctgtccatgcagctg

SEQ ID NO: 382498 - DNA, 201 bp, Homo sapiens
ctcccacatccaggaagtagtgcaggtgatcaagcaggtgtgtaagggctgtgtccttcctaaacacacacacacacacacacacacacacacacacacacactctctctctctctctctctcttcacaagtaggaaggggtggccccaggccctgactttgcccttaggagatgcactgcctagcgctgtccatgcagct

SEQ ID NO: 382499 - DNA, 201 bp, Homo sapiens
actcccacatccaggaagtagtgcaggtgatcaagcaggtgtgtaagggctgtgtccttcctaaacacacacacacacacacacacacacacacacacacwcactctctctctctctctctctcttcacaagtaggaaggggtggccccaggccctgactttgcccttaggagatgcactgcctagcgctgtccatgcagc

SEQ ID NO: 382500 - DNA, 201 bp, Homo sapiens
cgagtcccagcctccctgacctcctggcccctgatctgggtcatcaagggcacaaaaggatgcataatagggttggtgctgagcggctgaaccctatcccygcttttgctccccgcagaccccgccagcaggctaagatggctgagtattgccggacgatctttggggatatgctgctcacagagcccctggaaaagttcc

SEQ ID NO: 382501 - DNA, 201 bp, Homo sapiens
caactcccacatccaggaagtagtgcaggtgatcaagcaggtgtgtaagggctgtgtccttcctaaacacacacacacacacacacacacacacacacacwcacactctctctctctctctctctcttcacaagtaggaaggggtggccccaggccctgactttgcccttaggagatgcactgcctagcgctgtccatgca

SEQ ID NO: 382502 - DNA, 201 bp, Homo sapiens
accactcccccaccctgcctctcaccccagtctcctgggagctccgaacatggatattgggcatctcctgttcccactgtccagggagcgagggtggccakcaggcccctcctgagccaggcaggggtccttgctgtctccacagttccagaaggaggcgctggcagagtacgaggccaggatgaagggtctggaggcaga

SEQ ID NO: 382503 - DNA, 201 bp, Homo sapiens
aaaagttggaggaatttaagaaagaatgaataggatttattgtttgcaatttaaaagaattgaaaatgagttaaatatgtgttctgtccctaaaggaatakgataatgaagttgcacagttaagatagtattttggagattatatatcaaaatatgttgacatgatctctgtgattttgggtctctgtaatagtgatgggt

SEQ ID NO: 382504 - DNA, 201 bp, Homo sapiens
gcacctaataaaattagggttggttgatgaggcaagaatgtagttgaattcattcattttctgtctttcattcacacatacacatgcatctaggcacttayacactaatacacctgcaattttctctatctaatacatccttacacgctgtcattttattgctctatagctatttcatttttgtctttgtttacagctttg

SEQ ID NO: 382505 - DNA, 201 bp, Homo sapiens
ggttacagctactcaactttgcttgtgtaataaagtagccataggcaatacataagtgaatggccatggctatgtttcaataaaacttgatttaaaatagyggtagaccagacttggcccaacaggccatatttttctaacccctaatctaggattattagtagcaagttatcataccttaggttgtgttcaattatggaa

SEQ ID NO: 382506 - DNA, 201 bp, Homo sapiens
gaaatgcagtggcatgatcttggctcactgcaacctctgcctcctgggttcaggcagttctcctgtcttagtctcccaagtagctgggactacagaagccygccaccatgcctggctaattttttttatttttagtagagatgtggtttcatcatgttggccaggctggtctcgacttcctgacctcaaataatttgccca

SEQ ID NO: 382507 - DNA, 201 bp, Homo sapiens
catctcaaaaaaaaaaaaaaaaaaccaaaagaagaaaactttatagaaactgacagatagtatatattttatagagtttggaggccatgcaatcatggttrcagctactcaactttgcttgtgtaataaagtagccataggcaatacataagtgaatggccatggctatgtttcaataaaacttgatttaaaatagcggta

SEQ ID NO: 382508 - DNA, 201 bp, Homo sapiens
atgattttgaagccatttatgctgaggagaatcaagaaagatgtggaaaatgaattatctgacaaggtaagtaaagaagacctcatgtgtttaagcctcartaggcaccaacttaagattccagggggagaaatttattgatatatgtttagttgaagtttgcttgaaggaagacgtttaaacttgcatggatcaaagagg

SEQ ID NO: 382509 - DNA, 201 bp, Homo sapiens
tttttgcctaaatttacctaaaaaagaaacatatgtatctttctttgcctagtttgtttcacttaacatggtgttttcaaggttcatccgtgttgtagcasgtatcagtacttaattcctttttttttttttttttgagactgagtctcgctctgtcgtccaggctggagtgcagtggcggggtcccgactcactgcgacc

SEQ ID NO: 382510 - DNA, 201 bp, Homo sapiens
aattaaggccttaggaattattcttaccaaaatactgcagcgcttggagcggttacgcttccttcagctagagcaggaacatacgtgtcctcaggaaggaygcgctgaacgcttaagggggcagcccctgaaggtactgtagtttcagaggttaatgaagcaagaaaggggttagctcctgtaggacgagggagagtatgc

SEQ ID NO: 382511 - DNA, 201 bp, Homo sapiens
aatttttcatcttctaaggtgatagaaattggatagatttcttatccctgataataccacagggtctgggcctatgtcacagtactgtacaaggacattartcaagttgcaggagaaagatgtggtcaaggatgacagtttggctgaacagattgaggaatgatgtggtttagagtccaggaagaaccagcttctggtatg

SEQ ID NO: 382512 - DNA, 201 bp, Homo sapiens
ttatgaaattttccttttaaagactttttgactaaaagtctgtattttctgatatatattgtttttctttaatttttttctgaatacagaatgtgagggcrtctttgcttaatttttacatggctttttttcttccttttatttgtaatcattttacatcatttatggtgcatttctctttttgagacggagtctatctgt

SEQ ID NO: 382513 - DNA, 201 bp, Homo sapiens
taccgtgttttcagtagagaggactcatttcccttggaagtgtcctgttttcagctttgttgaataatgtttttcagttgaatacatgatggagtacttgmttctgaatgttagttttttggaaggcatttttgtcaatatggggtctcagtaggataattaaagaacaatttattgctaacatgaatttgtaacttattt

SEQ ID NO: 382514 - DNA, 201 bp, Homo sapiens
ttaaagaatttgaataggaagcgttgtggttatatgatcttgcaagtttgggaatatttttgttgtgatttgttagtagaaataacaggtattgtaatcasagttcagtagaactgaactgtgtttcagcagaggaaaacatctctcacataatacgattcttgtttatttaagcacaagaaagcagctgttcagttgtct

SEQ ID NO: 382515 - DNA, 201 bp, Homo sapiens
ggagaagcacatcttcagggctgtcttaaacattttggccctagaaaaacagtccatacatcagttccttattatgaattattaggtttctcttttcaccyttccccttttatatttacagaagaccctctacactcaggatgcccccttccatgtggttattaccagctatcagctggtggtgcaggatgtaaagtattt

SEQ ID NO: 382516 - DNA, 201 bp, Homo sapiens
aaagataatagaagagtttataaagccagaaatgatacaactctgcctatttgaggctatttttttctaaatccaaataccgtgttttcagtagagaggastcatttcccttggaagtgtcctgttttcagctttgttgaataatgtttttcagttgaatacatgatggagtacttgattctgaatgttagttttttggaa

SEQ ID NO: 382517 - DNA, 201 bp, Homo sapiens
gggtttacaggtgcatgccactacactcagctaatttttaaatttttttgtagagacaaggtctcgccatgttactcaggctggtcttgaactcttgggcwcaagctctcctcctgcctcacctcccaaagtgctgggattacaagcttcagccactgctcctggccaaaagtattttttagcattcttttttctttatat

SEQ ID NO: 382518 - DNA, 201 bp, Homo sapiens
gatgaggctcaggcgctcaagagtagttccaggtaacatgagtagtagaaaccaaactcaatgcattgggttaagtacacacacacacacacacacacacrcacacacacacacacacagacttgtatatatgaataaaatcaagatatgagaagttttatttaatttttttaatagagacaaggtctcgctttgctgccc

SEQ ID NO: 382519 - DNA, 201 bp, Homo sapiens
tggatgaggctcaggcgctcaagagtagttccaggtaacatgagtagtagaaaccaaactcaatgcattgggttaagtacacacacacacacacacacacrcgcacacacacacacacacagacttgtatatatgaataaaatcaagatatgagaagttttatttaatttttttaatagagacaaggtctcgctttgctgc

SEQ ID NO: 382520 - DNA, 201 bp, Homo sapiens
atacctccttaattagtgtcattttccttatcaggtaaaataactagagcatggattaattgttctgtaataaaagcttgggatggagccaagcagagtasttttacatttatacatgtatcaagatgaattatttgctgttctcttaagggagttttgttgtattttaaaaaccaatttctttgaaatcttctggagtgg

SEQ ID NO: 382521 - DNA, 201 bp, Homo sapiens
tagctggcggtgatgagcagaagttgctagacttgtcatctctcctccccagtgagggagcaagatgggctactgctgatgtcagaaatgcactttcaggraacaaacaaaaaacgtggctacatctttttacctttttcctcctaattattcagtattggaagaacagtctgacacctagcctgctaatctttgtaacga

SEQ ID NO: 382522 - DNA, 201 bp, Homo sapiens
actggatgaggctcaggcgctcaagagtagttccaggtaacatgagtagtagaaaccaaactcaatgcattgggttaagtacacacacacacacacacacrcacgcacacacacacacacacagacttgtatatatgaataaaatcaagatatgagaagttttatttaatttttttaatagagacaaggtctcgctttgct

SEQ ID NO: 382523 - DNA, 201 bp, Homo sapiens
cagcctactttactgttttaacttgcagccagtactgttggtaaacctgatgccagctgatgtaggctgtgtatattgctgagggaagcaagaggagagartaagaaggcaaatcattgtattgccattgataaaccagctgagatgaatggaaggagagttgagatttgaagaaagaagggaattagtggtttggatgat

SEQ ID NO: 382524 - DNA, 201 bp, Homo sapiens
ggtgatgagcagaagttgctagacttgtcatctctcctccccagtgagggagcaagatgggctactgctgatgtcagaaatgcactttcaggaaacaaacmaaaaacgtggctacatctttttacctttttcctcctaattattcagtattggaagaacagtctgacacctagcctgctaatctttgtaacgatactcatg

SEQ ID NO: 382525 - DNA, 201 bp, Homo sapiens
attcctacactggtggagcaaacagaaagtccaaccacattgactgcattgagactattttaaaactctcttgcctttcattggtcctgacgaaactacartttcttctgaatagaaaataaaatcaggtcccatgcaatagcaattttgacttccctggccatgcctcattccctttcccctagaatggtttccatagcc

SEQ ID NO: 382526 - DNA, 201 bp, Homo sapiens
attctgtctcaaaaaaaaaaaaaaaattaaaaattaaaaattagccaagcatggtggtgggtgcctgtagtcccagctactcagtagtctgaggcaggagratcccttgaacccaggatgtcaaggctgcagtgaaccctgagtgcaccactgtactccagcctcagtgacagagcgagaccctgcctcaaaaaaaaaaaa

SEQ ID NO: 382527 - DNA, 201 bp, Homo sapiens
gcagtgagccaagatcgtgccattgcactccagcctggacaacaagagcaagattccatctcaaaaaaaaaaaaaaaaaaaaaaaaagcattgtggagtaraaggcaaaatttgtgtgtattttaaaggtaaatgtggcttcaaataatgtagcttgcacaaggaaggcagctgactccttagcagtagtgaatttgctct

SEQ ID NO: 382528 - DNA, 201 bp, Homo sapiens
gctggcggatcacgaggtcaggagatcgagaccatcctggctaacacagtgaaaccccgtctctctaaaaatgcaaaaaatgagccgggcatggtggcggrcgcctgtagtccctcccagctactcgggaggctgaggcaggagaatggcgtgaactcgggaggcggagcttgcagtgagtcaagatcttgccactgcact

SEQ ID NO: 382529 - DNA, 201 bp, Homo sapiens
aaccaaactcaatgcattgggttaagtacacacacacacacacacacacacgcacacacacacacacacagacttgtatatatgaataaaatcaagatatragaagttttatttaatttttttaatagagacaaggtctcgctttgctgcccaggctagtcttgaactcctggcttcaagcgatcctctcgcatcggcctc

SEQ ID NO: 382530 - DNA, 201 bp, Homo sapiens
accgagccagcccataatgcttaaaataagagtgtgatttaaacccaaaattgagaatccaagttagaaaaccactggttatctgccttaaacagatagamgtgatacttggaaaataaacatcaggggatatggccaccttaattaagagagtgaggattatgattaccacaggtacttcatcaggtcttaattcatttt

SEQ ID NO: 382531 - DNA, 201 bp, Homo sapiens
gctgcagcggcctctgcagctgcctatgccgcatacgggtacaacgtgtctaaaggtacagaagcccagggtggctgcagactttgttctggtcagagacmgtctagaaattctgtcagtcaggtagaacatgtaggaaaccctgaagccgggagctttcttcctagagccccaattggggttcttcttctttgtaataag

SEQ ID NO: 382532 - DNA, 201 bp, Homo sapiens
aaggagaaaaacaaatgaggacaggttggtttctcagaagccaaagcagcctcaactgtgaagcatgttcctagctgggtgcaaggccatgggcggtgagyacagggggtcgtaatgatcttaacccttcctcttctagatctccatcagcagtgagctgcacactggctccattcccctggacgagagcagcagtgacat

SEQ ID NO: 382533 - DNA, 201 bp, Homo sapiens
catgccatatcacactgttggataaactgttccctcagcctaagtcatcctcccatgagtctcctcttccacctggtgaacttctgtttgttctttaaaamcccattcaggtgtcaatattcctttcccagcccctccctttattcaagttaatcaaaatacattgtaagtaattattttacatactagactttggcctca

SEQ ID NO: 382534 - DNA, 201 bp, Homo sapiens
tcttaatattttaaatagaattttgtgaagagcactaacttctaggggtttagggaaagtgggcaggataggtaatctgtttgatcattcattgatcttaytgcacttagttatttttgccctgcatttgatctgagaactagaggtgacacgttccttgggtagtaaggaacaccagagagaagtgaatctatagaaact

SEQ ID NO: 382535 - DNA, 201 bp, Homo sapiens
ctgagattctagcttttggcttttcatctcgagactatgagcccagagtctttatgtataattccaatataagttctgcttttttacaaaataaataaatwaataaaaatttttaaatcaaaacggttatctgtgagtataaaaattggtctgtatgaggtttttttgttgtttttttttgtttctttttttcgttttgtt

SEQ ID NO: 382536 - DNA, 201 bp, Homo sapiens
tggcggtgatgagcagaagttgctagacttgtcatctctcctccccagtgagggagcaagatgggctactgctgatgtcagaaatgcactttcaggaaacmaacaaaaaacgtggctacatctttttacctttttcctcctaattattcagtattggaagaacagtctgacacctagcctgctaatctttgtaacgatact

SEQ ID NO: 382537 - DNA, 201 bp, Homo sapiens
gatcttggctcactgcaacctctgcctcctccgggttcaagcagttcttctgcctcaagctcccgtgtaactgggactacaggagcctgccaccatgcccrgtgaatttctttattcttagtagaggctgagtttccccacgttggccaggctggtctcaaattcctgagctcaagcgatccttctaccttggcttctcaa

SEQ ID NO: 382538 - DNA, 201 bp, Homo sapiens
tatgaacattcctgtgcaagtttttgtttgaacacttttactgttttcacttcttttgggtatgtacctatgagtagaattgctaggtcatatggtaattytacttattaaggaatcttccacctgttttttttgttttttgttttttgttttatgacacagagtcttgctctgtcgcccaggctggagtgcagtggcgtg

SEQ ID NO: 382539 - DNA, 201 bp, Homo sapiens
gtggcatcttattggtgctcaaaacctttgagattttggagtattttgggtttttagaatagggatgctcaacctgttataacgtactgaggggaaacagsaagtacaaaaatttatcagatgaagtccttgcactcattgggtcacataatcaggaatattaattccataagttccataatttatattaattccataact

SEQ ID NO: 382540 - DNA, 201 bp, Homo sapiens
ctgggttcaagcgattttcctgcctcagcctcccgaatagttgcgactacaggtgtgtgccaccactcctggctaatttttttttttttttttttttttgkatttttggtagagacggtgtttcaccatgttggccagggtggtctctatctcctgagctcgtgatccacctgctttggccttgcaaagtgctaggattcc

SEQ ID NO: 382541 - DNA, 201 bp, Homo sapiens
atcagtggcatgcaagcagagcattgtcttctcaacttgtatagtaaaacagtggttttcagactgatgggatgtgttagaggaccagtagatattaagcrgagatggccactctttatcagtcaggatagcgatgcttttatctattttatatattagaggggttccgtgtaagaatttgcttgaagaaagtgttccgat

SEQ ID NO: 382542 - DNA, 201 bp, Homo sapiens
atcactactaaaaatacaaaaattaaaggcgtggtggtgcgcacctgtaggcccacctactcaggaggctgaggtgggagaatcgcttgaacctgggaagrcagaggttacagtgagccgagatcgcaccactgcactccagcctgggtgacagagaaagactctgtcccaaaaataaaaataaatgaatgtgttctaatt

SEQ ID NO: 382543 - DNA, 201 bp, Homo sapiens
agttttgttttttgttttttgagatagaattgtcttgctctgttgcccaggctggagtgcaatggcgtgatttcggctcactgcaacctctggctcccagkttcaggcaattctcctgcctcagcctcccaaggagctgagactacaggagcctgccaccacgcctggctaatttttgtatttttagtagagatgaggctt

SEQ ID NO: 382544 - DNA, 201 bp, Homo sapiens
gataatgggcataaacatgtagagagataatgaacttcaacggagatgctacccaaaatcaagatgggaacacagatgttattgaaaagctgtcagaatgytaaaattcttctttgggtaatgacagggacctcaacatttagagaaaaggccaaacatatcatagctacatgggcctagcagtatatcaaatgttgtaaa

SEQ ID NO: 382545 - DNA, 201 bp, Homo sapiens
tgttagtttctctctgccctttattaatcatgccactcctttgattaaaactcttcaggaattcttcatcaattataaaataaagtataaggctcttcatytgtgtcctttatctacctttatagcttaattatcagaccactttcccttccaaattttatattccagaaataatgattgacttctagttccctgaacaca

SEQ ID NO: 382546 - DNA, 201 bp, Homo sapiens
agcatttaaataatgacgattatgggattttttttctcagcacaaataacagtgataattctgggatttaaatgagttaatgcacttagaacaatgcactrtaagtgttaaccgttaatgttattaatgtactaaacactacgttttaactattaatattattgccactctttttaagtgaaaactgaaaaaaataaaaca

SEQ ID NO: 382547 - DNA, 201 bp, Homo sapiens
ttttacaaaataaataaataaataaaaatttttaaatcaaaacggttatctgtgagtataaaaattggtctgtatgaggtttttttgttgtttttttttgkttctttttttcgttttgtttttttttttttttttttttgagacagagtctcactctgtcacccaggctggagtgcagtggtgcaatctcagctcactgta

SEQ ID NO: 382548 - DNA, 201 bp, Homo sapiens
gttctgttatccttttcttcccaaatcccgcttttcttttggggtgcatcctcacacgttttccatatttatccgtgtgttcccagaagaaaaaagaagatgaattggatgggaaaaggagaaaagagggtgtgaacctggtgatcccatttgttccctcggctgataactccaacctctctgctgacggagatgactcct

SEQ ID NO: 382549 - DNA, 201 bp, Homo sapiens
agttctgcttttttacaaaataaataaataaataaaaatttttaaatcaaaacggttatctgtgagtataaaaattggtctgtatgaggtttttttgttgkttttttttgtttctttttttcgttttgtttttttttttttttttttttgagacagagtctcactctgtcacccaggctggagtgcagtggtgcaatctca

SEQ ID NO: 382550 - DNA, 201 bp, Homo sapiens
aaccagcttctggtatggggtcctttccgctgtaatgctgttgttgttttcagcttgctcaccagtgcatgaaggaggtgcgtcgagctgccttgcaggcmcagaagaactgtaaggaaaccttgcctcgtgcccgccgcctcaccaaggagatgcttctgtactggaagaaatatgagaaagtagagaaggagcaccgca

SEQ ID NO: 382551 - DNA, 201 bp, Homo sapiens
gaaaccatatctctgctaaatatacaaaaattagccgtatgtgctggcgcatgcctgtggtcccagctactcgggaggctgaggcaggagaatcacttgamcccaggaggcggaggttgcagtgagccaagattgcaccactgcactccagcctaagtctatttctagtacctggaacagtttgttcatttgttcattcat

SEQ ID NO: 382552 - DNA, 201 bp, Homo sapiens
attttctagttagcagttccaagcaaagaagttatcattttccttctgtcggacaaataatctggatgagccaatcagatgaactgaaatgaaaagggagwaaagaagaaataggaaaccagaggcctcccctgaggagtgggttgagaacgatgtgtatctttttctggatatttgccataagggaatggatgcctggag

SEQ ID NO: 382553 - DNA, 201 bp, Homo sapiens
gggattacaggtgtgagccactgcacctcgcctgaataagtgtcttacacattcattcgacaaatatttcactaatgcctactatgtgtctgatactgttygagacatttagggtacatcagggaaaacagactggaaaaacaatcagtccatccagatttgttttaggagctataattgaacacatcagaaaggattgtt

SEQ ID NO: 382554 - DNA, 201 bp, Homo sapiens
aattgcccaccacttctcctccagctcagactctggtaaccaaggccacaggctccaaggaagcttacgcgggactggtgcttacgttcttgtctctctcygtccccacaggaatctccgccagcagtcctctgcagacatcccttgttcggcctgctggccttgctgactttggaccttcaagcgcctcttctcctttga

SEQ ID NO: 382555 - DNA, 201 bp, Homo sapiens
gtatatagcccctatttgtaagtgattacatctgaactaatctctggctgtacagactatggaaattacccatctttttctttctcttttcttttctttcytttttttttttttttttttttttgagacagggtgccactctgtcacccaggctctggagtgcagtagaacacagtagagcaattagaactcactgcatcc

SEQ ID NO: 382556 - DNA, 201 bp, Homo sapiens
cttgctttctatatttttttataccctataggtagttgttttttttgccttcctgtttggcatgtatgtatagtttgtatgtatatgatatttatgtattrtttatacttttgtaagtattcagaggaatttttagccttgttgctgataacatgtcccatgttttattgcattttagtttgtattccctaagtttaatta

SEQ ID NO: 382557 - DNA, 201 bp, Homo sapiens
tcttctgtatatagcccctatttgtaagtgattacatctgaactaatctctggctgtacagactatggaaattacccatctttttctttctcttttctttkctttcttttttttttttttttttttttttgagacagggtgccactctgtcacccaggctctggagtgcagtagaacacagtagagcaattagaactcact

SEQ ID NO: 382558 - DNA, 201 bp, Homo sapiens
ctggcatattttacttaacagaatcaggtttattcatgttgatttccttctttttaaggctgaataatattcgtgtgtgtgtgtgtgtgtgtgtgtgtgtgtatgtatatatatcacatattctttatccattcacctgttttgtttgtttattttgagacaatcaccctgttgcccaggctgcagtgctgtggcatgatc

SEQ ID NO: 382559 - DNA, 201 bp, Homo sapiens
tctggcatattttacttaacagaatcaggtttattcatgttgatttccttctttttaaggctgaataatattcgtgtgtgtgtgtgtgtgtgtgtgtgtgtgtatgtatatatatcacatattctttatccattcacctgttttgtttgtttattttgagacaatcaccctgttgcccaggctgcagtgctgtggcatgat

SEQ ID NO: 382560 - DNA, 201 bp, Homo sapiens
caggctacagaaatcttacgaacttagcttgcccaccctcactcaagggctgaaaaatatgtggtctttttttttttcaccttgtgcttttaatgagaacrgaaagaagtatgtctaaagctgattggtagctctgtggtgaatgtttaggagctatcaaaattgagagaccttagggaattcaattactggagaagggta

SEQ ID NO: 382561 - DNA, 201 bp, Homo sapiens
cattgttccaaaataacttgcatataatcactataaaacttactgctgggaacaatgagtgcatattgcatttagcctgataaatggatactcgtggtcaractgccacggtagaaaacatctaccttatttggtttaacatagatttttgacaaatcataccatcagtacacatcctatcatttacggcatttctctttt

SEQ ID NO: 382562 - DNA, 201 bp, Homo sapiens
ctggcatggtggtgcatgcctgtgatcccagctacttgggaggctgaggcaggagaatcatttgaatctgggaggcggagattgcggtgagctaagatggygccattgcactgtagcctgggcaacaagagcaaaactctatctcaaaaaaaaaaaaaaaaaaaaaaaggaaatgagtacaagatcatgttttagatttca

SEQ ID NO: 382563 - DNA, 201 bp, Homo sapiens
aaaatactctgccaatacatctattcccttgtaaataagataccttacatatatgtatgaatatgaattcaaaatgaagagggcagcacctattttgaagrtgatgctgagaacgagtgctcctctagtactttcctttctgaggtgcacaacagtgagcttggggtgtagatttggatagttgtttattcatagttttgg

SEQ ID NO: 382564 - DNA, 201 bp, Homo sapiens; identical to SEQ ID NO: 83174

SEQ ID NO: 382565 - DNA, 201 bp, Homo sapiens
tctgggaaacagtaggagggttaagccatggactctggaaccaatctgcttgagtttcagtcctaggtctgccacctactgcctgtgtcactttagggacyttaacatctgtaagataggagggacaataataacacctacccttactatatacccatgaaaattaaaaatctaaaaaaaaaaaatttaaaaaggaggtga

SEQ ID NO: 382566 - DNA, 201 bp, Homo sapiens
gaagtgtttatcaaccacctggtttgatgtaaacatatctccttgttgattgttagaccacatagttaatagagtgaaagtagttacatttgctctttatrtaattatcacagatatgactgacttaaatatctacagtttgaaaagcaggatccagttagtgtacagttcaactcatgcttatttgcagatggtttgtct

SEQ ID NO: 382567 - DNA, 201 bp, Homo sapiens
tgggtgagcatgtagcctccttactaagtatttgagaaaatagggacatttggatccccacttggaattctttataatggaggtgcccccccaacccccamgctttttgcataaaggataatgtttaacatttaaagaagtgtttatcaaccacctggtttgatgtaaacatatctccttgttgattgttagaccacatag

SEQ ID NO: 382568 - DNA, 201 bp, Homo sapiens
tattctgctgggcatggtgtctcaagcctgtagtcccagttactcaggaggcaagaggatcacttgagtccctagtgagctatgattgtgccagcgcactyaagcctgggtggagagcgagaccctgtctctaaaaacaaaacaaaactaattataagctgtggtgttagaggttcacttaatgaaagtttgttggccggg

SEQ ID NO: 382569 - DNA, 201 bp, Homo sapiens
ataagttctgcttttttacaaaataaataaataaataaaaatttttaaatcaaaacggttatctgtgagtataaaaattggtctgtatgaggtttttttgktgtttttttttgtttctttttttcgttttgtttttttttttttttttttttgagacagagtctcactctgtcacccaggctggagtgcagtggtgcaatc

SEQ ID NO: 382570 - DNA, 201 bp, Homo sapiens
gtttctcttcttctcagcttgcctatctcaggtttagtctatggtttcttaaggaatagtttctccggttgttcatttaaatggttaaagaaaaaaaaaaactaagcagatttaaagagagatctgcaccttgcttccaaggttcacatagtttgccctgtaggagtaaagagcgtcctgccagccacaaagaagcaaagt

SEQ ID NO: 382571 - DNA, 201 bp, Homo sapiens
gaggagaaagcaaactcatgagggtagtggagaaatgaggtgcaagagtgtagaggcttgaatagattcacagcagcagggggaatctctctctctctctstctcactaatctgatactacacattctgtaatagcaactataggatgcaccttccttggcatctaaactttcagttaaccaggtacggcaagacgtcagc

SEQ ID NO: 382572 - DNA, 201 bp, Homo sapiens
taaattctgtagccatcaaccactatttaattcatcaccctaaaagagaatctctagaagccatttagcagtcactccccattccccctccctccagtctyaggtaactattaatatattttttgcctaaatttacctaaaaaagaaacatatgtatctttctttgcctagtttgtttcacttaacatggtgttttcaagg

SEQ ID NO: 382573 - DNA, 201 bp, Homo sapiens
aatcttttttctttctttaattaatttcttaatgccatctaaagcaccaaactgagcccttatttgtgtgtgtgtgtgtgtgtgtgtgtgtgtgtgtgtgkagataaatcttagagtcaaaagcctgttctgccgggcacagtggctcacgcctggaatcccagcactttgggaggctgaggcacgtgcatcacctgaggt

SEQ ID NO: 382574 - DNA, 201 bp, Homo sapiens; identical to SEQ ID NO: 83175

SEQ ID NO: 382575 - DNA, 201 bp, Homo sapiens
attccaatataagttctgcttttttacaaaataaataaataaataaaaatttttaaatcaaaacggttatctgtgagtataaaaattggtctgtatgaggkttttttgttgtttttttttgtttctttttttcgttttgtttttttttttttttttttttgagacagagtctcactctgtcacccaggctggagtgcagtg

SEQ ID NO: 382576 - DNA, 201 bp, Homo sapiens
ctggccagaaatttcttatctttttgcttctaatactttattttgttgtacttctcaaatgccttgtcttttcccaccagtcccccatactcccaccctgkacccattccctgacgcctaccccatgctcatattttgggtctcctcaagaattaacaaaaaaaagtcctagccattggatgaccccatcaactctcacgc

SEQ ID NO: 382577 - DNA, 201 bp, Homo sapiens
caagtagctgggattacaggcaggtgccactacacccagctaatttttggattttggcctcaagggattcccctgcctcagcctcccagagtgttaggatyaggtgtgagccatcacacctggccaaggaatttgtggccatataaaactaccacagccccttatttccatgctgatcccattatatcagatatttcatta

SEQ ID NO: 382578 - DNA, 201 bp, Homo sapiens
tgggattacaggcgtgagccaccacacccagcccaactatactttttaataggatgaaaaactcttgtgaatactggcaggctgtataattaacagaaagmtatttctctgccacaaagaatgttttaaaatgtccagaacaactaacactaagcttaacattattttatttaattaattaatttttttggagatggagtc

SEQ ID NO: 382579 - DNA, 201 bp, Homo sapiens
gggttttaccaggatgctctttgttttgctgagagactgatttagaacgagtattagttttgcctatatggtaggcccttatttataaaatcttgataagrtttaattaaggaaattagttatctttataggctctgtgatttgtagctatgagaggaaaaagtagaaaatagtattattgactttccatctttattttat

SEQ ID NO: 382580 - DNA, 201 bp, Homo sapiens
ttgacagataatcacagcctccacattttaacaaaagctagccttgtcatcttcaagttccttaccagttgacttcacaggtatctgcatactgcctattagagtaggaataaacccagatagccaaagaaggataaaatctgtgtttctgaattggcaggagccctctactccatcgagtgagcagcagctgagtgttgt

SEQ ID NO: 382581 - DNA, 201 bp, Homo sapiens
gtctggcatattttacttaacagaatcaggtttattcatgttgatttccttctttttaaggctgaataatattcgtgtgtgtgtgtgtgtgtgtgtgtgtgtgtatgtatatatatcacatattctttatccattcacctgttttgtttgtttattttgagacaatcaccctgttgcccaggctgcagtgctgtggcatga

SEQ ID NO: 382582 - DNA, 201 bp, Homo sapiens
ctgtattccaggagattagtactgaaatagaatttaatttatgagcatggaattacaatgcccaaagtgtttaccatatatttaatcattgattgaaatayaaacatattgtacgacttgagatggtgcagcactaggtctgcgtttttttatctttgaaagagtgtttttcagtcactttcataatagaaactctgagta

SEQ ID NO: 382583 - DNA, 201 bp, Homo sapiens
tgtcagcgtgggcttgacagataatcacagcctccacattttaacaaaagctagccttgtcatcttcaagttccttaccagttgacttcacaggtatctgmatactgcctattagagtaggaataaacccagatagccaaagaaggataaaatctgtgtttctgaattggcaggagccctctactccatcgagtgagcagc

SEQ ID NO: 382584 - DNA, 201 bp, Homo sapiens
gctctttttaggtaaagtgcactttccttgtcctcaagaggcagggaaagtatagctaaagtagtgatcttcagctgctaacaattaaagaaaaagcagtrtgctaaggatactggtaagggacataatggtatttcttttccaagactatagtcttacatgttgattcatatgaaaggaaagttccaagggaatgtgaat

SEQ ID NO: 382585 - DNA, 201 bp, Homo sapiens
aaagcacatgcagtgagtggaaatatattgtttgaaaatcagtgggggaacctaagtgtaaagcaagctggtaaggaaactacagaatcccaggcaagagrtgagcaccgttattgaaagaagcaagatagcaccttacttcttttttctcccttcttggttctggctcctaagttcccattacaggagtagatggcttat

SEQ ID NO: 382586 - DNA, 201 bp, Homo sapiens
gaggttgacatttcttacccttttatgtttttctcttgtttctccactcatcttagcaagtgtactgtttttacaggtttgttggttttttttgtttttgktttttttaatgcttttgagacagggtttcactctgttacccagcctggagtgcagtggcattatttcagctcactgcaacctcaacctcctgggctcaag

SEQ ID NO: 382587 - DNA, 201 bp, Homo sapiens
ctctaagaggttgacatttcttacccttttatgtttttctcttgtttctccactcatcttagcaagtgtactgtttttacaggtttgttggttttttttgkttttgttttttttaatgcttttgagacagggtttcactctgttacccagcctggagtgcagtggcattatttcagctcactgcaacctcaacctcctggg

SEQ ID NO: 382588 - DNA, 201 bp, Homo sapiens
ttgtcgcttcaattaaatacagttccccctcacccccttttcttctccccaggcaaggagagcctcatcactgacagtggaaagctgtatgcccttgatgkcctgctgactcggctcaagtctcaagggcatagggtccttatctactcccagatgaccaggatgatagacctactggaggtaggagagggaatcttgggg

SEQ ID NO: 382589 - DNA, 201 bp, Homo sapiens
tgatggttggcagacacagagtacagtaccagtattgattctgtctcctgtctgtctcattgaaactgttgtcatggtaatggtctacttatgcatagtaygtgctgaaagttttttttgtttgtttttttgttgttgttgttgagacggagtctctgtcacccaggctggagtgcaatggtgtggtcttggctcactgca

SEQ ID NO: 382590 - DNA, 201 bp, Homo sapiens
tcttgggctcaagcagtcctcccgcctcagcctccagtgtagctgggactgcaggtacatgctaccatgcctggcaaatttttttattttttgtagaaacraggttttgccatgttgcccagtctggtctcaaactcctgagatcaagcagtccacctgaaaggcacttttaatttagccttctgacattaaaaaaaaaaa

SEQ ID NO: 382591 - DNA, 201 bp, Homo sapiens
gctaattttcgtatttttagtagagagacggggttttgccatattggctagactgatctcaaactcctgatctcaagtaaccggcctgacctcaagtaacyggcctgcctcggcctcccaaagttctgggattacagtcgtgagccaccgtgcctggctaaaaccaatttaaatgtttggacattttatataattcatctt

SEQ ID NO: 382592 - DNA, 201 bp, Homo sapiens
gtagctgggactacaggtgcgcgccgtcacacccagctaatttttgtatttttggaagagacgaggtttcgccatgttggtcaggctggtcttgaactccygacctcaagtgagctgctcacctcagctttccaaagtgctggaattataggtgtgagccaccatgcccaacctgttttaatgttttgaggatattacctt

SEQ ID NO: 382593 - DNA, 201 bp, Homo sapiens
ttaaagttgtattcctcggggtcaagtgttggtagccaatgtgaagccatgagaagtagtattctggtagcaggttcagtaaggctgctaaattaccagartcattatatcaaaccagttgggatctttgttatttgtattttatgaagattaacctcagagtgtgatatcaggaagaatggaggcagcaatccatgttaa

SEQ ID NO: 382594 - DNA, 201 bp, Homo sapiens
ttaaaagtgaaacagtttcaaaactaaaaggttttacttgctatggaacctctagtctagttaactttccattatttatgtttgggtttggctttattttwtttacttactttgcaggtggttaagggttctttctccatttgcaccagactatatccaacggtctctctttcacagaaaaggtaggtgttttgatctttg

SEQ ID NO: 382595 - DNA, 201 bp, Homo sapiens
ctcctgggtttcagcgattctcccacttctgcctcccaagtagctgagtagctgggactacaggtgcgcgccgtcacacccagctaatttttgtatttttrgaagagacgaggtttcgccatgttggtcaggctggtcttgaactcccgacctcaagtgagctgctcacctcagctttccaaagtgctggaattataggtg

SEQ ID NO: 382596 - DNA, 201 bp, Homo sapiens
catctctggattacttataatacctcatatgatgtaaatgctatgtaaatacttgttatcctatattgtttagagaataatgaccaaaaaaagtttgtacrtattcagtacagctgctgcaaccattcttttttttttttcctgaatatttttgatcctcggttgaatctatgatgtggaacccacagataggaagggtag

SEQ ID NO: 382597 - DNA, 201 bp, Homo sapiens
gtaacctgttgatcatgaatctaatagttcgtaagagagtttctgaatgttctcaagctgtttattttttatttttattttttgagacagagtctcagccrcccaggctggagtgcagtggcagtgatcttggctcactgcaaccaccgtctcccaggttcaagcgattctcccatctcagcctcccgagtagctgggatt

SEQ ID NO: 382598 - DNA, 201 bp, Homo sapiens
gtctgtattgatgtgcctcttctggaatttttgtttttgttttctttttaggagacaggctcttgctctgtttcctaggttggagtgcagtggtgcagccwtagctcactgcacccttgaactcctggggtcaagcaatccttcctcctctgtctcccaagtagctgggactataggcacatgtctttttctgtagagaag

SEQ ID NO: 382599 - DNA, 201 bp, Homo sapiens
aatatattggggaaacataaataaagtaacttacacagtatgtactttaaaatgcaaatgcatgggcatgaacccataataagtgacataagacatagtcrtatcttctttttttgagatggagtcttgctttgttgcccaggctggagttcagtggcacagtcttggctcactgcaacctccacctcccaggttcaagcg

SEQ ID NO: 382600 - DNA, 201 bp, Homo sapiens
ggtcttgttctgttgcccaggctggagtgcagtggactcatcttggttcacttcagcgttgatctcccaggctcaagcagtcctcgcacctcagcctcctkagtacctggggctataagtgtgtgccaccacactgagctaattctgtttatttaatttttttttgttttttgagacggagtttcgctcttgtcacccagg

SEQ ID NO: 382601 - DNA, 201 bp, Homo sapiens
gcagacaggatttcgctatgttgcccaggctggtctcaaactccagagctcaagtgattagcttcccaaagtgctggcattacaggcatgagtcactgcgrttggccaaagttttctatttttatagagaggtgggtctccctatgttacccaggctggtgttgaactcctgggctcaagcagtcctcctgcctcagcctc

SEQ ID NO: 382602 - DNA, 201 bp, Homo sapiens
aattttttattgaaagggataaaggaagtgggtatacattttaagatactgttttgaaaaagtatagtatgaattttcattgtgaaatgtaactgtgttgytgtatttttatattctttatatccttttaacttctgcctttgctttaggaggcagtgtctaacaagagctttatcatgatctttctgcagactcctgtct

SEQ ID NO: 382603 - DNA, 201 bp, Homo sapiens
tttttgttcttaagtcaaaactcagcagttgagcaggctttaactgagcatcgtctcttggtttgctgttgggtttcaaattgtcttttatatttcaggtrttaatgaagaaagctgtttctctttccttcgctttattgatatatctccagcagaaatggcaaaccttatgcttcagggacttttggccaggtgagaggt

SEQ ID NO: 382604 - DNA, 201 bp, Homo sapiens
atttgaagacctaagaattttctagcaattagttaaggtccaaagttagttcagagagattggaataatattctgaaccttataaacctgtagaagtggtwaacagagtatctgacccttttgatgtaaaaagttccttccttcttaaactccagcagtaaggtacttggcgctccaagtatttgcttgttttttatgttt

SEQ ID NO: 382605 - DNA, 201 bp, Homo sapiens
aggattacaggcgtgaatcaccgagcctggcctgctacctgtttttgaatggctgtaaactaagaatagtttttactttttaaaattattgataaaaaaayaaactttcatagaatgtgacatacaaagttgaaagtcatacgtattggaacacagccccacactgcactctttttctaccttttttttgagacagtgtct

SEQ ID NO: 382606 - DNA, 201 bp, Homo sapiens
tcctcaccccattgtgctctgtagactagctgggacagggcgggggttgggggtgtctcactggaaccctttatcatctctctttcctttatacttttacrttttctctttccctgagaagggttgcttccatattccttgagagactgaccaaaatcttctgggtttcacaccttttcttctccatgtttcaccagaaag

SEQ ID NO: 382607 - DNA, 201 bp, Homo sapiens
ggggtttcaccatgttggccaggccagtctcgaactcctgacctcaggtgattcacccacctcggcctcccaaactgctgggattacaggtgtgagccacygcgctttagtcttactagagaagactaaatatgctttacttatctaagagtatgcatgctgttcaagacatatagaactggtcatatttctatagtctag

SEQ ID NO: 382608 - DNA, 201 bp, Homo sapiens
gatttgagctgtgcccttgaagtgacacaggccttggagagcaggggtggccattgccagcgcaaggagaactgtatgaatatagacacaggatagagagygggcagccttgtaccctctggcccgacttactggagagtagcaggagcatgaaattgaaaaggaaacatcttatcaaacttgatgttccaagaaagaaga

SEQ ID NO: 382609 - DNA, 201 bp, Homo sapiens
catctcagctcactgcaagctctgcctcccaggttcacgccattctcctgcctcagcctcccgagaagctgggactacaggcgcctgccaccacgcccggmtaatttttttgtatttttttttttagtagagatagggtttctactctagcgttagccaggatggtcttgatctcctgacctcgtgatcctcccgccttgg

SEQ ID NO: 382610 - DNA, 201 bp, Homo sapiens
gttgttagcaaggagtggcagggaggaattgcccaccacttctcctccagctcagactctggtaaccaaggccacaggctccaaggaagcttacgcgggaytggtgcttacgttcttgtctctctccgtccccacaggaatctccgccagcagtcctctgcagacatcccttgttcggcctgctggccttgctgactttgg

SEQ ID NO: 382611 - DNA, 201 bp, Homo sapiens
ttttatttattttttatttttttgagactgagtcttgctctgtcgaccaggctggagtgcagtggcgcgatctcagctcactgcaacctccgcctgccggrttcaagcgactcgcctgcctcagcctccctagtagctgggactacaggtgtgtaccactaacgcccagctaatttttgtatttttagtagagatgaggtt

SEQ ID NO: 382612 - DNA, 201 bp, Homo sapiens
gagatccacaaacctaccataattctgctagtgtaccactcagtgtcatctgtcactagaaaaataaacccccggtttatttctaaatgtctgttcatctstttttctctagttcacaccaaggatttgaactgtcttaaaaatttgtcttaaaaacagatatgtagaaaatatattgaaagcattggccctctcttttgt

SEQ ID NO: 382613 - DNA, 201 bp, Homo sapiens
gtaaatgctgatatattgagttttaagtcttccttcctaattgtttttctacttgtggcacctgtttaatttttctcttttccttatttttacattaaaawtttttttgagacggagtctggctctgtggcccaggctggagtgcagtgatgtgatctcagcttactgcaacctctgcctcccaggttcaagcaattctcc

SEQ ID NO: 382614 - DNA, 201 bp, Homo sapiens
ctagtagatggtactataggtgcacaccaccatgcctggctaattttttattttttatttattttttatttttttgagactgagtcttgctctgtcgaccrggctggagtgcagtggcgcgatctcagctcactgcaacctccgcctgccggattcaagcgactcgcctgcctcagcctccctagtagctgggactacagg

SEQ ID NO: 382615 - DNA, 201 bp, Homo sapiens
tgcctcccaaagtgctgggattacaggcgtgagcccttctgtggaactttctatcctcagaaaggtcttacttcctacagcaatcttttttttttttttttgagacaggggatagggtcttgctctgttgcccaggatggagtggtgcagtggcgcagttggggctcactgcagcctcgacctccctgtctcaaacgatcc

SEQ ID NO: 382616 - DNA, 201 bp, Homo sapiens
ttccaagaaagaagaaaggaaaaacctgtttgtgcctagtaagttacagctctcatcctgtaactttggtgtctcagattgtaaaatgtgtgctctatctrgagtgtcaagatgaacattttaccatctgtggatgaagtagtatagagagggttgggtaggtatcattttctcttaaaaatctattcctcttactgaaaa

SEQ ID NO: 382617 - DNA, 201 bp, Homo sapiens
cttcccttattttatcatgacttcgagaatgaagatggattttgctcagttctcttaagtctcctggttaattcgtatatttgcatgcaaggtaatcataattatcaagttagtaaacatttgatgcttttgggaattcttaactcagagaatttaaagtcatttcagagttagccacagatcttgaagttttgcaggcaa

SEQ ID NO: 382618 - DNA, 201 bp, Homo sapiens
agctactcaggaggctgaggcaggagaattgctcgaacccagaggcggaggttgcagtgagccgagatcacagcactgcactccagcctggcgacagagcragactctgtctcaaaaaaaaaaaaaaaaaaaaaaagagatacatcattttatggagctggaaatcattatcctcagtagtgagtgtaagtgggagctgaa

SEQ ID NO: 382619 - DNA, 201 bp, Homo sapiens
acagtgttcgttggaagatcctcttacagttccagtgtcggaatcggcttttgctaaccgggaccccaattcagaacaccatggcagaggtaggcactagwccaggtcacaggtttatatcttcataaaacagaaggattccagcagagcatagaattctttacccattcccttgcagtgctactgctttgtataaattat

SEQ ID NO: 382620 - DNA, 201 bp, Homo sapiens
aaatcagctgggtgtggtggcgtgtgcttgtaatcccagctacttgggaggctgagacacgagaatcgcttgaaccaaggggcggaggttgcagtgagcccagatcatgccgctgcactccagcctggcgacagagcaagactctgtctcaaaaaaaaaaaaaaaaaaaaaagaaaagcaagcatgaggaaccttagtaaa

SEQ ID NO: 382621 - DNA, 201 bp, Homo sapiens; identical to SEQ ID NO: 83170

SEQ ID NO: 382622 - DNA, 201 bp, Homo sapiens
ttgggaggccaaggtgggaagatcacttgagtccagaagttcaagaacagccttgccaacgtagaccttgtctctacaaaaaatttaaaagttagttggayatggtagtgcatgcctgcagaccaagcttataaaaaaatgggccgggtgcggtggctcacgcctgtaatcccagcacttcggaaggctgaggcagggggg

SEQ ID NO: 382623 - DNA, 201 bp, Homo sapiens
taacactagtttaccatggttgtgagtggagaaaaggcgattacagcatttggggaatggatggttttggagtaacttgttccattgatcaatcgatttgygtcaatatatcatacattgacgaattccctctcctatcccaatttctaaagcacagatctggtctaaccctcacattccacaggaagcagagacccagaa

SEQ ID NO: 382624 - DNA, 201 bp, Homo sapiens
ggccctattactttgacttccggacctactgcaaaggtcgctgggtgggccacagcttgctgcacgtcttcagtaccgagttccgagctcagcccctggcytactatgaggccgcggtccgggcgggccgcctgcaactcaacgagaagccggtgcaggacctcaacatcgtgctcaaggtggagtcctgatggggctggc

SEQ ID NO: 382625 - DNA, 201 bp, Homo sapiens; identical to SEQ ID NO: 83196

SEQ ID NO: 382626 - DNA, 201 bp, Homo sapiens
cctcacttaccgtaacagctgcccagtaaacgcttggctcagctctgtcgcctgtagcccggaggaaatcgggaggggcggagtcccctagtgacggagcmcaggagtcctccaactaccttcccacccgacgatgttctgtgcgtcgattggtcgagaggagctcagcgtggtgaagaagtgaggagcagcaagaggcga

SEQ ID NO: 382627 - DNA, 201 bp, Homo sapiens
gtctgaagccaggctctcaaaaggcttggtttcccttgatttggccctttttctgagcctagtctccagttgtcttgtgaattctatgaggcactaatatwctttccataattctatctctgatgaaattagccagagttggtttattttgcacttaagaaccctcgccatatatcctctgatctatttgcagttttaatc

SEQ ID NO: 382628 - DNA, 201 bp, Homo sapiens; identical to SEQ ID NO: 83201

SEQ ID NO: 382629 - DNA, 201 bp, Homo sapiens
acacaacacagttatcttcatcctaggcaaggagcaccaactcaaggagctacaccccttgcatcggcttgaccgccttacctcaggggtgcttatgtttkccaagacagctgcagtctctgagagaattcacgagcaggttcgggaccggcaggtgagtcaggcttttgtctcctacaggccacttcttgggctcacgaa

SEQ ID NO: 382630 - DNA, 201 bp, Homo sapiens
tgcttatgtttgccaagacagctgcagtctctgagagaattcacgagcaggttcgggaccggcaggtgagtcaggcttttgtctcctacaggccacttctygggctcacgaatgctctgtgtcaaaagggcatcatggagttccgaagtggtccttcatatttatctggccatccttcctaccttcctaccttaaggcagg

SEQ ID NO: 382631 - DNA, 201 bp, Homo sapiens
acttccggacctactgcaaaggtcgctgggtgggccacagcttgctgcacgtcttcagtaccgagttccgagctcagcccctggcttactatgaggccgcsgtccgggcgggccgcctgcaactcaacgagaagccggtgcaggacctcaacatcgtgctcaaggtggagtcctgatggggctggccagaagcgggcgagg

SEQ ID NO: 382632 - DNA, 201 bp, Homo sapiens
gaactgatgtctagcgctacagtgaacccccaacccgaattcgtctaaagccacccaaaaccaaaactttgctcacaccagagccccgcatggccccttaycccagggcagggcgtccagaaccacgcaggaaattccggcgtccagatcccaggcctcagtcgctcaggtctctagggctgtctggacgggatgaatcag

SEQ ID NO: 382633 - DNA, 201 bp, Homo sapiens; identical to SEQ ID NO: 83198

SEQ ID NO: 382634 - DNA, 201 bp, Homo sapiens
caaaacgctgggcaccccagcccctcctcacttaccgtaacagctgcccagtaaacgcttggctcagctctgtcgcctgtagcccggaggaaatcgggagrggcggagtcccctagtgacggagcacaggagtcctccaactaccttcccacccgacgatgttctgtgcgtcgattggtcgagaggagctcagcgtggtga

SEQ ID NO: 382635 - DNA, 201 bp, Homo sapiens
tgcaggacctcaacatcgtgctcaaggtggagtcctgatggggctggccagaagcgggcgaggaaaaggggccgggttttgttttgttttgttttgttttktagtcttagtaaagcataggtactggattaaaatcatggcaattctaaagcgttctcgctttcatttggaacactattttagcccgtttcccacctccgc

SEQ ID NO: 382636 - DNA, 201 bp, Homo sapiens
cgcttgaacccggaaggcagaggttgcagtgagccaagatcgcaccactgcattccaacctgggcaacagagcaagactgtctcaaaaaaaaaaaaggagrggggggttgaggattatagagtatatgatggaagtgtggccagagtacataaaggagagagtggtcattagaagtgtgtgtcagaatgctttgttgttgt

SEQ ID NO: 382637 - DNA, 201 bp, Homo sapiens
tcacataacataaaattaaccactttaactagccaggcacagtggctcatggctataatcctagtactttgggaggtagaagtgaaaggatcactggaggycaagagttcaaggttaaagtgaactgtgattgtgctgctgcactccagagcctaggtgacagagtgagaccctgtctcttaaaaaaaaaaaaaattaacc

SEQ ID NO: 382638 - DNA, 201 bp, Homo sapiens; identical to SEQ ID NO: 83200

SEQ ID NO: 382639 - DNA, 201 bp, Homo sapiens
cgagaagccggtgcaggacctcaacatcgtgctcaaggtggagtcctgatggggctggccagaagcgggcgaggaaaaggggccgggttttgttttgtttkgttttgttttttagtcttagtaaagcataggtactggattaaaatcatggcaattctaaagcgttctcgctttcatttggaacactattttagcccgttt

SEQ ID NO: 382640 - DNA, 201 bp, Homo sapiens
aaggcagcttccttgtttccaagggacagaagttggaattttcataattcctttaaacaccgtcttgtggcaagggcactgatcactttaccctgcgttgyagatctctgtgcaaatagtaataataggggctatcatttatgtctctttactgtgtgctgggcacaaagttaaacattgtatgtccactaattctaatga

SEQ ID NO: 382641 - DNA, 201 bp, Homo sapiens
tttccatgtcagtgaggaacaggggaagctggatatgaagttgactgattacaggctgcggtccctaggctgacttattacctatgtctttgacaggacartgatttcttgcggaacacagtgcacaggcatgagccaccagtcacagcagagcccattcgcctgctagctgagaacgaagatgtggtggttgtagacaag

SEQ ID NO: 382642 - DNA, 201 bp, Homo sapiens
cgagcagctcactcattcgctcacttatcgcagaccccgcctcgggactgggcctccctgattcgctggggccgagtgacgtcctcagatcgcgaccctgrgagtggagtgggggcagcgtggttatgtggctggaccgccgcggatggctcagggttcttggacattggcgctacgaccttaggcgccctagctttacca

SEQ ID NO: 382643 - DNA, 201 bp, Homo sapiens; identical to SEQ ID NO: 83215

SEQ ID NO: 382644 - DNA, 201 bp, Homo sapiens
agtcttatcttcatacgactcttttggttaaaggaatcagcctaattaaaatgaggatagcatgttagtacttacttcagaggacttttggtatatgagarccacgacaatacctggtggtggcagttattactctattactcttattattactgtaataacccttgtaacttacagtgagccaagagtatggaatcactg

SEQ ID NO: 382645 - DNA, 201 bp, Homo sapiens
cttacagttccactttgtgaaactaagatgatgctgttgaatgatcagttcttgctttaagatatagatctaaatagagtggccatgtacagccatgtcartaataggtaagggcctcagaactaataactttcaactcttctccctgttttaattcatcttcaccatttgcttttggccttcgagtatattttggtaaag

SEQ ID NO: 382646 - DNA, 201 bp, Homo sapiens
tagtgggggttggcggggtagggagaaaggctaggggttgagggggtgtgaaggagatctttttaggctggcccctcatagcgcccgcgatcctgtttctsccatatggcatccgttcgagggttctctcgcgtttgtgcgctcaaggcagagggagggtataacggggaggcgattcggccgaggaccttgtacttgacc

SEQ ID NO: 382647 - DNA, 201 bp, Homo sapiens
cgggacctcttcaactcccctttactccgtcttccccctaaggaggaacaagagcgggatgtgttgggggtggggaatgtcttggggctgtacaagctcgmtgagacttttcggggcccgccgtttccgcgtgcccgcgcgactctcgacaatggacagtgtacagtggtggcagggtttcacgggtccccgcgccgattt

SEQ ID NO: 382648 - DNA, 201 bp, Homo sapiens
aggaactaacatttatttacttgactcacagtagctgcccttaggccttcatcacgcagagttaatttattccaattatatacctgctaaacagcttggtkattttatttccaagcctatgaaggttaaaaacagcaagtacatttttgaggcaggcatgctgaaagcaatgaatactgacaatttaataacctgacagaa

SEQ ID NO: 382649 - DNA, 201 bp, Homo sapiens
tggatgaagctggaagccatcatcctcagcacataacacaggaacagaaaaccaaatactgcgtgttctcactcataagtgggacttgaacaatgagaacrtatggacacagagagggggaagaacacacaccagggcctgttgggggtagagggtgaggggagggaacttagcggatgggtcaataggtacagcaaacca

SEQ ID NO: 382650 - DNA, 201 bp, Homo sapiens
ttaatttgtaatgaagaatctgtgttttgtaatctttcccattactttgctttgccttttcttcttttattgtctcttgacttttccataacaactgagcwtggtgccttttggaaaccatctttgagatgacctaaggaggttggttggtactagaatgagcacaggttttaacacaaggcaaacctgtgttgtaatcct

SEQ ID NO: 382651 - DNA, 201 bp, Homo sapiens
tgggacttgaacaatgagaacgtatggacacagagagggggaagaacacacaccagggcctgttgggggtagagggtgaggggagggaacttagcggatgrgtcaataggtacagcaaaccaccatggcacatgtatacctatgtaacaaacctgcacattctgcacatgtattccattttcttttagaagaaataacaag

SEQ ID NO: 382652 - DNA, 201 bp, Homo sapiens
ggagtgaccattttaatcacactatttttttgcaatattcatattcttactggaaggaattttgagttgtaaaataaactatgctcatgggacaatgccaytacattaaatttgagaccagtttcagcatggaaaatacctgcccctcaaaaatttatctgtgagttctccaatattcctttccagttgatccatggacct

SEQ ID NO: 382653 - DNA, 201 bp, Homo sapiens
ataatgttgtaagttgttttctttttcatctttcttcagggcattcaaagattaaagccttcctgagccatggtggtttgaacagtatttttgaaactatrtatcatggtgtgcctgtagtgggaattccactctttggagaccattatgatactatgaccagagtacaggcaaaaggcatggggatattgctagaatgga

SEQ ID NO: 382654 - DNA, 201 bp, Homo sapiens
ctcctcttgttaaaattgttaacaggacccttatgtatgtaatagaattgtaaggtcagatgcagcaacgtgtagctgaaagatgatgagctttttcaacrtatattaacctttgttgactttttttttttagcgatttatatctttgagatagtgggactttctgagtcttctgttctcatttttaagggaaacgatcta

SEQ ID NO: 382655 - DNA, 201 bp, Homo sapiens
ataaacatttgagtagccagaaagtagatgtctgttttttcactctggtattgtttggcatttcttgctttcattggcttcataataattattggccattwaaatatgtgttgttagtcatgcaatatttgtgttaaaaatagtaatatacatttcaactacttaaaaatggcttttaattgatatatcaaaatctgacaa

SEQ ID NO: 382656 - DNA, 201 bp, Homo sapiens
caattaggtatataacaaatattttaattggtgtagagcaggaatcagtgaaattacacctttaggaatcctttatctgaaatgcatgtttactgtagtgycgatttttaatgaatttctgggaaaatctcttctgtagagtaataatgttgtaagttgttttctttttcatctttcttcagggcattcaaagattaaagc

SEQ ID NO: 382657 - DNA, 201 bp, Homo sapiens
gccaaagcatggtttcattcttaagaatatcaacaaaagatcatcaaacatttattttaaatctcataatttaatcagagagcccatactatgagtaaggyttgatttttaaaagactaattgtctggtgtacattttaggttttctggacccaaaccaaagaatctaggaaacaacactaaactcatagaatggttacca

SEQ ID NO: 382658 - DNA, 201 bp, Homo sapiens
taaccccagaaagtacctcttctgcttcatttaggacagtttatgtctattccattcagactcttttgtcaccctcttagttgttaagcatatttctgttktatcttttaaagatcaggcaggaaacaacctaattatgtgcttcaccccacaaaacttttatttctggtgaagctaaagaagagaacttactgatttttt

SEQ ID NO: 382659 - DNA, 201 bp, Homo sapiens; identical to SEQ ID NO: 83214

SEQ ID NO: 382660 - DNA, 201 bp, Homo sapiens
tacagatcttaccaaataaaccacatgtcctcatttcagttagcattatcagatgaaatgttgtaaacaaaagcagttatttagaagaaaatatcatatcstttactttctaattgtttaagaaaattacttaaaaggtttttttttaactgggctgttaataacaccaattataaactacattggtcttcgtaaaactta

SEQ ID NO: 382661 - DNA, 201 bp, Homo sapiens
ttgtcctttagaaaagttttcatgttttcttcatgtatatttggtatatttggtatatttctgttaggtttatttgtaggtctttatgaattttgttgctrttataaatgaattatttagtccagttttaaaatttggtatttgaccaggagcagaagatatttgaccaggagtagaagtacttttacttgtaaaaatgtt

SEQ ID NO: 382662 - DNA, 201 bp, Homo sapiens
agtgctagatccctatctgtcagttcggtgggagaattgcataaatatccccagctgcttactaaatatgcagattcttgggtttctccctagactccatracagcttatttgctgaggtgactttggaacctgtatttttagtaagtacttgaggtgattcttctggacgccagaatttgaaaacaacttcattaggtga

SEQ ID NO: 382663 - DNA, 201 bp, Homo sapiens
caatggaaaatagatctctatgtaagcaaattatttcttgtttttcctccaaccagtgaaagtttttattaaaaagaaacttaatcaaatatttgctgttrccaaagcatggtttcattcttaagaatatcaacaaaagatcatcaaacatttattttaaatctcataatttaatcagagagcccatactatgagtaaggt

SEQ ID NO: 382664 - DNA, 201 bp, Homo sapiens
tgccaggcactgagctagcaatgttaagtgcagttcatggtttttttgtttgtgttgcttctagtctaataggggaaataataaagatgtaaacaaattartatgatgcatatttccaaagctaaactgctgtaacagaagccaaaagaatgcagtgatagaaaataaggagtcttctcagacaatcagagtaatgcctcc

SEQ ID NO: 382665 - DNA, 201 bp, Homo sapiens
cctgaccaaagcagagcattctttgtatcagaaatattaaatgggaaaagaggcctattgatgttggtgttgggaataagaaaaggaactccaacacccamccccctcatctcccattatcatctctgtgtaggattctctcacagtccaggcattcttttcctcagaatggatggggccaacaaaggatgcagtgttata

SEQ ID NO: 382666 - DNA, 201 bp, Homo sapiens
cccaaggcaggctgtatttgggggagtgaagagtagataaaatattggtacctgatgaatctgaggccaggtttcaatactttatctgctcttcatttccscatatctacttactgtaggtacggcctcattaaaaaatataaactctctgaagacagaacattttgtttatttattctttgatatgtcccaagtgtcaga

SEQ ID NO: 382667 - DNA, 201 bp, Homo sapiens
gtttgattaaggtgttacttacaagacttctttgctgtcacattactaattttacttggtagtcagaattggaagctatgtaaatatttctcatcagtctytgtgtctttatggcataatactgattatcatgaaaaaaattgagtgttttctttttgtttttgtttttttttctggaaagaaaggaggcagacagattag

SEQ ID NO: 382668 - DNA, 201 bp, Homo sapiens
tgagccaggagaaaggcgtgaacccaggaggtggagcctgcagtaagccgagatcgcaccactgcactccagcctgggtgactgagcgagactctgtctcaaaaaaaaaaaaaaaaaaaattataattcaatttaacttttaatcgctctttgacttctactagcggagggatagaacctcatatttttttcttcaatcag

SEQ ID NO: 382669 - DNA, 201 bp, Homo sapiens
gcgtgaacccaggaggtggagcctgcagtaagccgagatcgcaccactgcactccagcctgggtgactgagcgagactctgtctcaaaaaaaaaaaaaaaraaaattataattcaatttaacttttaatcgctctttgacttctactagcggagggatagaacctcatatttttttcttcaatcagtagctgattgtctct

SEQ ID NO: 382670 - DNA, 201 bp, Homo sapiens
atctctactcacaatacaaaaattagctgagcatggtggcacgcacttgtaataccagctactgaggaggctgaggcaggagaatcacttgaagcccggaggcagaggttgcagtgagctgagattgtgccactgcactccagcctgggtgacagagtgagattctgtctcaaaaaaaaaaaaattcaagccaccatatta

SEQ ID NO: 382671 - DNA, 201 bp, Homo sapiens
ttgaaattatagaaaaatgcttcaagcttttgcaaatttattttggtaaagttcaaatgctttcccccctcataaaaaagatccatttatttcagttaagwtttaagtatatcgctttgtaaataaaacttcaaatgaggcttgtttaccagatctttacaaatttaaagagcagaaatgtattctgatgtgtaatttgaa

SEQ ID NO: 382672 - DNA, 201 bp, Homo sapiens
agcccttcatacctatatcgttggcttattctattacttattggaaaatatttattgagtacctgtcaactgcaagagactccattagatgctggagatayaaaataaaatgccgtaaaccttaaagccctcaaagatctttcaggcaatctataagttttctagctcactgtgattccaatgtcctttccatttgtgaaa

SEQ ID NO: 382673 - DNA, 201 bp, Homo sapiens
cctgggatgcaaggctggttcaacatatgtaaatctataaggtaatctatcacataaacagaaccaaagacaaaaaaacacatgattatctcaatagatgyagaaaagcctttgataaaattcagtatcccttcatgtaaaaaactcttaataaactaggtattgatggaacatatctcaaaacaataagaggtatttatg

SEQ ID NO: 382674 - DNA, 201 bp, Homo sapiens; identical to SEQ ID NO: 83221

SEQ ID NO: 382675 - DNA, 201 bp, Homo sapiens
ttggggacaatgagagattgagcaacagagttattagattagccacttgtgagcaggtaagtttatgagaagaaaaatgaaatgaagaaacaaaatagtgrctttccatacttggtattcctgattaacatagaagccattacttcctattacatatggtgattgaaagctggtttcaccattaatgaatgaagtctctag

SEQ ID NO: 382676 - DNA, 201 bp, Homo sapiens
gcctgtaggacaggttttttctgcttttcctgtgactctttttctttttctgatgacttgcagtctctttctattgttcctggttttgtccaggccattaragtcttatggtaggtctcaaagcaggtctgcagccacttagggcgggtctgaattacacttagctgggagtctgtatacgggaactgatctgggtgcctg

SEQ ID NO: 382677 - DNA, 201 bp, Homo sapiens
accttcaaggaattgaataggaaaatacctagagttttgtttcttgttctgatttgcttgtttatatttggccagttttgtcctgaaaatatgtttgagasattacatgaaaatttattttgtgactcttaatataaatgttaaaaatacatttaaactagtgatagtaaagaaagaatatcttaattagtgggggaaata

SEQ ID NO: 382678 - DNA, 201 bp, Homo sapiens
ttttattttctcactatatttttgtttttatcttaccttcctgcttaatgttttcagagaaactccccaggtgggcctaagccagctatcactgataagcraatagggttgagtttctcattacagcttcaccacctgtactgtagatgtctgaaaagagataactgcagatacttgtgttgaagaagtggtaagtgcaac

SEQ ID NO: 382679 - DNA, 201 bp, Homo sapiens
ggaactttggattaatttatttcattaagtttgtgaaatggaaccaaattccttcttcctttgcattcagcatttttcagttttatttctgcagttaagcygtgggcttctatacaaataaatataatttttctgatggaatgaaaaacattaatttagtaatgtggaggattttgaaaatctagagttacttatatttat

SEQ ID NO: 382680 - DNA, 201 bp, Homo sapiens
ttaatacctgttttgcaaattcagaatttttaatgggtttaattaagcagatacacacacaacaacaacaacaacaaaaaacttggacacacttctgtaayacatcttgaatatagtctcatctgttggaattttttaaacttctacacttaagtcttaatctgattctccctcatcctcataatattcattattcagagg

SEQ ID NO: 382681 - DNA, 201 bp, Homo sapiens
attaatttatttcattaagtttgtgaaatggaaccaaattccttcttcctttgcattcagcatttttcagttttatttctgcagttaagccgtgggcttctatacaaataaatataatttttctgatggaatgaaaaacattaatttagtaatgtggaggattttgaaaatctagagttacttatatttattaactgctga

SEQ ID NO: 382682 - DNA, 201 bp, Homo sapiens
tgaggtgtatagagctgtttttgtttatagtaaatggtctcagcctgctgggttgaaatactagaatagagacagaagtaccattcttctttttatgtttkttttttttttctgggtcctctttctgttattggctatcactttctgctgctgtcagactgtgagtgggccctgctgctctattatctgttgtcttttttt

SEQ ID NO: 382683 - DNA, 201 bp, Homo sapiens; identical to SEQ ID NO: 83217

SEQ ID NO: 382684 - DNA, 201 bp, Homo sapiens; identical to SEQ ID NO: 83219

SEQ ID NO: 382685 - DNA, 201 bp, Homo sapiens
tacttctgactttttccaggtaatactactatacaggttcaaactctttttaaatctaagatttccagaggactatgcttgttgtatttaagcttggtacrcgtcttagaataaataaaccaatgcagtaaataaagatgcttatgacaatttttttggataaaaactacttttcgtttaaagattttgacagtttacatt

SEQ ID NO: 382686 - DNA, 201 bp, Homo sapiens; identical to SEQ ID NO: 83220

SEQ ID NO: 382687 - DNA, 201 bp, Homo sapiens
tgaagggttgttacataggtaaacacatgtcacaggggtttgttttacatattatttcatcactcagttattaagcccagtacccaatggttatctttaascaatattttaatagtgttaagagtaaccatactttgtccccaggagattttaaaattagagtcatgcatcttaatattatatggtaaaggagaccagaac

SEQ ID NO: 382688 - DNA, 201 bp, Homo sapiens
tgcttattcaaagacatacctctattacagacttctctgtgagcatagtgataaattgtattaatggaaaaaagtcatggtattgaaggattagaagagcwcataaatccaaattttagttccacagaattggctgtatagaatataatgagatgaaagagtgctcttggcaggtcagttcctttaggggaggctgagggt

SEQ ID NO: 382689 - DNA, 201 bp, Homo sapiens
tcccggatacaattacgcggcagacacacactcagactcgcgcggggcagccaagagacgaggtgagcggagggaccacgccgttccagagggcggaaggrggggcggtctgggtggaggagaggggcgttgtttgctccctgaggtgagtgccgggcgaatggctgctgtccaggggcgggggggtgggaattagaaagc

SEQ ID NO: 382690 - DNA, 201 bp, Homo sapiens
tatagtatctcatttatttgacctcatctgcattggtacttatttacataagcacattttctcggtagctgactcttcacaccgtttattactgaaacttaaaaaaaagagccattataacccacaagcaatttctaaatcttactgtcttccttgttcccttggagaatattggatataagttattctttcttgttgggt

SEQ ID NO: 382691 - DNA, 201 bp, Homo sapiens
ttcccaaatatgaaaggataatgcagaagtacaacctgctgccggagaagtccatgtatgatttggttcatgggtccagcctgtggatgctgtgtactgaygtagcactggaattcccaagacccactctgcctaatgttgtttatgtaggaggaatcctaaccaaaccagccagcccactaccagaagtaaggtttgccg

SEQ ID NO: 382692 - DNA, 201 bp, Homo sapiens
aggcacctctatacctcatagggtcttaaaaatcaacatgtgaaaaataattattagcctgtgtaataggggaaggactgatttgtagaggtttgtttgcttttttttttttttttccccaattaagactactatggtaatatttaaatatacctacttttttcctaggattttctgtttggatgaagtgatgctttatat

SEQ ID NO: 382693 - DNA, 201 bp, Homo sapiens
attgttgacttcagtttagtgtcatatttagtgcattttcctttttactgttaagatcttatagattgatagtttcatgtaaaaatatgtttgtttgtttkttttttttttttgagacggagtctcgctctgtcgcccaggctggagtgcagtggcgcgatctcggctcactgcaagctccgcctcccgggttcacgccat

SEQ ID NO: 382694 - DNA, 201 bp, Homo sapiens
tgtcatgaggcaataagggtaagtttcctaattttctatacgtattttgattttttcctgttgttttttccagaactgcatcattcaaacttgaaacattmccctatttttttttaacaaggtgttctatataggaacaacatatcttatagggattgctacattatttagtcacaatggaaaaaaaagtttgatatatag

SEQ ID NO: 382695 - DNA, 201 bp, Homo sapiens
gtttctcaggtttctacttctattatattttccaggaggaatacatttataggtattgactcaagtaggccctagctgacatccaaaataaaataagagatttttttaagtgttaaagttaaaaaatatgtatgatataccctaaggtagctggattttatttaattcaaagacatatgctaggagatctcaccaaaggac

SEQ ID NO: 382696 - DNA, 201 bp, Homo sapiens
aaggcatttgagaggtcattatattcttttaatcagttagactttatctgaatatatgctttggaatatactttttcttcaaacttctaaactatgtgcartatacagaaacaaggtcctctggctgtcctgctttctgcttgctttttttctctccctttcacttttctggagataatttttctgcctcttgtagggaat

SEQ ID NO: 382697 - DNA, 201 bp, Homo sapiens
atctggggctatgtgcattatatttttctaaattcccaagataattgagctttaattcaggtctcgatagttggatccacattaccttcattgtattacckgtatttctcttatgcacataagtaacgagtgctagatccctatctgtcagttcggtgggagaattgcataaatatccccagctgcttactaaatatgcag

SEQ ID NO: 382698 - DNA, 201 bp, Homo sapiens
atcacgccatattacacataatatttttttgtgcttctatatcacattgttagaaaaataccacaaatggtaactgtgtactaacatttctaatattttayacaagatgaaaagagaaatagagacaagaaggaaaattctcttatggtcatcatagaaaaacctgcttatactaaagaagtagtcatcgaatatatacca

SEQ ID NO: 382699 - DNA, 201 bp, Homo sapiens
caggtcagtcaacttttatgtcccacccactttcattcctagtacgacagtacttgcacagtatgggctttaatacatatgttttgaattaacgtaatccraagttgcaaaagtcaatacagttgcctaatttattttgcaaaaatggaataaaacttttattacactatgcatttccagactttttatcagtgaaaagca

SEQ ID NO: 382700 - DNA, 201 bp, Homo sapiens
attacttacaatgacagttaaataataacaaccaatgctcgttgaatgcttttatataccagttaccattctaaacaatttacatgaattagctcttttgtgtgtgtgtgtgtgtgtgtgtgtgtgtgtgtgtgtgtgtctcactctgtcacccaggctggagtgcagtggcgctatctcagctcactgcagcctcagtct

SEQ ID NO: 382701 - DNA, 201 bp, Homo sapiens
gcttctgattacctcctagcagttaatatctttcttcagtttcttcagctggaaaataaattactaacgcaatatgattttagcttttctttaaaattaaygatgctggggataatattggatagcatattggatatgtaatttctgatccctagggtactagaggttgccaatgtagtgtgggtagagtattctagtttt

SEQ ID NO: 382702 - DNA, 201 bp, Homo sapiens
ttacttacaatgacagttaaataataacaaccaatgctcgttgaatgcttttatataccagttaccattctaaacaatttacatgaattagctcttttgtgtgtgtgtgtgtgtgtgtgtgtgtgtgtgtgtgtgtgtctcactctgtcacccaggctggagtgcagtggcgctatctcagctcactgcagcctcagtctc

SEQ ID NO: 382703 - DNA, 201 bp, Homo sapiens
gctgggctgcagtatgcccggctaaaagttggaagttgttactaaggaagtggaggaagtgtcttccacaatgatctacctatgtttgttttcttattttaaaaaaaaacccttaaactttatgaattaaaattaaaatttcatcttatgtcttttatagtattaactccttggtacacttttgtgttttttcactttgag

SEQ ID NO: 382704 - DNA, 201 bp, Homo sapiens
aacttttaattatacttgcactgtttctgaagctcattttttaagaagctacttacaattttcttgcattgggatgtgttttacattggccacaatgaataaaaaaaaattgtttattttcggatagggggatgagtatatttttaagaaggcattacccaatgagtgtcttctttaaaagtttcaagatcttgctttcca

SEQ ID NO: 382705 - DNA, 201 bp, Homo sapiens
tgaaccattgatacctaggcacagaagcattgtagctaatctaacttgttttctggagctctaagggtttaaaacctttcctttgtgctgtgcatggtggytcatgcctgtaatcccagcactttggtaggctgaggcaggcagatcacacggtcaggagttcgagaccagtttgaccaacatggtgaaaccctgtctcta

SEQ ID NO: 382706 - DNA, 201 bp, Homo sapiens
tggtggcgattgccctcattcatctgacacttggtatgtgatgctaccttttggcattttcttctggttatacatctcttttccctaattatattttggaytttttgagtgcaaagactaggttttatatctaccatgaccttagttttggactgtctgtgatggtcatatttcaagtagtttctgaatataacagaaaac

SEQ ID NO: 382707 - DNA, 201 bp, Homo sapiens
aaagtttatttcttcttcttgctcatatcactaaaaataaattgcccaaaagatgtatagcaggaaggaaaagaaaaatcaaataatattgaaaagtacayatgagaataatcagtcaaaataagcaaagttttccttgccttaaaaaaagaatctaccatctgaaatgcctacttgtttaaggaacaaagagccaggtct

SEQ ID NO: 382708 - DNA, 201 bp, Homo sapiens
atctgaaatgcctacttgtttaaggaacaaagagccaggtctccctctttgtagatctcacttatagatagtatttggagagtgggtgagtgagcaagaaycccgaatccaaacgtgggcagcagacctctctctggctgctcctttgctgatcagggcccaggtaaaactttttttttgtatactttctataacttagta

SEQ ID NO: 382709 - DNA, 201 bp, Homo sapiens
aattttgagaaaggaataagagcagcgacataattctgactttgagacctgtaatctttgatagcaaactttttttgtttttttttgagacaaagtcttgstctgctgcccaggctggagttcagtggcgtgatctcagctcacggcaacctccgtctcttgggttcagatgattctcctgcctcttcctcccatgtagct

SEQ ID NO: 382710 - DNA, 201 bp, Homo sapiens
atttatttttctttaacatctattgatttctaagcaatgtgaaactagttccagtatactctatgtattatatgtcttcattttgttttgtttgtgatccytggatagcattggcagtgaggtgggaggaggagatgtaattgagaatttgacaagggccttgctaccataatcaaactgaaaccttatcagacttatttg

SEQ ID NO: 382711 - DNA, 201 bp, Homo sapiens
acttttatcagcagcattactttgtaattgctttagaactggcttttattcccatatgcccatttgatgaaacttacctagtttattattcattcacatarcatatattaaatttcactgtgccacttcatttatttcattttattataaaagtagttacaaaagttacatgctcatggtaaaaaatgggaaaggttataa

SEQ ID NO: 382712 - DNA, 201 bp, Homo sapiens
aaaaaatatatccacacaaaacttgtacacaaatgttcatagcagcagcattcataatagctaaaaagtggaaacaatccaaatatcccccaactgatgaytggatgaacaaactgtcatatctgcacaatggaagattgcttggccatacgaaggaataaagtactgatccatgctaccacatggatgaacttaaaaaca

SEQ ID NO: 382713 - DNA, 201 bp, Homo sapiens
ttatattaaaggctaacaataaaagaagaaacaacgatatatttattttgggtacaatatacactactcaggtgacaggtgctctaaaatctcagacttcrccactatacaattcatccatgtaaccaaaaaccatttgtaccccaaaagttaatgaaataaaaaatatttaaaataaatgaataaaaggctgagtgcagt

SEQ ID NO: 382714 - DNA, 201 bp, Homo sapiens
gaccatcctggctaacatggtgaaaccccatctctactaaaaatacaaaaaattagctgggtgtggtggcaggtgcctgtagtctcagctacttgggaggstgaggcaggagaatggcgtgaatccgggaggcagagcttacagtgagccgagatcgtgccactgcactccagcctgggcgacagagccagactccatctc

SEQ ID NO: 382715 - DNA, 201 bp, Homo sapiens
ctcggctaataactatcagggtggatttggaacaacactcatggctaaggtatggtaaatgtagacacccaagagagaaggaaaaacgtttcacggtccartaacaccttccttctctttctcttaataaagcatatgtctcaggtaagaggcaaaattactagaatattcactctcactgaaaatgagtaaaaacctaac

SEQ ID NO: 382716 - DNA, 201 bp, Homo sapiens
acttcctaaaactgataaaggcatgtactaaaacaaaaacaacctatagctaacgttatactttgtagtgaaagactaaatgctttccccctgagatcagmcaacacaggatatctactctcactgcttagtctctcactagaaatcttagccagtacaataaagtaagaaaaataaaaagaaataaaactattcatattc

SEQ ID NO: 382717 - DNA, 201 bp, Homo sapiens
ttgatactaaaaccagataaactataagactagtacagattagtattctttatactgtacacataaaaattctgatcaacatattaagaaattgaatcagyaatacataaaaagaacaatacagccatgtgggatttatcttagaatgcaaatcttgttcaactgaaatcagtctttgtaatattaatagtctaaagaaga

SEQ ID NO: 382718 - DNA, 201 bp, Homo sapiens
ttaaaagctactaaggagtagtgaagtcagtgttaaagtttatttcttcttcttgctcatatcactaaaaataaattgcccaaaagatgtatagcaggaakgaaaagaaaaatcaaataatattgaaaagtacacatgagaataatcagtcaaaataagcaaagttttccttgccttaaaaaaagaatctaccatctgaaa

SEQ ID NO: 382719 - DNA, 201 bp, Homo sapiens
catcatagggatttgtaacattccatgcaaggtgtcagacccataaactagcgtgtccatcataccgatgcgcaagtggaatcgtctctcattggtggcakacagactgaagatgaccttttgctatgtaattgtattcatcatttaataattcaagaatatctaaaggggatgaacacttctttattcagattagagcat

SEQ ID NO: 382720 - DNA, 201 bp, Homo sapiens
tttgggagactaaagtgggtggatcacttgaagtcaggagtttgagaccagcctggccaacgtggtgaaaccctgtcactattaaaatacaaaaaaatttwaaaaaaaattagctgggcctggtggcagtcacctgtaatcccacctacttgggaggccgaggcatgagaattggctaaaccctggaggcgaaggttgcag

SEQ ID NO: 382721 - DNA, 201 bp, Homo sapiens
atcgcttgaacccgggaggcagaggttgctgtgagccaagattgcgccactacactccagcctgggcaacaagagagaaactccgtctcaaaaaaaaaaaagttactgattgattgcagatcaccgtaacagaaataatagtaatgaaaaagtttgaaatattgtgagaattaccaaaatgtgacagctgcatgaactggg

SEQ ID NO: 382722 - DNA, 201 bp, Homo sapiens
tcttctgaccagtaggtctcaacagtgggcttaaaataaatattcagtaaaccatcccataaacagatgtgctttcttctagactttgctgttccatttgkagagcacaggcagagtagattcagcataattcttaagggccctaggatttttggaatggtaaatgagcattggcttcaacttcaagtccccagctgcact

SEQ ID NO: 382723 - DNA, 201 bp, Homo sapiens
tgatgatatctgagaatttttcagaattgacataaacccacagaaacaggaaggacaatgtatatcaaataggagtttaaatttttttaaaaaagaaatcktactaaatacatgatagtaaaactagcgcagtaccaaatacaaacgtgtaaagcagctgggaaaaaaagacacattacctataaaagaacaatacagact

SEQ ID NO: 382724 - DNA, 201 bp, Homo sapiens
ataaaaataaaagatagattgaaaatgaataaggatccagaaaatgtcagaaatgaccgaatttagaaaaatcattgaaatttaaaaattaatagataaayggtatatgggagcagaagagagagaattagtaaatgagatatctaaagaaataacccaaaggtactacagaaagagttggaaatggaaaatatgaaagaa

SEQ ID NO: 382725 - DNA, 201 bp, Homo sapiens
tcttggtcctctatagtatattacaatttcagtttttctaatcttttaggttcaaattctgaaagtagcactgtccaatagaaatgtaatataagccacaygtgtaatttaaaattttttagtagtcacattagaaaagtaataagaaacacaggtgaggataatttcaggaatacattttatttaacccagtatatcaaa

SEQ ID NO: 382726 - DNA, 201 bp, Homo sapiens
acagacttttctgatttctggatctgcatttttatttattggactccttcaatcaagctcatttttggagtcaaactttttcatttcagtaaaaccagctytagctcttggtcctctatagtatattacaatttcagtttttctaatcttttaggttcaaattctgaaagtagcactgtccaatagaaatgtaatataagc

SEQ ID NO: 382727 - DNA, 201 bp, Homo sapiens
aatgctctattgctaaaaaagctaacaattatctgagccttcagtgagtcatatagtccttttttgctggtggaaggtcttgccttgaggttgatgaatgstgattgaccagggtggcggttgctgaaggttgggtggctatgacaatttcttaaaataggacagtaatgaagtttaagtttactgcattgatttactcat

SEQ ID NO: 382728 - DNA, 201 bp, Homo sapiens
gataccacacaagcataccttggagatattgtgggttcagttccagacaaccacaacaagtcacacaaattttttggtttcccagtacatataaaaattaygtttatactatgccatagtctattaagtgtgcattagcattatgtctaaacaatatacgtatcttaattttaaaatgctctattgctaaaaaagctaaca

SEQ ID NO: 382729 - DNA, 201 bp, Homo sapiens
tgattaaaaagtaagaatacggccaggcgcgatagctcatgcctttaatcccagcattttgggaggccgaggagggcagatcacctgaggtcaggagttcragaccagcctggctaacatggtgaaacccagtttctactaaaaataaaaaaaattagtcgggcgtggtggtgcgtgtctgtaagcccagctactcaggag

SEQ ID NO: 382730 - DNA, 201 bp, Homo sapiens
aataaatatattttatcttccttaatgattcccttagtaacatttttttctctagcttgctttaccataagaatacaatatataatacatatacaaaatatgtgttaatcaactgtttatgttattgacgaggcttccagtcaacagtgggctattagtagttaagtttttggagagtcaaaagttatacatgggtttttg

SEQ ID NO: 382731 - DNA, 201 bp, Homo sapiens
taataaatatattttatcttccttaatgattcccttagtaacatttttttctctagcttgctttaccataagaatacaatatataatacatatacaaaatatgtgttaatcaactgtttatgttattgacgaggcttccagtcaacagtgggctattagtagttaagtttttggagagtcaaaagttatacatgggttttt

SEQ ID NO: 382732 - DNA, 201 bp, Homo sapiens
tcgaaggacatttattaggaagagaagcaagcagcaccaggatttaaggcaggaaaggataggctaactctactgttttgtacaaatgcagttgggttgawaatcaggactgcccttatctataaagttgctaacttctgaggctttaagtgaaaagataaataccagctgcctgtcttttggttgtacagcaagaaggcc

SEQ ID NO: 382733 - DNA, 201 bp, Homo sapiens
agcagacagttcccaggcgccattaagaaaaaatcattgaagagaaagtatatctgcctgaatgagtttttaatgcagacagaagtgccctattacggagaaaaaaaaaaaaaaaggatgctcgaaggacatttattaggaagagaagcaagcagcaccaggatttaaggcaggaaaggataggctaactctactgttttg

SEQ ID NO: 382734 - DNA, 201 bp, Homo sapiens
cagcagacagttcccaggcgccattaagaaaaaatcattgaagagaaagtatatctgcctgaatgagtttttaatgcagacagaagtgccctattacggagaaaaaaaaaaaaaaaggatgctcgaaggacatttattaggaagagaagcaagcagcaccaggatttaaggcaggaaaggataggctaactctactgtttt

SEQ ID NO: 382735 - DNA, 201 bp, Homo sapiens
ttatatatatgtaatcattcatccaacatccagatttgcagtaaaggagagttctcgttagacattcaggggtatctattctttggcaggtgacttggaayattttgcacgtttggtcagagggccttgttttagctctgtatcagttttctgagatagtaactttactgattgtgctgttaaagtagttagtttggtgga

SEQ ID NO: 382736 - DNA, 201 bp, Homo sapiens
tcttgaaagaaaaaagaaaaagaatgctgggaaatggaagagcaaggagagttacttctctctcttccctcactagactgtgagcttttaaaggacagggrccatacgttgcttgtgtctgtctctgagctctgtcatagtacttcatgcagtgaatatttattgagtggagttctaaatctagaaagtgaaaaattgcat

SEQ ID NO: 382737 - DNA, 201 bp, Homo sapiens
aggattacttgagcctaggaggttgaggctgcagtgagctgtgtgctccagcctgggtgatggagtgagaccttgccttaaaaagaaaaaaaaacaaaccrgaaaacatagtctatatgtttatataacatagtctgtataggatttggtactgtctgtggtttcaggcatccactgggagtcttggaatgtatacctctc

SEQ ID NO: 382738 - DNA, 201 bp, Homo sapiens
cctgctatctcttcctccccttttctaagctgtgggatctgaaattttctctggggattcacctgcttttccaaaattccaactatctaatttcatttctraagagattttctaactctgtatttccatcacagacttttctgatttctggatctgcatttttatttattggactccttcaatcaagctcatttttggagt

SEQ ID NO: 382739 - DNA, 201 bp, Homo sapiens
agcaatgtaataatacgaagtaatggttaagtattcagtttatagaaatttgactcagatgtttcaataaaatatctgtttttgtaaatcaaaagataacyaccttcattggtatttgggaccaaagtttttcctccttcactttctgcccttttggaagacacagtaaaaatagaattcatgaaacatttctaaataatg

SEQ ID NO: 382740 - DNA, 201 bp, Homo sapiens
acctgcttttcttagagtcctaacctctcaactcaggtgcaaggaagcagagtttgactacttttgtgggtactgaagacctagcttattgtaacaacaamaaaaaatgtggttttatttttagtaaaaatcagtgtccaatatgcgctctaaatataatctggttatttttgaaatttatgttaagaagtaagaatttgg

SEQ ID NO: 382741 - DNA, 201 bp, Homo sapiens
aacatttcaaggagaataaagaagcaattactttactaagttgaatagacaagtgatagttctgttcaaaagagactgttaatcctaagtcaaagcatgargtctttttggcctctgatttcaaatgctaataattacatccaaagagagaaaacaagcatctcttattttatcttctttcaaataagtatgcgtcacttt

SEQ ID NO: 382742 - DNA, 201 bp, Homo sapiens
aaaattcccatagtcccacaatcccttacttgaaactcttggagtcatgtgagttttgttttagaattatagcaaggtaatatgtatatttaccatatgcwatgtaacatccccagcagagaccagggcagccccctgtaatcaaaacaccaacaatttctgcaatgaaatatatgaatattcacactaagcagaagaaat

SEQ ID NO: 382743 - DNA, 201 bp, Homo sapiens
tctaatacagtaaataccaatagatataatccacataaacaaaagcttttgtgtcctcaaaaatatttaaagagtataaagaaatcctaagaccaaaaagkttaagaaccactggtttaaaatgatgaggccttggaaataacccaaatgtccaataagggagaattgattaaattacatattatgaatcagtgatgtaga

SEQ ID NO: 382744 - DNA, 201 bp, Homo sapiens
cagtgtaccctccatggatccctaggaggccataaagtgaaaattatttttctaataatagagtaataatactcatggtgcaaaaggaatggtgagtaaarctgctgcccttagcaagagtcaagacagtggtatcgtattcttaacagctacacataaagcattccacttaatgttccttgatgaagcattaaaaattat

SEQ ID NO: 382745 - DNA, 201 bp, Homo sapiens
gtctataaatttacctagtaatttatgtatgtatatttttacaaatatatataatttaccaagtaattccactttaagaatttatccccccagagtaagartatgtgtaaagatttaactataagaatgtacttttagcattgttaagaacattggttctcagtgtaccctccatggatccctaggaggccataaagtgaa

SEQ ID NO: 382746 - DNA, 201 bp, Homo sapiens
atcaaagtttttacttccaccaacaatgtaggagaatgttgtggtccgaatgtatcccccagaattcatgtgttagaaacttaattcccagtgcaacagtsttgggaacttttgggaactgtttagatcatgagggctctgcccttgtgaatggattaataatgttagaaaagggcatggtggagggagtttggtcctttg

SEQ ID NO: 382747 - DNA, 201 bp, Homo sapiens
caatcctccatctcagcctcctgagtagctgggactacaggcacatgccaccatgcccagctaatttttgtattttttgtaaagacggtttcgccgtgttrcccaggctggtctcaaacttctgggctcaagcagtccaccagcctcaacctcccaaagtgctgggattacagatgtgagccactatgcctagctaattta

SEQ ID NO: 382748 - DNA, 201 bp, Homo sapiens
gccagtcccgctgcacacgctcgcagtctgtgggccctccgggaggcggcggaggtcaccgcggggagaggggcgggcgcagcatggcagcctccttacgkctcctcggagctgcctccggtctccggtactggagccggcggctgcggccggcagccggcagctttgcagcgggtaaggacctcacgcctcctccccctt

SEQ ID NO: 382749 - DNA, 201 bp, Homo sapiens
ctaagttcaaaatggttacatttatttcaggataatttcggtctttttgttttgtttttgagacagggtcttgctctgttgtccaggctggagtgcagtgrtgcgatctcagctcactgcagcctccaccttctgggttcaagcaatcctccatctcagcctcctgagtagctgggactacaggcacatgccaccatgccc

SEQ ID NO: 382750 - DNA, 201 bp, Homo sapiens
ctatcataattctttgggtcagcttttcagtaaggctaaattccaaatttcagctctttcctactgttagatcaaagacttcgacatgtttaagctgaatraatttacttgttatgtttaaattttttataacatttgtgtaatagctatatacctttccaatgtattgtttcatttgagtgtcaaagttagtatggccag

SEQ ID NO: 382751 - DNA, 201 bp, Homo sapiens
cgcctgtaatctcagcactttgggaggctgaggcaagtggatcacctgaggtcaggagttcgagaccagcctggccaacatggtgaaaccctgtctctackaaaaatacaaaaattagccagctgtggtagtgggcgcctgtaatcccagctactcaggaggctgaggcaggagaatcacttgaacccgggaggtggaggt

SEQ ID NO: 382752 - DNA, 201 bp, Homo sapiens
aaagatactcgacttttctagaggacacagaatgactatcgtgtatcaagcattgcttatgtagtctttcacagtcctgtcgaagcagatattattcttttaacaagtgagaaaactgagtcttagaattagtaacttatggtggacgttttttcaaatactgtaatttatcaaagtggaatgttttttgcattaagttaa

SEQ ID NO: 382753 - DNA, 201 bp, Homo sapiens
aaaagatactcgacttttctagaggacacagaatgactatcgtgtatcaagcattgcttatgtagtctttcacagtcctgtcgaagcagatattattcttttaacaagtgagaaaactgagtcttagaattagtaacttatggtggacgttttttcaaatactgtaatttatcaaagtggaatgttttttgcattaagtta

SEQ ID NO: 382754 - DNA, 201 bp, Homo sapiens
aaaaagatactcgacttttctagaggacacagaatgactatcgtgtatcaagcattgcttatgtagtctttcacagtcctgtcgaagcagatattattcttttaacaagtgagaaaactgagtcttagaattagtaacttatggtggacgttttttcaaatactgtaatttatcaaagtggaatgttttttgcattaagtt

SEQ ID NO: 382755 - DNA, 201 bp, Homo sapiens
taaaaagatactcgacttttctagaggacacagaatgactatcgtgtatcaagcattgcttatgtagtctttcacagtcctgtcgaagcagatattattcttttaacaagtgagaaaactgagtcttagaattagtaacttatggtggacgttttttcaaatactgtaatttatcaaagtggaatgttttttgcattaagt

SEQ ID NO: 382756 - DNA, 201 bp, Homo sapiens
gagcaacccgcactcaccccagcgacccctggtctttcagcgcccccagggtgcaccttgggttggggacacacttgggcagcagggcctgatgtttaacyacctgagtccgaggggatggccttattacacaagcggtggctgtacaagccaggcagtaagtctttcagcaaagtttcagtcacccttgaccagcaagac

SEQ ID NO: 382757 - DNA, 201 bp, Homo sapiens; identical to SEQ ID NO: 83223

SEQ ID NO: 382758 - DNA, 201 bp, Homo sapiens
atctgtgttgatgattctgaaatgtagctacctgttaacctatttataaactagattgctggaaaataaggtgcctagatcagtcaagccactgatcattkgtctcccttgccttctcttgtgtggttctgtacccacggagttacaatttaataatatttatctattgtatgggttgtttagtgggttgaatagtggccc

SEQ ID NO: 382759 - DNA, 201 bp, Homo sapiens; identical to SEQ ID NO: 83225

SEQ ID NO: 382760 - DNA, 201 bp, Homo sapiens
ccaaagatgtcctataaaattgttaggagaaaacacagaggtaaatctttatgactttggatttggcgaaggattcttagatatgacaccaagagcatgarcaacaaaatgataaataggtaaattggactttatcaaaattaaaaacttgtgctccagagaacaccatcaataaagtgaaaaacaattcacagaatggga

SEQ ID NO: 382761 - DNA, 201 bp, Homo sapiens
gatttcagttttccttttagtttctaccatacatttgaagacagtggagttagaatcactttctctgatgcatagtgggcatatatcctagttatttaatrtctctgtgcctttctacatctgtaaaataggcattattatgtaacacatacctcaagggttgatttcttaagggtctagaaaagtgtctgatccacagta

SEQ ID NO: 382762 - DNA, 201 bp, Homo sapiens
tcttatttaaccagtagtgtttagtactctataattcaaaattggattcttcactctcgtatcaatctgcttagattttagaagacatataataaatggasagagaagatggagcatccccatacataaataagtcacgcacgacgtgtacattttgacacttaacacttcttttctttgacctttgacaggttagggctt

SEQ ID NO: 382763 - DNA, 201 bp, Homo sapiens
  misc_feature (1)...(201): n = A,T,C or G
cagaactcttactctggttcacaaaacaggacttctagaactttgagaagaggcagtttggtgtgatgggacgatcacgggatttggattcaggactccantgtaggtcacttactagttgtatgacttgggtatgttcacatatacccaaaagtcaaccacagagtctttgccacagaaaaggttgctcagagaacataa

SEQ ID NO: 382764 - DNA, 201 bp, Homo sapiens
ggtttctttgaaattagtcctgaagaagaggtgcccataaaaatctctttttacattctttggcatgcctaagactgccttgcaacagttgtcatagacartaattcatatataaggtgttaagttcttaacacattcaaagaagactgctgactcactgcccaagataacatggttgaggcagctccagcagtttgtcgc

SEQ ID NO: 382765 - DNA, 201 bp, Homo sapiens
attcaccaagaataactcataggatgaatggggccaggcgaaggtgtggcttttgggataaaaaataaccaagttggtctgagtactttttgttttattgkttttattctcatcctgctatttcttctcatctttcctattttggtttctgacctaaaaattcagtctcttttcttcagatagtctcttcgttatcttaaa

SEQ ID NO: 382766 - DNA, 201 bp, Homo sapiens
tttacattctttggcatgcctaagactgccttgcaacagttgtcatagacaataattcatatataaggtgttaagttcttaacacattcaaagaagactgstgactcactgcccaagataacatggttgaggcagctccagcagtttgtcgcctaagaaaattacagaagaatgtgttagagaaggcaaggtgatcacttt

SEQ ID NO: 382767 - DNA, 201 bp, Homo sapiens
ttttttgaagatagaggctgtaactttaaaagggtagattgttatattctaggaagtatgctaagtgaacatatgacagtgttttcatgaaggagagatgrtatgggaaaaccatagcaataaaggtgaagaaaaataagaaatgtgaaagaagacccattctgtttttgttgtttaagggagagaactccctgaccccgt

SEQ ID NO: 382768 - DNA, 201 bp, Homo sapiens
ctggctggaaattacattttaatgagtatgaatatgcgtggggagataaaaatgttgcaaatattttctgccagtttgtcctttctttattcagtttatgrtaatttttaaaatacagaagcttggaattatcgtacagttgagtgtatcagtcttctcctttatggcttctgagtttggtgtcctatccagaaaaggttt

SEQ ID NO: 382769 - DNA, 201 bp, Homo sapiens
attgctagccagaaaattgcccaactagatagtgatgaaaactggagtttagccaactcttatttttgtgtgattttactcttttcctgtggttggttggmttggcaaagacctttagtgggttgtttgattatggcaggaccaaggtcaagtttagctttgcctgacttcaatgatgttatcttttcaaaccaaaatgcc

SEQ ID NO: 382770 - DNA, 201 bp, Homo sapiens
ggttgttgagaagggaactggcaagcagagtttataatctattagtggattttttttggcatgcgaaacatagtaggaaagagtaaataatgagaaagtaygtttgcatgtaaaattgatcaagtgaaaccttaaaatgatgtgaaataattcataattgttagagaatgcttatttgtcagtaatcttcaggtttaaaaa

SEQ ID NO: 382771 - DNA, 201 bp, Homo sapiens
ctaattaggcattgcaattatcatttggtgttgtactgaaagaattatattggtaactgatgcttttcatcttgttagtatttttaatccctctcaatatrtataatctttcagtagtttcatcaaaagaaatctgttccaacaactttaaacagaggaccttcaagagtgtgaggtgtgtgtaatagttttatcttgaag

SEQ ID NO: 382772 - DNA, 201 bp, Homo sapiens
aaatgattcaaataatatttgctaatattatgaccaaactttgaagaaagtgatagttgtattttataggattaagtgagatccttatctgggactatgamgggattaacagataccttcagattgctttacagctgaggtgtatgtagatagatgtagagctctaaagggattaggtgggtggtggttaagcaatagcag

SEQ ID NO: 382773 - DNA, 201 bp, Homo sapiens
tcaatctctacgaactgtagatactgatgtttccaaaacagagtatgaaatgactatacataaaacatttaaagaaataaaagatagcctggagcagtggytcatgcctgtagtcccagcactttgggtggctgaggcaagtggatcacctgaggtcaggagtttgagaccagcctgaccaacatggagaaatcctgtctc

SEQ ID NO: 382774 - DNA, 201 bp, Homo sapiens
tgggtgatgtagttgtgaacattttaaatttacatgcaaatttcatagtagtcatctttccttcaggtccaaggaaagtatggcagcagatatgccttctktcttttgccttggagggattttgacctgacctgaaggtagaagattgttgtttttttgcatttagcttaggttacctacagggataggaaagatgtggat

SEQ ID NO: 382775 - DNA, 201 bp, Homo sapiens
tctccatgggttcctgtctttaaagagttatagtactattatgtattttaaagttacttttggccaggcgtgatggctcatgtctgtaatcccagcacttygggaggctgaggtgggcagatcacctgagatcaagagtttgagaccagcctggccaacatggtgaaaccccatttctactaaaaaaatataaaaattagc

SEQ ID NO: 382776 - DNA, 201 bp, Homo sapiens
aactttgccaagttttctggctagtttcttttcattcgtcctcagtaatagacactaatgctagtttcttaaccagtgaaccagtatcacctttgtatttkgttgattgattttctcccagcttggttttatttatgttttaactctactttttccacgcactactgtcagaagttatttaaagagagatgcattatttag

SEQ ID NO: 382777 - DNA, 201 bp, Homo sapiens
gtaaaaagatactcgacttttctagaggacacagaatgactatcgtgtatcaagcattgcttatgtagtctttcacagtcctgtcgaagcagatattattcttttaacaagtgagaaaactgagtcttagaattagtaacttatggtggacgttttttcaaatactgtaatttatcaaagtggaatgttttttgcattaag

SEQ ID NO: 382778 - DNA, 201 bp, Homo sapiens
gtattttaatttagttctatatctcttttcccttaatcctaatttgtagaagtgtggctgttcaaacagactctcatgtattttgaaatacatgcagtgcsgtttttgtatgggagcaagtactatggattttcttgggctataacttagtagcatggcagtaggttatagaaccagtccatgaatcctgcagttcttact

SEQ ID NO: 382779 - DNA, 201 bp, Homo sapiens
ctactaaaaatacaaaaaattagctgggtgtggtggcaggtgcctgtagtctcagctacttgggagggtgaggcaggagaatggcgtgaatccgggaggcrgagcttacagtgagccgagatcgtgccactgcactccagcctgggcgacagagccagactccatctcaaaaaaaaaaaaaaaaagaaaattaacaaactt

SEQ ID NO: 382780 - DNA, 201 bp, Homo sapiens
gtagaattcatacaataggtagccttttgtgttaatagcagacctcctaagaacaactgaagccagaaaacagtagaacaatatcatcaaaatacaagtarctgtcaccttagaatttgcatccaacagaaccaagaatgatagtaggttccagttgtggttaagatgaagtaaatatactgtcctttctctcctactgaa

SEQ ID NO: 382781 - DNA, 201 bp, Homo sapiens
gttctaatggtattttaatgaacccttgatgtaccttttagagttatgaaagttcttaccaattcatggtgaaagagcctgaggcctaagactgtaatacrtgcctctgtaaactgggagggcctacctcagagtgctgattagactactttggcatatggtcttgtactttgggttctttggcccaaaggtaattgtcag

SEQ ID NO: 382782 - DNA, 201 bp, Homo sapiens
tgaagtgtagagattgatgaatttggacaactatatatagtcgtgtaaccgtcatcacgtttaaggcagaggggagtttctatcactccagaaactccccrcatgcttttttgtagtcagttccttcctcagccctaggtaaacactgatttgctttctgataccatagttttgcctcttctagaatatcgtgtaaaaata

SEQ ID NO: 382783 - DNA, 201 bp, Homo sapiens
ttgacataaacccacagaaacaggaaggacaatgtatatcaaataggagtttaaatttttttaaaaaagaaatcttactaaatacatgatagtaaaactagcgcagtaccaaatacaaacgtgtaaagcagctgggaaaaaaagacacattacctataaaagaacaatacagactgataccatactttctttttactcccc

SEQ ID NO: 382784 - DNA, 201 bp, Homo sapiens
gttgtagttttatgccccaaatgaatgtgatatttctcttcttggaattttgaacattttaacttttgtatgacaatattttgtgtattaaagttaattttataatgcagtaatagtctggctcaccaaatcaaattcttaatttgagcaagaattgcatattaattatttttgtataccctgaagagctgagagtgggtt

SEQ ID NO: 382785 - DNA, 201 bp, Homo sapiens
ttgaacccgggaggcggaggttgtggtgagccgaaatcatgccactgcccttcagcctgggcaacaagagcgaaactccatctcaaaaaaaaaaaaaaaaagagaaatgatgcttggaaagttcacaaatgtgctgtagaagtaatttcttccgaaaggtcattgttatagaaatctctttaagaaaaatttaagagatga

SEQ ID NO: 382786 - DNA, 201 bp, Homo sapiens
tctccaaatgcaaaatggtcctggctcaaaaatattcttatttaaccagtagtgtttagtactctataattcaaaattggattcttcactctcgtatcaayctgcttagattttagaagacatataataaatggagagagaagatggagcatccccatacataaataagtcacgcacgacgtgtacattttgacacttaac

SEQ ID NO: 382787 - DNA, 201 bp, Homo sapiens
gcttgaacccgggaggcggaggttgtggtgagccgaaatcatgccactgcccttcagcctgggcaacaagagcgaaactccatctcaaaaaaaaaaaaaaraagagaaatgatgcttggaaagttcacaaatgtgctgtagaagtaatttcttccgaaaggtcattgttatagaaatctctttaagaaaaatttaagagat

SEQ ID NO: 382788 - DNA, 201 bp, Homo sapiens
  misc_feature (1)...(201): n = A,T,C or G
tgctgaatatttctgtagagatttagagtatcttatacatgcctggcataaatacagattggaggcaggatgtttttagttggtttctctaattttattanctgcctaaacattttaagaaatatattcttttgcttctatccctttacccccaaatgattcaggtgtaggagctgcacgatctgggaacctcacgtttat

SEQ ID NO: 382789 - DNA, 201 bp, Homo sapiens
tttctaccatgctatttatcagccaaccatttgttgagtatatcatgcactataatagataatggggatgctggcaagccatgacctcagtgctgactttktaggaagtttataatggaggaatcagacaagaaaatccaagattttaataaagtatgataaatgctgtaatagaatcaagcacagggtggattttggttt

SEQ ID NO: 382790 - DNA, 201 bp, Homo sapiens
cagcactttgggaggccgaggtcggcagatcacctgaggtcaggagttcaagaccagcatggccaacatggagaaaccccatctccactaaaaataaaaaataagtcaggtgtggtggcgcatgcctgtaatcccagctacctgggaggatgaggtaggagaattgcttgaacccgggaggcggaggttgtggtgagccga

SEQ ID NO: 382791 - DNA, 201 bp, Homo sapiens
tcaccatgttgtacagtaggtctcttgaacttatttctccttatttctgattttctaaaagctctctattttttttgctctgataagcaaacccacattgrttgtgaagagtggtggagtattatgtgcatttagataacaggcagaactcagcgtctaataaaaagcataccagattacttgctcagttcatgttaaact

SEQ ID NO: 382792 - DNA, 201 bp, Homo sapiens
gttataacttgtccaagaggtgtgaccctgcactgtgatttctttccaagtcttttaactcaatcacgtttttcacttttaactcttcataataatgtccycatacatgtacacttagcttatgcatgtttatgtagcagtaagtgaaaatgccattaccacatgtaaagaatcatgctgccccaaagttgagcttttaaa

SEQ ID NO: 382793 - DNA, 201 bp, Homo sapiens
aggcccaggacattactgtacactgctgtagacttgataaacactgtattcttagggtacactaaacttataaaaaatatttttcttcaataataaatcarcttcagcttactgtaacatttttactttacaaacttaaatttctaaaaaactttctgactcttgtaataatactcgaaacagcaacacattatacagctg

SEQ ID NO: 382794 - DNA, 201 bp, Homo sapiens
atggtcattatgggtaaataatgaaccaggtctgcaaatgtagcagctgccaacttgggatagaagaacggctattgcttccaatttaaggatctatcgascgcttctcttctccctgcagatcttctgcagaaaactaatgttttctgctgctgtgtattgtggtttcagctgtttcagatatagcctataatttccttc

SEQ ID NO: 382795 - DNA, 201 bp, Homo sapiens
aatattatgaccaaactttgaagaaagtgatagttgtattttataggattaagtgagatccttatctgggactatgaagggattaacagataccttcagawtgctttacagctgaggtgtatgtagatagatgtagagctctaaagggattaggtgggtggtggttaagcaatagcagatgtcccttttaaaatcttcaaa

SEQ ID NO: 382796 - DNA, 201 bp, Homo sapiens
accatcttgatctgaggtgaatgccaaggaattgctttttaaagtgatttttagaataaaagaaaaccatttcatctctgatttgccctccctttaaaaaycccactctgcatttctgtcttacggcttctgtactgcatcagtcctcctcaagccagccagctccatgcggaacattctgttgctctttcagcataagca

SEQ ID NO: 382797 - DNA, 201 bp, Homo sapiens
caaggttttagtccttgaagtagaccaaaaataaaataatttttaaactacttcccagaggagtgtttttctgctcaataaggaaacagtcacatggcatycaaactctatacaagcagtactgtgtcctttgtcctcacgcaaatctggttagttacctttccttaatgttatgttaatgcaccatcagaaatggttgca

SEQ ID NO: 382798 - DNA, 201 bp, Homo sapiens
gctatactaataaaatgtggtattagtgaaagacatagagatcagtgaaacagaagagagtttaaaataagactcgtgaatgtttttgttttttgacaaakgtgcaaaggcaattcagggagaagggatggtcttttcgacaaatgataaacaattctacatatattaagaaaaaaaggttgttgatctatagctcacatc

SEQ ID NO: 382799 - DNA, 201 bp, Homo sapiens
gaaatttgaagaaaatcactggatatgttcaaaagcagagtgcttgtgacaaagaaaagagtcagtggatttggagacagaaattacatgaatggaaattrtctaatcagactaaaagaagaagactgtaagaaaatggacagagccttgggatcccctgagataataccaagaaatatctaacatttgtgccagtggagt

SEQ ID NO: 382800 - DNA, 201 bp, Homo sapiens
tctcacaagtgcttcgattatacagtagtcttgtatgtgatatttattcttatgttttattcttacctcagtaagaatttatttttgttacacacaatgartaagttctggagagctgttgtataacatagtgcctgtagttaacaatatcgtgttgagtattaaaaatttgttaagaaggtagataccaggataggtgtt

SEQ ID NO: 382801 - DNA, 201 bp, Homo sapiens
accccatctccactaaaaataaaaaataagtcaggtgtggtggcgcatgcctgtaatcccagctacctgggaggatgaggtaggagaattgcttgaacccrggaggcggaggttgtggtgagccgaaatcatgccactgcccttcagcctgggcaacaagagcgaaactccatctcaaaaaaaaaaaaaaaaagagaaatg

SEQ ID NO: 382802 - DNA, 201 bp, Homo sapiens
ccatcaaatttcatataactgaaattgccttggtttataatgtgtggagggggaagggctatcagaataggtctttttttgatactctcacaagtgcttcrattatacagtagtcttgtatgtgatatttattcttatgttttattcttacctcagtaagaatttatttttgttacacacaatgaataagttctggagagc

SEQ ID NO: 382803 - DNA, 201 bp, Homo sapiens
ggtatagagcagttgtggccagtacagtggtgacattccagctatcactactgttgtgtatttcttccgggcctgtgagctttgatactactttcctatayaattgaggggttagcagtattctggcaatgcaaccatctcaagaagcagatgctagggatgcagggggctgattggccaccccatgcacttggcaagtgc

SEQ ID NO: 382804 - DNA, 201 bp, Homo sapiens
cctccctccctcccttccttccttctttccttccttccttctctctctccctgtctctctttctctctttctttttttccacattgctctacactgcagtygctctggattattgtaatattcttaaaaccttgaaacccagttgccaaacttcctgagagctcatgtagactatcagttggaatggaaagaatgttcctt

SEQ ID NO: 382805 - DNA, 201 bp, Homo sapiens
tgagattgagaaccactctgctagaatgtaaactccacagaccaaagatttgttctcttgctcattgctgtattctcaatgcctgtaacaatacataatcmaatagtaggcactcagtcttgtgtttaatggatagatgagtgaatggataaatgaacaaatgaatctttctggtaaaaaagatataaattgcagtacaag

SEQ ID NO: 382806 - DNA, 201 bp, Homo sapiens
taatcccagcactttgggagactaaagtgggtggatcacttgaagtcaggagtttgagaccagcctggccaacgtggtgaaaccctgtcactattaaaatrcaaaaaaatttaaaaaaaaattagctgggcctggtggcagtcacctgtaatcccacctacttgggaggccgaggcatgagaattggctaaaccctggagg

SEQ ID NO: 382807 - DNA, 201 bp, Homo sapiens
gggaggccaaggtgggcaaatcactggggcccaggagtttgagaccagcctggccaacatggtgaaaccctgtctctaccaaaaaatacgaaaattagccrggcatggtggcgtgtacctgtagtcccagctactcgggaggctgagatggaagattcacttgaacctggaaggtggaggttgcagtgagctgagattgtg

SEQ ID NO: 382808 - DNA, 201 bp, Homo sapiens
accctatattaaaaaacaaacaaacaaaaaaaacaacgaagacatgatcacacacattagcctgggcctttcctaagccttcacattcactcatttgataytactgtgctgtgtggtttggatatatgagccctccagacctcatgttgaaatttgatccccagtgttggaggagaggcctcatgggaagtatttgggcca

SEQ ID NO: 382809 - DNA, 201 bp, Homo sapiens
ttttctgatttctggatctgcatttttatttattggactccttcaatcaagctcatttttggagtcaaactttttcatttcagtaaaaccagctctagctcttggtcctctatagtatattacaatttcagtttttctaatcttttaggttcaaattctgaaagtagcactgtccaatagaaatgtaatataagccacacg

SEQ ID NO: 382810 - DNA, 201 bp, Homo sapiens
agctgcggacctgggaattctgattggtctgcttccctgtccgtaaagggattgacaggccctgccgcgtcaggccgctcctctcggctccgcgctccttycctcgcgcgtgggcacccgcccccgagcggtgagagcgcgtgcgcgcgcgcccttctccgtgggcgagccagccagtcccgctgcacacgctcgcagtct

SEQ ID NO: 382811 - DNA, 201 bp, Homo sapiens
tttctcactgaagtgaatctgggcatgattcttgtattgagaaatgcctagtatagtctcaatataattgattgcatttctttcattaaaatcaggggaarcatgtttgtttccttgacacctgtgtttcatgaaaaatcgtagaaaacagccacatgtattttaatttagttctatatctcttttcccttaatcctaatt

SEQ ID NO: 382812 - DNA, 201 bp, Homo sapiens
ggtagtatgcatcaaaaacttttatacatacacacacgtgtgtgcatatacatacacatacatacacacgtgtgtatatatgcacacgtgtgtgcacatgsaaatatacacacgtacttttatacatacatatgtgtgtgcatatatacacacatatatacatatataaaaaacatgcacacctgtatgtatgtataaaag

SEQ ID NO: 382813 - DNA, 201 bp, Homo sapiens
tgatgtaagttatttgaaccaactcagagaacagtttggtagtatgcatcaaaaacttttatacatacacacacgtgtgtgcatatacatacacatacatacacacgtgtgtatatatgcacacgtgtgtgcacatgcaaatatacacacgtacttttatacatacatatgtgtgtgcatatatacacacatatatacata

SEQ ID NO: 382814 - DNA, 201 bp, Homo sapiens
tgtggaacaaaacaaacaggtattgtggaaggtggaaaaatcgaagagacactcagaaatcaaggtttctgtctggagcaattttgcagttatatgaaagygcttatttaaaaatgttaacttaccatagtatttataagtatcttattttttcagattacatttttccttctttcaaaccaaaacataaggaagcacagt

SEQ ID NO: 382815 - DNA, 201 bp, Homo sapiens
gtgatgtaagttatttgaaccaactcagagaacagtttggtagtatgcatcaaaaacttttatacatacacacacgtgtgtgcatatacatacacatacatacacacgtgtgtatatatgcacacgtgtgtgcacatgcaaatatacacacgtacttttatacatacatatgtgtgtgcatatatacacacatatatacat

SEQ ID NO: 382816 - DNA, 201 bp, Homo sapiens
tgaaagcgcttatttaaaaatgttaacttaccatagtatttataagtatcttattttttcagattacatttttccttctttcaaaccaaaacataaggaascacagttccaaagagcctttaccaccagtctcagcgtgttctctcctcctgtttgatttaggatctgggattggcacaagactctgctaccagcacaaag

SEQ ID NO: 382817 - DNA, 201 bp, Homo sapiens
acttcttttctttgacctttgacaggttagggcttgacccaaaactactggctaaaatcctaaatatgagctcaggacggtgttggtcaagtgacacttayaatcctgtacctggagtgatggatggcgttccctcggctaataactatcagggtggatttggaacaacactcatggctaaggtatggtaaatgtagacac

SEQ ID NO: 382818 - DNA, 201 bp, Homo sapiens
agaatcagttgaacccaggaggaggaggttgcagtgagctgagattgtgccactgcactccagccggggcaatgagcgaaactctgtttcagaaaaaaaamaaaaacaacaaaaacatctttatgtaacaccctaaacatttcttcaacagcttattccaaagtctttttatctttgttgttgctggtattattttattta

SEQ ID NO: 382819 - DNA, 201 bp, Homo sapiens
ggagtgcagtggcgccatctgggctcactgcaagctccgcctcccgggttcacgccattctcctgcctcagcctccccagtagctgggactacaggtgccygccaccacgcccagctaattttttgtatttttagtagaggtggggtttcaccgtgttagccaggatcgtctcgatctcctgacctcgtgatcagcccgcc

SEQ ID NO: 382820 - DNA, 201 bp, Homo sapiens
tttgtgtgtcagtttatcacactgggttgtttctgtattttaaaacatttcatccttatagcatccccatgaaatgcagattatcctctttttttttttttcagtgaggaagttgagtctcaggaaggcacaataggacaatatgcaattttaagaattagcctgatttagcaaaaataagacattttaggtagaggattt

SEQ ID NO: 382821 - DNA, 201 bp, Homo sapiens
tttgcatgtaaaattgatcaagtgaaaccttaaaatgatgtgaaataattcataattgttagagaatgcttatttgtcagtaatcttcaggtttaaaaaawttttttttaaagactgacgccttgtaatgtaaaacgttcagcaatgaagatacccagttttaagtgtacttttggcatagtatatcagcttagctctaaa

SEQ ID NO: 382822 - DNA, 201 bp, Homo sapiens
tctttttttaattctcttgctgtttggccccagagacagatctagttgcaggaagtacaagactttctagtcagaggaccgggtggcagtgggggatggargtggggtagtagagtgtcagagagtggggcccttcacagataagagggagctcataaagggaccgcatgatgttatgtatgaacttctgggcccaccctt

SEQ ID NO: 382823 - DNA, 201 bp, Homo sapiens
aattgcctcctgctgtccatgaattgcttcttggcttgttgtgttagaatttctcaccagggtcttttgtgagctatgtagccaacattaaaaaaaaaaaatcaaatttgatagagtaaactggactagtaaaaattatacttactattcataattataattgaggtttcttggctcagcatatcaattttatgcagtaag

SEQ ID NO: 382824 - DNA, 201 bp, Homo sapiens
gaagagacactcagaaatcaaggtttctgtctggagcaattttgcagttatatgaaagcgcttatttaaaaatgttaacttaccatagtatttataagtaycttattttttcagattacatttttccttctttcaaaccaaaacataaggaagcacagttccaaagagcctttaccaccagtctcagcgtgttctctcctc

SEQ ID NO: 382825 - DNA, 201 bp, Homo sapiens
aatttagaaaaatcattgaaatttaaaaattaatagataaatggtatatgggagcagaagagagagaattagtaaatgagatatctaaagaaataacccamaggtactacagaaagagttggaaatggaaaatatgaaagaaaagttgagacatgaatagaaagctagaaagaaaaagttatgcatgcatctaattggagt

SEQ ID NO: 382826 - DNA, 201 bp, Homo sapiens
aaactttgtgaaaattaagaaacgggaagaaaagtatttttctatgcactaatggcatattttattaaccctttaccttaggctataacatttttttttttgcagcattctttcattagataagcagctggaggaaggaggctagttagtttactgtaattgttaaatatctacaaacattcagatagttaaaataattat

SEQ ID NO: 382827 - DNA, 201 bp, Homo sapiens
gtattcaaagttgagaattagaaaagggcatggcatgtttgaagattaaatgagagtcagtgtatctggagttttgtttgttctaaattcagctacttacrattttctgcacaaattccctacttttttcgcctttatgcgtttgcttttgcagatcactttacacagaatttctttctctgtccctagtcgtttcttacc

SEQ ID NO: 382828 - DNA, 201 bp, Homo sapiens
agtctgccgctacatttttctcttagccagtgacatattctggttctgcactacctgtcaaagtttgttaaatacatgcaaggaaatttacagaatttttytcgttccttttttcctatacttcttccactcctgtttttagaataatgcatatatcagccactttgttagaataagtcatggtctttgctctcaagaagc

SEQ ID NO: 382829 - DNA, 201 bp, Homo sapiens
agcagtggtctctgaagtcagcctttctacttctgctttgatctccacctctcttaccttcttccccattaaatcaatttctaggagttgttccttaatasgtagttgagattgagaaccactctgctagaatgtaaactccacagaccaaagatttgttctcttgctcattgctgtattctcaatgcctgtaacaataca

SEQ ID NO: 382830 - DNA, 201 bp, Homo sapiens
atttgctctgcattggcccttgagtagctgaacatggttggagtaaatggatgaccatgttggtctggcttgaattttaaattaatgatcactaatcccargttggcccttagggctgcttgacagttccccttcatttccttagtccattcattcttttccatcacctaaacaattatttcacaccttctcttgtctcta

SEQ ID NO: 382831 - DNA, 201 bp, Homo sapiens
aagatgcaaagtacaaaatagagggatagattttaatgtaacatagtataaaaagttctttccacattgcaacaagcctttaagaaaccaccatttgtcargtttgggtttaatataaaagaaggatatccacaattatctgaaaaagttattaaaattctctcttacttttttaaactgcattatctatatgaggtcagc

SEQ ID NO: 382832 - DNA, 201 bp, Homo sapiens
ccttaaagacttttgtgaaaagattgttggtgcagttaaagaatgtgagtttctgttactgtatactgggaatttagaatatctgcataactaactgaacsagtattttccaattgaccgttgtatgatgttaccaaattatgcctagataaaagatgcaaagtacaaaatagagggatagattttaatgtaacatagtat

SEQ ID NO: 382833 - DNA, 201 bp, Homo sapiens
tatttgcttttgtagaaattggtgataatctaataatttatattgaatgtattgttcatagggaaaaaacatttttaaagaataaattgcagagaaaatgmgtgaactgatgtgaagtcagtttgttaagtcacctcccccttcacgtccaggtggactgaatttatgtggaggaattacataaccacctatcttcttaga

SEQ ID NO: 382834 - DNA, 201 bp, Homo sapiens
gtatcttttaagaggataatttaatctgtttagttactatcaaggttattattgatatgcaaggctttgtccctgtcatattgttaattattttctgatgktgttatatattttgtttctttccttttctctcattgttagtcattatggcatggtggatttctgtattggtaccatttgagtccttttttctttgtgtga

SEQ ID NO: 382835 - DNA, 201 bp, Homo sapiens
ttttatgaatctgggtgctccagtgttgggtgcatatatatttggaattgttatatcatcttgctggattgattcctttttcattatttaatgccctacarttaatgattgtctttttttattgttctttatttaaagtctgtttgatgtaagtataacgattcttgcttgctattggtttctgtttgcatggaatatctt

SEQ ID NO: 382836 - DNA, 201 bp, Homo sapiens
catatactgatggaaaaaatgtatattctgcaactgttggataaaatgtgctgtaaatgtctgttaggtccattttgtgtaaactccagtttaaattcaaygtttttttcttgacttcctgtctaggtgatctgtttaacattgagaattgggtgttgaagcccccaactattattggatctctctttcagatctagtaat

SEQ ID NO: 382837 - DNA, 201 bp, Homo sapiens
ccagtttctactaaaaataaaaaaaattagtcgggcgtggtggtgcgtgtctgtaagcccagctactcaggaggctgaggcaggagaatcgcttgaacccsggaggtggagatggcagtcagctgagatagcaccattgcactccagcctgggcaacagagtgagacttcgtctcaaatagaaaaaaaaaagaaaaagaat

SEQ ID NO: 382838 - DNA, 201 bp, Homo sapiens
ggggtttcactgtgttggtcaggctggtctcaaaccgctgacctcaagtgatctgcctgccttggcctcccaaggtgctgggattacaggtgtgagccacygcgcctggctgttttcagttttttaaaagttattcagacttattttgtggcctaataaaaggtctattctggagaatgttccatatactgatggaaaaaa

SEQ ID NO: 382839 - DNA, 201 bp, Homo sapiens
attacagccatgagtcatggtgcccagcctttattttcatcttaatttcttagtcaaccgcagtggtcattcaggagcatgtttccccgccaccccacccrtgtatttgtagaattcttctttgtattaattttagttatattttattgtggcgcgaagagatacttaacaggttttcagttttttgtttgtttgagatcg

SEQ ID NO: 382840 - DNA, 201 bp, Homo sapiens
ccaagattgagaggtgttataacttgtccaagaggtgtgaccctgcactgtgatttctttccaagtcttttaactcaatcacgtttttcacttttaactcytcataataatgtccccatacatgtacacttagcttatgcatgtttatgtagcagtaagtgaaaatgccattaccacatgtaaagaatcatgctgccccaa

SEQ ID NO: 382841 - DNA, 201 bp, Homo sapiens
taccttggcctcccaaagtgctggcctcccaaagtgctgggattacagccatgagtcatggtgcccagcctttattttcatcttaatttcttagtcaaccrcagtggtcattcaggagcatgtttccccgccaccccacccatgtatttgtagaattcttctttgtattaattttagttatattttattgtggcgcgaaga

SEQ ID NO: 382842 - DNA, 201 bp, Homo sapiens
ttagaaagtctatgttctcaactacagaaaataatttttagaccagctaactttcagatttctgcagtgcttattttctcccagttgagggttggtttttktttgtttgtttgtttgtttgtttttcctgattaaaaagtaagaatacggccaggcgcgatagctcatgcctttaatcccagcattttgggaggccgagga

SEQ ID NO: 382843 - DNA, 201 bp, Homo sapiens
aaaataataaatatacatttcttactttagaaaatgcttaatgagcaggatgctttactcagttgctttcatcacattccccaaaactgcttaccaaatayatcacaaaacagaatagtgtttcataccatagcttttgataaaagtaataaaaagagccaacatacttgagatatttttgaaaacacagtaatggattca

SEQ ID NO: 382844 - DNA, 201 bp, Homo sapiens
gctggagtgcagtggtgcaatcacagctcactgcagcctcaacctcctggacacaaggggtcctccagcctcaggctctcgagtagctgggactacaggtrtgtaccaccacacctgtctaatttttgtagagatggattctcactgttttcccagtctagtcttgaactcctgggctcaagtgatcctcctaccttggcc

SEQ ID NO: 382845 - DNA, 201 bp, Homo sapiens
ttggcctcctaaaggatgatttcaggttccacttcctctctgttcctgccttcagtggtcttgttgctctgaactcctatctcttatagcctctaccttayaattcaccacttgtttttgttgccttttcatacagcatattactcccatttccaattagattgtaagttccatcccttaaagagcagttgtgccctatag

SEQ ID NO: 382846 - DNA, 201 bp, Homo sapiens
tcatttgattttatttgaggcttctctcttcttttcctggttaaactagccaatggtttatcaattttatttatctttttgaagagccaaatttttgtttygttgatcctttgtatttttaagtctctatttcatctagctctgctctgatctttattatttattttctcctgttcattttatgttatgttatgatctttg

SEQ ID NO: 382847 - DNA, 201 bp, Homo sapiens
aatctcacttgatcgtgttgtattatctttttgatatgctactggattctgtttgctagtattttgttgagaatttttgcacctgtgttcatcaggtatayaggcctgtagttttctttttttgttgtgtccttgtctgattttgggatcagggtgattccagcttcatagaatgagttagggagaattctccccatttca

SEQ ID NO: 382848 - DNA, 201 bp, Homo sapiens
atcatgttggatgataacatctgctggttaagtcttgagttgtttggatttgttaaactttatcaataactcaaattacaggagaccatgtatcagtatcygaatatagtttgttttttctagatatgagggaaattcttcttggtcaagttgtagagtggtaactgaggatagtgtgtgatcccagaacagagaatacta

SEQ ID NO: 382849 - DNA, 201 bp, Homo sapiens
cacatttttatgaaagttgtaatccttatttaatgtctcatgttgtttagtcatgccattttggatacatacacgtgtgtgggtgggtgtgtgtgtgtgtgcgcgcacacacgcagtgggtctgctaccacagtgttggttccaacttgatcagctctcgtctataatgaatgctagacatacagcaaattaaaactaaat

SEQ ID NO: 382850 - DNA, 201 bp, Homo sapiens
tctgtgcttcactgtcttctttttcttcacctttcccagcaccccagaccctgcttccttggatcccatgatagtactcctcctatccaattataccatgyttatttaattgtctttctccttaacacaatgtgagtttgggtgggctgtggctgttttgctcatcattttatcccagcttctggcacattgtcagcacac

SEQ ID NO: 382851 - DNA, 201 bp, Homo sapiens
tcacatttttatgaaagttgtaatccttatttaatgtctcatgttgtttagtcatgccattttggatacatacacgtgtgtgggtgggtgtgtgtgtgtgtgcgcgcacacacgcagtgggtctgctaccacagtgttggttccaacttgatcagctctcgtctataatgaatgctagacatacagcaaattaaaactaaa

SEQ ID NO: 382852 - DNA, 201 bp, Homo sapiens
aagtatacccaatggagttgtaaacctaattcagtgttaattttatatatatgtaatcattcatccaacatccagatttgcagtaaaggagagttctcgtyagacattcaggggtatctattctttggcaggtgacttggaacattttgcacgtttggtcagagggccttgttttagctctgtatcagttttctgagatag

SEQ ID NO: 382853 - DNA, 201 bp, Homo sapiens
acttgtgcaaatcacatttttatgaaagttgtaatccttatttaatgtctcatgttgtttagtcatgccattttggatacatacacgtgtgtgggtgggtgtgtgtgtgtgtgcgcgcacacacgcagtgggtctgctaccacagtgttggttccaacttgatcagctctcgtctataatgaatgctagacatacagcaaa

SEQ ID NO: 382854 - DNA, 201 bp, Homo sapiens
aatatatataaatatatttatatgaatatatataaattataatttatataatttttatatgtaatatatataaattatattatatatatttatatattatrtaaatataatatatatatttttggatatatatatcctatatatataaaatatatatataatatatatataaataatatatatatatttttttggagatgg

SEQ ID NO: 382855 - DNA, 201 bp, Homo sapiens
tacacttcaaagagagttaaataatctggagataacctggaggacagcttcagaaagataaatatataaatataaatataaatatatatatttatataaaatatatttatataaatatatataaatatatttatatgaatatatataaattataatttatataatttttatatgtaatatatataaattatattatatata

SEQ ID NO: 382856 - DNA, 201 bp, Homo sapiens
gaaccagtggaatttggaattagatttgacagttccttagtacatattctttaaataaagaagaaagggaattagttcatataattctcctaccacctttatttttttgttgttgtgctttatctgtctgtctatctatctaaacgaggctctttctaccatccagggaaacttctttcaatttattcttttatatatata

SEQ ID NO: 382857 - DNA, 201 bp, Homo sapiens
atattttctagagttctcatatatttcaagagggaaataaagattgctaaatggaagaattagtgaccttagggctaagcagcagatgaacattccagctrgacccaatctaaagtgcttacctacagaattgtgaacaagtaaggccactaaatttgggggtgggtgttatatgtagcagtaaataactgatgcagccaa

SEQ ID NO: 382858 - DNA, 201 bp, Homo sapiens
catagatacagccagattcttttcttttctctttgcttctggagtctgcttttctccatcaggctcctctctcccttcaaggtgcaagatggccacctgcmgttccaggtgaagaagtattttagaatattatgaccctggaggcttttcttcaagctttagtaaaaccgtagtcatgcacctcataaggatgttttggtc

SEQ ID NO: 382859 - DNA, 201 bp, Homo sapiens
tatctgcatgtgtaatattttatggttaaaaaaataaagaatgaaaacaacaaaacctaacataaaatctttttatatcccttaggagcacataaagattrtagagatagagatgattagagaacaaccaatttaactgcatgcaaagtaacatttttgttttttgtatgtttaggttacaaaaaaacaatgaaattgtgc

SEQ ID NO: 382860 - DNA, 201 bp, Homo sapiens
gattcacttgaacctggaaggtggaggttgcagtgagctgagattgtgccactgcactccagcctgggtggcagagtgagacctgtctcaaaaaaaaaaamaaacaaaaaaaacccacaacaacaacaaaaaaccccactagatttaatctatacagctgattccaggccaacagaaggacctttagttctggaaatggaa

SEQ ID NO: 382861 - DNA, 201 bp, Homo sapiens
gaaacccagttgccaaacttcctgagagctcatgtagactatcagttggaatggaaagaatgttcctttttgtgttttccttctgtttttgcatatttgcmacaagggcatatttgcttttgtagaaattggtgataatctaataatttatattgaatgtattgttcatagggaaaaaacatttttaaagaataaattgca

SEQ ID NO: 382862 - DNA, 201 bp, Homo sapiens
gccaagatcacacccttgtactacagcctgggcgacaagagcaaaactccatctcaaataaatagtaaaaataaaaatgacttttaaagctgaaagatacrttatttgcaagacggagttttaaaaatcatattctccaggggcattaagttaactgtctttgtgctccagttatttagctttcaggagtttagtgtttta

SEQ ID NO: 382863 - DNA, 201 bp, Homo sapiens
cctgcctttaaccatttctctgttatttgagggagatattcaaggattgaagcgaacagagtccctcactgaaaggctggaaatataatttcacttaaccrtacctggtagtatcttcttaaatggtataagaaagtgcttttctaattcaaatgattcaaataatatttgctaatattatgaccaaactttgaagaaagt

SEQ ID NO: 382864 - DNA, 201 bp, Homo sapiens
ttgtaataatactcgaaacagcaacacattatacagctgtacaaaaatattttttcctgatattcttattttataagctttttttctattaattaaaaatwtttttttttttaccttttaactcttttctaaaaaaggaagacatgggggctgggcgcagtggctcatgcctgtaattccagcactttgggaggccaaggc

SEQ ID NO: 382865 - DNA, 201 bp, Homo sapiens
tcagcctccccagtagctgggactacaggtgcccgccaccacgcccagctaattttttgtatttttagtagaggtggggtttcaccgtgttagccaggatsgtctcgatctcctgacctcgtgatcagcccgcctcggcctcccaaagtgctgggattacaggcgtgagccaccgcacccggccatcaatttttaaaacta

SEQ ID NO: 382866 - DNA, 201 bp, Homo sapiens
atgcgtggggagataaaaatgttgcaaatattttctgccagtttgtcctttctttattcagtttatggtaatttttaaaatacagaagcttggaattatcrtacagttgagtgtatcagtcttctcctttatggcttctgagtttggtgtcctatccagaaaaggtttactgtcactaagtttgtaaaattaaaaagaaat

SEQ ID NO: 382867 - DNA, 201 bp, Homo sapiens
cttgtaataatactcgaaacagcaacacattatacagctgtacaaaaatattttttcctgatattcttattttataagctttttttctattaattaaaaawttttttttttttaccttttaactcttttctaaaaaaggaagacatgggggctgggcgcagtggctcatgcctgtaattccagcactttgggaggccaagg

SEQ ID NO: 382868 - DNA, 201 bp, Homo sapiens
gccttcacagaattgaagaaagttagggccttgttctgggttaagctttggtttaagggaatgttttggctggtttgatctatccagaccactcaaacttwctccctatcagcagtaaggccgtttcacttatcattcatgtgttcactggaatagcatttgtaattttcttcaagaattttttctttgcattctactgtt

SEQ ID NO: 382869 - DNA, 201 bp, Homo sapiens
tccacatgccttaaattctaaccaaactggactattcactaattcttaaatatttaccttatttactcaagtcccaatgtagatgccacctcctgtgatcyctccttaggtaaaagtcaccctccctgtgaagcaccatgacaggttagggtctcacctacattgtaattactgtatacctatgttctcagctacactgta

SEQ ID NO: 382870 - DNA, 201 bp, Homo sapiens
aagaagacccattctgtttttgttgtttaagggagagaactccctgaccccgtcaaaacattttagcatctgagaaataagaagttacttatctctgttayttcttccatatcccatagtaacttaaactttgatttttttttcccattggcaacaaaaatgtgatatagcattccttttacttatgtctgaattttgaat

SEQ ID NO: 382871 - DNA, 201 bp, Homo sapiens
ctggctaatctggggccacccagtctttgtggcagtcaggatggttctgaaaagttattatgtttaaccctcagattggcaaagatacaaaagtctagtcytagcatagatagggaagatgtgtagcctcatagactgctttggtgatgtaagttatttgaaccaactcagagaacagtttggtagtatgcatcaaaaact

SEQ ID NO: 382872 - DNA, 201 bp, Homo sapiens
tgatgttatcttttcaaaccaaaatgccttatgataatgagattcttcatttaaaaaaaaaaagaacaattcttgatctttatgcatgttttgagtgatgkgttttttgaagatagaggctgtaactttaaaagggtagattgttatattctaggaagtatgctaagtgaacatatgacagtgttttcatgaaggagagat

SEQ ID NO: 382873 - DNA, 201 bp, Homo sapiens
taatttaatttaactctattaacattttatagatggaaaaatcgaggttcaaagaggataagtgacttgcccagggttctctaggttgttagcaactctargactagaatcagttttccagctaaatctaatgttcttcccacactatgtcacaccttcctcccttcagtctcgttccttggtggcctcctgtcttcttca

SEQ ID NO: 382874 - DNA, 201 bp, Homo sapiens
tgaggaagttgagtctcaggaaggcacaataggacaatatgcaattttaagaattagcctgatttagcaaaaataagacattttaggtagaggattttcartattattgcaggagactaatacattcaagtttggagtttctttgggttgctagaataactaaaaggctttggtttgtttcatttaaaaacaaaatagaga

SEQ ID NO: 382875 - DNA, 201 bp, Homo sapiens
tttggtagaactcagctgtcagtttgtctggtcctggacttttccatgttgaaagatgttttattattctttccatcttgctacctataatgtcagttcargttttctatttctttctgattcaatcttggtaggtcgtatgtttctagaaatttttcatttcctgtaggttttcctgctttttaagcgtatagtagttca

SEQ ID NO: 382876 - DNA, 201 bp, Homo sapiens
gattaggacacagttaatgtggctttcaaagaaaagctggcattttggctttatagtatttttaatactagatttttagtaattttctataaatatatagkcaaggaaacaatgacttactgtatctgcatgtgtaatattttatggttaaaaaaataaagaatgaaaacaacaaaacctaacataaaatctttttatatc

SEQ ID NO: 382877 - DNA, 201 bp, Homo sapiens
ctttttaaatatctgaaatttagaaaaactgattaggacacagttaatgtggctttcaaagaaaagctggcattttggctttatagtatttttaatactaratttttagtaattttctataaatatataggcaaggaaacaatgacttactgtatctgcatgtgtaatattttatggttaaaaaaataaagaatgaaaaca

SEQ ID NO: 382878 - DNA, 201 bp, Homo sapiens
tgtagattcctttttgtaatagaatctcatttttttaaaatgagaatggaaaaatgatattctgtatggtggtctttaagtgctgaaggatccacagagtsttctgaactttgaaagaaactaagtttggccactcctgagcaaaagtaatctagaaaaagcgataagtatataaggtgatggatatgttaattagcttga

SEQ ID NO: 382879 - DNA, 201 bp, Homo sapiens; identical to SEQ ID NO: 83222

SEQ ID NO: 382880 - DNA, 201 bp, Homo sapiens
taatctgataataaaaaataccaatttgatttttaaacattattttaacctttaaaatataatcttatgagaaaactttgaaattactcttttgttcttaycaagcaatttttaaactttggtttgttgttttagtgtacaaaaatgctaacataactgaatacacctgaacctgcatatgtagtagattaaaagctttgt

SEQ ID NO: 382881 - DNA, 201 bp, Homo sapiens
tcatatgattgtctcaattagaagaaaagacccactaatgaaatgctaaaaatttactattaactcatacattaatagcaggtatctgggtagtttggaayggcaggattatagtatggcttctctgtaatttccaagttttccaaaattactgtgtaatcagaattactgtgtacacatttatattatgtatttgtagca

SEQ ID NO: 382882 - DNA, 201 bp, Homo sapiens
ttctagctcttaatatttagattacacactctgtttggcttcctattcttttactttcatcaaatgcacataaatacaaaaagaacatgtgtaaacttctrccacatgaaaagcagaggcattcctatttgtaagatgcttacatgtcccttcacattttctagtagaaatacgtttctacatgcataatgtatgtagaaa

SEQ ID NO: 382883 - DNA, 201 bp, Homo sapiens
atgaacatacgggtgcatgtgtctttatggtgaactgtttatattcctttgggtatgtacccaataatgggattgctgggttgaatggtaattctgctttragttctttgaggaatcaccacactgcttccacagtaactcatctaatttgcattcccaccagcggtgtataaatgttcctttttctctgcaaccttgcca

SEQ ID NO: 382884 - DNA, 201 bp, Homo sapiens
gaaaattctgtgtgtggttcaccctgaggcaggaagcctggaagacagaatcttgcctctcttcctcacatctctcattctcttaagcatcttgactctargaggtcctctgagtattgattttaacagcagtggaaggtgggacaatgtgaaattcagatgaatgaagtgagaaaggtaaagggtgaaaaagctttggtc

SEQ ID NO: 382885 - DNA, 201 bp, Homo sapiens
ttttttttttgtatcattggaggggatggtttctgtaactgtgggagtgggaaggtaaaaagtttttccattcttgaagctggtccaagacttacgtcttwttgaatactttctgtcttttatacacattattaagggagataatatggaatacttcacattataagtaaattacatattaggtgttttataaatgataac

SEQ ID NO: 382886 - DNA, 201 bp, Homo sapiens
acatctttttgagtttttttttttttgtatcattggaggggatggtttctgtaactgtgggagtgggaaggtaaaaagtttttccattcttgaagctggtmcaagacttacgtcttattgaatactttctgtcttttatacacattattaagggagataatatggaatacttcacattataagtaaattacatattaggtg

SEQ ID NO: 382887 - DNA, 201 bp, Homo sapiens
catccatttgtaatcactgctcattctcccggcccccagccattggcagctactaagctttctgactctagatttaaagctgcttcttggccaccagcctrgttttatttcccaattgctgagcactgctgcaagagaggtctttctaagactgaaatccaatccggccaaccctgtttagaatgtttgggcctaggatac

SEQ ID NO: 382888 - DNA, 201 bp, Homo sapiens
gaattctgattggtctgcttccctgtccgtaaagggattgacaggccctgccgcgtcaggccgctcctctcggctccgcgctccttccctcgcgcgtgggyacccgcccccgagcggtgagagcgcgtgcgcgcgcgcccttctccgtgggcgagccagccagtcccgctgcacacgctcgcagtctgtgggccctccggg

SEQ ID NO: 382889 - DNA, 201 bp, Homo sapiens
tttcacggtccaataacaccttccttctctttctcttaataaagcatatgtctcaggtaagaggcaaaattactagaatattcactctcactgaaaatgartaaaaacctaacttagatgaaaatccttatcttgttcatttttattcctggccttttggttgagaagaatgggccagaccatgtgtgtgtgtgtatgtgt

SEQ ID NO: 382890 - DNA, 201 bp, Homo sapiens
aaatttattacctagtggaggagacccgcaagtctgctctgggatagcatgtgaggttcagagggagccatgctgcatcaggttctcttccgcactcgagraaatcaacagttgaatgttatttcttttagaaagcagcccctggaattgggcaaggaaaaacgtcctgtgagttttaccttgaaaatacagatatttaat

SEQ ID NO: 382891 - DNA, 201 bp, Homo sapiens
tggtcttcactaaatgtttaaaaacttgagttgacttcaactggaaaaacaaccatgtgaaatagacaggataagcagtgatactcccattttaccaagggtggaagtaacaccaagagatattagataacttacctcaagaccatactgttgatcaggggcagaattgaaggactgatatgatggttctttaatgcatat

SEQ ID NO: 382892 - DNA, 201 bp, Homo sapiens
cctcaccagacaacagacctgctggcaccttgacttggacttcttagtctcagaaatgtgagaaatacttttctgttctttataaattacccagtgtcagrtgttttgttgtaggagcacaaaaggaaaaagagcatttattcatacatttgcaacaatctgtttgggggaactgatacattatctttacatttcttttct

SEQ ID NO: 382893 - DNA, 201 bp, Homo sapiens
tcctgaaatccataagctgtcttacacagttttagagtcgcagctttctaggtattctttcctaagttcaaaatggttacatttatttcaggataatttcrgtctttttgttttgtttttgagacagggtcttgctctgttgtccaggctggagtgcagtgatgcgatctcagctcactgcagcctccaccttctgggttc

SEQ ID NO: 382894 - DNA, 201 bp, Homo sapiens
tttggtccatttactgtggataggaatacatcagtttttagaaaattttttttggaactaatgaaaaaaaaatcagcttaaataatcctgtaactgttaargaaattgaacaagtgggaaaaaaagaaaaacaattgtttcacaagggaagcattggctcagatcattttacagatgaatattaccaaaatttcaaggagc

SEQ ID NO: 382895 - DNA, 201 bp, Homo sapiens
gagaaatctgaactcagatctgagttcttttatttcctctatctgttgtgtgactttgggcaaattaacttttctgagtctcaacttttctgggtgtaaawaaaagtgatgggactgttggtgctgagtctaaatgcattgcttattttgagacttaaatgaaatgatgtaccattgaatctcttggagtgggcatattcc

SEQ ID NO: 382896 - DNA, 201 bp, Homo sapiens
acaaaaacaaatagccaggcacagtggcacatgcctgtagtccgagctactcgaaaggctgaggtgggaggattgcttgagcctgggaagttgaggctgcmgtgagctatgatcatcacactccagccagggtgacagagtaagaccctgtctcaaaaaataaataaataaatagcatttttattttacagcatacattca

SEQ ID NO: 382897 - DNA, 201 bp, Homo sapiens
ttttggtccatttactgtggataggaatacatcagtttttagaaaattttttttggaactaatgaaaaaaaaatcagcttaaataatcctgtaactgttamggaaattgaacaagtgggaaaaaaagaaaaacaattgtttcacaagggaagcattggctcagatcattttacagatgaatattaccaaaatttcaaggag

SEQ ID NO: 382898 - DNA, 201 bp, Homo sapiens
aatgacttgctggaatgatagaaatgctttgtctgtaatccttggcatcttgtgcatatcttgtgagagcagttatcacatggtattacagtcgttgtctstttccttgagactttccttctctcttgcctcctgagaatctcttatgtactagagctagtggatgtgagtgaatgagccaacaatcactgccctcatgga

SEQ ID NO: 382899 - DNA, 201 bp, Homo sapiens
catgcacagagagagagagaaagagagagagtgtgtgttattaggtatagagcagttgtggccagtacagtggtgacattccagctatcactactgttgtstatttcttccgggcctgtgagctttgatactactttcctatataattgaggggttagcagtattctggcaatgcaaccatctcaagaagcagatgctagg

SEQ ID NO: 382900 - DNA, 201 bp, Homo sapiens
atttgtacaaatgagttcaatgtttctgattgtagtattatgggagagaaacactagagacatcatcacaggaaagtgttagaaaaagcactaaaggcagycacaaatatttaggctttttagagttaatgtagttacatgagaaaattttcttttttctcatttggaacaatttttttgtgcaaagtaaaacatgccata

SEQ ID NO: 382901 - DNA, 201 bp, Homo sapiens
gctgagactatggggttttctagatacagcgtcatgtctgcacacagggataggttgacttcctctcttcatatttgaatgccttttatttcttgcctgaktgctctggccaggacttaagtactatgttgaataggagtgatgagatagggcatccttgcctggttccggttttcaagaagagtgcttctaccttttgcc

SEQ ID NO: 382902 - DNA, 201 bp, Homo sapiens
aggtaggttgtctgtttattttttgttgatagtttcttttgctgtgcagaagctgtttagtttaattaggtctcatttgtcaatttttgtttttgttgcarttgcttttgatatctttgtcttgaaatcttttccaggtcctatgtctagaaacagtatttcctaggttatcttccaggtttttatagctttaggttttac

SEQ ID NO: 382903 - DNA, 201 bp, Homo sapiens
tacaatgctttcattaatctcttgtttattccccattacattttcagattttccacagcatttccagaactttaacttagggctggcagctcctgaaccartcatttggcagaaggatgccattaccatgtattagtttagacagtttgaaacttgacctcggatctacgggaaagaatattggagagtcaacctgcaatg

SEQ ID NO: 382904 - DNA, 201 bp, Homo sapiens
tatcaatgcaatagaagcttattccggagcaaatgggattctaaagtatgtatttctcacctgtggatattttcttgttatgatagttcatgaatttcacrtgttagaactattaggaaattacaattgtgtttgttaaacctttctatactgtttttatttcataaagtgaatagtgtggtggttttctcattgtaaaag

SEQ ID NO: 382905 - DNA, 201 bp, Homo sapiens
tggagtattatgtgcatttagataacaggcagaactcagcgtctaataaaaagcataccagattacttgctcagttcatgttaaactgctctgaactagawtcacaaatggattcagaatacctgtattctcatcagtttttatatgcctacctacagttgacagcaagaatattactcttcaagaacaatatcttgtttt

SEQ ID NO: 382906 - DNA, 201 bp, Homo sapiens
tcaacctcgtgggctcaagcaatccccctgcctcagcctcccaagtagctgggaccacaggtgcacaccaccacacctggctttatttatttatttatttwttttgtagagatggggtctcaccatgttgcccagcctggtcttgaactctgggggtcaactgatcctcctgcctcagcctcccaaagtactgggattaca

SEQ ID NO: 382907 - DNA, 201 bp, Homo sapiens
aaatgctggttagttgatttctaatgtcagctgttctttcagtgagagatttgcagggaagaaaatcagatgttgttttgaagaagtgcttttgtttttttgaaagcaaaaactgagaatttattgtttcatgtattggaagagttggggagtggcctgacctctggcagagctgaatttagtgacatagatacagccaga

SEQ ID NO: 382908 - DNA, 201 bp, Homo sapiens
atgaaaatgaaatatttggaggggattgctatttttcatttagtaaaataagcatttaacatttggcttttttttttttttttttttttttttttgcttgkctaaacactggagaggggaatccagcgtataaaaattctcacaaatatttcaaatccccgccccccaccatgtggcaagattccacccccctccctgggt

SEQ ID NO: 382909 - DNA, 201 bp, Homo sapiens
ggtggatcacttgaggtcaggagttcaagaccagcctggccaacatggtgaaaccctgtctttactaaaaatgcaaaaaaaattagccaagtgtggtggtrtgcacctgtaataccagctactcaggaggctgaggtgggagaattgcttgaacccaggaggtggaggttgcagtgagccgagattgccaccactgcactc

SEQ ID NO: 382910 - DNA, 201 bp, Homo sapiens
gtaatacgtgcctctgtaaactgggagggcctacctcagagtgctgattagactactttggcatatggtcttgtactttgggttctttggcccaaaggtarttgtcagaatatagatttctgataaattttaaatagttcttttgtgatgaagtggttaaatcacttaagcaatttttttttctcttgaaaaaaatttttt

SEQ ID NO: 382911 - DNA, 201 bp, Homo sapiens
ctgtgtgggctggtgatggtggtggctgcgatactggtggtggctgcaatacagggtcacccccaacagccccagacatgttgctaccaggcttttctgcygtctatagcagcaatgctgccatgctatacagagtggtgtatgggccctgcctttgcatgtgagccttagcatggaggccatgctgccagtgggatttca

SEQ ID NO: 382912 - DNA, 201 bp, Homo sapiens
aagcctatggaggtatctcccctttctaccccaggaccacctttataaactggtgattccattctcctgggtttaacatctttttgagtttttttttttttgtatcattggaggggatggtttctgtaactgtgggagtgggaaggtaaaaagtttttccattcttgaagctggtccaagacttacgtcttattgaatact

SEQ ID NO: 382913 - DNA, 201 bp, Homo sapiens
gtcagctggagtggtatgggcaatggcaatagtggtggtttgattaccttctgggtccctatctgtgtgggctggtgatggtggtggctgcgatactggtkgtggctgcaatacagggtcacccccaacagccccagacatgttgctaccaggcttttctgctgtctatagcagcaatgctgccatgctatacagagtggt

SEQ ID NO: 382914 - DNA, 201 bp, Homo sapiens
accctcctatccatttgaaatcctaccccttgtataatatccaggtcagatgccacattcctcaagttcccacaccatgaattctcatttttcatcagcaktgtgtttttatctttaactgtcttatgttagtgtttatgtacatggtttatttcttcttggttttaagcttgttgaaggcaaggactgtgtctcttacct

SEQ ID NO: 382915 - DNA, 201 bp, Homo sapiens
aaacacaaaaaaatggtaaacatatccatcaccatacccctgagattgattcatacctctggaatatacaaatatttgtatatttttcttggttatagatktctagcttgacagttgttttttccttctggtatttaaaaaatgttgcaccactgtcttctcacttgcattgtttctgatgagaaatctgcctttatcctt

SEQ ID NO: 382916 - DNA, 201 bp, Homo sapiens
ggggctgggtaggtgagcaggttcttatgtcactggtcagctggagtggtatgggcaatggcaatagtggtggtttgattaccttctgggtccctatctgygtgggctggtgatggtggtggctgcgatactggtggtggctgcaatacagggtcacccccaacagccccagacatgttgctaccaggcttttctgctgtc

SEQ ID NO: 382917 - DNA, 201 bp, Homo sapiens
taacacgcagcggttgtggggacaaggtttccgaggaggcgggagcgagcgacggcccccgcctcccacacgccctctgctttggtaaacaaggagactcycgcccgcaggctgtaaatgaggcacgagcttgggggcagcgccagggcgcctggcgtcactgttcaaaaaggcctcttattggtccttcgcacagctgcg

SEQ ID NO: 382918 - DNA, 201 bp, Homo sapiens
tccttccacattatggttgcattttttttttaatcttaatctcttgctgttttgtttctttgtgcattctttaggaagaatagagggcagtatcatacagrgtttacaagtggagactctagaattagaatgtctggatttgaatcttggcattacaacttagtaaagtattaggtattttacttcaactcagcatcaggg

SEQ ID NO: 382919 - DNA, 201 bp, Homo sapiens
cgcactcgagaaaatcaacagttgaatgttatttcttttagaaagcagcccctggaattgggcaaggaaaaacgtcctgtgagttttaccttgaaaatacrgatatttaatatgtactcaatttattttcaggcggcaaagatctgcaacaacatgctgttagctattagtatgattggaactgctgaagctatgaatctt

SEQ ID NO: 382920 - DNA, 201 bp, Homo sapiens
accaaaacaacatatatctgcttctgcatttaatctactatgaaaatccagctgtcttctattaagccagaactaaagagatttgaaaaattgtcaagcartgctactcttctcactaaattttgttgcttgttatttttcccaaaatatgttaatatgtattaggtttatgattgatgtttttaagtcaattgagaaatg

SEQ ID NO: 382921 - DNA, 201 bp, Homo sapiens
gagagttacttctctctcttccctcactagactgtgagcttttaaaggacaggggccatacgttgcttgtgtctgtctctgagctctgtcatagtacttcmtgcagtgaatatttattgagtggagttctaaatctagaaagtgaaaaattgcatctaacgctatttccatagtactgtaaagcctccccactctgtaacg

SEQ ID NO: 382922 - DNA, 201 bp, Homo sapiens
atccttccacattatggttgcattttttttttaatcttaatctcttgctgttttgtttctttgtgcattctttaggaagaatagagggcagtatcatacartgtttacaagtggagactctagaattagaatgtctggatttgaatcttggcattacaacttagtaaagtattaggtattttacttcaactcagcatcagg

SEQ ID NO: 382923 - DNA, 201 bp, Homo sapiens
tggccaaaattcctaaccctcaatataatgatattaggagctcggccctttgggaggcaattagatcatgcggatagagctcctgtgaataggattagtgytgttgtacagagagacatgagagtggcttctctttctgctctctaccatgtgaggatacagtgagaaaatggccatcggcaaacgaggaagtggacctac

SEQ ID NO: 382924 - DNA, 201 bp, Homo sapiens
gaatatattgtcactccatcatgagcttttccttgtcctattagcaagtaggaacaggtgcattaaggtaagagagaaggcaaattgcattcatagattartattcttcctgcagatttttcatacttgtgaaatacagtttctggatttaaaagtcatattctagaatttaacacaagccagcacttaacaacacatccc

SEQ ID NO: 382925 - DNA, 201 bp, Homo sapiens
agtatcaatgcaatagaagcttattccggagcaaatgggattctaaagtatgtatttctcacctgtggatattttcttgttatgatagttcatgaatttcrcgtgttagaactattaggaaattacaattgtgtttgttaaacctttctatactgtttttatttcataaagtgaatagtgtggtggttttctcattgtaaa

SEQ ID NO: 382926 - DNA, 201 bp, Homo sapiens
cacataggcaaatttattacctagtggaggagacccgcaagtctgctctgggatagcatgtgaggttcagagggagccatgctgcatcaggttctcttccscactcgagaaaatcaacagttgaatgttatttcttttagaaagcagcccctggaattgggcaaggaaaaacgtcctgtgagttttaccttgaaaatacag

SEQ ID NO: 382927 - DNA, 201 bp, Homo sapiens
aaaaacttatccaacaggtgaaaaatggtatcacatcattttgttttgcatttctctaattatgacaagttgggtatatttttagaggttttctgggggggtaatttacatattttctgttgtcattttgtgatttttgcctactttaaaaaattattcatgtttttcttccagattgtaaagttattttacatataaaac

SEQ ID NO: 382928 - DNA, 201 bp, Homo sapiens
catacatgtacacttagcttatgcatgtttatgtagcagtaagtgaaaatgccattaccacatgtaaagaatcatgctgccccaaagttgagcttttaaaraagtaattgacaaaaaaaaattgtatatattgtgtacatgttataaaatatgtatacattgtagattggccaaactgagctagttaattacctcacatac

SEQ ID NO: 382929 - DNA, 201 bp, Homo sapiens
aaggtaattgtcagaatatagatttctgataaattttaaatagttcttttgtgatgaagtggttaaatcacttaagcaatttttttttctcttgaaaaaaattttttttttttccctcggagtctttgtctgtcgcccaggctagagtgcattggcgcaatctcagctcactgcaagctccgcctcccaggttcacgccat

SEQ ID NO: 382930 - DNA, 201 bp, Homo sapiens
catgcaagaatgagagagagattacattgtcctcttccattttagttggtagtttctactgaaaactgtaaagtttaactttttggaattgtaactatccmaagtgggaatgtaaactatattgaacaaaatttatttagcctgttaaaaagtcaacctaaaactatggttaattagtttatattattacatcacttttag

SEQ ID NO: 382931 - DNA, 201 bp, Homo sapiens
ttaagctgtggttttgggttgatttgtgggctcccaaaattcatatgttgaaatccttaacccaagtatctcagaatatgaccatcttggagatacggtcytcacaaaggtaatgaagttaaagtgaggtcattaaggtgggccttaatttaatatgattgttctccttacaaaaaggggaaatttagacacacacataaa

SEQ ID NO: 382932 - DNA, 201 bp, Homo sapiens
agtctcagctacttgggagggtgaggcaggagaatggcgtgaatccgggaggcagagcttacagtgagccgagatcgtgccactgcactccagcctgggcracagagccagactccatctcaaaaaaaaaaaaaaaaagaaaattaacaaacttctcctctgctaaaacactgttaagaggctgaaaagacaagctgcagc

SEQ ID NO: 382933 - DNA, 201 bp, Homo sapiens; identical to SEQ ID NO: 83249

SEQ ID NO: 382934 - DNA, 201 bp, Homo sapiens; identical to SEQ ID NO: 83256

SEQ ID NO: 382935 - DNA, 201 bp, Homo sapiens
taagtattatttttagatgggtaataactgagatatgtttatatctcagagtgattctgtttctgcagttgatatcagtgaccattttaagtctcttaaartactttcatccgtaatttctgttacacaacacttaattgcttctcttcctacctgggctggtttattctgtccttttgctcagtcacctactctccaaga

SEQ ID NO: 382936 - DNA, 201 bp, Homo sapiens
tgtttagtgttattatcctgagtggttttagaaaatatttctttgttttgtgggtagaatttctccctctactgatttttttttctgtaactttacagttrtgacagacataaatctgctactaattatacttggtatattttaaaaagagccattgtgtatttctataaataaacttgcacaatggtgggcctatcagag

SEQ ID NO: 382937 - DNA, 201 bp, Homo sapiens
aaactgctaggaaatattacaagaagtaacccaaggctccctctctagagttcaaggcagagtaagaggtcttggcttgagataagtattttaaatttgaktgtgtgtgtgtgtgtgtgtcatacaaagattgagagagacaaattgagagaattaatttttatcctcaggagtgaataaaatcatgtagggaaagagtgt

SEQ ID NO: 382938 - DNA, 201 bp, Homo sapiens
tactagagtaaaataggtttttattgttgttgttttgtgtcttttcggagagctgagctaggctggagttgggggagaagagatgctataggtatatgctwtactgttttttctctccagaccatgaatttaatcagttactgttgtgcatatgtggaaaattacaaaataaaacattctgtaattgattgaatttcatag

SEQ ID NO: 382939 - DNA, 201 bp, Homo sapiens
catgagtcaaatgcactccgtttgtttgtttgtttgtttgtttgtttgtttgttttgagacagagtttcactcgtgtcacccaggctggagtgcaatggckcgatctcggctcactacaaccaacacctctcaggttaaagcaattctcctgcctcagcctccccagtagctgggattacaggtgcacaccaccacgtctg

SEQ ID NO: 382940 - DNA, 201 bp, Homo sapiens
agtgcaggaggagggatccaagcttccaagcctctgctccgctctccttctatccagttggtctttagggcactgaaggaaactcttcttcagaaataacyttttaacttttcttctgtcagctgcctgccaatcacggagccagaggctgaggggaggctttgagccggtctgcgagtccggaaggcaaagatcgcgaag

SEQ ID NO: 382941 - DNA, 201 bp, Homo sapiens
gtttaattaggtcctatctgtctatttttggttttgttgcaattgcttttggagacttcatcatgagatctttgccatggcatgtcttcagaatggggtgytttgtgttttcttctagaatttgtatagttttaggttttacatatggtgtaaggaaggggtccagtttcaatcttctgcatatggctacctggttatccc

SEQ ID NO: 382942 - DNA, 201 bp, Homo sapiens; identical to SEQ ID NO: 83254

SEQ ID NO: 382943 - DNA, 201 bp, Homo sapiens
tcaggctcctgcagagttcagtagataagagaagcttacataattgtttccaggagttgtccagtaatactgatttttaaaaaaaattaattaggtgagaytttcaggaattaatacaatactttatgtatgtgttattttactatctatttaccagtcattgttacatagctgggaggatatctaattagtattttttac

SEQ ID NO: 382944 - DNA, 201 bp, Homo sapiens
acattcacctacctttttccattactttattttaaaaatataagcaaccttttatgttaaatttgttgttgctgatggtttattgtgagatcttagaatcstctaatctgtagttagacacaactgggaacatctgcctttttaatatttgtgagtttaagccatttatttttactcttccgttttatactttaatattta

SEQ ID NO: 382945 - DNA, 201 bp, Homo sapiens
aaatgaatgttgctagtcattttttttttttttctgaaatgcacttattgactaaagatttgccctgggaaatacatttctttgggattagtcaaaattasaatccagtcttgactctataatttataaactgttattttatttctctcatattgagcttcccagggaggaaggtaaactccctatctctaaggactgtta

SEQ ID NO: 382946 - DNA, 201 bp, Homo sapiens
tccatagtttgcaaatattttctccagttctgtaggttatctgcttactgctttgatagtttcttttgctgtgcagaagctctttagtttaattaggtccyatctgtctatttttggttttgttgcaattgcttttggagacttcatcatgagatctttgccatggcatgtcttcagaatggggtgttttgtgttttcttc

SEQ ID NO: 382947 - DNA, 201 bp, Homo sapiens
aacaaagttggaaggaacaatagaagaacgaagtctggtttaatgcagataatcaaacagctatgctccattaaaacatctcatgagtcaaatgcactccgtttgtttgtttgtttgtttgtttgtttgtttgttttgagacagagtttcactcgtgtcacccaggctggagtgcaatggcgcgatctcggctcactacaa

SEQ ID NO: 382948 - DNA, 201 bp, Homo sapiens
ttgtttcagctctcaaggcgaatgcttccagctttttcccactcagtaagatgtttgctttatgttacttcgatgcctatgttgttgaggattttttaacrtgaaaagatgttgaattttacctaaaatcttttaattaagaaggaaggttctattttacagtatggataccctccttgcagttcttttaaaactttttct

SEQ ID NO: 382949 - DNA, 201 bp, Homo sapiens
acaaagttggaaggaacaatagaagaacgaagtctggtttaatgcagataatcaaacagctatgctccattaaaacatctcatgagtcaaatgcactccgtttgtttgtttgtttgtttgtttgtttgtttgttttgagacagagtttcactcgtgtcacccaggctggagtgcaatggcgcgatctcggctcactacaac

SEQ ID NO: 382950 - DNA, 201 bp, Homo sapiens
tctgttttaagttcttcgagaaaagctccaaaatgctttccatggtgtctgactagtttactttcttaccagcagcatataagtgttcccttttctctacagcctcgccaagccaacatccattatttatttattttttacttcttaatgatagccattctgatcgctgtgaaattgtatttcattgtggttctgatttgc

SEQ ID NO: 382951 - DNA, 201 bp, Homo sapiens
caaagttggaaggaacaatagaagaacgaagtctggtttaatgcagataatcaaacagctatgctccattaaaacatctcatgagtcaaatgcactccgtttgtttgtttgtttgtttgtttgtttgtttgttttgagacagagtttcactcgtgtcacccaggctggagtgcaatggcgcgatctcggctcactacaacc

SEQ ID NO: 382952 - DNA, 201 bp, Homo sapiens
ggagagacctgatagctgattttcctgagttgagacagttctgtgatcttcttctactttagggtagaaatgtattgaaatgagatattctgtctgtgaawcatacttacatctcttggctaaatcttccattattatgatatatgaatgtttaatataccattgaatttttttaattcctaatttagtatttgtgcttct

SEQ ID NO: 382953 - DNA, 201 bp, Homo sapiens
aaagttggaaggaacaatagaagaacgaagtctggtttaatgcagataatcaaacagctatgctccattaaaacatctcatgagtcaaatgcactccgtttgtttgtttgtttgtttgtttgtttgtttgttttgagacagagtttcactcgtgtcacccaggctggagtgcaatggcgcgatctcggctcactacaacca

SEQ ID NO: 382954 - DNA, 201 bp, Homo sapiens
tgcaaggatttttaagaatatagactcatgccactttccaaaaccacattaaatgacgagattttctttgaaccaggctatcccagtgaaaaagcacaaaytgcacaacagctttctctctttaacattactactgatatttgtaatagcttcatcggtaatatctacagatatttttacagataaaattaatagagtata

SEQ ID NO: 382955 - DNA, 201 bp, Homo sapiens
gtagcaactgtctgagtcactagaaattgctattaaacatatctttctgggaagatttttgttatagaatatatagtggttttatgaaagcatgtgtcactttttttttttttttttttgagacggagtctcgctctgtcgcccaggctggagtgcggtggcgcaatctcggctcactgcaagctccgcctttcgggttca

SEQ ID NO: 382956 - DNA, 201 bp, Homo sapiens
acctaaagataaatattgcttttctaaaaaattaaaaataaatcttaaaaaatctcaaattttctatctggcttcatcttgttcatgtcgaaaacacaacwgtggggtgtcagcaaagctgtaatacctgagaataaaagcgtagtgccaatacgcatgaacagaaattctgttcagacatgctgaagccttctgcagaaa

SEQ ID NO: 382957 - DNA, 201 bp, Homo sapiens
cgcttaaagtcaaaatcatgtccctaaagctattacaaacctatttctataaatttttcagggtaatcagattctttttcctagtggtacaactacttataaattataacattttaatcctaatgatactttaaaaggtgagcgcacgggcaatatttgaaaggggtatgtgttccagagagggccaaatgttaagctgtg

SEQ ID NO: 382958 - DNA, 201 bp, Homo sapiens
tttgttatagaatatatagtggttttatgaaagcatgtgtcactttttttttttttttttttgagacggagtctcgctctgtcgcccaggctggagtgcgktggcgcaatctcggctcactgcaagctccgcctttcgggttcacgccattctcctgcctcagcctcctgagtagctgagactacaggcgcccgccaccac

SEQ ID NO: 382959 - DNA, 201 bp, Homo sapiens
gctccattaaaacatctcatgagtcaaatgcactccgtttgtttgtttgtttgtttgtttgtttgtttgttttgagacagagtttcactcgtgtcacccargctggagtgcaatggcgcgatctcggctcactacaaccaacacctctcaggttaaagcaattctcctgcctcagcctccccagtagctgggattacaggt

SEQ ID NO: 382960 - DNA, 201 bp, Homo sapiens
atgtgtcactttttttttttttttttttgagacggagtctcgctctgtcgcccaggctggagtgcggtggcgcaatctcggctcactgcaagctccgcctytcgggttcacgccattctcctgcctcagcctcctgagtagctgagactacaggcgcccgccaccacgcctggctaattttttgtatttttagtagagacg

SEQ ID NO: 382961 - DNA, 201 bp, Homo sapiens
agtcagtttgcaagttggagagaaagcactgcaaatccaccctgcctgttcaaaacataagaagcaccagttaaaatctacctatattagggaaaaaaagaaaaaaaaacttcaattaacaacttgactaaatgaaacaattgaaaaaaatagaatgttccttacacattacaacatggatgaatctcaaaacagctatcc

SEQ ID NO: 382962 - DNA, 201 bp, Homo sapiens
tgagtcaaatgcactccgtttgtttgtttgtttgtttgtttgtttgtttgttttgagacagagtttcactcgtgtcacccaggctggagtgcaatggcgcratctcggctcactacaaccaacacctctcaggttaaagcaattctcctgcctcagcctccccagtagctgggattacaggtgcacaccaccacgtctggc

SEQ ID NO: 382963 - DNA, 201 bp, Homo sapiens
agctgtaaaaccgaaagaaaggcaagactgctggagaaatccttttattgtagtcatttggcagcattaatgtaatcaaaattcctttatgtattcaaagrcagtgctgctgcagtaattattaaatgattgaaattgcagacaaaacttggaaaattaaagtaggttaagtaaggtactgttgacaaacaacttctccca

SEQ ID NO: 382964 - DNA, 201 bp, Homo sapiens
cattttactcctactcaacggtaacatcccaaaatcctatgtagttactatcctcaatttagatttagaatcaccaacacatgcacagtcctccctgtcasgatgcacgtggcttctcatgatctagtgacctatgaacttaaaaggcaatctctcttatctgctatgtgtgtccacacacacaaacacggacactctaat

SEQ ID NO: 382965 - DNA, 201 bp, Homo sapiens
agaaaaactgggaaaaaactctgcaaattaatttggtgagttatcttagctatatttcttgtctataattatttaataacatgatgtttgtaaagaaaaaraggttcttggagtcatggaaacaaaacaatgacctacaatattgaaaaagggaagttacagaaagctggataaaagcattttcttttataaaaaggaaga

SEQ ID NO: 382966 - DNA, 201 bp, Homo sapiens
gcatagttggattcacacgctcagcagcggtgaggctacaacaaccgtcatatctcattttctctttgtacacatttataaaacatgaattctgtagagargaatcacttgagaaatcacttggatgaaaggtggaaaaatgacatacctccatctcaattataaaaagttatcagatcacataaagaaccaaataaataa

SEQ ID NO: 382967 - DNA, 201 bp, Homo sapiens
aaggagcatcatcacagaagtgctagatgcttttgaccatatgttttctccggctttttccccaatgagacagtactttaaaataataataatagtaatcwtaataaagtatacaatgttagaattgtagtagaaacatctctatcagcctttcctcaatgctttcctgtttccggctactcacttaaaatagaccaatct

SEQ ID NO: 382968 - DNA, 201 bp, Homo sapiens
gctgcgcaggcccgcgattcctctcctcttgtctataggtagcgctggtggattggaatcttgaagcaggtgtacagtgtaaagctgccctggatgagcartttgaacctcagaagactctgttcatccagtgcgatgtggctgaccagcaacaactgagaggtaagacaggggaatcaatctgtcaactgggaacgtgct

SEQ ID NO: 382969 - DNA, 201 bp, Homo sapiens
tttcgtgagctgcgcaggcccgcgattcctctcctcttgtctataggtagcgctggtggattggaatcttgaagcaggtgtacagtgtaaagctgccctgsatgagcagtttgaacctcagaagactctgttcatccagtgcgatgtggctgaccagcaacaactgagaggtaagacaggggaatcaatctgtcaactggg

SEQ ID NO: 382970 - DNA, 201 bp, Homo sapiens
ttctatattccaagatccaagagaattaaacagagtagttaagtgtggaatactgagacatgagaaccatatgcagagaagaagggtaaataaattttgcmtccaacatttagaaaacaaaaagaatatatggaattattgaagatgttgagaattgagtgaaagtaatagacatttttggaatacaacctgtagcataaa

SEQ ID NO: 382971 - DNA, 201 bp, Homo sapiens
agataatacaacagacttagggactttgaaaaacttaaataaaatgatacatacaaggtacttaaaatggtaactggtaaaaaataaaattttcagtaaaygctagctgttaccaatcatatttctacactaataacatctatatctggtaagtctaagatctactgatacgataaagatgagaaaatgatcatttgctca

SEQ ID NO: 382972 - DNA, 201 bp, Homo sapiens
tgataagattgctttggttttaaattactttcctggcactggtacaatttaatgaataatattgcattacaaactgcttctccctctgattttcctccacrtgtacaaggcaacactatgtaaaatggttaaatagcttaagtttgtcattgttccctctgcttggcttactactctctccattttcagaagttgtccttg

SEQ ID NO: 382973 - DNA, 201 bp, Homo sapiens
caaggatatgattaaatactatggaattttggagtaagtaaaactatgtctattttcttttaaatgatgaagcaaagcattatttagacaagctataaaargggaagaaataagcttatacagttgagaaatgaacacaagcttcaaacttttggtttggcaaactctctgggagaaaatatatttttctgggtttataaa

SEQ ID NO: 382974 - DNA, 201 bp, Homo sapiens
actcaagacaccagcacaggagctagaccaaaagcagctatgggccactgttgtgagcttggattttatttcaagggcaaccatccatggggcttttacaygcaggagtgataagatcagatttcctttttaagaagaccattctgtctgcttttgcaaattgtgttacaaaagacaagtgtaaaagcggaaagaacagtt

SEQ ID NO: 382975 - DNA, 201 bp, Homo sapiens
aaaaatgaccccaaatggaaatattattaacttcagcttttctgaaatgcaagatgcaataggccccagccattatttgtcaccagagatacgatgaaaakgagtgagaacatggagctggaaggaggggtggggccaggcatttacttgatagagtggtcaaggataatgtctccatggaggcctagggtgaaaggtgca

SEQ ID NO: 382976 - DNA, 201 bp, Homo sapiens
ctacctcttttagtaattctgtaagtttagactctatatattataaatctataatattcagagcataagttgctaatgattgcaatttattgatttttaawttttttttaaagttaaacttctgatttgctgtctgatgattttttaatctattctatattttcagatataaaattagtaccctatcattttctttggatt

SEQ ID NO: 382977 - DNA, 201 bp, Homo sapiens
ctatattttcagatataaaattagtaccctatcattttctttggattcacattcacctacctttttccattactttattttaaaaatataagcaacctttyatgttaaatttgttgttgctgatggtttattgtgagatcttagaatcctctaatctgtagttagacacaactgggaacatctgcctttttaatatttgtg

SEQ ID NO: 382978 - DNA, 201 bp, Homo sapiens
actattgtcttgtgtccttacagatgttagttaatagttactgggtcacctgccattacctgtatatgatattttgcatacatgagagtattcacttctakgtctcagtacattgctttccaaatacattagttcttccaaacggtatcatctgtccttctacttttactccttatcaaatttactccttacttttcactt

SEQ ID NO: 382979 - DNA, 201 bp, Homo sapiens
ttacttcttaatgatagccattctgatcgctgtgaaattgtatttcattgtggttctgatttgcatttctctgatgattagtgatattgagcattttttaygtttgttggccatgtgtctgtcctcttctgagaagtattcacagaagtctctttatgtcctttgccctttttttaatggggttgtttggtttttgcttgt

SEQ ID NO: 382980 - DNA, 201 bp, Homo sapiens; identical to SEQ ID NO: 83247

SEQ ID NO: 382981 - DNA, 201 bp, Homo sapiens
gtaatttggaccacaaaaacaaatcttcaaagcatatttattatcagctcaagttggaaattaaaaatctgatcgttttatagttccatggaattttctaktgcaaaatatcaaaagtttgaaaaatatgtttatttctcttaatttaacttgtggcttttaaagttatcttactgcagtaatatttgaaaaaatatatat

SEQ ID NO: 382982 - DNA, 201 bp, Homo sapiens
gaagaagttaacttttaattttcttaaacttttggaggcattgttcaagacagattggtgacaggaaattgcatactaatttgtagtgaagactaataatstccaagactctctgaagattcaaattccttcagccattaggaagctttaaaaatgtagaatatatactttttaaaatccagacttaaaaatggaaactta

SEQ ID NO: 382983 - DNA, 201 bp, Homo sapiens; identical to SEQ ID NO: 83257

SEQ ID NO: 382984 - DNA, 201 bp, Homo sapiens
gtcacttacaaacactacattagtgactactgaaccattgcttttaggggaaatagagggttaagttcctgaaagcctctggtcacaaaactccaatcaaycagtcaatacataaccttattttatgtgtattcctgtttaaagaaccttatttatcataggttgtatgaacattgaactcattactaaagcacttattac

SEQ ID NO: 382985 - DNA, 201 bp, Homo sapiens
tctaagtctcagctacttagcttcaggctcctgcagagttcagtagataagagaagcttacataattgtttccaggagttgtccagtaatactgatttttwaaaaaaattaattaggtgagattttcaggaattaatacaatactttatgtatgtgttattttactatctatttaccagtcattgttacatagctgggagg

SEQ ID NO: 382986 - DNA, 201 bp, Homo sapiens
gcacacctcagaagtggctgggagggaacccaaacctaattgccaaatttcaggtccaggaggggagcctcttgtgtgtttattgtttgtccgtctatttmgtgagctgcgcaggcccgcgattcctctcctcttgtctataggtagcgctggtggattggaatcttgaagcaggtgtacagtgtaaagctgccctggatg

SEQ ID NO: 382987 - DNA, 201 bp, Homo sapiens
aaagaagaaaacatgggacaatatatagaatataaggatcatatcaaggatatgattaaatactatggaattttggagtaagtaaaactatgtctattttsttttaaatgatgaagcaaagcattatttagacaagctataaaaagggaagaaataagcttatacagttgagaaatgaacacaagcttcaaacttttggtt

SEQ ID NO: 382988 - DNA, 201 bp, Homo sapiens
taaggatcatatcaaggatatgattaaatactatggaattttggagtaagtaaaactatgtctattttcttttaaatgatgaagcaaagcattatttagayaagctataaaaagggaagaaataagcttatacagttgagaaatgaacacaagcttcaaacttttggtttggcaaactctctgggagaaaatatatttttc

SEQ ID NO: 382989 - DNA, 201 bp, Homo sapiens
actttccttgactttccagaaggcctggggaggcagaaaaacacatataactcttggctgtatctctgtgtaacttagctactataaattctggacgacaygggtcatggagcaaataaactacacttaggctactgagtttcacaaagctatctggttttatgttactgtgttattcagattcatcttaaattgaaatta

SEQ ID NO: 382990 - DNA, 201 bp, Homo sapiens; identical to SEQ ID NO: 83243

SEQ ID NO: 382991 - DNA, 201 bp, Homo sapiens
tatttccctaagttgaattttcagcatttttatatagtccattctacatggtttctctctccttaaaagcaaatcttgtttgcggatttagtatgactgcyctgtctgaggaggtttctgtttttgcaaaaaaatctttttgagcttttttaccttctgtgaaatgattaaaactggcttttgtaaatatgggtagaaaga

SEQ ID NO: 382992 - DNA, 201 bp, Homo sapiens
aaatgtgacagctttagattcctgcttttttagcgtagttacagaactccaggttatcatacgagtatcagcatccttagattcaccatttatttccctargttgaattttcagcatttttatatagtccattctacatggtttctctctccttaaaagcaaatcttgtttgcggatttagtatgactgccctgtctgagg

SEQ ID NO: 382993 - DNA, 201 bp, Homo sapiens
ggtgtctgactagtttactttcttaccagcagcatataagtgttcccttttctctacagcctcgccaagccaacatccattatttatttattttttacttyttaatgatagccattctgatcgctgtgaaattgtatttcattgtggttctgatttgcatttctctgatgattagtgatattgagcattttttatgtttgt

SEQ ID NO: 382994 - DNA, 201 bp, Homo sapiens
tgagcagagcagtttaaggcttgcaatttgatgtccactttgctttgttggctaggagcttgctttgtcatcccgctcaccgccacctcccgccaaccccrggtgttaatcctctttttacctatgtcagatacaacatttgcaatcatgtgtgggcatttctctattcatgcagataaaacgatgacttgatataaattc

SEQ ID NO: 382995 - DNA, 201 bp, Homo sapiens
tgtgtcactttttttttttttttttttgagacggagtctcgctctgtcgcccaggctggagtgcggtggcgcaatctcggctcactgcaagctccgccttwcgggttcacgccattctcctgcctcagcctcctgagtagctgagactacaggcgcccgccaccacgcctggctaattttttgtatttttagtagagacgg

SEQ ID NO: 382996 - DNA, 201 bp, Homo sapiens
  misc_feature (1)...(201): n = A,T,C or G
ttacatgagtaagcaaaatggaggtgaaggcggcatcattatcaatatgtcatctttagcaggtaagggcaattattacattaaatgtaacattttcttantggtaatttggaccacaaaaacaaatcttcaaagcatatttattatcagctcaagttggaaattaaaaatctgatcgttttatagttccatggaattttc

SEQ ID NO: 382997 - DNA, 201 bp, Homo sapiens
ctacctaaacccgttgcaagagtagaatctgaccaataatttaacttccaacttgattatctctgttactgtaatgcaaatatttgtgtgtagtttatatractcttttttgaaactctgctctggatttaatttgcctccttgggtcttatacaattccatgtttgttcttttgcatgtttttctgtattactgctcatg

SEQ ID NO: 382998 - DNA, 201 bp, Homo sapiens
tcctttagttataactaacaggcctagttccttctccattgaaatttatccagcctttatttttcttgggactctgctgacataggccacttttcagcttmacatcaggaactgatgatatatgtttacataaagaaaacaccatggaacctttgttaccaatgtattacttaaaaatatgttacttcccctcctacctaa

SEQ ID NO: 382999 - DNA, 201 bp, Homo sapiens
ggcaaatattacaaagttacagaattcgactgatgtcttcatccagctgagagggcatgtttgctttaatgtagcctgtgtgaatacctgctctgagctgraaagtgccaatatcatgggcaaataggaaattctggaagaccaggggaattttattgtgatcctttagttataactaacaggcctagttccttctccatt

SEQ ID NO: 383000 - DNA, 201 bp, Homo sapiens
cacttgctgtgtcttttctctgaaaaatcagctgtcagaaacagtgtgcaatgattacagctaacgtaaagaaacatggaaatattgaggcaaatattacraagttacagaattcgactgatgtcttcatccagctgagagggcatgtttgctttaatgtagcctgtgtgaatacctgctctgagctggaaagtgccaata

SEQ ID NO: 383001 - DNA, 201 bp, Homo sapiens
gtctggacacctgagaatatatttccgtcatgtagaaaaacaaccacaatttttatccatagtgtaaaataatagaagtagaatgaatgatcaaaggcccrgggaaacagtttaaatcaattagaactctgtcaaaggctgctttgagaaacaatagacatgtgattggacagtgtaatgaaagacattcaggcctcagaa

SEQ ID NO: 383002 - DNA, 201 bp, Homo sapiens
atcagattctttttcctagtggtacaactacttataaattataacattttaatcctaatgatactttaaaaggtgagcgcacgggcaatatttgaaagggrtatgtgttccagagagggccaaatgttaagctgtgggagactgaaaccctaaaagcaaattggcaaagctaaatctatactattttgaaataaaatcata

SEQ ID NO: 383003 - DNA, 201 bp, Homo sapiens
tttcctagtggtacaactacttataaattataacattttaatcctaatgatactttaaaaggtgagcgcacgggcaatatttgaaaggggtatgtgttccrgagagggccaaatgttaagctgtgggagactgaaaccctaaaagcaaattggcaaagctaaatctatactattttgaaataaaatcataagaaaaaaaca

SEQ ID NO: 383004 - DNA, 201 bp, Homo sapiens
tagtaactggtcctatagtcattatactggtatctggctcttcaaccggtaaaattccaccttcgtcctgcaacaggggtcctcccattggttttacacayttcaattgagtatatttaaaatattacttcattatactttgcatttaaaaggaactaaacacatagttcttatgtgaatttacttctgtagagcctgttg

SEQ ID NO: 383005 - DNA, 201 bp, Homo sapiens
aaaaaaaaatatgcattttatatttactctttggaggatacccctgacttattaagagttgtatttcattacatcttttggtagcctgataaaacaaaaaktttgaaaatatggctaattgggaactgcaaggatttttaagaatatagactcatgccactttccaaaaccacattaaatgacgagattttctttgaacca

SEQ ID NO: 383006 - DNA, 201 bp, Homo sapiens
aaatatttgtatttcacaaagttttattcaaagagactgagtaaattgtaaggcactttttaatcaaggggtctgaaaacttttgcaaatcttattccagygctcctgttcttaaagggacatcaaatgtacatttattttaaaattttaaaatattctgtaagagaatgaaaatgaactgacgtgttagaaggaagtggt

SEQ ID NO: 383007 - DNA, 201 bp, Homo sapiens
gtacagatgatttcatcacccagatagtggtcatagcaacccatagataggtttcccattctcacccttctcccacccttcatcctcaagtagaccttggkgactatttttcccctttgtatccatatgtgcttaatgttttgttcctgtttgtaagtgagaacatgaggtatttgattttctgttcctgcattaatttgc

SEQ ID NO: 383008 - DNA, 201 bp, Homo sapiens
ttgattataaagctgttttttttttttttgtacatctattggagaacttgagagtgccccaataaacttacaggaaacaaaaattctggagaaaaactagraaagtaaaatatttgtatttcacaaagttttattcaaagagactgagtaaattgtaaggcactttttaatcaaggggtctgaaaacttttgcaaatctta

SEQ ID NO: 383009 - DNA, 201 bp, Homo sapiens
gcatttaaattttagccattctaatgtgtgtagtagaatctcattgttgttttaatttgaaatttcctataacatctgatatttatcatattttctttttygtttgttgtttgagacagagtctcactgtgttgcccaggctgagcacccactatagtttaaggagagaaaactgctaggaaatattacaagaagtaaccc

SEQ ID NO: 383010 - DNA, 201 bp, Homo sapiens
gatttcatcacccagatagtggtcatagcaacccatagataggtttcccattctcacccttctcccacccttcatcctcaagtagaccttggtgactattkttcccctttgtatccatatgtgcttaatgttttgttcctgtttgtaagtgagaacatgaggtatttgattttctgttcctgcattaatttgcttaggata

SEQ ID NO: 383011 - DNA, 201 bp, Homo sapiens
ccaatgagacagtactttaaaataataataatagtaatcataataaagtatacaatgttagaattgtagtagaaacatctctatcagcctttcctcaatgytttcctgtttccggctactcacttaaaatagaccaatctacttgtgaagtatcagggacaatattggcatacacaataaacagctttgattataaagctg

SEQ ID NO: 383012 - DNA, 201 bp, Homo sapiens
tttgcttaggataatgctctccagctgcatccatgttgctgcaaccaacatgatttcctttttttatgggtgtgtggtgtttcatgctgtatacctacccrtattctttatccagtcccccgttgatgggcatctaggttgattccgtctttgctattgtgaatagtgttgcgatgaccctattagtgctgtgtctttctt

SEQ ID NO: 383013 - DNA, 201 bp, Homo sapiens
tttgagtaaatgccaaggaactaaatgttggattgtattgcatgtttacttttgaaagaaattgctaaattgtcttccaaagtggctgtgccattttgcaytcgcaccagcaatgaattggagttcttgtttcttgacatattcatcagtatttggtgtcttcagcatttaaattttagccattctaatgtgtgtagtaga

SEQ ID NO: 383014 - DNA, 201 bp, Homo sapiens
catagtttgcaaatattttctccagttctgtaggttatctgcttactgctttgatagtttcttttgctgtgcagaagctctttagtttaattaggtcctatctgtctatttttggttttgttgcaattgcttttggagacttcatcatgagatctttgccatggcatgtcttcagaatggggtgttttgtgttttcttcta

SEQ ID NO: 383015 - DNA, 201 bp, Homo sapiens
atagtttgcaaatattttctccagttctgtaggttatctgcttactgctttgatagtttcttttgctgtgcagaagctctttagtttaattaggtcctatctgtctatttttggttttgttgcaattgcttttggagacttcatcatgagatctttgccatggcatgtcttcagaatggggtgttttgtgttttcttctag

SEQ ID NO: 383016 - DNA, 201 bp, Homo sapiens
tagtttgcaaatattttctccagttctgtaggttatctgcttactgctttgatagtttcttttgctgtgcagaagctctttagtttaattaggtcctatctgtctatttttggttttgttgcaattgcttttggagacttcatcatgagatctttgccatggcatgtcttcagaatggggtgttttgtgttttcttctaga

SEQ ID NO: 383017 - DNA, 201 bp, Homo sapiens
agtttgcaaatattttctccagttctgtaggttatctgcttactgctttgatagtttcttttgctgtgcagaagctctttagtttaattaggtcctatctgtctatttttggttttgttgcaattgcttttggagacttcatcatgagatctttgccatggcatgtcttcagaatggggtgttttgtgttttcttctagaa

SEQ ID NO: 383018 - DNA, 201 bp, Homo sapiens
aactctcacgtgcttagtattccaataatggaacactaggcataagtgggtcaatatattcaaataagatttaaacaaaataaatgaatgttgctagtcattttttttttttttctgaaatgcacttattgactaaagatttgccctgggaaatacatttctttgggattagtcaaaattagaatccagtcttgactctat

SEQ ID NO: 383019 - DNA, 201 bp, Homo sapiens
atttgaaaacctggctggcagaagttctgccgtcttcagcagggagctcccagggttactttagaactgctggattcctttttctctagcagaaagagaaraagaacatggaggaggcatggctactcttttaagaaccccagcccagtaatggcagaccttctgctcacatttcagtatagaacttgagctcatgtttca

SEQ ID NO: 383020 - DNA, 201 bp, Homo sapiens
acggggtttcaccatgttggccaggatggtctcaatctcttgacttcgtgatccacccgcctcagcctcccaaagtgctgggattacaggtgtgagccacygcgcctggccgggacgagaactcttataatgcatgccccaaaggttttaagtggatctgttttaggaagggcataaggaaatcgaaggtctaaaaattga

SEQ ID NO: 383021 - DNA, 201 bp, Homo sapiens
gaaggggtgtgtgtgtgtgtgtgtgcgtgcacgcagaactactggcttggaaagaaggggtgtgtgtgtgtatgtgtgcgtgtgcgtgcacgctcagggcycccactggtgtgggtgtgtgtgtgtgtattcagggctcccactggctagggaagaaggggtgtgggggtgtgtgtgtattttggggtaggggaagtggta

SEQ ID NO: 383022 - DNA, 201 bp, Homo sapiens
atgagaatacttatgatctatttagtaattgatgtaaagctactgagtaaaggagctgtgataattgatggtaaaagtaggaagtgcagtcatcgtgtacytttaaccaccctagctagatgttgtgcccatgcacactactttcccctttgattgtagctgtttttctcattgaaaatctgtattctttttgagttctgg

SEQ ID NO: 383023 - DNA, 201 bp, Homo sapiens
cctgtaatcccagctctttgggaggccaaggcaggcagatcacctgaggtcaggagttcgagaccagcctggccaacatggtgaaacccagtctctactgaaaaaaaaaaaaatacaaaaaattagctgagcttggtggttcgtgtctgtagtcccagctactcaggaggctgaggcagggagaatcgcttgaacccagga

SEQ ID NO: 383024 - DNA, 201 bp, Homo sapiens
ctgtaatcccagctctttgggaggccaaggcaggcagatcacctgaggtcaggagttcgagaccagcctggccaacatggtgaaacccagtctctactgaaaaaaaaaaaaatacaaaaaattagctgagcttggtggttcgtgtctgtagtcccagctactcaggaggctgaggcagggagaatcgcttgaacccaggag

SEQ ID NO: 383025 - DNA, 201 bp, Homo sapiens
aaaagacaatacttgaataatttatactttccttttttccaatctccagccaccacatttgctcaaagtatggggtttatcaatgaagacttatctaccastgcttctcaagctcttcattcagattggcttgctcggaattgccagccaaattattggagggtatgcacacatttaatttaaaaaaataagttaattgaa

SEQ ID NO: 383026 - DNA, 201 bp, Homo sapiens
aggcagggagaatcgcttgaacccaggaggcggaggttgcagtgagccaagatcaatgccattgcactccagctgggtgacagagcaagactcctgtctcaaaaaaaaaaaaatctacttcgcagttttcaaatgtgcactctattgttattaaccttagtcagcatgatccgcagtaggcctctggaacttaccctcctg

SEQ ID NO: 383027 - DNA, 201 bp, Homo sapiens
caggccctagtgcgctgctccagccctctgcccctggtcgtcaacacttggccctttaagaatgcaaccgaagcaggtgcgggttggcggcctgggcgggyggctgcgccgcgagagcttgcgggtggggatgactagcccgccccgctgcagtcacccggcagggcggacggaagagcgccgggctgggccgggcctcgc

SEQ ID NO: 383028 - DNA, 201 bp, Homo sapiens
atttgtacgtttttaaaaaagaagcatccataccataagattccaactgtatgacaccagacagggaaaaactatgaagacagtataaagatcagaggctkccagcagttgtggggagggaggaatgaatcagcaaagcacagactacttttagggcagtgaaactgttctctataatactgcaaatggtggatgtcattt

SEQ ID NO: 383029 - DNA, 201 bp, Homo sapiens
aggaatgaatcagcaaagcacagactacttttagggcagtgaaactgttctctataatactgcaaatggtggatgtcattttatcatttctccaaacccayagaatatgcaacactgagtgaaccctgtcgtgaactatggactctgggtaataatgatgtatcaatgtcaggtgtaccagctgtaacatgtacaactctg

SEQ ID NO: 383030 - DNA, 201 bp, Homo sapiens
ggattaattgttcggcgatcgctggctgccgggacttttctcgcgctggtctcttcggtggtcagggatggcgcggaagtcgaacttgcctgtgcttctcktgccgtttctgctctgccaggccctagtgcgctgctccagccctctgcccctggtcgtcaacacttggccctttaagaatgcaaccgaagcaggtgcggg

SEQ ID NO: 383031 - DNA, 201 bp, Homo sapiens
gaagctgcacttcagtgtgctaggtagagggtacataggccgtttctgtttttcttccagctcagggatttataatgagaggaagtgctacaaaaagctgyggtgcgaaaatgacggacgctatgaatggaaaaaaaatctaaaatcaatccggtcctaagcaaacacgcttcacctacactcataactattgcagacctc

SEQ ID NO: 383032 - DNA, 201 bp, Homo sapiens; identical to SEQ ID NO: 83297

SEQ ID NO: 383033 - DNA, 201 bp, Homo sapiens; identical to SEQ ID NO: 83298

SEQ ID NO: 383034 - DNA, 201 bp, Homo sapiens
ttacactcgatttcctgccctaaattgttaataccctctcaaagccgtgtaggagactcaccaatacctggagctggagcctatgctgacgatactgcagrggcagccgcagccactgggaatggtgatatattgatgcgcttcctgccaaggtatgacttcttagtttgtgaattttagagacctttggagaagatattt

SEQ ID NO: 383035 - DNA, 201 bp, Homo sapiens
tttacactcgatttcctgccctaaattgttaataccctctcaaagccgtgtaggagactcaccaatacctggagctggagcctatgctgacgatactgcasgggcagccgcagccactgggaatggtgatatattgatgcgcttcctgccaaggtatgacttcttagtttgtgaattttagagacctttggagaagatatt

SEQ ID NO: 383036 - DNA, 201 bp, Homo sapiens
taataccagtctacatacacaacctaaatttatgagtttgcattatattcttgagccctttagatttataaaggaatcttaaagcacaacttagaatataktcacataaacctagctttgaagaaacaataaaagcttttaaaacatattttactttaagtctcagaattctttggccaaggaacaaatttctgaaattta

SEQ ID NO: 383037 - DNA, 201 bp, Homo sapiens
gatttgattaacagcgtggagggcattagcatctggaggctctgccctggatgcagtggagagcggctgtgccatgtgtgagagagagcagtgtgacggcyctgtaggctttggaggaagtcctgatgaacttggagaaaccacactagatgccatgatcatggatgggtaagaacaccgttcaggtcctatttattatgt

SEQ ID NO: 383038 - DNA, 201 bp, Homo sapiens
gttgtccagggtactggttagcatcctggctgtacattagaactagtggttttagttgactctccaggtatggatgttcctgaaacacctctagctgcatygggtgcatatccagcatggagagctactggtctctcacagtagttttcaaactgaagtttctgccatgtggaggtggctgcctcaatcagggctgctctg

SEQ ID NO: 383039 - DNA, 201 bp, Homo sapiens
atatataaacaagcattattgggatttgattaacagcgtggagggcattagcatctggaggctctgccctggatgcagtggagagcggctgtgccatgtgwgagagagagcagtgtgacggctctgtaggctttggaggaagtcctgatgaacttggagaaaccacactagatgccatgatcatggatgggtaagaacacc

SEQ ID NO: 383040 - DNA, 201 bp, Homo sapiens
aactagtggttttagttgactctccaggtatggatgttcctgaaacacctctagctgcattgggtgcatatccagcatggagagctactggtctctcacartagttttcaaactgaagtttctgccatgtggaggtggctgcctcaatcagggctgctctgcttgtatttctttctaactaagtctaaaaaatcagtttgg

SEQ ID NO: 383041 - DNA, 201 bp, Homo sapiens; identical to SEQ ID NO: 83305

SEQ ID NO: 383042 - DNA, 201 bp, Homo sapiens
acatttgactgtcggtatcattactgacagttattcagccaaagccaaaaataatattccacatctgaaattcatgggtggattagttgaaaagatagacwctgtatcaaagtggacttgctttgtggatgctttaacagaagtaaccgactcttgttcatttatgtgtattctatcacatgtggcaattttggtggtttt

SEQ ID NO: 383043 - DNA, 201 bp, Homo sapiens
tatatacctggctgataacaagttcttttaaaaaattaattttaatgacaatgaaaattatgtgtatttgtggtgtacaacatgatactttgatatatgtrtatgttgtagaatggctaaatcaagctatttaacttattatctcacagacctattttattatggtgagaacacttaaaatctacttagcagttttcagct

SEQ ID NO: 383044 - DNA, 201 bp, Homo sapiens
ggatgctttaacagaagtaaccgactcttgttcatttatgtgtattctatcacatgtggcaattttggtggttttaatttctaacttcaagtaacccaatytggagttagtatttattctgagacactaaggtttcacctctgtttcaatcagctaccaagctgtagaatacatgagaagaggagaagatccaaccatagc

SEQ ID NO: 383045 - DNA, 201 bp, Homo sapiens
gtttcacctctgtttcaatcagctaccaagctgtagaatacatgagaagaggagaagatccaaccatagcttgccaaaaagtgatttcaagaatccagaarcattttccagaattctttggggctgttatatgtgccaatgtgactggaagttacggtaagttgtgtttggattttgtatttgtgtgaacttccaaatatt

SEQ ID NO: 383046 - DNA, 201 bp, Homo sapiens
catcagcctgggcgggggacagttctgtgtttaagttgcctgtattgaaagagggaacttgcgtaaatacactttcaagcctgtaggtgctgtagtgatgcttgaagtgtttaccaaccagagcacccactcttcaaggaattctgttgttaccagaaaagaaattgtccatcaaagacccttccccccacacccccaaat

SEQ ID NO: 383047 - DNA, 201 bp, Homo sapiens
atcagctaccaagctgtagaatacatgagaagaggagaagatccaaccatagcttgccaaaaagtgatttcaagaatccagaagcattttccagaattctytggggctgttatatgtgccaatgtgactggaagttacggtaagttgtgtttggattttgtatttgtgtgaacttccaaatatttctaaaacatacacttt

SEQ ID NO: 383048 - DNA, 201 bp, Homo sapiens
atcagcctgggcgggggacagttctgtgtttaagttgcctgtattgaaagagggaacttgcgtaaatacactttcaagcctgtaggtgctgtagtgatgcttgaagtgtttaccaaccagagcacccactcttcaaggaattctgttgttaccagaaaagaaattgtccatcaaagacccttccccccacacccccaaatg

SEQ ID NO: 383049 - DNA, 201 bp, Homo sapiens
ttgtgttgagaattttagatatatataaagagagaaattagggacctgtgtcatgcaatatagatacctcacctgtattatttaattcttagactagaatrgatattcagtaaaattatttatcttatttgtttttatataagacttagtgatttcttagcttttaattcttatctttaagttaccagatgtctttttttg

SEQ ID NO: 383050 - DNA, 201 bp, Homo sapiens
  misc_feature (1)...(201): n = A,T,C or G
ggtatcattactgacagttattcagccaaagccaaaaataatattccacatctgaaattcatgggtggattagttgaaaagatagacactgtatcaaagtngacttgctttgtggatgctttaacagaagtaaccgactcttgttcatttatgtgtattctatcacatgtggcaattttggtggttttaatttctaacttc

SEQ ID NO: 383051 - DNA, 201 bp, Homo sapiens
cagcctgggcgggggacagttctgtgtttaagttgcctgtattgaaagagggaacttgcgtaaatacactttcaagcctgtaggtgctgtagtgatgcttgaagtgtttaccaaccagagcacccactcttcaaggaattctgttgttaccagaaaagaaattgtccatcaaagacccttccccccacacccccaaatgta

SEQ ID NO: 383052 - DNA, 201 bp, Homo sapiens
tgcggaccctacaaaccacctggtatcttaaagcaggatattcctatccataaagaaacagaagatgatcgtggtcatgacactattggtaatttgccttytgtgcagtttttatggataaagtttagttaattatcttcctgtagctcttccctattcttctaccagaagttgattttgattgttttaactgccaattaa

SEQ ID NO: 383053 - DNA, 201 bp, Homo sapiens; identical to SEQ ID NO: 83267

SEQ ID NO: 383054 - DNA, 201 bp, Homo sapiens
tattgattggagaaaagcaatgtttttaatctatgaacctctgaaaactccttaattcctaactgcattctattttcttgcagcactactatggatgtagragcagtaggagatctcagacgaattaaaaatgctattggtgtggcacggaaagtactggaacatacaacacacacacttttagtaggagagtcaggtatt

SEQ ID NO: 383055 - DNA, 201 bp, Homo sapiens
tgattggagaaaagcaatgtttttaatctatgaacctctgaaaactccttaattcctaactgcattctattttcttgcagcactactatggatgtaggagyagtaggagatctcagacgaattaaaaatgctattggtgtggcacggaaagtactggaacatacaacacacacacttttagtaggagagtcaggtattttt

SEQ ID NO: 383056 - DNA, 201 bp, Homo sapiens
tgctgctgacccagaatgtctctagtacatatatttttgttgaaaagacaatacttgaataatttatactttccttttttccaatctccagccaccacatytgctcaaagtatggggtttatcaatgaagacttatctaccagtgcttctcaagctcttcattcagattggcttgctcggaattgccagccaaattattgg

SEQ ID NO: 383057 - DNA, 201 bp, Homo sapiens
tctccagccaccacatttgctcaaagtatggggtttatcaatgaagacttatctaccagtgcttctcaagctcttcattcagattggcttgctcggaattsccagccaaattattggagggtatgcacacatttaatttaaaaaaataagttaattgaaaatattcagtgacatcctttctgctcagtgttgcctgcctgt

SEQ ID NO: 383058 - DNA, 201 bp, Homo sapiens
tttgctcaaagtatggggtttatcaatgaagacttatctaccagtgcttctcaagctcttcattcagattggcttgctcggaattgccagccaaattattrgagggtatgcacacatttaatttaaaaaaataagttaattgaaaatattcagtgacatcctttctgctcagtgttgcctgcctgttgtccagggtactgg

SEQ ID NO: 383059 - DNA, 201 bp, Homo sapiens
ggtaaactttatacacctacagtgattttttttttttaacttctaggcatggttgtaatccataagacaggacatattgctgctggtacatctacaaatgrtataaaattcaaaatacatgggttagtgtttccaaaagaacagagctctcaaatatacactgaatgcagagcaatatatgccgggtgctatgggggttgc

SEQ ID NO: 383060 - DNA, 201 bp, Homo sapiens
tcctatagttcaccaaacttctttctcatttttggccccaggtgctgcttgcaataaactttcaacatttactcagtttagtttcatggtttataattcckaaaaaaatcagccaactgaggaaaaagtggactgcatctaatccatctttactgtcaacatctgtatttaaagaagaaagaaacaaaggctgaaaaggct

SEQ ID NO: 383061 - DNA, 201 bp, Homo sapiens
ttgtttagcttggtttgtttccctaacttctgattaactctctgtatgacaactctacagaagttgtgcgcgtgctttctcagcagcatttttccttcaamatcatctttttaatcaacagtcattaataaatgtacatgtacgatattcaaactttagaatttcagctgttttttctatgctcatcttatgttctttcta

SEQ ID NO: 383062 - DNA, 201 bp, Homo sapiens
acacattgaaaatatgttgtacataatttattttgataagaaataacttaataggcccacattctactgcacaatcttggtctttataagtcactaagatkacttttaaaggttaaaaagtcaaaaaagtttgtgattagaatctgctattgatttgacaaatggttttgggggcatgacccagaaaaattatttcagaag

SEQ ID NO: 383063 - DNA, 201 bp, Homo sapiens
gaaaaaaatatatatatataaacaagcattattgggatttgattaacagcgtggagggcattagcatctggaggctctgccctggatgcagtggagagcgrctgtgccatgtgtgagagagagcagtgtgacggctctgtaggctttggaggaagtcctgatgaacttggagaaaccacactagatgccatgatcatggat

SEQ ID NO: 383064 - DNA, 201 bp, Homo sapiens; identical to SEQ ID NO: 83301

SEQ ID NO: 383065 - DNA, 201 bp, Homo sapiens
ccgggacttttctcgcgctggtctcttcggtggtcagggatggcgcggaagtcgaacttgcctgtgcttctcgtgccgtttctgctctgccaggccctagygcgctgctccagccctctgcccctggtcgtcaacacttggccctttaagaatgcaaccgaagcaggtgcgggttggcggcctgggcgggtggctgcgccg

SEQ ID NO: 383066 - DNA, 201 bp, Homo sapiens
aaatgtatgggatcctggctctgctacttaccagctgtgtgaccttaaactaactgcctgacctgtggctctgtttacttttctttaaaatgagggtcgtsattgtacagtacctaccacagaagctgttatgaagactcaatgaactaatccatatgaagtccacgttgtaattgtttgctgttcagtattattaagact

SEQ ID NO: 383067 - DNA, 201 bp, Homo sapiens
gactcaatgaactaatccatatgaagtccacgttgtaattgtttgctgttcagtattattaagacttcctgggataggtgttacctcaatacacatatcarttatgcatattttaatctaatgatgcagaagaaatgtgtgaagaaggctgcggtttagtggattttttatttaactgccttttagtggtttcgattgtac

SEQ ID NO: 383068 - DNA, 201 bp, Homo sapiens
agcctgggcgggggacagttctgtgtttaagttgcctgtattgaaagagggaacttgcgtaaatacactttcaagcctgtaggtgctgtagtgatgcttgaagtgtttaccaaccagagcacccactcttcaaggaattctgttgttaccagaaaagaaattgtccatcaaagacccttccccccacacccccaaatgtat

SEQ ID NO: 383069 - DNA, 201 bp, Homo sapiens
accgaagaggttagcagaattatttttgcactgtttgaggcttgtctttcacttcatttactttccatatgagcctatcacagtttcaaagcattttaagrtcagccactgctgattctcattagtgaattttcagatggggaagatacacagcttactgatcaatatgacttattaggttggactgcttattattgttct

SEQ ID NO: 383070 - DNA, 201 bp, Homo sapiens
agagagagcagtgtgacggctctgtaggctttggaggaagtcctgatgaacttggagaaaccacactagatgccatgatcatggatgggtaagaacaccgktcaggtcctatttattatgttgagttacatttagagttgtggtcttctgagagcaagatgaaagaatgcatgagttttgacacagatcaaaacccctagc

SEQ ID NO: 383071 - DNA, 201 bp, Homo sapiens
ccaaagtgctgggattacaggtgtgagccaccgcgcctggccgggacgagaactcttataatgcatgccccaaaggttttaagtggatctgttttaggaarggcataaggaaatcgaaggtctaaaaattgagtctcttaaaactgttcatgtgtgaatattcctttgaaagtctttgtgtagctcacttaagatgctgct

SEQ ID NO: 383072 - DNA, 201 bp, Homo sapiens
aataaaccttattagaaagctcaaagttggatttaacagaatgaaaaaaatgataattatataattgtggatgaatttacaggtgactagtttcttctatktaatgaccaaagaggaccctcccccaggtgtttgagcatgagaagatgaacttgattagacaaagcatcttgacaaattactcttgactcttcctgtgag

SEQ ID NO: 383073 - DNA, 201 bp, Homo sapiens
aaatcagagtaatagaaatatcacatggagagataggtagtcccttagaactgggagaatgccaagctaaaaaactatgtctctgaccttataaacaatcrtttatctgctgtccacaaatgctgtggtttgcctgacctgaagccttcaggcccctttcaaaagccatatttaaaattagcttggagaaactgagaattt

SEQ ID NO: 383074 - DNA, 201 bp, Homo sapiens
aaagttgtgtgtgtatatgtgtgtgtgtgttcagggctcccactggggtgtgtgtatgtgtgcatgtgttcagaactcccactggcttggaaagaaggggkgtgtgtgtgtgtgtgtgcgtgcacgcagaactactggcttggaaagaaggggtgtgtgtgtgtatgtgtgcgtgtgcgtgcacgctcagggctcccactg

SEQ ID NO: 383075 - DNA, 201 bp, Homo sapiens
acctcattcctttcatggactgttcactgctcagttctgaggaggatgacactagtgtatttccatgtggcttagacataaggtatacagtagccagtgtstagtcaaataagcagtatctgtattggttataaatatgtgcatcctatagttcaccaaacttctttctcatttttggccccaggtgctgcttgcaataaa

SEQ ID NO: 383076 - DNA, 201 bp, Homo sapiens
gtccacaaatgctgtggtttgcctgacctgaagccttcaggcccctttcaaaagccatatttaaaattagcttggagaaactgagaattttagtgctgttktggtacatggcaagttgattttctatttttttccttaattttgtctgattgtgggaatctatatgaacttcgtggatgtgctgtcacttctgtgttaaga

SEQ ID NO: 383077 - DNA, 201 bp, Homo sapiens; identical to SEQ ID NO: 83306

SEQ ID NO: 383078 - DNA, 201 bp, Homo sapiens
atatgtgtgtgtgtgttcagggctcccactggggtgtgtgtatgtgtgcatgtgttcagaactcccactggcttggaaagaaggggtgtgtgtgtgtgtgygtgcgtgcacgcagaactactggcttggaaagaaggggtgtgtgtgtgtatgtgtgcgtgtgcgtgcacgctcagggctcccactggtgtgggtgtgtgt

SEQ ID NO: 383079 - DNA, 201 bp, Homo sapiens
aaaaccagatctaagttcaaattccagctgttttacttaacatctattgaactggataagtaacttttaaatctctttacttcttcatctctaagaagaargcaatggaagttttgagacggagtttcgctcttgtcacccaggctggagtgcaatggcgcgatctcagctccctacaacctctgcctcctgggttcaagt

SEQ ID NO: 383080 - DNA, 201 bp, Homo sapiens
atgtgtgtgtgtgttcagggctcccactggggtgtgtgtatgtgtgcatgtgttcagaactcccactggcttggaaagaaggggtgtgtgtgtgtgtgtgygcgtgcacgcagaactactggcttggaaagaaggggtgtgtgtgtgtatgtgtgcgtgtgcgtgcacgctcagggctcccactggtgtgggtgtgtgtgt

SEQ ID NO: 383081 - DNA, 201 bp, Homo sapiens
gattggaaacagtattttcctgacagcagcccttggatttcccgaggctttgattcctgttcagctgctctgggtcaatctggtgacagatggcctgcctrccactgcactggggttcaaccctcctgatctggacatcatgaataaacctccccggaacccaaaggaaccattgatcagcgggtggctctttttccgtta

SEQ ID NO: 383082 - DNA, 201 bp, Homo sapiens; identical to SEQ ID NO: 83357

SEQ ID NO: 383083 - DNA, 201 bp, Homo sapiens; identical to SEQ ID NO: 83483

SEQ ID NO: 383084 - DNA, 201 bp, Homo sapiens
atgtcactaacttataagccgcctccatggcagatgctgctgtgctccctgatgccctgtgagcaccggggttgcctgtggcgcctgccatgtgactcggrcgcagcatcagctggctggaggtgtggctttcatagacctccacaggctgcctaggacaagatgaccaggagggcccaagccagacaaaagccggagtgg

SEQ ID NO: 383085 - DNA, 201 bp, Homo sapiens
ttttgtatcctcttgtaggttgtactcaatttaaatattagatttgttgaccttttaaaatttgtcaagtatatgagagtatgagctagggtttatatatwgaattgtttaagtctgttcagcagttacaatgcagaagtaaaatagtgcttatagattgacgaccgctatctcacattggacagaagtcttctactccat

SEQ ID NO: 383086 - DNA, 201 bp, Homo sapiens
cagtatccaaatacacaatgaacaaaagttagcccccataagagatgaaaattgtactacctggaatttgcacaattgtttgaaacattttcccgtttttstgtgataaaagcacaatctagggtggagggttcatactaactggaagtaagtttgtcagaagaattaactttaaatacaatgctaacttggattaaatag

SEQ ID NO: 383087 - DNA, 201 bp, Homo sapiens
aactggggtgttccaactttcaaagtggaaagcttctaggtttgtcttaggtttctccaggatattaaggtgtttgagctacttaagttcttattttttgsaaccaaaaggttggatgaattggctaaaagtcagttttgtcatactggttgtttcaggaagagaaagggaattttcttatttacgattttgtgtctcact

SEQ ID NO: 383088 - DNA, 201 bp, Homo sapiens
tctgtcgccgcatcggcatcttcgggcaggatgaggacgtgacgtcaaaagctttcacaggccgggagtttgatgaactcaacccctccgcccagcgagaygcctgcctgaacgcccgctgttttgctcgagttgaaccctcccacaagtctaaaatcgtagaatttcttcagtcttttgatgagattacagctatggtga

SEQ ID NO: 383089 - DNA, 201 bp, Homo sapiens
gtgacgtcaaaagctttcacaggccgggagtttgatgaactcaacccctccgcccagcgagacgcctgcctgaacgcccgctgttttgctcgagttgaacyctcccacaagtctaaaatcgtagaatttcttcagtcttttgatgagattacagctatggtgagcatgtttgaacatgtacaggtgactcaggctacacaa

SEQ ID NO: 383090 - DNA, 201 bp, Homo sapiens
ggcattattcctggccttaacactagaatgccctgttgaaagcatacagtaacatttattatactcattctggttgtctgtttgccctagctcactggacrttggtggtgattggcatctgtcaggacttggtggtcctggtgcctcctgtttttatttttctttttgtcctgctcaaacagatatttcttattcatgccg

SEQ ID NO: 383091 - DNA, 201 bp, Homo sapiens
caggagttcgagaccagcctggccaacatggtgaaaccccacctgtactaaaaatacaaaaattagccaggcgtggtggtgggtccctgtaatcccagctrctcaggaggctgaggcaggagaatcgcttgaacccgggaggcggatgttgcagtgagccgagattgcgccactgcactccagcctgagtgacaaagtgag

SEQ ID NO: 383092 - DNA, 201 bp, Homo sapiens
gtgtgatcactgcgacctcgaactccttggcttcaagggggtcctcctgcctcagcctcctgagtagctggtaatacaggcacatgacaccatgcccagcttttttttttttttttttttaaagacggaatcttgaactgtcgcccaggctggagtgcagtggcacgattgcggcccactgcaagcttcgcctcccaggtt

SEQ ID NO: 383093 - DNA, 201 bp, Homo sapiens
tagtattcattgtggtgagttctctctttttaccacgtttatagttgttggattgggaagtgcagtgtgactcttactttgtagtttttaaatcttaacargtttatagttgtatgagctaaaagtttaaacctctgccccattttcttggggcagtgttctgtgaccagttacatttttggacttaggttatctctgaag

SEQ ID NO: 383094 - DNA, 201 bp, Homo sapiens
tttttccccagctcttcccccacagtatggtaattgctaaaaagcgtatatattgctttgacgttgggctctgtttttctttaatttttatttttattactattattattattattattattattattactattttgagacagggtctcactctgctgtgcaggctggaatgcagtagcgtgatctcggttcactgcaacc

SEQ ID NO: 383095 - DNA, 201 bp, Homo sapiens
cttactttgtagtttttaaatcttaacaagtttatagttgtatgagctaaaagtttaaacctctgccccattttcttggggcagtgttctgtgaccagttrcatttttggacttaggttatctctgaagtgctgtgttgctgtataaatgtcatatggaggataacctacaaaatacacttcggatctcccaacagctttg

SEQ ID NO: 383096 - DNA, 201 bp, Homo sapiens; identical to SEQ ID NO: 83370

SEQ ID NO: 383097 - DNA, 201 bp, Homo sapiens
accaagacggtggaggaggtgctgggccacttcggcgtcaacgagagtacggggctgagcctggaacaggtcaagaagcttaaggagagatggggctccamcggtaggtgcagggcgctccgctgcaggggcccggcgcggccgggagagccagggaagatggctgaccgggctccacctcgtgggcttcggctccgcgcc

SEQ ID NO: 383098 - DNA, 201 bp, Homo sapiens
ttttccccagctcttcccccacagtatggtaattgctaaaaagcgtatatattgctttgacgttgggctctgtttttctttaatttttatttttattactattattattattattattattattattactattttgagacagggtctcactctgctgtgcaggctggaatgcagtagcgtgatctcggttcactgcaacct

SEQ ID NO: 383099 - DNA, 201 bp, Homo sapiens; identical to SEQ ID NO: 83372

SEQ ID NO: 383100 - DNA, 201 bp, Homo sapiens
tttggcttggtttgaagaaggtgaagaaacaattacagcctttgtagaaccttttgtaattttactcatattagtagccaatgcaattgtgggtgtatggyaggtaagcaaaaattcctgtactgcaaaatttcaataagttatgtaagtgattagggctgtattaatctttctgttatctgtttttcctgatgtgttgag

SEQ ID NO: 383101 - DNA, 201 bp, Homo sapiens
tttccccagctcttcccccacagtatggtaattgctaaaaagcgtatatattgctttgacgttgggctctgtttttctttaatttttatttttattactattattattattattattattattattactattttgagacagggtctcactctgctgtgcaggctggaatgcagtagcgtgatctcggttcactgcaacctc

SEQ ID NO: 383102 - DNA, 201 bp, Homo sapiens
accccgtgcctcccttggcctctctgagctttgcccagaagaccaacaatcatacataccctaactgggacaccactctgcagaatgcagatgatccattytggaggaagctgtcccttgagctcagtgagctcccaggcaagcagggcatctggccgacttccctcacaacagctgctcccacatcccctcggactggag

SEQ ID NO: 383103 - DNA, 201 bp, Homo sapiens
ttaataaaatgctaaatgtcaatttatcactgcgcatgtttgactttagactgtaaatagagatcagtttgtttctttctgtgctggtaacaatgagcgtygcacagacatggtttcaggtaaataaatctattctatgataaattctcagtgtggtggtgactgttctgtgggagggggactgatgggcaccaagggcct

SEQ ID NO: 383104 - DNA, 201 bp, Homo sapiens
aggaatttgattggattttcttgcagagtcatttcctacagtgtaaagaggacaacccggactttgaaggcgtggattgtgcaatctttgaatccccatamccgatgacaatggcgctctctgttctagtaactatagaaatgtgtaacgccctcaacaggttagtgcaccttcacggcaggctgaggcgagcatggtgac

SEQ ID NO: 383105 - DNA, 201 bp, Homo sapiens
gccaggagtcatcccagaacattgctacttatttattaaaaagctaaaaactagtgaaagcaagtaactgaaccagtgaactctgggtatcgataggttcrtcttaaataggccacttccccactcccccacccccccttgcttggtcttgtccttggtggctaagacttagctctgcaggggatgttaaagcacagttag

SEQ ID NO: 383106 - DNA, 201 bp, Homo sapiens
tccaggatattaaggtgtttgagctacttaagttcttattttttggaaccaaaaggttggatgaattggctaaaagtcagttttgtcatactggttgtttsaggaagagaaagggaattttcttatttacgattttgtgtctcacttagcctgaaagctttaattcctcagaatagtctttatgtctgtgaaagtaagcca

SEQ ID NO: 383107 - DNA, 201 bp, Homo sapiens
ggagcccatggagggacccacttcccttggtccagacagctgggagtgggttaggcccactgctgttttgagcagggccacttgctccatttcactgaagsctttgctgggtgaaaacacttcagcatctcctcctcaggtcaacccataaagaccaggtccagcaccgtggtcttggcacatccctggcctcaggccctc

SEQ ID NO: 383108 - DNA, 201 bp, Homo sapiens
ttgagctcctgtcctcatgatctactcaccttggcctctcagtgctgggattataggcgtgagccaccgtgcccagctcaacgtggcctgtttaacttgarttttacattttttaaattccccttagagaatgatttgatcagattattaattgctcatatttcagagaaagcacgagaaaatatagttttgacatcactt

SEQ ID NO: 383109 - DNA, 201 bp, Homo sapiens
aggctggaggcgtgacacgtcttccctgtgtgtcagctcatcttccagatcacaccgctgaacgtgacccagtggctgatggtgctgaaaatctccttgcscgtgattctcatggatgagacgctcaagtttgtggcccgcaactacctggaacctggtaaagagtgtgtgcagcctgccaccaaatcctgctcgttctcg

SEQ ID NO: 383110 - DNA, 201 bp, Homo sapiens
attgtctagggaacatcaattcattcagctctgcgggctccttactgtatacatatagttatgcagcttcatagaacatgagctattgccacaataaaaawaagtgggaaggagcagagaagcagtttgtcttattttactcgggaaatgtttatgcaactctgaaatgtgagtttattcttcccaagcttttgtgcttag

SEQ ID NO: 383111 - DNA, 201 bp, Homo sapiens
cattcgagttggaagtactaaggttcctatgacctctggagtcaaacagaagatcatgtctgtcattcgagagtggggtagtggcagcgacacactgcgaygcctggccctggccactcatgacaacccactgagaagagaagaaatgcaccttgaggactctgccaactttattaaatatgaggttagctaatgaaaagt

SEQ ID NO: 383112 - DNA, 201 bp, Homo sapiens
tcagtaagaattgtgttgtatctatagatgagtttgggaaatatggtcgtaatatcaagtctttggatccatgagcatagggatgtctgttttttttttgttttttttttttaaggtctgtcatttctttcaacactggttgtcagtgttcaagtcttgtgcttcttttgttattgcatttttggcggggggaatatttgt

SEQ ID NO: 383113 - DNA, 201 bp, Homo sapiens
agtggtaatgggtgggcatgaatgagaggttctaggttcttggtgtgggtcgcagagatctgttttttctgtctcacaacccgcttaggtgaatctgtctytgtcatcaagcacactgatcccgtccctgacccacgagctgtcaaccaagataaaaagaacatgctgttttctgtaagtactttatgaaatgtgttttta

SEQ ID NO: 383114 - DNA, 201 bp, Homo sapiens
tcaagtgatcctcctgccttagcctgtaatcccaggtctttgggaggcggaggcgggtggatcacaagatcaggagttcaagaccagcctggccaagatgrtgaaacccccgtctctactaaaaatacaaaaattagccgggtgcagtggcaggcacccgtaacccgtaatcccagctactcggtaggccgaggcaggaga

SEQ ID NO: 383115 - DNA, 201 bp, Homo sapiens
atgtgtagagaatctgggtgccctagtcaaaaaccagcgtcggtatttaagttgggatgtggtattcatcttgtgaccagttctctacttctgtcctaggrtacaaacattgctgctgggaaagctatgggagtggtggtagcaactggagttaacaccgaaattggcaagatccgggatgaaatggtggcaacagaacag

SEQ ID NO: 383116 - DNA, 201 bp, Homo sapiens
ccattgttcgaagcctcccgtctgtggaaacccttggttgtacttctgttatctgctcagacaagactggtacacttacaacaaaccagatgtcagtctgmagggtaagaggagtaatttagaatattccgtgtcgtggttctttgttcatcctaccaatatgccttcatgccatcaaaacttttgatttgtaatttcata

SEQ ID NO: 383117 - DNA, 201 bp, Homo sapiens
caatttaggaggccaaggcaggcggatcatttgagcccaggagttcgagaccagcctggccaacactgtgaaatcccatcttcactaaaaatacaaaaatyacccgggtgtggtggtggatgcctgtaatcctagctacttgggtggctgaggcacgagaatcgcctaaacccaggagatggaagctgcaatgagcctaga

SEQ ID NO: 383118 - DNA, 201 bp, Homo sapiens
cccctccgcccagcgagacgcctgcctgaacgcccgctgttttgctcgagttgaaccctcccacaagtctaaaatcgtagaatttcttcagtcttttgatkagattacagctatggtgagcatgtttgaacatgtacaggtgactcaggctacacaagcacatagtagcctctaattttgaccactgaatttttttgtcat

SEQ ID NO: 383119 - DNA, 201 bp, Homo sapiens
cattttcctcctgcttcccattcagtgggcttttgcctaggggtatgaatgtggcatgccagttggctgacccaaccattgctttccctttcagactggcratggcgtgaacgatgctcctgctctgaagaaagccgagattggcattgctatgggctctggcactgcggtggctaaaaccgcctctgagatggtcctggc

SEQ ID NO: 383120 - DNA, 201 bp, Homo sapiens
ctggcggatgacaacttctccaccattgtggctgccgttgaggaggggcgggcaatctacaacaacatgaaacagttcatccgctacctcatctcgtccarcgtcggggaagttgtctggtaggtctctgtgacagcatcacttactgtacgcctttatctaaatgggtcatggagcccagttctcgcagtttgctctcca

SEQ ID NO: 383121 - DNA, 201 bp, Homo sapiens
ggatgacaacttctccaccattgtggctgccgttgaggaggggcgggcaatctacaacaacatgaaacagttcatccgctacctcatctcgtccaacgtcvgggaagttgtctggtaggtctctgtgacagcatcacttactgtacgcctttatctaaatgggtcatggagcccagttctcgcagtttgctctccagattg

SEQ ID NO: 383122 - DNA, 201 bp, Homo sapiens
tgcactggggttcaaccctcctgatctggacatcatgaataaacctccccggaacccaaaggaaccattgatcagcgggtggctctttttccgttacttgsctattggctgtgagtacaatttttttatattactgatttttaaacaaaatgtttgtgagctgaaattttgtaaattcatcccttaaaagcgtgttttttc

SEQ ID NO: 383123 - DNA, 201 bp, Homo sapiens
agaaaaacattgttcattctttacggtagcaaggaattaaaatgggtgagagaagctgcttaaggaaatgagaatgtgagaaccattatctttatgtctcytagttgcttcctgtgacaaactttaaaagctacatgtcatttttattctccttgggtttttttggtaggtttagctataaaaattgtttccccttcagtg

SEQ ID NO: 383124 - DNA, 201 bp, Homo sapiens
ttgatcttcgtccttgtggggactggcctgcatggcctcggtggcagcgagccctgcagaggcaagtgcatcagcatcactgtgtttgttcccaggttacktcggcgctgctaccgtgggtgctgctgcatggtggttcattgctgctgacggtggtccaagagtgtccttctaccagctggtactcagtcacctttcttt

SEQ ID NO: 383125 - DNA, 201 bp, Homo sapiens
gtctgtgctaggcttggtatggggttggagcctggacttgggaaatatactgggctgataggaatttgattggattttcttgcagagtcatttcctacagkgtaaagaggacaacccggactttgaaggcgtggattgtgcaatctttgaatccccatacccgatgacaatggcgctctctgttctagtaactatagaaat

SEQ ID NO: 383126 - DNA, 201 bp, Homo sapiens
gactctgaaagctatgcttggccaggcttggtagctcacgcctgtaatcccagcactttgggatgccgaggcaggcagatcacgaggtcaagagattgagmccaccctggccaacatgaaacctcatctctactaaaaatgcaaaaattagccgggcatgatggtgtgtgcctgtagtcccagccacttgtgaggctgcag

SEQ ID NO: 383127 - DNA, 201 bp, Homo sapiens
ccggccgggcccccgaagccatggagaacgcgcacaccaagacggtggaggaggtgctgggccacttcggcgtcaacgagagtacggggctgagcctggarcaggtcaagaagcttaaggagagatggggctccaacggtaggtgcagggcgctccgctgcaggggcccggcgcggccgggagagccagggaagatggctg

SEQ ID NO: 383128 - DNA, 201 bp, Homo sapiens
aacttgtgattgagcagtttgaagacttgctagttaggattttattactggcagcatgtatatcttttgtaagtataaaaaaatttattttctttcccccmaaaagctgaaagtattccatagataaatcagaaaacaaatgatgtccattgggtgaaaacatatttggagttgcaagctgtgtctctatgtttaaaaaca

SEQ ID NO: 383129 - DNA, 201 bp, Homo sapiens
aaggcatttgcaactattatatggaacattttggaaaagcataccgtgactgtataacctgggccagataaataggtatttattttattaagactatacaygttgagccttttaaacttccacctcttttagaattagtaatcaaattgactgtgcaatctagcatttagcctgataattcagttttgtgaaaactataga

SEQ ID NO: 383130 - DNA, 201 bp, Homo sapiens
atctcagggtgaaaagttctagaccatcatgtccagcctgcagttagggacacctagcccttccatgacctgtatggcgtggtcttccggttagtgtgagrcagcattttgtctcctttatactgtcctgagaaaacaaaactcacactggaattgagactgtctcagctgaaatatagattccttttcagtaaactgatg

SEQ ID NO: 383131 - DNA, 201 bp, Homo sapiens
cattcctttgctgcctgagacggttcagtggctggcaggccagcaggatcgctgcagggccctgagccccatctagtcagttcatcagccttcagtcctcycgtagcttcctaggttagatgctgatgttcttggggatttctatgatgatttttaaatgtgtgtcagtgggagcaaatataattaactcaccacattaac

SEQ ID NO: 383132 - DNA, 201 bp, Homo sapiens
aatgcaccttgaggactctgccaactttattaaatatgaggttagctaatgaaaagtttctttgtccacaccctgcacgattcattgtgtttaaacagtaytccttcaagcaaaaggtcaaacagttctcacttttgccaagaaagaggtgtggttatttgtttttctgcctgccagctgtgtcacccttaaaatttgctg

SEQ ID NO: 383133 - DNA, 201 bp, Homo sapiens
ctcctagttgcttcctgtgacaaactttaaaagctacatgtcatttttattctccttgggtttttttggtaggtttagctataaaaattgtttccccttcwgtgcttactacagactctgagacttaaaattcatgttaagtgttgatcttttaggtatttgacggatataatcacccctttgaggactgaagtagacctt

SEQ ID NO: 383134 - DNA, 201 bp, Homo sapiens
aaataaaaaagtactgacttaacgattttgatatttgcagaaaggaacagacctttttgtagtcactgtttggaatgtaagggtcatctcctgactttaawattctttgtcagcttttggaagatatctggtaggatggttctggctgaacttttcaaagactaagctggaataggtggttttttgagggagatatggaga

SEQ ID NO: 383135 - DNA, 201 bp, Homo sapiens
gataattctttttttttttttccttgagatggagttttgctcttgtcagccaggctggagtgcaatggcgcgatctcggctcgctgtaacctctgcctccyggggtcaagcgattctcctgtctcagcttccccagtagctgggattacaggcgtccaccaccacactcggctaattttttgtattttagtagagatgggt

SEQ ID NO: 383136 - DNA, 201 bp, Homo sapiens
cgccttactgaagtgtagtccaacagggtcttactgccactgtgacacgtgccttgccttgggggtgcgtttccccacctctccttgctctgcagcttgtmcgaaaaccagtccttgctgaggatgcccccctgggagaacatctggctcgtgggctccatctgcctgtccatgtcactccacttcctgatcctctatgtc

SEQ ID NO: 383137 - DNA, 201 bp, Homo sapiens
ccttactgaagtgtagtccaacagggtcttactgccactgtgacacgtgccttgccttgggggtgcgtttccccacctctccttgctctgcagcttgtcckaaaaccagtccttgctgaggatgcccccctgggagaacatctggctcgtgggctccatctgcctgtccatgtcactccacttcctgatcctctatgtcga

SEQ ID NO: 383138 - DNA, 201 bp, Homo sapiens
gtgtagtccaacagggtcttactgccactgtgacacgtgccttgccttgggggtgcgtttccccacctctccttgctctgcagcttgtccgaaaaccagtmcttgctgaggatgcccccctgggagaacatctggctcgtgggctccatctgcctgtccatgtcactccacttcctgatcctctatgtcgaacccttgcca

SEQ ID NO: 383139 - DNA, 201 bp, Homo sapiens
cattagttactgaaggtcaaaagatccaagttggagattacttccacttttctactcagagtagaattcttttatatcaaggatgtgacatcctaaagctrtgaacaaaatgaagaagctttggtactgtgggctcagaatagcacaagagttaaagaatggtttgataacgggtgtagtggtatttttttttctcataag

SEQ ID NO: 383140 - DNA, 201 bp, Homo sapiens
ctgtgtgggtcagtcggtcacgtgggtgccaaggacaggtgggagagaagaagcaagctacagaagcagctcaagaatgggaactgcggaagctgattgtmttggaggaaggagtgtgatgctctcagagcagccagggaggagcagaaggagcttagggacgtaagtcaggctctcaaagtctatgtctggttcctgccc

SEQ ID NO: 383141 - DNA, 201 bp, Homo sapiens
acgggaggcgaggccggccgggcccccgaagccatggagaacgcgcacaccaagacggtggaggaggtgctgggccacttcggcgtcaacgagagtacggrgctgagcctggaacaggtcaagaagcttaaggagagatggggctccaacggtaggtgcagggcgctccgctgcaggggcccggcgcggccgggagagcca

SEQ ID NO: 383142 - DNA, 201 bp, Homo sapiens
ctttaatgttttgggttcttccattgttatcgtgttgtaagatcatactaagatgatgttggactctttgtagtctgtaaatagaacttacaaaaggaatrttccagttgctttcccttcctggtaatggcaaggtgacagttgttcctgacggtgacaagaatgatgacggctgtgatggcacccttgttgaccaaattt

SEQ ID NO: 383143 - DNA, 201 bp, Homo sapiens
gtaagcatacatagcaaatgctaatgtgagtcttaagtatctagaacacaagagccaaatgaaattgatatggcaaataaaaacatggagaaaataacccrcacataggctgtgctcagtggctcatgcctgtaatctcagcacttttgggggaggccaaggcatgcagatcacttgagtccaggagtttgagaccagcct

SEQ ID NO: 383144 - DNA, 201 bp, Homo sapiens
gtagaatttcttcagtcttttgatgagattacagctatggtgagcatgtttgaacatgtacaggtgactcaggctacacaagcacatagtagcctctaatyttgaccactgaatttttttgtcatagctccctaatttggaatttgtcatgatttgggtcttttctctagaattcggtgaatcagtggttagcatgttgtg

SEQ ID NO: 383145 - DNA, 201 bp, Homo sapiens
tcggtgaatcagtggttagcatgttgtgtgctacttgcagggaagatcctagagtcgtttaaaacccagaagggccttccagatcagtcccagaggaacartctggtgatctagtctcttttttaaatgagacgtgtttttattgtaagttttctgaaaattgaggatgtaatcagtcagttgtttggatcaccctgcttt

SEQ ID NO: 383146 - DNA, 201 bp, Homo sapiens; identical to SEQ ID NO: 83391

SEQ ID NO: 383147 - DNA, 201 bp, Homo sapiens; identical to SEQ ID NO: 83396

SEQ ID NO: 383148 - DNA, 201 bp, Homo sapiens
ggaaacttttacttcagacagttaacatgcagtactgagatttagtagcaggtataaactgcttttgaagcagttgagtaaaaggcagagttgtgaaatasatgagtggattcatataagaacctggattatgatcctagttctgcatgacattggactatgtacattaacctctgcagaattaggtaattggagtactgt

SEQ ID NO: 383149 - DNA, 201 bp, Homo sapiens
tgcttagtgcatggttgcctttgcaacatctaatgaattggttacctttctacccccataactctagtaactggaaacttgcttaatgatcagtgtcattyttttagtcagttcattataaaatattccttatgagctaaaatatattttgtctgttgtgtatgttagcttttttaatttggagccacatagaaatctgat

SEQ ID NO: 383150 - DNA, 201 bp, Homo sapiens
cgtcggggaagttgtctggtaggtctctgtgacagcatcacttactgtacgcctttatctaaatgggtcatggagcccagttctcgcagtttgctctccakattgcagcagctttggtctttgtgcctgagttggaagaggggagtgggcaagacagaaatgccttatggaagcagtggtgctttggccctcgggagggtt

SEQ ID NO: 383151 - DNA, 201 bp, Homo sapiens
gctctccagattgcagcagctttggtctttgtgcctgagttggaagaggggagtgggcaagacagaaatgccttatggaagcagtggtgctttggccctcrggagggttgtctgcagctgccccaatgtgcaaagaatcctctttaacgtgagactgagctaacattaaccaggtagtcacatgaaattcttgccctccaa

SEQ ID NO: 383152 - DNA, 201 bp, Homo sapiens
tctgaaggaggtgggcattagggccatgttggtctcccatctgtctaaatcataaagtcataattaatatggtaataatttgcataggtttctctaccttycaccgtcgtttcccatgtcagctacttagattgaccctaaaatgctaataaaactttctagactgtggtacttctcaacctttaggttacatttgaccat

SEQ ID NO: 383153 - DNA, 201 bp, Homo sapiens
actagacccccttgagttagtgcttttttttttttttttttttaaatgtagatggagtctcactcttgttgcccgggctggagcgcagtggtgcaatctcrgctcactgcaacctccacctcctgggttcaagtgattctcctgcctcagcctcctgagtagctgggattacagatgtccaccaccacgcccggctaattt

SEQ ID NO: 383154 - DNA, 201 bp, Homo sapiens
gggcagtagattgcttgctagttttcctaaaaatggtcaggaataggacacagatgttcctaattctaatagcatgagatgccttttattcttgaattacrttattcttacaaaaaccacgataagtgaaattcacccagtgcagtacttctttctagttaaaacaaaattgacaaaacttcacggtttcagttcttgtac

SEQ ID NO: 383155 - DNA, 201 bp, Homo sapiens
actataatactgcagtaagggatcttgcgtttcagtaatgtcactcatccagttttcctcccctttctcttaccccatctccctcccagtctcatggtttytgttgtcaatcctctttctccttacacaaggcaagaggttttcttaccaatagatcagaactgtgaaggactgcccgacatgatctgatatggttgttct

SEQ ID NO: 383156 - DNA, 201 bp, Homo sapiens
ctagttaaaacaaaattgacaaaacttcacggtttcagttcttgtacatatatgtatgcaggtcccagggatcagcctcagtctttgtgagaaccataccrtagagggctattttgagaacgaaataaacaaagcagtgggcatttatttagttcagatgaggaaaagattaaatttatacccatcttttaagtagatagt

SEQ ID NO: 383157 - DNA, 201 bp, Homo sapiens; identical to SEQ ID NO: 83353

SEQ ID NO: 383158 - DNA, 201 bp, Homo sapiens
tacccatcttttaagtagatagtggcagcagtaaataaatttgtggaataatttttacataaatcctgctatgatactttattatgccatattagccaagyattgtgtagccattaataattcagtccccaagaaccttttctgtggttttcattgattaaaatggggacttacatagcaaaccattcagcattctgagtc

SEQ ID NO: 383159 - DNA, 201 bp, Homo sapiens
tgacagttagttatagtgaacaatttgttagaatactggctaatgacgacacagtttttcctgttttgtttcttggcaccaaagttcatggtcaagggtartttcttgactctgaaagctatgcttggccaggcttggtagctcacgcctgtaatcccagcactttgggatgccgaggcaggcagatcacgaggtcaagag

SEQ ID NO: 383160 - DNA, 201 bp, Homo sapiens
tgcagctgccccaatgtgcaaagaatcctctttaacgtgagactgagctaacattaaccaggtagtcacatgaaattcttgccctccaaaagttggctttwtctcagtcagcttaataatttttttatttttatttatttttttgagacagtctcgctgtcgcccaggcttcgggcagtggcacgatctcagctcactgtc

SEQ ID NO: 383161 - DNA, 201 bp, Homo sapiens
tccaagttagtcttagcatttgtttcaaacgctttaccatcttggtagttctctttggtacccagattgaatgcagttatgtaaatggagtctggttgtcrttctagacattttttgtcttctgacagtctatggaaatttctttggcagtcttaattactctaccagctaaaactacagtctttcttaggtgttcttccc

SEQ ID NO: 383162 - DNA, 201 bp, Homo sapiens
atttctgacagtccaaaatcacaacacccctgggaccaaccaggatagtctaggtgggttgtttgttttggctatttcacttagagagtcattgcatactrttattcagattatctggcttttcatacccttctgagttaagtatactatttactttgttgctatttgtgaattatctcatagtaatatgcttttatattg

SEQ ID NO: 383163 - DNA, 201 bp, Homo sapiens
ttatgtaaatggagtctggttgtcattctagacattttttgtcttctgacagtctatggaaatttctttggcagtcttaattactctaccagctaaaactrcagtctttcttaggtgttcttcccatccccccattcctaaatttctagacttttactggcatagattattttggttttagtctaaacgtagaatttaagc

SEQ ID NO: 383164 - DNA, 201 bp, Homo sapiens
tgaattgaaagagctgcattccttaacccatgctctacaactttggcctctgaaaggaaattgccttgtcctattctctcatccagaaatttttgttgttyctccagaaaaaaaggatagtgttacatatatgccagtaagccaattatttgggactgtgtagtgtttgtgtgtaaatggtgtgtgtaaatgatttaacag

SEQ ID NO: 383165 - DNA, 201 bp, Homo sapiens
gggcacacagtgagggatgccagcctaatctgggagttagaggaaagccttactatttatgggagaagaaagggtatgtgaaggcccagaaacaagttagmggaactgaagagcatagtgtgtgatgctcagagggaggtgagagggtgacaggcaaacagcacttgggtcatggaggctgttataagcccgggttgggat

SEQ ID NO: 383166 - DNA, 201 bp, Homo sapiens
taattcagtccccaagaaccttttctgtggttttcattgattaaaatggggacttacatagcaaaccattcagcattctgagtcagtcacaatgtacctcygataaaatgtttcttcttgattgattaaaaaattttcccccagaaaatggctgctgttttaccaattaagggaaatgagtagacccgattaactatagtt

SEQ ID NO: 383167 - DNA, 201 bp, Homo sapiens
atagtttatcaatacattgtcatggggcaaaataaatgatacatttggagctagtgtaagatttgtatttaactgggtacataatagcgttggcagttaartaatggggtccgataaggtcattgggaacttcttaaaaattaatcagctgactacaagccagaagcaaaatacatttttactgaattctctgtgttacaa

SEQ ID NO: 383168 - DNA, 201 bp, Homo sapiens
taatggggtccgataaggtcattgggaacttcttaaaaattaatcagctgactacaagccagaagcaaaatacatttttactgaattctctgtgttacaakttgaagcagtgtgggaaaccatgccactggtgttactattggggttgcactgggtctgttttttgagtggccagtttgagtgactttatattagcatttt

SEQ ID NO: 383169 - DNA, 201 bp, Homo sapiens
atcaccacctgcctggctcttggaactcgcagaatggcaaagaaaaatgccattgttcgaagcctcccgtctgtggaaacccttggttgtacttctgttayctgctcagacaagactggtacacttacaacaaaccagatgtcagtctgcagggtaagaggagtaatttagaatattccgtgtcgtggttctttgttcatc

SEQ ID NO: 383170 - DNA, 201 bp, Homo sapiens
ttagaaataattgcagtgtcaggcaggtctttactactcttctgttttcttttatacaggaaagaaatgctgaaaatgccatcgaagcccttaaggaatakgagcctgaaatgggcaaagtgtatcgacaggacagaaagagtgtgcagcggattaaagctaaagacatagttcctggtgatattgtagaaattgctggtg

SEQ ID NO: 383171 - DNA, 201 bp, Homo sapiens; identical to SEQ ID NO: 83398

SEQ ID NO: 383172 - DNA, 201 bp, Homo sapiens
gtctttactactcttctgttttcttttatacaggaaagaaatgctgaaaatgccatcgaagcccttaaggaatatgagcctgaaatgggcaaagtgtatcracaggacagaaagagtgtgcagcggattaaagctaaagacatagttcctggtgatattgtagaaattgctggtgagttgagtttgtcatttttcttttat

SEQ ID NO: 383173 - DNA, 201 bp, Homo sapiens
aaagtgctgggattacaggcataagccaccgcacctggcctcagtcatctgaatttaagtaataaactaagtaaaattgagctttaattcaaaattgggtrtaagtattttacagattacctgaagttgttgtcatttatttttctggaggagggcgggttgatgatgctctttaaatagtggccagaagtcatttgggct

SEQ ID NO: 383174 - DNA, 201 bp, Homo sapiens
ttactgatttttaaacaaaatgtttgtgagctgaaattttgtaaattcatcccttaaaagcgtgttttttcttctatccccgtatagggtagcaaaagacrgagatgccctcttacagttcgatgaactatacatccaatttaccagagtcctttcacagttagttccagttttagcatcctgcccttacttgggcttttc

SEQ ID NO: 383175 - DNA, 201 bp, Homo sapiens; identical to SEQ ID NO: 83404

SEQ ID NO: 383176 - DNA, 201 bp, Homo sapiens
cttgccttcttcctgcttgtcagatccttccatatccggacatgcgtagtgcctcatccttgcagccagcggccttcatgctccactgtaattcgtgggtyagtgggtatatgcacttgttgtttttgatgctaccacatggggatatttgcctcgtctgaactctgtgtattctctgctgcaccttgttgcttctttgca

SEQ ID NO: 383177 - DNA, 201 bp, Homo sapiens
ctcccaaagtgctgggattacaggcctgagccaccatgctcggccagtgctagccactttttaaaaaagtgacattaagcctaaaaagacacattctaacrtgccatttctcttctaggttttggcttggtttgaagaaggtgaagaaacaattacagcctttgtagaaccttttgtaattttactcatattagtagccaa

SEQ ID NO: 383178 - DNA, 201 bp, Homo sapiens
tgaggcacgagaatcgcctaaacccaggagatggaagctgcaatgagcctagattgcacaactgcattccaccctgagggacagagcgagactctgttgcaaaaaaaaaaaaaaaagaaaacaaaacaaaaaagaaaaattgctttagttgttctgtaaatcctggaagctatacctctgtttccaaagccaaggtataaa

SEQ ID NO: 383179 - DNA, 201 bp, Homo sapiens
atttatactataggaccaataggtaagacctatagtcctgtactacctgttggtcctgtaggtgtatctattagtgttaggtaggaccattactaaatacrgtgtgtatatatactaaatatgtatatttagtattggtcctacctaatactgttagataacgattggatatccctaatctgaaaagctcaaagatcagaa

SEQ ID NO: 383180 - DNA, 201 bp, Homo sapiens
gccattcctgaaggtctgcctgcagtcatcaccacctgcctggctcttggaactcgcagaatggcaaagaaaaatgccattgttcgaagcctcccgtctgyggaaacccttggttgtacttctgttatctgctcagacaagactggtacacttacaacaaaccagatgtcagtctgcagggtaagaggagtaatttagaat

SEQ ID NO: 383181 - DNA, 201 bp, Homo sapiens; identical to SEQ ID NO: 83356

SEQ ID NO: 383182 - DNA, 201 bp, Homo sapiens
attggaaatctttattgtaatagcaaattaaagagctgtggattttcaagagctgaatttgaaaggtgtcagatgttaaatggaaggtaattcagagtttwttcttttattgtacctgcctccacccaaagagtcagagaaaaacatttggaagaaaaaattgcagagcatccctttggcaagagtaagaattttccacta

SEQ ID NO: 383183 - DNA, 201 bp, Homo sapiens; identical to SEQ ID NO: 83358

SEQ ID NO: 383184 - DNA, 201 bp, Homo sapiens
ctaatagagtcaaccctaaattgactctgatatcaacaaaaggaatgtaacagtcacacagcaagttaaacaaaggttttcattaattgagcttccttagmgaaggctacttttacttcctagcctgagttcctgtgcataaaatgaagaggacattggttggtcaagatgatgtgatggtccctctagctaagaaaatac

SEQ ID NO: 383185 - DNA, 201 bp, Homo sapiens
ctctgtgttacaagttgaagcagtgtgggaaaccatgccactggtgttactattggggttgcactgggtctgttttttgagtggccagtttgagtgacttyatattagcattttaaattaatgatgtgtgtgggttttgtttgttcattttttactttgaagtaattagaggcttatagtttgtaagcatttcaagcaggt

SEQ ID NO: 383186 - DNA, 201 bp, Homo sapiens
atagaagccaattaaacatagaaactctaaggtagcatatttcccaagtgttgggaggctttggagctttttagcttcgagttggtgtgcctgatagatgrgaaacagcacaacagaaaagctgttcataggatccatgactctagctattgcattttttctcttgcattaatttttctagtgtatttgtaaaaccttttt

SEQ ID NO: 383187 - DNA, 201 bp, Homo sapiens; identical to SEQ ID NO: 83360

SEQ ID NO: 383188 - DNA, 201 bp, Homo sapiens
ttggtaactgtggagttactgctcaggaaatgaactgtgttacatttttattttatgagttggtaaatagcaaaagaataagtgtttagggagtacttctrtagaattaatttgctttggtttgtttgatcaaggaattgcagatataagacctgttgtgttgattttcttcatgtggggttgggtactgctgctgcattg

SEQ ID NO: 383189 - DNA, 201 bp, Homo sapiens
ccagtgcatatgaacattagaaattgcttaatttgacactgaagaccccccctctatcattcactttatcttttcattctcttcttgattaccaactttgytctaaatgtaacacatcgtatggttgcttaactgatgcctgtcctttcttctcttttcctgctttgttaagatatttattgagcacctgtcacagacact

SEQ ID NO: 383190 - DNA, 201 bp, Homo sapiens
caccaagacggtggaggaggtgctgggccacttcggcgtcaacgagagtacggggctgagcctggaacaggtcaagaagcttaaggagagatggggctccracggtaggtgcagggcgctccgctgcaggggcccggcgcggccgggagagccagggaagatggctgaccgggctccacctcgtgggcttcggctccgcgc

SEQ ID NO: 383191 - DNA, 201 bp, Homo sapiens
tcaatagtggcgaccataccctgctctaagagtgttttctctttgggcaggcataaagatgataaaccagtgaattgtcaccagtatgatggtctggtagrattagcaacaatttgtgctctttgtaatgactctgctttggattacaatgaggtaagtctcttcataaattagaaggaatggctgttcctagttcaaggg

SEQ ID NO: 383192 - DNA, 201 bp, Homo sapiens
gccacccagtagtatccatatttgttccctttgtaggtcattaaacagctgatgaaaaaggaattcactctagagttttcacgtgacagaaagtcaatgtyggtttactgtacaccaaataaaccaagcaggacatcaatgagcaagatgtttgtgaaggcaagtatggcagattgcaattgagatgttcttgccagggtt

SEQ ID NO: 383193 - DNA, 201 bp, Homo sapiens
ggttaagatcccggtgaaccaataaaacaaaattgtttatctaaatctgtaacatttccagggtgctcctgaaggtgtcattgacaggtgcacccacattygagttggaagtactaaggttcctatgacctctggagtcaaacagaagatcatgtctgtcattcgagagtggggtagtggcagcgacacactgcgatgcct

SEQ ID NO: 383194 - DNA, 201 bp, Homo sapiens
agcaagtgctttttctcacacattctggaggaaaagttatccagttcttctgttctagaaacacccctgtccttcagaaaccagggtctagttgctctggytaccaggcgtgagcaggtggtggtagcaccacaggccccggttaccatcactgtcccatgtctttgatcttcgtccttgtggggactggcctgcatggcc

SEQ ID NO: 383195 - DNA, 201 bp, Homo sapiens
gcccagccatcagtgtcgcttgttgccaccccgtgcctcccttggcctctctgagctttgcccagaagaccaacaatcatacataccctaactgggacacyactctgcagaatgcagatgatccattctggaggaagctgtcccttgagctcagtgagctcccaggcaagcagggcatctggccgacttccctcacaacag

SEQ ID NO: 383196 - DNA, 201 bp, Homo sapiens; identical to SEQ ID NO: 83374

SEQ ID NO: 383197 - DNA, 201 bp, Homo sapiens
acagacaaatggtaccatccagttaagcccgtgacaaaaatggaaatttctaaatagcccaagtctccagggcaattgggaacagctttgaacccactaaratggggtctgctatgccaaaacatagatacagaattcacagtttgtcctgcattaggacattctcttcaactttgccactgtagaaagtggaggtaggtc

SEQ ID NO: 383198 - DNA, 201 bp, Homo sapiens
aaaacatagatacagaattcacagtttgtcctgcattaggacattctcttcaactttgccactgtagaaagtggaggtaggtcagcggatggtgccacatkaacagccgccttactgaagtgtagtccaacagggtcttactgccactgtgacacgtgccttgccttgggggtgcgtttccccacctctccttgctctgca

SEQ ID NO: 383199 - DNA, 201 bp, Homo sapiens
gggcaggatgaggacgtgacgtcaaaagctttcacaggccgggagtttgatgaactcaacccctccgcccagcgagacgcctgcctgaacgcccgctgttytgctcgagttgaaccctcccacaagtctaaaatcgtagaatttcttcagtcttttgatgagattacagctatggtgagcatgtttgaacatgtacaggtg

SEQ ID NO: 383200 - DNA, 201 bp, Homo sapiens
tagggtcataatattcatcattgaacttgtcctctttttgaaatgttcgagggcatgtaggatcaggttaatcatgacaggcagaaatagtgcagtatagrgcatgttagctgttaaagaccactaaagtttagaatatagttactttgttgtcttaaatcatctgttagatgtactctcttcaatgtagttagagcagaa

SEQ ID NO: 383201 - DNA, 201 bp, Homo sapiens
ggatgaggacgtgacgtcaaaagctttcacaggccgggagtttgatgaactcaacccctccgcccagcgagacgcctgcctgaacgcccgctgttttgctygagttgaaccctcccacaagtctaaaatcgtagaatttcttcagtcttttgatgagattacagctatggtgagcatgtttgaacatgtacaggtgactca

SEQ ID NO: 383202 - DNA, 201 bp, Homo sapiens
gcgctctctgttctagtaactatagaaatgtgtaacgccctcaacaggttagtgcaccttcacggcaggctgaggcgagcatggtgactgccagggcaccrgggaattgtgtgtagtcacggttgattgaggatcacaggacagttcttcccttcccaaaagaaaggagaacaggcaataccagttttaaaagcatgagct

SEQ ID NO: 383203 - DNA, 201 bp, Homo sapiens
aaaagctttcacaggccgggagtttgatgaactcaacccctccgcccagcgagacgcctgcctgaacgcccgctgttttgctcgagttgaaccctcccacragtctaaaatcgtagaatttcttcagtcttttgatgagattacagctatggtgagcatgtttgaacatgtacaggtgactcaggctacacaagcacatag

SEQ ID NO: 383204 - DNA, 201 bp, Homo sapiens
ttcaagggatggaggtggaacctggagaccgactcttaaaagcacagtccgtggttgggtgtggtggctcatgcctgtaagtaagtctcagccctttggargccacagcagaaggattgcttgagcccaggtactcaaaccagcctgggcaacagagtgaggccctgtcaaaaaaaaatcagccttactgtgaagcctcca

SEQ ID NO: 383205 - DNA, 201 bp, Homo sapiens
ccaaatgcatttaatcatactcttaaagaatctgtaaaagatctccagataactcttcttgtcgtttctaaatatttaattgccacttgattagaatggargttgtaagatggaaacatttagaacagctgtggtcagtatttaagggtttcccaggcatttgacatttgttcctctagcatttgacatttaaggtattcc

SEQ ID NO: 383206 - DNA, 201 bp, Homo sapiens
tgaaaaatacattttctatttatttcaaatcctctgagcttccactgaaacacagcaaaacacatgccaaaacattgcttttgtatcctcttgtaggttgkactcaatttaaatattagatttgttgaccttttaaaatttgtcaagtatatgagagtatgagctagggtttatatattgaattgtttaagtctgttcagc

SEQ ID NO: 383207 - DNA, 201 bp, Homo sapiens
caagacatagccagttgtttatataattgcattttctaccgtttatttctagagaaagaaaatagattttgtctatcataatccctttagtgctagccactttttttttttttttttttgagttttcgctcttgctgcccaggctggagtgcaatggcatgcagtacactcacggctcactgcaacctttgcctccccagg

SEQ ID NO: 383208 - DNA, 201 bp, Homo sapiens
ttctatgcagtattatactggcattcctggtctgtgtaataggcaagaaaagtacaaaaactggaagagaaggggtatctttagttgtaggtaacgatatmaagccaaaggtttattctcagtcttcgtcttcctattttgttggtgctgtcactcgctccctctttgaagcacctcttcacttggcttccacgatcccat

SEQ ID NO: 383209 - DNA, 201 bp, Homo sapiens
ttccactgaaacacagcaaaacacatgccaaaacattgcttttgtatcctcttgtaggttgtactcaatttaaatattagatttgttgaccttttaaaatwtgtcaagtatatgagagtatgagctagggtttatatattgaattgtttaagtctgttcagcagttacaatgcagaagtaaaatagtgcttatagattgac

SEQ ID NO: 383210 - DNA, 201 bp, Homo sapiens; identical to SEQ ID NO: 83382

SEQ ID NO: 383211 - DNA, 201 bp, Homo sapiens; identical to SEQ ID NO: 83383

SEQ ID NO: 383212 - DNA, 201 bp, Homo sapiens
tcttctgtatcttttaatttttgattttaaaaatgggataagaagggcaaattactgattggtttaactagtttattcagagcttttcttaaaataatgayttgaaaggtggatttaatagagtactttttaaaaagattgttttctcatgcctgaaagcattgaatgtttttacatagctttatatctggatcagaaggg

SEQ ID NO: 383213 - DNA, 201 bp, Homo sapiens
ctgcctgcagtcatcaccacctgcctggctcttggaactcgcagaatggcaaagaaaaatgccattgttcgaagcctcccgtctgtggaaacccttggttrtacttctgttatctgctcagacaagactggtacacttacaacaaaccagatgtcagtctgcagggtaagaggagtaatttagaatattccgtgtcgtggt

SEQ ID NO: 383214 - DNA, 201 bp, Homo sapiens; identical to SEQ ID NO: 83386

SEQ ID NO: 383215 - DNA, 201 bp, Homo sapiens
gaactcctgacctcaggtgatctgcccacctcagcctcccaaagtgctgtgattacaggtgtgagccactgctcctggcttgaaacagataattctttatrttcaacctgttgtcaaaatttttagaaacattttcccagttccttgtataagtatactttgtataacttctggcaaaccataattatgaactcacattac

SEQ ID NO: 383216 - DNA, 201 bp, Homo sapiens
ttaaagtgatgctcttattttagaccaatctgaccttcgttggctgcgtgggcatgctggatcctccgagaatcgaggtggcctcctccgtgaagctgtgmcggcaagcaggcatccgggtcatcatgatcactggggacaacaagggcactgctgtggccatctgtcgccgcatcggcatcttcgggcaggatgaggacg

SEQ ID NO: 383217 - DNA, 201 bp, Homo sapiens; identical to SEQ ID NO: 83388

SEQ ID NO: 383218 - DNA, 201 bp, Homo sapiens
tagtattttaaagtagaggtttgctctgatggtcccatcactgcttgccattgtctttccctttgctctagctatcaggggatgttgctttaagtttgttscccaggctttactgccaagagggaaattcatacccactttaacaaggtgtgaagcttatcttacagttgctaatgcctcactgaccttttggaaaggtca

SEQ ID NO: 383219 - DNA, 201 bp, Homo sapiens
aaagctttcacaggccgggagtttgatgaactcaacccctccgcccagcgagacgcctgcctgaacgcccgctgttttgctcgagttgaaccctcccacargtctaaaatcgtagaatttcttcagtcttttgatgagattacagctatggtgagcatgtttgaacatgtacaggtgactcaggctacacaagcacatagt

SEQ ID NO: 383220 - DNA, 201 bp, Homo sapiens
gcatgccagttggctgacccaaccattgctttccctttcagactggcgatggcgtgaacgatgctcctgctctgaagaaagccgagattggcattgctatrggctctggcactgcggtggctaaaaccgcctctgagatggtcctggcggatgacaacttctccaccattgtggctgccgttgaggaggggcgggcaatct

SEQ ID NO: 383221 - DNA, 201 bp, Homo sapiens
attgctatgggctctggcactgcggtggctaaaaccgcctctgagatggtcctggcggatgacaacttctccaccattgtggctgccgttgaggaggggcrggcaatctacaacaacatgaaacagttcatccgctacctcatctcgtccaacgtcggggaagttgtctggtaggtctctgtgacagcatcacttactgta

SEQ ID NO: 383222 - DNA, 201 bp, Homo sapiens
ctgacagcagcccttggatttcccgaggctttgattcctgttcagctgctctgggtcaatctggtgacagatggcctgcctgccactgcactggggttcawccctcctgatctggacatcatgaataaacctccccggaacccaaaggaaccattgatcagcgggtggctctttttccgttacttggctattggctgtgag

SEQ ID NO: 383223 - DNA, 201 bp, Homo sapiens
tcatagctcattataacctcaaactcctggtttcaagcaatcttcccgagtagtcaggactacaggcatgccctgccatgcccaactaattaaaaaaaaawttttttttatacacatagggtctcactatgttactcaagctagtctccaattcctggccttaagagattttcccaaagcattaggattataggcatgagc

SEQ ID NO: 383224 - DNA, 201 bp, Homo sapiens
aaagccgagattggcattgctatgggctctggcactgcggtggctaaaaccgcctctgagatggtcctggcggatgacaacttctccaccattgtggctgmcgttgaggaggggcgggcaatctacaacaacatgaaacagttcatccgctacctcatctcgtccaacgtcggggaagttgtctggtaggtctctgtgaca

SEQ ID NO: 383225 - DNA, 201 bp, Homo sapiens
tggcattgctatgggctctggcactgcggtggctaaaaccgcctctgagatggtcctggcggatgacaacttctccaccattgtggctgccgttgaggagrggcgggcaatctacaacaacatgaaacagttcatccgctacctcatctcgtccaacgtcggggaagttgtctggtaggtctctgtgacagcatcacttac

SEQ ID NO: 383226 - DNA, 201 bp, Homo sapiens
tgctcacttctccatcaacctcaccctctgcaccactaaccaagaccttgtcctcttgcctgtctcgctgctttcacagctgcaacgattgtgtctgcctsatggggttttcctccagagcctttattctgtagccagacgacacgaggagtctgtgtcactgagccagtgcttctagatgctaccctgtgtgggcggcac

SEQ ID NO: 383227 - DNA, 201 bp, Homo sapiens
ggccagaagtcatttgggctctctttgtcttcttttcttgattggaaacagtattttcctgacagcagcccttggatttcccgaggctttgattcctgttyagctgctctgggtcaatctggtgacagatggcctgcctgccactgcactggggttcaaccctcctgatctggacatcatgaataaacctccccggaaccc

SEQ ID NO: 383228 - DNA, 201 bp, Homo sapiens; identical to SEQ ID NO: 83413

SEQ ID NO: 383229 - DNA, 201 bp, Homo sapiens
acttaaaccctttctacttctgagctgggggtaggggcacacacttggattggttcttcaagtatatattttttccaaacattagcttcagtgaagagttmtgatgattttcacagctacaccctaaaagctacatgacagaaagacgtcacaaggcgcaaagtacataacgctggatacacatgctttacataatttgct

SEQ ID NO: 383230 - DNA, 201 bp, Homo sapiens
aaagtgatttaatacttaaacatatttggggtattttttacgtgtttgtaaatagacagtactaagaaaacacaaacatgagattgtaactaatgaatacatatgttgacagtattttacaggttttacaccctccttcttggaaccatgttgtttctctaaattcaaatactcaaaacatttttcagaacttgaaatggc

SEQ ID NO: 383231 - DNA, 201 bp, Homo sapiens
aagtgatttaatacttaaacatatttggggtattttttacgtgtttgtaaatagacagtactaagaaaacacaaacatgagattgtaactaatgaatacatatgttgacagtattttacaggttttacaccctccttcttggaaccatgttgtttctctaaattcaaatactcaaaacatttttcagaacttgaaatggca

SEQ ID NO: 383232 - DNA, 201 bp, Homo sapiens
cttgctatttgcctcttgttctttgtttttttattttcttgaattatttacttcttattcagtcactgattcagcagacatttactgagtgactaaacttstagattcctcatttgttttaaatactcttacaacacaacaaattagtgcagatcccaccctttgggcatttatagaccaggtgagaatataagatatacc

SEQ ID NO: 383233 - DNA, 201 bp, Homo sapiens
aaatagtgttttgttatatggatatgccacattttatttatccattcatcagttgatggacattgggttgtttccagttttgactattatgaataatactrccatgaacatttgtgcacaagtttttgtacaaatgcaagttttcatttctcttggtatatgcctaggagtagaattgctgagtaactctgtatttatcct

SEQ ID NO: 383234 - DNA, 201 bp, Homo sapiens
agttaattccatggtggccaactccaagtggcttacagagttttgaacccaagtggcaaacttaagtttctttttcttgctttgcagtactggctgtgaayggagtaatgcctgaccatcaacacttactttgctgattggacttgttaatatttctagtcctagcagggtgtccaccagcatgggtatggtcatctagca

SEQ ID NO: 383235 - DNA, 201 bp, Homo sapiens
atatatttgtagaaatacaactgctagatcaaaagacattcaaaattctaaggctggtggtatgttataaaaatgccagccttaaagtttgtactgatagrtagtatactaacattgggtgtaacttttttgggagaaatagattggatttgtatcataactttaatttccagttcttcatttttttgaaaggctaataaa

SEQ ID NO: 383236 - DNA, 201 bp, Homo sapiens
acaatggttgaactagtttacagtcccatcaacagtgtaaaagtgttcttatttctccacatcctctccagcacctgttgtttcatgactttttaatgatygccattctgactggtgtgagatggtatctcattgtggttttgatttgcatttctctgatggccagtgatgatgagcattttttcatgtgtcttttggctg

SEQ ID NO: 383237 - DNA, 201 bp, Homo sapiens
atacctgtaaactaaaataagcaaataaattctctttaattctaccactctgaacaaaaacaacattggtatttctttggtttatctttccagtatttttyttaacagcaatgtaatttttaaaatgaggtcatatcagaagtaccactttataacctacttttccacttactatctcataattttctgtgatggtcatat

SEQ ID NO: 383238 - DNA, 201 bp, Homo sapiens
aaactcacaaactttcttaaaacatcatgagatttttttgcagtttttcttctttagttcattagctgtcattagtgttagtgtaccactgctcaaagaartaagagacaacgcaaacaaatggaaagaaattccatgctcatggataggaagaatcaatattgtgaaaatggcctacttcccaaagtaatttatagattc

SEQ ID NO: 383239 - DNA, 201 bp, Homo sapiens
gctttctttgtggggatattttattttactttattatttgttttttcagctttattgaggtataattgacaaaaatggtatgttcaaggtatataaggtgwcattttgatatacatatacattgtaaaatgattatttgtggagacattttataatttcaatttctttgaaagatataggactacttatctttttcttctt

SEQ ID NO: 383240 - DNA, 201 bp, Homo sapiens
aatattgtgaaaatggcctacttcccaaagtaatttatagattcagtactattcccatcaagctaccattgactttctgttcagaattagaaaaaactacyttaaatttcatatggaaccataaaagagcccatatagccaagacaatcctaagcaaaagcaaagctggagacattacgctacttgacttcaaactatact

SEQ ID NO: 383241 - DNA, 201 bp, Homo sapiens
tccttgtgggaggggtggcagccaacactgcagcttcagggcttccttgcaggaactccgtctccaactaggggctaagggacagaactctgatctccctrggcctgaacccctagggggagggatggccgtagtctctgtggaccagcagacttagtctttcctcctgcgagcactgacgaatctgggcagcccagatga

SEQ ID NO: 383242 - DNA, 201 bp, Homo sapiens
aatctacaaggaacttaagcaaatttacaagaaaaaaacaaccccatcaaaaagtgggcaaaggatacgaacagatgcttctcaaaagaagactttttttmaaaaaatatggaacgcttcacgaatttgcgtgtcatccttgcgcaggggccatgctaatcttctctgtatcgttccaattttagtatatgtgctgctgaa

SEQ ID NO: 383243 - DNA, 201 bp, Homo sapiens
aaactgagaagtctgttggatatccaagtacagatgcaggcaggaaactgaacatgcgtcaggaatccaggaatccaaaattcatgccaagatagttgtgwatatttcatctcaaaggcaaatggtagtgatattctgatatttaatttattctagatcgagaatctccatgccatgtaaaactcttacgcacgcaaaaag

SEQ ID NO: 383244 - DNA, 201 bp, Homo sapiens
attgttgcacatgtcagtaggtttttgtgttttattactgggtggtattcccattttatggatagagtcaccagttcatggacatttgagtattttccccmgttttgggttgtttcgaataaaactgttatgaacattcaattacaaatgtttgtgtagacatatgttttcatttttcatgaataaactcctaggagtgaa

SEQ ID NO: 383245 - DNA, 201 bp, Homo sapiens
aatgcctggagcgactatttgataactctgaaaaacaaatagtggcaggcacattgggaaagaagaccagaacttgaagtaccactaagctggcaatgagwttaccattttttcccctcttatcatcctgccatttggccccagaggcagaagtccataggctagaggactaaaaaggaaccccaagaaacctggaagtat

SEQ ID NO: 383246 - DNA, 201 bp, Homo sapiens
attaaattcactctatccaagtgatctatcttgattttctttcataatctttccttttgaaaataggaatgggctggatgcagtggctcatgcctgtaatyccagaactttgggaggccaaggtgggtgaattgcttgagctcagaagttcaagaccagcgtgggcaagatagcaaaaccaagtctctacaaaaaagtaaa

SEQ ID NO: 383247 - DNA, 201 bp, Homo sapiens
ctgtcttgagaatatatattcaggatctcatacctcttctacccctcttcctgcctctctggtccaagttaccatcatatctcacctggatcattgcagtmatttctaattgttgtgcctgtttcctcccttaatccctctctccacagagtaatcatattatccctctccccaaaatcttccagtgctttctcagctcat

SEQ ID NO: 383248 - DNA, 201 bp, Homo sapiens
aaagtaaaaaaaaaaaaaaaaaattagccaggtgtgtggcagtgcacatctgtagttccagctactcaggaggctaaggtgggaggatcacttgagcttgraaagtggaggctgtagtaagccatgatcatgcctctgcactccagcctggacaacaaagcaagacctcatctccccccgcccccgccaaaaaaaaaaaaa

SEQ ID NO: 383249 - DNA, 201 bp, Homo sapiens
acatgaatgtaaaaagtaaaactataaaaataataggaaaaaaaattaggggaatgtgtttacaaccgtgagggtttcaacgtggtcctgaagccataagrgaaatgattggtaggtttgcatgaaattttaaaatttcctgtggcgtaaggcatcccataacgaagccaaaaggtgagtgatagactgggagaaataact

SEQ ID NO: 383250 - DNA, 201 bp, Homo sapiens
ggacctctctgtttttaggatttcctctgtcagaacccataggtggttttctaatttttattctttattaaaaatccctttaaagcattagattatgccayggttggcaattctgagttcctgaaaataactgagtcattgcagctgatcttattctgactagtggaatgctagtgactcaaaactacaaagtctactccc

SEQ ID NO: 383251 - DNA, 201 bp, Homo sapiens
actatactggaattcaactagaaattaataggagaaaaataacaagaaagtcttcaaactcttagattaaaattaagcagcagccttataaataatcaatragtcaaagaggaagtctcaagggaaatctaaaaatattttgaactgaacgaaaatgaaaatatggtttatcaaaatttgtgggatatagcttaaagcagt

SEQ ID NO: 383252 - DNA, 201 bp, Homo sapiens
gaaacagatgacacacacatggggctggggggtggggcagtggggggcagagagtagagtaaagagatcacatagtaagaaatgccaaacttaaggtaagwgcttcaaagggcatctagattccgtagtgagaacctgagaataaaactcatgcatgacaaacacttcttgctccttaagatctacttcaggaccgctggc

SEQ ID NO: 383253 - DNA, 201 bp, Homo sapiens
ttctcctaggtatgtacctagaagtggaattgttgggttatatggtaactctgcgtttagcctttgaaggaaccttcagattgttctctaaagtgattgcrccattttaaattctcacaagaagtgtatgagggcccgagagatctttttaaaatgtagatctgtttggccgggtgtggtggctcacgcctgtaatcccag

SEQ ID NO: 383254 - DNA, 201 bp, Homo sapiens
gactgcatctatctatatatatgtttgttttcatgttgctatatctgtgatattgacagtttagagattttcaagagaaatgaacatttttcaaagaatarctctttttaacaagtggttattagctttcttttcctgccattttgaaagttgtggtttttacccactttctaccatgtttcttcaagcatgatactattt

SEQ ID NO: 383255 - DNA, 201 bp, Homo sapiens
ggcccagcttcccaggagtttgaggccagcctgtgcaatatagtaagaccctgtctccaaaaaaaaaaaaaaaaaaaaaaaaaagaaattgagaaccttcyctgaggacaagtcacaacagcatctcagcctgttgactctttttgggagttgttggtactgctaggaagagggttataaggttctatctcattttcttct

SEQ ID NO: 383256 - DNA, 201 bp, Homo sapiens
ttcccagcccacccatgtacccacccctgtagagctgggctgggagtgtcagtagctgcccgaggtgcttcttcaggaactgcatagatggcctcagaccrttttccgtgtgctcctcacccccatccaggcccttctacaaatgccagtgcatatgtcttcgctttcctctgcatctctctccatagctggcgtttgatc

SEQ ID NO: 383257 - DNA, 201 bp, Homo sapiens
tcactaggacccagaaattggtcttatctttgtagtgatgaagaatgtgattatacctagtcaccgtcattttaagagatcttaactgcatgcacgcctakggtgaaatgtggagaaagaccttgatagagtgtggcaaggaagggttttagataagcagagcaacacggagacattaggcttcttttgggataaagagta

SEQ ID NO: 383258 - DNA, 201 bp, Homo sapiens
cagttgtaattttttctagtaggagaaaacatatttggttgaaattccattgtaattcttaaaactgtttgaaacttttcagtaattttgtgttgaatatmacacacataggtgaatacacatttgtgtagattagagattggcaaaaggatgacttagtaaatgttttaagctttgggaaccgtatggtctctgttacaa

SEQ ID NO: 383259 - DNA, 201 bp, Homo sapiens
actattgaaatgcctgtaggcccagcttcccaggagtttgaggccagcctgtgcaatatagtaagaccctgtctccaaaaaaaaaaaaaaaaaaaaaaaawagaaattgagaaccttctctgaggacaagtcacaacagcatctcagcctgttgactctttttgggagttgttggtactgctaggaagagggttataaggt

SEQ ID NO: 383260 - DNA, 201 bp, Homo sapiens
cagaagagggacctgactattgaaagaaaaacagaaagtaacaacaacagtttcaacaaaaaagtctccacaaaaatccttatccaagggttagcaggctyaaagatcgaaactagacaaactcatgaggatgagaaagaatcaatgaaaaaaacgctgaaaacccaaaaggcagagtgcctcttctctaaatgatcgcaa

SEQ ID NO: 383261 - DNA, 201 bp, Homo sapiens
ctttctctgatgtttaaaaggacacaaagcagggagaaaaaagtcttatttaaaaaatctggccctgagtttccagttctgggaaggatggataagtacawgccttcctgtcttcgactgtatgcaactataaaacctggacagaatgcctggagcgactatttgataactctgaaaaacaaatagtggcaggcacattgg

SEQ ID NO: 383262 - DNA, 201 bp, Homo sapiens
atattttaggtcttctttaatttttctcagcaatattttttacttctcagtatacaggtcttacacatgtttcattttaaatatttcattttttatgttayacatggtatttttaaacaatctttaatttctagtattttgttagtatttagaaatatgattgatttttgtatattgatcttgaattactttgttaaactc

SEQ ID NO: 383263 - DNA, 201 bp, Homo sapiens
ctctcactactgctattcaacatcatgctagaagtcctagccagtgtaataaggaaagaatgggggcggggggtgtgtgggtggcagggggaagcaaacamattggaaaggaagaaaaaaaaccatctctattctcagaaaaaattctttctattaaaaattgcagtgtctacattgaaaattaaaaaactattagttaaa

SEQ ID NO: 383264 - DNA, 201 bp, Homo sapiens
tggcagtaagaaaaaagaagtgctagatgttatgttgtgtgtaatactagggaaaatgtttataacattaatggcaaaaatatttcatttgttgatgaccraaacacaattaaggtttttaacggcatttcatttttaaaaatgaagtaatctgttctacagtaatagcttaatattcattattcatgttcaaattatgga

SEQ ID NO: 383265 - DNA, 201 bp, Homo sapiens
atgctctcttttatgtgggtttgttgttttccaaaggaatagaaaaagactacttttttgtatgtctctgttatcctctttggtaatcttgtagatttttyatatatatatatatatatatatatatatatatatatatacacacacacacataatgtagattatatatatatacacacatataatgtagattatataaaa

SEQ ID NO: 383266 - DNA, 201 bp, Homo sapiens
tctggatgtgagtgagctctggcaaagcagccgcactgcgtctgtctgcatactgggtcagctggccctcagtcatcctgcagacgccctccccacagggytgagtgactgcaagaatcccaagctagaggtgtgccaagaaggctttgggattcagcctcggaatccagcccatgcttgtgatctaaatttggaataagg

SEQ ID NO: 383267 - DNA, 201 bp, Homo sapiens
caaaaaatcattgaatccaggagctggttttttgaaaaaattaataaaatagaccaccagctagactaataaagaagaaaagaagaattaaattgacacartaaaaaacaataaaggggatatcaccactgatcccacagaaatacaaactaccttcagagaatactattaacacctccagcaaataaactagaaaatcta

SEQ ID NO: 383268 - DNA, 201 bp, Homo sapiens
atgtccactctcactactgctattcaacatcatgctagaagtcctagccagtgtaataaggaaagaatgggggcggggggtgtgtgggtggcagggggaarcaaacaaattggaaaggaagaaaaaaaaccatctctattctcagaaaaaattctttctattaaaaattgcagtgtctacattgaaaattaaaaaactatt

SEQ ID NO: 383269 - DNA, 201 bp, Homo sapiens
tttttattttttatcttcttagagaacatatgtaatatcagttacctggggaggggaggtgactagttagttcagagttagaataaaatagattttgcccrttgtattagtcggttttcacactgctgataagacatacccaagactgggcagtttagaaaagaaagaggtttattgggtttacagttccacgtggctggg

SEQ ID NO: 383270 - DNA, 201 bp, Homo sapiens
aaaaataccaaatgcttcttcagtgtgtttagttattttaatgtgtgggttgaggttccatcatcatctgcaaaatatagtgtatagtcttgacggaatgratcaaaagagactgcatgtgaaaatgaatcagagggcacttcagcctgaatgttcccaagtggggcaggggtgtattcagagaggggagtgaatgaggca

SEQ ID NO: 383271 - DNA, 201 bp, Homo sapiens
agccctggtgagcactgtgctgttctctgtctcagtacctctgttttttccagaatgtcaggtaaattgaatcatatgaatgtagccatttgagcctggcttttttttttactagcagagtacatttgagattgatttatgttgttgtatatattagtaaatttattttttattattttttattttactttttattattgg

SEQ ID NO: 383272 - DNA, 201 bp, Homo sapiens
taattccaaattactgatactgttgtacatacccttaattccattcccctcttcccgcccttctttcttacacagacaaaactcttatgaatttgatatgktttttttatgtttttatactttttataataaacatgtatgttaaaacagatttttttttttttttttgagatagggtcttgctttgtcacccgggctgaa

SEQ ID NO: 383273 - DNA, 201 bp, Homo sapiens
ttcccgcccttctttcttacacagacaaaactcttatgaatttgatatgttttttttatgtttttatactttttataataaacatgtatgttaaaacagatttttttttttttttttgagatagggtcttgctttgtcacccgggctgaagtacagtggcgtgatcatggctcactgcagccttgacctcctgggctcagg

SEQ ID NO: 383274 - DNA, 201 bp, Homo sapiens
ggccaaccagagaaagccaaatacacacccttaaccagtcacataggatgccccacttctagttagcccacctgcagcttccccagactagcagcctccartcagagtgtacctgaagccttccctctttccactgtaaagcttttccactcctctgcttgattttgagtctctgccacaacacaagtgacagtggctgac

SEQ ID NO: 383275 - DNA, 201 bp, Homo sapiens
ggatgacatgctccacagctgaggcttaactcatttaaatggtaaagaccaggtaattcactatatgtatgctttttgtcttaatgttatctcaggcacartataggttgttaatccagatctgttgcctaacaagaggggttgcatgaaaggaagaaaagaagcatctcactgatttttcttttctttctttcttttttt

SEQ ID NO: 383276 - DNA, 201 bp, Homo sapiens
aatgctgtcatgcaagtctgtgttatgtaagttgaagagtacaccagaggtgtaggggaggggagattggttctgcctttgggtgttgagtagcactttggtgtgtgtgtgtgtgtgtgtgtgtatgcatgtgcacttgggtgtatgaatgaatgtggcagcatcactaagcttattgcacacctgatacccagtgatgtg

SEQ ID NO: 383277 - DNA, 201 bp, Homo sapiens; identical to SEQ ID NO: 83592

SEQ ID NO: 383278 - DNA, 201 bp, Homo sapiens
atgctgtcatgcaagtctgtgttatgtaagttgaagagtacaccagaggtgtaggggaggggagattggttctgcctttgggtgttgagtagcactttggtgtgtgtgtgtgtgtgtgtgtgtatgcatgtgcacttgggtgtatgaatgaatgtggcagcatcactaagcttattgcacacctgatacccagtgatgtga

SEQ ID NO: 383279 - DNA, 201 bp, Homo sapiens
tgtgttaccccgggtctccgaatgtaaattgatagagtttagaaatatgtgaaatttataatctctataaatattcagattaagtggttcttgttaaaaartaaaactgcccaggaagataatcctgtgtaatggtagcagtattcctgtttctgggttgtacattttcctcctccaatttgtctctttcagaacaaattg

SEQ ID NO: 383280 - DNA, 201 bp, Homo sapiens
gggatctagtgatcctcccacctcaacctcccaagaagctgggactacaggtgtgcaccactgtgcctggctccatgtttttattacttatagacttattrtagattattatttcttccttaaatggctggtagagtcactgttgaagccatctggccctagagctttctttgtggggatattttattttactttattatt

SEQ ID NO: 383281 - DNA, 201 bp, Homo sapiens
ctgagctgggggtaggggcacacacttggattggttcttcaagtatatattttttccaaacattagcttcagtgaagagttctgatgattttcacagctamaccctaaaagctacatgacagaaagacgtcacaaggcgcaaagtacataacgctggatacacatgctttacataatttgctacattctacatctcttcaa

SEQ ID NO: 383282 - DNA, 201 bp, Homo sapiens
tccaaaaaaaaaaaaaaaaaaaaaaaaaagaaattgagaaccttctctgaggacaagtcacaacagcatctcagcctgttgactctttttgggagttgttkgtactgctaggaagagggttataaggttctatctcattttcttcttttcaaagtcatactaataagagcttgcagagagcccttaacaacaacaacaaca

SEQ ID NO: 383283 - DNA, 201 bp, Homo sapiens
tgtttcccatctttctgttctggagtggaattttgtagtgatgcagagatttattcttcctgccaaatctctagcctactagtgtgggtgtaagatttttytgggcctcatttaaagcctgcatatattccccaagtgctttaccagccagggtcagccttgccactatgccatgtttttttgggcgccagaattggcttg

SEQ ID NO: 383284 - DNA, 201 bp, Homo sapiens
gaacaatgagtaaaatttatcatctcacatgagaagaggtatttctaggataggctaagtcagtagcacagttgcctcatgtgtttcccatctttctgttytggagtggaattttgtagtgatgcagagatttattcttcctgccaaatctctagcctactagtgtgggtgtaagatttttctgggcctcatttaaagcct

SEQ ID NO: 383285 - DNA, 201 bp, Homo sapiens
ttagatgttaacatgcaggttttagggttgccagagaaactatcaaataagcagtccaggaaacaatataaagattagcccagttaggaagtggcagaaaycgcttgacgtcacaaacatccctgtatccttagagaagtggccaacaattctctaagctagaaaaccccacagctaaaatcttatcataaacaaaagaaa

SEQ ID NO: 383286 - DNA, 201 bp, Homo sapiens
ttttgaacagttttgaaagttgtctgattccccagttgtcaagctcaccaccagatgttgaagccatgagaatctatttaatactacctgagtttcccctrctccaggattccaagtattatataacattgactattcccttggctatggccattcttcggctggatacaaaccccagcaaagtactaggtgaatttgcta

SEQ ID NO: 383287 - DNA, 201 bp, Homo sapiens
tagtatagagagctttttattcttttttaggtcagtctatgggtattgactgccttccaaggaggccaaagttaaaatatttgagctctaagtaggcagartagtaccagtgaataagtatagcatgtggtgaaaattgggaggggtagatttttattctgagtgagaataaatcttctgtttatgttagtggatctagca

SEQ ID NO: 383288 - DNA, 201 bp, Homo sapiens
ctaagtttggaagcctactaagatttggatactagaaagtagagaagaggatataaacatgaaaggtgctctgtaaagggatggaaaaatctgagttgtcrtttcagacagaaattttgattgcattttactgtgttcaagatgtacagaacagcttctgtactaggtagaaatttagatttcggtttttcagagtactca

SEQ ID NO: 383289 - DNA, 201 bp, Homo sapiens
ctagggatgttcagcgatttttgtaaatccaccctttaattctgaatttttgtgttacaatagcaattttttagtttggcaattttgatgatttcatctasgttggtgatctatgatctttatagatctggggtaggtagaatgttgtagtttatcagcctgaatggggtatatctggtcagctgatattttacatctctt

SEQ ID NO: 383290 - DNA, 201 bp, Homo sapiens
ctaactcacagtcgtaatgattgttttcctaagttttcttcttgaaattttatagtttagctcttacatttaggcctatgatccatttcaaattaaaattytatatgtaggtgatataatggtcaaggttcgtttttttgcatatggatacccaattttcagcatcattattgaaaagactgtatatccccctgctccctt

SEQ ID NO: 383291 - DNA, 201 bp, Homo sapiens
tgctactatagttatagtatatactatagtatatctgggatgtgtgttaccccgggtctccgaatgtaaattgatagagtttagaaatatgtgaaatttayaatctctataaatattcagattaagtggttcttgttaaaaaataaaactgcccaggaagataatcctgtgtaatggtagcagtattcctgtttctgggtt

SEQ ID NO: 383292 - DNA, 201 bp, Homo sapiens
atagaagtaatttttcagttattaatttgccaagataatttctgtgttcgggaagtaacagcttggcttctcttttttggttttattctgtgtttctcttwggagtttagatagggcacttcttagatggttggtggtagaaaaatattcaagaacattattgggacaagaggttttctttcaggagctttgatattcttt

SEQ ID NO: 383293 - DNA, 201 bp, Homo sapiens
aataaatgaatgaatgattaatctgttatttattgcatttattggcaactccatgtcctaaaacaaaagatgttttttaacctgctaatgttttctgactyaagttctgattattctcccactaattttctgtaatagtcatgaaactacatttgttcctaaagcctctctcagtcatttgagttctagaaagatgaatgg

SEQ ID NO: 383294 - DNA, 201 bp, Homo sapiens
ttcaaatctcttgtggttttcagacacggtaagtaagtggtgtcacaattaaacagatggattaaattaaactttctttttgttgtcagaccaatcccctracttctaactttgcaaaggggaacataacaaggataataattcaaaatgtttataagtaattaaaatgtttatccagtcttcatttatacttgtttccaa

SEQ ID NO: 383295 - DNA, 201 bp, Homo sapiens
cttcctaaaggtgtgtggtggcaaagtacttgagctcttccagccttcagaactgagggctatgatggtggggaacagcaactacaactgggaagaactgsaagaggtaagcacaaaagatcctttaactcctttaactccggcgaagcagcagcagcctggggaggtgttcccagagcctggtctcgttccaagcatact

SEQ ID NO: 383296 - DNA, 201 bp, Homo sapiens
ataaaaattgttgtgatggtgtttctcttgggtaattgtatcagaaaaatgtcattagtttagtgtcatgggtttcagagaagtgaggtgttatatacggwgtgagaaactttcagcatcaatgattaacatgcacaataatctttttacattagtggctttattttaaagattgcacagttataccattttaaaaatggg

SEQ ID NO: 383297 - DNA, 201 bp, Homo sapiens
ttctgtctgtttactcattcatttaaacaaacacaatttatttaaacttcttttttaaactctgattaaaatacaaaatagcatcattataacataactgytttcaacagtattaatatgttttattttgagttgtaagatatctgaagaatattaaggggagggttatttttaaaattggttacattcattacttgattt

SEQ ID NO: 383298 - DNA, 201 bp, Homo sapiens
attacagtgatggataagtagtaaataactatcttcatgatgtgaagttttaaaattgtttttaatctaaaatacaaaaagttaatgtgacaaacatttgyatatatgatccacagtcaacaggtatttgcttcagattttttaataaaagaaaaaaattactgataccgctgtacatacccttaattccaaattactgat

SEQ ID NO: 383299 - DNA, 201 bp, Homo sapiens
ttccagtaggattctttttttgtagatatagacaagccaattataatgtttatatgggaaggtaaaggatctagaatacctgaagcaattttgaaaaataygaataaagttgaaggaatcacctgattttaaggcttactatagaggtatagtaatccagggtatgtggtactgacagaggtgtagacgcagtccaataga

SEQ ID NO: 383300 - DNA, 201 bp, Homo sapiens
atccaagctctgtacctatgtgtccacccaacacccccttggccatcccacacacctagcggcatatatcttggtggcaaggtcgtctctcagcaggactmccctggaagcagttttggagccatttgggtaggaaatctcagagctcccggtgtcctggtgtgtgttctagaagatcctacagaatctttggcctgtggg

SEQ ID NO: 383301 - DNA, 201 bp, Homo sapiens
gcaggcagacaagattaaagaaaaaataatgaaaaggaatgaacaaaacctctgagaaatatgggactatgtaaaaagaccgaacctaagactgattggartacctgaaagagacagggagaatggaaccaagttggaaaacacacttcaggatattatccaggagaactttcctaacctagcaagacaggacaacattca

SEQ ID NO: 383302 - DNA, 201 bp, Homo sapiens
gaactttgtggcattaaaagcttatttagaaagaaaagtattcaatcaataatttaagccttcacttatgaaatgagaaaaatattaagagcataataaayggaagataagtacaaggaaagaaatagtgatgaaagtagaaattagtgttattgaagatagaagaacaatagagaaaatcaatggaaccaaaagctagct

SEQ ID NO: 383303 - DNA, 201 bp, Homo sapiens
aacattttcatctcttcaaaaagaaaccacccatacacattagcagtcacttacctttccccttcagccctggacaaccattaatctactttctgtttctmtagatttgcttattttgaacatttcatgtaaatgagatgatacgatatgtggtcttctgtgactggcttctttaatttagcattttccaggtccatccat

SEQ ID NO: 383304 - DNA, 201 bp, Homo sapiens
taaaaggaaaaatagacaaatctaaaaattatatttggagactttttactcttttttgtgataaatagaactaatagaacatcatcaagaatatagaagtkcaccatcaaacggactagatatgattgatatttatcgaacattctatccaacagcagaatacacttttttcaactgcctatagaacattcaccaagatag

SEQ ID NO: 383305 - DNA, 201 bp, Homo sapiens
tgcagcaacctgcccgggaaaccaacctcttatctgcaataagcagcccaggaagccagcctgctataagtcagacttgcaggcagcctgattgccatctstctcgataacttctgtaacagtgggcccaaataggccaggatgtgattaataatcagcagcttccctaatttttgttcctacttccaacttagggccaac

SEQ ID NO: 383306 - DNA, 201 bp, Homo sapiens
gtcatgaacaatgagtaaaatttatcatctcacatgagaagaggtatttctaggataggctaagtcagtagcacagttgcctcatgtgtttcccatctttytgttctggagtggaattttgtagtgatgcagagatttattcttcctgccaaatctctagcctactagtgtgggtgtaagatttttctgggcctcatttaa

SEQ ID NO: 383307 - DNA, 201 bp, Homo sapiens
ggctgtgtgtgctcgtctttttgtggaccctgtattctgttcatctacatgtctttccttagtattacactgtgttgattactgtagctttatagtaaatyttggaagtatgtagttgcagatagtataaattctacacctttgtttttatttttcagaatttttttttggctattcttggtcttttgattttgcatgtaa

SEQ ID NO: 383308 - DNA, 201 bp, Homo sapiens
aacctatgcacatttacttaaactattaaccagagatgattatttagatacagaggctgatcaaatcatatgcttaccctgttaccatatcacttaaagamccaagaaaaagcacctgtatagttacagcctctatttttttttttttgagatggagtcttgctttgtcgcccaggctggggtacaatggcgtgatcccgg

SEQ ID NO: 383309 - DNA, 201 bp, Homo sapiens
agccccaggtgtgtgggttcatatctgacagaagtgtcaaggaagtggcctgtgggggaaaccactctgtgttcctgctggaagatggggaagtttacacrtgtggtttgaacaccaaggggcaactgggccatgagagggaaggaaacaagccaggtaagtgcaccttatctgtcttgattattggtgagaatggaaagt

SEQ ID NO: 383310 - DNA, 201 bp, Homo sapiens
agcgatttttgtaaatccaccctttaattctgaatttttgtgttacaatagcaattttttagtttggcaattttgatgatttcatctaggttggtgatctrtgatctttatagatctggggtaggtagaatgttgtagtttatcagcctgaatggggtatatctggtcagctgatattttacatctcttcaagggctactg

SEQ ID NO: 383311 - DNA, 201 bp, Homo sapiens
gtgattttggccaagtgtcaagtgaatgtagtgctcttgtgcacattgttgtgataggcattttgtatacagggtttagaggtatacccttaaagatacartgaagtcctatggtgtttgttccttgttagagtggaggtgtgtttacctttggcgctggttcctgtgggcaacttggacacgactccatgaatgatgagg

SEQ ID NO: 383312 - DNA, 201 bp, Homo sapiens
ccagtgtggtttattctttgtgaaagaataatattctgtattttgggtttattattttgagatttatgcaaagtgtagtatttttgtggatcttatctgcyagatcaaatttaaatctgattactaagaacacagtattttacttgtttataattcctatcagagtgtttgctttttcttttattatatacctttttgatt

SEQ ID NO: 383313 - DNA, 201 bp, Homo sapiens
aatttatggcagatcataaagcagatttgttagcccagctgatttcccttccctcctggttttggggattgctttataacattgtagatgcgtgtgagtaygtatgtagatacatacgtaacctttagtctttcaaacaatgtcttagcttttgcattaagtttcagacaagataatgtgtgcatcatttgttagaagcta

SEQ ID NO: 383314 - DNA, 201 bp, Homo sapiens
aagaatctcttggggctaaaagcagtttcctttatataacattggtacttttgttaacagtaaataatttatcttcaggatgtttatttccttaataagamcaggctttttattccatatagtcagataatgtttttagaattgggaaatttatggcagatcataaagcagatttgttagcccagctgatttcccttccct

SEQ ID NO: 383315 - DNA, 201 bp, Homo sapiens
agctgactttgcatagaagagccaattagctgtctccttcatatgttgacagttctctcctgtagattggctgatatattcagctttgatgtgttcgcctrgtattataattcaaagtaagtcttcaccatttctgttagaatccatcctcttttcattaggatgaaatgaatgtaccaatgaaaagattagggaagacac

SEQ ID NO: 383316 - DNA, 201 bp, Homo sapiens
agattgcgccactgcactccagcctgggagacagagcgagacttggtctccaaaaaaaaaaaaaaaaaaaaaaaagtatgtttggaaactgaaatgtaatstgaatgtccttaagaccaatcttctgcattgcttgtttgtttttaagatgggtctcgctctattacccaggctggagtgcagcagtgcgatcacagctca

SEQ ID NO: 383317 - DNA, 201 bp, Homo sapiens
ggaaaggcccagggttcctgatgtccagtttcattttgggccctcagaattagctgtttcctcagagcctgtataatagaaggtaatgggaataagcactygtttcactattttttaatttatgtctcagatatgcagcaaaatagaagtaatttttcagttattaatttgccaagataatttctgtgttcgggaagtaac

SEQ ID NO: 383318 - DNA, 201 bp, Homo sapiens
acgcctgtaatcccagcactttgggaggcagaggtgggtggatcacaaggtcaggagtttgagaccatcctggccaacatggtgaaaccccatttctactraaaatacaaaaattagctgggtgtggtggtgtgtgtctgtaatcccagctactcgggaggctgaggcaggagaattgcttgaacccgggaggcagagatg

SEQ ID NO: 383319 - DNA, 201 bp, Homo sapiens
ttattcccagaaacgtacataatggttcctgcattatgacatagattgtagtgggccaaatgaccaggacgctacactttgaggcacttgagctagtaackttgtgagtgagagagcattagaaacgccctagagcagctctgtggcagtcttcagaatccctctaaccttaggatggctctgccaaggagctcaggctga

SEQ ID NO: 383320 - DNA, 201 bp, Homo sapiens
agttctccagtatatattttatggttcaaagcatatttaagattactgtaacttaaaggggggatggtaaagtaacctatatggtggtagggtttcttccrtgtaatatattttgcattgtaaaaatgttgattctaagtaagctctgaaaagataattattgtaattcctggaacaatcacttaaaaagctataccaagt

SEQ ID NO: 383321 - DNA, 201 bp, Homo sapiens
gagatggggtttcatcatattggccaggctggtctcgaactcctgacctcaggtgataagcccaccttggcctcccaaagtgctgagattacaggcgtgawccactgtgcctggccttaaaaagacttttaggcaagatggtgttatttattactgacattttatttaattgggaatatttctgataattgtgtttgtgtg

SEQ ID NO: 383322 - DNA, 201 bp, Homo sapiens
actgttttttaaaaagtctggcttattgaggtatcatttacataacagtaaaatttgtccttttgggcgtgctttcacaagcaaatacagtaatgtaagcrctgtagtaatcaagatatagaacagtaaatagtcccctaaaagtccgttgtggcccttccccagcatccagccctggtgagcactgtgctgttctctgtc

SEQ ID NO: 383323 - DNA, 201 bp, Homo sapiens
gcaaggtgtaggtacatgattttctgtccgtccggatttatgtttattccagaatcttctttcatagtttttccttggaaatggtctggacatgtaactgmagtagaaacactgttgcagcagtgtctgacttgccacttttccttttctgtcattctatgattaggagtctccaagagcttttagattaccccggggagg

SEQ ID NO: 383324 - DNA, 201 bp, Homo sapiens; identical to SEQ ID NO: 83590

SEQ ID NO: 383325 - DNA, 201 bp, Homo sapiens
ttgcctgcactcatcttcttgtgcacacatgttagcgtctctgcattacctacccgctagcacagtggcatggtcaagggtatttacattttcaacttatytagatattgacagaatttccccccaaaatgtttatgtctaggttcacagtttatatttccacttgtgagagactgaatattcctatggacaatggccagg

SEQ ID NO: 383326 - DNA, 201 bp, Homo sapiens
agaccggaggctgctagctaaaaggttcaagattgggcatgtagatggtgagagtctcaggctgcttcctgagactgttgagctatttctaccaatagtcycttaagtgaaatctaggtttttctatcaagctcctcaaaactctttcaggctctacctatttcctcatttcaaaggcacatctgcgtttttaggtatttg

SEQ ID NO: 383327 - DNA, 201 bp, Homo sapiens
tgaccatcaacacttactttgctgattggacttgttaatatttctagtcctagcagggtgtccaccagcatgggtatggtcatctagcactagtctggagsagaatttatttcattgccttgaaactttgtttcctgttaaaatgcaaacaaccctgggagccacataatctgaccttcctgaggggaaggaaagttgaaa

SEQ ID NO: 383328 - DNA, 201 bp, Homo sapiens
gtaactgaagtagaaacactgttgcagcagtgtctgacttgccacttttccttttctgtcattctatgattaggagtctccaagagcttttagattacccyggggaggatgtggaggagactttctgcctcaacttcacggtaagaatttccacagtttacttaggattgtggctgtctctcttaccatctttagagtgat

SEQ ID NO: 383329 - DNA, 201 bp, Homo sapiens
tatttctgcagttttacatttaagaccaaaataaaaattactttttaatattaataccttcttcagaggaggtaagtaagggtgatagggcaataatttayagattttaaataatttttaaagcagagcaagcacccggcctagattcaggagatgactgttttagttctagagctgcatctttttggctttgactctgag

SEQ ID NO: 383330 - DNA, 201 bp, Homo sapiens
ttaaaagaacttttgaatcccatctatggaatgtttacctactatcaagattcaaatctcttgtggttttcagacacggtaagtaagtggtgtcacaattwaacagatggattaaattaaactttctttttgttgtcagaccaatcccctaacttctaactttgcaaaggggaacataacaaggataataattcaaaatgt

SEQ ID NO: 383331 - DNA, 201 bp, Homo sapiens
caggatattcctctaaataccttcgcaatttttctttgaacagtgttgattaagcagcagtgatcttattaaaattgtggggtgcagccattctttcattsattttgcaagaatttaatcacctccttttgtcaaatcaccaaacagaacacctcaatgtaacattggataaaaatgccagtggattatttgaaagattag

SEQ ID NO: 383332 - DNA, 201 bp, Homo sapiens
cgcaaaaagttgtctatattagttgtggagaagaacacacagcagttctcacaaaggtaaggagctcagagtattttactttggtgctggggatatgatgkgtgattagaattgcttgattatgttagtgtagtgatggtgtgtgattacagtattgtggcttgaacttgaatgctctcttttatgtgggtttgttgtttt

SEQ ID NO: 383333 - DNA, 201 bp, Homo sapiens
gacagggctccatatgttattattgacttcgtcagtatatctagcttattgcatctgaaagcatacatagtaaatttagatttatggctttaagaagaacwtatattcagaaacatttttcatagtatttgttttagagttttgtgtgtatacattaagggccaaggttaaagtcacctgtcactgaactgagaggtacta

SEQ ID NO: 383334 - DNA, 201 bp, Homo sapiens
tgttttatggtgtggttttgtttttttgtttttagtcatcttgatttctaacttcaaagtaattggatatgtaggcatgagagtgagtaagattggtctgrattatatatgcaggatttcatacctgatctcactggactggaattgtttcttcaattagtgtttctctgtctagagaaatgtgccaagatccctggagga

SEQ ID NO: 383335 - DNA, 201 bp, Homo sapiens
aaaaaaatgatattcccaatttttctgttctatcccatttacttattcattgcttctatttcatatactttaaaaatgagcttaggtcacagtgcagcccygtttcaggcagggagacttgaaatatggtccactagtactttactagttttaagtctgtgatactcatttttgaggaatggatagtccaagacaagtagc

SEQ ID NO: 383336 - DNA, 201 bp, Homo sapiens
cttcagaactgagggctatgatggtggggaacagcaactacaactgggaagaactggaagaggtaagcacaaaagatcctttaactcctttaactccggcraagcagcagcagcctggggaggtgttcccagagcctggtctcgttccaagcatactgtggttgagttagatttagaggtgtcctgtatctcagcacttat

SEQ ID NO: 383337 - DNA, 201 bp, Homo sapiens
ttctagagctgcatctttttggctttgactctgagcaagttacgtaaactggtttcagttttctcatctgccaaatggggattataatcactgtgctctcyacttcatgggatggttgtgagaatgaaatgagataattcacaggaaaatactttggaatgaatggactcccagcatctagcacagagtttctagtatcta

SEQ ID NO: 383338 - DNA, 201 bp, Homo sapiens
aactgatttttattattgtaatcaacaccttgggcctggaaaacaacacactgatgagaaggaagtgaagtagcatactattagagaggcagggcaggttmaagtttaaacaactggaaagagggataggtatgcatgaaaagtgtaagatcacaaagaaaaaggaaagtaaacattacttaagaagatgttgctctttct

SEQ ID NO: 383339 - DNA, 201 bp, Homo sapiens
aattggttggaattatgccagtggtgctagggacacaaatatgttgaatattgacatcctacagtgtgttaattcccttacctaaatatgtataaagtttyttttataaccctaaaactgtaagtattctgaaattagaagcaatgtgactatatctgcagtagatagttgtacttgcatggccatgacagcctgtgcact

SEQ ID NO: 383340 - DNA, 201 bp, Homo sapiens
ctaccttcagagaatactattaacacctccagcaaataaactagaaaatctagaagaaatggacaaatacctggacacatacaccctcccaagactgaagyacaggaagaagttgaatccctgaatagagcagtaaccagttatgaaattgagtcagtaatagataccctactaactaaacaaagtccaagaccagagaga

SEQ ID NO: 383341 - DNA, 201 bp, Homo sapiens
agcttcctctgtgttgtaatctttaatttgtagccatttgggcatgcttttatcttgggagaaaagagtttgtcattttaaaagctgactttgcatagaakagccaattagctgtctccttcatatgttgacagttctctcctgtagattggctgatatattcagctttgatgtgttcgcctagtattataattcaaagta

SEQ ID NO: 383342 - DNA, 201 bp, Homo sapiens
acgcacgcaaaaagttgtctatattagttgtggagaagaacacacagcagttctcacaaaggtaaggagctcagagtattttactttggtgctggggatawgatgggtgattagaattgcttgattatgttagtgtagtgatggtgtgtgattacagtattgtggcttgaacttgaatgctctcttttatgtgggtttgtt

SEQ ID NO: 383343 - DNA, 201 bp, Homo sapiens
ctggtttcacttgattggtataacctgtggactagctatctacaactccactgtggtcgatctccacttcccattggctctctacaagaagttactcaatktaaagcctggcttggaagacttaaaggagttgtcacccactgaaggaaggtacaaagctaaaaggcgattggtatctgaaactgttgtggctgcctctgg

SEQ ID NO: 383344 - DNA, 201 bp, Homo sapiens
ctttcaggatagtttctgagggatgcagtctttaagatctgcattgtatttgcactggactattacaggaactgcagaattaaaatgccagtaacacttcytgagtgcttaccatgcatcagacactatttgaaatattttacatgtaagactccccatttactgaggaggaaactgaggcacagacaggcataagtctct

SEQ ID NO: 383345 - DNA, 201 bp, Homo sapiens
gtgagccaccacgcccagccaatagatggtagactttctaaggacacatggtaaatttctgacttcctttgtatcccttgaagcacctagtaaaaattgtrtgtatctataagtaccttgctaaaacttcaccagcaataatcaacagacacaccttgcagttttcattgcatcagtgtgtattctttgttatgctttcct

SEQ ID NO: 383346 - DNA, 201 bp, Homo sapiens
agggataacaacttttgtcagggtgtttctttgctacagaaggtaactaaatattaatgagacctttattcttttattttgaaaatattttgagggaaatrgtagaatgtttgaaggccagaaacattgcatttctttttaacacatttgtatgtgtcctaaaaagtgttttgtagagcacaactggtttcacttgattgg

SEQ ID NO: 383347 - DNA, 201 bp, Homo sapiens
  misc_feature (1)...(201): n = A,T,C or G
ttttccctcaaaatttagtcagccattcaaatggtgttagttctatggccagtagtcagattggttctgtgttttgttatttatattttacttttggaggnattaaaattcagggtttacaatttaagtaagagactttttatttttctttacacagaaggctagaccatcaataatacaggtaaatgatcctttttaaat

SEQ ID NO: 383348 - DNA, 201 bp, Homo sapiens; identical to SEQ ID NO: 83591

SEQ ID NO: 383349 - DNA, 201 bp, Homo sapiens
ggtgggagatgggacatgtaaatgtctgggtgaaaaatgttcctgtcagagagaactgggtgtgcaaaggtgctcatgtgggaagagatgtagttggagaraaggggaagagtagcacagctgcaggtcagagaagtcgtgtagacccagttatgcagggccctgaggggcagggtgaggatataactggttttctcagtg

SEQ ID NO: 383350 - DNA, 201 bp, Homo sapiens
taaaagctgactttgcatagaagagccaattagctgtctccttcatatgttgacagttctctcctgtagattggctgatatattcagctttgatgtgttckcctagtattataattcaaagtaagtcttcaccatttctgttagaatccatcctcttttcattaggatgaaatgaatgtaccaatgaaaagattagggaag

SEQ ID NO: 383351 - DNA, 201 bp, Homo sapiens; identical to SEQ ID NO: 83596

SEQ ID NO: 383352 - DNA, 201 bp, Homo sapiens
gtatttctgcctttgtggctgcaggttttattgttgtggtgagggtagctggatttcctgttgttcctattgtccatcttctttaacctctactcaactasttacttcccaactcagccttgcaccaggcacaaagaatagtcctttaccttgcaaaaatgtaaggaatgctatcaaaggagctcaggtgcggctggtgag

SEQ ID NO: 383353 - DNA, 201 bp, Homo sapiens
ttcacaaagcctagcaccaggtagtgaagaaggcaccaccttagaggggatgatccggggaagggtaggagtgtttcctgtgttggctgagggggtcagaggaccaaagtccagctaaagtggaggagagagaaaacagcaaggagtggattcacgttgttgaaaacttctctttgccttctatgacatttctgtctttgg

SEQ ID NO: 383354 - DNA, 201 bp, Homo sapiens
atgttatttttgtttaactacttttaaataatagatggatttttttgatgtgtgttggcatttttagcttgttaatagctgaggctgtgtagtatattatygagcacatgctccagtcaaaaagacctgggttcagttccttactctggtctaatggccatggccttagacaagttacctaatttctataggcccagcatc

SEQ ID NO: 383355 - DNA, 201 bp, Homo sapiens
ttctctcactatactggaattcaactagaaattaataggagaaaaataacaagaaagtcttcaaactcttagattaaaattaagcagcagccttataaatmatcaatgagtcaaagaggaagtctcaagggaaatctaaaaatattttgaactgaacgaaaatgaaaatatggtttatcaaaatttgtgggatatagctta

SEQ ID NO: 383356 - DNA, 201 bp, Homo sapiens
ccgaaatctgcagggtaggctgtaaggctagaaattctggcaatagttaatatttaaatcttgagtccaaagacagtctggagggagaattctttcctctytggaggacctcaagtctttttctcttaaggccttcagctgattggatatggcctacccacattatggagggtaacctgctttactcaaagtcaatgaatt

SEQ ID NO: 383357 - DNA, 201 bp, Homo sapiens
gaaccaagcacattataccagtttaataaatgatgaaaccatagcagtttggagacaaaaactctcagaacacaacaatgcaaatacaatcaagtatgtgrctgcttgtcttcatttttttttccacaaagtatgttacaactttttagcttagtgtgattttccgtacttgcatattgatactgtgaatgtaaatggggt

SEQ ID NO: 383358 - DNA, 201 bp, Homo sapiens
tctggggctcctcagccatctgaccagccgcgctgtcagggtcaccagccgcgctgtcacagtctccaccctgcgcaccgccttccgccattacctcctcygccgctgcctccgccgctgccgccgcctggctaggctccgcaggcccctggttttccgagtcggccatgttagaggagaagccgcagaggtctaggaggg

SEQ ID NO: 383359 - DNA, 201 bp, Homo sapiens
ggaagaactggaagaggtaagcacaaaagatcctttaactcctttaactccggcgaagcagcagcagcctggggaggtgttcccagagcctggtctcgttmcaagcatactgtggttgagttagatttagaggtgtcctgtatctcagcacttatttcttagcctcaaatgcaaatgatatataatgtccactataatatt

SEQ ID NO: 383360 - DNA, 201 bp, Homo sapiens
tagcaaaataatgaaggcacagctaatacaagcaaacttaaaccctttctacttctgagctgggggtaggggcacacacttggattggttcttcaagtatrtattttttccaaacattagcttcagtgaagagttctgatgattttcacagctacaccctaaaagctacatgacagaaagacgtcacaaggcgcaaagtac

SEQ ID NO: 383361 - DNA, 201 bp, Homo sapiens
ttttcaaatgtcagtcgttttaaatgctatttcctgctgttgatttgttagactccttgtttttcttctgttttcttcatttaattgctatttcctttgcrccactcctgtgccttatactattaaaacacttgtcacaaaagttgcaattatttatagaagtgtctgtctctgtttcaaaaatgtgagtcggttgggaac

SEQ ID NO: 383362 - DNA, 201 bp, Homo sapiens
aaatgttcctgtcagagagaactgggtgtgcaaaggtgctcatgtgggaagagatgtagttggagagaaggggaagagtagcacagctgcaggtcagagargtcgtgtagacccagttatgcagggccctgaggggcagggtgaggatataactggttttctcagtgagaggggaagaccctgagggtttggaggagaagc

SEQ ID NO: 383363 - DNA, 201 bp, Homo sapiens
ctgttgcagcagtgtctgacttgccacttttccttttctgtcattctatgattaggagtctccaagagcttttagattaccccggggaggatgtggaggaractttctgcctcaacttcacggtaagaatttccacagtttacttaggattgtggctgtctctcttaccatctttagagtgatatttaacattagttcttc

SEQ ID NO: 383364 - DNA, 201 bp, Homo sapiens
  misc_feature (1)...(201): n = A,T,C or G
aaaccatgaggtaggttttaggtaaattaaaactgagaagtctgttggatatccaagtacagatgcaggcaggaaactgaacatgcgtcaggaatccaggnatccaaaattcatgccaagatagttgtgtatatttcatctcaaaggcaaatggtagtgatattctgatatttaatttattctagatcgagaatctccatg

SEQ ID NO: 383365 - DNA, 201 bp, Homo sapiens; identical to SEQ ID NO: 83599

SEQ ID NO: 383366 - DNA, 201 bp, Homo sapiens
aaaaaaatgatttagttgctagaaagttaaaaatagtggcaatgaaattagtccttgggtgaatgtaattgtatcctttgtgttaacgatgagagacattmactttgcatttactatagatcatttttattttaaatactttggtaagaaaggctttcaacaaggaagttctactgtcatttgttgatgagtggaccagtt

SEQ ID NO: 383367 - DNA, 201 bp, Homo sapiens
tacaggtgtgagccaccacgcctggcctgatttttaaattattctaaaaataccaattattttatatgtaagttattcaagtattccatttatgaagtcarattgtttggattaacctctcttatctctctagcctttaaaatatattacaaagtatccagatggaactgggaaggtgtgatttatagcagctttattggg

SEQ ID NO: 383368 - DNA, 201 bp, Homo sapiens
cctcaccacctttttattttttgttggagtattttaaaggaaatctcagacatactatttcattctttaagtatttcagtatggctgagtttatttccaaygaagtataagccagtggtatatcttcttgtctggttatgagaaagcattttttggtgagaagtaaaaatcgtagtttttcaactaatgatacctcttaaa

SEQ ID NO: 383369 - DNA, 201 bp, Homo sapiens
gtccacatgtagtctggaattggacttttaagttaaccttcagattgagtctttgcaaaaaatcagaccaggctttacaaaaaaagctccagggattcttktacagctgttgttctccccaaaaaggttttaatggattctttttaaagtcagttttgggaaaatgtattttagactaatgtttatcttctagacaaagca

SEQ ID NO: 383370 - DNA, 201 bp, Homo sapiens; identical to SEQ ID NO: 83601

SEQ ID NO: 383371 - DNA, 201 bp, Homo sapiens
gtcaggagttcaagaccagcctggccaacgtggtaaaaccctgtctctaaatacaaaacttagttggccgtggtggcacccacctgtaatctcagctacgygggaggctgagacaggagaatcacttgaacccgggatgtggaggtttcagtgagccgagattgcgccactgcactccagcctgggcgacagagcaagatt

SEQ ID NO: 383372 - DNA, 201 bp, Homo sapiens
ctacagaatctttggcctgtgggaaggactaaagcttgaggagggctgaaaaaaagcaagtctttctaaagcatggggcccagggccaaggccccctcttrtcttggttaaagcatgtgccatctatcccaccccgctcacattcgtcttccctgccttcccccaacaccgtctgcttccctgccttccccactatctgtt

SEQ ID NO: 383373 - DNA, 201 bp, Homo sapiens
aatgccagtggattatttgaaagattagagtgctttctttgtcttctgctgtctttggtgtaccagttctagctctatcaaaaacaagcaaacaacaacaraaacgaaagctttgactaattaccactattaagctatcatttaggaagattgtagatatcaaagatttaagagaaagaaggtaaaataggaaaatggaaa

SEQ ID NO: 383374 - DNA, 201 bp, Homo sapiens
gtttaggatatcattaagaaataatatagagcactcccagatctctgagaatacacccatggttttctttttgagaattcttgctacagatcaacataacstatattgttgattttttattgtttctattaagttaatattaagttaatgtttgttacgtaacttaacaaaaagtgaacctataacatatctcctagatgt

SEQ ID NO: 383375 - DNA, 201 bp, Homo sapiens
agtgaaaaaaaatttctctctccatatatcatgcatatttccagggcttagcataatgtttggtacacagtaggtattccagaaatacttagtgaattatwtgaaattgtttaaagtcattcatcttttccctcagacaacttccatatccctattgctaatcttgttatgagttccactttcagaaatgtaataggcatg

SEQ ID NO: 383376 - DNA, 201 bp, Homo sapiens
gccaaatagtgttttgttatatggatatgccacattttatttatccattcatcagttgatggacattgggttgtttccagttttgactattatgaataatrctgccatgaacatttgtgcacaagtttttgtacaaatgcaagttttcatttctcttggtatatgcctaggagtagaattgctgagtaactctgtatttat

SEQ ID NO: 383377 - DNA, 201 bp, Homo sapiens
gtctatattagttgtggagaagaacacacagcagttctcacaaaggtaaggagctcagagtattttactttggtgctggggatatgatgggtgattagaaktgcttgattatgttagtgtagtgatggtgtgtgattacagtattgtggcttgaacttgaatgctctcttttatgtgggtttgttgttttccaaaggaata

SEQ ID NO: 383378 - DNA, 201 bp, Homo sapiens
aggaatatatttatgcaaactgtgttcaggttaaataacagttccctgcctcacctgtccttatcttgaatctcactccctatcatttcaactctttagctttttttttttttttgctgcttacctttatgtctctaaataacatgcttataatattatttcttgatttttttcaatattggacataatctggaaacttca

SEQ ID NO: 383379 - DNA, 201 bp, Homo sapiens
cttccctcccctgaaaactttcagatgcttcttcattgttttagtcatttaccactttaatgaaattatctggcaactttattgtggtgggtggggatcartgacggtgtaatgaggcaattagcaaattctgatagttccatctactccatgtgaaagtctcttgatgttttatatggtactcttattaataatcccaga

SEQ ID NO: 383380 - DNA, 201 bp, Homo sapiens
tgctctcttttatgtgggtttgttgttttccaaaggaatagaaaaagactacttttttgtatgtctctgttatcctctttggtaatcttgtagatttttcwtatatatatatatatatatatatatatatatatatatacacacacacacataatgtagattatatatatatacacacatataatgtagattatataaaaa

SEQ ID NO: 383381 - DNA, 201 bp, Homo sapiens
caaaatagcatcattataacataactgctttcaacagtattaatatgttttattttgagttgtaagatatctgaagaatattaaggggagggttatttttwaaattggttacattcattacttgattttctatgacctatttctttttaattaaaaaataatttttttaaactctctcctaggctacatgattccctgaaa

SEQ ID NO: 383382 - DNA, 201 bp, Homo sapiens
cttttatgtgggtttgttgttttccaaaggaatagaaaaagactacttttttgtatgtctctgttatcctctttggtaatcttgtagatttttcatatatatatatatatatatatatatatatatatatatacacacacacacataatgtagattatatatatatacacacatataatgtagattatataaaaatgtaga

SEQ ID NO: 383383 - DNA, 201 bp, Homo sapiens
tctggacatgtaactgaagtagaaacactgttgcagcagtgtctgacttgccacttttccttttctgtcattctatgattaggagtctccaagagcttttrgattaccccggggaggatgtggaggagactttctgcctcaacttcacggtaagaatttccacagtttacttaggattgtggctgtctctcttaccatctt

SEQ ID NO: 383384 - DNA, 201 bp, Homo sapiens
taaaggtgcaatacttgttcaaggcatgttgaatagtgtggtgagactgggaagagagggtgatggaagaggataagctggaaaggtagggggactaattygtttccttaaatttcagtgcttttaattgatttataacaggtgctacacatattttaagcttgttgattttatttttttccacctatttttacatttttt

SEQ ID NO: 383385 - DNA, 201 bp, Homo sapiens
caagaaagaattcagggcaagtccgtggtacaaaatgaaaacaaatttattaagaaagtaaaggaatgaaagaatggctactccatagacagagccctgargtctgctgattgcatatttttatggttatttcttgatgatatgctaaacaaggtgtggattattcatgcctcccctttttagaccatgtagggtaacttc

SEQ ID NO: 383386 - DNA, 201 bp, Homo sapiens
agttagatttagaggtgtcctgtatctcagcacttatttcttagcctcaaatgcaaatgatatataatgtccactataatattcttccaagatacattttyttctttttctcttttttggacagactgccatctacaagggagattactcggccacacatcccactgtaaaactattttgggaaacatttcatgagtttcc

SEQ ID NO: 383387 - DNA, 201 bp, Homo sapiens
cccgggatgtggaggtttcagtgagccgagattgcgccactgcactccagcctgggcgacagagcaagattctgtctcaaaaaaaaaaagaaatgtagaamccattaatagctcaaaagctaagcaaaaacagacagaaggctggatttgatgtgtggggcctcagtttgctgactcctgacatagagaattaaatggaac

SEQ ID NO: 383388 - DNA, 201 bp, Homo sapiens
  misc_feature (1)...(201): n = A,T,C or G
gtgttatttgagaagttaatgaactctcagcactccatgattctagaacaggtatgtttctatatttgtaaagtgcattcttaaaaatgcatttttgtatngatgaattcaacttcaagagaaaaagagtaagatgaaaaagtgaaagtctccaaatcttaattttgtaaagtatttactctgggaattagacctaccttt

SEQ ID NO: 383389 - DNA, 201 bp, Homo sapiens
gaatctacaaggaacttaagcaaatttacaagaaaaaaacaaccccatcaaaaagtgggcaaaggatacgaacagatgcttctcaaaagaagacttttttwcaaaaaatatggaacgcttcacgaatttgcgtgtcatccttgcgcaggggccatgctaatcttctctgtatcgttccaattttagtatatgtgctgctga

SEQ ID NO: 383390 - DNA, 201 bp, Homo sapiens
gaaaaatctgagttgtcgtttcagacagaaattttgattgcattttactgtgttcaagatgtacagaacagcttctgtactaggtagaaatttagatttcrgtttttcagagtactcattgaatacactgtgaactcatccatgctactttaggcactgatgtatatgtctgtgtcactcagtgacaggcaggagaccctg

SEQ ID NO: 383391 - DNA, 201 bp, Homo sapiens
gcaatttttctttgaacagtgttgattaagcagcagtgatcttattaaaattgtggggtgcagccattctttcattcattttgcaagaatttaatcacctmcttttgtcaaatcaccaaacagaacacctcaatgtaacattggataaaaatgccagtggattatttgaaagattagagtgctttctttgtcttctgctgt

SEQ ID NO: 383392 - DNA, 201 bp, Homo sapiens
aactctgttttcactttcaaatttaggaattattaaaaaataagcccttctgttttatcaatttatgaataattattcactgaataataacattatgagcrgaaaaataagcctgatgaattatttagtccaactgctttgtttctagatgaggaaatggaagttaaacaatttttccactaatttcattagtagcagtaa

SEQ ID NO: 383393 - DNA, 201 bp, Homo sapiens
aggaacttccacgatgttcccaaagtagtagagccacattttttttatatttatatttattttcattttattttttttaaattatactttaagttttaggrtacatgtgcacaacgtgcaggttagttacatatgtatacatgtgccatgttggtgtgctgcacccattaactcgtcatttaacattagatgtatttccta

SEQ ID NO: 383394 - DNA, 201 bp, Homo sapiens
ccccaagtagcttctgtggtatttgggaagggaacatgatggaaggccccttccttaaaagaggatttttctgggggttatgggcaggtctgtgatttcarcttggtatcattgcccagattggttgactttgaaatatgaaggattttaaaaagtgagtgtatgactgttcctctaaggctttgagagtgtgaagaagtg

SEQ ID NO: 383395 - DNA, 201 bp, Homo sapiens
aatgcctttagtatttgcagtgtagagatattagtggtgaatgggcatatagtcattctggctattagaggctttccactgatcacagagggtataattcrgattggctagctacctttctcctttcttctctacccttctaatttgtcataaagcctttgctactctttcatatagagtggaactcatctttggtcaagg

SEQ ID NO: 383396 - DNA, 201 bp, Homo sapiens
gttcagtttaaatgaaccatcagctttggcaggccacacctgttccagccaaacagaggtgtctggagaccttcttagactgaccttgtgtgtccagccaggggagctgtagtgcctgtggatggagttaacccataaaattgcatgacagaaaagactggagggagccagagacttcagaatttattcatccttttctgt

SEQ ID NO: 383397 - DNA, 201 bp, Homo sapiens
tttgttgaataaaaacttgttatagagatttacttaataatttattttaaatacacatttttattataaagtataattgattttgacaagccacaaaaacrtttgtgaattagcggctcaaatcctccacttcctaccattggtagatacagatacataacttcatttatctttccctctccatctctctgactgtctgct

SEQ ID NO: 383398 - DNA, 201 bp, Homo sapiens
caaacgactcgaagctagtatgatctcatacatcattcattaaccattttttttttgtcatgttaaccttccagactatccaagaagcctcagctttgggkaaagtgagctatagtatcagagttgagtgaaatgatgcagaagccacccagacacccaacaaaactggcttcagttgatggaattatcttggctctagaa

SEQ ID NO: 383399 - DNA, 201 bp, Homo sapiens
ctgtcagagtgtattaaaatcatctgaatgtgtccattactcaaaaacagaagcctgctttgcaaatagatagctcttttgtaaattaacaaatgtggtaygttcaagagcaggatatatgagatattctctaagtctcaaaaatgctaagattttatttaaggttaaaaaaatgatttagttgctagaaagttaaaaata

SEQ ID NO: 383400 - DNA, 201 bp, Homo sapiens
aacctagatgacaggttgataggtgcagcaaaccaccatagcacatgtatacctatgtaacaaacctgcacgttctgcacaagtatcccagaacttaaagwaaaataataataataataataaagccagtctaactgggtgaaaaaaagtaaagatgtgttttcttctatatatattttatctgtgtactaataataaaac

SEQ ID NO: 383401 - DNA, 201 bp, Homo sapiens
agtatgatctcatacatcattcattaaccattttttttttgtcatgttaaccttccagactatccaagaagcctcagctttggggaaagtgagctatagtrtcagagttgagtgaaatgatgcagaagccacccagacacccaacaaaactggcttcagttgatggaattatcttggctctagaaacctaatatagaggct

SEQ ID NO: 383402 - DNA, 201 bp, Homo sapiens
agttattaatttgccaagataatttctgtgttcgggaagtaacagcttggcttctcttttttggttttattctgtgtttctctttggagtttagatagggmacttcttagatggttggtggtagaaaaatattcaagaacattattgggacaagaggttttctttcaggagctttgatattcttttttttcccctaacatg

SEQ ID NO: 383403 - DNA, 201 bp, Homo sapiens
agaacagcttctgtactaggtagaaatttagatttcggtttttcagagtactcattgaatacactgtgaactcatccatgctactttaggcactgatgtayatgtctgtgtcactcagtgacaggcaggagaccctgttgctgtcacagttacctgtttgtctttgggctgctgtaaaaaagtacgataaactggatggct

SEQ ID NO: 383404 - DNA, 201 bp, Homo sapiens
tattttcccccgttttgggttgtttcgaataaaactgttatgaacattcaattacaaatgtttgtgtagacatatgttttcatttttcatgaataaactcmtaggagtgaattgctggttcatatggtaagtgtatgttccattttataagaaactgccagtaatttatgagagttctagttgctcctcagcatcacttgc

SEQ ID NO: 383405 - DNA, 201 bp, Homo sapiens
ttattctattttgaaatatacaatagattattgtaaactatggtcatcctactgatctatcaaatactaggtcatatttcttctatcaaaatgtaatttgygcccatcagtcaacctctctgcaaatactataattttgattggcctttggttgaatccatggatgtggaacatgtgaatatgaagggccaactgtatttt

SEQ ID NO: 383406 - DNA, 201 bp, Homo sapiens
tcatgttctggaggccggaagtccaagattaggctgccagcatggttaggttctggcgagggccttcttccacgttgcagactgctgacttctcgttgtaycctagcatggtggagagcagcgttgggaagcaagctctcatgactcttataaggacaccagtcccattcatggttactgctgtactctttactatagctg

SEQ ID NO: 383407 - DNA, 201 bp, Homo sapiens
tgggccctcagaattagctgtttcctcagagcctgtataatagaaggtaatgggaataagcacttgtttcactattttttaatttatgtctcagatatgcrgcaaaatagaagtaatttttcagttattaatttgccaagataatttctgtgttcgggaagtaacagcttggcttctcttttttggttttattctgtgttt

SEQ ID NO: 383408 - DNA, 201 bp, Homo sapiens
tgtaatgttaagtgcccatctcctgtcaagggttactgggctgcccacagtggccagctttcagcccgagctggtaagaatgattgtctctggaatttaawggtattttaagtgatgaaaacagttgtttacagaatatgtatctattacttactttgaggtcttttggagggaatgaagataaggtattttttaacatca

SEQ ID NO: 383409 - DNA, 201 bp, Homo sapiens
tttatgtgggtttgttgttttccaaaggaatagaaaaagactacttttttgtatgtctctgttatcctctttggtaatcttgtagatttttcatatatatatatatatatatatatatatatatatatatacacacacacacataatgtagattatatatatatacacacatataatgtagattatataaaaatgtagatt

SEQ ID NO: 383410 - DNA, 201 bp, Homo sapiens
catgaatgaatttttttttcttttcattttatgctgcacaaaatagaaatcttaccaacaaagtacattgaggtcctggtaagaaaggctgtatgaagttrtaaaagattgatcattatagtcattatttccttggctatatgccataatgtagtcattagcagtcctaaattatatgactaagaaaatgaaatagctgta

SEQ ID NO: 383411 - DNA, 201 bp, Homo sapiens
tgccctagacttattttagacccagcctcagagtgtgtattacagagaaatcctgaggaagctgaggtttttctttgtttcttcaagatgtcaataaaacraaatacaaaaggcactgactctgtggaggataatcagtttttgtccataagtaatagagttttaagtatttatttcccctagaaactagtattgaatagt

SEQ ID NO: 383412 - DNA, 201 bp, Homo sapiens
tatgtgggtttgttgttttccaaaggaatagaaaaagactacttttttgtatgtctctgttatcctctttggtaatcttgtagatttttcatatatatatatatatatatatatatatatatatatatacacacacacacataatgtagattatatatatatacacacatataatgtagattatataaaaatgtagattat

SEQ ID NO: 383413 - DNA, 201 bp, Homo sapiens
tttcttttggtcttataccactctaatcctagccattccctgtccagtaattgatatttaatatattttcttcagttagtctgtagtctgaggtaaaaatmtaaactgtttccaaattgctaaaggttttcttagctgttcttaaggtgaacattatggtaattatattaggttccagatccagtttgagttttgattaga

SEQ ID NO: 383414 - DNA, 201 bp, Homo sapiens
aggcaggatttaaacccaggtcattctaaatcatgtgtactatgttacctctactttgctgttggcattttggtatataacatgatgtgatttctttttawgccattttttttcttcccttaaaaaatagttaaatagcagtcttggtttcattggaaatcaaagtcaggcagtcattaatattgaatgactgcttcacct

SEQ ID NO: 383415 - DNA, 201 bp, Homo sapiens
tgtgggtttgttgttttccaaaggaatagaaaaagactacttttttgtatgtctctgttatcctctttggtaatcttgtagatttttcatatatatatatatatatatatatatatatatatatatacacacacacacataatgtagattatatatatatacacacatataatgtagattatataaaaatgtagattatat

SEQ ID NO: 383416 - DNA, 201 bp, Homo sapiens
tgggtttgttgttttccaaaggaatagaaaaagactacttttttgtatgtctctgttatcctctttggtaatcttgtagatttttcatatatatatatatatatatatatatatatatatatatacacacacacacataatgtagattatatatatatacacacatataatgtagattatataaaaatgtagattatatat

SEQ ID NO: 383417 - DNA, 201 bp, Homo sapiens
gaaaggaaaagtgagagagtcccaaagaacttcttggaaatttttgcctgagtctaccctgcttctctctgttcatcttagaggccacatgcagtagatcwttcagctctttcctgacttgccaccctcctcatgatctagagtgttagaggatagtattatggagagcagccgctgcaagaagagtcacgtgttaacatg

SEQ ID NO: 383418 - DNA, 201 bp, Homo sapiens
tttttgtatgtctctgttatcctctttggtaatcttgtagatttttcatatatatatatatatatatatatatatatatatatatacacacacacacatartgtagattatatatatatacacacatataatgtagattatataaaaatgtagattatatatataaatataatgtatatatttatatatatataaattcct

SEQ ID NO: 383419 - DNA, 201 bp, Homo sapiens
gctgtcacagttacctgtttgtctttgggctgctgtaaaaaagtacgataaactggatggcttataaacaacacaaatgtatttgtcatgttctggaggcyggaagtccaagattaggctgccagcatggttaggttctggcgagggccttcttccacgttgcagactgctgacttctcgttgtatcctagcatggtggag

SEQ ID NO: 383420 - DNA, 201 bp, Homo sapiens
tattcactaggacccagaaattggtcttatctttgtagtgatgaagaatgtgattatacctagtcaccgtcattttaagagatcttaactgcatgcacgcytatggtgaaatgtggagaaagaccttgatagagtgtggcaaggaagggttttagataagcagagcaacacggagacattaggcttcttttgggataaaga

SEQ ID NO: 383421 - DNA, 201 bp, Homo sapiens
gataaagaaaggaaaagtgagagagtcccaaagaacttcttggaaatttttgcctgagtctaccctgcttctctctgttcatcttagaggccacatgcagyagatcattcagctctttcctgacttgccaccctcctcatgatctagagtgttagaggatagtattatggagagcagccgctgcaagaagagtcacgtgtt

SEQ ID NO: 383422 - DNA, 201 bp, Homo sapiens
ctttataagatggagcatatattagtattaatgtaggacttaacaggttctgctgctcacatgggagcaaggatgagaggaagtggagatcttacacaagmattcttaaaaagagggaccacttctcctctgcctggctgcattggctattgagaagcagtagtggaagagctgaatgacaggttaaggtttgccaagtga

SEQ ID NO: 383423 - DNA, 201 bp, Homo sapiens
tattctttcccttttccttacactgaatggaaaggcccagggttcctgatgtccagtttcattttgggccctcagaattagctgtttcctcagagcctgtrtaatagaaggtaatgggaataagcacttgtttcactattttttaatttatgtctcagatatgcagcaaaatagaagtaatttttcagttattaatttgcc

SEQ ID NO: 383424 - DNA, 201 bp, Homo sapiens
ttgaaatatttctcagtttgtgtctgtgtgtaatcagcgtcagaaattagctagtgcatagtatggaattttagtcatgtaaaatcaaagcacagggtttrataggcagtctattttgctttataagatggagcatatattagtattaatgtaggacttaacaggttctgctgctcacatgggagcaaggatgagaggaag

SEQ ID NO: 383425 - DNA, 201 bp, Homo sapiens
acatttagtgagtaaagcttaaagtaggcaaagaaagtgaccaggaatacagaggaatgttacatagtgattaaatggtcaattcgaggggggcggggccragatggccgattggaagctcccatggaaaagatccaaaacagtgtattaatcttgcaccggcaaccaagatatccaggtttggtcattaggactgactag

SEQ ID NO: 383426 - DNA, 201 bp, Homo sapiens
tgctgagtcagtgacagcttactagataaagttctttttagaaagacctgaaattctttccaaatacttggtttctcctaagagtagcagcctgtgtgtakgtgtgtgtgtgtgtaggaagatgcaacatcatttaacaaataaaatctaatttgtattgtccactttacccaacaaaaattaacctgtgaagtcaaggtt

SEQ ID NO: 383427 - DNA, 201 bp, Homo sapiens
ggttttcaccatgtttgccaggctggtctcgaactcctgacctcaggtgatctgcctgcctcggcctcccaaagtgctaggattacaggcgtgagccaccrcgcccagccaatagatggtagactttctaaggacacatggtaaatttctgacttcctttgtatcccttgaagcacctagtaaaaattgtatgtatctata

SEQ ID NO: 383428 - DNA, 201 bp, Homo sapiens
tggtgtattagaaataaaggcaacgtggtagtaggagaatgtcaccgtggacacagtgtgatgggaggtaaagcagggagcaggaaacggaggtccttccrtggcaagattcgtcctgacggggcctgggcccaccacactcacatgctgaattgttaccataaagaatagtgcccatttcagatttcaggtcagtggcat

SEQ ID NO: 383429 - DNA, 201 bp, Homo sapiens
aaaaaactgctttaaaattcatatggaaccaaaagagagcccacatagtcaaggcaatcctaagcagaaagaacaaagctggaagcatcatgttacctgayttcaaactatcctacaaggctacagtaaccaaaacagcatggtactagtaccaaaacagacttatagacaatggaacagaatagaggcctcagaaataac

SEQ ID NO: 383430 - DNA, 201 bp, Homo sapiens
acacggagacattaggcttcttttgggataaagagtagcaggatgtggggaagggataaagaaaggaaaagtgagagagtcccaaagaacttcttggaaayttttgcctgagtctaccctgcttctctctgttcatcttagaggccacatgcagtagatcattcagctctttcctgacttgccaccctcctcatgatctag

SEQ ID NO: 383431 - DNA, 201 bp, Homo sapiens
tgttcctttaaaacaagtcatttaaatatgtaaaaaagaaacagcaatttaattaatgttttaaaataatcatgtttcttttgcttctaaatacattctakagagaatgaaaatgtatttttatattgaacaaatattattctacgttcactttgataaaatgccttaacatttatttaaatacagctgttaaaaaaacag

SEQ ID NO: 383432 - DNA, 201 bp, Homo sapiens
ttttgaataatactttcctatagcactctctttctagttcatgagtggaaatatcttctttgatttctcaaaagacttttaagaaactttgctccctgcaygatctgttttttcagagttcatttccttctgtttatgttgctctttgcctttcatgtttaagttttcctcacacatagggtgatccttgtctggcctttt

SEQ ID NO: 383433 - DNA, 201 bp, Homo sapiens
cctaattatttctcagtcctttctgccagtgaccaggctatatgagatctcaagatgaattagacttcatttctgtgtgtgaatcccacccctacccctcragccctgtgttactcaaggttcttcagagaaatggaacaaataggagagagataaatagatagatggatgtatctagagagagggagaggaagagagggg

SEQ ID NO: 383434 - DNA, 201 bp, Homo sapiens
gagtgtttaccctgctattctgtaacttgggaactatctaggacctatgttcctctggttcctatatgcctgatgcttttattccttcaggtctctgctcycatggcaccttattagagatgcctccatttactaccctgtgtttcctacccttcccagcactgtatcccccttccttgctttgggcatttatccctatct

SEQ ID NO: 383435 - DNA, 201 bp, Homo sapiens
agcaaaggctgtgaaagacttttcttctctttgatggtggttggccttaatttaatgagtaagctgatgctttgcgcaaaaattggaaagcctaataatgrtaatgagaggatttcaggaagagcaatgctgattcatacctggatggcagaaaagcagattaccgagagagactgtatctcagaaataattggtagaatc

SEQ ID NO: 383436 - DNA, 201 bp, Homo sapiens
agtgtttaccctgctattctgtaacttgggaactatctaggacctatgttcctctggttcctatatgcctgatgcttttattccttcaggtctctgctccsatggcaccttattagagatgcctccatttactaccctgtgtttcctacccttcccagcactgtatcccccttccttgctttgggcatttatccctatctg

SEQ ID NO: 383437 - DNA, 201 bp, Homo sapiens
tgtgacatcctgtttttctaaagcaaatgtacattttccaaagcttcagctgacaaagagctgctattaatgaaatccttgagtagatggttactttattrttgatgcttaaataaccatttatttgtaattattaaaggcttccccctcccttcttttctttgagcagtggtgttgttcagatattatcttctgcagcct

SEQ ID NO: 383438 - DNA, 201 bp, Homo sapiens
taagctccacgagaataagggcattgttttgtatcctcaacacctagaacattgtgtggcacatagtgagtgcagctttcagcaagttttttttttgagtyggagtctcgctctgtcacccagctggagtgcagtggtacgatcttagctcactgccacctccacctcctgggttcaagcgattctcctgcctcagcctcc

SEQ ID NO: 383439 - DNA, 201 bp, Homo sapiens
ttccccattgtttaagcaactgttaaaatgctaccttctctaggaatccttcatcggaatggtgatgatccctctctcttgacctcacctccacacatatrgtcccttcacttagtttgctgaactttaatctgctcttcccttgttttctgagcaggaactaatgagaagagtaacagtcaagtaccacagcagagtcac

SEQ ID NO: 383440 - DNA, 201 bp, Homo sapiens
ctgagcaggaactaatgagaagagtaacagtcaagtaccacagcagagtcacttcaccaaaactaccactggccctccccacctggtgcctccccaacccyttcctcgtcgtggtacccaacctgtgggttctctagaactaaagtctgcctgccaggtgactgctggaggatccagtcagtgctatcgaggtaagaccca

SEQ ID NO: 383441 - DNA, 201 bp, Homo sapiens
tgatcaaacaaatccaggagctggaggaagtactcagtggtcttaccctttccccagagcaaggtaaagtggcttatgcctcagaactccgggtttgcatygactttacaagagacattcgggaagcccttttaataaagaatgtgttgattcattcacttttccattttattatctgcttctgagacttctttcacatta

SEQ ID NO: 383442 - DNA, 201 bp, Homo sapiens
aggttcaaatagttgcaagatgttttcttggattaaaaataagcttatctcttgttctaatggattttcatagccttgattatttgtgttttatacttcaytagattgttcttccgatgcattagaagtaaggcagaggggaaacgctggtgtggaagtattccatggcaggtaggaattattcatctgttttcaaacctg

SEQ ID NO: 383443 - DNA, 201 bp, Homo sapiens
agcagagaatggacttggtagaggcatttaaccactccagaggccctcaggtacaagctggtcacatcagagccgcataattaactgttctgagttatacraagagaattctttttgtttggttggtttttgtttttgtctttttgagacggagttttgctcttgttgcccaggctggactgcaatagtgctatcttggct

SEQ ID NO: 383444 - DNA, 201 bp, Homo sapiens
aggtgaggggagatggagaaaagtgaattgcttaaacatacaatgttgatgtaaccttttcccagatttcatctctgttggcagaattggaggcaattcaragaaattcagcatcccaaaagaggtaactgcgttttctcattatccaagtattggtcataattatgtgagaaaatttgatattgccaagagttataaatc

SEQ ID NO: 383445 - DNA, 201 bp, Homo sapiens
caaggtttgctcccttgactcccagctgctcctgtccttttttgtctgttcaggccctggatccaatggaactgaagggtgaaggtcttgtcctttccctrgaagaacagctcagtgctttgaccttgtcagaactccgtgactcagagccatcttccactgtttcccttaacggcaccttcttcaagatggagctttttg

SEQ ID NO: 383446 - DNA, 201 bp, Homo sapiens
cctccgaatgaaacgctttgcctccactccttctcccaggttaatttttttaaacctgcttcaagaatcttttctggaccactcccttcccaccttccccyggtttggttgaatgcctctgccagcaccttgtgcttacataagttatagcactttgtttcttcagcagacgttgagtatccactatgggtcaggtgctgt

SEQ ID NO: 383447 - DNA, 201 bp, Homo sapiens
acaacttattggatatgtattcgctgctgaagtgagtaacttctcgtgattgtgtaaatatgaaccctgtctgtatcccttcatcattatttcatgtctcrtaataaagccttagtatgtgccagattatcttgtttaggagatggcaggcctgtcaacctttaaaggacaaaagaataaatatttatgagaaaatagctg

SEQ ID NO: 383448 - DNA, 201 bp, Homo sapiens
gcattggcttggttactatggcgagaaagtcagaagccacaaggaggaattctgggtaagtgtggtattataagagtcagcctttattgaatgcttaggcrttgtgctaaacacgtagtgttgtttcatttattcctctcaagaactctatgaggcaggtactattattcctcattttacagatgatgaaagtgaagcatg

SEQ ID NO: 383449 - DNA, 201 bp, Homo sapiens
atgttgggagagaagtgaactgggcagatagggtatgagggggcttctcactgtgtttttaatacttattgattgaatactttacctatttcagcagacaaaatatatatttttaaagctcttatttaatcaattaaaagtttttgaggagttattttaggtaattacataaatcagttctattttatgcagcaatactta

SEQ ID NO: 383450 - DNA, 201 bp, Homo sapiens
aatattcaaattgtaagttttaaattttacaagagtcatagtaaatgtcttggacctagatctcaaagtaaagagcaagtgctagggttctgctgaataasgaagataaaggagccattaaggtaggcacagagtagtgacggagtggcactgacagagaacaatggggaaatgtctgccagtggtttctcctcttgaact

SEQ ID NO: 383451 - DNA, 201 bp, Homo sapiens
ttttttttaccccatttttctccttctcccctccccagcttacctctgtctcatacacacatggaaggcaaaattttgaacctactcttcattggcttccytgcatagaagtcatagggtgtggtcaccatatactgaatctgtctggtcctcatggggctgtactgaataataatatctctttgacatttgacctgtcat

SEQ ID NO: 383452 - DNA, 201 bp, Homo sapiens
tgtataaagtatagtaaccctttgtgatatgtgtggtagttacgttttcccagtttgctttttgtcttacaattttgcttatggtattttcatcatatggwagtgtaaacttttaaaaattactaaattctttatttctcagcttcagagttttatcccaggcttagaaaagccttcttcactttaggactacaagaatat

SEQ ID NO: 383453 - DNA, 201 bp, Homo sapiens
atgttatatatatttaaattttttcataataagttggaagggagtgattaaaaacttacacaaaacaagaagcatatagggcgtattgttagaggtaggcrtgtgaataacactaagtgacagctctcagcttgttagagggaaaggatgaagggaagagcctggggaaaattcatacagggcctcacagccagccctaat

SEQ ID NO: 383454 - DNA, 201 bp, Homo sapiens
aaggacatgtacattttcccatactgtggctggatttcacttgtgattcttccagggcacctcaacacctttgcttcgaatagcctgggctcgaatcataytggatgaagctcacaatgttaagaatccccgagtgcagacttccatagctgtgtgtaagctacaagcctgtgcccgttgggctgtcactggaacccccat

SEQ ID NO: 383455 - DNA, 201 bp, Homo sapiens
atgtgtaataggatcagttgacaggagactgatcaggagataggagcttggagattgggttggctggcagtgaccagaaaagcaaaagccacttgtttccsaactgagaactgctagagacatggaaagttgaggagagtagttaacaaggagggtaagaaacagatacagggccatttgtagctaagttcactctaaagg

SEQ ID NO: 383456 - DNA, 201 bp, Homo sapiens
tcgaatagcctgggctcgaatcatattggatgaagctcacaatgttaagaatccccgagtgcagacttccatagctgtgtgtaagctacaagcctgtgccygttgggctgtcactggaacccccattcaaaacaacttattggatatgtattcgctgctgaagtgagtaacttctcgtgattgtgtaaatatgaaccctgt

SEQ ID NO: 383457 - DNA, 201 bp, Homo sapiens
aaggttctggtttttgcacacatatttaaaagaccataatttcagagtttgggcgtttcaggctattttaatctgaaactattcatctaacagtgtgagargagagatccatttgatggaatctgtttttcagagcacactggcatcagtgaacatccaggctcttccagacaagggtcagaagttgatcaaacaaatcca

SEQ ID NO: 383458 - DNA, 201 bp, Homo sapiens; identical to SEQ ID NO: 83605

SEQ ID NO: 383459 - DNA, 201 bp, Homo sapiens; identical to SEQ ID NO: 83606

SEQ ID NO: 383460 - DNA, 201 bp, Homo sapiens
ctcccgagtagctgggattacaggtgtgtgtcacgacgcccagctaatttttgtatttttagtagacatgggcttttgccatgttggccaggctggtctcraactcctagcctcaagtggtctgcctgcctcagcctcccagagtactgggattacaggcatgagccacctcacctggccaaattgtgtcttattttcatg

SEQ ID NO: 383461 - DNA, 201 bp, Homo sapiens
accatcctgtggcttgtcttccctcttggaagtggcactggagtttgggtctgaggagcctagacactcggaggcagcagactcaccgagatccagcaccrtccacatactgtcccagttgctgagactccgccagtgttgctgtcatctttctttactgaagtcggtaagaaaagccctcagcctgctgtcatatagtgc

SEQ ID NO: 383462 - DNA, 201 bp, Homo sapiens
gacatgtttaatgtatgccagccagcacaatgctgaccacagaaagtataattctttcattttcctaggaattaagctccacttttgtggggttggacttsttcctgggtgtgttggctcacacctgtaatttcagcactttgggaggctgaggcaggaagactgcttgggcctagtagtttgagaccagcctgggaaaca

SEQ ID NO: 383463 - DNA, 201 bp, Homo sapiens
cctccccagcttacctctgtctcatacacacatggaaggcaaaattttgaacctactcttcattggcttccttgcatagaagtcatagggtgtggtcaccrtatactgaatctgtctggtcctcatggggctgtactgaataataatatctctttgacatttgacctgtcatccagcatctcaccggaactttaagaagac

SEQ ID NO: 383464 - DNA, 201 bp, Homo sapiens
  misc_feature (1)...(201): n = A,T,C or G
ttgtactttgtgaaagtctttctttcttaggtagtgttttcatagaatttaaagtatttggtgatgactttactgatgatgcccctgaggcataccttcangcaaaccacagtcaggagaaaaacgagcaatttggggtaagcttgaagttggtcactgcaaaagaagagcaaatttgtgtatatggtgagggcagtccat

SEQ ID NO: 383465 - DNA, 201 bp, Homo sapiens
taatcccagcacttcgggaggctgagatggccaggagtttgagaccagcctgggcaacatggcaaaaccccatctctacaaaaaatgcaaaaaattcaccrggcatggggtcgggggggtggtgtgcctatggttccacctactccaggggctgaggtgggagaatcacttgaacctcgggaggcagaggctgcagtgagc

SEQ ID NO: 383466 - DNA, 201 bp, Homo sapiens
tctggaccactcccttcccaccttcccccggtttggttgaatgcctctgccagcaccttgtgcttacataagttatagcactttgtttcttcagcagacgytgagtatccactatgggtcaggtgctgtttcgtcaagagcagccagattcccacttcaggtattgaactagccagtgggacttactatatctatatcgta

SEQ ID NO: 383467 - DNA, 201 bp, Homo sapiens
ttgcatgaggactttgtggtagagcttcagggtttgcttctgccacaggacaagaaagaatacaggtaagggtccaaaaggaacatctaagtgtatttgcttttttttttttttctccctgaaagagttgtagccaggtatgtattaggattgttctttaaaagtcattttaaaaaacaaaatttgtatatgtattaagtg

SEQ ID NO: 383468 - DNA, 201 bp, Homo sapiens
ttttctgttcttaattgcggagtgaagatctagattgaatactggctgctgtagtcaaggatgagaacaaagttatttctgcctctaagtaatttctctcmccagcctccaatttggatattttatctcctaaagaacggggcggcagtctttcaggagtaagttgttagattggtgcccctctgtcttatgacaggccag

SEQ ID NO: 383469 - DNA, 201 bp, Homo sapiens
aagagcttctacgtgtgccgggcagacacgtgcagcttcgtgcgggccaccgagtaggtcttgagctgggccccactccctgtggctgcccggggcctccsgagaggagcttcccgctccccgctgtcgggcgtcacagggccgaggagtggtggggccctagtttgcggtgtcaggaccctttaagcaattggtgatccc

SEQ ID NO: 383470 - DNA, 201 bp, Homo sapiens
ttcactttcttctctcttcagggactttctgctttcttaagaccggcgtccgcgatggcccgaataaaggaaagagcttctacgtgtgccgggcagacacktgcagcttcgtgcgggccaccgagtaggtcttgagctgggccccactccctgtggctgcccggggcctcccgagaggagcttcccgctccccgctgtcgg

SEQ ID NO: 383471 - DNA, 201 bp, Homo sapiens
tgtcatcagtacctgagccagcagtagcaggtgatgttactgagtaggagcctggcattgatgaaggattagatctgaataactcaagagatagtatggamtcgctgtagcatttaagcagggatgactgatgaagattagtttttcttaacagagtacaagataaactggagtacagaagactagaagggggactctggt

SEQ ID NO: 383472 - DNA, 201 bp, Homo sapiens
taccgtagatgtctttgtgcccacatgaggggagaagccattcttaagtcagaagttgcccatataataaagattgtgcagctcagtagagctttgcatcrtgttacttagctttctgtgagggcacagactgtgtctaccttgttcaccactgtatgctgattagtcagctcagtggctggcacataggagtcatccagt

SEQ ID NO: 383473 - DNA, 201 bp, Homo sapiens
gcctctaatgagcactgttgcagctgggtcctatatccctttgtgtgtactagcagcatgtgtaagtagcacaggcacacacacgcagagatgaggggccrtggtataaacaaaccatcactaattggttccaaaccaatgtttgcttattttttaaaaaaggtttctgtacttaattttaaggtagaagtacattaagtt

SEQ ID NO: 383474 - DNA, 201 bp, Homo sapiens
  misc_feature (1)...(201): n = A,T,C or G
ctggaggaagtactcagtggtcttaccctttccccagagcaaggtaaagtggcttatgcctcagaactccgggtttgcatcgactttacaagagacattcnggaagcccttttaataaagaatgtgttgattcattcacttttccattttattatctgcttctgagacttctttcacattacacctatggttcataaaaaa

SEQ ID NO: 383475 - DNA, 201 bp, Homo sapiens; identical to SEQ ID NO: 83618

SEQ ID NO: 383476 - DNA, 201 bp, Homo sapiens
tatttatattttcaagattggtaagccagctgggttaaaatttaaaaaaggttctggtttttgcacacatatttaaaagaccataatttcagagtttgggygtttcaggctattttaatctgaaactattcatctaacagtgtgagaggagagatccatttgatggaatctgtttttcagagcacactggcatcagtgaac

SEQ ID NO: 383477 - DNA, 201 bp, Homo sapiens; identical to SEQ ID NO: 83619

SEQ ID NO: 383478 - DNA, 201 bp, Homo sapiens
taaattggtaattggatctagaggttagttttttgtttgttttggcttcgttgttttggggttttttttggggcaacattgctttgtagctagtgttgtgrccccccttcagggacacacagtgtctggctgtctctcatttctctgattttagtagccattgctgatcagtgtttctatttcagtcattcgttacagact

SEQ ID NO: 383479 - DNA, 201 bp, Homo sapiens
tttctatcttaacatatgtttttaaaatgtagtaactttagccaggcacagtggtatgcacctgtagtcccaattgagggaggagaggcaggagaatcacytgagcctgggagcttgaggccaactgggcaagaaagcaagacactgtctcttaaaaaaaattaaataaaaagtaataactttataagtactttaaagatt

SEQ ID NO: 383480 - DNA, 201 bp, Homo sapiens
agaggagttaggaaatgatccagctttcacttccagccactctgtgaaagcacattgctttttcacactgaggtcatgtgccacccactttcctccccctrtttagcctctctttctgcctgtacttttagtggagaaaataagtaatcaagtgtttcagtttaaaagaccatttcttccatttcctacttcactataggc

SEQ ID NO: 383481 - DNA, 201 bp, Homo sapiens
cctacctttctcgcttttccacttaccaagtcctttagttatattttctaaatgtttctgataaccatttcttccttcccatgcccactgccaggtccccscttcccactctgctgaatcctgttctctccatcaccaccgaagggctcttcctagctaatccatctgattgtgtcatccacttctcatattcttcagtag

SEQ ID NO: 383482 - DNA, 201 bp, Homo sapiens
tcagtgaattttcacaaatccattatagagtggtgggaggaaagcaccattgatacaaggtgaacagtgttttgaagttatctttctcccctgggactttrgtgtcatccatctcaaatcattattaaatgttaattcccaactctatcctactttctgttatttcccaactctatcctactttctgttctggccagatca

SEQ ID NO: 383483 - DNA, 201 bp, Homo sapiens
tgaatgcattgctgaataatttatgctttataaaaatactataggctgggcgcagtggctcaggcctgtaatcccagcactttgggaggccgaggcaggcrgatcacctgaggtctcaggagttcgagaccagcctggccaacatggcgaaaccccatctctactaaaaatacacaaaattgctgggcgtggtggtgggtg

SEQ ID NO: 383484 - DNA, 201 bp, Homo sapiens
gtgtgaatgaatgaattttacatttctcaagcacctagtccacaacgggcacaaaaaagctatttagtaagtactgtttaattaataaatgatacctcagrtttgtctcccttcctccggatccccataacatgtacatttatcacatcgcccagatttcctagacattacagattttctgttctacggcccccataagaa

SEQ ID NO: 383485 - DNA, 201 bp, Homo sapiens
atgagttctgctgtttgtccttccatttgtaggcatttttattgaaagatcaactctgcctctctcattgtccctctatagtgggaccatttattgatttmtttgttatgtctacgcagcctctctacatatgacatcgtgatcactacctatagcctcgtggccaaggagattcccacaaacaagcaagaggcagagatc

SEQ ID NO: 383486 - DNA, 201 bp, Homo sapiens
tatagtgggaccatttattgatttctttgttatgtctacgcagcctctctacatatgacatcgtgatcactacctatagcctcgtggccaaggagattccyacaaacaagcaagaggcagagatcccaggtgcaaacctcaatgtggaggtgaggctggggggcagccagggaagtggagttggagccacagatggtttaa

SEQ ID NO: 383487 - DNA, 201 bp, Homo sapiens; identical to SEQ ID NO: 83608

SEQ ID NO: 383488 - DNA, 201 bp, Homo sapiens
cctgaggtctactggtgatcttttgctgtgtccttgtcattgtcctcaatgaaagctgccctgtgaggaggcctgagatgccggagctgccattcaggtgrcagcagcattcccctagtcaaggagatgtgtcgcaaggccctcatggctgctggagttctgattccaggtgtacatagtgtgaatggaaccagcccagtt

SEQ ID NO: 383489 - DNA, 201 bp, Homo sapiens
gccattgcttcttatgagcttggcatcatttaacaagtcttctataatttgtcaagatcccactgcaggcacagttaagcaggtcttagtgaccattatayatgcattttttttctttttaatctgaggcaggtcagctctgcaatcctatctaaaaagacatgaaagtagaggcaaccaatctggaagaagccctaataa

SEQ ID NO: 383490 - DNA, 201 bp, Homo sapiens
taagactgcaagagctgagtgatggttggttcctgaacaaagagggcggagtaaaaggcggaagcagaattgggggcggggctttgtggaacttgggggamccagcgaaatggaagaagttaggtgtccagagcacggtaaggggctagggtctcagcgtcccggggcctgttgatttagcgtggcgtaatcgttgttcac

SEQ ID NO: 383491 - DNA, 201 bp, Homo sapiens
ggcctaaaagtagtctataaaaagcatcacagctactttgcttcaccaagtgctagaggcaaccagtgccaccccaaagtcagttgtttctatagccactstttcctgcagaaaggatttcatagggagtctctttctaaagctgcttatacctgaattaaagatgtttatgagtacatctgatatatagagccaggtcat

SEQ ID NO: 383492 - DNA, 201 bp, Homo sapiens
catgttgggagagaagtgaactgggcagatagggtatgagggggcttctcactgtgtttttaatacttattgattgaatactttacctatttcagcagacaaaatatatatttttaaagctcttatttaatcaattaaaagtttttgaggagttattttaggtaattacataaatcagttctattttatgcagcaatactt

SEQ ID NO: 383493 - DNA, 201 bp, Homo sapiens
tttaccaaaaaaaaaaaaaaaaaaaagaagaagataaagagcctgcattgaaccacttttggaataatattttaagaacagtgaaatttggaatctagtaytgaaaaaatattggtataacaaaataatttgtaaagtctcttggctttacaaattataaccacatttgttctcactatagtatcatcctgatcgagccta

SEQ ID NO: 383494 - DNA, 201 bp, Homo sapiens
gaggcgaagatgcccatttttcatctcttgcagtgtagctgcatttgtgtgcagatctctaactgaaacaccagatggcaccactgaccagcatttgactrgccattcggccatggccctctgtgtacaggcagtaaagaaaactgataatctcagtagaaccagggggaagaaatcttgccttgacatgaacgatgtggt

SEQ ID NO: 383495 - DNA, 201 bp, Homo sapiens
cacgggcctttgctcccatccctgagatttcacttaatcaggacgcgtatttgtgaaagccaaagacagatctttagtctcgtcaccatacagcctttgcsttgtatcctgaggtctactggtgatcttttgctgtgtccttgtcattgtcctcaatgaaagctgccctgtgaggaggcctgagatgccggagctgccatt

SEQ ID NO: 383496 - DNA, 201 bp, Homo sapiens
ccttctcacacacattgttttattcctgtcttttcttgggagtgagttgaaggtcaaatttccacaaactttatggcattattgattagttggatgtctgyattccctttttttttttaccccatttttctccttctcccctccccagcttacctctgtctcatacacacatggaaggcaaaattttgaacctactcttca

SEQ ID NO: 383497 - DNA, 201 bp, Homo sapiens
ttccttctcctccttttgcacacggcacatacttccattatagcacttaccaggtcatattattgtttattttcatgtttgtctcgcttttgttctgcttyggagcaagactatattcatctctccatccccacacctagcatagtgtagtgagtgcttaatcaatacttttgaatgagtgaatgaatgacaacagtgcca

SEQ ID NO: 383498 - DNA, 201 bp, Homo sapiens
tgatcgaagtgtgcaaagaaaggtgtctcctgcctcaggtgtttccaagaaggtagaaccctcagacccagtagcccggcgtgtctaccttacaacacaaytgaaacaaaagaaggtaactattgactcgtgttttgtttctgaggtcagagcattgcttgttatgggcagatatgagatctcattgctacagaagggtta

SEQ ID NO: 383499 - DNA, 201 bp, Homo sapiens
tgtggacttaaacctgagaccgagatgtgttacgagaccaagtctgtttaaagttaatgttgtgtttccttttgaaggtaatgctaatctctctcttggcyggaggtgttggtctaaacctgactggaggaaatcacctctttcttttggacatgcactggtaatgattccggatttgtcctgggttgtcacagcacatca

SEQ ID NO: 383500 - DNA, 201 bp, Homo sapiens
tagaggatcagggtaagcgaagcatctgaaaaagtgtttaaaagtagagaagcatataaagaaaagcaagcgagtgaggaggctccagcagtgctgataaygttcttaagctgagtacttggatacaaggactcatttgttatacctgacatatgtgctatacacctgcattatttataaaataattcaatataaaaattt

SEQ ID NO: 383501 - DNA, 201 bp, Homo sapiens
agcaagaactgacttcttatgttgattgctgtgttcgtattgcagagatgccttgctttgtatgtgtctatagatacagatctaagcagggtatagggctrgctgactcccctgaattcctgagctagcaagccttcaaatgactactcaaaatagttcattcacgttattgttagtctaacatctgtttccatggaaacg

SEQ ID NO: 383502 - DNA, 201 bp, Homo sapiens
  misc_feature (1)...(201): n = A,T,C or G
agcattataatcttcagatatgacctaaatgtgtgccttctcccttaggtagcagaaggcctttccttgtcaacatttgatagctaaccttaagaatgatnagggcattaaagccctgcagatgagtctgtttaatctatgttagggtatttttttattttattcttctttccagtgtcattgtctctcagtggaccaaca

SEQ ID NO: 383503 - DNA, 201 bp, Homo sapiens
aaaagggtgttctaggcagagggagcagaatggacaagatggccagtgtgtgatttatgggaagaattttggtgtgcttgctgtgtcgtttgaggagggcrtggtgagaaacgaacccagagaagcagaggctggagcagcaagaatccggcaagctgccttgaggagcttggcctttatcctcagtgggaagctatggaa

SEQ ID NO: 383504 - DNA, 201 bp, Homo sapiens
tttttcatgtgggagtcacagcgccttccacaatctcaagttgccaagacaccaggcacatcagtgtctctgttctattgttaactaaataacagatgtasctgcttttctgtctgctaatttgaatggtacagttctgtgactcacttcctgcctaggcaccagaatgtttgttaagattggaaagcagccccatgtggt

SEQ ID NO: 383505 - DNA, 201 bp, Homo sapiens
ttcctaatcatttgtgttccttgtttaattaaatgcaggtaatatttattcacaagttttcttaacatatgtccattaatagttcaaaccacatacggttrtttcaagtagggaaggaggcttcttactggaatttgaccccggctcgtgggccataaatccagccctcctgctgcagttttctcaaaacaccatggctag

SEQ ID NO: 383506 - DNA, 201 bp, Homo sapiens
atatactgaatctgtctggtcctcatggggctgtactgaataataatatctctttgacatttgacctgtcatccagcatctcaccggaactttaagaagaygactttgtaatcctttgtgtcatctgttctttgcactttctcttgaactcttatctttccctgaattccagatttactgtttcctatttggtacctctca

SEQ ID NO: 383507 - DNA, 201 bp, Homo sapiens
ttagccgggtgtggtggcgggcgcctgtggtcccggctgctcgggaggctgaggcaggagaatggcgtgaagcccggaggcggagcttgcagtgagccgakatctcgccactgcactccagcctgggcgacggagcgagactcccatctcaaaaaaaaaaaggaaacccaaatttgaaaacattttactcttagacatctt

SEQ ID NO: 383508 - DNA, 201 bp, Homo sapiens
tcaggtccctttgctactacaccagaagcaggcattggcttggttactatggcgagaaagtcagaagccacaaggaggaattctgggtaagtgtggtattrtaagagtcagcctttattgaatgcttaggcattgtgctaaacacgtagtgttgtttcatttattcctctcaagaactctatgaggcaggtactattattc

SEQ ID NO: 383509 - DNA, 201 bp, Homo sapiens
ataaatgaaatcctactgcatgtactcttctgtgtctgacttcttttacttaacagtatgtgaaatgtatataatatgtatcagtaattcattcatttttmttgtggagttgaatttcatttataaatgcaccactttgtttggtgtgcctatttgccatcagaaaatctcgacgttatctgtttaaatattttatccttt

SEQ ID NO: 383510 - DNA, 201 bp, Homo sapiens
gcaagtataattacatgtttcaggtactcaaatgttacaaatagaaattgattttctcttcctattatctcaaatctgctattcttctgtagtcattgtcyttgtgaatagtatcactctttatctaattatctagccagaactagactcctacctttctcgcttttccacttaccaagtcctttagttatattttctaaa

SEQ ID NO: 383511 - DNA, 201 bp, Homo sapiens
tgctgaaaatagggtcagaggtcttggttaaaagcagagagctgggcatagtggctcacacctataatcccagcactttcggaggccgaggcaggcagatsacttgaggccaggagctcaagactagcctggccaacatggtgaaaccccatctctactaaaaataagaaaattagctgggcatggtggcatacgcatgta

SEQ ID NO: 383512 - DNA, 201 bp, Homo sapiens
tttaaatgtttgagcttaaaacactctagtgattagttgttaggcttcttatttttaagtaggattctctgcatctaaatggtgaaattgataattcaaaraaattagcgctggaagaaacaacggagggcctggcgcggtgtgtgacgcctgtaatcccagcactttgggaggcgaaggcgagcgaatcgcttgagccca

SEQ ID NO: 383513 - DNA, 201 bp, Homo sapiens
agacagcctgggtaacacagcaagaccgtgtctccatatattaaaaaagaaaagttaaaagccatttggtgaatgtaactaggcactgatttttttccctyctcaagactcttgtgactttacttcccatggaacactaatcatctgtcctgcctccctgatccatcattggaaaaatgaggtggagaaacgggtgaacag

SEQ ID NO: 383514 - DNA, 201 bp, Homo sapiens
tgactagtgggaagataaagagattggtattcagaagtggtgatcagctgtcatcagtacctgagccagcagtagcaggtgatgttactgagtaggagcckggcattgatgaaggattagatctgaataactcaagagatagtatggaatcgctgtagcatttaagcagggatgactgatgaagattagtttttcttaaca

SEQ ID NO: 383515 - DNA, 201 bp, Homo sapiens
ggactatatcattttgccattttacagaacaggaaactgccacagggggcagtcaattaaggtgtctgatgtttcagaactaattaggtggtagggctggratttgaaccaagggagaatagttctggagcctgagagaactgtagccttgctaaagtgaatgcacttggcagtgtgatgttgagttggacattaccttta

SEQ ID NO: 383516 - DNA, 201 bp, Homo sapiens
tcatctgtcctgcctccctgatccatcattggaaaaatgaggtggagaaacgggtgaacagcaacaaactaagagtctatctctaccatgggccaaaccgsgattcacgtgccagagtgtaagtgcaggaatacgcagttgtgggggcgttcagcacctctgcccaagggcccacgggcctttgctcccatccctgagatt

SEQ ID NO: 383517 - DNA, 201 bp, Homo sapiens; identical to SEQ ID NO: 83622

SEQ ID NO: 383518 - DNA, 201 bp, Homo sapiens; identical to SEQ ID NO: 83602

SEQ ID NO: 383519 - DNA, 201 bp, Homo sapiens; identical to SEQ ID NO: 83604

SEQ ID NO: 383520 - DNA, 201 bp, Homo sapiens
  misc_feature (1)...(201): n = A,T,C or G
tttcttaagaccggcgtccgcgatggcccgaataaaggaaagagcttctacgtgtgccgggcagacacgtgcagcttcgtgcgggccaccgagtaggtctngagctgggccccactccctgtggctgcccggggcctcccgagaggagcttcccgctccccgctgtcgggcgtcacagggccgaggagtggtggggcccta

SEQ ID NO: 383521 - DNA, 201 bp, Homo sapiens
caaaaaaaaaaaaaaaaaaaaaatctgtggcatctgctctcagggcctctaatgagcactgttgcagctgggtcctatatccctttgtgtgtactagcagyatgtgtaagtagcacaggcacacacacgcagagatgaggggccatggtataaacaaaccatcactaattggttccaaaccaatgtttgcttattttttaa

SEQ ID NO: 383522 - DNA, 201 bp, Homo sapiens
tctcaaaaaaaaaaagaagaagaagaagaagaaaaaatactatagtggcaagaactggattgaaagttctgaaaaatggcctttagtccctgattggctgstgtcagctttgtgactttgagccaggtcaaaattaatccatggggactatccggttccaaagttttaggagcagctctgtaaggtaagttggccttgggg

SEQ ID NO: 383523 - DNA, 201 bp, Homo sapiens
  misc_feature (1)...(201): n = A,T,C or G
cagtgtacctgagctaagcaaatttaaaggtaaatgtgggtcctccatgcttgcctgctatttccccttgtgtccttaaggacatgtacattttcccatantgtggctggatttcacttgtgattcttccagggcacctcaacacctttgcttcgaatagcctgggctcgaatcatattggatgaagctcacaatgttaag

SEQ ID NO: 383524 - DNA, 201 bp, Homo sapiens
aagggataaagaaaacatacttgtgacatcttttaggtaacacctatttgtatgcaggccatacaaaccaagatcacgttcatgcagtgtggaaaatcacragtgaagccatcggtcaactgcatcgctcacttgagtcatgtcctggtgagacggttgtggcagaagatcccgccgggctgaaggtgagccagggaagac

SEQ ID NO: 383525 - DNA, 201 bp, Homo sapiens
aatattttttgaggtcttaaatgtagtcagtattcttttactcaaggaaaaaaatagatttccttgactaactcttgtatctttttatagaggaatttctrcttgatactggtataagctaagtataagcataagctcctagtatgttagaactaggaggagcatctcctaataggagaagccctacagatattcagtacg

SEQ ID NO: 383526 - DNA, 201 bp, Homo sapiens
tgctgggattataggcatgagccaccatgcctggccatattaggctctttatgatcttgccctacctgtatgtcgctcatctcttgatgacaccctgcccytccctggggcacctcttgctcagtcataccaagggatctgtagttcccaccatgctctgtcacagtgttgtgtctgttctccctccgaatgaaacgcttt

SEQ ID NO: 383527 - DNA, 201 bp, Homo sapiens
ttgcatcctatttcacttagtaaatattttttgaggtcttaaatgtagtcagtattcttttactcaaggaaaaaaatagatttccttgactaactcttgtrtctttttatagaggaatttctgcttgatactggtataagctaagtataagcataagctcctagtatgttagaactaggaggagcatctcctaataggaga

SEQ ID NO: 383528 - DNA, 201 bp, Homo sapiens
tttcttatagtggaattgatatttgctttctctgcgaaaatatatttccactgcattctttgttgatttacaatataataaaacgtaacaaacaaacttaytatcctaaaatcagaaaagctcatccagattgattttaattaaaaatgtaagggaaagcatttttagcactgtgcctagcacatagcagatgttcagtgt

SEQ ID NO: 383529 - DNA, 201 bp, Homo sapiens
ttggctgtcactacctaaataccaagcagctagttaatctgagaagtctgatttctagtaattttcacgtaaatggctccacaatcatccctctccaactrtcaggtagcctataatgacagctgaccattggccactaacttgcccttaacttgtcaatcttctaattctggtaatagaacaaggtagtgagtaaaaatg

SEQ ID NO: 383530 - DNA, 201 bp, Homo sapiens
tattttgtcttcatcatgaccgtatgaggtatggactatatcattttgccattttacagaacaggaaactgccacagggggcagtcaattaaggtgtctgmtgtttcagaactaattaggtggtagggctgggatttgaaccaagggagaatagttctggagcctgagagaactgtagccttgctaaagtgaatgcacttg

SEQ ID NO: 383531 - DNA, 201 bp, Homo sapiens
taaagtataactttggagatctttgcctgttttaaaatttttgtctttttttaaaactgagttggtagagttctttgtaaattctctatacaagttaggcyaggcatggtggctcatgcctgtaatcccagcactttgggaggctgaagtgggcagatcacttgagattaggagtttgagaccagcctggccaaccaacat

SEQ ID NO: 383532 - DNA, 201 bp, Homo sapiens
gcctataatgacagctgaccattggccactaacttgcccttaacttgtcaatcttctaattctggtaatagaacaaggtagtgagtaaaaatggctaaacrtatttagtcctcaataaatgttagtttcttttcctttatatgggaatttgggaagggcagagaagtctatagagctgggagatatttgtcacgagtattc

SEQ ID NO: 383533 - DNA, 201 bp, Homo sapiens
tttaggagagtactttaaaccttcactcaaacctgtttactctcaaatgttatatatatttaaattttttcataataagttggaagggagtgattaaaaayttacacaaaacaagaagcatatagggcgtattgttagaggtaggcgtgtgaataacactaagtgacagctctcagcttgttagagggaaaggatgaaggg

SEQ ID NO: 383534 - DNA, 201 bp, Homo sapiens
aggaatgcccatagctgtgataatgtgtgggaattacaaacccagtagaggttatacatagattcttggtgtaaaaacccatagttttgatttgactttargatattgatctctgttcctgacctaaaaatgttttcaacttttttcttttctctagcattcctgtttcccattgcttattgcatgaggactttgtggtag

SEQ ID NO: 383535 - DNA, 201 bp, Homo sapiens
acatagtggaaaataatttgtccctgttttgcactagttttaggcccgacggttttttttaaatgtttgagcttaaaacactctagtgattagttgttagscttcttatttttaagtaggattctctgcatctaaatggtgaaattgataattcaaagaaattagcgctggaagaaacaacggagggcctggcgcggtgtg

SEQ ID NO: 383536 - DNA, 201 bp, Homo sapiens; identical to SEQ ID NO: 83643

SEQ ID NO: 383537 - DNA, 201 bp, Homo sapiens
aatccattttgcttccagtccctgagcccagatgtgcccactcctggaactgcctaccagggtcagccagttgctgctgcctgactcttggctttctatgyctccaggccctgattttccctgctagtgagctgcatgtggctctctgccccaacccagcatgtggactgtgattctcaggagcgtggcttccaggcctta

SEQ ID NO: 383538 - DNA, 201 bp, Homo sapiens; identical to SEQ ID NO: 83644

SEQ ID NO: 383539 - DNA, 201 bp, Homo sapiens
cctgtgttgttttgttttgttttgagacagagtctcgctctgttgcccaggctggagtgcagtggtgcaatgttggctcgctgcaacctcctcctcctgartttaagcgattctcccgcctcagcctcctgagtagctgggactacaggcatgcatcagcacacctggctaatttttttttatttttagtagagacaggat

SEQ ID NO: 383540 - DNA, 201 bp, Homo sapiens
atacacatatatatacatgtatcctattggttctgtccctctggagaaccctgagtaattgtatatgtgtgtgtatatatgtatgtgagtttattagggakaattggctcacacaattacaaaggcaaagtcccacaatagggcttgcaagctggagaatcagaaaaaccagtagcttgtctcagtccaagacctaagcct

SEQ ID NO: 383541 - DNA, 201 bp, Homo sapiens
agtacaatttgaggagttctgcctgtgttgttttgttttgttttgagacagagtctcgctctgttgcccaggctggagtgcagtggtgcaatgttggctcrctgcaacctcctcctcctgaatttaagcgattctcccgcctcagcctcctgagtagctgggactacaggcatgcatcagcacacctggctaatttttttt

SEQ ID NO: 383542 - DNA, 201 bp, Homo sapiens
tagaatctggaagaaactgccattcaaaccagcattactttttgttcagaaagaagatggtgaattactcagggttgtccagagggacagaacaaataggatacatatatataagatacatatacatttgtatatatacacatatatatacatgtatcctattggttctgtccctctggagaaccctgagtaattgtatat

SEQ ID NO: 383543 - DNA, 201 bp, Homo sapiens
aagagtcagagatttactgagctcctactgcctaccaaaaactgttttagaccttggggttacataagtgggggtgtgggtggggtacaaaaattcctgcrcttgtgcagcttgtgtattagagagaggattgtgctctggggactcagggaatgctgtgtcctgtgcttaggatggaaagcaaagggaagtccggcatcc

SEQ ID NO: 383544 - DNA, 201 bp, Homo sapiens
tttaagaaccatatgggtagaatctggaagaaactgccattcaaaccagcattactttttgttcagaaagaagatggtgaattactcagggttgtccagarggacagaacaaataggatacatatatataagatacatatacatttgtatatatacacatatatatacatgtatcctattggttctgtccctctggagaac

SEQ ID NO: 383545 - DNA, 201 bp, Homo sapiens
gcatgagccaccttgtccagccctttctttcacttttgaatgtttattatacacttgttaaagagtcagagatttactgagctcctactgcctaccaaaamctgttttagaccttggggttacataagtgggggtgtgggtggggtacaaaaattcctgcgcttgtgcagcttgtgtattagagagaggattgtgctctgg

SEQ ID NO: 383546 - DNA, 201 bp, Homo sapiens
ttttcacatccagaggttgcctcggaacttccatcttcccagggttgcctcaggactttcatccaccaggaggggaaatcgaaagcacacccgcttggccrctttttcaacttacttctgcccaggaagcgccaactcatcatcaagctaggagggagaccccctgcccttgctcatttcctcccttaccttataaaaatc

SEQ ID NO: 383547 - DNA, 201 bp, Homo sapiens
aaaaagcccactaggcagatttaaaagcagattctacattatagaagaaaaaaattaataaaagacacattatataaaccctagagcaaactattaaaaargttatagctaataagacaatagtgaaaataaaatgaaaaaataaactttttaactcaaaagaagggagagagaaaggaaaacaaaacaaagaaaaaaatg

SEQ ID NO: 383548 - DNA, 201 bp, Homo sapiens
ccccatcacctggctttccctacagggcaagtttttctaactgtgtgctccaagacggatctctccttgagagctggcagtcgatttgcagaccaaagcayacccaccaaggaattttcacatccagaggttgcctcggaacttccatcttcccagggttgcctcaggactttcatccaccaggaggggaaatcgaaagca

SEQ ID NO: 383549 - DNA, 201 bp, Homo sapiens
tggcccccttagcccttcagaaatgcaaatataaccattctcctccccatcacctggctttccctacagggcaagtttttctaactgtgtgctccaagacrgatctctccttgagagctggcagtcgatttgcagaccaaagcacacccaccaaggaattttcacatccagaggttgcctcggaacttccatcttcccagg

SEQ ID NO: 383550 - DNA, 201 bp, Homo sapiens
gaatctatactagttcctagtgtaacccagcacccctgtttttctagaggtgatttaattgtttttttccttctctctctcttcttttctcatctccctgkcccccttagcccttcagaaatgcaaatataaccattctcctccccatcacctggctttccctacagggcaagtttttctaactgtgtgctccaagacgga

SEQ ID NO: 383551 - DNA, 201 bp, Homo sapiens
gtctgtcttttttatacctccgtagatgtggccaacaaaattgctccataaattggacactgcccaaagaagtctttaacgccattcctgggttctttgtyaaaaccatggtggcttttcctgtcttcacagagctaagcccattgttttgtggtccctgcagctgtacctctgacctgggtggagctgcatgtctaggca

SEQ ID NO: 383552 - DNA, 201 bp, Homo sapiens
ggttgcctcaggactttcatccaccaggaggggaaatcgaaagcacacccgcttggccactttttcaacttacttctgcccaggaagcgccaactcatcaycaagctaggagggagaccccctgcccttgctcatttcctcccttaccttataaaaatccctgctttctgctcccaaagtgaagcagcacattttaaggca

SEQ ID NO: 383553 - DNA, 201 bp, Homo sapiens
ttttaaggcaggaccctttgtgccccttccccaagctaactttggaatcaatttgcttttttttctatcagaccttgctcttgttaactggactccacatrcagcgagcaactaacctgcattttagttacactggtaatcactacttccttttgtaggtgctcataaattctctttaaacaatttattcataaatatgac

SEQ ID NO: 383554 - DNA, 201 bp, Homo sapiens
cttctttggaaaagaaatattaaaaattataaatacaaaattatctatgaaaatgaatgtttatacagaatgagaaaaaatgacttcaaattttttttttttgagatggagtctctgttgcccaggctggagtgcaatggcatgatctcagctcactgcaacctccacctccagggttcaagatattctcctgcctcagcc

SEQ ID NO: 383555 - DNA, 201 bp, Homo sapiens
ggcatgagccaccttgtccagccctttctttcacttttgaatgtttattatacacttgttaaagagtcagagatttactgagctcctactgcctaccaaaaactgttttagaccttggggttacataagtgggggtgtgggtggggtacaaaaattcctgcgcttgtgcagcttgtgtattagagagaggattgtgctctg

SEQ ID NO: 383556 - DNA, 201 bp, Homo sapiens
atgagccaccatgcccagccatgtacataattttctatctagaaaatacaagtctaccctgaatggctactacattaataagtgaatttagtaaggttgtrgaatacaaagtcaacataaaaaataaattgtatttctgtatacaagcaacaaataagtgagacattaaaatgtaaaacatcatttacaatagcatcagaa

SEQ ID NO: 383557 - DNA, 201 bp, Homo sapiens
gagtttaacagtcctctcaaaaaggaaaagtggttactttgcctttaacattatgggtgaatctatactagttcctagtgtaacccagcacccctgtttttctagaggtgatttaattgtttttttccttctctctctcttcttttctcatctccctggcccccttagcccttcagaaatgcaaatataaccattctcctc

SEQ ID NO: 383558 - DNA, 201 bp, Homo sapiens
tattagggagaattggctcacacaattacaaaggcaaagtcccacaatagggcttgcaagctggagaatcagaaaaaccagtagcttgtctcagtccaagmcctaagcctcaaaaccaggaaagctgacagtgcagctcccagtctgagactgaagggctgacagcaccccagaggtcactggtacaagtcccagagtcca

SEQ ID NO: 383559 - DNA, 201 bp, Homo sapiens
tgagtttaacagtcctctcaaaaaggaaaagtggttactttgcctttaacattatgggtgaatctatactagttcctagtgtaacccagcacccctgtttttctagaggtgatttaattgtttttttccttctctctctcttcttttctcatctccctggcccccttagcccttcagaaatgcaaatataaccattctcct

SEQ ID NO: 383560 - DNA, 201 bp, Homo sapiens
cacacaattacaaaggcaaagtcccacaatagggcttgcaagctggagaatcagaaaaaccagtagcttgtctcagtccaagacctaagcctcaaaaccakgaaagctgacagtgcagctcccagtctgagactgaagggctgacagcaccccagaggtcactggtacaagtcccagagtccaaaagccgaagaacctgga

SEQ ID NO: 383561 - DNA, 201 bp, Homo sapiens; identical to SEQ ID NO: 83645

SEQ ID NO: 383562 - DNA, 201 bp, Homo sapiens
ttttgcaaaaatgcaaatattattagaacgccctactctcttccctacccccaacacacacacacacacacacacacacacacacacacacacacacacamtggcacgcacacaggcctggctgcgctcgagaagcccacttccaccaccccttctgcagacagaaatgctggcattcgtaagctgtcacactgaggaaga

SEQ ID NO: 383563 - DNA, 201 bp, Homo sapiens; identical to SEQ ID NO: 83646

SEQ ID NO: 383564 - DNA, 201 bp, Homo sapiens
ctcttgttttctggatgcctcagatcccaagtgaggttttatccctccacagttctttaagattagcaaattaaattaactccttaactgctgggaaattyaaaaaacaaaaaaactgctgttttgcaaaaatgcaaatattattagaacgccctactctcttccctacccccaacacacacacacacacacacacacaca

SEQ ID NO: 383565 - DNA, 201 bp, Homo sapiens
gatcgtgccactgcactccagcctgggcgacagagcaagactctgcctcggtgggggggcagtgagggagggaagcaattaagaaaatcccggctctctgytcctcccattccacagacagctgcatcttctcgtgtagcgccagctgcatccctgagacatcatggtgaaggtgaagcctggagtcaatggattaggctg

SEQ ID NO: 383566 - DNA, 201 bp, Homo sapiens
ttctttggaaaagaaatattaaaaattataaatacaaaattatctatgaaaatgaatgtttatacagaatgagaaaaaatgacttcaaattttttttttttgagatggagtctctgttgcccaggctggagtgcaatggcatgatctcagctcactgcaacctccacctccagggttcaagatattctcctgcctcagcct

SEQ ID NO: 383567 - DNA, 201 bp, Homo sapiens
tatgtcttaatggaaagacacttccagagattagtttctggctttgcacaattaaaaccttgtttcttccccactccctgtaaggatccagtgctgggtgmcacagcataggttcatgttcataggtactctggttctgtatcttcctgttatatcacttggtaagtttgccccgtgggtggtaagaatattcctgcacag

SEQ ID NO: 383568 - DNA, 201 bp, Homo sapiens
ttacttcttggacaatgaaaaggaaatttggggaaaatcaaaagctgcaacatgtgcaaaaatgctctataaactgtaaaatgctactagacattaggaartgttatgattattaacgattacaatcatgaatcttcatgctatgagagcagcctcttggatgctcctgtcagccataagcacaccatactggcagtgggg

SEQ ID NO: 383569 - DNA, 201 bp, Homo sapiens
ataaatgattaaggaaagataaattatggggaactataaactgagcaactaccagagcttgcacaggattgggagatacttgagatcaggccagccagaasggaaagacctcattgggtacttgatgcattcaggtgaaatcccagaaacagtatgtcttactagtagggctaaactagtcctagagcaaaggatactcta

SEQ ID NO: 383570 - DNA, 201 bp, Homo sapiens
aatggatttacaaagtacctggtcatcttgttagaatgcagattctgattcagtagttttgtgacaaggcccaagattctgcatttccaataagcttccakgtgattctgatgtgactggttcaggaaccacacttttttagaaaggcattaaatgtgactaaaggaaatccaagtgtagatttcttctggaaggtaagag

SEQ ID NO: 383571 - DNA, 201 bp, Homo sapiens
aagtgttgccagcactgggccctgccctccaccagcgtgacccttggcatcattttgcagcctgtattgaggatgacagtcctctgcatccagcctgcacrtggaactaagcctaagccatttagttcactgtttttccttctgtctacaaatagctcatgcctaattgcccccctacttcaaattcacagcagggtggtg

SEQ ID NO: 383572 - DNA, 201 bp, Homo sapiens
cacaattgccagtatccagtcaaaattattagacatgccataagcaagaagtgtaacccataatgaaagggaaaatcagacaatagaagcagatctagaartgacaaagatggaattagcaaacaagggctttaaaacaatgattataaatttgttcaagcaattaagggaaaacaggaacataataaataagtaaatgga

SEQ ID NO: 383573 - DNA, 201 bp, Homo sapiens
tcacattgatatatagattatatgcaaccccaatcaaaatcccagcaggcattttttctttaagcaattgtaatactgaacctaaaatttgtaagaaattraaatagcctatgttagccaaaacaattttgaaaaagaagttcaaaactgaaggacttaatttgatttcaagacttactttaaagctacagtaatcaagaa

SEQ ID NO: 383574 - DNA, 201 bp, Homo sapiens
cttctctagaaacaccctcacagacacacccagaaaaagtgcttcaccaaccatctaggcatccctcaagcccatcaagttgacacctaatattaaccatyacagaattcatctgaacagtcagcccttgggtcacacttcatgggtatttttgttacacacatatgcctggaacaagtgcccagtgtgctctttggaaca

SEQ ID NO: 383575 - DNA, 201 bp, Homo sapiens
ctgttagcactgagtagtttatctttttctgtccttttactttcagctcttctgtgttcctaatgtattgatggagctcttgtgaattgcttgtaattgawgctttttggggttgtacaaatctttgcttttaactagagtattttcaatacagttaacgtaatgactgacttttaaaatttaaaatctaccatcccattt

SEQ ID NO: 383576 - DNA, 201 bp, Homo sapiens
gtataaaatttagtgtaattaattgtattcaaaatgttttatgatcatcaccactatctgcttcctaaacattcttttcaccccatacagaaactcagtaytcattaagagtaacttgacctggccgggtgtggtgggtcactcctgtaatccagcactttgggaggccaaggtgggtggatcacctgaggtcagaagttc

SEQ ID NO: 383577 - DNA, 201 bp, Homo sapiens
ggttttataaactctttttggttcaagcacttttaagttcctcaccttttaatctagaagcaacaaaaagcatcatacttgcgggcaaaaggagatatttrcatattagtgaatcagattcaaggctgaagaactattaatattttataagatactcatggaataggcccttttagaaacagtgctgtttggggaagggag

SEQ ID NO: 383578 - DNA, 201 bp, Homo sapiens
tccttatttcctccttttctaacacctagtacacacatttacccacaaatgctttttgtttttgtcttaaaagggagctaccattaagaaggatgaacagmccggggcgatcattgtggccagaatcatgagaggaggagctgcagatagaagtggtgagactttaaatgttaaccaagtacagactaatcacgtgtttcg

SEQ ID NO: 383579 - DNA, 201 bp, Homo sapiens
taagtaacagcatgggtgaatttcactaacttaatattagggaaaaatgaatactcacttgtaattctaattatataattttcaaataaagggaaagatcrccactttggggggtatggagggcatgatgactaggaatgagcataagtgggggccactggagtttggttaatgttgtatttcttgttttcggggtgttta

SEQ ID NO: 383580 - DNA, 201 bp, Homo sapiens
ctaattccagaggataggaattccagtagggaaacatctagcttctctaggtattatacctaacagtggagtctctgggctacagagatgagcgtttcccrctgcagtaggtcttaaccaaattcctctactaagtgaattgactggctcagtgaaatgtatatttacaattctgggaccttgggtcatctccctttatca

SEQ ID NO: 383581 - DNA, 201 bp, Homo sapiens
gggacttatgcctgtctaacttttgatttcagactcatatttgaaactgctctttgttttttgtttttctggtcccggactcataattaaccggtgacttyctttaagatcagagtcaatttgtcatcttttgttgtccgcagaatctactgtatgccttgctccttatatatgtccagtgtgtatacattgattgagtaa

SEQ ID NO: 383582 - DNA, 201 bp, Homo sapiens
agtagggaaacatctagcttctctaggtattatacctaacagtggagtctctgggctacagagatgagcgtttcccactgcagtaggtcttaaccaaattsctctactaagtgaattgactggctcagtgaaatgtatatttacaattctgggaccttgggtcatctccctttatcacccgcatttctggattgtgctgtt

SEQ ID NO: 383583 - DNA, 201 bp, Homo sapiens
agaagacataggcaaggcagtgaacagtcaagtacctggacactgtgctagccactgtgcatgcgttctcagttctcattcattctgcccaagaaggaaarggaacaggcacacttttagaaataaaatgaaatctaattacgcccctggctttgccttccagtgtcaccaggtgagggcatagcagatgggaagagatgg

SEQ ID NO: 383584 - DNA, 201 bp, Homo sapiens
aggctggagtgcagtggtgcgatctcagcccactgcaacctccacctcctgggttcaagcgattctcctgcctcagcctcctgagtagctgggactacagrcgcctgccaccatggccagctaatttttgtatttttagtagagacagggcttcaccattttggccaggctggtctcgaacttttggcctaagtgatccac

SEQ ID NO: 383585 - DNA, 201 bp, Homo sapiens
acttattacagatggacttttactttgtttacatatctgttctttaatgatataaatgtgtttattgacaaactggagaaaaatttcacttcttttggatkaattctgctgccactgaaaagcatacctttttagcagtattatgcaatgttggatggctttgcaaaaccaatgccagattcttaaaaggaaagtcatgga

SEQ ID NO: 383586 - DNA, 201 bp, Homo sapiens
caccccagtgaatgacttgggcagtctttcgttaagtcatggttcagtgttctgctcaccttgctaggaaggaaagtgttcacagttaattctgtgttttytcacctgtgtgtaggatctacttttgctaacaagcatacatcactgccaaaatggttaattctggaaagagaactacagagacaaagtatataaagagca

SEQ ID NO: 383587 - DNA, 201 bp, Homo sapiens
agaccctgagtaaattgttgcctttgtaattcatactctaaaaatggtggccatatgttgcccttttcagagatttccttgagagtaaggatgagaaattrggagccatatttgtgaatatttagtgcggctgtgccctcccgcgtggtctacatttatgtaatgtaacagtcaagttattgtgagatttacatggtgatt

SEQ ID NO: 383588 - DNA, 201 bp, Homo sapiens
ttttgttttctctctaccaatgtaattcagtattacagtatgagaattctttataagatttgtgagcgccttctacaataagcaatagcaatgatattacmattttgaaataaatcaaccctttataaaattctattatttaaactatcagaatcccattttacttaacttgctgtgttgcactagagctgccttcttaag

SEQ ID NO: 383589 - DNA, 201 bp, Homo sapiens
ctaagagtagaagccccaagcttgtaaattttcagatgcatttcactttctacctattttaccttattcttccttgggtctggttttcttataactccttsttttatctgttaccaggctcagtctcagggagcaattacatttaagattatacccggcagcaaagaggagacaccatcaaaagaaggcaaggtaattatt

SEQ ID NO: 383590 - DNA, 201 bp, Homo sapiens
tctatttatttgttgactgataattttgaaacatttaaaatacatttgttttttcctttggctttgctaagatgaggaaacagttgagtgtggtaggtggwttttttttttcctttgggtgcaacatcttcctattctaattgcattttctgcacatttaatcatttcctttctcattttctttgtgcttctcagaggaaa

SEQ ID NO: 383591 - DNA, 201 bp, Homo sapiens
tgaagccactttgggggctgtagtggtatctcattggttttaaatttggatccccagatgactaatgaggttgagtacttcttcatatgtttcgtatgggwctgtttctggaccgtctgctcttttctgttgttctgtcgctatgtcagtaccacagtgtcttatttgcagaaaaatctgttggcattttgatgattattg

SEQ ID NO: 383592 - DNA, 201 bp, Homo sapiens
tttcaataaattcctaaagtgctgattttcctggtctttccctctcaaatttgttcacatttcccatggtcaacctgggataagtcttccacttaccacgraaggttatattcataatctgtctactgccttcagagttcagagattgtctctcaatagttttttgattgccatagatagaggtagtcttggagaatatac

SEQ ID NO: 383593 - DNA, 201 bp, Homo sapiens
aatgtcccattctggatatattttgatggtagaactgaggagatttccctacaaagtggcaaaccaaggatgggtgtatggtttttggatttagtaactaygaagatggagttactatttactgagatgggaaagactgcagaggagtaggttgggctgaggaaaagttcagggattccatttgaggcgtattgagttgac

SEQ ID NO: 383594 - DNA, 201 bp, Homo sapiens
agaatttgctatagatttttaacctttttaagataaacataaaagaatctttgcatgtagttaacagtgactgttttcttaaatttaaaatcttaaatagmaattgtattaacattttatcgacaccttaaatgggctacgtaactttggttaaaatgaatgaaactttttataaaaccatgcaacacatttgcttacttt

SEQ ID NO: 383595 - DNA, 201 bp, Homo sapiens
acatttttagtagaagtataattgaaaaacgctactaattttgaatgggcttactatatatctatgacccagacattctactcttaaatatacttaaatarcatcatatatatatgcatcaaaagatatgaaacatttatggcagcattatttgtactagccaagaacggaaaacaacccagatgcccctcaaaggcataa

SEQ ID NO: 383596 - DNA, 201 bp, Homo sapiens
attaataagaaaaagacagatgcaatagaaaaccatgcaaatatcttgaggaggcatctcaccaagagacacacatgcccaataaacacaaatgggtttcrttctcattcattttaagaaaaatgaacatttcaaccacaggagataccgctatacacttggaatggccaaatttagactaataatgtaaaatgtttggga

SEQ ID NO: 383597 - DNA, 201 bp, Homo sapiens
attgagcaaaaataaccaagaaggagagtgaaagggcaagttaccaaaagggagaatgtatttctagcacatgtaactgataaagactgggtccagcataytataaatagttcttacaaattaataagaaaaagacagatgcaatagaaaaccatgcaaatatcttgaggaggcatctcaccaagagacacacatgcccaa

SEQ ID NO: 383598 - DNA, 201 bp, Homo sapiens
aaaaaaaagaggaagaaaatcatgtaagcatggtatattaatgcaaacttcttagtaatagttctactaaagaaaagatctagaaactttccagaatcaaraatgcctgtacagctggaggcttggaaatttcagccccctggtgtcattaacagaacattccacctctaccccactgtggcctgtgtacagcacgacact

SEQ ID NO: 383599 - DNA, 201 bp, Homo sapiens
aactctgaatccataaggtgagtcacataaaaccattgttagtcattggtaattgtttcacatttcctttattttgaatcctgttaatttcttaaacccartggtaacaattattcatttccttcatgcagtcatcctatgatatccatgggagattggttccaagacccccttggataccaaaatctgcagatgctcaag

SEQ ID NO: 383600 - DNA, 201 bp, Homo sapiens
agagtttcttccagctctaaggctttcttgtttgcagagcgttagcctttgacaccttttagaattttaactcttagaaaatgcctaatgtgtcatgcttkctttgttgaaatttacatgaagcagatgaaacaggaataatagtagggtttttgttgctgccttttaaaattacttccattcagtaaacgtttatcaagc

SEQ ID NO: 383601 - DNA, 201 bp, Homo sapiens
atgatgcaatctcagctcactgcaccctctgccccctgggttcaagtgattctcaattctagaatctcttgttaaatactgtattggttcctaacagtgaycaataggaattcctttaccctgctcttcccaacttctaatttaaactactatatacttttttaaaactcccaattaaaggtaatcaatgaacttatttac

SEQ ID NO: 383602 - DNA, 201 bp, Homo sapiens
ttcatactctaaaaatggtggccatatgttgcccttttcagagatttccttgagagtaaggatgagaaattaggagccatatttgtgaatatttagtgcgrctgtgccctcccgcgtggtctacatttatgtaatgtaacagtcaagttattgtgagatttacatggtgattcaaatatacttagtttcagaacaaccgtc

SEQ ID NO: 383603 - DNA, 201 bp, Homo sapiens
ttactctgccccattgtttaactttagttaaatacagtatattgatggtaactatcatttcttatccaaaagcttctctgattatttcagaaattcatccyctagttgctctcccatggagagggctcagggagcaattttccctgagctcttacaagtttttcttgtggtctttacattaatagttgaagatcagtttgt

SEQ ID NO: 383604 - DNA, 201 bp, Homo sapiens
tgaatgtggggagtttcttacctagaaatctctgacttaagaacagttcattcattagaatgtatggaatcaggaaatttgtaacacttatttcccttttygggcaattcctgctgttctctaattccagaggataggaattccagtagggaaacatctagcttctctaggtattatacctaacagtggagtctctgggct

SEQ ID NO: 383605 - DNA, 201 bp, Homo sapiens
atttgtggaatgctaaagttgtataaagctattcctcagagcgtgtaggattttatgtaactattatatgatatactgatatggttattctatcactgttrtctcgtcatgtgagaggatacttttctataattgtaacctaagtctgaggctaaaagggaagaaatgaatgaagacatatgagttgctgttgcagagatg

SEQ ID NO: 383606 - DNA, 201 bp, Homo sapiens
cataaaggcagaactagaatattttgagcaccctcattttttaattaaaagaagaaaaatactcttagataataggatgggaggaaaaggaggaaacttayggatatctactgaaatctatagtaattattatgcttaatggggaaaaatgaaaagcattcctttaaaaataagaaacaaataaaaagtgctttctgtcgc

SEQ ID NO: 383607 - DNA, 201 bp, Homo sapiens
aactattaatattttataagatactcatggaataggcccttttagaaacagtgctgtttggggaagggagaggtggtattaagtttagagagtaaacccaytggggaggttacgttacttgcctctgacatatcatttgctttgggtgggaggaaaaacaaaaagacagccagacattgcgaatgatccatggccacctgg

SEQ ID NO: 383608 - DNA, 201 bp, Homo sapiens
gtgagaccctgtctctaaaacattagggttttaactttaaaaacccaatattatggtaaataaaatccaacccaactctgagggttttttttttttgaggktttcttttttggttgatgttactaaaaatatatttattttaatatttgcagctggttttagaagaagttttcgtcttagtagaaaagataagaaaacaaa

SEQ ID NO: 383609 - DNA, 201 bp, Homo sapiens
gactctcccaatctttgtcttcggcctcgatctttctttttaaagccaggcctatgtcgtcacctgcctgtcccacttctccacgtgggtgtctcacaagsctttatgctcagtgtatctcctctacatttgatctctacttcttcagacttctgtgtttcggtaaatggcagcatcgttcctctggtttttatagaaata

SEQ ID NO: 383610 - DNA, 201 bp, Homo sapiens
atacagtgtgaagaggtgctatttcagttctggaacaccttcattttacctcatggtgagctcaccattaaaaagcgctttcccagaactctgagatgccrgcatctgcggggtctcctatccctctccctcccctctcaggaggtctcctgggcctctcctccaccctgcttcccttctgaaactgcagacagtcggttc

SEQ ID NO: 383611 - DNA, 201 bp, Homo sapiens
cttcttttagagaaaattccttttccagagataagagcaattatttttagcttgttagaaaaagtaggggcaaatggaaatttcatgcaaggttttaagaygggtttttaaataaaaatgcatctatacatatgccacgtatttcataattctaatcttttttcctgtttgagtcttgcttttttaaagaaaattatgaga

SEQ ID NO: 383612 - DNA, 201 bp, Homo sapiens
ggcgcggtggcttatgcctgtaatcccagcactttgggaggccgaggtgggcggatcacgaggtcaggagcttgagaccatcctggctccggtgaaacccygtctctactaaaaatacaaaaaattagccgggcgtggtggctggctcctatagtcccagctactcgggaggctgaggcaggagaatggcatgaacctggg

SEQ ID NO: 383613 - DNA, 201 bp, Homo sapiens
gcttatgcctgtaatcccagcactttgggaggccgaggtgggcggatcacgaggtcaggagcttgagaccatcctggctccggtgaaaccccgtctctacyaaaaatacaaaaaattagccgggcgtggtggctggctcctatagtcccagctactcgggaggctgaggcaggagaatggcatgaacctgggaggcagagc

SEQ ID NO: 383614 - DNA, 201 bp, Homo sapiens
gggaggcagagcttgcagtgagccgagactgcgccactgcactccagcctgggtgacagagtgagactccatctcaaaaaaaaaaaaaaaaaaagaaaaamattttattttacagagatggggtatcatgatggtcttgaacccctggactcaagcaatctgcttgccttggcctctcaaagtgctgggattataggcata

SEQ ID NO: 383615 - DNA, 201 bp, Homo sapiens
ttctttttctattgaattgcctttgatcctttgtcaaagattagcttctatatctgtgggtctatttttgggtaattgtgttccattatctatttgtttayactttcatcaacacatgctgccttgattaccttagctttatagttagttttgaagtagggtagcgtcagccctcagactttgttcttctttgatactgtg

SEQ ID NO: 383616 - DNA, 201 bp, Homo sapiens
tggagtgcagtggtgcattctcagctcactgcaacctctggtcccaagttcaagcgattctcctgcctcagcctcctgagtagctgggactacaggtgtgygccaccatgcccggctaattttttgtatttttagtagagatggggtttcaccatgttggccaggctggtcttgaactcttgacctcaagcaatccaccca

SEQ ID NO: 383617 - DNA, 201 bp, Homo sapiens
ctgagtagctgggactacaggtgtgcgccaccatgcccggctaattttttgtatttttagtagagatggggtttcaccatgttggccaggctggtcttgamctcttgacctcaagcaatccacccacctcggcctcccaaagtgctgggattacaggtgtgagccataatggggtcttgttatgttgcccaagctggtctc

SEQ ID NO: 383618 - DNA, 201 bp, Homo sapiens
tttagggtacatgtgcactttgtgcaggttagttacatgtgtatacatgtgccatgctggtgcgctgcacccactaactcgtcatctagcattaggtatayctcccaatgctatccctcccccctccccccaccccaccacagtccccagagtgtgatattccccttcctgtgtccatgtgatctcattgttcaattccca

SEQ ID NO: 383619 - DNA, 201 bp, Homo sapiens
ccatgttggccagcctggtctcaaactcctgacctcaagtgatctgcccacctcggcctctcaaagtgctggaattacaggcatgagccaccatgcctgaycaagatagtatcttaatatattaatattgtaatatattaataatatcttgtgatatatatcataataatatattaagataaagatacatttaatatgtaa

SEQ ID NO: 383620 - DNA, 201 bp, Homo sapiens
attaaaggaaactgaataacttgcccttccaggctctgtcttgcccagtttgttttccattcatttcacaaatacttgagtgcccatcgtggggcacgatmatagatgctcacatctcattggattcatttattgaagtattatggttattcacaaataattgatgaatgtagtttgatttttcagtcagctcaagttgtg

SEQ ID NO: 383621 - DNA, 201 bp, Homo sapiens
ccagctcatatttggccggcaactctacttggcatttcagtaatttcccacttgccagctcatcttttaccaagaatcaaaaaccattctgatctttaaaraaatgcagatgaggccgggtatcgtggctcacgcctgtaatcccagcactttgggaagccgaggagggtagatcacgaggtcaggagttcgagaccagcc

SEQ ID NO: 383622 - DNA, 201 bp, Homo sapiens
aaggaaactgaataacttgcccttccaggctctgtcttgcccagtttgttttccattcatttcacaaatacttgagtgcccatcgtggggcacgataatasatgctcacatctcattggattcatttattgaagtattatggttattcacaaataattgatgaatgtagtttgatttttcagtcagctcaagttgtggcat

SEQ ID NO: 383623 - DNA, 201 bp, Homo sapiens
gaaactgaataacttgcccttccaggctctgtcttgcccagtttgttttccattcatttcacaaatacttgagtgcccatcgtggggcacgataatagatgctcacatctcattggattcatttattgaagtattatggttattcacaaataattgatgaatgtagtttgatttttcagtcagctcaagttgtggcataag

SEQ ID NO: 383624 - DNA, 201 bp, Homo sapiens
atataaactttcgttgttatatgctgctaaggtttaggcattgcttattaccacaatattatttataacttaattttaacaagtattttcactatattacrtttcaaatatatttttcaaatatggcttagtgatgtagaaattaaaataaatagttattaacattgcatgaggctaattacttttaggtagttgctattg

SEQ ID NO: 383625 - DNA, 201 bp, Homo sapiens
tcctttcatcactaataaaactagaagacaaatgtatctacattgttcttagagtcccctgtttcattactacatttcacaattatttttgcttagcaagygagggctatcaatatcaaagtataatacaccccctcccttctgataaaaaactttcctattttttttgaaaggcttgagtgtatcaaatggtgtattttc

SEQ ID NO: 383626 - DNA, 201 bp, Homo sapiens
ttttccttatcaattcttaggttattttgaaatacagcttatataggaacaattaatctacgaattttcacaatgttgttttggtgcccttgcaccctccaaaagtgaatcagtaagaactcttttttttttttttgaaatggagtctcactgcgttgcccaggctggagtgcagtggcgtgatcttggctcaccacaacc

SEQ ID NO: 383627 - DNA, 201 bp, Homo sapiens
aggcgtgagccaccatgcccagccagtgcaattattattctttttgatgctaaaatgaccccagctttggccagtgggagtgccttcaagttgactcctgkgttttgttttgttttgttttgttttgttttgtttttgacccaactgcactgggctttgattgcttctttgctttttggcctgacagggtctctcaggctt

SEQ ID NO: 383628 - DNA, 201 bp, Homo sapiens
aaatataggcttattcagatttgtgtttctccttttgtgagattttgtcactcttgtctttcaaggaatggtgtatatcatctaacttatcaaatttgagrgcatagaattgttcatcacaattctttattgtccttttattgtccttggcatcagtactgttgactcctctttcatttctgatattcgtaatttgtatct

SEQ ID NO: 383629 - DNA, 201 bp, Homo sapiens
ggcagtaacagtggtaactgctgtaatgagggtctcaggcagtaacagtggcagtctgccacacttcatgatacacaggatggtcttcttatctttgtttytagcacatagcactgtgattgcaacattgggattcccagtaaacggaattcaatgtaaattattaaatgtttggtggaatttttattccattatagcctt

SEQ ID NO: 383630 - DNA, 201 bp, Homo sapiens
aaatatttgctggttgatgttacttaaataggttcaaatttcaaacagttctaagagcctgttgaatgtccgctatgaagagttgattttgccaagatggaaaaaaaaatctcatctggttgccttttaacgcctctgtatgatgttagatacaggtgtacttcttgccttttcacatattgaagaaaacagtgagagtat

SEQ ID NO: 383631 - DNA, 201 bp, Homo sapiens
ggatgtcgttcatgcatgattttctaatgtgttagtagaaaatgggaaaatattggttcaccgaatcatgcagatcttcccaatgttgatacaaaatgccaaaaaaaaaaaaaatcacatttgttaataccaccgtgggtcttctcagcaaaggctttgggcattgagaagctgatagaaccagtgcaaagtggggacttg

SEQ ID NO: 383632 - DNA, 201 bp, Homo sapiens
gggcccctgtagtcccagctcctcaggagcctggggcaggaagaattgcttgaacataggaggcggaggttgcagtgagcccagatcgcaccattgcactmcagcctgggtgacagagtgagactccgtatcaaaaaaaaaaataaaaataaaaaaataaaaattataagttgctgacaatttatatagtctctgttctac

SEQ ID NO: 383633 - DNA, 201 bp, Homo sapiens
ttccgcctcccaggttcacaccattctactgcctcagcctcctgagtagctgggactacaggcgcccgccaccacgcccggctaattttttgtatttttgtttttttttaatagagacggggtttcattgtgttagccaggatggtctcggtctcctggccttgtgattccgcctgcctcggcctcccaaagtgctgggat

SEQ ID NO: 383634 - DNA, 201 bp, Homo sapiens
actctttctatttagttaggttttcagtttctcccagtaacactttctaattttctcttatagatcttgcatatctttcactagtgtttttcctaggtgtygagaaaatgatttttaaatatttgctacttaagaatggggttgcgggttatctttgttttgtgttgctacaaaggaatagttgaggatgggtaatttata

SEQ ID NO: 383635 - DNA, 201 bp, Homo sapiens
tttcttctatatttttggctgtctactctttgcttgcctcttcatgtgtactattttctttaaaagaagagaaaagcaatccaatccatcttacgttaccratcaatttgtgtgtgtgtgtgtgtgtgtgtgtgtgtgtgttttaagagacaggatctcactctgtcacccaggatggagtacagtggtgcagttgtagct

SEQ ID NO: 383636 - DNA, 201 bp, Homo sapiens
ctatatttttggctgtctactctttgcttgcctcttcatgtgtactattttctttaaaagaagagaaaagcaatccaatccatcttacgttaccaatcaatttgtgtgtgtgtgtgtgtgtgtgtgtgtgtgtgttttaagagacaggatctcactctgtcacccaggatggagtacagtggtgcagttgtagctcattgc

SEQ ID NO: 383637 - DNA, 201 bp, Homo sapiens
tatttttggctgtctactctttgcttgcctcttcatgtgtactattttctttaaaagaagagaaaagcaatccaatccatcttacgttaccaatcaatttgtgtgtgtgtgtgtgtgtgtgtgtgtgtgtgttttaagagacaggatctcactctgtcacccaggatggagtacagtggtgcagttgtagctcattgcagc

SEQ ID NO: 383638 - DNA, 201 bp, Homo sapiens
tggtggctcatgcctgtaatcccagcactttgggaggccgaggcgggtggatcaccaggtctggagttcgagaccagtctggccaacatggtgaaaccctrtctctactagaaatacaaaaaactagccaggtgtggtggcacgcgcctgtagtcccagctacttgagaagctgaggcagaagaatcgcttgaatccagga

SEQ ID NO: 383639 - DNA, 201 bp, Homo sapiens
tctattgatcctttagtaatccgactcaaagactcttacagtgatatagtgttctgtttgtctttatgtaatttcatcttgtttgtttgctaccttgtatrtagaagctatttctcatctcagctgtaaatcccatctgggctggactatattagattactttggtagcctaaccaatgctaaaatttattaatgtcttca

SEQ ID NO: 383640 - DNA, 201 bp, Homo sapiens
ttttaagaaactgctggccaggtgtggtggctcatgcctgtaatcccagcactttgggaggccgaggcgggtggatcaccaggtctggagttcgagaccaktctggccaacatggtgaaaccctgtctctactagaaatacaaaaaactagccaggtgtggtggcacgcgcctgtagtcccagctacttgagaagctgagg

SEQ ID NO: 383641 - DNA, 201 bp, Homo sapiens
tgtagatgtaagtttgcaactcatttggataaatatcacggagcacagttactggatcatgtggtaagactagctttttaagaaactgctggccaggtgtrgtggctcatgcctgtaatcccagcactttgggaggccgaggcgggtggatcaccaggtctggagttcgagaccagtctggccaacatggtgaaaccctgt

SEQ ID NO: 383642 - DNA, 201 bp, Homo sapiens
ctcccatgctttacctgtcctccctccccagctcagcaatcactgatagttttactgtctgaatagttttgccttttccagaaggtcatattgttggaatmatacagtatgtagccttttcagattggcttcttttacctagtaatatgcatttagggctccatcaagtcttctcatggcaacatagcccatttctttact

SEQ ID NO: 383643 - DNA, 201 bp, Homo sapiens
cccaccagcagtgtataagggttctgatttgtctgtatcttcaccaacatttgtttttatctgactttttgattcttactgtcctggtgggtatgaagtgrtacctcattgtgattttgatttgcattttctagatgtctaaataatgttaaccatcttttcatgtgcttattggctatttgtatgtcttctttggagaaa

SEQ ID NO: 383644 - DNA, 201 bp, Homo sapiens
cctggacaacagagcaagactccatctcaaaaaaaaaaaaaaaaaagtatgtgatggcctttttggtcaagaggatgggtgagtattcatctttattgcaracctactatgtgctaggttctccaagaggtataatgattatgagatacataaggtttctgcacagatacacacatatccacaattttttaacttaaagat

SEQ ID NO: 383645 - DNA, 201 bp, Homo sapiens
ttggtatcttaagttggaacctgcattcggtataggagttgctcaggttaggctgggtgtggtggctcatgcctgtaatcccagcactttgggaggctgargcaggtggatcacttgaggtcaacagttcgagaccagcctggtcaaaatggtgaaaccctgtctctactaaaaatacaaaaattagccaggcatggtggc

SEQ ID NO: 383646 - DNA, 201 bp, Homo sapiens
taatgataaatactcagacccctgtaacatctggttacattgttttagctttgcatattttttaattttgggggttacatagtaggtatatatttttatgragtatacaatatattttgataccagcatgcaatataataatcacatcagggtaaatggggtatccatcacctcaagcatctatttaactttgagttttga

SEQ ID NO: 383647 - DNA, 201 bp, Homo sapiens
cattactatgttgtggtttttgagtcactgctatggagaggcatagaggctgaaacctgagatgtgtgaaggtctcctttccattcgttaagtgtattaakggaacctaacaatgctttacttatggaaacagctgcaaattacagttttggttgtgggtaacactgctaatttaccaaatctcctatttctcaggtctta

SEQ ID NO: 383648 - DNA, 201 bp, Homo sapiens
gataagaatatggaattgttagtaccttttaaatggttgtgttatgtttacccctaccctttaaagtaattgtgtgtatatttgggaacaggaggaaaaartgtagcaatctgaattttattctttttggtattttgaagtatttcaacaaacccaaattgatattttccagataattttcctcatatgattgaattattg

SEQ ID NO: 383649 - DNA, 201 bp, Homo sapiens
tacaaatagctactatctcagtttccttacctataaaattaaagttataatatctgtttacagggttgtttgtgagtttcaaataaaatagcgaagatctsagttttttggtagttatataatggggttagacaaatttaagtaggcattattaagtattgaggaaaaagttaattatcgtagcacgctaaagaccaaaaa

SEQ ID NO: 383650 - DNA, 201 bp, Homo sapiens
tggcagaactccattgaagtggtattttgtatataaatacactgaagccgaatgtgagtaaaaacagtttttggagacagttttagtaaagcatcatgccrtgaaaatgatcagccagcagaaatcgggtctggccatacagcaacattgggagtgatcagaactcctaaaatagtaaaatgagaacaagaagcttactgg

SEQ ID NO: 383651 - DNA, 201 bp, Homo sapiens
agaggattcttagactattgttgactcatacacagaagtgaagtattttcttctccagctttcttctctcctggatttcctccacactttacagcccacarggactttttctaccccccgtcccaagttctttgcaccagaacgttagggcttctcttggcattttgctgcagattctaccatgctgctctgcgaaggatt

SEQ ID NO: 383652 - DNA, 201 bp, Homo sapiens
gttcggctctgtgtcctcacccaaacctcatcttgtagctcccataataaccacgtgtcgtgggagggacctggtgggagataattgaatcacgggtcagrtctttcccatgctgttcttgtgatagtgaataagtctcacgagatctgatggttttaaaaacgggagtttccctgcacaagctctctgtttgcctgctgc

SEQ ID NO: 383653 - DNA, 201 bp, Homo sapiens
tgaaagaattgtatttaggtacataccttttgaacagttacacttcttgtgctttggtgaatggatcttcatattcaattgactcaaaactattttgtatrctattatgtgaacatttcatactattgtaggctgaacatttgtataaaatctagaccaattaattttcagagcagccttatttttaaagctaaaaatacc

SEQ ID NO: 383654 - DNA, 201 bp, Homo sapiens
caagcaaagtagaatcaggggatagcaagaagattctatcagggcacttatctctgtctataatgagacccttatgcgttggagtgctttgcattatctayacattccaaaagtgattttattctgcccatggctttaaaaagcgtctatgtgccagagactcccagggttatttctcttccagtcttttcttctaatctt

SEQ ID NO: 383655 - DNA, 201 bp, Homo sapiens
tgtctactctttgcttgcctcttcatgtgtactattttctttaaaagaagagaaaagcaatccaatccatcttacgttaccaatcaatttgtgtgtgtgtrtgtgtgtgtgtgtgtgtgtgttttaagagacaggatctcactctgtcacccaggatggagtacagtggtgcagttgtagctcattgcagcctcaaactcc

SEQ ID NO: 383656 - DNA, 201 bp, Homo sapiens
ttttacagaattaataattaagaaaaatctgaccagaatttattttttcaatctaacttgaaattctccatactctgtttttaaaacaaaatcacatagartaaattcaaaataattatgtaggaaaataagtaatttttaaaatattagatccaattttaatttattttgtgttggcagactatgctataggattgatga

SEQ ID NO: 383657 - DNA, 201 bp, Homo sapiens
gtctactctttgcttgcctcttcatgtgtactattttctttaaaagaagagaaaagcaatccaatccatcttacgttaccaatcaatttgtgtgtgtgtgygtgtgtgtgtgtgtgtgtgttttaagagacaggatctcactctgtcacccaggatggagtacagtggtgcagttgtagctcattgcagcctcaaactcct

SEQ ID NO: 383658 - DNA, 201 bp, Homo sapiens
aatacaaaaattagctaggcatggtggtgtgcccctctaattccagctactcaggaggctgaggcatgagaatagcttgaacccgggaggtggaggttgcrgtgagccgagattataccactgcactccagcctgggtgacagagtggggctcaaaaaaaaaaaaattaactttacctgtccctctccctccagcccatgt

SEQ ID NO: 383659 - DNA, 201 bp, Homo sapiens
actcctgggctcagcagccctcctgcctcagcttcccaaagtgttgggattacagccatgagccaccacacctggcctcttaataaacttttcttctggcytttttatttctttgctctcactcttttaaaattacagtgaaaattaatagtctgtgattagaaatctttaaaaagttcttgagttggctaagtgtgtttt

SEQ ID NO: 383660 - DNA, 201 bp, Homo sapiens
ggtggtgtgcccctctaattccagctactcaggaggctgaggcatgagaatagcttgaacccgggaggtggaggttgcagtgagccgagattataccactrcactccagcctgggtgacagagtggggctcaaaaaaaaaaaaattaactttacctgtccctctccctccagcccatgtcaatcaccattctactttctgt

SEQ ID NO: 383661 - DNA, 201 bp, Homo sapiens
ggaggctgaggcatgagaatagcttgaacccgggaggtggaggttgcagtgagccgagattataccactgcactccagcctgggtgacagagtggggctcaaaaaaaaaaaaattaactttacctgtccctctccctccagcccatgtcaatcaccattctactttctgtctctagaatttgtctattttagatatttcat

SEQ ID NO: 383662 - DNA, 201 bp, Homo sapiens
gaggctgaggcatgagaatagcttgaacccgggaggtggaggttgcagtgagccgagattataccactgcactccagcctgggtgacagagtggggctcaaaaaaaaaaaaattaactttacctgtccctctccctccagcccatgtcaatcaccattctactttctgtctctagaatttgtctattttagatatttcatg

SEQ ID NO: 383663 - DNA, 201 bp, Homo sapiens
aagatgatactgagagaatgcctgagaagtctcatattgatatggtttagctgtgtccccatccaaatctcatcttgaattgtagctcccttaattcataygtgttgtgggaaggaccccgcgggagataatcgaatcgtggggggtggtttccctcatactcttctcatggtagtgaataagtctcataagagctgatgg

SEQ ID NO: 383664 - DNA, 201 bp, Homo sapiens
cgatcagttttatgtagatttcccatgacagcatctcacgaataatcaaaaatatgctccatctcaaacagcttatagcttatctagaaatgaaaatgatrtattttaactctgaaatttaaattatttacaaagttattgtaaataatttaaataaaacaatttcatgaaatatgcaagtggggcccaaacctaatatct

SEQ ID NO: 383665 - DNA, 201 bp, Homo sapiens
ccttccaccaggtcccaatttgggattacaattcaacatgagacttagaggggacacatacctaaactatatcagcctcatatgtacatacataaatctcyatatagaagattgagccagttatcattttattgcctcttagctccaaattcatacttcattgtctgcactatgaagatagagctaggccctttaagtatt

SEQ ID NO: 383666 - DNA, 201 bp, Homo sapiens
tgcgtgggagggaagtcatgtttttccatccaacacatatccactttgtcacaacacatttctttcaatattccagttttaaaattactatgtttggagtyggagttaggagaatataggccatttcacatttattttttatctttattcatctttaatgaaacttttcttccagatgtttatcaaagccctctttgacta

SEQ ID NO: 383667 - DNA, 201 bp, Homo sapiens
cattttgattgatataattcttaaaaaaattaaaacacaccagttgctggtcatgacaaggtacaacagttctgcctgtaattattatgggtctagatcartgtacatcaccagctaattatttagcttactattgtactaaaaagtccaaaaaacaaatggctggggcagtcccactgagagatcccatcatcatttaat

SEQ ID NO: 383668 - DNA, 201 bp, Homo sapiens
ggcctcaggaagcttacaatagtggtggaaggtgaatggggagcaggtgtatcagatggtgaaagtaggggcaaaggaagtgagtggggggaggtgccacrcttaaacaaacaggtctcactacaactcactcactgtcttgaggacagcttcaagccatgagggatccacccccatgatccagtcaccttccaccaggtc

SEQ ID NO: 383669 - DNA, 201 bp, Homo sapiens
ttcttaaaaaaattaaaacacaccagttgctggtcatgacaaggtacaacagttctgcctgtaattattatgggtctagatcagtgtacatcaccagctamttatttagcttactattgtactaaaaagtccaaaaaacaaatggctggggcagtcccactgagagatcccatcatcatttaatgtccctggaggaaaggc

SEQ ID NO: 383670 - DNA, 201 bp, Homo sapiens
taagttgcccaggcttgtcccaggctcctggcctcaagcgatattcctgcctcggcctctgtgttgggtcgttctttgcattgccctagaggaatacttgygactgggcaatttataaagaaaagaagtataattggctcacggctctgcaggctgtacaggagcatggagctggcatctgcttctgaggaggcctcagga

SEQ ID NO: 383671 - DNA, 201 bp, Homo sapiens
tgggaggtacaagagaaactaataataaatctttctgtatatttcacatttttagcttgagcatcagtactattctgctctcctttgtgctgaatcttatrtgctgcccaaagactgcttgcagaggtaatttgaataaacaggcatttattataagactgtcactattttttcataaaactgtggcataacacaaagcct

SEQ ID NO: 383672 - DNA, 201 bp, Homo sapiens
atattttttttgtaaaggccagatgcaatgtactaagctttgcaggtccagtggtctctgcttcaaatattccactttgccattgtaacataaaagcagcygtagacaatatataagtgaatgaacttggctgtgtttcaataaaactttatttataggaacagatggtgggccaacttgctgtagtttttaggcccccga

SEQ ID NO: 383673 - DNA, 201 bp, Homo sapiens
aaatttttttttggtagtgatggttctttctaagttgcccaggcttgtcccaggctcctggcctcaagcgatattcctgcctcggcctctgtgttgggtcrttctttgcattgccctagaggaatacttgcgactgggcaatttataaagaaaagaagtataattggctcacggctctgcaggctgtacaggagcatggag

SEQ ID NO: 383674 - DNA, 201 bp, Homo sapiens
ctgtcactcaggctggagtgcagtggtgcaatcatagctcactgcagccttgaactcctgggctcaaaggatcctccctcctcagcctcccaagtagctgktgctatagaggtgcacaccactatgctcagctaacataaaatttttttttggtagtgatggttctttctaagttgcccaggcttgtcccaggctcctggc

SEQ ID NO: 383675 - DNA, 201 bp, Homo sapiens
gtgttatgtattagtaacagtgtctataatttttaacgatggacattttggttccaagtctttgactttggttctgtatatatcctagcaaataacccccyactagaactgaagggcattttgcaggaaatgtactgaatgaaagccccattgcaactgccatgtctgcacctgtcatcctggaaactccattatgaacat

SEQ ID NO: 383676 - DNA, 201 bp, Homo sapiens
catgttcttcaccatggcacactcacaatcaagaatagttggctgcattaaatcttaaccatggtacacatctctttactgtcaagtctttttaatctagmagaaagaggggaatactcagaaagcacttggctgcaaaccagagttctggttagcagaggacaagtagctgtaggattgtgagattgtgaactaaactag

SEQ ID NO: 383677 - DNA, 201 bp, Homo sapiens
tttactttcactaatcactaaatatttttcattgtatctccaatgccaaacaacagaaagaacatcgaaaacaaagcagaaagacaatattcctctccccyagaaagagacacacacatagttttttttttttttttggagataggatttcattctgtcactcaggctggagtgcagtggtgcaatcatagctcactgcag

SEQ ID NO: 383678 - DNA, 201 bp, Homo sapiens
gagagagagaggagcgaggtgccacacacttttaaacaacagggtctcacgagaactgactattgtgatgacagcaccaagggggatggtgttaaaccccrggaaaatgcccctatgatccagtcacctcccacaggctgcacctacagcagtggggattacattacaacatgagatttgggtgtggacacagatccaaac

SEQ ID NO: 383679 - DNA, 201 bp, Homo sapiens
aaacatctattgctgtaaatgttaaagggatgcaatgtagcataaagtaaaaacttatgaaaatatattactattaggaatctagatgatgtcacaataayggaggatggaagaaggaaggaagcaatataaatgtacgtaaatatcagttaagtaattattttttaagaatttgaccggtctgggcaacatggtgaaacc

SEQ ID NO: 383680 - DNA, 201 bp, Homo sapiens
tgtatgaatgcaagaagagtgatcagtacgacacagctgacgtacccacatacgaagaagtgacaccgtatcggcgacaaactaatgaaaaatacagactygttgtcttggttggtaagtgcttgtttctgtgagtaattctgaggaaatgagtgagctagtaagaatttctcttcaaagtgaatcatacttgaagttttc

SEQ ID NO: 383681 - DNA, 201 bp, Homo sapiens
aaatacaaagtctgataaggatagtgaacaaaaagaataggaagccatcagacctaataatgaaggagaactggttttgattgggtaagactgttgggaaragctgtgtgtaagtgacattttagctaagactcagagatgaatgtgggtacccccaagactcaggaacattgcaggcagagaggatgccttgaggtagga

SEQ ID NO: 383682 - DNA, 201 bp, Homo sapiens
atatttcactaagtataaaggaagtaaaacactcatactatggtctcttccctctcctcttcacctcccagtgcctctctacaaactttttaggataccaytaatgagtacttgacatattcatagttagtccataaacctgagagtgctcctggatcctcataggtatttcattgcactctgtgattggaattttgtttg

SEQ ID NO: 383683 - DNA, 201 bp, Homo sapiens
tcacaacttcccctggctactgcatgggcccaagccaccctcaccttctgccctggattgctgtgtttgatcttcccatatagttgtctgcctcggccctyggcttcctgcgatctgttctcaattcagcagccagagtgatgcattcattcactcatttatttttttttttttacgagacagggtctcattctgttgccc

SEQ ID NO: 383684 - DNA, 201 bp, Homo sapiens
cagactcgttgtcttggttggtaagtgcttgtttctgtgagtaattctgaggaaatgagtgagctagtaagaatttctcttcaaagtgaatcatacttgawgttttcaagctaaaaatctcctccccttcaacaccttttgtcttgtctctgaaacaaaatctttagttttttgtacgtaattgacttgcagagactttta

SEQ ID NO: 383685 - DNA, 201 bp, Homo sapiens
taaagtaattgtgtgtatatttgggaacaggaggaaaaaatgtagcaatctgaattttattctttttggtattttgaagtatttcaacaaacccaaattgrtattttccagataattttcctcatatgattgaattattgtgtgtgtttctgtgatttcagccttatacaagtaatgataaatactcagacccctgtaaca

SEQ ID NO: 383686 - DNA, 201 bp, Homo sapiens
ataacagatgtgtctactagaattcaaaactttctttatagaaaaaaggtgccataaagaaacatcaaagacaaatgagattgtatgaaaaatattttcartatatataataaaaggctaatgtttcaaaatatatagagatgataaaaatcaataagaaaaacatttacagaaaaatcagcagtgcatatggacaaatac

SEQ ID NO: 383687 - DNA, 201 bp, Homo sapiens
aagaaaaacatttacagaaaaatcagcagtgcatatggacaaatactttacaaaagaaaacatagatgtctggagacacgaaggtgatgccaagcccaggscaggcttgatcccctcaaagcattttcaggatatgagattggaaagcttgataatgcctagagttggtcagggtataggaaaataggtatatttatatga

SEQ ID NO: 383688 - DNA, 201 bp, Homo sapiens
aaaacttgtgggtgctggtacttattttaatgaagttagaatagatactcagtcttttcatctttcaattaatctattacgttggatattttactcgctcmccagaatacaatagatatgaatgttctttattttttttttctgatgggcattgccactaattgaatcatgtatttgtaactgcactactgacattatagg

SEQ ID NO: 383689 - DNA, 201 bp, Homo sapiens
tttttgtaatctggtttaagttcattttagaacaagatatggcacaaaaacttgcttaaatactatatttctttctttcttttttttttttttaaattctytgagacagagttttgctctgttgcccaggctggagtgtaatggtgcaatcttggcccactgcaacctctgcctcctaggttcaagtgattctcatgcctc

SEQ ID NO: 383690 - DNA, 201 bp, Homo sapiens
acaaaaagaagctgccatattgtcttttaaggtgactgtaccatgttgaattcctaccagcaatgagtgagagtccctgtagctctatagccttgtcagcrtttggtgtggtcattttttttttttttaattttagccattctagttggtgtatagtagtatctcattattgtgtcaatttgcacatggtaggttaagcat

SEQ ID NO: 383691 - DNA, 201 bp, Homo sapiens
agttccacattttactaaagtctaacttacagattttttctttcatggattgtgcttttggaattatatctaaaaactcattgtcaggccagtcatggtgrctcacgcctgtaatcccggcactttgggaggccgaggcgggcggatcatgaggtcaggagattgagaccatctggctaagatggtgaaaccccgtctcca

SEQ ID NO: 383692 - DNA, 201 bp, Homo sapiens
tgattttagctgtaggtattttatacatgttcttcatcaagttgagaaagttctttctatttccagtttgctcagagtttttattgtgaatgggtactgatttttttttttttaaagacagagtcttactttgtcacccaggctgcctctggggttcaagcgattctcgtgcctcagcttctcaagtagctgggattacag

SEQ ID NO: 383693 - DNA, 201 bp, Homo sapiens
atatgtttcttcaagggctgatgttgtgcaaaatgtattcttattggcagatggataacttaaggtctttctgcctacctggctttgacagggtttttgcttttttttttttttttttttttttttgagatggagtctcactctgtcgccaggctagagtgcagtggcgcgatcttggctcactgcaacctccgactccct

SEQ ID NO: 383694 - DNA, 201 bp, Homo sapiens
tatgtttcttcaagggctgatgttgtgcaaaatgtattcttattggcagatggataacttaaggtctttctgcctacctggctttgacagggtttttgcttttttttttttttttttttttttttgagatggagtctcactctgtcgccaggctagagtgcagtggcgcgatcttggctcactgcaacctccgactccctg

SEQ ID NO: 383695 - DNA, 201 bp, Homo sapiens
attttatacatgttcttcatcaagttgagaaagttctttctatttccagtttgctcagagtttttattgtgaatgggtactgatttttttttttttaaagrcagagtcttactttgtcacccaggctgcctctggggttcaagcgattctcgtgcctcagcttctcaagtagctgggattacaggtgtgcgtcactacgcc

SEQ ID NO: 383696 - DNA, 201 bp, Homo sapiens
tacttaatttttttttttctatgtgtgcttgccctacagttagcaacacacatttacaacaaatacaggttttgtttttttttttttttttttgagacagrgtcttgctctgtctccctggctggtgtgcagtggtgttatctcggctcattgcagccctgatttcccaggctgaagtatttctcccacttctcaacctcc

SEQ ID NO: 383697 - DNA, 201 bp, Homo sapiens
caacacacatttacaacaaatacaggttttgtttttttttttttttttttgagacagagtcttgctctgtctccctggctggtgtgcagtggtgttatctyggctcattgcagccctgatttcccaggctgaagtatttctcccacttctcaacctcccaagtagctggaagtacaggcgtgcgccaccatgcccagctaa

SEQ ID NO: 383698 - DNA, 201 bp, Homo sapiens
tctgcagactgtacaagaagcatggtgccaacatctgctcttgatgagggtctcaggacgcttccacttacagtggaaggcaaagcagagctgatacatasaaatgcctcatgttactgtagtattgtgcacttagaacatttattcctttatctgtagattcttttgtttgttaataatgccaattttatttcttccatg

SEQ ID NO: 383699 - DNA, 201 bp, Homo sapiens
tacggaagtccagactggcattttttttttccgtcaacacttaaaatatttcagtccactctctttttgcttgcgtggtttctgatgagaagcctgaagtaattcttatccttgtcctctagaggtaaagtattttttccctcaagcttctttcaagatgtttgctctctagcagtagtcttcaatgggctttacttctga

SEQ ID NO: 383700 - DNA, 201 bp, Homo sapiens
cctgtgtgtgtttgggcaggccgacttgatttacagccagcactccactgcgggtgagtaagatggcaagtttctccctgtttttcctctcagcccttccyatctagagtgcagataacataattactcagttaaatatcatctgcccaggttttcattttgagataaatctatattgtggttatctgcattatacttaaa

SEQ ID NO: 383701 - DNA, 201 bp, Homo sapiens
ccctgtcactacaaaaaaaattaaaaattagtcacatctaggggagcatgcctatattctcagctactcgggaggctgaggcaggaggattacctgagccyaggaggtcaaggctgcactgagctctgatcatggcactgcactacagcctgagtggcagagcaagaccctatctctaggaaaaaatcaaacccagctcct

SEQ ID NO: 383702 - DNA, 201 bp, Homo sapiens
ggttttcattttgagataaatctatattgtggttatctgcattatacttaaaacttacaccgaagataattctgttggataggttttaagtaattatcttyagtatttccttttcatttatgatatgaggcatagcaaatcttggattccttgatattaaaatagataagatcaagctgtgaactcaggatgagtcagtac

SEQ ID NO: 383703 - DNA, 201 bp, Homo sapiens
tggtgaacatagtatccaataggccttctcaaacgctgttcccttgctttccttcccgcttatgcaggcccggtgtctgttgctcccatctttatgtcccytgtgtacccagtggttagttcccacttataagtgagaacatgcagtttggctttctgtttcagtagcagagttcttttgagtgttttgtttgtttgtttg

SEQ ID NO: 383704 - DNA, 201 bp, Homo sapiens
aattctcacctatcttgtttggttaattcttttttgagctttattgctctcctttacatgctggggctgagtttttaatttcaatgatgatgatgattttyataagaagcaactgcttagttttttttcttttctttttttctgttttttttgagatggagtctcactctgtcacccaggctggagtgcagtggtgtgatc

SEQ ID NO: 383705 - DNA, 201 bp, Homo sapiens
ggctttgagacgaccagaaatattggttcagcccctgaaagtttccaacaggaaatcatgtaagtttgttaataagaatgcagagaaaccaaaccctgatrtttatttttgactattaaagcaggtgctcatggcagaacaaagggtcctattaccctagcaataactttgggatcatcagttctcaggaacaaacaaata

SEQ ID NO: 383706 - DNA, 201 bp, Homo sapiens
ttgggaccagaagtgttctggattttattttatttttcttttggaatatttgcattataccagttgctcaagcatccctaatctgaaaatccaaaatctgyaatgctctagtgaccatttcctttgagcatcatgttgataattttggattctggagcattttggatttcagatttttgtattagagatgctcaacctgtg

SEQ ID NO: 383707 - DNA, 201 bp, Homo sapiens
ttgtttctctcttttttttttttttttttgagacggagtctcgctctgtcgcccaggctggaatgcagtggcgctgtctaggctcattgcaagttccgcctcccaggttcacaccattctactgcctcagcctcctgagtagctgggactacaggcgcccgccaccacgcccggctaattttttgtatttttgtttttttt

SEQ ID NO: 383708 - DNA, 201 bp, Homo sapiens
agtgctagttcattcattacacctatgcttgcagagaaggggcggttgtgtgccttcccgagcccgcactagatgagtccctaagggtcttgtggttaatrctccttcctggcaaatggaccagggttcccggcagactttcctagcagccttgaagcctgggtctcttcgcctggggattataaagcagcatgttctctt

SEQ ID NO: 383709 - DNA, 201 bp, Homo sapiens
taaatcaactcacactgagttgaaatgcatcatgtagaaaacagagccttttcactttcactttaaattgtgccagaagaaacatgctatttaaaaaaaatttttttttttttttttttttttttgagatggagtctctctgttacccaagctggagtgcagcagcacaatcttggctcactgcaacctccgcctcctagg

SEQ ID NO: 383710 - DNA, 201 bp, Homo sapiens
cactagggacataagatcaactcagggatgccctcctaggtaaaagttactggaggacatggactcattgcctctttctctgggtagtgatggcatgtgcdgatattctcatactgtcttgcttttagaataattctgtgcatttaatttaaaaaattaagtatttgaaacttatagaaaagtatggcaaatactgtgata

SEQ ID NO: 383711 - DNA, 201 bp, Homo sapiens
ggtctcttcgcctggggattataaagcagcatgttctcttgtttcctttctgaagtctttaaaggtttataggattcttttagtgggattcttcttttctrttgcttcagcatttccctttccatgtgtggaaaggacatatgttggttttatattaatcattgaaccccattggatttgtaaaatgtgagacattttgat

SEQ ID NO: 383712 - DNA, 201 bp, Homo sapiens
gactctgacttggaagggaaagacagcggatcattattcagtttttagggacatatgatgatatgggttccattctcaaggaatctagtgggggacattgrttgaacaaaaaaatgtagaattatattgatgtacgttaattacaaaaaaggactggtttctgcggtagagaggacttaagggaatgccagtggaatgctg

SEQ ID NO: 383713 - DNA, 201 bp, Homo sapiens
agctggcttccatgtggtcttagcaggccctgtttttcccagccaggttccccttctagccctcagatttcttgacactaaattggtcataaagtaagttytcctaatcagatagattcattccagggtgtgttagtctaagagagtttggctagcagtccactagcaggctgtgcacagctctgtgaaatgctcttttct

SEQ ID NO: 383714 - DNA, 201 bp, Homo sapiens
ggtccaaatatgttaacagatataagtctgcttcttgcactggctaatagaactaatgagtctttcagattgagcttttacaaaaatctgtgatagatttwtttttaaaaagtttactcttgtttgtgttattttattgctctattaggttttgaaaatgtaacttttgagtatgtgtatctggtgaaataatctacagtt

SEQ ID NO: 383715 - DNA, 201 bp, Homo sapiens
aataatgcagaccaaactccctgccctctcatagtttctgtaagtcatacgttgcttaacgacagggagacgttctgagaaatttgttgttaggcgacttsgtccttgtgggagcatcctagagtgcacttaggcaaacccaaatggcagagcccactacacacctaggctgcatggtgcagcctgttgcttctaggccag

SEQ ID NO: 383716 - DNA, 201 bp, Homo sapiens
acatattattatggcaggcactattctaagacaccaggaattcagcagtgaataatgcagaccaaactccctgccctctcatagtttctgtaagtcatacsttgcttaacgacagggagacgttctgagaaatttgttgttaggcgacttggtccttgtgggagcatcctagagtgcacttaggcaaacccaaatggcaga

SEQ ID NO: 383717 - DNA, 201 bp, Homo sapiens
ccattcagtaaacgtttatcaagcaactgttctgtagcaagccttgcacaactgacatcacccaactatctatgcaacatggtccccatctttgacactcrtgcaacatcaccttaagagatctgattaccttctcttttcctcactaactcttcattgtttatgatgaaagtaaaaacttggctgggtgtggtggctcat

SEQ ID NO: 383718 - DNA, 201 bp, Homo sapiens
tacaaaaattagctaggtgtggtggcaggcgtctgtagtcccagctactcaggaggctgaggcatgagaatcgcttgaacctgggaggcagaggctgcagygagctgagattgcaccactgcactccagcctgagccacagaagtgagaccctgtctcaagaaaaaaaaaaaaaaaaaggaaagtaaaaacttaagtgaat

SEQ ID NO: 383719 - DNA, 201 bp, Homo sapiens
tattatttttttcttactgaatgcatttctaacaatattatgatgaataggccaggcacagtggctcatgcctgtaatcccaacactttgggaagctaaastggggggattgcttgaggccagcagttcaaaccagcctgggcaacgtagcaagaccctgtctctacaaagtattttaaaaattaaccagccgtggtgatg

SEQ ID NO: 383720 - DNA, 201 bp, Homo sapiens
cttgttttattttatttaaagtaaattatttttaaagtatagaactgaattataataatttcaaaataggctgttttctctctctctctctttctttctctttttttttttttctgagatggagtcttgctctgtcacccaggctggagtgcagtggtgcgatctcagcccactgcaacctccacctcctgggttcaagcg

SEQ ID NO: 383721 - DNA, 201 bp, Homo sapiens
ttcaacatgagacttgggtggggacacagagccaaaccatatcactcttgttaattgttcttttataaactcgtgatgatacttatggaaatgagaatcamtggagaacctgagaattaccccatcttagtaagatggagtcctttgaaaggttacaacccatgctgttcattgagaaatggtgggtgactcatgggaaat

SEQ ID NO: 383722 - DNA, 201 bp, Homo sapiens
attatgatatataacaatataataacttataataatttgaaagaacttattttatattacattataaaaaatcataaaaatcataatatattaagttaaawaatagatatgtttaccttaatatattaatatgtaatattaatatatattaagataatatctatatataaataatatattaatgatatatattaattatat

SEQ ID NO: 383723 - DNA, 201 bp, Homo sapiens
gaggcaggagactcacttgaacccaggaggcagaggttgcggtgagctgagatcatgccagtgcacttcagcttggggaacaagagcgaagctccatctcaaaaaaaaaaaaaaaaaaaaagaggaagaaaatcatgtaagcatggtatattaatgcaaacttcttagtaatagttctactaaagaaaagatctagaaact

SEQ ID NO: 383724 - DNA, 201 bp, Homo sapiens
aatcataatatattaagttaaaaaatagatatgtttaccttaatatattaatatgtaatattaatatatattaagataatatctatatataaataatataytaatgatatatattaattatattactatatattaggataatatcttttcattttggagacagagtctcactctatcacccaggctggagtgcagtggcat

SEQ ID NO: 383725 - DNA, 201 bp, Homo sapiens
gacctcaagtgatctgcccacctcggcctctcaaagtgctggaattacaggcatgagccaccatgcctgaccaagatagtatcttaatatattaatattgkaatatattaataatatcttgtgatatatatcataataatatattaagataaagatacatttaatatgtaaagatatatattttaatgtataaatatattt

SEQ ID NO: 383726 - DNA, 201 bp, Homo sapiens
agattgcctgattaaaggaaactgaataacttgcccttccaggctctgtcttgcccagtttgttttccattcatttcacaaatacttgagtgcccatcgtggggcacgataatagatgctcacatctcattggattcatttattgaagtattatggttattcacaaataattgatgaatgtagtttgatttttcagtcagc

SEQ ID NO: 383727 - DNA, 201 bp, Homo sapiens
gattgcctgattaaaggaaactgaataacttgcccttccaggctctgtcttgcccagtttgttttccattcatttcacaaatacttgagtgcccatcgtggggcacgataatagatgctcacatctcattggattcatttattgaagtattatggttattcacaaataattgatgaatgtagtttgatttttcagtcagct

SEQ ID NO: 383728 - DNA, 201 bp, Homo sapiens
ctgattaaaggaaactgaataacttgcccttccaggctctgtcttgcccagtttgttttccattcatttcacaaatacttgagtgcccatcgtggggcacgataatagatgctcacatctcattggattcatttattgaagtattatggttattcacaaataattgatgaatgtagtttgatttttcagtcagctcaagtt

SEQ ID NO: 383729 - DNA, 201 bp, Homo sapiens
aatttttaaaaaattattttaaaaaatttttaacttgtttttaaaattttttgggtacatggtaggtatatgtatttatggggcatgtgagtttttttttkttttgttttgtttttttgagatggagtctcactctgttgccaggctggagtgcagtggcgcaatctcagctcactgcaacctctgcctcttgggttcaag

SEQ ID NO: 383730 - DNA, 201 bp, Homo sapiens
tgattaaaggaaactgaataacttgcccttccaggctctgtcttgcccagtttgttttccattcatttcacaaatacttgagtgcccatcgtggggcacgataatagatgctcacatctcattggattcatttattgaagtattatggttattcacaaataattgatgaatgtagtttgatttttcagtcagctcaagttg

SEQ ID NO: 383731 - DNA, 201 bp, Homo sapiens
ttaaaggaaactgaataacttgcccttccaggctctgtcttgcccagtttgttttccattcatttcacaaatacttgagtgcccatcgtggggcacgataatagatgctcacatctcattggattcatttattgaagtattatggttattcacaaataattgatgaatgtagtttgatttttcagtcagctcaagttgtgg

SEQ ID NO: 383732 - DNA, 201 bp, Homo sapiens
taaaggaaactgaataacttgcccttccaggctctgtcttgcccagtttgttttccattcatttcacaaatacttgagtgcccatcgtggggcacgataatagatgctcacatctcattggattcatttattgaagtattatggttattcacaaataattgatgaatgtagtttgatttttcagtcagctcaagttgtggc

SEQ ID NO: 383733 - DNA, 201 bp, Homo sapiens
gctttcctcagatgtcatctcttgtcttataagacacccatgtgtttacaacttgtcctattctcttctcctctttacctttgtaaaggagctttagaacractgtcttccttgttttagatcctttataaataaccttttctctcaactcaaatatcttctcaaaatcggagtgactcttagagggccacagaaacatgt

SEQ ID NO: 383734 - DNA, 201 bp, Homo sapiens
ctgtgtaaatagcacattttggtatatattttacaaataattttccctggttttatgtaacaggaagaaactttgatctaagtcacgaatctaaaagtgcrttttagtttggctgaagatgggtgaatagtcttacttcaggtatttttcaggcttaggtgctcatggtcaaactatatggactagaatgttgggtcttga

SEQ ID NO: 383735 - DNA, 201 bp, Homo sapiens
attgctaacataattattaaagtagtttatgatgacagttaattacaagttttcatattcttgaacacttacccaaatttagaggaaatgtatttgaaaaktacttggtttcttgttgatatatattaactgtgtgtgtgtgtatatgttcacattaataaaaaatgttgcagactatggaattaattatttactgaaaac

SEQ ID NO: 383736 - DNA, 201 bp, Homo sapiens
tgttaccaaggaataggtaattatttttacaactccccaaatcaataataaaataatgaaatttcaccctttctttacataatttcacattttgacttccraccttaaccactgatcttggccattgttgattactttcatatatataatgaaacctgtattattatagattgagttaggctgagataccttacaaataat

SEQ ID NO: 383737 - DNA, 201 bp, Homo sapiens
tacatgcagctttgattatttatacagggataagaataaaaatctgggaggtctagtgaatgcagaacttgacattgttaatgcagaataattgcgttctkcaaagaagaggaaattctttcatcgtgtttgcattttgtgatagtcctcttgatgcaatttgccttaaagtagcagaagacttaaattccttgcttttat

SEQ ID NO: 383738 - DNA, 201 bp, Homo sapiens
actcaagcaatctgcttgccttggcctctcaaagtgctgggattataggcataagccaccgtgcccagcctttgtttgttttgttttagagatggtatctrtgttacccaggctggactcgaactcctgggctcaagcaatcctttcaactcagcctcctgagtagctggggctacaagtgtgcaccaccatgcctgcctt

SEQ ID NO: 383739 - DNA, 201 bp, Homo sapiens
tattatttttggtgctatggctttggagtggtattatatttttaatttcaagtttcagctgttcagcactggtatacaggaaagcaattgatttttggatrttaagcttctgtcttgcatccttgctataatcgtttgcttgtggccaaggtcttttgctgttgttgattctttgggattttctcatctgtaaacaaagac

SEQ ID NO: 383740 - DNA, 201 bp, Homo sapiens
taaacactgggtggatggatatgattgccctataaatctttttcatttgttttgttggttctgggagccaaagaatcttctaatttattagagggctatcrgaaaattggtaaattttgtgaaactatattatttattttgtttctgtgatgttaatgttgtgtgaaattcttttgattgttgaagaatatgggcagagtt

SEQ ID NO: 383741 - DNA, 201 bp, Homo sapiens
gagtagcttatttttgctcattatttgtgaaattgatggcatataaaaaaaagccagaggaagggatggtgatgaagagtttattttcagaggcatttagrttttttaacctttctgtagcaggaagtagagaggaagtcatccaggcagcctcctatgtagtccagggtttgagctgtgctatactttagtctgtgtagt

SEQ ID NO: 383742 - DNA, 201 bp, Homo sapiens
tctgagcactcactcatctagacctcccagctgccccaagaagtatatagtgacattatccccatgttacagaggaggaaaccaaggcaaaaatggttaarggatttgcgctaaattacacagatttttggcagaatatttgttaatcacagcttccctactcttaggtttttatgatgaattttagtacacatatgacat

SEQ ID NO: 383743 - DNA, 201 bp, Homo sapiens
atttttaaaaaattattttaaaaaatttttaacttgtttttaaaattttttgggtacatggtaggtatatgtatttatggggcatgtgagtttttttttgktttgttttgtttttttgagatggagtctcactctgttgccaggctggagtgcagtggcgcaatctcagctcactgcaacctctgcctcttgggttcaagc

SEQ ID NO: 383744 - DNA, 201 bp, Homo sapiens
ataaaagtggttttcataggcattcttacaaataaaatgtgatgcttgaaacattttgatctgcagaataaaggccatttgactacttaatatgttgatawtagaaagctgtctaaaaggctaaattgaaatgttggcttttttcaagcagttttagtactgttttaaaaaatttacttgtatattgcccttagcgatgtt

SEQ ID NO: 383745 - DNA, 201 bp, Homo sapiens
gcgtgatcttggctcaccacaacctctgcctccttgtttcaagtgattctcctgcctcagccgcgccaccatgcctggctaattttttttttttttttttytgcatttttagtagagttggggtttcactatgttggccaggctggtctcgaactcatgacctcatgatctgcctgcttggcctcccaaagtgctgggatt

SEQ ID NO: 383746 - DNA, 201 bp, Homo sapiens
gttaaaatccttggttcatagcttcttgttttgaatatcttaagtatcatacttcttcagcttctggtataaagtgttcgtaagtatggtgtcaatataactttctttcctttataagtgtttttgtcttgatgtttaaagaatgttttttaaaatttctgattcttaaaaaatatttctcagtgttgactgtttagtatc

SEQ ID NO: 383747 - DNA, 201 bp, Homo sapiens
ttaaaatccttggttcatagcttcttgttttgaatatcttaagtatcatacttcttcagcttctggtataaagtgttcgtaagtatggtgtcaatataactttctttcctttataagtgtttttgtcttgatgtttaaagaatgttttttaaaatttctgattcttaaaaaatatttctcagtgttgactgtttagtatca

SEQ ID NO: 383748 - DNA, 201 bp, Homo sapiens
taaaatccttggttcatagcttcttgttttgaatatcttaagtatcatacttcttcagcttctggtataaagtgttcgtaagtatggtgtcaatataactttctttcctttataagtgtttttgtcttgatgtttaaagaatgttttttaaaatttctgattcttaaaaaatatttctcagtgttgactgtttagtatcag

SEQ ID NO: 383749 - DNA, 201 bp, Homo sapiens
aaaatccttggttcatagcttcttgttttgaatatcttaagtatcatacttcttcagcttctggtataaagtgttcgtaagtatggtgtcaatataactttctttcctttataagtgtttttgtcttgatgtttaaagaatgttttttaaaatttctgattcttaaaaaatatttctcagtgttgactgtttagtatcagt

SEQ ID NO: 383750 - DNA, 201 bp, Homo sapiens
gatggggttttgccatgtaaaccaggctggtctcaaactcctgacctcaagtgatccgcccacctcggcctcccaaagtgctgggatggcatgagccaccrtgctcagccatgttcttggaagtttctttaaatggaaccatgcaggatgtattttgtttgtgtctttcttctcttgctcaaattatatgattcatttatg

SEQ ID NO: 383751 - DNA, 201 bp, Homo sapiens
ggaaaaaaaaaagaccagtggttttggagggagggaagataatttacaaaaatttgaaagtgggcgatttgtttcttaatttgaatctattgcattacatkcatttttttctctaacctttaagttttttcttaagactaaatattttgatattgtattcacctcggacctgtgctgaaaattgataggtatgttgacctt

SEQ ID NO: 383752 - DNA, 201 bp, Homo sapiens
ctcttcccactagatatcaagttttatcatagagtctcaatagtgaagatggcatggtattggcatgggagtagacaggtggaacaaaggaacaaaagaactccttgttacagacttgtaagtctatggaactgggacagtactgtagaaaaagaaggaagctaaaataaatagtttatacatataaaaaaggatggattt

SEQ ID NO: 383753 - DNA, 201 bp, Homo sapiens
ggcttgatcccctcaaagcatttccaggaaaggtgagctgctggtacataataatggcttttctccagctgaccttttgttctctgcaaaatatcattctrgcattgatgtgataaaatatgctataaaaccttgccttagaattttttatcctgtgggtttggatttctgttttgtctaactaagtatgatgaatgacca

SEQ ID NO: 383754 - DNA, 201 bp, Homo sapiens
atagaaaggacatattttcatcttaacctttctgtctaatccaatgagccaaaataagtgctgtatttttacctattatctaagagcctgatttacaaaartaaatgtactttgggggatcaggtggcatcattttcttaactttaaaaatataggtcgggcgtagtggctcacgcctgtaatcccagcactttgggaggc

SEQ ID NO: 383755 - DNA, 201 bp, Homo sapiens
tcttcccactagatatcaagttttatcatagagtctcaatagtgaagatggcatggtattggcatgggagtagacaggtggaacaaaggaacaaaagaactccttgttacagacttgtaagtctatggaactgggacagtactgtagaaaaagaaggaagctaaaataaatagtttatacatataaaaaaggatggatttg

SEQ ID NO: 383756 - DNA, 201 bp, Homo sapiens
cttcccactagatatcaagttttatcatagagtctcaatagtgaagatggcatggtattggcatgggagtagacaggtggaacaaaggaacaaaagaactccttgttacagacttgtaagtctatggaactgggacagtactgtagaaaaagaaggaagctaaaataaatagtttatacatataaaaaaggatggatttgg

SEQ ID NO: 383757 - DNA, 201 bp, Homo sapiens
taaaaatacagtggtatacaccttcctggaagtgttttctttggccactattctgtagcttggatggatgaggggagaactgttctgatcactcctatttkctctgaggtcattgtagtgaaatgctttgtaccttgactcatagttagatttgcctctgtaatattgccagtattttttccacccttctgaaagcgagtc

SEQ ID NO: 383758 - DNA, 201 bp, Homo sapiens
tccagccccggtgacagagtgagaccctgtctcaaaaaaaagaaagaaaaaaaaagaagaaatgaccatttattctttggatctactctaccacactgagyctaaattactcagtttgcctttcaaagcctgtcatattgaggcctgtatatggtattttccattactcttgtttttcttttacataccctccactctagt

SEQ ID NO: 383759 - DNA, 201 bp, Homo sapiens
ttcaaacttgctaagtctgagaaattctgtttccttttcttactggatgttcattaagcatgatacttgctactgaatatatgtgtgtggttatatcagtratataaaaatatcattttctctctacttaaaaattttatggagaaacattcttttgcaaatttatacagcatattcatgaaattttattagaatgtgaaa

SEQ ID NO: 383760 - DNA, 201 bp, Homo sapiens
gatgcaaaaacagattacaaagaaaaaaaaacgaatttttaaacttcctactgtgtattcatctcctttgtttgtcttaatttttgtagccttcccagtcragtataagatggttgatattatctctatttcacagagaaggagatagggatagaaaggatatgttgacttgagttccatagatgataggtgcacttggat

SEQ ID NO: 383761 - DNA, 201 bp, Homo sapiens
agtatccactaaagctgagcaaacacatacccttgacccagcaattccgctcctactgcacacccaatggaaatgcataagtacgttcaccaaaagacacrtactgagctattcttagtcattattcataagagctcagaactggaaactactcaaatgcttatcatttgaatgaataagtaaaatggagaagtaaagtat

SEQ ID NO: 383762 - DNA, 201 bp, Homo sapiens
tcccagaactctgagatgccggcatctgcggggtctcctatccctctccctcccctctcaggaggtctcctgggcctctcctccaccctgcttcccttctsaaactgcagacagtcggttctccctgggtgatttctttctcttcagttcatttcagttaccatttacatcccctgactctcccaatctttgtcttcggcc

SEQ ID NO: 383763 - DNA, 201 bp, Homo sapiens
acagcaagtacaaagtccctaagttgggaaaggctctggatctagattcaagacactgtgaagtgcaaggtggccagagtgtcatgaatggagggagaggragggatgtgttcagacaggaaagagaggccagatcacagggaggattggaggtgctgtgtgctgggtggattcatgccttcctccaccccttcactaccc

SEQ ID NO: 383764 - DNA, 201 bp, Homo sapiens
aaaggctctggatctagattcaagacactgtgaagtgcaaggtggccagagtgtcatgaatggagggagagggagggatgtgttcagacaggaaagagagrccagatcacagggaggattggaggtgctgtgtgctgggtggattcatgccttcctccaccccttcactaccctcaagacgtctttctccctggaccctat

SEQ ID NO: 383765 - DNA, 201 bp, Homo sapiens
gacaccaggaagtaagtcctgagaaggagaatctttgggagccattttagaggccgcctgctgcacacctagtagatgactattgaacaacgaattaatawcctgctccccactgtttttctgaacctctgcttctctgaacttggagttctttggtcctttggtggccatacttgtccactttctttcctaagcaggtct

SEQ ID NO: 383766 - DNA, 201 bp, Homo sapiens
gagtgaaaagttggggaaataattttcttagaaaataaaggttttattttatgttaaaaataaattgcgaatattttcacttagacttcagaaatcgaggmtgtttagctttgaggtggtaggaaatgttgtttaggaataggaatgaaatgtttagcttcggtctgaatttcctctctccacctagggaccgtattctta

SEQ ID NO: 383767 - DNA, 201 bp, Homo sapiens
gggatagtgtgttctccttttacccctactcccccaataccctttgcaagatggatcggtttgcttttgaaaggagatccagttcttctgttgtgttgggrcagggagacagaagttggccacattattgcctcttctcaggccagcactgaccagcattcttactctttgtggaagtgctcaaatgttgcatttctctta

SEQ ID NO: 383768 - DNA, 201 bp, Homo sapiens
aatagtttatacatataaaaaaggatggatttggatccctacctcacatcataaaccaaaatcaattttagatgggttatgaatataaatttgaaaagcaraacctgaaaactcttagatgatgagataaaagaggctgggcactgtggctcacacctgtaatcccagcactttgggaggccgaggtgggcagatcacaaa

SEQ ID NO: 383769 - DNA, 201 bp, Homo sapiens
ggtgggcagatcacaaagtcaggagatcgagaccattctggctaacatggtgaaaccccgtgtttactaaaaatacaaaaaattaacggagcatggtggcrggcgcctgtagtcccagctactccggaggtggaggcaggagaatggtgtgaacccgggaggcgaagcttgcagtgagctgagatcacaccactgcactcc

SEQ ID NO: 383770 - DNA, 201 bp, Homo sapiens
caaataaaatagcgaagatctgagttttttggtagttatataatggggttagacaaatttaagtaggcattattaagtattgaggaaaaagttaattatcrtagcacgctaaagaccaaaaaggaactacagagatggttgttatttctattaaaagaatgaaactaatgcataaaacaaattcttagttacactggcttg

SEQ ID NO: 383771 - DNA, 201 bp, Homo sapiens
ggcagatcacaaagtcaggagatcgagaccattctggctaacatggtgaaaccccgtgtttactaaaaatacaaaaaattaacggagcatggtggcgggcrcctgtagtcccagctactccggaggtggaggcaggagaatggtgtgaacccgggaggcgaagcttgcagtgagctgagatcacaccactgcactccagcc

SEQ ID NO: 383772 - DNA, 201 bp, Homo sapiens
taaaaaataatctgggtaatggttatttcttggaggatggaggagtttggaggggaaaggggcacacagggttagatgtaaaatatttgtactattctagyggatggtttgttggtaggttcctagatgttcctagtaaattataacttattaatatgcaaaatgcttacatgctcttttatgtactgaatgatataagat

SEQ ID NO: 383773 - DNA, 201 bp, Homo sapiens
cttacagctcgataccatttttatgaagctcaaaaacaagcaaaacagaacaatatattgttgaaacattcacacaagagttgtaagaccagatttttttwaaaaattaaaagataaggctgggtgtggtggctcacgcctgtaatcccagcactttgggaggccgagatgggcggatcacctgaggtcgggagttcgaga

SEQ ID NO: 383774 - DNA, 201 bp, Homo sapiens
tatcaaactggcctcaactgatcctcttgccttgacttcccaagctctgggagtataggagtgagccacagtgcccaatcaatatctttattttaaagagwcatctgcaaagtccctttaccatgtgaggtaacatagtcacaggctcgggcgatttggatgcagacatctttgggggccattacccagacaccacatgct

SEQ ID NO: 383775 - DNA, 201 bp, Homo sapiens
gtgtggtggctcacgcctgtaatcccagcactttgggaggccgagatgggcggatcacctgaggtcgggagttcgagaccagcctgaccaacatggagaarccccatctctactaaaaatacaaaattagccgggtgtgatggcgcatgcctgtaatcccagctacttggcaggctgaggcaggagaatcacttgaacctg

SEQ ID NO: 383776 - DNA, 201 bp, Homo sapiens
agatgggcggatcacctgaggtcgggagttcgagaccagcctgaccaacatggagaagccccatctctactaaaaatacaaaattagccgggtgtgatggygcatgcctgtaatcccagctacttggcaggctgaggcaggagaatcacttgaacctgggaggtggaggttgcggtgagccgagattgcaccactgcactc

SEQ ID NO: 383777 - DNA, 201 bp, Homo sapiens
gaggtggaggttgcggtgagccgagattgcaccactgcactccagcctgagcaacaagaccagaactctgtcccaaaaaaaaaaaaaaaaaaaaaaaattraaaggtaaaaaataatctgggtaatggttatttcttggaggatggaggagtttggaggggaaaggggcacacagggttagatgtaaaatatttgtactat

SEQ ID NO: 383778 - DNA, 201 bp, Homo sapiens
ttcctgggcttaagcaatcctcccacctaagactcctgagaatttgggattataggtgggcaccactatgcctggctaacttttaaaaatttctttatagrgataggattctcactctgttacccaggctgatatcaaactggcctcaactgatcctcttgccttgacttcccaagctctgggagtataggagtgagccac

SEQ ID NO: 383779 - DNA, 201 bp, Homo sapiens
attaagtaatttcttattcttcatccctcagccctcccccacttctgagtctccaatgtctcttacaaagatgtccaatcttttgggttccctgggccacwttggaagaagaagaattatcttgggccccacataaaaaacactaacactaatgatagctgatgagctgaaaaaaaaatctcataatgtttgaagaaagtt

SEQ ID NO: 383780 - DNA, 201 bp, Homo sapiens
tgaaactgcagacagtcggttctccctgggtgatttctttctcttcagttcatttcagttaccatttacatcccctgactctcccaatctttgtcttcggyctcgatctttctttttaaagccaggcctatgtcgtcacctgcctgtcccacttctccacgtgggtgtctcacaaggctttatgctcagtgtatctcctct

SEQ ID NO: 383781 - DNA, 201 bp, Homo sapiens
gctttgaatgtggcccaacacaaattcctaaactttcttaaaacattaggagatcgtttttgtgattttaattttttaaaaaatttatttttttaattaatttttttttttttgctcgtcagctatcattagtattagtgtactttatgtgtggctgaagacaattattcttctactgtggcccaggaaagccaaaagatt

SEQ ID NO: 383782 - DNA, 201 bp, Homo sapiens
ttgatgcggtactataaggatgaaatgaatgaagaattgctttaaaaggataaaaaccaaacagcattgaaatacaaggtatttttataatggaaagaagrtatgtttattttacacagttttgaagaggttgaagatttcaaaaatccttaaattgggctgaaaccctttgatgctatgtagatagaatttcctctattt

SEQ ID NO: 383783 - DNA, 201 bp, Homo sapiens
aacattttgatctgcagaataaaggccatttgactacttaatatgttgataatagaaagctgtctaaaaggctaaattgaaatgttggcttttttcaagcrgttttagtactgttttaaaaaatttacttgtatattgcccttagcgatgttctctagttttggaagagttcaactttattttaaaattatagttttctgt

SEQ ID NO: 383784 - DNA, 201 bp, Homo sapiens
tgagtaaaagttctgagacatgttacacaaaggctctttcttttttccctttagcagctgtttagtgcagtaataacttggtgttttcacagaaatagggwtttctgtttttccactgtgtggagagctctctctcccactccacaggagtagagacaggagatacactgtgatatctctgattctagcatagtgcctggt

SEQ ID NO: 383785 - DNA, 201 bp, Homo sapiens
atgttctctagttttggaagagttcaactttattttaaaattatagttttctgtgacctcaagttccttctttttacatttttctaaattattgcttgtawtcattttcagtcacaagttataggactgctgctttctaccaacagagatgaaagttaatgaaaatgtggaactagacattttttttgcctgtaattattc

SEQ ID NO: 383786 - DNA, 201 bp, Homo sapiens
atagggatttctgtttttccactgtgtggagagctctctctcccactccacaggagtagagacaggagatacactgtgatatctctgattctagcatagtrcctggtggttgctcagtaaatgttctttggatacctgtaattgccatttagtaaaactaataggagtaaaatgtaatatattttatttaaatatatattt

SEQ ID NO: 383787 - DNA, 201 bp, Homo sapiens; identical to SEQ ID NO: 83652

SEQ ID NO: 383788 - DNA, 201 bp, Homo sapiens
tctcgggttcaagcgattctcctgtctcagcctcccgagtagctgggattacaggcacgctgcaccacacctggctaattttagtatttttggtagagacrgggtttcaccatgttgaccaggctggtctcgaactcctgacctcaggtgatcctcttgcctcggcctcccaaagtgctgggattacaggtgtgagccacc

SEQ ID NO: 383789 - DNA, 201 bp, Homo sapiens
aatgtataataaaagattttttaaaaactgacattttgaaatacttggctctgtttatattattaaacacagtttaaaaaaattacgtgttcagcagaaaygtcttttacctatgaattttatcttgccacctataattgttttaaattcacaaatgattccaatgcatttaattttttacaggtttattgaatatggaga

SEQ ID NO: 383790 - DNA, 201 bp, Homo sapiens
tttgccacttgcagtgatcacagttagtgtctgcctttcctgtgtccgtatctggtggtcacagttactgtctgcctttcctgtgtccatccaggcttccrttagccctttgttcaggtcctcttctctttttacttggactgtttttgaagaaatgtcaatagagatggcatttggttgcgtgacctcagaaattctctt

SEQ ID NO: 383791 - DNA, 201 bp, Homo sapiens
ttgggggccattacccagacaccacatgctctattattgttgctgcagctgggaacggtgggatctctgtgttcatttggagccataggtattagtgaggmgaagagaatcaccagattggccaggggcattcaaaatgccattattgtgttaagccattcattaactcataattcccccatgtttctgttttgatttaga

SEQ ID NO: 383792 - DNA, 201 bp, Homo sapiens
cttatggatatctactgaaatctatagtaattattatgcttaatggggaaaaatgaaaagcattcctttaaaaataagaaacaaataaaaagtgctttctrtcgccacttaaaaaaatcttggaatagagatcctagtcaccgttgcaagataagggagagtggggataaggattagaaagaaagaaacaaaactgtcatt

SEQ ID NO: 383793 - DNA, 201 bp, Homo sapiens
cagacaccacatgctctattattgttgctgcagctgggaacggtgggatctctgtgttcatttggagccataggtattagtgaggagaagagaatcaccakattggccaggggcattcaaaatgccattattgtgttaagccattcattaactcataattcccccatgtttctgttttgatttagatttaggggatacaaa

SEQ ID NO: 383794 - DNA, 201 bp, Homo sapiens
cccaagggtctcctattctttaatgcctttttctttttctttcttttttttttttttttttttggagacagggtctggctctgttgcccaggctggagtgyggtggcacaatctgagctcactgcaacctccacttcctgggctcaatcaatcaatcagtctgcccacttcagcctcccgagtagctgggactacaggtgt

SEQ ID NO: 383795 - DNA, 201 bp, Homo sapiens
aaatcttggaatagagatcctagtcaccgttgcaagataagggagagtggggataaggattagaaagaaagaaacaaaactgtcattcacaggtgataggwttatctctgtatggaaaacccaacgggaatctacatactagttaatagagtggtcagtgctgggtggctgactgcaaggtctgtatatgaaagtcagctg

SEQ ID NO: 383796 - DNA, 201 bp, Homo sapiens
accgttgcaagataagggagagtggggataaggattagaaagaaagaaacaaaactgtcattcacaggtgataggattatctctgtatggaaaacccaacrggaatctacatactagttaatagagtggtcagtgctgggtggctgactgcaaggtctgtatatgaaagtcagctgtgtttctaaccccagcaaccaacag

SEQ ID NO: 383797 - DNA, 201 bp, Homo sapiens
agaagagaatcaccagattggccaggggcattcaaaatgccattattgtgttaagccattcattaactcataattcccccatgtttctgttttgatttagrtttaggggatacaaatgcagttttattacatggatatatgtatagtggtgaagtctgggcttttagtgtaaccatcacccaaacagcaacatacatttta

SEQ ID NO: 383798 - DNA, 201 bp, Homo sapiens
tatgtggggagtgaaaaataaatgtatgtagaaatttggggttgtttcaaaatgggacagattatatatctctggattggagaattcaagtttccccaccmccccccaccccaactaactcagattttccaaagaaatgtttaatgccctggctactttctctagaacattattctgggaactaaaggaatttgatctgta

SEQ ID NO: 383799 - DNA, 201 bp, Homo sapiens
atggtattaaataaaagatgaggttaaaaacatgtggcgggcgcctgtagtcccagctactcgggaggctgaggcaggagaatggcatgaacctgggaggyggagcttgcagtgagctgagatcgtgccactgcactccagcctgggcgacagagcgagactccgtctcaaaaaaaaaaaaacaaaaaaacaaaaaaaaaa

SEQ ID NO: 383800 - DNA, 201 bp, Homo sapiens
aaggtatgtaggttgttagttgaattgacagttaaaatatgaaaaatgtaactctagtgtgttaatttgaatatttaatttctagtggattagggaagttacttactttttaaagatttcctatttcattttaaatacttaattcattggactgaaaaggaagttgaaatatatcttcaaagtaatagaactttaaaaaga

SEQ ID NO: 383801 - DNA, 201 bp, Homo sapiens
aggtatgtaggttgttagttgaattgacagttaaaatatgaaaaatgtaactctagtgtgttaatttgaatatttaatttctagtggattagggaagttacttactttttaaagatttcctatttcattttaaatacttaattcattggactgaaaaggaagttgaaatatatcttcaaagtaatagaactttaaaaagac

SEQ ID NO: 383802 - DNA, 201 bp, Homo sapiens
ttccatctgctgaggcacaaatattttaggctatcagaagcaatatgtgttttaatgcaggattgtgggattttattaaaacatcgaaatgcttttttcgygtttggcgcagtgattgtgtttttatagcacatgatcgactgccctggctccattagccaccacccagcgcctctagttctgaagctgggctgggttact

SEQ ID NO: 383803 - DNA, 201 bp, Homo sapiens
ctagaactgaagggcattttgcaggaaatgtactgaatgaaagccccattgcaactgccatgtctgcacctgtcatcctggaaactccattatgaacattytgaactgagaacttcagtggatgaggccattcaattccctatcaaaccatacatcttccagcagatccccagcccacagcattttcctcatcccccaggg

SEQ ID NO: 383804 - DNA, 201 bp, Homo sapiens
catcttttaccaagaatcaaaaaccattctgatctttaaagaaatgcagatgaggccgggtatcgtggctcacgcctgtaatcccagcactttgggaagcygaggagggtagatcacgaggtcaggagttcgagaccagcctgtccaacatggtgaaaacccatctctactaaaaatacaaaaattagttgggcatggtgg

SEQ ID NO: 383805 - DNA, 201 bp, Homo sapiens
tggtgaaaccccatctctacaaaaaatatggaaattagccaggcatgatggttggacacctgtagtcccagctacttgggaggcggaggtgggaagatcayaagaccccaggagactgagagtgtagtgagctgagatcacactactacactccagcctggtaggcagaggtgggaagatcacaagaccccaggagactga

SEQ ID NO: 383806 - DNA, 201 bp, Homo sapiens
tcaagaacagtgaagatatcaggtttttcttttagaggtaaacagtgaagactggatgggacatgagattcccaggtcagagatgatggtggcaaagtgtwggaagagccactgattttagtttgagagagggaggctgatgttcagtgtgctctcatctgcctgtgggctcttcattgaaatatgaaactctcctgttgt

SEQ ID NO: 383807 - DNA, 201 bp, Homo sapiens
acctcatttctagatgtagtttctattcttgtggattcttttttcctattgagatctctttacttattttacattttattttttttagttatgtttctgtrtgtttttgtaatctggtttaagttcattttagaacaagatatggcacaaaaacttgcttaaatactatatttctttctttcttttttttttttttaaatt

SEQ ID NO: 383808 - DNA, 201 bp, Homo sapiens
aaactcctgggctcaagcgatctgccctccttccttggcttcccaaagtgctgggattataggcatgagccaccgtggctggctctatttcttaatttcayatgtgtcacattatgaaagcatagaatttccattagagaaaagaacctgaggcttgatgatttattccatcccctggagtccagttaaagttaactgact

SEQ ID NO: 383809 - DNA, 201 bp, Homo sapiens
gaaaatagaaagcacatctacaaaagagtgaaaaaaacaatttaagagaaaacgggtagaaaacatcagaaacatgtaggggccagtagatatagaaaatrtaatctttttttagacagagtctcactctgttgcccaggctggagtgcagtggtgtgatctaggttcactgcagcctccgcctactgagttcaagcgatt

SEQ ID NO: 383810 - DNA, 201 bp, Homo sapiens
tttcttaaatctgtgacaattggattataacagaacagacttaatggagaatattcattttattctttttgtcatgttagatcacattttctcttcaggcraattgtatttcctgtgtctctatataaaaaatagagtaaaggccaggtgcggtggctgatgcctgtaatcccagcactctgggaggccgaggcaggcaga

SEQ ID NO: 383811 - DNA, 201 bp, Homo sapiens
acagagtctcactctgttgcccaggctggagtgcagtggtgtgatctaggttcactgcagcctccgcctactgagttcaagcgatttgagcctcagcctcyggagtagctaggactacaagcatgcgccaccatgcccgactaaattttgtatttttagcagaaacggggtttcaccatgttgcccaggctggtctcaaac

SEQ ID NO: 383812 - DNA, 201 bp, Homo sapiens
ctcagtaaatgttctttggatacctgtaattgccatttagtaaaactaataggagtaaaatgtaatatattttatttaaatatatatttaggccaggcgcrgtggctcaagtctgtaatcccagtactttgggaggctgaagtgggcagatcatttgaggtcaggagttgaagaccagcctggtgaacatggtgaaaccct

SEQ ID NO: 383813 - DNA, 201 bp, Homo sapiens
taacaccattttagaaaacatttgatgttaacgtaaaaatatttatatcctgtgacccagcaattcttctcatgagaatttatctgaggaaaccatttccwtatatatataccagcaaacttttacaagaatattttttatcagccaagtacttatttattttttaaattttagatcagtaggtacgtgtgcaggtttgtt

SEQ ID NO: 383814 - DNA, 201 bp, Homo sapiens
ggaaaccatttccatatatatataccagcaaacttttacaagaatattttttatcagccaagtacttatttattttttaaattttagatcagtaggtacgygtgcaggtttgttacatggatatggtgtgtgatgttgaggcttggacttctgttgagccggtcacccaaatggtgaacatagtatccaataggccttctc

SEQ ID NO: 383815 - DNA, 201 bp, Homo sapiens
accatttccatatatatataccagcaaacttttacaagaatattttttatcagccaagtacttatttattttttaaattttagatcagtaggtacgtgtgyaggtttgttacatggatatggtgtgtgatgttgaggcttggacttctgttgagccggtcacccaaatggtgaacatagtatccaataggccttctcaaac

SEQ ID NO: 383816 - DNA, 201 bp, Homo sapiens
tgccatgttggccaggctggtctcgaactcctgagctcaagtaatccgccctccttggcctcctaaagtgctgggattacaggcatgagctaccatgcccrgccccactagcagagttcataatagcagaaaagctatatcaattgggatatctattgatagcaaaataggtaaataatttgtggcttttctgcagaacaa

SEQ ID NO: 383817 - DNA, 201 bp, Homo sapiens
tgaggcaggagaatcacttgaacctgggagatggaggtttcagtgagctaagatcacgccgcttcactctagcctgggtgaaagagtgaaactcagtctcwcacacacacacacacacacacacacacacacacacacagcacacgattgaggtcctaatgaaagagtgtgggatgggtggaaggaagcacgggggatggg

SEQ ID NO: 383818 - DNA, 201 bp, Homo sapiens
tcttacagctcgataccatttttatgaagctcaaaaacaagcaaaacagaacaatatattgttgaaacattcacacaagagttgtaagaccagattttttwaaaaaattaaaagataaggctgggtgtggtggctcacgcctgtaatcccagcactttgggaggccgagatgggcggatcacctgaggtcgggagttcgag

SEQ ID NO: 383819 - DNA, 201 bp, Homo sapiens
tgtatagtggtgaagtctgggcttttagtgtaaccatcacccaaacagcaacatacattttacccattaagtaatttcttattcttcatccctcagccctsccccacttctgagtctccaatgtctcttacaaagatgtccaatcttttgggttccctgggccactttggaagaagaagaattatcttgggccccacataa

SEQ ID NO: 383820 - DNA, 201 bp, Homo sapiens
acacatacagacacaaacatgcacccataaaggaaagaatattttaaaatccataagtgagattagaaggaacatttattaatatacatgatttatgatabccttaataagatgtgataatttattatgttcacttttactttttgcagagtgacttgataaagacttaaaaggaaacagaaatattcttttttgataata

SEQ ID NO: 383821 - DNA, 201 bp, Homo sapiens
ttggctggctgcattacctttcaaccctttctgtatatataaatattaaatgttttttcccagtatattctgtgggatcatagaatgcactacttaatgtsatttttttttcttttaatatttttggcattttgtagccttctctttgtgtcaacaaaattacctattttaacttacagacgaacctttgttatttctgct

SEQ ID NO: 383822 - DNA, 201 bp, Homo sapiens
ggacactaaattctaaattttacttttattctaattggcctgacaggagtcagtgcttatcaaaatgatttttggaagatgtcatgcccatgttttttcakgtttgatgtgatgaacttatcatggctgcctttaaaatatttgaggctaaagtcatctggtccatacagcagagaatgaggcttctttcttttttttttt

SEQ ID NO: 383823 - DNA, 201 bp, Homo sapiens
gatgtccaatcttttgggttccctgggccactttggaagaagaagaattatcttgggccccacataaaaaacactaacactaatgatagctgatgagctgaaaaaaaaatctcataatgtttgaagaaagtttacaaatttgtgttgggctgcacgtggcccatgggccacaggttggacactcttggtctattattccac

SEQ ID NO: 383824 - DNA, 201 bp, Homo sapiens
tggcgtgcagtggcacaatctcagcttactgtaacctccacctcccaagtttaagcgattctcctgcctcagcctcctaactagctgggactacaggtgcrcgccaccacacctggctaattcttgtgttttttgacaattcggggttttgacatgttggccaggctggtcttgaactcctggcctcaagtgatccactca

SEQ ID NO: 383825 - DNA, 201 bp, Homo sapiens
tttaaattcacaaatgattccaatgcatttaattttttacaggtttattgaatatggagaatataaaaacaactactacggcacaagtatagactcagttyggtctgtccttgctaaaaacaaagtttgtttgttggatgttcagcctcatgtaagtaaacaatgagctattcaatacccttctgacccatgtcatctaca

SEQ ID NO: 383826 - DNA, 201 bp, Homo sapiens
gcctgacaggagtcagtgcttatcaaaatgatttttggaagatgtcatgcccatgttttttcaggtttgatgtgatgaacttatcatggctgcctttaaamtatttgaggctaaagtcatctggtccatacagcagagaatgaggcttctttctttttttttttttttccttttcttagagacaaggtctcactctatagc

SEQ ID NO: 383827 - DNA, 201 bp, Homo sapiens
tatcattattcttgcaaatgtattttcccagaagaaatttggaattctcttttatgtcataaaaaaaaaccattgggatgcaattaaattttccagagacmgtggcaatttatttatttagatcaaattgttccttatataaccctggactatttcctgctaagtctattcccaggcctgatgtgtacgcgtgtgtgccgg

SEQ ID NO: 383828 - DNA, 201 bp, Homo sapiens
gggaacggtgggatctctgtgttcatttggagccataggtattagtgaggagaagagaatcaccagattggccaggggcattcaaaatgccattattgtgktaagccattcattaactcataattcccccatgtttctgttttgatttagatttaggggatacaaatgcagttttattacatggatatatgtatagtggtg

SEQ ID NO: 383829 - DNA, 201 bp, Homo sapiens
tggccaggggcattcaaaatgccattattgtgttaagccattcattaactcataattcccccatgtttctgttttgatttagatttaggggatacaaatgyagttttattacatggatatatgtatagtggtgaagtctgggcttttagtgtaaccatcacccaaacagcaacatacattttacccattaagtaatttctt

SEQ ID NO: 383830 - DNA, 201 bp, Homo sapiens
caaaatgattacaagtttttgtttcttactgaccaaggggtatatttgattattcatgcctgcaaagcttcttgtataatagcagctttcatgttctattraaaaaagaattcatagcaaaaaatgtttttcataggaagaaaaacattttagataactctgccaggaataagaagggaatggaagcagtgtattatataa

SEQ ID NO: 383831 - DNA, 201 bp, Homo sapiens
tttataccaccttaccgaagtatctcatttaattttcaatgttattgacaagattttttaaaaatcttttcctgtttagtaattatagataatttcccccsttaccttattgccttgatatgacttgcaggaaaaaatgctcaaaacttgtagtaaaaacaggatatgcttttgtttttctgtacttttatggggatactt

SEQ ID NO: 383832 - DNA, 201 bp, Homo sapiens
tcatctctagaatatggcattataatttaggcagtcatggaaaatttggtagattttttaaaaggcaataaaataagaagatttgttgtaatttttagctwccaaacattcacttaagagaaattactcactgcctgagcatgcaagatgaatgaagcttcattaaagcaagctgaaggaaaaagttaagctccttctgga

SEQ ID NO: 383833 - DNA, 201 bp, Homo sapiens
atatatgtatagtggtgaagtctgggcttttagtgtaaccatcacccaaacagcaacatacattttacccattaagtaatttcttattcttcatccctcakccctcccccacttctgagtctccaatgtctcttacaaagatgtccaatcttttgggttccctgggccactttggaagaagaagaattatcttgggcccca

SEQ ID NO: 383834 - DNA, 201 bp, Homo sapiens
gcacactttttgtgtaaactctgcttgatttggagtggagggactggataatattcactgaagtgtagtttggaactttaggcctttggttaataatcatkaaatgattggatgtgtgagtgtaataatgtatggctgaaggagacaggtaatttctagagagaggacaacgacttccatgattccttcacatcaaattgg

SEQ ID NO: 383835 - DNA, 201 bp, Homo sapiens
ttttcttcctggttttaagcattttggtggtgttttatgttttctttgtgcttgggtacattgagcttcttgaacatgtgggtttatacttttttcatcayatttggactattttctgccatatttctttaaatagtttccagcaactgccccctttctttggagatgccagttaacatgtatattaggccatttaaagta

SEQ ID NO: 383836 - DNA, 201 bp, Homo sapiens
tttggttgcgtgacctcagaaattctcttcttgaatataggtgataccgattaatctttgatgttgatctttaggtcttgattgtatcatatgtatacacracatggtgtagtcaaagggagacgagaatctcctcttactaggaacaccagtggaagcgagcaggggaattggaaataaatactgtttattaggtgtttt

SEQ ID NO: 383837 - DNA, 201 bp, Homo sapiens
atgcatgccatggctaaggactttgctcaggactcaagggagacctcctacagatctcccaaattctgtatctgccaccctttcctcttctataggcttayctgagaatctagtcagttgacgtctctggattcccagctctgttttcccaactcaaggagacgactgagttttgcctgtgtttctttttccccatcacag

SEQ ID NO: 383838 - DNA, 201 bp, Homo sapiens
tttcaggtggattcctgttaacctcatcttggtcctcatctttattcttgaaagatacttttgctgggtacacaattctggactggctattattttttctragcactttgaaggtatttgaactgtcttctggtgtctactgctgctgttaatcagctgtcaatcagttttcttctttcctttctcatgatctatcttttt

SEQ ID NO: 383839 - DNA, 201 bp, Homo sapiens
cttataagctagacacttaattctgtgaacctgacagatacttagaacataaagttgactccaggggttccagtgcagtgagtgcttgtgagtctgatgarttacaaggcctagtgttcaatttcctgcagattcttctgagcaacaggtaaacccatcagttgtgattggtggctctggcatatggaaacacaatttcca

SEQ ID NO: 383840 - DNA, 201 bp, Homo sapiens
ttcacccctgtaatcttagcactttgggaggctgaggtggaacaattacttgagcccaggagttcaggaacagcctgggcaacatagcaagaccccatctytatataaaaaaattaaaaaaaagagaaaatagaggaaaggtgatatttgtgggataatgactacatgctttctagaactggagaagacccatgacaccac

SEQ ID NO: 383841 - DNA, 201 bp, Homo sapiens
ggatgctcaatctgtatataattaatttgatctattgctgggttcaacttattaatattttgttgagtttttttgcatctctgtttgtaagtacggttagkctgtaattctccttccttgtcatgtctttatctggttttgatattaagataatgctggcctcgtagaatgaggtaggaagtatactctgcttgctatttt

SEQ ID NO: 383842 - DNA, 201 bp, Homo sapiens
caacttattaatattttgttgagtttttttgcatctctgtttgtaagtacggttagtctgtaattctccttccttgtcatgtctttatctggttttgatawtaagataatgctggcctcgtagaatgaggtaggaagtatactctgcttgctattttccttttctttctggaagagattgcagagaattggtataatttct

SEQ ID NO: 383843 - DNA, 201 bp, Homo sapiens
ctacttggcatttcagtaatttcccacttgccagctcatcttttaccaagaatcaaaaaccattctgatctttaaagaaatgcagatgaggccgggtatcrtggctcacgcctgtaatcccagcactttgggaagccgaggagggtagatcacgaggtcaggagttcgagaccagcctgtccaacatggtgaaaacccatc

SEQ ID NO: 383844 - DNA, 201 bp, Homo sapiens
atctttctctacttttttcttttcgtgtgtctgtatctttatgttcaatgtgagttttttatagacaacatatagttgggagttgggtctttctttttatscattctgacagtctctgttttttaattggtatatttagatcattcacatttgaagtgtctgttgatatagttggttaatatttaccatatttacaactga

SEQ ID NO: 383845 - DNA, 201 bp, Homo sapiens
acctccattattctactcttcactaggctgtgggcccccctgccggctgtcccctcttttcctatttccgtaagacaatttccactctgtagtcctatgtrtgtatgtatatatgaaatttatatttcatatataaatttcacacacacacattctgggaagtggcagatagaagatagttgatggttacatttcacccat

SEQ ID NO: 383846 - DNA, 201 bp, Homo sapiens
ttagaacatgggacttaacacttctttttcctcagctttggggactagtcatcagttttggggcaagaagaaaatcattgcatttatcatcctcttccacrgtgatcccagggtgttaccaactgtgcaggattagaggatttatatgtccacttatcactaactaataataacgttttaacatctattttatgtgaggca

SEQ ID NO: 383847 - DNA, 201 bp, Homo sapiens
tctctttgcctttgccattttgtatttctgctgtgatgtattaagcataggtttctttttatctttccttgttcctaaaggatatatcaggcttcgtgaaygtttagagtctttctctcatcacttctcaaaaatttgcagccattatcttctcaggtattttatcatcttgatgttgtttatttcttccccattaaaact

SEQ ID NO: 383848 - DNA, 201 bp, Homo sapiens
taatggaagcttctatcgggtgactacctgccttctctacctacctgtgtttggagtcccctgttgcagccctccacttagctaccaagtagttctcaccragaaaagcctaatagtggatagttagctatacagtgtgaagaggtgctatttcagttctggaacaccttcattttacctcatggtgagctcaccattaaa

SEQ ID NO: 383849 - DNA, 201 bp, Homo sapiens
aaaaaagtttttaaaaaatagaatatatattggttattgagaatgtcagtaagaggagaggattcaaggatggcttgagtaatttatgaatagtggtgttkcttattaggggtcaagtttgttgaaagtccaaaactcactcatctaaaatagtgaattgtgacatgtcaaagttctggtgttcttttcatctttggtgta

SEQ ID NO: 383850 - DNA, 201 bp, Homo sapiens
ttatgctcagtgtatctcctctacatttgatctctacttcttcagacttctgtgtttcggtaaatggcagcatcgttcctctggtttttatagaaatatartactcattctttttttttttttttttgagatggagctctggagttttatcacccaggctggagtgcagtggcgcggcctcggctcactgcgatctccgcc

SEQ ID NO: 383851 - DNA, 201 bp, Homo sapiens
gatctaatgtcaaggagtcagccttaaagatctggagacagaaggaacagcaagtacaaagtccctaagttgggaaaggctctggatctagattcaagacrctgtgaagtgcaaggtggccagagtgtcatgaatggagggagagggagggatgtgttcagacaggaaagagaggccagatcacagggaggattggaggtg

SEQ ID NO: 383852 - DNA, 201 bp, Homo sapiens
tcagatagacttttcatagtatttttatctttgtatttttttagaaatatttcagagtctcctgacctgtgggtggcatttttctctgctattaccatgcrttaaaaaaaatttgtactgtatattatttggttatttcagtgggattctgagtagggtgtgtgatcaattcgtgggctcagttcaccatctgaaactgca

SEQ ID NO: 383853 - DNA, 201 bp, Homo sapiens
gagacgagaatctcctcttactaggaacaccagtggaagcgagcaggggaattggaaataaatactgtttattaggtgttttctattttccagaacttgcrtgaaactcttttaatggtgactttcattctcacagtaaccctagttaatagatacgattattatcctgttttaaatatgagaaaactaaggcatagaaag

SEQ ID NO: 383854 - DNA, 201 bp, Homo sapiens
taagtattctgtgatactatatgttgagatgtcttaattctcgataattatttaaacaaagtgaatttagctcagtatgattggtttttgttttaaattawatgttcatagtttctcaaatcaaatctaactctttttatagcttacagtctttaaagtttattaccttgttatgatacatctttaaaatttccaagatgt

SEQ ID NO: 383855 - DNA, 201 bp, Homo sapiens
actgcttaagtccattgtgtttgcaaagaaagggaaacctgaggaaccccaaagtcatctgcactgagcagtgaccagtttgtttgttttgttttgttttktttttttaagtttctgaccactagcacaatatcctcctaacaggttttctgttcctcgtcttacctgctacctcccttcctccccaaatctgtccaagga

SEQ ID NO: 383856 - DNA, 201 bp, Homo sapiens
gctcagtatgattggtttttgttttaaattaaatgttcatagtttctcaaatcaaatctaactctttttatagcttacagtctttaaagtttattaccttkttatgatacatctttaaaatttccaagatgttaagtaaaaatgtggctctgatcattctggtaatatcataagtgtcaaaattctttccctgaagcttta

SEQ ID NO: 383857 - DNA, 201 bp, Homo sapiens
aagaattatgcatctgtgtagagatgttgcaaacaccctggctggaattgaaggcaaagtaccagttgctcccagcgattcctatgggaaggctttatttstttacatttttacttctgactgtgtagcttgagcaaaggtacagcctccaagtttttaggctttatgatatacacacacagaatagctacttttctaggg

SEQ ID NO: 383858 - DNA, 201 bp, Homo sapiens
tagacatcacaaaacttaacatgcttattgaggggaaagacaaagacttagttttcaagtgggttctgtttgattaagactgttttttccatttgactccrtgttgtaaacactgggccatagtaatagatgaattaggcacacatacgtgtcacctatgggtttatattagcatgtacaaacatattacatgtgtgtaat

SEQ ID NO: 383859 - DNA, 201 bp, Homo sapiens
tgatgctatgtagatagaatttcctctatttagtcatgagaatagacattctaagacaaatggcatgatgtctatttttcctgcctcatttcttttttttygtttttgtagttgttttctcttttttcagatgaatgtccttatttcctccttttctaacacctagtacacacatttacccacaaatgctttttgtttttg

SEQ ID NO: 383860 - DNA, 201 bp, Homo sapiens
gcgccaccatgcccgactaaattttgtatttttagcagaaacggggtttcaccatgttgcccaggctggtctcaaacttacaacctcaagtgatctgcccrccttggcctcccaaagtgctgggattataggcgtgagctgccatgcctggcctagaaaatataacctaaccagtaagcatgagttgcaaattagtgccac

SEQ ID NO: 383861 - DNA, 201 bp, Homo sapiens
tatgtttattatagcagggaagcagacatttaaacaagtaactgcagtcaggttagatgagttttgtgatagggtaagttaagtattctgtgatactataygttgagatgtcttaattctcgataattatttaaacaaagtgaatttagctcagtatgattggtttttgttttaaattaaatgttcatagtttctcaaatc

SEQ ID NO: 383862 - DNA, 201 bp, Homo sapiens
aatgtttgtgggaggaggaactttggctcttatactccagatcattgaagggctctaagcagagccgtaacatgaactgccttctgtgtgtaagggtcacrctggctgatctgttgggaatggattgtaagggagaaacagcagaagcagggagctcctgtagtcattcaggcagatgatgatggtggctggaagcagata

SEQ ID NO: 383863 - DNA, 201 bp, Homo sapiens
tgaggggaaagacaaagacttagttttcaagtgggttctgtttgattaagactgttttttccatttgactccatgttgtaaacactgggccatagtaataratgaattaggcacacatacgtgtcacctatgggtttatattagcatgtacaaacatattacatgtgtgtaatatgtcataaacatataactttaggatat

SEQ ID NO: 383864 - DNA, 201 bp, Homo sapiens
tgatctgttttcttttatgctgacctctccttaaacattggaaagtaatagccttgagcaagttagattctcagttgtcacacacccaatcccacaatgcycttactaaatgttctttaagtcaatgtaatctccgttgcagctggccgaagagcttcagaacaagccattaaacagtgagatcagagagctgttgaaact

SEQ ID NO: 383865 - DNA, 201 bp, Homo sapiens
gctaaacaggctatgattaatgatgtgagggtaattgatttgtagtggtttaggaagtttattaaatttttgttctgaaagaacaaggatcagattagagsagaaaagttccttgatgttaaatacaaagtgtgtaaaaacgttaaggagatttttagccacagaacgttctgaagatttcttcatttggtcttagactgc

SEQ ID NO: 383866 - DNA, 201 bp, Homo sapiens
cttaataagatgtgataatttattatgttcacttttactttttgcagagtgacttgataaagacttaaaaggaaacagaaatattcttttttgataatacrtaattgtatttttcattcaaattataaagaaagtagaagcccctatcgtcattgctttattagtgcggatgcatatcttttcctatgcttatatgttttt

SEQ ID NO: 383867 - DNA, 201 bp, Homo sapiens
tgtcatattggcattgatattaacttcttgattgtctataatacattttgataacttcaatatcctgacttatttaaatttgtgaggttgtttgggtttcrttttttatatttacagatgttaatttctagtttgacccatttttatcacaatatacaacctgttaacctttttaatataaaatttgtttaaaatgtttgc

SEQ ID NO: 383868 - DNA, 201 bp, Homo sapiens
atgttaatttctagtttgacccatttttatcacaatatacaacctgttaacctttttaatataaaatttgtttaaaatgtttgcttgctagtttggccaayttttgcaaatatatgaaggaaaagaatagctatatggaaaggatttttaaaaaatttatatatggtcctttacaagtttatagacaaggttaaatataca

SEQ ID NO: 383869 - DNA, 201 bp, Homo sapiens
tgtattttgtcctggggactcaatgccatgcaggttggaaagcattggttaactcttaggggtctgatctgtggttgcggattattgcagacttttaggasggattgcggtagggggtggggaatttaggaaagtggtttctagtatggggatttaaccttgcccatgtgaataatagcacactaatatagacacagtttc

SEQ ID NO: 383870 - DNA, 201 bp, Homo sapiens
aaactgtcccatttgaaaaattacaggtggtaacgtagtagtattgattttctttgagttaacagaaagccaagtcccacttccccctcatttacatgtgygattttttggaggctgttagtatgggtggtgagttatcttgactttgcttgagggccttttatgttaatggccatgtttgtagctaaaatgatcatgtat

SEQ ID NO: 383871 - DNA, 201 bp, Homo sapiens
gcatggtgccaacatctgctcttgatgagggtctcaggacgcttccacttacagtggaaggcaaagcagagctgatacatagaaatgcctcatgttactgyagtattgtgcacttagaacatttattcctttatctgtagattcttttgtttgttaataatgccaattttatttcttccatgacaattctttatccatcta

SEQ ID NO: 383872 - DNA, 201 bp, Homo sapiens
aaaggcctaactagattaattgaatgtgaatacttcctgcagtgatgaaataggcaaaatcaataatgttggtggcatttaggggcattgatggagggatsttgttctatatagagactttgtttctaggggaagcagagatagtcattaataaatcaaaaccacttctaaccatcaaattgccacattaaaggcaaatta

SEQ ID NO: 383873 - DNA, 201 bp, Homo sapiens
ggctagagaaaatctactaagtaagaattggatgatgagagagattttattaaaattgtattctttactcatttcagaataatacagtgtgccagataccyggtacatccattaacacctccccctacatcaccagaaactgtaatggctttaaacagcaagcatttattctcatgatactgtggtcagcagtgtggttct

SEQ ID NO: 383874 - DNA, 201 bp, Homo sapiens
tatctgtggaggtggtgagaaaatgtcccattctggatatattttgatggtagaactgaggagatttccctacaaagtggcaaaccaaggatgggtgtatsgtttttggatttagtaactatgaagatggagttactatttactgagatgggaaagactgcagaggagtaggttgggctgaggaaaagttcagggattcca

SEQ ID NO: 383875 - DNA, 201 bp, Homo sapiens
actcctgggttcaagatatcctcccatatcaacctttgttttaattagctggggacctttcctggctaattaatttttttttttaagagacagggtcttgytgtgttgctcaggctggtcctgaattcctgggttcaagcaatcccttcacctcagcctaccaagtagtgaggattataggctcggaccactatgcctggc

SEQ ID NO: 383876 - DNA, 201 bp, Homo sapiens
tagtacccagaatcttctccccacccccagtatttaaaatatggaggtagataggtgtatgcatgcatgtgctaattctagatctggtaccattaattaayatgctgaagagtcaaactactgggcagtaattttcagtacttttttgtactcataatagaagccaataaaaggattacagctttagtttacttaatgtaa

SEQ ID NO: 383877 - DNA, 201 bp, Homo sapiens
ggtgtcgaagtttttaaaaaatgctttctttgcatacgttgagatgattgttttgtctgccattattctcttaatgctgtgaattctactgcttttctaaygttaaagccaacctttggtgtgtgtgtgtgtgtgtgtgtgtgtgtgtgtgtgtgtgtgtgtgtgtgtttactattatggaaatgattgaatttaagctac

SEQ ID NO: 383878 - DNA, 201 bp, Homo sapiens
atggaggtagataggtgtatgcatgcatgtgctaattctagatctggtaccattaattaacatgctgaagagtcaaactactgggcagtaattttcagtasttttttgtactcataatagaagccaataaaaggattacagctttagtttacttaatgtaatgtaatgcagatgaccatggtggagtctgtacatcattga

SEQ ID NO: 383879 - DNA, 201 bp, Homo sapiens
gtgtcgaagtttttaaaaaatgctttctttgcatacgttgagatgattgttttgtctgccattattctcttaatgctgtgaattctactgcttttctaatrttaaagccaacctttggtgtgtgtgtgtgtgtgtgtgtgtgtgtgtgtgtgtgtgtgtgtgtgtgtttactattatggaaatgattgaatttaagctact

SEQ ID NO: 383880 - DNA, 201 bp, Homo sapiens
ggtgtatgcatgcatgtgctaattctagatctggtaccattaattaacatgctgaagagtcaaactactgggcagtaattttcagtacttttttgtactcrtaatagaagccaataaaaggattacagctttagtttacttaatgtaatgtaatgcagatgaccatggtggagtctgtacatcattgacaggtataaaaca

SEQ ID NO: 383881 - DNA, 201 bp, Homo sapiens
tacatgaagcagatgaaacaggaataatagtagggtttttgttgctgccttttaaaattacttccattcagtaaacgtttatcaagcaactgttctgtagsaagccttgcacaactgacatcacccaactatctatgcaacatggtccccatctttgacactcgtgcaacatcaccttaagagatctgattaccttctctt

SEQ ID NO: 383882 - DNA, 201 bp, Homo sapiens
gcctcccaggctcaaaccatcctcccacctcagcctcgcaagtagcttggactacaggcctgcaccaccacggccagctaatttttttgtatttttggtasagatgaggtttcaccatgttgcccaggctggtctcaaactcctgagctctaatgatccacctgtcttggtctcccaaagtgctgagattataggcatgag

SEQ ID NO: 383883 - DNA, 201 bp, Homo sapiens
atcccctggagtccagttaaagttaactgacttgctgaagatcaactaattgttgactgggtgagctttgttctgtcagcctgactgacgcataagcacaygctacactacacactccctaatttagttttctttttgtttaacaatagatgctgcctgtgccatgggtacgttgtgaggttatgcttaggatgtaataga

SEQ ID NO: 383884 - DNA, 201 bp, Homo sapiens
agctttgttctgtcagcctgactgacgcataagcacacgctacactacacactccctaatttagttttctttttgtttaacaatagatgctgcctgtgccrtgggtacgttgtgaggttatgcttaggatgtaatagaaactttgttcatgttcatgaatgagagaacttattgtttacatttaaaatgcttttacagtgt

SEQ ID NO: 383885 - DNA, 201 bp, Homo sapiens
ttctaatgtgtgcaagagacaaccacaaggttagtgcacctggaagttccttgagataccaccaagattaggaaacctaggagggtacctgagaagagagwcatacggtataaaaagacttttaaaaagaatacatccttccacagtgaaataataggacagataaatgaatagtgttgctgataaaagtatcttctttta

SEQ ID NO: 383886 - DNA, 201 bp, Homo sapiens
caatccacccacctcggcctcccaaagtgctgggattacaggtgtgagccataatggggtcttgttatgttgcccaagctggtctcgagctcctgggctcmagcaatcctcctgcctcggcctcccaaagtgttgaggttacagacatgagccattggcacctggccaaaaattataaatggagagatagaaagtgagata

SEQ ID NO: 383887 - DNA, 201 bp, Homo sapiens
tataaaaagacttttaaaaagaatacatccttccacagtgaaataataggacagataaatgaatagtgttgctgataaaagtatcttcttttatggaagcwgttcaactaatgaccaaagatttgacgttagttcttttgtagaataagcaagtttgatcatagtctctcatttaaaaaagaatatattgctaaaaagtta

SEQ ID NO: 383888 - DNA, 201 bp, Homo sapiens
aataagcaagtttgatcatagtctctcatttaaaaaagaatatattgctaaaaagttactttgttacaaatagcttgagaaaattatcttgtggaattctrtttttcccccaaaagccaaatcctaaaaatgcctacagatcttatgtgtttttaaaacaaggcttataagcaacatgctaacataaatggcaaaactatt

SEQ ID NO: 383889 - DNA, 201 bp, Homo sapiens
gtttcttcttggtttctgccactgtttttctttacgctcctgtcctttaattgtgggagtgtcttcagtccttttcccacttactcacccccaccgccccrattgtgcgtttgcccattgtcttggtttcagctctcatttctgtctgagtggcttctaaactgcctgtggctttaatgagctccagttcagtgaatccac

SEQ ID NO: 383890 - DNA, 201 bp, Homo sapiens
gatacaggtgtacttcttgccttttcacatattgaagaaaacagtgagagtatctagaaaacgggggacctagatggagagactgaatgcatgagggttartgccagtttcctcatattacaacccaggcttgagcaatatctgattttttaatgcttcacagaaagctaaataaatgcctatgtactgtggtggttccat

SEQ ID NO: 383891 - DNA, 201 bp, Homo sapiens
tgtatagggcttttcagagttgtcactttgcatttattttcatgattatcgatatctggctgctaccctacactggggaaaaaacttgtgtttgcttttattttttttttcctcccttctttgtaaccgcccaatgggttcccttgcccactgcctagacagaactgatttatcaagacaggggaattgcaatggagaaag

SEQ ID NO: 383892 - DNA, 201 bp, Homo sapiens
tttttaaatttttatttttttactatgataactgagggtgatagaaggatcactgaactaactaaaagtcaaatgatctgggttttagttttttaacatayagaatcttttgtctattagtgtaattgtcactattccactttcttgatgcggtactataaggatgaaatgaatgaagaattgctttaaaaggataaaaac

SEQ ID NO: 383893 - DNA, 201 bp, Homo sapiens
tttaaaatgtcattttaaatattggaatatgaaatcaaatgaatagaattacttgtcttgaaatttttctcattcaaatatataattagtgtattatcttygcaattattgttaaggtaaagtaagattattgtgtgaacaaatttaaagtttaaaaaatacactacccagaagaatagaaaatactttcaacaaatttgt

SEQ ID NO: 383894 - DNA, 201 bp, Homo sapiens
aaagcagaatttctgtcaatatttttggaaacagtgaacagctcaaaattatttagagtaaatttttactcccctaccaacttaatttttaaaatgatgcrgtaaagtaaaacacatacgcaacacagggttaccagaactttgaaattctagaacatttaaaaaatgtttgatatggcacaaaatccaggagtgggcagg

SEQ ID NO: 383895 - DNA, 201 bp, Homo sapiens
agaaaacacaagggatgaagaggaaccaccaatgagaaagaaaatataagggatggagaggaaccactgatgatcctctagtcagtggaagcagtcactgygatttgttatatatctttccagccttcctttctatgccctacaaactggccatattcattaggcagccaaggatcgcagtgaagaacacagatgagatgt

SEQ ID NO: 383896 - DNA, 201 bp, Homo sapiens
ccccctcctcaccccgcttttttttatttttgctagacaccatgctatgggactacaagggatacatgttcctgccttcaaggttcttttaagtagttggwggcattgcagcatgaatctgtagctaacatgtaaagcacttaccatatgccacagatgggaccgaaagctttacatgaattatttaatccttaaccacct

SEQ ID NO: 383897 - DNA, 201 bp, Homo sapiens
atccaacccaactctgagggttttttttttttgagggtttcttttttggttgatgttactaaaaatatatttattttaatatttgcagctggttttagaaraagttttcgtcttagtagaaaagataagaaaacaaataaatccatgtatgaatgcaagaagagtgatcagtacgacacagctgacgtacccacatacgaa

SEQ ID NO: 383898 - DNA, 201 bp, Homo sapiens
gactctgtctcaaaataaaaaggcagttaataaaggaatgtgggtattttcacaaacatcgattgccttgactcagatttgcatcctagcatctatcttgygcacccttcacagatgtgagtagccacaagctccatgtatcttcacttcatcctcaatgcatttctttaaaaatgtagcgagagatatttaaacttccag

SEQ ID NO: 383899 - DNA, 201 bp, Homo sapiens
gagactctgtctcaaaataaaaaggcagttaataaaggaatgtgggtattttcacaaacatcgattgccttgactcagatttgcatcctagcatctatctygtgcacccttcacagatgtgagtagccacaagctccatgtatcttcacttcatcctcaatgcatttctttaaaaatgtagcgagagatatttaaacttcc

SEQ ID NO: 383900 - DNA, 201 bp, Homo sapiens
aggcgtggtagcacagtcctgtagtccgagctactcaggaggctgaggcagaagaatcccttgaacctgggaggtggaggttgcagtgagccaagatcgcrccactgcactccagcctgggtgacagagcgagactctgtctcaaaataaaaaggcagttaataaaggaatgtgggtattttcacaaacatcgattgcctt

SEQ ID NO: 383901 - DNA, 201 bp, Homo sapiens
ccatctctacagtgaagccccatctctacattgaagccccatctctacaaaaatacaaaaattagccaggcgtggtagcacagtcctgtagtccgagctastcaggaggctgaggcagaagaatcccttgaacctgggaggtggaggttgcagtgagccaagatcgcgccactgcactccagcctgggtgacagagcgaga

SEQ ID NO: 383902 - DNA, 201 bp, Homo sapiens
cagcctggccatcatggtgaagccccatctctacagtgaagccccatctctacattgaagccccatctctacaaaaatacaaaaattagccaggcgtggtrgcacagtcctgtagtccgagctactcaggaggctgaggcagaagaatcccttgaacctgggaggtggaggttgcagtgagccaagatcgcgccactgcac

SEQ ID NO: 383903 - DNA, 201 bp, Homo sapiens
tttagaccttcagtgaaataaagtattacagcagagttctaggatatttcaagctagagagtcagcaaagtcgctttaaagttgataattggctgggtgcmgtggctcacacctttaatcccagcactttgggaggccagggtgggaggatcacttgaggtcaggagtttgagaccagcctggccatcatggtgaagcccc

SEQ ID NO: 383904 - DNA, 201 bp, Homo sapiens
aataatagcagagacatacaatgcaattaactttttaacccatcttcaaatcaatataattttaataacagtggaaaatctggatttataacagcttactrtattttattagctaatttgctttttaaatacatttttaaatcctgttgaaaaaactaattaaatacccttgatttcttttttagtattttccttaaggtg

SEQ ID NO: 383905 - DNA, 201 bp, Homo sapiens
tgttagtttctcttcatctgaggaggtctttattttgcctttattcttgaaacacattttgattaagtattttcctttagtgctttaaagatattatttcwttgatttcttatttttatgatttataataagaaatctgtgacagtttaaatcattattcacttatgtgttcagtgttttttcctagctgctttgagattt

SEQ ID NO: 383906 - DNA, 201 bp, Homo sapiens
  misc_feature (1)...(201): n = A,T,C or G
ggctcacttttgataaaacagtgaagtgacatcatctctagaatatggcattataatttaggcagtcatggaaaatttggtagattttttaaaaggcaatnaaataagaagatttgttgtaatttttagcttccaaacattcacttaagagaaattactcactgcctgagcatgcaagatgaatgaagcttcattaaagca

SEQ ID NO: 383907 - DNA, 201 bp, Homo sapiens
aataatatttgaaacagatgaaaaggtaataatttggttggtaattattgttaatcttcacctctaattttttagtaacctggatttgcttcatttctatraaatgtgtagacactgctttgcagaatgagggaaggttgcaagtgtcttattctgacctccttccagcccactaattgaatcttaacatgtaatttggat

SEQ ID NO: 383908 - DNA, 201 bp, Homo sapiens
tttttagtaacctggatttgcttcatttctataaaatgtgtagacactgctttgcagaatgagggaaggttgcaagtgtcttattctgacctccttccagsccactaattgaatcttaacatgtaatttggatagaattttacttcaaaaaccaacaactatgtagtatatcactaggtccagcgtctgcttcacacacct

SEQ ID NO: 383909 - DNA, 201 bp, Homo sapiens; identical to SEQ ID NO: 83654

SEQ ID NO: 383910 - DNA, 201 bp, Homo sapiens
ttgcagaatgagggaaggttgcaagtgtcttattctgacctccttccagcccactaattgaatcttaacatgtaatttggatagaattttacttcaaaaaycaacaactatgtagtatatcactaggtccagcgtctgcttcacacacctgcatctcattctctcattggctcttcaaaaaattgaaatgatgataattaa

SEQ ID NO: 383911 - DNA, 201 bp, Homo sapiens
gtggctcatgcctgtaatcccagcactttgggaggccaaggcgggtggatctcctgaggtcaggagttcgagaccagcctggccaacatggagaaaccccrtctctactaaaaatacaaaaattagctaggtgtggtggcaggcgtctgtagtcccagctactcaggaggctgaggcatgagaatcgcttgaacctgggag

SEQ ID NO: 383912 - DNA, 201 bp, Homo sapiens
tctgacctccttccagcccactaattgaatcttaacatgtaatttggatagaattttacttcaaaaaccaacaactatgtagtatatcactaggtccagcrtctgcttcacacacctgcatctcattctctcattggctcttcaaaaaattgaaatgatgataattaacttgctggtaccgtcttctctagctagctccaa

SEQ ID NO: 383913 - DNA, 201 bp, Homo sapiens
actaattgaatcttaacatgtaatttggatagaattttacttcaaaaaccaacaactatgtagtatatcactaggtccagcgtctgcttcacacacctgcrtctcattctctcattggctcttcaaaaaattgaaatgatgataattaacttgctggtaccgtcttctctagctagctccaagcccaccccagtgccccct

SEQ ID NO: 383914 - DNA, 201 bp, Homo sapiens
agctttcctcagatgtcatctcttgtcttataagacacccatgtgtttacaacttgtcctattctcttctcctctttacctttgtaaaggagctttagaayaactgtcttccttgttttagatcctttataaataaccttttctctcaactcaaatatcttctcaaaatcggagtgactcttagagggccacagaaacatg

SEQ ID NO: 383915 - DNA, 201 bp, Homo sapiens
tatgtaaattattatactctattgtttagggaataatgacaaggacaaaagtctcaatacagatgaaataacactcaatacatgttcaatagagatacagytaaaaaatttcagtccataattggttaaatccacatggatggaacccacagattcagacagctgactatattcactaaaatccacacagattagttatta

SEQ ID NO: 383916 - DNA, 201 bp, Homo sapiens
gaagtggcagatagaagatagttgatggttacatttcacccatctctttgagtctagagaagtgtatgtttcagctgtttggagtttttcttagaacatgrgacttaacacttctttttcctcagctttggggactagtcatcagttttggggcaagaagaaaatcattgcatttatcatcctcttccacggtgatcccag

SEQ ID NO: 383917 - DNA, 201 bp, Homo sapiens
gagagactgaatgcatgagggttaatgccagtttcctcatattacaacccaggcttgagcaatatctgattttttaatgcttcacagaaagctaaataaaygcctatgtactgtggtggttccattcttgttcagtaccatcttggcttcctttcaggtaaggaagaaattgagcagtgattgtagcagtgattcccctgt

SEQ ID NO: 383918 - DNA, 201 bp, Homo sapiens
ttttgggtataggataagtagaccaatattattcagcaataatatttgtattttctatgagtgttattggaaatgatgattgtggtatattcatgactatwatgggttctggcaagaccttttattgtttttcttcttaatcttaatatattctacctttggaccaaaaatcaaaagcaaagaaattaaatgtgaagagct

SEQ ID NO: 383919 - DNA, 201 bp, Homo sapiens
cctgcatcgcattgactgtattctagtaaaagacagactctagacaagaagagtgaaatacgcatagctcatgaagttgggatgggcacaggcaaagatcrttaagtggaattaggaaggtgtgagggagattttagaaagggaggccaaggaagctgagaagatgccacctggggaaacacccgggaaacctgaaccact

SEQ ID NO: 383920 - DNA, 201 bp, Homo sapiens
tgttctatatagagactttgtttctaggggaagcagagatagtcattaataaatcaaaaccacttctaaccatcaaattgccacattaaaggcaaattaayctgtatgagtcatcattccgggggctcacttttgataaaacagtgaagtgacatcatctctagaatatggcattataatttaggcagtcatggaaaattt

SEQ ID NO: 383921 - DNA, 201 bp, Homo sapiens
ttaaagataaaagaagcaaattcaggccaaagcagtacgaaaaacttgtgaaatttttttatttcatgtaatgagttgtgaaactctgtagtagaggtatktattattattaatgtatgatatttccaagaaatcagtaattttattatatggctcatttatataaaatgtatttaaatagttattatagattgtgttaga

SEQ ID NO: 383922 - DNA, 201 bp, Homo sapiens
tcctgcagtgatgaaataggcaaaatcaataatgttggtggcatttaggggcattgatggagggatattgttctatatagagactttgtttctaggggaarcagagatagtcattaataaatcaaaaccacttctaaccatcaaattgccacattaaaggcaaattaaactgtatgagtcatcattccgggggctcacttt

SEQ ID NO: 383923 - DNA, 201 bp, Homo sapiens
aggtggcacttcacgtcctattgccacaaaggtgttgggcagtgcagtgtggtcctgacattcccagttggttctcaaagtccatttcccacagcaaattrtagaaccattggcagcaaataaacctccaatgtttgttttcatctatagtaaaatgattttaaaacgtcacagttcttgccatctacaacttccttggag

SEQ ID NO: 383924 - DNA, 201 bp, Homo sapiens
gtagaaaatgggaaaatattggttcaccgaatcatgcagatcttcccaatgttgatacaaaatgccaaaaaaaaaaaaaatcacatttgttaataccaccrtgggtcttctcagcaaaggctttgggcattgagaagctgatagaaccagtgcaaagtggggacttggttccaccatgcgtgtatttcagttaacatagca

SEQ ID NO: 383925 - DNA, 201 bp, Homo sapiens
ttcctctactaagtgaattgactggctcagtgaaatgtatatttacaattctgggaccttgggtcatctccctttatcacccgcatttctggattgtgctrtttttggatatctggctttaatgccatgacaggtggcacttcacgtcctattgccacaaaggtgttgggcagtgcagtgtggtcctgacattcccagttg

SEQ ID NO: 383926 - DNA, 201 bp, Homo sapiens
tcaaaaacacttgtttcaaaggctcaatctgaaattcactgtgccacctacttgaggagaccttgcaatacggcagtttataggaaataaataaagtaaattttttttttttttttgagacggagtctcactctgttgcccaggctggagtgcagtggcgtgatctcggctcactgcaacctccgcttcctggattcaagc

SEQ ID NO: 383927 - DNA, 201 bp, Homo sapiens
aagccaggagagtgatggtgttgaatacattttcatttccaagcatttgtttgagacagatgtacaaaataacaagtatgtggacatttttgagaattttyatgtgactgttttttataagcacatgcctgtcccgttttagacaactgagagttctccatttgaagtgtattttaattatcataataatatttgaaacag

SEQ ID NO: 383928 - DNA, 201 bp, Homo sapiens
caaaaacacttgtttcaaaggctcaatctgaaattcactgtgccacctacttgaggagaccttgcaatacggcagtttataggaaataaataaagtaaatwttttttttttttttgagacggagtctcactctgttgcccaggctggagtgcagtggcgtgatctcggctcactgcaacctccgcttcctggattcaagca

SEQ ID NO: 383929 - DNA, 201 bp, Homo sapiens
cttctctgcttttagttgaccattttatattattccatttactctcttcttttatcaaatcaattatacttaatttttttttttctatgtgtgcttgccckacagttagcaacacacatttacaacaaatacaggttttgtttttttttttttttttttgagacagagtcttgctctgtctccctggctggtgtgcagtgg

SEQ ID NO: 383930 - DNA, 201 bp, Homo sapiens
gagaatattacatttccagtcattttggaaacaagttagaaattgaaataaaagcagaaaatactagtagttggtgagtctaagctttatgaccatgaagwgatgctcattcaagtctctggccttgaatacatgcacaggtgatgaaaaatgccgtaaaatgcctgtcacttaattctttgacttttttactattattgg

SEQ ID NO: 383931 - DNA, 201 bp, Homo sapiens
aatgcttttttcgcgtttggcgcagtgattgtgtttttatagcacatgatcgactgccctggctccattagccaccacccagcgcctctagttctgaagcygggctgggttactccgtagcgtgcaatgaaattccagtagtttctattgtttggcttattcaccattttattgcattgcattagttctgaagaaaaaggg

SEQ ID NO: 383932 - DNA, 201 bp, Homo sapiens
tcatcccccagggaccatggtttctccttccactgatggctgtaccctggggtgcaaaacctccaaatgctagaatgacctgcggaagccctttggacctytaaaggaagatgaatctggagtaaaagtgtttcaagaatcaggaaggctgcctcctgacttgggcactgtgttagtcccttgttgcactgctctgaagaa

SEQ ID NO: 383933 - DNA, 201 bp, Homo sapiens
gcagcccagagcaacactactgggtgaccctgaaccgactaaaaggtaagaaagacccaccgatatggatgcctgtgcagtcagcagcaacagcagcagayagattgattgattgattgattgactgactgattttgagacggagtctcacacggtcaccgaggctggagtgcagtggcgcgatctcggctcactgcaagc

SEQ ID NO: 383934 - DNA, 201 bp, Homo sapiens; identical to SEQ ID NO: 83661

SEQ ID NO: 383935 - DNA, 201 bp, Homo sapiens
tcactcccacaggcacagggaggaggggcagggctggggctcagactgggagcaaccgcctgccaccactacaatgggcaagctcccagtccgactctgcrtgcagaagaacagctatcccattagaaccagcaacaaagggtttatttttaatcactcaaatatcattaacacagctctgaaaatggtccatttatttgt

SEQ ID NO: 383936 - DNA, 201 bp, Homo sapiens
ggatacctactggtgtcaggcattgtgctaagggctctctgtaagatggaaaatgttaaagctagtaatgattttgtggcaaatctgatacttcagatggsttctctgagaggtagagggaaatcagataccatccttaagtggacttcagtattttctctttgtaaaaggtggactggcttctatagggagtgtggcttc

SEQ ID NO: 383937 - DNA, 201 bp, Homo sapiens
aatctcagagttcccttgtaacgctgtatttccatgcaacagaatcagcttctctgtgaagctcggcagacagtgaggttttactgcatacgtgtcatcayggttattagtatgattgttttaggccaaccaacgcaaaggacaactgtgcacccatctaacagatgggtactattatgggcgtaagaaaaaactggattg

SEQ ID NO: 383938 - DNA, 201 bp, Homo sapiens
tctaaatggcacagctgtatcattataatcaaggtgtagctgagttgcttttcacttatgtcctaagtttctcccactgatagtcttcatatttgtaatcttttttttttttttttgagacagggtctcgctctgtcacccaggctggagtgcaggtggtatgatcatagctcactgcagcctccactttctgggctcaag

SEQ ID NO: 383939 - DNA, 201 bp, Homo sapiens
gcctgaacaactaagctaatcagcctagacagtggtgtacgatgagtccagtagacattggttggggtttttttaatataatttcatgtccactgcaagtytgattttcaaataatctccgagggctgttacagagaaaacaatccaaagaaccccaagagaatcacaaagagtactctccatacagcaagggagtaacaa

SEQ ID NO: 383940 - DNA, 201 bp, Homo sapiens
ctgggtgaccctgaaccgactaaaaggtaagaaagacccaccgatatggatgcctgtgcagtcagcagcaacagcagcagatagattgattgattgattgmttgactgactgattttgagacggagtctcacacggtcaccgaggctggagtgcagtggcgcgatctcggctcactgcaagctccacctcccgggttcacg

SEQ ID NO: 383941 - DNA, 201 bp, Homo sapiens
atgattcagaattctcaatgaaatcagaatgtttcaacaatgtttgaaaaaaaccctagttagtataaatcctaacaaagtcctcattccctaaaagtaartacttcagaaagttcttaccatcactagcttcagtatgaaaacggtactcacagttaggcagtagcgtggccatccatggccagcattcagagtcagcac

SEQ ID NO: 383942 - DNA, 201 bp, Homo sapiens
aatttcatgtccactgcaagtttgattttcaaataatctccgagggctgttacagagaaaacaatccaaagaaccccaagagaatcacaaagagtactctscatacagcaagggagtaacaaggggtggagaaagggctgaaaaatgaaacccaagtacaaagatggggatccccaaccttggtccacctggatgctactg

SEQ ID NO: 383943 - DNA, 201 bp, Homo sapiens
cagattcttcctgaaaacaggagcccctcaggtgtgcacatggtataagaagtcataaagggttgatactatcaataataaagtaatgattcagaattctyaatgaaatcagaatgtttcaacaatgtttgaaaaaaaccctagttagtataaatcctaacaaagtcctcattccctaaaagtaaatacttcagaaagttc

SEQ ID NO: 383944 - DNA, 201 bp, Homo sapiens
aagtcctcattccctaaaagtaaatacttcagaaagttcttaccatcactagcttcagtatgaaaacggtactcacagttaggcagtagcgtggccatccwtggccagcattcagagtcagcaccctaagtaggccaagccctggtgtgtagggaggtggtaaatcttccgggtccgagctttgggcctgcactcaatcct

SEQ ID NO: 383945 - DNA, 201 bp, Homo sapiens
gggattacaggtgtgagccaccacgcccggccataagatttattgaaaaaattgaacattttttcaattcagctatgtttctttggccttgtaaatgttcyacattttgcaagaccttccacttagggaaacaggaagttctctgattttaggggtctgaagttagctgaaagatgttcccaaaccagtctggctgctttt

SEQ ID NO: 383946 - DNA, 201 bp, Homo sapiens
atccataccattcttatgaactacttacaaccaatgaaaagacttagaagttcatggaactcagaatctatcggaactgagattttagcaggcaaatgagygctagcttatctctcgtgtgcgcgtggtgagttaaatcccatggtattcacctaaagcagtaactaacaaagatttcagaaatcactaaaagaatgaaag

SEQ ID NO: 383947 - DNA, 201 bp, Homo sapiens
gaaatcagaatgtttcaacaatgtttgaaaaaaaccctagttagtataaatcctaacaaagtcctcattccctaaaagtaaatacttcagaaagttcttamcatcactagcttcagtatgaaaacggtactcacagttaggcagtagcgtggccatccatggccagcattcagagtcagcaccctaagtaggccaagccct

SEQ ID NO: 383948 - DNA, 201 bp, Homo sapiens
tttcaattcagctatgtttctttggccttgtaaatgttctacattttgcaagaccttccacttagggaaacaggaagttctctgattttaggggtctgaarttagctgaaagatgttcccaaaccagtctggctgcttttgttccctctctagaaagaagtactggcattttgcatctcctgagactttggaaaattctga

SEQ ID NO: 383949 - DNA, 201 bp, Homo sapiens
ttgttttcctcttagatgctccaggtgctacaccaaacgctggctgggaaggaaatgttcgagccattaagcggaaaagtgaggaaggaaatgttcatgawggatgtaaaggtaaaaagaaaaacaaaacaaaacaaaaaaggcttcaaattttacaacaactataaaactgctgcctcaatcctagtgggcaagacggag

SEQ ID NO: 383950 - DNA, 201 bp, Homo sapiens
gtggagaaagggctgaaaaatgaaacccaagtacaaagatggggatccccaaccttggtccacctggatgctactgccagcgtagtacatgctcccacccscaaaagcactagcctttgatccgatgttacaagtgaaacatctcaaggaaggttggactttcccctctacttttctcattgactacctcatctagaggaa

SEQ ID NO: 383951 - DNA, 201 bp, Homo sapiens
aagacggaggatcatgtttaaagtaatctggaattagtgatgatccaattagtataggttgagtcaattttttaaaaaaactttttatataagattcatayagaaaagtacacaaatcacaaaaaatacaggttgataaaatttcccaaagtaaatataccctctgcaccaacagctaggccctgccatatgtctccacac

SEQ ID NO: 383952 - DNA, 201 bp, Homo sapiens
tctaaataacttcctgattataaagaactactcatttcatgtagaaaatctgaaaaatatggaaaagcaaagaaatgtataccttctgctcacagatagcyatgttaagatgattgtgtttgtccttcctgttttttctgtacgtccctatgtatttcagtgttagcagtacactgcttattttcatgtaatattgatgaa

SEQ ID NO: 383953 - DNA, 201 bp, Homo sapiens
tgttgacttgaatacacttttagggagtataggtatcagtttctcatgtctccttgccttcatttgttcagagtaacaaggtaaagtatgtgttttcctcwcatattctataggtgttagtggtctgtatgactttgggccagttggctgtgctttgaagaacaatattattcagacctggaggcagcactttatccaaga

SEQ ID NO: 383954 - DNA, 201 bp, Homo sapiens
gcttagaggtgctcgcgccgctctgctgctgctgctgccgccccggctcttagcccgaccctcgctcctgctccgccggtccctcagcgcggcctcctgcsccccgatctccttgcccgccgccgcctcccggagcagcatggacggcgcgggggctgaggaggtgctggcacctctgaggctagcagtgcgccagcaggt

SEQ ID NO: 383955 - DNA, 201 bp, Homo sapiens; identical to SEQ ID NO: 83664

SEQ ID NO: 383956 - DNA, 201 bp, Homo sapiens
ttgttttgaaagcaagataaaatagtttgtgttgggtgtcaaatatttttcagtagagtgagtcaatggaaaccgatatcttggctttgaagagtattaaygtgtgttttcttttcttcctccatgcttgcttattggttggtttagggtgtgattaataacacagtattaggctatttcattggccgcatctacctctac

SEQ ID NO: 383957 - DNA, 201 bp, Homo sapiens
gtagatcccagtgagaaagaccaccccaagttccagaatgtggcagaccttcacctttatttgtattcagcaaaagcccaggtcagcggacagtccgctcrgaaaatgcgcctgggagatgctgttgaacaggtaggattctggaggtaacttaacttagattgtgcctgttcagggtttgcagcaattagcaaattctat

SEQ ID NO: 383958 - DNA, 201 bp, Homo sapiens; identical to SEQ ID NO: 83668

SEQ ID NO: 383959 - DNA, 201 bp, Homo sapiens
aaagaccactatagtatggagcctttatcactagaatgcagttgaaaatagaggccttgttttttgtttgtttgttttttgtagttaaatatgcaggtttwtcgcttacgtttttgctttcagagaattcacaatggcagaaattgagcactttgtagatcccagtgagaaagaccaccccaagttccagaatgtggcaga

SEQ ID NO: 383960 - DNA, 201 bp, Homo sapiens
tgacattgtttggctctgtgtaaggtttcctgagttcaggatgaatcttcttcttaaaaatctgaacaagttggttgatacttggcttctctttccttgtytctagatctctgagctgcccagcatagtccaagacctagccaatggcaacatcacatgggctgatgtggaggccaggtatcctctgtttgaagggcaaga

SEQ ID NO: 383961 - DNA, 201 bp, Homo sapiens
attcagccactttgccatctgtcctcttcgctggtttgagcctgaccgattttaataaatagcctttcattttgaaatatcaccacgggcttaactttttwcttcatgattggtgtcagaacaccgattgcatattctgtctccctccacccaccttccactccacaaataaaattaggtgtggttcctttgtcttttctt

SEQ ID NO: 383962 - DNA, 201 bp, Homo sapiens
ctgagagacagagttagtgtatgatgggacagtgcggatgtgtacactgctgtacagtgtattggcagcattactggcaatatcctggagtggatctaagrcacattggcctctccttcctggcaagagtcccagcaaacattggaaatggtggagaggttgaataaagaaagtcatagtgctcttagctcaatgagctat

SEQ ID NO: 383963 - DNA, 201 bp, Homo sapiens
agtaatagggaaaacagaagcaaaagactgcttttttttctgaaggagtttatagtctaatccagaagtcgtgaatttctagcttgactttttagagaccrtctggctactctggagctgtgtccccatctgggtgtggttctcaaaagtgtggtccctagaccagcagcatcagtatcccctggaaatgtatgagataag

SEQ ID NO: 383964 - DNA, 201 bp, Homo sapiens
atttgagagaatgttattgaatttctatctctttttcagtggaagaagttgttccgaatgtaattgaaccttccttcggcctgggtaggatcatgtatacrgtatttgaacatacattccatgtacgagaaggagatgaacagagaacagtaagttgttgtgtacagtgtgctgttatagtgtcagaaaataaaaattttc

SEQ ID NO: 383965 - DNA, 201 bp, Homo sapiens
tttaactcaaaattcacagacgatctccaggtaccctcctgcccctgtgccctgtcacccctccagcctccaccaccaaacatgaacatcagtattgaagyggagggacgaaaggcatttgcatataggagatgctgtctatattggtggcaggaggaaatgtggcatctaaaacaaggctgagagtcttttggcatttct

SEQ ID NO: 383966 - DNA, 201 bp, Homo sapiens; identical to SEQ ID NO: 83671

SEQ ID NO: 383967 - DNA, 201 bp, Homo sapiens
cactttgggaggccgaggtgggaagattgcttgagctcagaaatttgagaccagcctgggcaacatagcaagaccctgtctctacaaaaaatacaaaaatyagccaggtgtgatagcacgcccctgtagtttcagctacttgggaggctgaggtgggaagatcacatgagcccgggaggttgaggctgtagtgagccatga

SEQ ID NO: 383968 - DNA, 201 bp, Homo sapiens
tgtagattttgggctagtcctacttgaaattacaaatatagaattagtaaatggcgtaagagcttttttattttacttccatcagctagctgaaagtaagrttcttcagtattgagggatttgcattgttgacttgaatacacttttagggagtataggtatcagtttctcatgtctccttgccttcatttgttcagagta

SEQ ID NO: 383969 - DNA, 201 bp, Homo sapiens
aaggcgcagggcgcgaaagaacagaaacagaagtgtccgttcaagtaggtcggccggggtgtcactcgtataaaaacctatgctttgaaggttctcgtgtrtctcggcctgcaggtctcgctcagagctgtgtccctgaacatccaccctgctggggtggcttgacgcacttctgtgcaaatctgttcgctcgcaacccta

SEQ ID NO: 383970 - DNA, 201 bp, Homo sapiens
ggaccaagaatgtgtgactctgggcaaatcattaacctctctgggcctatttccttatctggggaacatctgcacttgagcaacagaagtctaagatcccyatctgatttgatgttttgcgacccttttaaggcgcagggcgcgaaagaacagaaacagaagtgtccgttcaagtaggtcggccggggtgtcactcgtata

SEQ ID NO: 383971 - DNA, 201 bp, Homo sapiens
aatgtgagcctatactgatttctttttagcccctcagttaagttttaatatgtgggttaacagggctaaacataggcatgggtattattttccaaaggacytaagattgtcatctgcctccatgtacatgatgacttagaagacatcaggggtttaaggggcactatgggagaggtggtgttttttgtttgtttgttttga

SEQ ID NO: 383972 - DNA, 201 bp, Homo sapiens
tcttttggtttgggatattagcatttagatatttacaaattaacatatttggatttttttctttttaaatcatccagttcttcagtttccctgctgtagtygctccattcaaatgttccgtcctcccactgagccaaaaccaggagttcatgccatttgtcaaggaattatgtaagcaaattcaattgggtaaactccatg

SEQ ID NO: 383973 - DNA, 201 bp, Homo sapiens
ctgattcaccttctgtggtaggaagacctctactcctattatgtggatttaacagctcagaacgaattcttttgtttctcttctctgtctgtttttgtggyccatctctggatgttccagttttaaaaaccatttttaacttgtttatgaaaaattcaaaacatacaaaattttatatgttaaataaaaacataataaaca

SEQ ID NO: 383974 - DNA, 201 bp, Homo sapiens
aggtgcccaccaccacggccggctaatttttgtattttcagtagcgatggtgtatcaccatgttggccaggatggtctgaaactcctgatctcagatggtraggagggcctttcaaagtgctggtattacaggcgtgagccaccacgcttggcctgaattgcatcattcttacatagactttttaaaaggcacgcttaaaa

SEQ ID NO: 383975 - DNA, 201 bp, Homo sapiens
tccatatatttcattttattttcagtattcagggtttcctttttaaaaatttgttttataatcatatagcacaatagcaaagacttggaaccaacccaaaygtccatcaatgatagactggattaagaaaatgtggcacatatataccatggaatactatgcattcataaaaaaggatgagttcatgtcctttgtagggac

SEQ ID NO: 383976 - DNA, 201 bp, Homo sapiens
ctacgtaagtggagtgctgtttaccatgtgattttcacattgttaacttagaagcacaggtaccaaatgaatttttgtgcactttatgtcacagaggaacraagggaaaagaaaagagatcttttcctgagcaaaacagaaaaagcagttgcctcctgcctttttataagtgtcctaaggagctcgttgtagtcttagata

SEQ ID NO: 383977 - DNA, 201 bp, Homo sapiens; identical to SEQ ID NO: 83670

SEQ ID NO: 383978 - DNA, 201 bp, Homo sapiens
agcttgctgttttgaaacaattctgcttcataatcctgattatgaatttatttttgttttctccaaaaatcatgttttacatttggaatctctaaatgtawtctccaggatgacaggcagttttgagtgacaaaagtgaacttgaagggaaaggaaggagggtggagactgtcttaagagtctcacctgctccaaaattac

SEQ ID NO: 383979 - DNA, 201 bp, Homo sapiens
tttttatacctctaaaggcaaatctaaaaaacaaggtatatttagtctactatctttctcttccctttaccttccgtccttctgcttccctgcttcctgarcagtttttaacttaaaacaacttccttttttaaaaaaatagaatataaacaaagacatatagatatttgtatgccctcctttctagataaatggttgcat

SEQ ID NO: 383980 - DNA, 201 bp, Homo sapiens
tcgatctggactgatcagagtcaggtactgctcaggttactcttacaaattagtgaatgaccttggcattgcattgaaaatgaaagcttgctgttttgaarcaattctgcttcataatcctgattatgaatttatttttgttttctccaaaaatcatgttttacatttggaatctctaaatgtaatctccaggatgacagg

SEQ ID NO: 383981 - DNA, 201 bp, Homo sapiens; identical to SEQ ID NO: 83672

SEQ ID NO: 383982 - DNA, 201 bp, Homo sapiens
cagtggatggctagggttatatataatactttatatcttatgccttgttttctctgtcttttacactaatttctttatatgtcttttagcttgataactayggacagcaagaacttgcggatctttttgtgaactataatgtaaaatctcccattactggaaatgatctatcccctccagtgtcttttaacttaatgttca

SEQ ID NO: 383983 - DNA, 201 bp, Homo sapiens
cctaaattcggagctgaaaccaggtgtttctgatgctggttctgcttctcttttgccatactgcttttcatgtcatgttttctggcattttggtaatgacrttatgcttgaacacttgctgaatattaacctcttttggtttgggatattagcatttagatatttacaaattaacatatttggatttttttctttttaaat

SEQ ID NO: 383984 - DNA, 201 bp, Homo sapiens
tgcctgttggtatccacttgtatcaggccacaaagcagaggatggatgttttgcttttgtttgcttggagtcaccatttggtgtgatacctgttatttttstccactgcatttattcctggacagcactttttttgattaggatgtagggaattgttggaggcccatgtatgtatttgatgtgtctgtgtactcatgtact

SEQ ID NO: 383985 - DNA, 201 bp, Homo sapiens
tctctgggcctatttccttatctggggaacatctgcacttgagcaacagaagtctaagatccctatctgatttgatgttttgcgacccttttaaggcgcarggcgcgaaagaacagaaacagaagtgtccgttcaagtaggtcggccggggtgtcactcgtataaaaacctatgctttgaaggttctcgtgtgtctcggcc

SEQ ID NO: 383986 - DNA, 201 bp, Homo sapiens
catatccaactaatttttgtattttttgtagagatgaggtttttgccatgttgcccaggctgatcttgaactcctaggctcaagcagtccacctgccttcrcgtcccaaagtgctgagattacaggcatgagtgaccacgcctggccctcattccctgtcttctttggcaaaataacttgttaaaaagtcatttaggggcc

SEQ ID NO: 383987 - DNA, 201 bp, Homo sapiens
tataagaaggatgcaaaactggtgatggagtatcttgccatttgtgatgagtgctacattacagaaatggagatgctgctgaatgagaaagggtaagataycagatgtttactcttccatgggctccagtcagttgtgtcatctgccaggttctgaaaggatgagattaatttcttaagattttttgcaggtaagtactgt

SEQ ID NO: 383988 - DNA, 201 bp, Homo sapiens
cctgatatatgaggctattcccatttcaaatatttatgaaatttgaatgaagattatatcatcgaattatcattgaatatatgaaaggtttataatctgcmtgcatttgtgaatgaacccaatataagtaataataagtaagtaatgtttttattgattatatctttttagggttggattgagattgttggatgtgctgat

SEQ ID NO: 383989 - DNA, 201 bp, Homo sapiens
attttctttctttagtaggcagtgaagttatgagctgatttcttaggggtaggtcagtgacaggaaatagatcttgttttgagcattttagaaatacttaycagaagttcttatgctatgggttgggtcattgctgattagataatatctcttttttctcactgtaactggaaaagtttctattgatggtgttaattttgg

SEQ ID NO: 383990 - DNA, 201 bp, Homo sapiens
tcttttacactaatttctttatatgtcttttagcttgataactatggacagcaagaacttgcggatctttttgtgaactataatgtaaaatctcccattaytggaaatgatctatcccctccagtgtcttttaacttaatgttcaagactttcattgggcctggaggaaacatgcctgggtatgtatcacttattgtttac

SEQ ID NO: 383991 - DNA, 201 bp, Homo sapiens
gagacccagggatctggggtttttttaaaaaaaataagaatcctgagtgatttcactgtgaaagcttgacagatcataaatgggataatagttgtctgggrtatagcctttcctagcattcaagtattgctgaagatagaagtttataagaagtcttcatcagctcccacaaattttcttttcggtctgatgcttctgaat

SEQ ID NO: 383992 - DNA, 201 bp, Homo sapiens
cctgagtggagtgtagcaaccataatggatctacagccacagaatccacagccctgaaaggaatcctggtggtcatctggcacatccacttatttcagagytgggaaatggggagagtccattgacctgcttagagccataaaaatagaggtggtggagtcaggactcaccttctggccttggctcttggtcccatatttg

SEQ ID NO: 383993 - DNA, 201 bp, Homo sapiens
ctatctttctcttccctttaccttccgtccttctgcttccctgcttcctgagcagtttttaacttaaaacaacttccttttttaaaaaaatagaatataarcaaagacatatagatatttgtatgccctcctttctagataaatggttgcattccatacacacttttctccattgtggttttcttcacataacaaaatatt

SEQ ID NO: 383994 - DNA, 201 bp, Homo sapiens
  misc_feature (1)...(201): n = A,T,C or G
aattgtctttttattgtctagttaatgtcttctttcttatgggaaggaagaatgtgggagagggtgagaaatagatttgaggaagaattttctctggcatncattactgtcatggatacatcattactatagatatgggagcttccatctttgagatggatataaatattgatggggaattatcttataaggtaatatcta

SEQ ID NO: 383995 - DNA, 201 bp, Homo sapiens
  misc_feature (1)...(201): n = A,T,C or G
ccgatctccttgcccgccgccgcctcccggagcagcatggacggcgcgggggctgaggaggtgctggcacctctgaggctagcagtgcgccagcaggtacnggtgttttgcgctctccgctaagcctccggctctcctcccagggccttcttctggtcatccttccctcctccccggggaactgtcctcctcttcggttac

SEQ ID NO: 383996 - DNA, 201 bp, Homo sapiens
tgcctataggcctaaagttttataatttgtataatatttaagctgacaaattttagagaagacaaaaaagagaccacagagataatttattctgacctttyaccaattgcaggaatactttctatattagaagtagttcttatccttttgttgggtcacagaccaccctaagaatgtgatcaaaactgcacgtctccctgg

SEQ ID NO: 383997 - DNA, 201 bp, Homo sapiens
acagtccttaaagatatctgtgatgagatgagtggtgatattaacaaacgtggatttttttttgatagtatttggataatctgcgtaactcagtgaaccartgttttccaggtgaccaatgcatgatgttatgaaatcaggtattggtgaaagagccattcaaagcttaagatacattaatagatttattctgacagtaca

SEQ ID NO: 383998 - DNA, 201 bp, Homo sapiens
gactcctcatcctttcaaaatgcaactcaaaatgtcaactttttaataaagccttcctgaccctgcaaatgctggactcaatacgctatatgaatttccakggaaaggattgtgctcttctttacgacttctcttatgcctgaaaataatgatttttgtttgtttgtttgttttaaggaaaaggtctgtttatttgatacc

SEQ ID NO: 383999 - DNA, 201 bp, Homo sapiens
ttggaaaacactatatattcttgaattacctgggaaatagatgttcctcaggctctttaactttctactctagtaggaccagcttatatttatggtacccrtgtcttgaagttcactggaacagtttcctcattgatccagcctcttgggtaattgtataatgttattttgtggattcctcctagaaattctgtagaaata

SEQ ID NO: 384000 - DNA, 201 bp, Homo sapiens; identical to SEQ ID NO: 83676

SEQ ID NO: 384001 - DNA, 201 bp, Homo sapiens
accttggtgatacaatgccagtaatttggttctgaacaagttcttatcaagataacaagctaaaaagttaaacaaatacaaaccatgtaatactttttgcrtgtaggaattgtttttgtgaattttgccagctgtgttagattttaaattctagcaaaatcttattaaaagccttagattttttatgctttctgggtagcc

SEQ ID NO: 384002 - DNA, 201 bp, Homo sapiens
ctgtaaatgtttacccttttgaggttaaatagtgcctcaaatacccaggaaaaaattagagaattggatgctaaaattatagatcattgttatcagatgtkgtgagaaattattttgtaatttttacggcagaaaactgtaatctgctttttcattctgttctctaagggggaacttttgttgtagattttgggctagtcc

SEQ ID NO: 384003 - DNA, 201 bp, Homo sapiens
cttgccattttgtaactcgtcattattcatttaaggttgactggtggagagctaatttttactattggcatccgttaggttctcttaataatttcagccartgaagaggaggaattctgaatgatggctctataagatcaggactacctatcattttagctacttgttccaccaataggaactttgtagagataataccaa

SEQ ID NO: 384004 - DNA, 201 bp, Homo sapiens
ataatggcagaaataaatcttttaaaaaattctttctgaatataatttcttttttggcatatatgtatttttttggcataaaataaagtctctgatcactrtatcttctagttatagctgcatagggtagaagggacagttgaagaatggttttaaaagccgttgaacttattgctgaaggatattttagaaaccatttag

SEQ ID NO: 384005 - DNA, 201 bp, Homo sapiens
  misc_feature (1)...(201): n = A,T,C or G
ctgctgttgtaaaatcaactgtgggattcatgtaaattaagaactttatgcttggatttactttttaattgtctagcattgaaactgaaaagtgcattgtnctttttcccattgattgatatatgtcaacactgttcttacagctcatttacagaaattgatgtctgataagaagtgttctgtcgaaaagaaatcagaaat

SEQ ID NO: 384006 - DNA, 201 bp, Homo sapiens
gaaaacttcctttaatatgacaagatattgccatctcatcttatacatttcctgtcccagacttggaatcagacatttctccaaggagccctggtacttgrtacttattagtggggatggtattgatcactaattataaaccttgtcagtgatctgagctaggaagttgatattttttaaaagataaacttttcatgagtt

SEQ ID NO: 384007 - DNA, 201 bp, Homo sapiens
gtttttaaaattgcttatattaaaaggtaaatatcaatgttatgaaggaaaaatttttaaaaagtgatatacagaagtacagatgaatgtattatggagawataatggcagaaataaatcttttaaaaaattctttctgaatataatttcttttttggcatatatgtatttttttggcataaaataaagtctctgatcact

SEQ ID NO: 384008 - DNA, 201 bp, Homo sapiens
acacaaattcgtaaactttcaaaaaacattatgaggtttttttgcattttttttttcttagctcatcagctgtggttagtgttagtgtattttatgtgcaktccgagacagttctttctagtgtggcccagggaagccaaaagattgaacacctctgttttagacaatccggggctctgagagtgcattgccagcagacct

SEQ ID NO: 384009 - DNA, 201 bp, Homo sapiens
ctttcattgggcctggaggaaacatgcctgggtatgtatcacttattgtttacctgtttatgtaatgaagtttttaaaattgcttatattaaaaggtaaayatcaatgttatgaaggaaaaatttttaaaaagtgatatacagaagtacagatgaatgtattatggagaaataatggcagaaataaatcttttaaaaaatt

SEQ ID NO: 384010 - DNA, 201 bp, Homo sapiens
gtcactccaaaaactcaggattcacatgtgaacatcttgctaatgaataagtccaagtctttaccttgttctatggataaatggagatgttttagacactrtagtaacgcttgtttaaacctattattttacctatccctttgttcctttcctattctctgtacttgtagtctgacgtgtgcccactcaatgtttggcctt

SEQ ID NO: 384011 - DNA, 201 bp, Homo sapiens
aaaatctgaacaagttggttgatacttggcttctctttccttgtctctagatctctgagctgcccagcatagtccaagacctagccaatggcaacatcacrtgggctgatgtggaggccaggtatcctctgtttgaagggcaagagactggtaaaaaagagacaatcgaggaatgaggacaattttgacaacttttgacca

SEQ ID NO: 384012 - DNA, 201 bp, Homo sapiens
agtttctgagctcatatgagttttatatttgcttgctttattacagacaccccatgtgataacatgtgcttggaaagcttagtagttttttctttttttctttttttttttttttttttgagacagagtcttactctgtcacccaggctggagtgcagtggtgcactctcagctcactgcagcctctgcctcctgggttca

SEQ ID NO: 384013 - DNA, 201 bp, Homo sapiens
aaaaactcaggattcacatgtgaacatcttgctaatgaataagtccaagtctttaccttgttctatggataaatggagatgttttagacactgtagtaacrcttgtttaaacctattattttacctatccctttgttcctttcctattctctgtacttgtagtctgacgtgtgcccactcaatgtttggcctttaaaagaa

SEQ ID NO: 384014 - DNA, 201 bp, Homo sapiens
ttattagcacctagttcctcaatccatttgcctataaatttggtataaaaacattgctagtgaaattttaaaaattatttttctataaaggcaggtccctrttactctcttatattaaatagaaatatcacaagatggaggaagggaatagaattctgaaccttctgtgatgtgagcagccatattggtggaatacaggcc

SEQ ID NO: 384015 - DNA, 201 bp, Homo sapiens
gttaacttagaagcacaggtaccaaatgaatttttgtgcactttatgtcacagaggaacaaagggaaaagaaaagagatcttttcctgagcaaaacagaaraagcagttgcctcctgcctttttataagtgtcctaaggagctcgttgtagtcttagatagctgagagacagagttagtgtatgatgggacagtgcggatg

SEQ ID NO: 384016 - DNA, 201 bp, Homo sapiens
agttcctcaatccatttgcctataaatttggtataaaaacattgctagtgaaattttaaaaattatttttctataaaggcaggtccctgttactctcttayattaaatagaaatatcacaagatggaggaagggaatagaattctgaaccttctgtgatgtgagcagccatattggtggaatacaggccttacttagagtg

SEQ ID NO: 384017 - DNA, 201 bp, Homo sapiens
gggcacatttcagggacaccatgaagggtggcttcactgggggtgatgagtaccagaagcacttcctgcccagggactacttggctacttactacagcttygatggcagcccctcacccgaggccgagatgctgaagtttaacttggaatgtctccacaagaccttcggccctggtgagcagagggtggcccttccccttg

SEQ ID NO: 384018 - DNA, 201 bp, Homo sapiens
cccctccctcctccaaggaacaagaaacccatccaggaagggctggacttccaggggaggcttccagctcccagtcagcctgaaacttaaagggccactgmccccagcatgtcctctctgaactctccagcccgaatcttccccagagcagggcttgggcctctgttctctgtcccagaaatattatactcttggcttatg

SEQ ID NO: 384019 - DNA, 201 bp, Homo sapiens
gggcgtagtggcgggcgcctgtagtcccagctacttgggaggctgaggcaggagaatggtgtgaacccgggaggcggagcttgcagtgagccgagattgcrccactgcactccagcctgggcgacagagcgagactccgtctcaaaaaaaaaaaaaaaaaaaaaagagtgttgccaaagctctttccaaaattcaccttat

SEQ ID NO: 384020 - DNA, 201 bp, Homo sapiens
ggttttgcacaaattgacccattgatgttattcccccagagggtcagggctgagatggtctttcaaaattacccagtctaatctccaggttttttgtttgyttgtttgttttgagacagagtcacactctatcgcccaggctggagtgcagtggtgcaatctcagctcactgcaacctcagcttcccacgttcaagcgatt

SEQ ID NO: 384021 - DNA, 201 bp, Homo sapiens
ccagacttggagagatgccagcagaagcatttcataggctcaaaaggacgtacatttcccaatctcttcctgacctatttctaactcccgtatccttatgsgggtggagctggaggttgaagggtctgtgggggaggtggggaagaggaggatgaaaccccaacagctcttttgccctctgcctgtaagttcagcttatct

SEQ ID NO: 384022 - DNA, 201 bp, Homo sapiens
tccctctctctctctgcagcggccgatgggaggagaaggaggagaagctgcgggcagcggtgaagcgggtgctcaagtgcgatgtccacctgggcaacccrctggccccggctgtgttgcctctcgccgactgtgtgctcaccctgctggccatggagtgtgcctgctgtagccttgatgcctaccgcgctgccctgtgca

SEQ ID NO: 384023 - DNA, 201 bp, Homo sapiens
ccaaggaacctggatggggatggggagacggtgtcctgggggcagtctggtctcctctaggggtttttggggatgggctgggggagcttctggggccctgccccctctctttgggcagctgttatgctggaggttgagtctgtctccccatggctcaggagctctgtgccagctgaagagcacagccccgtgcagttccca

SEQ ID NO: 384024 - DNA, 201 bp, Homo sapiens; identical to SEQ ID NO: 83704

SEQ ID NO: 384025 - DNA, 201 bp, Homo sapiens
acgcccagagagagaaaaagttaagctgctgaccctgaaggcaagggagagcaggctgcacagctgtgtgtggaagccacgggctcaagcagccaaggcaggtggacagtgtgagagagctagtgtaagctgttgatgagagctgttgctgaataaaaccatattcacctgcctatgggccctgagtgttctttctgtcca

SEQ ID NO: 384026 - DNA, 201 bp, Homo sapiens
cgcccagagagagaaaaagttaagctgctgaccctgaaggcaagggagagcaggctgcacagctgtgtgtggaagccacgggctcaagcagccaaggcagktggacagtgtgagagagctagtgtaagctgttgatgagagctgttgctgaataaaaccatattcacctgcctatgggccctgagtgttctttctgtccat

SEQ ID NO: 384027 - DNA, 201 bp, Homo sapiens
gcccagagagagaaaaagttaagctgctgaccctgaaggcaagggagagcaggctgcacagctgtgtgtggaagccacgggctcaagcagccaaggcaggyggacagtgtgagagagctagtgtaagctgttgatgagagctgttgctgaataaaaccatattcacctgcctatgggccctgagtgttctttctgtccatc

SEQ ID NO: 384028 - DNA, 201 bp, Homo sapiens
ggcacatttcagggacaccatgaagggtggcttcactgggggtgatgagtaccagaagcacttcctgcccagggactacttggctacttactacagcttcratggcagcccctcacccgaggccgagatgctgaagtttaacttggaatgtctccacaagaccttcggccctggtgagcagagggtggcccttccccttga

SEQ ID NO: 384029 - DNA, 201 bp, Homo sapiens; identical to SEQ ID NO: 83694

SEQ ID NO: 384030 - DNA, 201 bp, Homo sapiens; identical to SEQ ID NO: 83696

SEQ ID NO: 384031 - DNA, 201 bp, Homo sapiens; identical to SEQ ID NO: 83697

SEQ ID NO: 384032 - DNA, 201 bp, Homo sapiens; identical to SEQ ID NO: 83698

SEQ ID NO: 384033 - DNA, 201 bp, Homo sapiens; identical to SEQ ID NO: 83699

SEQ ID NO: 384034 - DNA, 201 bp, Homo sapiens; identical to SEQ ID NO: 83700

SEQ ID NO: 384035 - DNA, 201 bp, Homo sapiens; identical to SEQ ID NO: 83701

SEQ ID NO: 384036 - DNA, 201 bp, Homo sapiens; identical to SEQ ID NO: 83702

SEQ ID NO: 384037 - DNA, 201 bp, Homo sapiens
tggggatagagtagatggaatcccaagtttcaggattacagcagttttaggggcaagactctgatcacaggactatgttgaggtgtgatatagtcaagtaygaacactgaaaaccagatgattttcatctcttccttcttctcttccttccttaccctcatctatatatctacctctctatcttctatgtatctaactatc

SEQ ID NO: 384038 - DNA, 201 bp, Homo sapiens
tgatagcagtcactacacagggtagttttgaggtgtaaatggaaattaacacatataaaatatttggcatgaggcttggcttacagggagctgccaatccrtgataaccaccaagcacgtttgccccttgggtaagaccagggtgtgtgtcctcatccctgtgtctgccttgggtctcgtttcttttacccatccattacc

SEQ ID NO: 384039 - DNA, 201 bp, Homo sapiens
tggaatgtctccacaagaccttcggccctggtgagcagagggtggcccttccccttgagcctctctccaaggaacctggatggggatggggagacggtgtyctgggggcagtctggtctcctctaggggtttttggggatgggctgggggagcttctggggccctgccccctctctttgggcagctgttatgctggaggtt

SEQ ID NO: 384040 - DNA, 201 bp, Homo sapiens
tgactggcacagttatccaaacagctggtgtttcacaagcacttgatgtttgattgattgatgtagaacagcaactaaaccgttggaacaatgatgtggtytctagaccacatcagtttacaaatcagctcatgggtacattgtagaagtactctctttttgctaggtgtcttttgttgcagggttgtcatccatgaacct

SEQ ID NO: 384041 - DNA, 201 bp, Homo sapiens; identical to SEQ ID NO: 83706

SEQ ID NO: 384042 - DNA, 201 bp, Homo sapiens; identical to SEQ ID NO: 83707

SEQ ID NO: 384043 - DNA, 201 bp, Homo sapiens; identical to SEQ ID NO: 83708

SEQ ID NO: 384044 - DNA, 201 bp, Homo sapiens
ccatgaaaaactgagtaactaagattttaaaagagatgccctttccacctctctctgagactgaagtccagatctcttgggagaagatggggctatcagasgaacatgcagtggtagaaaacttgccagaaggcccaaggctggagttggcctgagggtttctgaggtgaatgtccatggccttccacatgctgatttact

SEQ ID NO: 384045 - DNA, 201 bp, Homo sapiens; identical to SEQ ID NO: 83711

SEQ ID NO: 384046 - DNA, 201 bp, Homo sapiens
tatcttctctatttgaggttaagagattgaggctctgagaggttaagcattctcaaagttgtacagttagtactggtgataggaagattcctagtcacagktgatataatggattggaagcagcatacaatccaataggcctggatttgaattctcactctgtcatctttttagttgagtcgtctttcacacactgttcac

SEQ ID NO: 384047 - DNA, 201 bp, Homo sapiens
ggtcaggagtttgagaccagcctggccaacatagtgaaaccccgtctctactaagtattcaaaaattagctgggcgtagtggcagatgcctgtaatcccarcttctcggggggccgagggaggagaatagcttgaacccaggaggaggaggttgcagagagttgagatcgcacccctgcactccagcctgggtgacagagc

SEQ ID NO: 384048 - DNA, 201 bp, Homo sapiens
gctaagccctcattgcctggggccgacagggccggccggctgctctgagtgcggggccgccaagcccacgcccacccggaactccagctggcccgcaagcrccgggcgcagccccggttcccactggcgcctctccctccacacctccctgtaagctgagggagtgggctccggccttggccagcccagaaaggggctccc

SEQ ID NO: 384049 - DNA, 201 bp, Homo sapiens
tttcagtgttatggtgaagaacaagaaagatttcttaaaattattgcagtggattagataatgacaaaagtggcccttctaggtattaacaatttcccttycttttgaaggtaattttaaagatggaccagtttggaaatggacttgaaattgatcaagctcggctaggaatgtgcagacagcttggggatgtattcacgg

SEQ ID NO: 384050 - DNA, 201 bp, Homo sapiens
ggtttcatcatattggtcaggctggtctcaaactcctgacctcaggtgatccacctgcctcagcctcccaaagtgctgggattacaggtgtgagccaccaygcctggcctataatttcattaagaatgattcttaagcttttcctttgtctcagaaactcaaaaatagttgacagtgttgagtatgtcccattaccaattg

SEQ ID NO: 384051 - DNA, 201 bp, Homo sapiens
agcctttctccaggtttctgtaggtggaattggcttctctttgatattctcttctgcagacaaagtcttttaatttcttccatctatgttctatcttcacygtggtttagaagtcacagattatctcctaatttttttgcaggttaattttgtgtttcttattgttttgaggaatgattatggaaagaaggagactgaaaa

SEQ ID NO: 384052 - DNA, 201 bp, Homo sapiens
ataagaaatacaggaaaagtaagatccttgcctgtcaaatgcccattgcctaaataggaaggagaagggattctatagaaagaaatgcggtaagtgctacrctaaagaggtattccaggctctgtggaaataaaaagcatgtccctcactccacctaagagaatgcttcctaataataatggcaaacattttctgagcatt

SEQ ID NO: 384053 - DNA, 201 bp, Homo sapiens
ggccatccttcatcagctcaaattcctgtcagaattttgtccttctcatagagaaatttctataggaaccataattgtacaccaaatgagttatttttatktatctaaaatttatttagtctggttttctacttgtctatttctctttcttatttagtaaaaccatcagtgggacctaatgccatgagccatactgataaa

SEQ ID NO: 384054 - DNA, 201 bp, Homo sapiens
caatatttagccttttgtttcatctctgttttcagacaaatgaatctatcttcagaaatgcctgctatgtctgttactctttgtgggtttcaaaagttcarttgttctggttctgaaggcaggtagatgtttgttgactgtatagtcaggttggagatggggacacagggtcaaataattctctctttcgttagtcattcc

SEQ ID NO: 384055 - DNA, 201 bp, Homo sapiens
atttcgttgctacatcctcttgcctctttgagttgtccttctggttaacattttcttcttttcccaagcttccagtttaattcttgctcactaatttattyctttactaaacatttatcaagcactgaaacaatgtaattaggttagctagggttctggaatataaagaaaaataagaaatacaggaaaagtaagatcctt

SEQ ID NO: 384056 - DNA, 201 bp, Homo sapiens
agaaggagaagggaacagcatcactagatagagaagacttcagcaatttccaaggagaaatcctaaggcataagtaaggctctctcttttaagtcatgttrttccatagcaatggaaggaacagggccaggcacggtggctcacaccagtaatcccagcagtttgggacgctgaggcaggagggtcatttgagctcaggaa

SEQ ID NO: 384057 - DNA, 201 bp, Homo sapiens; identical to SEQ ID NO: 83719

SEQ ID NO: 384058 - DNA, 201 bp, Homo sapiens
caataggttttgtcccctttctatacacacaaacacaaaaacaaaacaaaagaactagagtaagtttaattcctatttcatgtaccagcccttcagatgayttaaagatagccattgtgacactcctaaatttctcttccaggctattatgttccttggccattcaggttgtgctctggatgtaatataggtttttaagaa

SEQ ID NO: 384059 - DNA, 201 bp, Homo sapiens
  misc_feature (1)...(201): n = A,T,C or G
taaaaatctaattttattttattttttgatctggggactctaggaatctgattgcaatattaagttacttgacagtcaaagtgaccagacctccaagctangtttatctcatttctcaaaaaaagacacacctctaaggaacaaggtaaaacatttatttaattttttttttaatttcagaagcggtgtatgcttacaact

SEQ ID NO: 384060 - DNA, 201 bp, Homo sapiens
  misc_feature (1)...(201): n = A,T,C or G
attcatcgtataaatagaattctaaatgtgtgaatgttggcataatcaaaatttgaattttgactaaaatttaagattttttatgcctttatgaaattatntatttatgagacttttttcaaaaagaaactgattattccattttgaatcttgacaccccttgagaaaactctaaaatactcatacttacttattgtttct

SEQ ID NO: 384061 - DNA, 201 bp, Homo sapiens
tgtgtgtgtatacgtatacacacatatacctacgtatatattttccccccaagacattgctggatatggtctataattttatcaatactgtgtcagtacaytgactttcgtagcttgacaggacaacctgttatttttatggggaagatatattcaaaactccaaacaaatgtatattttaggaacatagccattcttaag

SEQ ID NO: 384062 - DNA, 201 bp, Homo sapiens
tgccagttttatctttcgagatctggaaatacaagtcaattaagtaacagtatgggccagttgggaggaagtagccatgaactgggaagggttctgagttwtacttctgtttgttgctagccaagtaattttataaccctgggcattgtcactatctcttctcttgcctgtgaaatgatatgtaggagaatacttgggcat

SEQ ID NO: 384063 - DNA, 201 bp, Homo sapiens
tttcaccatgttggccaggctggtcttgaactcctgacctcgtgatccacccgtctgggcctcccaaagtgctgggaatacaggtgtgagccactgcgccyggcctgtacatgttctttcattttcttctgctacaatcaagacacgctgtccattttatgtagctagctcactgtcagcaagtttgcgagttctttatgt

SEQ ID NO: 384064 - DNA, 201 bp, Homo sapiens
gttacatcattaagaggaatcaagatatattaagtgagaaaaatgaagtgcacaacaatgtgtactatgctgcctgtgtgtgtgtgtgtgtgtgtgtgtgyacgtgcacgtgcacgtaagtcagtggatgcacaggaagctgggagcagcaattgcctctggaaagggaggcagcgagagagattcattttgctctctgtt

SEQ ID NO: 384065 - DNA, 201 bp, Homo sapiens
aacagccttagggccgatgaaaggattaaatgagttactatcagtaatgcacctaaagcagtgccttatagatagatgataaacatacagtaagtaactcstattatgttgactttagatggtggtgccacaacatgaaaaaggaaatgtaagtgtcagaagtgatctaggcatgatagagtaacactaagagagaaaagt

SEQ ID NO: 384066 - DNA, 201 bp, Homo sapiens
catcattaagaggaatcaagatatattaagtgagaaaaatgaagtgcacaacaatgtgtactatgctgcctgtgtgtgtgtgtgtgtgtgtgtgtgcacgygcacgtgcacgtaagtcagtggatgcacaggaagctgggagcagcaattgcctctggaaagggaggcagcgagagagattcattttgctctctgttcctt

SEQ ID NO: 384067 - DNA, 201 bp, Homo sapiens
tggattaggaatttagaacctggagtcaggcttcctggaatcttgttgtgttcattgtgagatgtgtgacttgacaagttaacttctggatacttcagttytctccttttaaaaattgggactaacaattataacagccttagggccgatgaaaggattaaatgagttactatcagtaatgcacctaaagcagtgccttat

SEQ ID NO: 384068 - DNA, 201 bp, Homo sapiens
atgataaactaggtttgttaaatcaaaatatataaatatttgtgttactacatagtaaagcatgttttatatattaagcacgaattaaagcatattttatrtattaaatgttcttgttcatcagtataaaaacaccatttcctaacttaaaagatggataaaggtcataaacaggtcacaaaaggagaagtaccaatggtt

SEQ ID NO: 384069 - DNA, 201 bp, Homo sapiens
tttgggaggctgaggcgagcagatcacaaggtcaggagatcgagaccatcctggctaaaacggtgaaacgccgtctctactaaaaatataaaaaattagcsaggcgtggtggcgggtgcctgtagtcccagctactcgggaggctgaggcaggagaatggcgtcaacccgggaggtggagcttgcagtgagccgagatcac

SEQ ID NO: 384070 - DNA, 201 bp, Homo sapiens
acatactgccaaaaggccttctagaaactgtgtacccatgataaactaggtttgttaaatcaaaatatataaatatttgtgttactacatagtaaagcatrttttatatattaagcacgaattaaagcatattttatgtattaaatgttcttgttcatcagtataaaaacaccatttcctaacttaaaagatggataaagg

SEQ ID NO: 384071 - DNA, 201 bp, Homo sapiens
ccaggcgtggtggcgggtgcctgtagtcccagctactcgggaggctgaggcaggagaatggcgtcaacccgggaggtggagcttgcagtgagccgagatcrcaccactgcactccagactgggcgacagagtgagagtccatctcaaaaagtaaataaataaataaataaataaataaataagtaaagaataaagaatagc

SEQ ID NO: 384072 - DNA, 201 bp, Homo sapiens
gagtggtattactggtcccaaggcatgtatgatttaacattgatacatactgccaaaaggccttctagaaactgtgtacccatgataaactaggtttgttraatcaaaatatataaatatttgtgttactacatagtaaagcatgttttatatattaagcacgaattaaagcatattttatgtattaaatgttcttgttca

SEQ ID NO: 384073 - DNA, 201 bp, Homo sapiens
ggcgtcaacccgggaggtggagcttgcagtgagccgagatcacaccactgcactccagactgggcgacagagtgagagtccatctcaaaaagtaaataaawaaataaataaataaataaataagtaaagaataaagaatagcttgaaattaaagttagttgctttaacagaatggtcttaaaatgggtgtttaatcttcag

SEQ ID NO: 384074 - DNA, 201 bp, Homo sapiens
aattgctttcctaggccttaagtctcctgccttccttttcttatctctcaggattgtaaagagaataaaattttatttggttttttgttttttgttttttktttttttgagagagttttgctcttgttacccaggctggaatgcaatggtgcgatctccactcaccgcaacctccgccacctgggctcaagcaattcttct

SEQ ID NO: 384075 - DNA, 201 bp, Homo sapiens
atgatttattttaataccacagaatacatttgacacacagcaatcttcttgggcctcatagtgaagtaataacgatcagagctacagcacaaattacttaygactatatgacattcacaatatacatcaaaacccagaacacataaaccatgtgtatcaatagctgctggttttattggaacattttaacgattgatcatt

SEQ ID NO: 384076 - DNA, 201 bp, Homo sapiens
tgatgaatttgccagatttgcagtgtatgtggccagcactgttttaaaagaattcatcttctatatagttaaatttttgttaaccataatacttccttctsttagaccacaaaattagccacagagtagcattaccttatagctattttcttgttctcaataaaagaaatgtgctgtttaataaaagttttttttaattat

SEQ ID NO: 384077 - DNA, 201 bp, Homo sapiens
accttgcctggcctacactggtgcacttttaatgcatcttttacatgtaacatcatgagttggtcttttggaaaatattggttaattgagatgtacttccraatattgatatattttattatacaatataagaaaaaagtcacaatcaacaaagcctttaatattggaaaactgttgtgtggcagatacgttttccaaaat

SEQ ID NO: 384078 - DNA, 201 bp, Homo sapiens
tgcttccatcaagaacatttttgagacttttttttaactgcaagtgcgcagaggtggagaatacaaatagtcctggtatgactcgtacggtgtgatgccactgtcttgattcacactgagttgtcagcagtttcactctgttctgctttagcaacatccatgcaagggtcagcacagtggaaaggatgaacaaagtctgaa

SEQ ID NO: 384079 - DNA, 201 bp, Homo sapiens
gcttccatcaagaacatttttgagacttttttttaactgcaagtgcgcagaggtggagaatacaaatagtcctggtatgactcgtacggtgtgatgccactgtcttgattcacactgagttgtcagcagtttcactctgttctgctttagcaacatccatgcaagggtcagcacagtggaaaggatgaacaaagtctgaat

SEQ ID NO: 384080 - DNA, 201 bp, Homo sapiens
gactccatctcaaaaaaaatttctttttaaattaactggatattattaaattagttttcaaagttaattttcaaggtaattttacatgtttttctatttcycacaacaatattatgagatacataggattgctgctatcttctctatttgaggttaagagattgaggctctgagaggttaagcattctcaaagttgtacag

SEQ ID NO: 384081 - DNA, 201 bp, Homo sapiens
accagcctggccaacatagtgaaaccccgtctctactaagtattcaaaaattagctgggcgtagtggcagatgcctgtaatcccagcttctcggggggccragggaggagaatagcttgaacccaggaggaggaggttgcagagagttgagatcgcacccctgcactccagcctgggtgacagagcgagactccatctcaa

SEQ ID NO: 384082 - DNA, 201 bp, Homo sapiens
tcttcatatgaaataaaaggtttttgtgtatgttatataagataatatatacttgttatataagaagtacagtgtacattcatcttccttccttccttccytccctccctccctccttccttccttccttccttccctccctccctccctccttccttccttccttttttgagactgtgtcactgtgtcacccaggctgga

SEQ ID NO: 384083 - DNA, 201 bp, Homo sapiens
tcaggtagttaatttggcaccatggggatacagggattgctacaatttatcaaagaagcttcagaacccatccatgtgaggaagtataaagggcaggtagyagctgtggatacatattgctggcttcacaaaggagctattgcttgtgctgaaaaactagccaaaggtgaacctactgataggtaagtctggaccttatgt

SEQ ID NO: 384084 - DNA, 201 bp, Homo sapiens
gtttcttgagtcagcctcttaaatgttttatatttaaaaaatgttcttcccttgcagaagacgacaagccaatcttcttaagggaaagcaacttcttcgtraggggaaagtctcggaagctcgagagtgtttcacccggtctatcaatatcacacatgccatggcccacaaagtaattaaagtaagacaaaggggcagatg

SEQ ID NO: 384085 - DNA, 201 bp, Homo sapiens
aggctattatgttccttggccattcaggttgtgctctggatgtaatataggtttttaagaattgtctagttgttacagtgagtatgattattgaaatgtgrtctgcttaccacagaagaaatatttagaattgtggcactgtttcagtcctgtgcttttattattgcaaactaagattgcattcacattcttgcaatctgg

SEQ ID NO: 384086 - DNA, 201 bp, Homo sapiens
tgcattggtttaaatatagtgctatagcctataatatatatgtaagatacattattagaggagagttatgtatgtgtgtatatatacgtgtgtgtgtataygtatacacacatatacctacgtatatattttccccccaagacattgctggatatggtctataattttatcaatactgtgtcagtacactgactttcgtag

SEQ ID NO: 384087 - DNA, 201 bp, Homo sapiens
gaaaaaaaatgagaaaaatagcaaattgttaccaaaattgatagcagcaggatcttgatacctctttcctctttttttctttttttcttttttttttttarcttcccaaagcctgtcttcaggccttgggaaccattttcccatagtttagaacatggaagttccagttccagctgcctagattttgacacagcggctatg

SEQ ID NO: 384088 - DNA, 201 bp, Homo sapiens
tgattttcatgataattatctctgaacctttgtttcttcatatgaaataaaaggtttttgtgtatgttatataagataatatatacttgttatataagaartacagtgtacattcatcttccttccttccttccttccctccctccctccttccttccttccttccttccctccctccctccctccttccttccttccttt

SEQ ID NO: 384089 - DNA, 201 bp, Homo sapiens
cttccatcaagaacatttttgagacttttttttaactgcaagtgcgcagaggtggagaatacaaatagtcctggtatgactcgtacggtgtgatgccactgtcttgattcacactgagttgtcagcagtttcactctgttctgctttagcaacatccatgcaagggtcagcacagtggaaaggatgaacaaagtctgaata

SEQ ID NO: 384090 - DNA, 201 bp, Homo sapiens
ctgctgaaagagaaactgatgtgtatcctcagtttgcaaggattagtagagtttttcaagatgggtgattccaggctaaaaaaaaaaaaaacaaaaaaagsgtatgtagaaaaaagtgatatattaagggaactcttagattgttcattatggatgggctaagaatatcttagtgtttaccatgtaaaggaaccagatctt

SEQ ID NO: 384091 - DNA, 201 bp, Homo sapiens
gttcaacttattttagctagtaagatgaaaacttaaccacacgtgcgtaacgcagcgtttttacagtaggagactcttgttttatctgactcagcattttracatcctcttctaacagttcagaaaagactttaattttaaatagatattttatataatttacctctccagctgaaacatcttgttagcttcttcaatgaa

SEQ ID NO: 384092 - DNA, 201 bp, Homo sapiens
ttccatcaagaacatttttgagacttttttttaactgcaagtgcgcagaggtggagaatacaaatagtcctggtatgactcgtacggtgtgatgccactgtcttgattcacactgagttgtcagcagtttcactctgttctgctttagcaacatccatgcaagggtcagcacagtggaaaggatgaacaaagtctgaatat

SEQ ID NO: 384093 - DNA, 201 bp, Homo sapiens
tgaccattttcgtaaataggggagctgtgattccaagccaagttctctactgtctgctgaaagagaaactgatgtgtatcctcagtttgcaaggattagtrgagtttttcaagatgggtgattccaggctaaaaaaaaaaaaaacaaaaaaagcgtatgtagaaaaaagtgatatattaagggaactcttagattgttcat

SEQ ID NO: 384094 - DNA, 201 bp, Homo sapiens
ctaggtaaaatggtaggggcagattttaatcactactactactgcaatggggaaaagaacccagcgtgaactgaattcaatttcgatttgtagaggcaacmgggcgttttaaagagaatgaaggaattaggatgggactgatgacgccgagggggactgagcaactttttcaggtttgaaaagcctcaacatcaacgcgcg

SEQ ID NO: 384095 - DNA, 201 bp, Homo sapiens
gttacatgattaaaagaagggatggagctgcaccagttcaacttattttagctagtaagatgaaaacttaaccacacgtgcgtaacgcagcgtttttacaktaggagactcttgttttatctgactcagcattttgacatcctcttctaacagttcagaaaagactttaattttaaatagatattttatataatttacctc

SEQ ID NO: 384096 - DNA, 201 bp, Homo sapiens
tcgcttgaacccaggaggtggaggttgcagtgagccaagatcgtgccactgcactccagcctgggtgacagagcgagaccatctcaaaaaagaaaaaaaawaataataagatttaaccagggcttaaccatttgttcctgcttcacttatattagttcttaaccagacttgagaagggcactaaggagaaaagaattaaag

SEQ ID NO: 384097 - DNA, 201 bp, Homo sapiens
  misc_feature (1)...(201): n = A,T,C or G
agaatggcgtgaacccgggaggcggagcttgcagtgagccgatataggccactgcagtccctcctgggcgaaagagcgagactccgtctcaaaaaaaaaanaaaacaacaaaccaatttctgcattggactccaagctttctcttcatttgtctaagatgttttaataaatgtatttttctttaaatattactgttctccc

SEQ ID NO: 384098 - DNA, 201 bp, Homo sapiens
tacgttttccaaaattttaattttcatttgaaagcttgaattttatcattagcaacaaatactcttagttgtttttctttaaagtaacaggctctctttgytcattttatttgtttgtttatttatttatttattttgagacagagtctctctttgtcacccaggctggagtgcagtggcacaatctcagctcactgcagc

SEQ ID NO: 384099 - DNA, 201 bp, Homo sapiens
ctcctgaattttgctttatgatcagcaggtcccaatcattgttccataccaatgcaagttcactgtcactgatctacaacacatagaaaaaataaggatamcaatgtagtgagtctttcatcaagatgacatatttaaaaggtcatcttttttttctttattttagctgctaagtttgcgttatgcaaaaagattaaagat

SEQ ID NO: 384100 - DNA, 201 bp, Homo sapiens
caagagaatctgatcaatttgaagtccctgtttgggaatgaggcacttatcagcatgaagaattttttctcattctgtgccattttaaaaatagaatacattttgtatattgactttataattgggttgtggtttttttgctcagctttttatatttttataagaagctaaatagaagaataattgtatctctgacaggtt

SEQ ID NO: 384101 - DNA, 201 bp, Homo sapiens
ttggcctatcttaacaaagcgggaattgtgcaagccataattacagaggactcggatctcctagcttttggctgtaaaaaggtactcacctctgactactrtatattacttttctatgtagatagtagtgtaaatcaaggagctgaaatttttcctgtccaggaaattatgataatttataatatttataaaatttataat

SEQ ID NO: 384102 - DNA, 201 bp, Homo sapiens
cctggggccgacagggccggccggctgctctgagtgcggggccgccaagcccacgcccacccggaactccagctggcccgcaagcgccgggcgcagccccrgttcccactggcgcctctccctccacacctccctgtaagctgagggagtgggctccggccttggccagcccagaaaggggctcccacagagcagcggtgg

SEQ ID NO: 384103 - DNA, 201 bp, Homo sapiens
ttatgtatctgctacattatcacttttgtttaaaagtatcttcgttactacattttctttgacaaaaagaattgctgtggaaaagcctaatggtaatcttktgtgtgtgtgtgtgcatataatcattctaagtcacttgttctttttgccttagaagcctaaagcatctgggttaatgttctcaagggcctggtgtgtact

SEQ ID NO: 384104 - DNA, 201 bp, Homo sapiens
gcctcccaagtagctgggattacaggcatgtgccaccacgcccggctacttttgtatttttagtagagatggggtttctccatattggtcacgctgggctygaactcccaatctcaggtgatctgcccaccttggcctcccaaagtgctcggattacaggtgtgagccaccgtgcctggcctgttaaaggtatgatggtaa

SEQ ID NO: 384105 - DNA, 201 bp, Homo sapiens
cttctggccagtcatatttgaaggggccccgaaaagctcatggggaacattgtgtgaatgagtggggcttatgatgttggacttcattcttggatgatgtkgttggtaacacattggatttgatttgtgaattctccaatgttggaatgttctctgcacagttacatttttccaaaaagagatgtctgcttagggtatcta

SEQ ID NO: 384106 - DNA, 201 bp, Homo sapiens
gtttctccatattggtcacgctgggcttgaactcccaatctcaggtgatctgcccaccttggcctcccaaagtgctcggattacaggtgtgagccaccgtrcctggcctgttaaaggtatgatggtaaaggtgaagtcagctttttctagcttacagttctgtcatccagttcctgagctaaaataggcgctacagttctg

SEQ ID NO: 384107 - DNA, 201 bp, Homo sapiens
tgtacttttttttgaagatttagatgtcatctcttatctttctcagaatatgataattttttgaacgttttcttccgctctctgtaactgctgtgtacctktttcctgtgttgatattttctccctcatggtggtaacttctggccagtcatatttgaaggggccccgaaaagctcatggggaacattgtgtgaatgagtg

SEQ ID NO: 384108 - DNA, 201 bp, Homo sapiens
gtgtagtcaggagaagagaggctgcattgtgtgcggaagtagagaagaaaccctgattggacacaaatagtggtgtaaaagtgtgtccagaattggtgggwtcttggcctcactgacttcaagaatgaagccgcagaccctcgcggtgagtgttacagctcttaaggtggcgtgtctggagtttattccttctgatgttag

SEQ ID NO: 384109 - DNA, 201 bp, Homo sapiens
aactttatcagcttcagtgatgtaaaccttacactcaggttgctattcccctattttctaaccttgctccatgtaatacggtagccactagccatgtgtgrctatttaaatttgttaaaattaaatacaattgctattttacttccttagttatagtagccagctttcaagtgcttagtggttagtggctaacatagtgga

SEQ ID NO: 384110 - DNA, 201 bp, Homo sapiens
cagctcataaaagcagcgtggacccaaagagtgagcagtagcaagatgtattgcaaagagcgaaagaacaaagcttccatggtgtggaaggggacctaagygggttgccactgctggctggggcagccagcttttattctcttatctggccccacccacatcctgctgattggtagaaccgagtggtctgttttgacaggg

SEQ ID NO: 384111 - DNA, 201 bp, Homo sapiens
gagcacaaatctataacgaccctaaaaatgaactttatcagcttcagtgatgtaaaccttacactcaggttgctattcccctattttctaaccttgctccrtgtaatacggtagccactagccatgtgtggctatttaaatttgttaaaattaaatacaattgctattttacttccttagttatagtagccagctttcaag

SEQ ID NO: 384112 - DNA, 201 bp, Homo sapiens
cacatcctgctgattggtagaaccgagtggtctgttttgacagggtgctgattggtgcgtttacaatccctgagctggacacaaagattctccactgtccscatcagattagttagatacagtgtctacacaaaggttctccaaggccccaccagagcagctagatacagagtgtctattggtgcattcacaaaccctgag

SEQ ID NO: 384113 - DNA, 201 bp, Homo sapiens
aaaagtgatatattaagggaactcttagattgttcattatggatgggctaagaatatcttagtgtttaccatgtaaaggaaccagatcttgagaaaaaaaraagtgagcctggaaaagatgaccactaacaaactggtgatccattcagcatggaaaagtaaccattactgtaagctgaaataagccaagcctaccaagag

SEQ ID NO: 384114 - DNA, 201 bp, Homo sapiens
ctaaggccccgcgagaaatagagcgcagcgccggtgggccggcactgctgggggacccagtacatcctccgcagccgctggcccgggtgctaagccctcaytgcctggggccgacagggccggccggctgctctgagtgcggggccgccaagcccacgcccacccggaactccagctggcccgcaagcgccgggcgcagcc

SEQ ID NO: 384115 - DNA, 201 bp, Homo sapiens; identical to SEQ ID NO: 83725

SEQ ID NO: 384116 - DNA, 201 bp, Homo sapiens
ccacattttgtcttctgggctaacctttttttatgtactaatggttatagaaatgtgaatcctcctcccctagccatgccccactgaaaataaacgaactraacaaaactaggaataattcattaagtcctctctcttgctgccagatgtagtaaactcctactagaatagttaattctcaaagaatctgatgctgacagt

SEQ ID NO: 384117 - DNA, 201 bp, Homo sapiens
agccctcattgcctggggccgacagggccggccggctgctctgagtgcggggccgccaagcccacgcccacccggaactccagctggcccgcaagcgccgsgcgcagccccggttcccactggcgcctctccctccacacctccctgtaagctgagggagtgggctccggccttggccagcccagaaaggggctcccacag

SEQ ID NO: 384118 - DNA, 201 bp, Homo sapiens
aacagaatggtcttaaaatgggtgtttaatcttcaggttcctgggctatataagtccagttctgcagactctctttctacaaccaagatcaaacctctagracctgccagagccagtgggctgagcaagaagccggcaagcatccagaagagaaagcatcataatgccgagaacaagccggggttacagatcaaactcaat

SEQ ID NO: 384119 - DNA, 201 bp, Homo sapiens
agttcacactgtaggctggtagaactccacattttgtcttctgggctaacctttttttatgtactaatggttatagaaatgtgaatcctcctcccctagcyatgccccactgaaaataaacgaactaaacaaaactaggaataattcattaagtcctctctcttgctgccagatgtagtaaactcctactagaatagttaa

SEQ ID NO: 384120 - DNA, 201 bp, Homo sapiens
gaatcatccttatccttatgttttcttttctgaggcatagtttttttttttttttttttaaagtccttatttttaggacaatgggatataaactgaagttmaggccaaatctctaagtacaggtgaaacaaagatttacagataattttgtttttatttagcagagctgtcagaagatgacctgttgagtcagtattctct

SEQ ID NO: 384121 - DNA, 201 bp, Homo sapiens
ggatttctgcatgttggccaggctggtctggaactcccaacctcgggtgatccgcccacctcggcctcccaaagcgctgggattacaggcgtgagccaccrctcctagccgcgatttgctgttttcttctgcttcttcagtattgtatgtattccttaagatactgtctcccatcattgtctttctctttgtatttctgtt

SEQ ID NO: 384122 - DNA, 201 bp, Homo sapiens
ggccgacagggccggccggctgctctgagtgcggggccgccaagcccacgcccacccggaactccagctggcccgcaagcgccgggcgcagccccggttcycactggcgcctctccctccacacctccctgtaagctgagggagtgggctccggccttggccagcccagaaaggggctcccacagagcagcggtgggctga

SEQ ID NO: 384123 - DNA, 201 bp, Homo sapiens
acatatttgtagttagaaaatatatactttgatagcctttttagatagtggtaaattttcttctttgctgttatgtctaaatccaacaacttgtagtttcyttaggtcagtgatagtgtagaatatgaaaccatatcaactgactttttgtactctgtgttttattgcagtccactggtgtcccttttttctgttgcctag

SEQ ID NO: 384124 - DNA, 201 bp, Homo sapiens
caggttcctgggctatataagtccagttctgcagactctctttctacaaccaagatcaaacctctaggacctgccagagccagtgggctgagcaagaagcyggcaagcatccagaagagaaagcatcataatgccgagaacaagccggggttacagatcaaactcaatgagctctggaaaaactttggatttaaaaagtga

SEQ ID NO: 384125 - DNA, 201 bp, Homo sapiens
gcaatggtattcatcttaagttttagtacttcagaaatatattttcatttactcttcttattccttctaaatttctccttatgacaaaacaaaacagtaayacaggtgtgcatactggtctagaagactgtctgtttctcttcctatgaacgtctttatctcgtctttttcatttctgcttcatactgcatcttctcttac

SEQ ID NO: 384126 - DNA, 201 bp, Homo sapiens
ccgacagggccggccggctgctctgagtgcggggccgccaagcccacgcccacccggaactccagctggcccgcaagcgccgggcgcagccccggttcccrctggcgcctctccctccacacctccctgtaagctgagggagtgggctccggccttggccagcccagaaaggggctcccacagagcagcggtgggctgaag

SEQ ID NO: 384127 - DNA, 201 bp, Homo sapiens
caaatccccccaaaaggtaagaaaagtggcatggctttacatttcattttgcaaatctttactatctagtttgcaaatctttactgtctggcttaatagarctcagccggattcttgtatctgcttctacatttgatctgttatgatttggtgttttggttgagtatatgaaggaaatagacatatttgtagttagaaaat

SEQ ID NO: 384128 - DNA, 201 bp, Homo sapiens
aatagctatattttccaaatccccccaaaaggtaagaaaagtggcatggctttacatttcattttgcaaatctttactatctagtttgcaaatctttactrtctggcttaatagaactcagccggattcttgtatctgcttctacatttgatctgttatgatttggtgttttggttgagtatatgaaggaaatagacatat

SEQ ID NO: 384129 - DNA, 201 bp, Homo sapiens
ttttaaaatatctattttaaaataatgataagcctattacatgaatgtagatagtacatttaaaaaataaatagctatattttccaaatccccccaaaagstaagaaaagtggcatggctttacatttcattttgcaaatctttactatctagtttgcaaatctttactgtctggcttaatagaactcagccggattcttg

SEQ ID NO: 384130 - DNA, 201 bp, Homo sapiens
gggttgcgggatacgcgttgacgtcacatcctctgggcggggccgcaaggaacccgcgcaaattgaaaggtcagcctttcgcgcgctgtgtaggcaagttrcccgtgttctgcgttgccggccgtgggtgctctggccacagtgagttaggggcgtcggagcgggtttctccaaccgcaatcggctccgctcaaggggagg

SEQ ID NO: 384131 - DNA, 201 bp, Homo sapiens
ctaggattaaaccatatgacagcagttttcaaactttttcttttcaggaatgctttatactcttagaaattattaaaggccccaaaatactttggtttatktaggttatatttgtcaacacttaaccatcatagaaattgaaatagacattttaaaatatctattttaaaataatgataagcctattacatgaatgtagat

SEQ ID NO: 384132 - DNA, 201 bp, Homo sapiens
tatggaatgataggattaaaccttacctagtagaaatattgtcatagatgaggcggtatgagtgggaaacactttgtaaataagtaagtgctggacaatcrtttcttattttacattgtgtaaagtctaggattaaaccatatgacagcagttttcaaactttttcttttcaggaatgctttatactcttagaaattatta

SEQ ID NO: 384133 - DNA, 201 bp, Homo sapiens
gatcttgggactctccaggggttgtggaacatgctttgaaaactgttgctagacagaaattaagggtgcaacagtattcttaaatacctttgagaaaaagragatgtactggtatttaatttttgttgacaggagatagaattacctgtaatatcttcataacaggattaatttttatagatagcttccttccagaaaaga

SEQ ID NO: 384134 - DNA, 201 bp, Homo sapiens
gtgtactttctaatgagtcaaaaacttttttcagttctaggaaagcttcttgaattacagttctgttacagtttcttgagtcagcctcttaaatgttttayatttaaaaaatgttcttcccttgcagaagacgacaagccaatcttcttaagggaaagcaacttcttcgtgaggggaaagtctcggaagctcgagagtgtt

SEQ ID NO: 384135 - DNA, 201 bp, Homo sapiens
ccggtctatcaatatcacacatgccatggcccacaaagtaattaaagtaagacaaaggggcagatgggcaagttcaccaaagctagttacaacttgtttaytgatgggagaggaagaaaatcaagggtggaaaattgttctaggcctaacctcaagtaaagggcagatgtcagaaggagaagggaacagcatcactagata

SEQ ID NO: 384136 - DNA, 201 bp, Homo sapiens
tagaagcctaaagcatctgggttaatgttctcaagggcctggtgtgtactttctaatgagtcaaaaacttttttcagttctaggaaagcttcttgaattayagttctgttacagtttcttgagtcagcctcttaaatgttttatatttaaaaaatgttcttcccttgcagaagacgacaagccaatcttcttaagggaaag

SEQ ID NO: 384137 - DNA, 201 bp, Homo sapiens
tggaccaaaaaaggaaaaaaaatgagaaaaatagcaaattgttaccaaaattgatagcagcaggatcttgatacctctttcctctttttttctttttttcttttttttttttagcttcccaaagcctgtcttcaggccttgggaaccattttcccatagtttagaacatggaagttccagttccagctgcctagattttga

SEQ ID NO: 384138 - DNA, 201 bp, Homo sapiens
ctctacaaaaaatacaaaaaaattagttgggcatggtggcatgcacctgtagtcccacctactcgggaggctgaggtgggaagatcacctgagcccagagyccaggaggtcgaagctgcagtgtgccctgccggctggcaccactgccactccagcctgggtgacagagccagaccctgtctccaaaaaataaaatgatta

SEQ ID NO: 384139 - DNA, 201 bp, Homo sapiens
agagattgaggctctgagaggttaagcattctcaaagttgtacagttagtactggtgataggaagattcctagtcacagttgatataatggattggaagcrgcatacaatccaataggcctggatttgaattctcactctgtcatctttttagttgagtcgtctttcacacactgttcacctccctgagcctatttgttta

SEQ ID NO: 384140 - DNA, 201 bp, Homo sapiens
ctgccggctggcaccactgccactccagcctgggtgacagagccagaccctgtctccaaaaaataaaatgattacttttgtaacttgtaggattctttttwtctctggctgtgtagcagtatttcttttctccaaattttataagttgattttttaaaaatgtcttaatggctatataattagttcaacatatactaaaac

SEQ ID NO: 384141 - DNA, 201 bp, Homo sapiens
tgccggctggcaccactgccactccagcctgggtgacagagccagaccctgtctccaaaaaataaaatgattacttttgtaacttgtaggattctttttayctctggctgtgtagcagtatttcttttctccaaattttataagttgattttttaaaaatgtcttaatggctatataattagttcaacatatactaaaact

SEQ ID NO: 384142 - DNA, 201 bp, Homo sapiens
aatatctcactgagaagaaacctatgtgtattactgagcgaagtaaaggaccaagctacggggctatctgttggaagagcattctgggaagaaggaacagygtatgcaaagccctagaggtgggagtgtacctggcatattcaaagaatggcacggaggctagatggctaaagtagagtgggcaagagcaagaagagtggg

SEQ ID NO: 384143 - DNA, 201 bp, Homo sapiens
atgtttatcaattcacttaaactttataataaactcattacatgttagcataaatagcatgcttttatgaaaaataatcattttttaaaacaaaaattatragagaggaatcatacatttatgcaaatctctttaatgtggcctaatagaagacagctgtgttcgtatacaagttgaacatccctaatccaaaaatctgaa

SEQ ID NO: 384144 - DNA, 201 bp, Homo sapiens
tcacattttattcatttgaaggacttctctgtatctttcacattttaaactgcaatacatttaaattaactctgtatatttcctgaatcactgtatgttcrattggtgagtatctcaaggggtgccacagttaaaaccgaggcagagtgataatctgtgaaatgaaaaattattatcaatttactgtttaaatccttaata

SEQ ID NO: 384145 - DNA, 201 bp, Homo sapiens
cttccaaacttaacgtttgataggagagatttgtattatgaaatgctaagcaactgctcagtgcccattactgactttttattgtagagtggggggaggtygtttcatcagaaagggttgtgacagttccagaatctctgtatagaaagggcttagggggctgcaaccggaatggaagggggtggaaagttaaagcatttg

SEQ ID NO: 384146 - DNA, 201 bp, Homo sapiens
ctgcagagacagatagagactagcaaactgtgtctgctttcagtaatgctgatgtataaagtaaggagactccatttaagtcataaacctatggattttcrtgacaatagaaaacatttttccatcttagtataatatcatttggttggttgttaataaatacatttttccttaatcttgctaatctagatatgttgatga

SEQ ID NO: 384147 - DNA, 201 bp, Homo sapiens
agagttcaaatgcatcaaagctttctcagtgctctagtaaggactctgattcagaggtaagtcaaatcctgaaggctttgttttcaaatttatatgtaagraaaaatagattgttgctcaaactgaggaaatttttcctacatgtgaatgacgagctatattattttttcattctaaactctactgtgcagaaagttcaca

SEQ ID NO: 384148 - DNA, 201 bp, Homo sapiens
atgctacgggagttaaagctgttttttcactcatgcacaatttaacaaatatttaatgcacgcccctgctgtttctttaaacaatttgctgttttcttttmttttttcttttttgagacagagtttcattcttgttgcccaggctggagtgcaatggtgcgatctcagctcaccacaacctccgcctcccaggttcgagca

SEQ ID NO: 384149 - DNA, 201 bp, Homo sapiens
tgctacgggagttaaagctgttttttcactcatgcacaatttaacaaatatttaatgcacgcccctgctgtttctttaaacaatttgctgttttcttttchtttttcttttttgagacagagtttcattcttgttgcccaggctggagtgcaatggtgcgatctcagctcaccacaacctccgcctcccaggttcgagcaa

SEQ ID NO: 384150 - DNA, 201 bp, Homo sapiens
tctactgtctgctgaaagagaaactgatgtgtatcctcagtttgcaaggattagtagagtttttcaagatgggtgattccaggctaaaaaaaaaaaaaacaaaaaaagcgtatgtagaaaaaagtgatatattaagggaactcttagattgttcattatggatgggctaagaatatcttagtgtttaccatgtaaaggaac

SEQ ID NO: 384151 - DNA, 201 bp, Homo sapiens
tgctttaacagaatggtcttaaaatgggtgtttaatcttcaggttcctgggctatataagtccagttctgcagactctctttctacaaccaagatcaaacytctaggacctgccagagccagtgggctgagcaagaagccggcaagcatccagaagagaaagcatcataatgccgagaacaagccggggttacagatcaaa

SEQ ID NO: 384152 - DNA, 201 bp, Homo sapiens; identical to SEQ ID NO: 83714

SEQ ID NO: 384153 - DNA, 201 bp, Homo sapiens
tcttgcttctccttttccagtttaaataccttttatttctttttcttagtataagaatctaagcttgttttcttttgaactgcctgatttcaagattataytgcctgacttcaagatttcctatgagccacagtgtgtgatgtaacagtgtatctgatgtaaagataggtaaggagagcaatggtgcagaataatagagtt

SEQ ID NO: 384154 - DNA, 201 bp, Homo sapiens; identical to SEQ ID NO: 83715

SEQ ID NO: 384155 - DNA, 201 bp, Homo sapiens
aaaattaagaagtgactgttatttattatcaaacccttatccttgagcatttcatttgaatataccaagcatttgatgcctttttttctcatctcactccrttcggcttctgtggcatttggcatcattgaagacccaagcctaggaatgctacgggagttaaagctgttttttcactcatgcacaatttaacaaatattt

SEQ ID NO: 384156 - DNA, 201 bp, Homo sapiens
acatgcaggctgatgcagagccctgagtcacttaggtggtggctaggactttcccctctgtttcccttaaagggagggagtcagtgatggcctgggccctygtcagaagacaccaactcctgcagagacagatagagactagcaaactgtgtctgctttcagtaatgctgatgtataaagtaaggagactccatttaagtc

SEQ ID NO: 384157 - DNA, 201 bp, Homo sapiens
tgcccttcccatagccactggccatgtacatgcaggctgatgcagagccctgagtcacttaggtggtggctaggactttcccctctgtttcccttaaaggsagggagtcagtgatggcctgggcccttgtcagaagacaccaactcctgcagagacagatagagactagcaaactgtgtctgctttcagtaatgctgatgt

SEQ ID NO: 384158 - DNA, 201 bp, Homo sapiens
tcatttaaattaccatgctagtgaaaattgagaacaactttttgtttataaacccgaggctcatccactatgcatcctgattacttagattgactgacagwagcatgcacagggtccgtcacttacggtacacattccaaaggtggctcttgagaggacctcctcgtggcaagcaagctcgacttatcaggaagagcattc

SEQ ID NO: 384159 - DNA, 201 bp, Homo sapiens
agtgtcccaggtgggaataggaccacgtgccttaactagcctgtgactccaggatccgtttggttctctgggccttccctttttcatctatgaatttactrtgcaatgtttaggatcctttccagctttaagcatccatgactctcacagaaatcagaatgtcaacttggtttaaaaatatgatctagaaatatttgcatt

SEQ ID NO: 384160 - DNA, 201 bp, Homo sapiens
gctcctgggctcaagcgatcttcagtaactggcatcaagcctcttgagtagctggaactacaggcacatgccaccatgcctggctaattttgtgtgtgtgkggggggggtctcactatgttgcccaggctagtcttgaactcctggcctgaagcagtcattctgccttggcctccaaaacttctgaggttacacatgtgga

SEQ ID NO: 384161 - DNA, 201 bp, Homo sapiens
tcctgggctcaagcgatcttcagtaactggcatcaagcctcttgagtagctggaactacaggcacatgccaccatgcctggctaattttgtgtgtgtgtgkggggggtctcactatgttgcccaggctagtcttgaactcctggcctgaagcagtcattctgccttggcctccaaaacttctgaggttacacatgtggagc

SEQ ID NO: 384162 - DNA, 201 bp, Homo sapiens
ctgggctcaagcgatcttcagtaactggcatcaagcctcttgagtagctggaactacaggcacatgccaccatgcctggctaattttgtgtgtgtgtgggkggggtctcactatgttgcccaggctagtcttgaactcctggcctgaagcagtcattctgccttggcctccaaaacttctgaggttacacatgtggagcca

SEQ ID NO: 384163 - DNA, 201 bp, Homo sapiens
caggctagtcttgaactcctggcctgaagcagtcattctgccttggcctccaaaacttctgaggttacacatgtggagccaccacacctggccacagcattatatatatatatatatattttttgacttgaatatctctttttttttttttttgaacagaatctctctctcttgcccaggctggcacgcggtggcatgatt

SEQ ID NO: 384164 - DNA, 201 bp, Homo sapiens
ttgtacaccaaatgagttatttttatgtatctaaaatttatttagtctggttttctacttgtctatttctctttcttatttagtaaaaccatcagtgggayctaatgccatgagccatactgataaagctatctttttatattcgttccctcaattaaattaccttccttattaattctcaaagggtattctgaataatgt

SEQ ID NO: 384165 - DNA, 201 bp, Homo sapiens
aggctagtcttgaactcctggcctgaagcagtcattctgccttggcctccaaaacttctgaggttacacatgtggagccaccacacctggccacagcattatatatatatatatatattttttgacttgaatatctctttttttttttttttgaacagaatctctctctcttgcccaggctggcacgcggtggcatgattt

SEQ ID NO: 384166 - DNA, 201 bp, Homo sapiens
catcataggaattgccgttgatttaaaaatgaatttgccgtcctatctaggagctcatgttttctgcttactgaaaagcctagtaagagcttttcttccaygtactgcttcctgccccctccccatacaactaatctagggatttggtgaaaggatagaaaggatttttactctctagcatttagtaaatattctgttcat

SEQ ID NO: 384167 - DNA, 201 bp, Homo sapiens
atttgctaagtgtcatattcaatttctgaagcatttccttaataaaataataaatcataatatggatttaaatattctgttatgcgaataacctatattayattattaaaaggagcaaatgactgaggcactagaactttgccttagcaactaacatatattgggaaaatcatgttttctgcaattggcaaaaaagtagtg

SEQ ID NO: 384168 - DNA, 201 bp, Homo sapiens
tgccttggcctccaaaacttctgaggttacacatgtggagccaccacacctggccacagcattatatatatatatatatattttttgacttgaatatctctttttttttttttttgaacagaatctctctctcttgcccaggctggcacgcggtggcatgattttagctcactgcaacgtctgcctccgagtttcaagtgg

SEQ ID NO: 384169 - DNA, 201 bp, Homo sapiens
atcaatactgtgtcagtacactgactttcgtagcttgacaggacaacctgttatttttatggggaagatatattcaaaactccaaacaaatgtatattttmggaacatagccattcttaagatggaagttttctataatttaaaataagtgggccaggcacaatggctgaacgcttacaatgccaacactttgggaagctg

SEQ ID NO: 384170 - DNA, 201 bp, Homo sapiens
gaaactcaaaaatagttgacagtgttgagtatgtcccattaccaattgtaatgttatggaatgctaagatggccatccttcatcagctcaaattcctgtcagaattttgtccttctcatagagaaatttctataggaaccataattgtacaccaaatgagttatttttatgtatctaaaatttatttagtctggttttcta

SEQ ID NO: 384171 - DNA, 201 bp, Homo sapiens
aaactcaaaaatagttgacagtgttgagtatgtcccattaccaattgtaatgttatggaatgctaagatggccatccttcatcagctcaaattcctgtcagaattttgtccttctcatagagaaatttctataggaaccataattgtacaccaaatgagttatttttatgtatctaaaatttatttagtctggttttctac

SEQ ID NO: 384172 - DNA, 201 bp, Homo sapiens
gtgtgtgtgtgtgtgtgtgcacgtgcacgtgcacgtaagtcagtggatgcacaggaagctgggagcagcaattgcctctggaaagggaggcagcgagagasattcattttgctctctgttcctttacaaaagagagaacttttaaattttatgccaggtttacatattacctgttaaaataatttatgatgacttctgtaa

SEQ ID NO: 384173 - DNA, 201 bp, Homo sapiens
agtgagaaaaatgaagtgcacaacaatgtgtactatgctgcctgtgtgtgtgtgtgtgtgtgtgtgtgcacgtgcacgtgcacgtaagtcagtggatgcayaggaagctgggagcagcaattgcctctggaaagggaggcagcgagagagattcattttgctctctgttcctttacaaaagagagaacttttaaattttat

SEQ ID NO: 384174 - DNA, 201 bp, Homo sapiens
caaatgtattttattgtattttgcagagattctgaaaagcttcctccttgtaagaaacccctgtccccagtcagagataacatccaactaactccagaagyggaagaggatatatttaacaaacctgaatgtggccgtgttcaaagagcaatattccagtaaatgcagactgctgcaaagcttttgcctgcaagagaatct

SEQ ID NO: 384175 - DNA, 201 bp, Homo sapiens
gactcagaatgtattgggagtgctcacaggagaacctgattgtgttatataatgaattgaaagagatcgtacagtaaagggtcttatcctcttcatgtccstctattttgtccaggtagaatatttcttctctaataatcagtaccttaaaaataccaaatgtattttattgtattttgcagagattctgaaaagcttcct

SEQ ID NO: 384176 - DNA, 201 bp, Homo sapiens
  misc_feature (1)...(201): n = A,T,C or G
agtggtggcccagcacctacactgaatagtgattttgaaagcaagaagaggcactaagaagtgagactcagaatgtattgggagtgctcacaggagaaccngattgtgttatataatgaattgaaagagatcgtacagtaaagggtcttatcctcttcatgtccctctattttgtccaggtagaatatttcttctctaata

SEQ ID NO: 384177 - DNA, 201 bp, Homo sapiens
ctttctttaagtgaaaggctttgattagattctgagttcatgtgggatttttgtcaggtgggattgtaatgattttttttgtgtctttgctaattttttcyctttggctgtccttctctgttagaatatcattgacatcctcttagcagatcattgtcttccaaaatttgtagtaattgtgaataacttatattagcatta

SEQ ID NO: 384178 - DNA, 201 bp, Homo sapiens
acatgtttttctatttctcacaacaatattatgagatacataggattgctgctatcttctctatttgaggttaagagattgaggctctgagaggttaagcmttctcaaagttgtacagttagtactggtgataggaagattcctagtcacagttgatataatggattggaagcagcatacaatccaataggcctggatttg

SEQ ID NO: 384179 - DNA, 201 bp, Homo sapiens
gtagagtgtccctgtgctgctgcttcatgttgagctcttctttggagacaacaaatgagaatgtttgtgtgtctctacagggctcgcctatttagtcattrtagaagcttaaggaagtcttcaagtttgagactgtacatcgctgctttatgtagtttagatgtttcactagtaacttgttcagagggtgcattaagagat

SEQ ID NO: 384180 - DNA, 201 bp, Homo sapiens
cagggatttaactaccacttctgttttggtgacccttcaggtgagctctccctgatacccatctttaatacctaaaatcaaactcgtgtcttttacctctrtttcttctcggaacgttttttgttttatctattaaataaaattatattatctgccacttagtttcaaaatcctaaggttgtcctttttcttgataactgt

SEQ ID NO: 384181 - DNA, 201 bp, Homo sapiens
catgcagaattatttacaatgatggatagaactggagatgtagaaagtacttttcctgaaggagttatgtctagatagtaaaccatcatattattattatwattctcagacatttgcattgtcagggatttaactaccacttctgttttggtgacccttcaggtgagctctccctgatacccatctttaatacctaaaatc

SEQ ID NO: 384182 - DNA, 201 bp, Homo sapiens
aagatataaatacttttgaacagatcgatgactacaatccagacactgctatggtaacgttttgatgaccaccctatgaaaacacgttttagttatgtccygagctgtgattaaaggcaaatcttcatacactaagcttcttttaagcgtttctatatccaggctctgtgcagaatgtacattaaaaacaacttgatccta

SEQ ID NO: 384183 - DNA, 201 bp, Homo sapiens
cccgcactcctcagcccttgggtggtggatgagactgggcgccgtggagcagggggtggtgctcgttggggaggctcgggcggcacaggagcccacggagsgggtgggaggctcaggcatggcgggctgcagtcccgagtcctgccccgcaggaaggcagctaaggccccgcgagaaatagagcgcagcgccggtgggccg

SEQ ID NO: 384184 - DNA, 201 bp, Homo sapiens
tgccaagacaattaaatggggaaggaaactagaatctgtagtacaatattgaacagaagtgctgagaggaatatactaggtattggggaaacgtgggaatkttttcaccatagaggatgtttaaaatgaaaagaatgattataattgcttccttctctcttaacttccttccctcagacatctacatcggtgaatgaaata

SEQ ID NO: 384185 - DNA, 201 bp, Homo sapiens
ctgatattaaatcttaaactaatgtgtgaaattataaaatagacctaagggagtttttttgaatcatccttatccttatgttttcttttctgaggcatagtttttttttttttttttttaaagtccttatttttaggacaatgggatataaactgaagttaaggccaaatctctaagtacaggtgaaacaaagatttacag

SEQ ID NO: 384186 - DNA, 201 bp, Homo sapiens
agaaggaaacgatgcgatgcaggacagagcgtgaagtataaagaaatgtgtgctctgtgtagtcaggagaagagaggctgcattgtgtgcggaagtagagragaaaccctgattggacacaaatagtggtgtaaaagtgtgtccagaattggtgggatcttggcctcactgacttcaagaatgaagccgcagaccctcgcg

SEQ ID NO: 384187 - DNA, 201 bp, Homo sapiens
tgcttaaatgataaatatttatttctcacagttctagaggctgggaagtccaaggtctgagtgagagcccacttcctggtttgcagacagatgccttctckctgtgtccttacatggtagagggagagaatatctcttttgtacctcttcttaagggcactaatctcattcatgagggctctactctcatgatctaatcac

SEQ ID NO: 384188 - DNA, 201 bp, Homo sapiens
gggtcaagctagaaggaaacgatgcgatgcaggacagagcgtgaagtataaagaaatgtgtgctctgtgtagtcaggagaagagaggctgcattgtgtgcrgaagtagagaagaaaccctgattggacacaaatagtggtgtaaaagtgtgtccagaattggtgggatcttggcctcactgacttcaagaatgaagccgca

SEQ ID NO: 384189 - DNA, 201 bp, Homo sapiens
accgtgcctggcctgttaaaggtatgatggtaaaggtgaagtcagctttttctagcttacagttctgtcatccagttcctgagctaaaataggcgctacasttctgattttggctttgtcatttgagtctctggctcttttctgtatgggtcaagctagaaggaaacgatgcgatgcaggacagagcgtgaagtataaaga

SEQ ID NO: 384190 - DNA, 201 bp, Homo sapiens
ctctgttctgctttagcaacatccatgcaagggtcagcacagtggaaaggatgaacaaagtctgaatattgtaagaatagttttggtcttggaaaccgttsaaaggatcttgggactctccaggggttgtggaacatgctttgaaaactgttgctagacagaaattaagggtgcaacagtattcttaaatacctttgagaa

SEQ ID NO: 384191 - DNA, 201 bp, Homo sapiens
taattttattttattttttgatctggggactctaggaatctgattgcaatattaagttacttgacagtcaaagtgaccagacctccaagctatgtttatcwcatttctcaaaaaaagacacacctctaaggaacaaggtaaaacatttatttaattttttttttaatttcagaagcggtgtatgcttacaactagaaaatg

SEQ ID NO: 384192 - DNA, 201 bp, Homo sapiens
aagttacttgacagtcaaagtgaccagacctccaagctatgtttatctcatttctcaaaaaaagacacacctctaaggaacaaggtaaaacatttatttawttttttttttaatttcagaagcggtgtatgcttacaactagaaaatgagaaatacaagcagaattaaaaatcaaaatacctgtagtctcatttatataaa

SEQ ID NO: 384193 - DNA, 201 bp, Homo sapiens
tctctaagtacaggtgaaacaaagatttacagataattttgtttttatttagcagagctgtcagaagatgacctgttgagtcagtattctctttcatttaygaagaagaccaagaaaaatagctctgaaggcaataaatcattgagcttttctgaagtgtttgtgcctgacctggtaaatggacctactaacaaaaagagt

SEQ ID NO: 384194 - DNA, 201 bp, Homo sapiens
gattgctgctatcttctctatttgaggttaagagattgaggctctgagaggttaagcattctcaaagttgtacagttagtactggtgataggaagattccyagtcacagttgatataatggattggaagcagcatacaatccaataggcctggatttgaattctcactctgtcatctttttagttgagtcgtctttcacac

SEQ ID NO: 384195 - DNA, 201 bp, Homo sapiens
ttagtgaaaaggaaaaatatgttattaacaatatgtatagtggtgtttttgtttaaatactttaaaatattcatgtacacatttgcatgtttgtggcatcmtattaagaagtctggaaagatacatgcagaattatttacaatgatggatagaactggagatgtagaaagtacttttcctgaaggagttatgtctagatag

SEQ ID NO: 384196 - DNA, 201 bp, Homo sapiens
gatcaatttgaagtccctgtttgggaatgaggcacttatcagcatgaagaattttttctcattctgtgccattttaaaaatagaatacattttgtatattractttataattgggttgtggtttttttgctcagctttttatatttttataagaagctaaatagaagaataattgtatctctgacaggtttttggaggttt

SEQ ID NO: 384197 - DNA, 201 bp, Homo sapiens
tgaaccatcatgccactgcagtccagccagggtgagacagtgcaagactccgcctccaggaaaaatagaaaagaaaagaaactttgagagggttttaatcrggggaggtggtgtatgatttgatctctgttttagatcaaccattctgagcgccctgtgaagagtgggctgaagagggccacagatggggcacaaggacca

SEQ ID NO: 384198 - DNA, 201 bp, Homo sapiens
ttttctgttctttttcttgtgtttttctaccatgagcatatattatgtttctagtagcataaaaacttcttactttttaaaattttaataaatggccctgsctatccatttgaaagaagatgtagtctcacacaatataaatgtaaattctactgtagtcaatatgggttgctataacagaataccagaaactggatttgc

SEQ ID NO: 384199 - DNA, 201 bp, Homo sapiens
ttataatagtgaaaaaatggaaataacctaaataacaataagggagtgagttattaaataatcattggttttagctcttactggtagaaatataggtgaayttttttctgttctttttcttgtgtttttctaccatgagcatatattatgtttctagtagcataaaaacttcttactttttaaaattttaataaatggccc

SEQ ID NO: 384200 - DNA, 201 bp, Homo sapiens
aggcatgcaccaccacgcccggctaattttgtatttttagtagagacaggatttctgcatgttggccaggctggtctggaactcccaacctcgggtgatcygcccacctcggcctcccaaagcgctgggattacaggcgtgagccaccgctcctagccgcgatttgctgttttcttctgcttcttcagtattgtatgtatt

SEQ ID NO: 384201 - DNA, 201 bp, Homo sapiens
ctggctgtgtagcagtatttcttttctccaaattttataagttgattttttaaaaatgtcttaatggctatataattagttcaacatatactaaaacttayagtagaaaaactctacttcaaaggaaatgatttctcaaagtaatattagcatgtgcctgctgaggctagtaataaagtgggtttgaaacaggaagttgtt

SEQ ID NO: 384202 - DNA, 201 bp, Homo sapiens
ttttctcctgttttctcctagaagttttatagttgtattagtccattttcaccctgctgataaacacatacctgagactgggcaatttacaaaagaaagargtttaatggacgcacagttccatgtagctggggaggcctcacaattatggtggaaggtgaaaggcacttctcacatggtagcaaacgagaagaatgagag

SEQ ID NO: 384203 - DNA, 201 bp, Homo sapiens
gagtttttttgaatcatccttatccttatgttttcttttctgaggcatagtttttttttttttttttttaaagtccttatttttaggacaatgggatataractgaagttaaggccaaatctctaagtacaggtgaaacaaagatttacagataattttgtttttatttagcagagctgtcagaagatgacctgttgagtc

SEQ ID NO: 384204 - DNA, 201 bp, Homo sapiens
cagaaggaaataaattgattattttctttctgcaaataatctttttccttttccttttctagcctgcccattcaagaagtcatagttgggatgacaaaacrtgtcaaaagtcagctaatgttagcagcatttggcataggaattactctcccagaccagagtcgggtactgtttcagatgccccacaattgaaggaaaatc

SEQ ID NO: 384205 - DNA, 201 bp, Homo sapiens
tcaagtttaataaatcaggcagcagtcagctttgtctaaccatgatgatgggagaagagcatgaaagaatgaaccactggtagtttcttagtctcacctcrggtgatgtttcaaacccttctcccatggagtcttctcaaggaaacagttgcaatacaatatgattaaatgatagttttgattcgtcttttgctagtcacc

SEQ ID NO: 384206 - DNA, 201 bp, Homo sapiens; identical to SEQ ID NO: 83712

SEQ ID NO: 384207 - DNA, 201 bp, Homo sapiens
ccatacagtatggtgagtacagagataaaggcatgaatacggtgttttgagggcgttcaaggggcatctaatgctggggcaatggttggaaagggtaagarggaagggatgagtgttgggtgtccctgcctaggtttaaatgacaggtgaagcaggcaaagaccggcaccaagtaccttcccagtacagtcagacagcttg

SEQ ID NO: 384208 - DNA, 201 bp, Homo sapiens
taattctctacttaatctctaacttcattgcactaaggtcagacactgtagtctatatgataccaatttttaaaattttaagccaggctcagtggcttgcrcctgttgtcctaggtactcgggaggttgaggcaagaggatcacttgagcccaggagttcagcaccttagtaccctatgatcatcgctgtgaagagccact

SEQ ID NO: 384209 - DNA, 201 bp, Homo sapiens
cctcaattaaattaccttccttattaattctcaaagggtattctgaataatgtcaccggttttatttatttttatttttgtcctttctttaagtgaaaggstttgattagattctgagttcatgtgggatttttgtcaggtgggattgtaatgattttttttgtgtctttgctaattttttccctttggctgtccttctct

SEQ ID NO: 384210 - DNA, 201 bp, Homo sapiens
aaaccccgtctctactaagtattcaaaaattagctgggcgtagtggcagatgcctgtaatcccagcttctcggggggccgagggaggagaatagcttgaayccaggaggaggaggttgcagagagttgagatcgcacccctgcactccagcctgggtgacagagcgagactccatctcaaaaaaaatttctttttaaatta

SEQ ID NO: 384211 - DNA, 201 bp, Homo sapiens
tgccatgagccatactgataaagctatctttttatattcgttccctcaattaaattaccttccttattaattctcaaagggtattctgaataatgtcacckgttttatttatttttatttttgtcctttctttaagtgaaaggctttgattagattctgagttcatgtgggatttttgtcaggtgggattgtaatgatttt

SEQ ID NO: 384212 - DNA, 201 bp, Homo sapiens
gcttctctgctcaaagggtcttactagttcagaatacattatcgtaaaacaaaaaataaatacaaaagaaattttttaaacattagtcaaatgtggtgacktgtgtctgtagtcccatctattcaggaggctgaggtgggaggatcgctcgagcctcagagttggaggctgcagtgagccatggccacatcactgcgcccc

SEQ ID NO: 384213 - DNA, 201 bp, Homo sapiens
tttataatttatgttgatacagaaggaaataaattgattattttctttctgcaaataatctttttccttttccttttctagcctgcccattcaagaagtcrtagttgggatgacaaaacatgtcaaaagtcagctaatgttagcagcatttggcataggaattactctcccagaccagagtcgggtactgtttcagatgcc

SEQ ID NO: 384214 - DNA, 201 bp, Homo sapiens
acttacctcatttttccgcagaagctggcagtccaggttttacatgcaatctctccacctttaaatgttgacaagtacattttcccataatattttgcagrcctaaggaaacgtgtcgtctggaatgggcttgggggccacgcctgcacatctccgcgagacagagggataaagtgaagatggtgctgttattgttacctc

SEQ ID NO: 384215 - DNA, 201 bp, Homo sapiens
aactgttattttctgtaatttccatccctttctcccaactcttcctagtttcgtatgagtttttgtttctctcactataaaataattatttttctctcttycctttagctaactctttatacttaatatcaatttctataccttcttttcataaaaagatggcaaactaaaaaccagttttcagtctggttttggagtctc

SEQ ID NO: 384216 - DNA, 201 bp, Homo sapiens
agaagcaggtatagttatgtctccagaatgttgattgtctgttgtattatgtactctgttggtatttattttgtctttttttagaattaatttatttattrtactttaagttctggggtacatgtgcagaacgtgcagttttgttacatgggtatacatgtgccatggtgatttgctgcacccatcaacccgtcacctcca

SEQ ID NO: 384217 - DNA, 201 bp, Homo sapiens
tgtactctgttggtatttattttgtctttttttagaattaatttatttattatactttaagttctggggtacatgtgcagaacgtgcagttttgttacatrggtatacatgtgccatggtgatttgctgcacccatcaacccgtcacctccattaggtatttctcctaatgttatccctcccctagccccctaccctgcca

SEQ ID NO: 384218 - DNA, 201 bp, Homo sapiens
ccatttcctaacttaaaagatggataaaggtcataaacaggtcacaaaaggagaagtaccaatggttgattaatatatgtttaacctcatttgtttaaccrtatgtttaacctcattagtaatcaagtagtgcaaattaaaataataaaatagtttcttgcctcttcatatttcaaaaaaatgtttttaattatactcatt

SEQ ID NO: 384219 - DNA, 201 bp, Homo sapiens
atttaaaccagtaagtgcattctagaactttagcctaaggaaacattgagaatttaaatacaagaatacttaatactgcattggttataatagtgaaaaawtggaaataacctaaataacaataagggagtgagttattaaataatcattggttttagctcttactggtagaaatataggtgaacttttttctgttctttt

SEQ ID NO: 384220 - DNA, 201 bp, Homo sapiens
tgtgtctttatagtagaatgatttataatcctttgggtatatacccagtaatgggattgctgggtcaaatggtatttctggttctagatccttgaggagtygccacactgtcttccacaatggttgaattaattcacactcccaccaacagtgtaaaagcattcctatttctccacatcctctccagcatctgttgtttcc

SEQ ID NO: 384221 - DNA, 201 bp, Homo sapiens
ttcttgttcatcagtataaaaacaccatttcctaacttaaaagatggataaaggtcataaacaggtcacaaaaggagaagtaccaatggttgattaatatrtgtttaacctcatttgtttaaccatatgtttaacctcattagtaatcaagtagtgcaaattaaaataataaaatagtttcttgcctcttcatatttcaaa

SEQ ID NO: 384222 - DNA, 201 bp, Homo sapiens
tcctaaaaatacaaaaatcttaggcaggcatggtggtgggcacctgtgatcccagctattcgggaggctgaggcagggtaattatttgaacctgggaggcrgaggttgcagtgagccgagattgagccactgtactccagcctgggggacagagcaagactgtctcaaaaaaaaaaaaagaaaaaaaaagagaccttataa

SEQ ID NO: 384223 - DNA, 201 bp, Homo sapiens
atatgaaagatcactttccaagtacttttagtcattaatgtaatgactttataatatgcagttgtataggtttggtcaatccccttatttttgtcatttaycctaaatttttttgctctagcaaataatactgcaaccaagatcttgtggataaatatttgaggacatgttcttgattagtttgtaaggatgaattgcatg

SEQ ID NO: 384224 - DNA, 201 bp, Homo sapiens
aaagcatattttatgtattaaatgttcttgttcatcagtataaaaacaccatttcctaacttaaaagatggataaaggtcataaacaggtcacaaaaggaraagtaccaatggttgattaatatatgtttaacctcatttgtttaaccatatgtttaacctcattagtaatcaagtagtgcaaattaaaataataaaatag

SEQ ID NO: 384225 - DNA, 201 bp, Homo sapiens
ccaatactgttagctatgagcaaagaatgttagagtttctgtaaggtataatacaagttaatggagtgcttttcactattgggttttttattgctcttttkttttgttttgtttttttgttttttaagtctgctctgttgcctaggctggattgcagtggtacaatctcggctcactgcaacctccacctcccgggttcaa

SEQ ID NO: 384226 - DNA, 201 bp, Homo sapiens
atattttatgtattaaatgttcttgttcatcagtataaaaacaccatttcctaacttaaaagatggataaaggtcataaacaggtcacaaaaggagaagtrccaatggttgattaatatatgtttaacctcatttgtttaaccatatgtttaacctcattagtaatcaagtagtgcaaattaaaataataaaatagtttct

SEQ ID NO: 384227 - DNA, 201 bp, Homo sapiens
agaacctctgaaatttgagaactgctggaccagagcctttagagctctgataaggtgtcaacagggtaaagctgcctcctgatcctgtactttctttcttyctttccttccaaacttaacgtttgataggagagatttgtattatgaaatgctaagcaactgctcagtgcccattactgactttttattgtagagtggggg

SEQ ID NO: 384228 - DNA, 201 bp, Homo sapiens
gattattttttaaatttttgagcaagaagttttttgcaatcatatctactaacttgaaaagacattcattattagtgaaaaggaaaaatatgttattaacratatgtatagtggtgtttttgtttaaatactttaaaatattcatgtacacatttgcatgtttgtggcatcatattaagaagtctggaaagatacatgcag

SEQ ID NO: 384229 - DNA, 201 bp, Homo sapiens
acttcattgtctccattctgtccacagggtaaaaatcaacccttagtagaaacagcctaaatgtcaatagaggtttgtttaagtaagttatggcatatatrtacaatgcaagaacaggcaacctattcaaaataaaattctatttcctgtgaactgaaaaaaatctctaagttacatcattaagaggaatcaagatatatt

SEQ ID NO: 384230 - DNA, 201 bp, Homo sapiens
agagccatatatcttaaatatagtaattccagtttagtctattaagcttctgatcaagatgaataaaccttatacaaaattaagacagagttcaataggaytagaaaagggaggtcagggaaaaaatgtggatattatattttgaataatttggagttcaaaccaacttggaagctttccttttagcagatattattttaa

SEQ ID NO: 384231 - DNA, 201 bp, Homo sapiens; identical to SEQ ID NO: 83833

SEQ ID NO: 384232 - DNA, 201 bp, Homo sapiens; identical to SEQ ID NO: 83834

SEQ ID NO: 384233 - DNA, 201 bp, Homo sapiens
atgccagaaaatctatttcagttgagacagataataccaggcctgcacaccccaggctccagaggccctcaggggaaagagctggagaacagcaagtcccyggaacaattggggagcctgttcacaattttggctgtgtcgctgccctgccagtctgtctgaagcatttggggaacacccagtctttgcagaagcttgaac

SEQ ID NO: 384234 - DNA, 201 bp, Homo sapiens; identical to SEQ ID NO: 83835

SEQ ID NO: 384235 - DNA, 201 bp, Homo sapiens
gaacatcgtagagtttacttacacagcctagatggtatagcctaccaaacacctaggctagcccctattgcttcagagctacaaacctgtacagcatgttytgaatactgtaggcaattgcagcacaatgataagtgtttgtgtatctaaacatactcagtatagaaaaggtacagtaaaaatatgtataatcaataaaaa

SEQ ID NO: 384236 - DNA, 201 bp, Homo sapiens; identical to SEQ ID NO: 83836

SEQ ID NO: 384237 - DNA, 201 bp, Homo sapiens; identical to SEQ ID NO: 83837

SEQ ID NO: 384238 - DNA, 201 bp, Homo sapiens
aaatctatttcagttgagacagataataccaggcctgcacaccccaggctccagaggccctcaggggaaagagctggagaacagcaagtccccggaacaaytggggagcctgttcacaattttggctgtgtcgctgccctgccagtctgtctgaagcatttggggaacacccagtctttgcagaagcttgaacttggccct

SEQ ID NO: 384239 - DNA, 201 bp, Homo sapiens
actgggcatctcctgtgtgccaggtacagtgtaaggtgctgcaggtaaatagcattatagtgcttgctgaatgaacagtctctgatatagttttgatattyccccccccaaatatcacatcaaaatatgatccccaatgttggaggtggggccttatcagactggcaaccatcaccaccagtcagaggcttattagactgg

SEQ ID NO: 384240 - DNA, 201 bp, Homo sapiens; identical to SEQ ID NO: 83838

SEQ ID NO: 384241 - DNA, 201 bp, Homo sapiens
gcattatagtgcttgctgaatgaacagtctctgatatagttttgatattcccccccccaaatatcacatcaaaatatgatccccaatgttggaggtggggycttatcagactggcaaccatcaccaccagtcagaggcttattagactggcaattctcaaactctataccagagaaaaacgggaactttttaaaagcacag

SEQ ID NO: 384242 - DNA, 201 bp, Homo sapiens; identical to SEQ ID NO: 83839

SEQ ID NO: 384243 - DNA, 201 bp, Homo sapiens; identical to SEQ ID NO: 83840

SEQ ID NO: 384244 - DNA, 201 bp, Homo sapiens
ttcctcccacctcactgtagtttgtgttttaaaataacttccagtgctgccaaggtcatggggaagctggtacagtgaattaccagtggcatgaccatggytcagcctgcataggccagcatgcagcaatgcttatcaaacatggaaacacttccatgctggctgaggcaggcattgccctaaggattcttttcaaggaat

SEQ ID NO: 384245 - DNA, 201 bp, Homo sapiens
tagcatttctgtgatcaacccctcaataaattttagtgtacttgttgatatcatctcagaagtcatttttaattagatcagacctccattttaaaaaaccytatgaacagattccaaattctcctcacttttttttttttaacaaaagttttattggagatagaaccaccatgtacacagggaaaagagcacaaaaattca

SEQ ID NO: 384246 - DNA, 201 bp, Homo sapiens
tctccccactctccacattattgggagtgttagaaaatctgtagcaactattatgtagcataatatctttctagaatgaatatatgtgtgtgtaggtatayagtatacatataatatatggaaatgtgcatacatctacattttaatctatacatttatctgcatttatctatcatctatctacctatgtaatctaatctg

SEQ ID NO: 384247 - DNA, 201 bp, Homo sapiens
cagggtgtttgaacttatatttacaagagacattggtttgcaatttttcttcctcaaaattttcttgtcagatttctgatattgaggaaatgttggcttcrtaaaataaggaagataatgttctgtattgtggttgtttttataatcttttctcccttctctattctttttgtgctcacttagttctgtctttggagtgac

SEQ ID NO: 384248 - DNA, 201 bp, Homo sapiens
acatacgaaacacagtcaaaaattgactgtagccatcaaaaattgactgtaacctctctgagttcccccatgcctgcaagcctgagtaatttttgtctcarcatcttttccagtgccttctaacacatggtttctgtgtttattgagactttttagttgctattctgcaagctgctccattccacttgaagcgagtacata

SEQ ID NO: 384249 - DNA, 201 bp, Homo sapiens
taaaaatacaaaaagttagccaggcaaggtggcaagtgcctgtagtcccagctacttgggaggctgaggcaggagaatggcgtgaacccggaaggtggagyttgcagtgagcagagatcacactattgtactccagcctgggtgacagagtgagactctgtctcaaaaaaaaaataaaataaaaaaataaaggccatactg

SEQ ID NO: 384250 - DNA, 201 bp, Homo sapiens
ctcttacatgatgccacctctgaggtttggctgaattgctttgcagatcattagcaccattccctatgcccatgcgatttccctgctgatgaacatccccrttattgggccaggttagtggggctttggggagttgatccagtttttcaaactgaaaaagctagaatgtaggttaatttaattctgcctctagatacatca

SEQ ID NO: 384251 - DNA, 201 bp, Homo sapiens
tgtgtaatgatcaagttaggtgtttaggatatgcatcactttgagcatttatcatttctatattttgagaacagacctgtgttctagctatcttgaaataygcaatactttgacattaacacactgctatgttctctaatgacatccctggaaacctcctaggggcagccagatctttcatgatagtggttgtcagtcctc

SEQ ID NO: 384252 - DNA, 201 bp, Homo sapiens
tccctagttgtccattagctctgtattcagctttctttatattttccttcatctttacttgtgtattaatcatgttttttattttctatatttttatgaawtcttcaacatcttggggattttgtggtcctagaagggactgctgctcccaaagtcagacagttcctagagatagcaaatgtcttgtccacagcatgtctc

SEQ ID NO: 384253 - DNA, 201 bp, Homo sapiens
gtgaagtgcatggcatagagctgatactccataaatatttgttgagtgaagggtgcctagtaaaataagatattaagtagataggaagtgtattcattttygtttttctgtgtatccagccatccttccagtcattctgccttcgatccatccatctatttaatcatttatcaaatagttactgcatactctttgtgactg

SEQ ID NO: 384254 - DNA, 201 bp, Homo sapiens
accacaccaaatatccaacaatgatagattggattaagaaaatatggcacatatacaccatggaatactatgcagccataaaaaatgatgagttcatgtcstttgtaaggacatggatgaagctggaaaccataattctcagcaaactatcgcaaggacaaaaaaccaaacactgcatgttctcacttataggtgggaatt

SEQ ID NO: 384255 - DNA, 201 bp, Homo sapiens
aagacagttatgcagccaaaggacacatgaaaaaatgctcatcatcactggccatcagagaaatgcaaatcaaaccacaatgagataccatctcacaccarttagaatggtgatcattaaaaagtcaggaaacaacaggtgctggagaggatatggagaaataggtacagttttacactgttggtgggactgtaaactagt

SEQ ID NO: 384256 - DNA, 201 bp, Homo sapiens
aagcaatggggagaggattccctatttaataaatggtgctggtaaaactggctagccatatgtagaaagctgaaactggatgccttccttacaccttatakaacaattcaagatggattcaatacttaaatgttagacctaaaaccataaaaaccgtagaagaaaacctaggcaataccattcaggacagaggcatgggca

SEQ ID NO: 384257 - DNA, 201 bp, Homo sapiens
tccaagggatgtgaaggacctcttcaaggagaaccagaaaccactcctcaatgaaataaaagaggacacaaacaaatggaggaacatttcttgctcatggktaggaagaatcaatatcatgaagacggccatactgcccaaggtaatttatagattcaatgtcatttccatcaatctaccaatgactttctgcacagaatt

SEQ ID NO: 384258 - DNA, 201 bp, Homo sapiens
gaaaatctagaagaaaagaataaattcctcgacacatacaccctcccaaaaataaaccaggaagaagttgaatccctgaatagaccaataacaggctctgraattgaggcaatagttaataacttaccaaccaaaaaaagttcaggaccagatggactcacagctgaattctatcataggtacaaggaggagctggtacca

SEQ ID NO: 384259 - DNA, 201 bp, Homo sapiens
acaaacacctctatgcaaatacactagaaaatctagaagaaaagaataaattcctcgacacatacaccctcccaaaaataaaccaggaagaagttgaatcyctgaatagaccaataacaggctctgaaattgaggcaatagttaataacttaccaaccaaaaaaagttcaggaccagatggactcacagctgaattctatc

SEQ ID NO: 384260 - DNA, 201 bp, Homo sapiens
agagcaaacacattcaaaagctagcagaaggcaagaaataactaagatcagagcagaactgaaggagatagagatgcaaaaaacccttcaaaaaatcaatgaatccaggagctggtttttttaaaagatcaacaaaattgatagaccactagcaagactaataaagaagaaaagagaagaatcagttagatgcaataaaaa

SEQ ID NO: 384261 - DNA, 201 bp, Homo sapiens
aactcctgggctcaagcaattcttccacctcagcctcctaagtatatgggacaacaggtgcatgccaccatgcccaactaattttttttttttttttttttgtagagatagggtctttccaggttgcctaggctagtcttgaacttctgggctcaagcgatcctcccatcttggcctcccaaagtgctgggattacaggca

SEQ ID NO: 384262 - DNA, 201 bp, Homo sapiens
gggatcaattcaacaagaagagctaacgatcctaaatatatatgcacccaatacaggagcatccagattcataaagcaagtccttagagacctacgaagasacttagactcccacacaataataatgggagactttaacaccccactgtcaacattagacagatcaaggagacagaaggttaacaaggatatccaggaact

SEQ ID NO: 384263 - DNA, 201 bp, Homo sapiens
tgtatttcctgaatttgaatgttggcctgtcttgctaggttggggaagttctcctggatagtatcctgaagcgtgttttccaacttggttccattctcccygtcactttcagatacaccaatcaaacatatgtttggtcttttcacttagtcccatatttcctggaggctttgttcgctccttttcattcttttttctcta

SEQ ID NO: 384264 - DNA, 201 bp, Homo sapiens
catattggaggtggggccttgtgagaggtgattggatcatgggggtggatttttcatgaatagtttagtaccatcccttttggtactgtcctcatgatagsaagtgagttttcatgaaatctaaagtgtgtagcacctcccacctcccttttttgctttgacttttgccatgtgagtgaaagctcctgttttgccttctgc

SEQ ID NO: 384265 - DNA, 201 bp, Homo sapiens
atcttagcattgtggcattaacatctgggaaagatagatgatttctttattttacagatgagaaaagaaatgcctgaatatagagctggaattcaagcccrttagctggtggtttttcccaccaaacccccaaatccagtttctggcagtactttggtgactgcccaaaagcacacactcaatggaaatccaagtcccttg

SEQ ID NO: 384266 - DNA, 201 bp, Homo sapiens
taggataggggtgtttgctgcttcagcaaggtaattaaggttaagatgacaaaatgattggattttggggtgtatgaaccattaaaaaattacagttttgsctgtgctgagctagcatgtcctgaactctgtctaaaggataattgtgtgattatctcaactactcacggaagtatcttaactactctggtgtatgggtac

SEQ ID NO: 384267 - DNA, 201 bp, Homo sapiens
tgaaatggaaaatattcatccaagacaccagaccatggggaattttagaacatcagagttaaagggaaagtcataaaaacattcagagataaattaggtcmcctgtgaaggatcaggaatcagaatggcattagaattctcaagagcagctgtcatcttgtgtatttgtagataaagaatattttcagatctgcatttggc

SEQ ID NO: 384268 - DNA, 201 bp, Homo sapiens
aaggataattgtgtgattatctcaactactcacggaagtatcttaactactctggtgtatgggtacttatccataaaatgctgagttacattttatggtawctttgtacccctcccagttataaaagagtgattctatttctgaggcttcctgctaggagtagaaatagcagggaatggctttgtgatctatttcatgttg

SEQ ID NO: 384269 - DNA, 201 bp, Homo sapiens
caatattttttcttagggtcaatagttttatcttttacaagcaacttttttttttcttcaacttttatatttatctatgagcagattctggctctgcatarcatattagccacacacttgtttttctggggtcagaatcacactgaagtgatgataaacatattacaaatgagaattactcctgttaaagttggagtataa

SEQ ID NO: 384270 - DNA, 201 bp, Homo sapiens
actcaaacaaatttacaagaaaaaaaaaagatccccatcaaaaagtgggcaaaggatatgagcagacaattctcaaaagaagacatttatgcagccaaaaacacatgaaaaaatgctcatcatcactggccatcagagaaatgcaaatcaaaaccacaatgagatatcatctcacaccagttagaatggcgatcattaaaa

SEQ ID NO: 384271 - DNA, 201 bp, Homo sapiens
aaaatgctgagttacattttatggtatctttgtacccctcccagttataaaagagtgattctatttctgaggcttcctgctaggagtagaaatagcagggwatggctttgtgatctatttcatgttgttcaaatttccttaccctctgttcttatctgtaaaatgggaattaaagcaattcatggcattctatatttcaag

SEQ ID NO: 384272 - DNA, 201 bp, Homo sapiens
tctccttcatcctgtataggtggttaatgtccaaactctctgtcttcatgtctgtagtgtctcttcaatttctatattcttattcattcctgtgcttgttyactagatcaagttgactattacctcacatctggaatataataatggctggccccatcttgtcttgtcaatctgttctctttctccataatcttggatatg

SEQ ID NO: 384273 - DNA, 201 bp, Homo sapiens
ttcaaggctatggagaagaattaatgtacaaaaatgagataattgacatgaagctattttaatattctgaaaataatatatgagtatagaaaattatcatmtttgatcccttgttcagaattttctaacttaaatctttctatcagtatagaggactactttgtacgtataatcaaatgctcctcttacagagggagataa

SEQ ID NO: 384274 - DNA, 201 bp, Homo sapiens
tgtcatccccatcaagctaacaatgactttcttcacagaattggaaaaaactactttaaagttcatatggaaccaaaaaagagcccgcattgccaagtcartcctaagccaaaagaacaaagctggaggcatcacaccacctgacttcaaactatactacaaggctacagtaaccaaaacagcatggtactggtaccaaaa

SEQ ID NO: 384275 - DNA, 201 bp, Homo sapiens
acaccttttgctgaagagtgctttccccattgtatgttcttggcacctttgtcaaaaatcaattgattatagatgtgtgggcttatttcagggttctctaygcttttcctttaatcagtgtgtctatttttatgctaatgctatgcagttttgcttactatagctttgtaacatattttgcagttcagtggtgtgatgcct

SEQ ID NO: 384276 - DNA, 201 bp, Homo sapiens
tgttatttgtttgcctgcatcttgtggttcattgattagttctataacgattgcttaaatagtgaggcaagaaacacttcatgagcactttatgtacttaycatgtgtatagatctggatgaagcaccatggagaatttataattgaattgttaaacaattataatatgtgagcaccattgttaggtactaagaatttatc

SEQ ID NO: 384277 - DNA, 201 bp, Homo sapiens
aagaaacaaattatttgtactctccaccttctctactgctaggtcaattgttctgaggtctaattaatttaagaatctcattaaaatatggacactgccasaaaaatgacactatatgagttctccatttttgtacacatttaggggggtttccttaatgctatgaattgtctccattaattccaggttaaggagaattgt

SEQ ID NO: 384278 - DNA, 201 bp, Homo sapiens
catattttatatttccattcattagttgttggttttgattgtttctgttttggctgttatgaataatgctggtatggacatttgtgtacaagtttttgtgyatagataagtttttatttctcttgggtatatacttggctgcagaattgctggattatacagcaactgtatgcttaatctttggagaaaccgtggctggat

SEQ ID NO: 384279 - DNA, 201 bp, Homo sapiens
attatagtgtgaggtatgggtacaacttcattctttgcatgtgcattcagttgtcctagtaccatttgttgaaaagactattcattccccattgagtgatygtggtacatttgttgaaattcagttgactacaaacacgaggatttatttttagactctaaattctatttcattgatctatatagctttctttatgccagt

SEQ ID NO: 384280 - DNA, 201 bp, Homo sapiens
taattgtgtgattatctcaactactcacggaagtatcttaactactctggtgtatgggtacttatccataaaatgctgagttacattttatggtatctttktacccctcccagttataaaagagtgattctatttctgaggcttcctgctaggagtagaaatagcagggaatggctttgtgatctatttcatgttgttcaa

SEQ ID NO: 384281 - DNA, 201 bp, Homo sapiens
catgtgcattcagttgtcctagtaccatttgttgaaaagactattcattccccattgagtgatcgtggtacatttgttgaaattcagttgactacaaacaygaggatttatttttagactctaaattctatttcattgatctatatagctttctttatgccagtatgacagtactttttttttttgagacagggtctcgct

SEQ ID NO: 384282 - DNA, 201 bp, Homo sapiens
tgcctgtttacatttgttccatcaacctgaattttcccataccctttctgtctttagtctccccctctgctggtactacacacagttactttaactactcrttatatagaagatgttttctggttcctattttctcccttcctctatcaatcaattgtctacaagcttttcagacagatgttattttgcactgatgacctg

SEQ ID NO: 384283 - DNA, 201 bp, Homo sapiens
  misc_feature (1)...(201): n = A,T,C or G
atggtgggtgacttttttttttcctgaaaaatgttttctaaaatttattttaatttatttttagattgatacataacttttatgcatatttatggggtacntgtaatattttgttacatgcacagaatgtgtaatgatcaagttaggtgtttaggatatgcatcactttgagcatttatcatttctatattttgagaacag

SEQ ID NO: 384284 - DNA, 201 bp, Homo sapiens
ccctcccatgctaggcagacagaattatgcaacaccttctaccttcattcagaattagatatcaacacagtcaaaaaaaattttttttcaattttttttttattatactttaagttctgggatacatgtgcagaatgtgcagttttgttacataggtatacacgtgccatggtggttcgctgcacccatcaacctgtcacc

SEQ ID NO: 384285 - DNA, 201 bp, Homo sapiens
cttgtaacctgaattgctacaacaaatgtgccattttcctccttttccatcatttcttacttgtgtcttatcagctaaagtccaggaagagattgaatgtktagttggcagaaaccggagcccctgtatgcaggacaggagtcacatgccctacacagatgctgtggtgcacgagatccagagatacattgacctcctccc

SEQ ID NO: 384286 - DNA, 201 bp, Homo sapiens
gttctgtctttggagtgactcataaattttggttaagtgccagttatgatgtatgaaaaaatgcagaatgtcagatgaggttcatcttcttccagaaagggttcatccctcccatgctaggcagacagaattatgcaacaccttctaccttcattcagaattagatatcaacacagtcaaaaaaaattttttttcaatttt

SEQ ID NO: 384287 - DNA, 201 bp, Homo sapiens
gagtgaagggtgcctagtaaaataagatattaagtagataggaagtgtattcatttttgtttttctgtgtatccagccatccttccagtcattctgccttygatccatccatctatttaatcatttatcaaatagttactgcatactctttgtgactgttcatgacctaatgttcaaggaacaaatcccctatgtctctta

SEQ ID NO: 384288 - DNA, 201 bp, Homo sapiens
ggtaaagggatcaattcaacaagaagagctaacgatcctaaatatatatgcacccaatacaggagcatccagattcataaagcaagtccttagagacctaygaagagacttagactcccacacaataataatgggagactttaacaccccactgtcaacattagacagatcaaggagacagaaggttaacaaggatatcca

SEQ ID NO: 384289 - DNA, 201 bp, Homo sapiens
ggaaaggaacaaacagtaccagccactgcaaaaacataccaaattgtaaagaccatcgaggctgggaagaaactgcatcaactaacgagcaaaataaccarctaacatcataatgacaggatcaaattcacacataacaatattaaccttaaatgtaaatgggttaaatgctccaattaaaagacacagactggcaaattg

SEQ ID NO: 384290 - DNA, 201 bp, Homo sapiens
tgaaggacctcttcaaggagaactacaaaccactgctcactgaaataaaagaggacacaaacaaatggaagaacattccatgctcatgggtaggaagaatsaatatcatgaaaatggccataccacccaaggtaatttatagattcaatgtcatccccatcaagctaacaatgactttcttcacagaattggaaaaaacta

SEQ ID NO: 384291 - DNA, 201 bp, Homo sapiens
gccaatatcatactgaatggacaaaaactggaagcattccctttgaaaactggcacaagacaaggatgccctctctcaccactcccgttcaacatagtgtyggaagttctggacagggcaatcaggcaggagaaggaaataaagggcattcaattaggaaaagaggaagtcaaattttcgctgtttgcagataacatgatt

SEQ ID NO: 384292 - DNA, 201 bp, Homo sapiens
gcacaaaaattcaactgatacagaacaacaactgaaagtcacaattacccaatgtagtttgcaattacttttcagtttcttaaacagctcccctcaacttktttttttaacagtcttgctaatttttcagctgaaacagcatcaagttttccaaaaattaagagcctcgggaggggacccgctttcaagatactgaaggtg

SEQ ID NO: 384293 - DNA, 201 bp, Homo sapiens
aatcaataaaagtaatccagtatataaacagaaccaaagacaaaaaccacatgattatctcaacagatgcagaaaaggcctttgacaaaattcaacaacccttcatgctaaaaactcaataaattaggtattgataggacgtatctcaaaataataagagctatctatgacaagcccacagccaatatcatactgaatgga

SEQ ID NO: 384294 - DNA, 201 bp, Homo sapiens
ttccctagttgtccattagctctgtattcagctttctttatattttccttcatctttacttgtgtattaatcatgttttttattttctatatttttatgaaatcttcaacatcttggggattttgtggtcctagaagggactgctgctcccaaagtcagacagttcctagagatagcaaatgtcttgtccacagcatgtct

SEQ ID NO: 384295 - DNA, 201 bp, Homo sapiens
gaaaactctgaagactcttccaaaagggcctctggaagggataaatgaccagtaaagtttcaggatacaaaataaatgcacaaaaatcaatagcatttttrtatatcaataatgttcaagctgagagccaaatcaagaacgcaatcccatttacaatagccacaaaatattaaatccctaggaatacatctaaccaaggaa

SEQ ID NO: 384296 - DNA, 201 bp, Homo sapiens
tttttagattgatacataacttttatgcatatttatggggtacgtgtaatattttgttacatgcacagaatgtgtaatgatcaagttaggtgtttaggatrtgcatcactttgagcatttatcatttctatattttgagaacagacctgtgttctagctatcttgaaatacgcaatactttgacattaacacactgctatg

SEQ ID NO: 384297 - DNA, 201 bp, Homo sapiens
gtcatatcacacagcatatgggagagtgaggtgaaagggtttaacctaagtgggcctcctgcatgtcctgatgtttggtgtaaatgttaaaatatttacartgaataacggggcagtcaattttttggtgtgcagaacagtgtgatgacaggttcagaggtgtgtggtggcaaagagatggaaaagggaggccttaactga

SEQ ID NO: 384298 - DNA, 201 bp, Homo sapiens
ttaaattatgaaataattttttaggaaaagcacaatcaacagtctgaatttactgttgaaagcttgatagccactgtaactgatatgtttggggctggaayagagacaacgagcaccactctgagatatggactcctgctcctgctgaagtacccagaggtcacaggtatgatgataccataggtgagcagggtgattttc

SEQ ID NO: 384299 - DNA, 201 bp, Homo sapiens
ttgagtatttaaaaaatatatcttggccatttgtatgtctttttttgaaaaatgtctactcaaatcctttgcccatttaattaattaattaattaattaawagagacagggttttgctctgttgtaggatggagtgtagtgatgggatcatggtccctgcagccttgagctcctgggctcaagccatccttctaccttaga

SEQ ID NO: 384300 - DNA, 201 bp, Homo sapiens
agttcattcagtcccttgtcctaagcatctccattgcccttactctctccttcatcctgtataggtggttaatgtccaaactctctgtcttcatgtctgtmgtgtctcttcaatttctatattcttattcattcctgtgcttgtttactagatcaagttgactattacctcacatctggaatataataatggctggcccca

SEQ ID NO: 384301 - DNA, 201 bp, Homo sapiens; identical to SEQ ID NO: 83854

SEQ ID NO: 384302 - DNA, 201 bp, Homo sapiens
cattggaattttgatagggatttcaatgaaaccataaatttctttagatagtatggacattttaacaatatcaactcttccaatccatgcatatggtatcycttttttatttgtgtcttcttcatttttttaattaatattttatattttttggtgactttcacttttttggttaaatgtactcctaaatactttatttct

SEQ ID NO: 384303 - DNA, 201 bp, Homo sapiens
ctcctgcctcagcttccgacagtgctgggatttaaggcatgagccactgtgcccagtctaaattacctataattccttatacaatgtaaatgccatgtaartggttgttatactgtattttttagggaataatgacaagaaaaagaagtctgtacatgtccaatatgaacacttttttttttctgaattttattctttttt

SEQ ID NO: 384304 - DNA, 201 bp, Homo sapiens
tatttaagagactgtcccctttccattgcatattcttggtacctttgtctaaaatcaattgtagttgcatgggttcttttccagctctctgttatattctrttggttgatgtgtccatttttatgccagtaccatgctgttttaattactattaatttgtagtatagcttgaaatcaggtaatgtgatgcctccagctttc

SEQ ID NO: 384305 - DNA, 201 bp, Homo sapiens
ataatactggtactttttccagtggtctagagagagactcctgtatacttagtcctctctgctcccagaattggtaagttaagtagatagctgtggggaamcttagagttagggtgttaatgtgtggtctaaatcctcctttccacagggagaagctggatgttggggattcattctcaattgtatggtgtagtgcctggg

SEQ ID NO: 384306 - DNA, 201 bp, Homo sapiens
gagtgcagtggtgtgatctcggctcactgcaacctccgtctcctgggttcaagtgattcttatgcctcagccttccgagtagctgagattacaggcgcatkccatcacgcccggctaatttttgtgtttttagtagagatgagatttcaccatgttgcccaggctggtctcgaactcctgacctcaggtgactgcctgtct

SEQ ID NO: 384307 - DNA, 201 bp, Homo sapiens
ttacaatttagcatgtttttgcagtggctggtagcagtttttgctttccatgtttagtgcttccttctggtgctcttgtagggcaggcatggtggtgacaraatctctcagggtttgcttgtctgtaaaggattttatttctccttcacttatgaagtttagtttggctggatatgaaattctgggttgaaaattcttttc

SEQ ID NO: 384308 - DNA, 201 bp, Homo sapiens
attatgatgttagctggttattttgctcattagtttatgcagtttcttcctagcatcaatggtctttacaatttagcatgtttttgcagtggctggtagcrgtttttgctttccatgtttagtgcttccttctggtgctcttgtagggcaggcatggtggtgacagaatctctcagggtttgcttgtctgtaaaggatttt

SEQ ID NO: 384309 - DNA, 201 bp, Homo sapiens
aacatttcaagtggtaaggtagaatcaaaatgataaaggcctgctgctttctttgcttcacagtcatttgctatatttttttgcctgaaggaaaatggtartggaagtgttttgtgattaaagattttgagaagtcagtcactgtatatgctatgtattttgcttagattagccatgatcattaaacgtcttaaaaaagca

SEQ ID NO: 384310 - DNA, 201 bp, Homo sapiens
tgctatgttctctaatgacatccctggaaacctcctaggggcagccagatctttcatgatagtggttgtcagtcctcatatggagggtggaggtttgaagsagagagccaagggaggttttgtgcacctatgcttgttgtgtttgtacacaatgactatgcatacgctgtgagtataaaaggctcatttaatcctattgtg

SEQ ID NO: 384311 - DNA, 201 bp, Homo sapiens
atcccagagcccacagaaattgttcaaactatctattcccaggcttactcagtctaccctccctatctcactcatttcttcctgtgaaaaccccaatgaargctcagccccatggtttctttttgctcttgctgcctcctgaccaaccctggtacttccccatgtggctccccgcactccatggtgtggagtgcccctcct

SEQ ID NO: 384312 - DNA, 201 bp, Homo sapiens
gacagtttgttataatttctgtttttttacatttgctgaggagtgctttaattccaactatgtggtcagttttggaatacgtgcgatatggtgctgagaasaatgtaaattctgttgatttggggtggagagttctgtagatgtctattagatctgcttggtgcagagctgagttcaattcctggatatccttgttaactt

SEQ ID NO: 384313 - DNA, 201 bp, Homo sapiens; identical to SEQ ID NO: 83857

SEQ ID NO: 384314 - DNA, 201 bp, Homo sapiens
tagtttagtaccatcccttttggtactgtcctcatgatagcaagtgagttttcatgaaatctaaagtgtgtagcacctcccacctcccttttttgctttgrcttttgccatgtgagtgaaagctcctgttttgccttctgccgtgattgcatcacgcttcctgtacagcctgcagaactaggagccaattaaacctctttt

SEQ ID NO: 384315 - DNA, 201 bp, Homo sapiens
cagactgggaacagaatgtgaagagtcaggtcaagccatttggcctttatcccataggacagatgggtgttgtttaaagttgtaaaatgagagactgacakgtttagacatgtacttttgaaagtacactaggaaaaaaaatctttggctaaacattgtgccagaagtacaaaggggaacacactatatgagccttctctt

SEQ ID NO: 384316 - DNA, 201 bp, Homo sapiens
tcatgactaagtcctcaaaagcaatcacaatgaaaaaaaattgatatgttacttaaaattgataatttagttacaaattaaactaaagagcttctgcatawcaaaagtaactattaacaaagtaaacagacaacctacagaatgggaggaaatatttgcaaactatgcatctgacaaaggtctaatatcctataaggtaat

SEQ ID NO: 384317 - DNA, 201 bp, Homo sapiens
ttaattagtcagggccatctgggtggtaacagaatatttatggcctctgtacaaagctgctgtctgtgacctatgagtgtatagcatggaaaacatttttyctctgtgagatgccacacatcctgatactatctctgttggatccactctccttctgtggtgattataccagtggatctcaaagtgggctgggcagtagaa

SEQ ID NO: 384318 - DNA, 201 bp, Homo sapiens
cattaagtagttctgatttttaaaaaacaaaaacaaaattttctgcttctcctcccttcaaagcttcaaggaaatagaaacaaggaaacaaaacaaaaacraaaaaaaccagtgatggtaaagagaagccttttgcttgaattatcaattcgaaaaacagtaattttgccattttgtatatataaacaatcttgggacatt

SEQ ID NO: 384319 - DNA, 201 bp, Homo sapiens
gagggcaaccaaatagctgtattcgcttgtcagctgagctcatataaagaagtcagtgaggagctgagaaaatataggcaatggctgctcaataagaattwtaagttccgaataccacatataggtagacaccagtgtgcaagttgatgcaactagaaagaaacagatgactttttaaaatacctggccacaggtctttga

SEQ ID NO: 384320 - DNA, 201 bp, Homo sapiens
ctctatctaaaagttgcttacgagtaacttgaatcttgtgtaatagtctgcatctcacagaccatcatggatgagttagaacactgttgttgatggtccartatgaagagagggcaaccaaatagctgtattcgcttgtcagctgagctcatataaagaagtcagtgaggagctgagaaaatataggcaatggctgctcaa

SEQ ID NO: 384321 - DNA, 201 bp, Homo sapiens
ttcttcctatccgtaagcatggaatgttcttccatttgtttgtgtcctcttttatttcattgagcagtggtttgtagttcttcttgaagaggtccttcatrtcccttggaagttggattcctgggtattttattctctttgaagcaattgtgaatgggagttcactcatgatttggcactctgtttgtctgttattggtgt

SEQ ID NO: 384322 - DNA, 201 bp, Homo sapiens
gatgaagcaccatggagaatttataattgaattgttaaacaattataatatgtgagcaccattgttaggtactaagaatttatctgagaaaagacagaatrcatgccttagatgaaagggaaatacaaataagatagaaaatgcaaaatatagcatcataaattgaaggtggacatggtcatatcacacagcatatgggag

SEQ ID NO: 384323 - DNA, 201 bp, Homo sapiens
tgtcttcaatacatgtgtttaatttaattaatttttaaaaatctttaaggtctgcaataatttccctgctctcatcgattatctcccaggaagtcataatraaatagctgaaaattttgcttacattaaaagttatgtattggagagaataaaagaacatcaagaatccctggacatgaacagtgctcgggactttattga

SEQ ID NO: 384324 - DNA, 201 bp, Homo sapiens
agacatgaagtccttgcccatgcctatgtcctgaatggtattgcctaggttttcttctagggtttttatggttttagatctgacatttatgtctttaatcmatgttgaattaatttttgtataagatgtaaggaagggatccagtttcagctttctacatatggctagccagttttcccagtaccatttattaaataggga

SEQ ID NO: 384325 - DNA, 201 bp, Homo sapiens
gaagctattttaatattctgaaaataatatatgagtatagaaaattatcatctttgatcccttgttcagaattttctaacttaaatctttctatcagtatrgaggactactttgtacgtataatcaaatgctcctcttacagagggagataatttttaaaaattcactccagttttaaaccagcagttgacttatggcata

SEQ ID NO: 384326 - DNA, 201 bp, Homo sapiens
tgttctgcttctttagtattttttttttgtggctattctcaggtgtttacatttccaagtaagtgttgaaagtatcattttgtcaatttcccaaaacactrtgctgggatttttatcatgatgacattaaatctttagatcaatttagaaataattgatgtcctgacaggttgaatctttcaattcatggatatgattatg

SEQ ID NO: 384327 - DNA, 201 bp, Homo sapiens
ttcaattcatggatatgattatgctctttatttatttgggctttcttctattgtgtcagtaatgttttgtcttcagttcagtggctttctcatgtattacrttttttttctgaaatgatatttctatgtaattgtaagttgtgtatttaatatataatataaaatatatataatatgaaataaatatatataatattaaaa

SEQ ID NO: 384328 - DNA, 201 bp, Homo sapiens
ttgtcctgtctatagatataatatatatattagttaaaatacacacaaatgtgcacacagagacatacacagctgggttttatttgctatgattttcaggrtgtttgaacttatatttacaagagacattggtttgcaatttttcttcctcaaaattttcttgtcagatttctgatattgaggaaatgttggcttcgtaaa

SEQ ID NO: 384329 - DNA, 201 bp, Homo sapiens
tgtccttattgttcaactcccacttataagtgagaacatgcggtgtttggttttctgatcttgtgatagtttgctgagaatgatggtttccagcttcatcmatgtccctgcaaaggacatgaagtcatcattttttatggttgcatagtattccatggtgtatatgtgtcatattttcttaatctagtctatcattgatgg

SEQ ID NO: 384330 - DNA, 201 bp, Homo sapiens
ccctagttgtccattagctctgtattcagctttctttatattttccttcatctttacttgtgtattaatcatgttttttattttctatatttttatgaaakcttcaacatcttggggattttgtggtcctagaagggactgctgctcccaaagtcagacagttcctagagatagcaaatgtcttgtccacagcatgtctct

SEQ ID NO: 384331 - DNA, 201 bp, Homo sapiens
tttggttttctgatcttgtgatagtttgctgagaatgatggtttccagcttcatcaatgtccctgcaaaggacatgaagtcatcattttttatggttgcayagtattccatggtgtatatgtgtcatattttcttaatctagtctatcattgatggacatttgggttggttccaagtctttgctattgtgaatagtgccac

SEQ ID NO: 384332 - DNA, 201 bp, Homo sapiens
catgcacagaatgtgtaatgatcaagttaggtgtttaggatatgcatcactttgagcatttatcatttctatattttgagaacagacctgtgttctagctrtcttgaaatacgcaatactttgacattaacacactgctatgttctctaatgacatccctggaaacctcctaggggcagccagatctttcatgatagtggt

SEQ ID NO: 384333 - DNA, 201 bp, Homo sapiens
gtccctgcaaaggacatgaagtcatcattttttatggttgcatagtattccatggtgtatatgtgtcatattttcttaatctagtctatcattgatggacwtttgggttggttccaagtctttgctattgtgaatagtgccacaataaacatacgaaacacagtcaaaaattgactgtagccatcaaaaattgactgtaac

SEQ ID NO: 384334 - DNA, 201 bp, Homo sapiens
ttctattgattggaatagtttcagaaggaatggtaccacctcctccttgtacctctggtagaatttggctgtgaatccatctggtcctggactttttttttgttggtaggctcttaattattgcctgaatttcagagcctgtgattggtctattcagggattcagcttcttcctggtttagtcttgggagagtgtatgtgt

SEQ ID NO: 384335 - DNA, 201 bp, Homo sapiens
aaaagtttataataacataaggtatttttttgatggctagatagaacaataaccgaggattctataagaggtcaggctttgttcaaataaattgaagataktgcctggtgataatagacaccatttcttagagcaggaaattccttttttttctttgaatattgaaataaggaaataaaaggactccatctgtcaatttaa

SEQ ID NO: 384336 - DNA, 201 bp, Homo sapiens
ttacttttattttaggcaaaccaatctatcttcttatttgtgttaatttgtgttagattttttcttgtataacatagatgacttttgcctgtttacatttrttccatcaacctgaattttcccataccctttctgtctttagtctccccctctgctggtactacacacagttactttaactactcattatatagaagatgt

SEQ ID NO: 384337 - DNA, 201 bp, Homo sapiens
acatatatgtgcatgcatgtctgtgtgtatatagtttttaattttaattttaattttaaaagaagtatagaaatttaatatgtttttcttccaatgttatkttttctcatatttttttctttttttaattatactttaagttctagggtacatgtgcacaatgtgcaggtttgttacatatgtatacatgtgccatgtagg

SEQ ID NO: 384338 - DNA, 201 bp, Homo sapiens
tcagacagtccaatttttttaattttttaaaattatactttaagttctgggatatgtgtgcagaatgggcaggtttgtcacatgggtatacatgtgccatrgtggtttgctgcacccattaacccgtcatctatattaggtatttctcctaatgctatccctccctttacccccaatcacccaacaggccctggtgtgtga

SEQ ID NO: 384339 - DNA, 201 bp, Homo sapiens
gtttccattccagtttgggcctatgaaggtttataacaggtctcagtatctagcagtgtatgtcttccaaatttgttctgcttctttagtattttttttttgtggctattctcaggtgtttacatttccaagtaagtgttgaaagtatcattttgtcaatttcccaaaacactgtgctgggatttttatcatgatgacatt

SEQ ID NO: 384340 - DNA, 201 bp, Homo sapiens
ggcacatgatacctttttgggatcagttgactcttacatgatgccacctctgaggtttggctgaattgctttgcagatcattagcaccattccctatgccyatgcgatttccctgctgatgaacatccccattattgggccaggttagtggggctttggggagttgatccagtttttcaaactgaaaaagctagaatgtag

SEQ ID NO: 384341 - DNA, 201 bp, Homo sapiens
tgctcttgtagggcaggcatggtggtgacagaatctctcagggtttgcttgtctgtaaaggattttatttctccttcacttatgaagtttagtttggctgkatatgaaattctgggttgaaaattcttttctttaagaatgttgaatatcggcccccactctcttctggcttgtattgcccagatcaatgtcctgtagttt

SEQ ID NO: 384342 - DNA, 201 bp, Homo sapiens
catactctttgtgactgttcatgacctaatgttcaaggaacaaatcccctatgtctcttattttcaggaaaacggatgtgtatgggagagggcctggccckcatggagctgtttttattcctgaccaccattttgcagaactttaacctgaaatctcaggttgacccaaaggatattgacatcacccccattgccaatgca

SEQ ID NO: 384343 - DNA, 201 bp, Homo sapiens
cctaaatatatctgctattctccatactctgtatcacttgtattgaccaccacatatgctaatacctatctactgctgagttgtcagtatgttatcactakaaaacaaagaaaaatgattaataaatgacaattcagagccatttattctctgcatgctctagataaaaatgattattatttactgggtcagttcttagat

SEQ ID NO: 384344 - DNA, 201 bp, Homo sapiens; identical to SEQ ID NO: 83855

SEQ ID NO: 384345 - DNA, 201 bp, Homo sapiens
gttgttcaaatttccttaccctctgttcttatctgtaaaatgggaattaaagcaattcatggcattctatatttcaaggctatggagaagaattaatgtamaaaaatgagataattgacatgaagctattttaatattctgaaaataatatatgagtatagaaaattatcatctttgatcccttgttcagaattttctaac

SEQ ID NO: 384346 - DNA, 201 bp, Homo sapiens
tctattgataaaagagattggactaggtgatttccatcacttcttcccactctttgacttctttataacttagtttgtctgttttgctattttcagggcaygaccataataacatccctgacttctgtgctgcacaatgacaaagaattccccaacccagagatgtttgaccctggccactttctggataagagtggcaac

SEQ ID NO: 384347 - DNA, 201 bp, Homo sapiens
acaaaaaataaaaaaattagctgggtgtagtggcatgtgcctgtagtcccagctacttgggaggctgaagtgggaggattgctggtgtccaagaggttgasgctgctgtgagctatggtcgtaccactgtactccagcctgggtgacagagcaaggccctgtctcaaaaaaaacaaaaaaaaaagaggaaagaaaagaaat

SEQ ID NO: 384348 - DNA, 201 bp, Homo sapiens; identical to SEQ ID NO: 83864

SEQ ID NO: 384349 - DNA, 201 bp, Homo sapiens
ggttcaagcgattctcctgcctcagcctcccaagtagctgggacaacaggctcatgccaccatgttcagctaatttttgtatttttagtagagacagtgtgtcaccattttggccaggatggttttgatcacttgacctcatgatctgcctgccttggcctcccaaaatgctgggattacaggcgtgagccaccatgcccg

SEQ ID NO: 384350 - DNA, 201 bp, Homo sapiens
aggttcaagcgattctcctgcctcagcctcccaagtagctgggacaacaggctcatgccaccatgttcagctaatttttgtatttttagtagagacagtgtgtcaccattttggccaggatggttttgatcacttgacctcatgatctgcctgccttggcctcccaaaatgctgggattacaggcgtgagccaccatgccc

SEQ ID NO: 384351 - DNA, 201 bp, Homo sapiens
atgtaggtaagtataatagtgaaaaattgtggatgtggctcaattgcaggaaacatattttttctcaagttaatcagtgccttttaacgtataatactatraaggtccttaataaaatcaatattctgaatccttgttttgtagggtaaaaattcaattgatgcaagtgaagagaagccaggtaaatatccttattctagt

SEQ ID NO: 384352 - DNA, 201 bp, Homo sapiens
caggttcaagcgattctcctgcctcagcctcccaagtagctgggacaacaggctcatgccaccatgttcagctaatttttgtatttttagtagagacagtgtgtcaccattttggccaggatggttttgatcacttgacctcatgatctgcctgccttggcctcccaaaatgctgggattacaggcgtgagccaccatgcc

SEQ ID NO: 384353 - DNA, 201 bp, Homo sapiens
tctgtcacccaggctgtggtgcagtggcacaatcactgctcactgcagcctttacctgcctggctaaattttttgtatttttttgtagagactggcatttygccatgtttcccaggttggtctcagactcctgggcttaagcagtccacccaccttggcctcccaaagtgctgggattccaggttttagcaattgtgcctg

SEQ ID NO: 384354 - DNA, 201 bp, Homo sapiens
agataaacatttagttggatttttaagataaagtctagatgtaatcttctgtaatttactatgggattttggcttcattttataacttacagtcagtcagtaagaaatagttgttaagtatggtattttaatgaatttcgacacttgcatacacttgtgtaaccaccatccaaatcaaggtatagaacatttccattgtaa

SEQ ID NO: 384355 - DNA, 201 bp, Homo sapiens
agcctgagagcttcatttgcttttattttttatcaacacttttttttgccgtccttcttaatgcaagccattgtgattggtttgtaatatgttgtattgtwgttttaaaaggaattttaatgtttttaatttctcattttttttagatcatttcaaaggtggtcagtctggattaaatctgtctaagaatttcttagatcc

SEQ ID NO: 384356 - DNA, 201 bp, Homo sapiens
tagataaacatttagttggatttttaagataaagtctagatgtaatcttctgtaatttactatgggattttggcttcattttataacttacagtcagtcagtaagaaatagttgttaagtatggtattttaatgaatttcgacacttgcatacacttgtgtaaccaccatccaaatcaaggtatagaacatttccattgta

SEQ ID NO: 384357 - DNA, 201 bp, Homo sapiens
agaccctgttacacaagaatttaaggtgaatactgtttaattctaatttactgttttgatttccattacttttatattggtggaaagtgttactttttttkattataattattaaaaataagtatggtgctatttgtcatgaagattgtaatccttcagtaagctgagacagtcttctttccgaaatttcagagaacctta

SEQ ID NO: 384358 - DNA, 201 bp, Homo sapiens
ttagataaacatttagttggatttttaagataaagtctagatgtaatcttctgtaatttactatgggattttggcttcattttataacttacagtcagtcagtaagaaatagttgttaagtatggtattttaatgaatttcgacacttgcatacacttgtgtaaccaccatccaaatcaaggtatagaacatttccattgt

SEQ ID NO: 384359 - DNA, 201 bp, Homo sapiens
gttagataaacatttagttggatttttaagataaagtctagatgtaatcttctgtaatttactatgggattttggcttcattttataacttacagtcagtcagtaagaaatagttgttaagtatggtattttaatgaatttcgacacttgcatacacttgtgtaaccaccatccaaatcaaggtatagaacatttccattg

SEQ ID NO: 384360 - DNA, 201 bp, Homo sapiens
tgagcctggggaggtgaaggctgcagtgaggtgagattgcgccactgcactgcagcatgggcaagagaatgaaaccctggttttttgttttttttttttttggagagagagtctcgctctgtcgccaggctggaatgcagtgctgcgatcttgactcactgcaacctccgcctcccgggttcaagtgattctcctgcctca

SEQ ID NO: 384361 - DNA, 201 bp, Homo sapiens
gtgagaggatcacctgagcctggggaggtgaaggctgcagtgaggtgagattgcgccactgcactgcagcatgggcaagagaatgaaaccctggttttttkttttttttttttttggagagagagtctcgctctgtcgccaggctggaatgcagtgctgcgatcttgactcactgcaacctccgcctcccgggttcaagtg

SEQ ID NO: 384362 - DNA, 201 bp, Homo sapiens
tgaggcaggagaattgcttgaaccccggaggcggaggttgcagtgagctgagatggcaccattgcactccagcctgggcaacaagagtgaaattccatctyaaaaaagaaaaaccacttttaatatgccatactgaagtttagccagtcatacagctgtttatttaatttgttaaatggttgtggaatatcggttttgggc

SEQ ID NO: 384363 - DNA, 201 bp, Homo sapiens
ctgatgatctctggttgactataaccagttaaggtaatatattaacaaattttctttaagtaacatcaatactttttgcttcagggtagatgtgaattaayagaattgagaggtctgacctgaaccaccttttctcattctttgaattttcatagtactttattacacagaatttaccatgaccaaataagtaatgataaa

SEQ ID NO: 384364 - DNA, 201 bp, Homo sapiens
tagtaaagaaaggtaaatgctgtcttcaccttagcctgcatacagagagagatataggagtaagtagtcaatgaaattgaatttttttttttttgagacartgtttctattaccctggctcgaatgcagctggcacaatctcagctcactgcagcctcaacctcccagactcaagtgatcctcgtatctcacactccccag

SEQ ID NO: 384365 - DNA, 201 bp, Homo sapiens
caagacagaccctgaaaatttatagtagtgggttaactagaaccaaatataagagaataggccttaggaatatgtaagtaatgcacaatctgtaatagaamagcataaaggccaaaagaggcacaatttagaccctgtgtgaaaggatatcagacaatgaggaagagaaatcctgaatgtaccctggagaggggacatact

SEQ ID NO: 384366 - DNA, 201 bp, Homo sapiens
aattccatctcaaaaaagaaaaaccacttttaatatgccatactgaagtttagccagtcatacagctgtttatttaatttgttaaatggttgtggaatatyggttttgggcaaactttgtcataggtggatgaaatccattagtaaagaaaggtaaatgctgtcttcaccttagcctgcatacagagagagatataggagt

SEQ ID NO: 384367 - DNA, 201 bp, Homo sapiens
atttaaacttcaaggcattttgtaagtggccaccttctttgaaacctgtaatgaagttttgctagtgaaaagagaaataatttattgaatacatactgtgkgtcaggtgtgctatcatgtcttctcttactctattttttttttcttttttgagacggggactcgctctgtcacccaggctggagtgcagtggcgcaatct

SEQ ID NO: 384368 - DNA, 201 bp, Homo sapiens
gatttatagctattcagtaagaagcacaggtaaggcgacttgggccttgcgattggcatctggaactggtagttaaaagtcttggggactgaaccctcaayctatggggtatggtgctttcaccccgtagatagtgtcagaattgaattacaatagaggacacccagctggtgtcactgcagaaatgcttgtttggtgtat

SEQ ID NO: 384369 - DNA, 201 bp, Homo sapiens
attgtataaatgaaatcatggtattgtgctagtgagtaaatagttggtcttcatcaccatttcctggtatacaactcttgaaatccttggaatcttcaaartaatagtgtttttttttttgtttttttttttttaatgctaatgatcaatggctagctgcccttaggtagcttcaggatgggagcctaagaaagacaaaac

SEQ ID NO: 384370 - DNA, 201 bp, Homo sapiens
gtgcaatggcgcagtctcggctcactgcaacctctgcctccggggttcaagcaattctcctgcctcagcctcctgagtagttgggattacaggcatgtgcygccaagcctggctaattttgtatttttagtagagatggggtttctccatgttggtcaggctggtctcgaactcccaacctcaggtgatccgcccgtcttg

SEQ ID NO: 384371 - DNA, 201 bp, Homo sapiens
attgcaggctctgagaggaggggacccggttcccgggtgagtgtccaggcatgccagcggaacggcccgcgggcagcggcggtgagtgaggaaaacctttygggcgcgggtggcagcctgcggggctgaggtgggcaagcatggaggctgcggcggagtttcggggagggagccgaccccgggcagggactgaggaggaaa

SEQ ID NO: 384372 - DNA, 201 bp, Homo sapiens
aggttttgttaacataattgttttatagatctgaatgatttgtttggcctcctttgtttaagtctttaatagttgtaattgaaaacatttttctccttcartcttgttggttaatttattttaatctgttgtatttacatcctttttgcttttagatgcacagcttcaacacggatccagaggtgtttatcttcttagtga

SEQ ID NO: 384373 - DNA, 201 bp, Homo sapiens
cttctagtttggactgtagaactgattccatctggaaccttcctttaccatactcctgggtattcctgttggctgtttcatgttttggaattactgtttamtgtgtcttgtgtctccccccccccccctttttttttcctttaagacagagtttcactcttgttgcccaggctggagtgcaatggcttgatctcggctcac

SEQ ID NO: 384374 - DNA, 201 bp, Homo sapiens; identical to SEQ ID NO: 83866

SEQ ID NO: 384375 - DNA, 201 bp, Homo sapiens
cctgtaatgaagttttgctagtgaaaagagaaataatttattgaatacatactgtgggtcaggtgtgctatcatgtcttctcttactctattttttttttmttttttgagacggggactcgctctgtcacccaggctggagtgcagtggcgcaatctcggctcactgcaagctctgcctcccgggttcacgccattctcct

SEQ ID NO: 384376 - DNA, 201 bp, Homo sapiens
gagtaaatagttggtcttcatcaccatttcctggtatacaactcttgaaatccttggaatcttcaaagtaatagtgtttttttttttgtttttttttttttaatgctaatgatcaatggctagctgcccttaggtagcttcaggatgggagcctaagaaagacaaaacctggattagagggttgggatttagcctcaccct

SEQ ID NO: 384377 - DNA, 201 bp, Homo sapiens
gtattgtgctagtgagtaaatagttggtcttcatcaccatttcctggtatacaactcttgaaatccttggaatcttcaaagtaatagtgtttttttttttktttttttttttttaatgctaatgatcaatggctagctgcccttaggtagcttcaggatgggagcctaagaaagacaaaacctggattagagggttgggat

SEQ ID NO: 384378 - DNA, 201 bp, Homo sapiens
actcctgacctcaggtgatccaccctcctcggcctcccaaagtgctgggattacaggcgtgagccaccgtgcctggccccaatttttttttttttttttttggtacggagttttgctcttgtttggagtgcagtggcatgatctcggctcactgcagcctctgcctcccccgggttcaagcgattctcctgcctcagcctc

SEQ ID NO: 384379 - DNA, 201 bp, Homo sapiens
ccagtactttgggaggacaaggcagatgaatctcttgagtttaggagttggagacctgccttagcaatatggtgaaaccctgtctttaccaaaaaaaaaaatacaaaaaattaacagggcatggtggcatctgcctagagtcccagctacttgggaggctgaggtgggagggtggtttgagcccgggatttggaggctgca

SEQ ID NO: 384380 - DNA, 201 bp, Homo sapiens
tgcctgtaatcccagtactttgggaggacaaggcagatgaatctcttgagtttaggagttggagacctgccttagcaatatggtgaaaccctgtctttacmaaaaaaaaaaatacaaaaaattaacagggcatggtggcatctgcctagagtcccagctacttgggaggctgaggtgggagggtggtttgagcccgggatt

SEQ ID NO: 384381 - DNA, 201 bp, Homo sapiens
cttgcctctcttaagtctctaccatttattactgtacttgagttaggatttggaagtgccactgaacactaaaattattctgtctgggtatttgaatggtrtgagacaaaaatccattttaatgttttatcaagttgagatgtctcacatgagtagttagtgctgagaatcagacacaggcacatttgggagcatggcgtg

SEQ ID NO: 384382 - DNA, 201 bp, Homo sapiens
ttattggttgactttgtgtttttactaatccttgttgaaaagtagaggaattggtttagttgagaaaacaaaatactaaaaaatctgccactagactttttaagtcaagagtttgtataaaatgaaacatatctactatctaatctataaaatttagaatctttttaattctaaagttaacttaagtgtgatttttagtgc

SEQ ID NO: 384383 - DNA, 201 bp, Homo sapiens
tggattaattctgcatagcaaaaactatgataggtgtgttaagtaatgaagtttggggaatgttaataagatgatttctcttactgtagatgaaatacatygtaagagaatccctcgtgagaccagatcagttacatgtatatcttgcctctcttaagtctctaccatttattactgtacttgagttaggatttggaagtg

SEQ ID NO: 384384 - DNA, 201 bp, Homo sapiens
ggcgcctgcaaccacacgcggctaattttttgtatttttagtagagacagggtttcaccgtgttagccaggacagtctcaatctcctgacctcgggatccrcccgcctcagcctcccaaagtgctgggattacaggcgtgagccaccgcgcccagcctcatatcccccatttcaaacacgctgtaaacaatgctcaattac

SEQ ID NO: 384385 - DNA, 201 bp, Homo sapiens
ctttcataatccgtattaccatggattaattctgcatagcaaaaactatgataggtgtgttaagtaatgaagtttggggaatgttaataagatgatttctyttactgtagatgaaatacattgtaagagaatccctcgtgagaccagatcagttacatgtatatcttgcctctcttaagtctctaccatttattactgtac

SEQ ID NO: 384386 - DNA, 201 bp, Homo sapiens
cccgcctcagcctcccaaagtgctaggattacaggcgagagccactgcacccagctggccctgagttcaatattaatcaacatatatattaaataagatayctttaaaaacagaaacacaaataaaacagggttgtgtatcgtttggttgaaaatgtcataaccagagtcagagacccaagcttgtatttttcctaggggc

SEQ ID NO: 384387 - DNA, 201 bp, Homo sapiens
aatgtctttttccctcctttcttctagtaatgcagttcatgggctttaggtacttcagttatgaagtaggcttttcatggggagagattgggattatgctytctgttgtttaagaaactgtttgattttagagtctatttctatgagatagtttaccaaataaatgttccttataagatgatctcattaaattatttcttc

SEQ ID NO: 384388 - DNA, 201 bp, Homo sapiens; identical to SEQ ID NO: 83861

SEQ ID NO: 384389 - DNA, 201 bp, Homo sapiens
catataacaggaagtgtttaggatatgcaagtaaataaaagttgataatgaaaacggataatataagagcaggctattaccaagagagaaagaaatgtctratgaacagacaaggatgattagaaatcagtaatacaaatgaaaatcagatttcatttcacagctgtcatgttgataaaaatttaggagactacatattgt

SEQ ID NO: 384390 - DNA, 201 bp, Homo sapiens; identical to SEQ ID NO: 83862

SEQ ID NO: 384391 - DNA, 201 bp, Homo sapiens; identical to SEQ ID NO: 83863

SEQ ID NO: 384392 - DNA, 201 bp, Homo sapiens
attttctttcagtacaatataaacatcttgcaagcgctagcttgatttacactttttgtctgtatccacctcttttttttttttttttttttttttttttttgagatggagtttcgctcttactgcccaggctggagtgcagtggtgcgatcttggctcattgcaacttccacctcccaggttcaagcgattctcctgcct

SEQ ID NO: 384393 - DNA, 201 bp, Homo sapiens
gtttcctagtatctggagtcctgctaaaatgttaagtgataatctttgtattaattgctttacagtcatctggaatacttactaaaaatttaggccaggcrcggtggctcatgcctgttatcccagcactttgagaggccgaggcgggtggatcacctgaggtcgggaatttgagaccagtctgaccaacatggagaaaac

SEQ ID NO: 384394 - DNA, 201 bp, Homo sapiens
aattttctttcagtacaatataaacatcttgcaagcgctagcttgatttacactttttgtctgtatccacctcttttttttttttttttttttttttttttttgagatggagtttcgctcttactgcccaggctggagtgcagtggtgcgatcttggctcattgcaacttccacctcccaggttcaagcgattctcctgcc

SEQ ID NO: 384395 - DNA, 201 bp, Homo sapiens
agggtagtaaagacactgtctgaccagagcagataagtatttcagggaaaaagatggtaccagctctttgttaaacgagtctgagcctggcctagtcagarattgtcactataatttaactttttgtaacccctaaccttgtcttaagaactttattcttgttttttgttgaagacttttacgaaactgaaatcatatgct

SEQ ID NO: 384396 - DNA, 201 bp, Homo sapiens
taagtcagtggtccccaaaactaacttatattcttgaatttttcttctaattaaaatcccagaatgatggctgggtgtggtggctcatgcctataatcctrtcactttgggaggctgaggcaggtggattgcctgagctcaggagttagagaccagcctgggcaacacggtgaaaccctgtctctactaaaatagaaaaaa

SEQ ID NO: 384397 - DNA, 201 bp, Homo sapiens
tcacccttttcagtgagttagtcgtgacatttcttacactgtgagggggagtggtaattactttacagggaggtatggggccatggtgtttgactcttctttcaaccacttctgggttttttagtgaaaacctctatctaacactgatactttcatttctgttgtctattgagtcagttaacactgatccatttatttttc

SEQ ID NO: 384398 - DNA, 201 bp, Homo sapiens
ccatcttggccaggctggtctcaaactcctgacccgaagtgatctgcttgcctctgccttccaaagtgctgggattacaggtgtgagccaccatgcctggycccataccagttattctttcatttactgttacttctttcttctgtatatttactgaatttcctgctctcttttcctcttcgcctaactaaattctttcca

SEQ ID NO: 384399 - DNA, 201 bp, Homo sapiens
gttgatttactaggctggattcatgttacagaattggtaatcttggttgggcatggtggcacatgcctgtaatcccagtactttgggaggacaaggcagaygaatctcttgagtttaggagttggagacctgccttagcaatatggtgaaaccctgtctttaccaaaaaaaaaaatacaaaaaattaacagggcatggtgg

SEQ ID NO: 384400 - DNA, 201 bp, Homo sapiens
ttcacccttttcagtgagttagtcgtgacatttcttacactgtgagggggagtggtaattactttacagggaggtatggggccatggtgtttgactcttctttcaaccacttctgggttttttagtgaaaacctctatctaacactgatactttcatttctgttgtctattgagtcagttaacactgatccatttattttt

SEQ ID NO: 384401 - DNA, 201 bp, Homo sapiens; identical to SEQ ID NO: 83859

SEQ ID NO: 384402 - DNA, 201 bp, Homo sapiens
attcacccttttcagtgagttagtcgtgacatttcttacactgtgagggggagtggtaattactttacagggaggtatggggccatggtgtttgactcttctttcaaccacttctgggttttttagtgaaaacctctatctaacactgatactttcatttctgttgtctattgagtcagttaacactgatccatttatttt

SEQ ID NO: 384403 - DNA, 201 bp, Homo sapiens
cagaacaagactctgtctcaaaaaaaaaaatattaacagcctgatatgacaggatttaaataagcagtggggaatttgggagcctaaactaagttggtcaycatagacataaaagaaagaatgttagcgagtatgtagatatgtagatgaagagcagatgggcagagaaaaggggtcaaggataactacatgttcctgata

SEQ ID NO: 384404 - DNA, 201 bp, Homo sapiens
tccatctggaaccttcctttaccatactcctgggtattcctgttggctgtttcatgttttggaattactgtttactgtgtcttgtgtctccccccccccccctttttttttcctttaagacagagtttcactcttgttgcccaggctggagtgcaatggcttgatctcggctcactgcaacctctgtctcccaggtttaaa

SEQ ID NO: 384405 - DNA, 201 bp, Homo sapiens
aaatcttagagtcattcttctcttccttccctcatatttcatgtctgattctaaaggaaatcttgttgcctgtactttttctttctttcctttttttcccctttttttgagtctcgcactgtcgcccaggctggagtgcagtagtgcaatctcagctgactgcaatctctgtgtcccgggttcaagcgattctcctacctc

SEQ ID NO: 384406 - DNA, 201 bp, Homo sapiens
agaacctggcaggtggaggttgcagtgaatggagattgtgccactgcactccagcctgggtgacagagcgagactctgtctcttaaaaaaaaaaaaaaaaatcccagaatgactttttgtaaaacagactgttgttaaaatttatatgagagagtaataaagggccagaaccaagacagttttgaagcacaagatattcta

SEQ ID NO: 384407 - DNA, 201 bp, Homo sapiens; identical to SEQ ID NO: 83879

SEQ ID NO: 384408 - DNA, 201 bp, Homo sapiens
ctcagccttccgagtagctaggattacaggcatgtgccaccacgcctggcaaattttgtatttttagtagagacggggtttctccatgttggtcaggctgrtctcgaactcccgatctcaggtgatccacccaccttggcccccaaagtgctgagattacaggcatgagccactgcaccggcctatttccaagctttttaa

SEQ ID NO: 384409 - DNA, 201 bp, Homo sapiens
taaatgttgtaatcatccatatttgattgaatatcctatagaccctgttacacaagaatttaaggtgaatactgtttaattctaatttactgttttgattyccattacttttatattggtggaaagtgttactttttttgattataattattaaaaataagtatggtgctatttgtcatgaagattgtaatccttcagtaa

SEQ ID NO: 384410 - DNA, 201 bp, Homo sapiens
actatgtcctgctaattttgttttgtgtattttgtagagacaggggtttgccatgttgctcaagctggtctcacactcctgggctcaagtgatctgtctgsctcatcctcctaaagtgctggcattatcgaaactgcttttatttgcaagtggtctggtttgattatcttcataggaagtccaagggaatccagaatcttt

SEQ ID NO: 384411 - DNA, 201 bp, Homo sapiens
ctagtattacagtcgcctgccaccacacctggctaatttttgtatctttagtagagacagggtttcgccatgttggccaggctggtcttgaactcctgatytcaggtgttgtgcccaccccagcctcccaaagcactgggattacaggcatgagccactgcaccaagcctaacgtggtgatttttagtatcccttgaaagt

SEQ ID NO: 384412 - DNA, 201 bp, Homo sapiens; identical to SEQ ID NO: 83860

SEQ ID NO: 384413 - DNA, 201 bp, Homo sapiens
ctgacacctgttatcccagcactttgggaggccagggtgagaggatcacttaagcccaggagtttaagactagtttgggcaacatggcgaaatcctgtctstacaaaaagaaatacagaaatagccaggtgtggtggtgcatgactttggtcccagctacacaggaggctgaggtgagaggatcacctgagcctggggagg

SEQ ID NO: 384414 - DNA, 201 bp, Homo sapiens
ataatgtaatgaaccccttgtgcaattcattcagccacatgtatccaatcttgttttattgtcatttttcttcttagagtattaaaatcaaatctcagacrtgacattttgcccataaatgtcattatctttaacttcttccataattcagatattttctgtaaactggtaaataacacttgtaaatgaatatattcaagt

SEQ ID NO: 384415 - DNA, 201 bp, Homo sapiens
atatttttagtagagactgggtttcaccatgttggtaaggctggtctccaactcctgaccttgtgatctgcccgccttggcctcccaaagtgctgggattrcaggcgtgagccaccacatctggctttttttttttttttttttataaacagtttcacttcgtcacctgggctgaagtacagtggtgtgatcttggctcac

SEQ ID NO: 384416 - DNA, 201 bp, Homo sapiens
tcttgggtagttgatagaatgatagcataatatcaatagaaataaattcttagtaaccctcaatcacagttgtttcaaggtagtttacaataggcttttcyactcctggcaatattgacattttgggccagataattctttcttaggaggtaatgttctgtgcacttaggacatttagcagcatccctgtcttctacccat

SEQ ID NO: 384417 - DNA, 201 bp, Homo sapiens
atttaaaccaaaaatcttagagtcattcttctcttccttccctcatatttcatgtctgattctaaaggaaatcttgttgcctgtactttttctttctttcytttttttcccctttttttgagtctcgcactgtcgcccaggctggagtgcagtagtgcaatctcagctgactgcaatctctgtgtcccgggttcaagcgat

SEQ ID NO: 384418 - DNA, 201 bp, Homo sapiens
tggttttgaaatgtactgtaaatgaaacttgacatataaaatttctcttttttccctttttttttgagagaaggtgtcgctctgtcacccaggctgtggtrcagtggcacaatcactgctcactgcagcctttacctgcctggctaaattttttgtatttttttgtagagactggcattttgccatgtttcccaggttggt

SEQ ID NO: 384419 - DNA, 201 bp, Homo sapiens
cgcccacctcggcctcccaaagtgctggcattacaggcttgagccaccacacccagcctccattctgaatttttttttttttttttttttgagaaggagtyttgctcttgttgcccaggctgggattaagtgctgggattaccagcatgagccaccgcgcccggccattctgaatttttaatttttaatggtacatgttac

SEQ ID NO: 384420 - DNA, 201 bp, Homo sapiens
tgagaggatcacttaagcccaggagtttaagactagtttgggcaacatggcgaaatcctgtctctacaaaaagaaatacagaaatagccaggtgtggtggygcatgactttggtcccagctacacaggaggctgaggtgagaggatcacctgagcctggggaggtgaaggctgcagtgaggtgagattgcgccactgcact

SEQ ID NO: 384421 - DNA, 201 bp, Homo sapiens
aattctgaaatgctgcggacaactgtgagtttatcatttggtctggtctgggaaaatctcaagatattttcaccttttgagatttggcattatttatatakgaagtcaaaagataaggtaaaggagtatatggggacagtattccttgaaaaacaagaatgtttaatactcatatttttctgttcatgttttaattttaga

SEQ ID NO: 384422 - DNA, 201 bp, Homo sapiens
cccgccaccacgcttggctaattttttctatttttgagtagagacggggtttcaccatggtagccaggatggtctcgatcttctgaccttgtgatctgccygcctcggcctccgaaagtgctgggtttacaggcgtgagccaccgtacccggcctcttctccctttttaataattaattataattaaaggaagggtctagc

SEQ ID NO: 384423 - DNA, 201 bp, Homo sapiens; identical to SEQ ID NO: 83865

SEQ ID NO: 384424 - DNA, 201 bp, Homo sapiens
cccaggttcaagcgattttcctgccttagcctcctgagcagctgggattacaggcgtgtgccaccacacctggctaatttttttgtatttttagtggagaygaggtttcaccatgttggccaggctggtcttaaactcctgacctcaagtgatctgcccgccttggcctcccaaagtgctgggattacaggtgtgagccac

SEQ ID NO: 384425 - DNA, 201 bp, Homo sapiens; identical to SEQ ID NO: 83867

SEQ ID NO: 384426 - DNA, 201 bp, Homo sapiens
cacaagtactgcagataatgagagctgactctaatttgctgaaaattacggatttgaacccaggattagtttaagagcttctacttagcttctgtgctaamctgccttttatttatttattttttttttgagacggagtctcgttctgtcacccaggctgggatgcagtggcgtgatttcggctcactgcaacctctgtct

SEQ ID NO: 384427 - DNA, 201 bp, Homo sapiens
tcaagacaatgaatatttatagaatttgtcacttacacgttacctcacagtgtatacaggtagatagatattccttagaaatgatcatctgccttttgatwgaacatttgtagtaattgtcatagttgataattccataagagggctcactggaattgttttactatagataacttcagatttccattaatattaagatat

SEQ ID NO: 384428 - DNA, 201 bp, Homo sapiens; identical to SEQ ID NO: 83858

SEQ ID NO: 384429 - DNA, 201 bp, Homo sapiens
tagtaagggacagaggggaatagatggactcatttcatgatgtagaaacaaatactccctgtcttgtcttacatgaaaaattattcttaaactaggccttrtctttgagaacctgatcaaagtataaaaaatactttttggctttatttctttagtgagtcactattccatattttgaaggtgttaagaggtatggtaaag

SEQ ID NO: 384430 - DNA, 201 bp, Homo sapiens
tttagattgtaattggaacttgcattggggaaaaagcataatttttttttaagagaccatttaacttttttacccaggttgttctcgaacacctggactcwagtgatcctcctgccttagcctcttcaagtgttgggcttataggtgtgagccactgtgctcagccctattttcgattttttagtagattaattttgtaga

SEQ ID NO: 384431 - DNA, 201 bp, Homo sapiens
tctcttcacttacttacttagtatcttctgaagagcaaaagttttaaattttaatgaatttcaattttaacaaatttttttctgttcactcatgatttttrtgtcatctgtaactactctttgcctaattcaaggtgttgatattttcttttaatagttttatagtttttgctcttacatttagatctatgatctattttc

SEQ ID NO: 384432 - DNA, 201 bp, Homo sapiens
attttctttgttcaccctttccagtaattcctatgctccccttaccatcactaggaagcatccagtattctgatttttgtcacactgatgagtcttttttytgtttagctattttgttgaatatattttttcaacacagagtcatctgtgttgtttttagtagaatttttttcttttaattggtgaatagtttgttttttc

SEQ ID NO: 384433 - DNA, 201 bp, Homo sapiens
tttatagtagtgggttaactagaaccaaatataagagaataggccttaggaatatgtaagtaatgcacaatctgtaatagaacagcataaaggccaaaagrggcacaatttagaccctgtgtgaaaggatatcagacaatgaggaagagaaatcctgaatgtaccctggagaggggacatactccataagccatacatttc

SEQ ID NO: 384434 - DNA, 201 bp, Homo sapiens
gaatcgcttgaacccgggaggaggaggttgcagtgagccgagatcgtgccactgcactctagcctgggtaacagaacaagactctgtctcaaaaaaaaaaatattaacagcctgatatgacaggatttaaataagcagtggggaatttgggagcctaaactaagttggtcaccatagacataaaagaaagaatgttagcga

SEQ ID NO: 384435 - DNA, 201 bp, Homo sapiens
ttttaattttatttatttatttttatttttttgagacagaatcttgctctattgcccaggctggagtgccgtggtgcaatctcggctcactgcaagctgcrcctcccgggttcacgctattctcctgcctcagcctcccgagtagctgggactacaggcgcctgccactacgcctggctaattttttctattttttagtag

SEQ ID NO: 384436 - DNA, 201 bp, Homo sapiens
ggctttcagattcctcatcatttatttccttgttttcttttctctcacatacccattataaaagtatatatatatatatatatatatatatatatatatatatatatatacacacacacacacacacacacatttttttttttttttttttgagacagtctcactctgtcacccaggctggagtgcagtggcacgatctcg

SEQ ID NO: 384437 - DNA, 201 bp, Homo sapiens
ttatattttttccctcagaatgatttatattttctaaatagtcaatatttacattttgttcttaagtctgataaaaatcaatataaaatttttcagatccctacaatgttatatcatggaacccaggaggaacgtcaaaaattggtaagaaatatttacaaacggaaagggactttgcagattcatcctgtggtaatcacg

SEQ ID NO: 384438 - DNA, 201 bp, Homo sapiens
gttcaagcgattctcctgcctcagcctcccaagtagctgggacaacaggctcatgccaccatgttcagctaatttttgtatttttagtagagacagtgtgtcaccattttggccaggatggttttgatcacttgacctcatgatctgcctgccttggcctcccaaaatgctgggattacaggcgtgagccaccatgcccgg

SEQ ID NO: 384439 - DNA, 201 bp, Homo sapiens
ttacatccttgcatggctgctgtctaatctatttttattgcttcctgtaattcctaccccatcctacctatctttaatttagagaaacattatctttcaarggtaatctagtcatatgggcctgaaaagcttctcagttgtggtttagcaattttattcaaagtctttatcgttttttctgatattaaagtttatacatgt

SEQ ID NO: 384440 - DNA, 201 bp, Homo sapiens
agtaagctaattgggtgtggaaaaataattttaaattttgggaatttatttcaaatctggttaccgaatggtggctcaaggcaggctaccttattgtgackctgggcgcttttattgaaagacaagaattccaggtcctgtgcagacatactgagttacagtgtcaaggtaggagttgagaatctgagttttttgaacatg

SEQ ID NO: 384441 - DNA, 201 bp, Homo sapiens
agcctggggaggtgaaggctgcagtgaggtgagattgcgccactgcactgcagcatgggcaagagaatgaaaccctggttttttgttttttttttttttgkagagagagtctcgctctgtcgccaggctggaatgcagtgctgcgatcttgactcactgcaacctccgcctcccgggttcaagtgattctcctgcctcagc

SEQ ID NO: 384442 - DNA, 201 bp, Homo sapiens
taatttatacttgttttggcatcagtgaaggaagtaagctaattgggtgtggaaaaataattttaaattttgggaatttatttcaaatctggttaccgaakggtggctcaaggcaggctaccttattgtgactctgggcgcttttattgaaagacaagaattccaggtcctgtgcagacatactgagttacagtgtcaagg

SEQ ID NO: 384443 - DNA, 201 bp, Homo sapiens
gaggaggccactttttacaccttttataggatggcttattatttcctttccactcaacatgtctgtgatactcatttatgttgttgagcatattagtaacyggtttcttcttattgactagtattctgttgaatgaatgttacaattttctcatccatccccttattgatgggcatttgggttgtttgcagtttgtgactt

SEQ ID NO: 384444 - DNA, 201 bp, Homo sapiens
ctgaaaatctgtcttttaattcatggggattttttagaatgatttcttggagggttttgtcttttgaatgtgtggtcccttctctgcctagaatttttttktttgaatgagacatggtcttgctgttgtccaggttggagagcagtggtgcaactatagctcactacattcttgaatttctgggctcaagccatcttccca

SEQ ID NO: 384445 - DNA, 201 bp, Homo sapiens
ctttgccaaaaggctaagaagagagttttctgttttttctgtacttgttaccttctgcaatttttttttttttttttttttttgaaatggagtctctgttrcccaggctggagggcagtgatgcagtcttggttcactgcaatctctgcctcccatgatgaagcaattcttgtgcctgagccaccggagtagctgggatta

SEQ ID NO: 384446 - DNA, 201 bp, Homo sapiens
gctcagtctgaaaatctgtcttttaattcatggggattttttagaatgatttcttggagggttttgtcttttgaatgtgtggtcccttctctgcctagaayttttttgtttgaatgagacatggtcttgctgttgtccaggttggagagcagtggtgcaactatagctcactacattcttgaatttctgggctcaagccat

SEQ ID NO: 384447 - DNA, 201 bp, Homo sapiens
aagatttacaccagatgtaagacatgcttccttatgttaaaattataattttacatgttttcttatgctttgttgtagtaggaattaaattgtagaactcytataattatattggtttctgtataaatattttgtctgatttgacttactcaatctgcacaataccctaatttaaatttatatagtataggttttggaaat

SEQ ID NO: 384448 - DNA, 201 bp, Homo sapiens
tgggtcttttttttttttctttttttttttcatttttaaagagactcctgctatgttgcacagacttgtgaattcctggtttcaagttatctttccccctrtgtcactcaagtaatgtggactacactcatgtgacaccatgcccatctttatgttgtgtatcttatttttgttttgttttactcttgaatcagctcagtc

SEQ ID NO: 384449 - DNA, 201 bp, Homo sapiens
atacctagcacaaagcaaacaatttatcttttcctctcttccgaatcttgctcttttgttttctctttttttggtgttaatatcagaaccagtatctactrtgtcatctaaaacaatttaggaggttatctgaatttccttatatatctagatttttatcgatttctgtgagtcatttcatttgctgctactctggtgttt

SEQ ID NO: 384450 - DNA, 201 bp, Homo sapiens
gagatctgtgggcatagtagtttttctttctttctttttcttttctttttttttttttaagacagagtttcactgtgtggcccaggctggagtgcagtggygatctcggctcactgcaacctccgtctcccagttcaagcaattctttcacctcagctccctgagtagtccagcgcctgggactacaggcacgtgccacca

SEQ ID NO: 384451 - DNA, 201 bp, Homo sapiens
tccttaagatagtcttttaaacagttatcagaaaattattttccttttactacatgtagatttaaatcagtttttaatagctgcttattatcccattgtcytgttctactataattaataatatctatctcttcctcttttcaaaattttcaacaatataaacaaggttgtagtatctgtatttaaaactacacctttgcc

SEQ ID NO: 384452 - DNA, 201 bp, Homo sapiens
ttgtgccgttaatgaaactgcatagcagtccatgagactgtgctgacttttcagagcgctctgtgatcagttttgtatatctttttgcacgtgtataccccaaagcaaaattatcttttatctctattgttgtttgattagaaaattatctatgaataaaaacttaaattgctatcaagttttatttcttgttatatcctt

SEQ ID NO: 384453 - DNA, 201 bp, Homo sapiens
ataaagatttggagtctataattccataccatcaacctatactctgcattctcttcatctcaagacatgctgcttaaaaaaaaaaaaaaaaaaaaaaaaakccaggcatggtggcttacaccttaccagcacgttaggatgctgaggcgggtgcatagcttgagcctgggagttcgagaccagcctgggcaacgtggtgaa

SEQ ID NO: 384454 - DNA, 201 bp, Homo sapiens
cataaagatttggagtctataattccataccatcaacctatactctgcattctcttcatctcaagacatgctgcttaaaaaaaaaaaaaaaaaaaaaaaaagccaggcatggtggcttacaccttaccagcacgttaggatgctgaggcgggtgcatagcttgagcctgggagttcgagaccagcctgggcaacgtggtga

SEQ ID NO: 384455 - DNA, 201 bp, Homo sapiens
ggggcgctctattttgctctctgaacgcaccctctcaagtttcccagtcttctcgtagacggtcaggagagcaatgacagcctggagcagtcgcgcgtgarcgcaaaaatgcccgctggtggaggagcgcttcccctccctcccaagcgatttgccgcatttgttctgacgcaggggcaccccgctcgccgtcttcactta

SEQ ID NO: 384456 - DNA, 201 bp, Homo sapiens
gcataaagatttggagtctataattccataccatcaacctatactctgcattctcttcatctcaagacatgctgcttaaaaaaaaaaaaaaaaaaaaaaaaagccaggcatggtggcttacaccttaccagcacgttaggatgctgaggcgggtgcatagcttgagcctgggagttcgagaccagcctgggcaacgtggtg

SEQ ID NO: 384457 - DNA, 201 bp, Homo sapiens
ctcattgtatttttacaaacatcctattcattgggtcatccctgaactttttgcaaggtcagtattcccattttattgatgagaaagttgaggcctaaaawgaatagtttctggcctgtgattacttatctggatgatgttgcagctgacactgggacctaggtcaaatgatttcagtatttgtgctgttaactgttttat

SEQ ID NO: 384458 - DNA, 201 bp, Homo sapiens
ttctgatgaagatcttaagaagggagagtaaataggctaatgcatgccacatttggctcatgtttaatgtttaacctgatcccaccttatggtggaatctycagggatttgcataaagatttggagtctataattccataccatcaacctatactctgcattctcttcatctcaagacatgctgcttaaaaaaaaaaaaaa

SEQ ID NO: 384459 - DNA, 201 bp, Homo sapiens
aatggcttgaacccaggaggcagaggttgcagtgagccgacattgcgccattgcactccagcctgggcgacaaagcaagactctgtctcaaaaaaaaaaaagaaagaaaacaagaccatagaaaaacttcagtcactacgtagaaacacaccttcttaacaaatgtgattttcattcattcagtaagcatctattgtgtgt

SEQ ID NO: 384460 - DNA, 201 bp, Homo sapiens
ccaggctggagtgtaatggcacagtctctgctcactgcaacctctgccccctgggtccaagtgattctcctgcctcagcctcccgagtagctgccaccatrcctggctaattttttttattttttttatttttagtagagacagggtttcactgtgttggccagactggtcttaaactcctgacctcgtgatccacccgct

SEQ ID NO: 384461 - DNA, 201 bp, Homo sapiens
atcagtagttatttctttaatgcagcacaactttcctcccacctcctcctttgtgctgttattagcaaatacattacatttctatgtatcaaccgtccaayggtacattatataatattattttgtgtaatggctgttaaaatcaggtaagagaagaaagaaaaataggcacttataatgtactttatagttacataatta

SEQ ID NO: 384462 - DNA, 201 bp, Homo sapiens
atgcatcaggtggcttcgtttaaatatacgacaattacttttattatgttgaaaggaaaaggtctggagctcgagggaggggattacagatttgggtccaytggcgcaaagggaggctgactgttcagattaataattattaacggccaccgtatggaaagcactgcacgaaaaactaagatgaccagtcctcgtccttaa

SEQ ID NO: 384463 - DNA, 201 bp, Homo sapiens
gaacaaaggtctctggttttcctaggcagaggaccctgcggccttccgcagtgtttgtgtccctgggtacttgagattagggagtggtgatgactcttaaygagcatgctgccttcaagcatctgtttaacaaatcacatcttgcaccacccttaatccattcaaccctgagtggacacagcacatgtttcagagagcaca

SEQ ID NO: 384464 - DNA, 201 bp, Homo sapiens
gtgcgccactacacccggctaatttttttgtatttttagtagaggtggggtttcaccatgttggccaggctggtctcaaattcctgacctcaggtgatccrcccgtctcagccttccaaagtgctgggattacaggcatgagccactgtgcccagcctatgtgttctttttcttacagattgttttttttttttttttttt

SEQ ID NO: 384465 - DNA, 201 bp, Homo sapiens
tgtgaatcactgcctcacccagttttttggttttaatatatttatgcctaaaactggttcaggattatttaaaacaggggaatccaagggagagaatacartcatgggttcttagtttctgtttttggttgtgccagtaaagccccttcctcgtccttcttttctgcttatcactagagacagaaactaaaaaccatggct

SEQ ID NO: 384466 - DNA, 201 bp, Homo sapiens
tttgtattttgccaatgaccagtatgagtgacatgtaacattattgattgatttgttgctatgaaagttattgtataagatttgtgaggaaaagtaatacygggttgactcctagacatggacatgtgtgtataaaataactgaaacaatttgtttgcagtaatttctaagtttaagatgcaatctttctttataaggatg

SEQ ID NO: 384467 - DNA, 201 bp, Homo sapiens
atgtccttgaaggaggtaaaaggaacagatttgaaatatataatacttttagtgtattattatgtaacaaggaatctaaatgctttgctgaaagagttttrtatgacagactgggattatgcaaaataaactctacttctctgagcaggatgttgactaataagcagtttcaagcctagtttttatatctgtctttttgaa

SEQ ID NO: 384468 - DNA, 201 bp, Homo sapiens
tgggctggctgtattgctgttgctaaagagcgggagatgtacacagacttggtagaagacctgtgctatagtaaactctgccatccagacatttttttgcytattgtatactatgcagattaaccttctcatttgtatggtttctatattagtttcacataatttatcatgtttcttaaaataaaatttttttaacctagg

SEQ ID NO: 384469 - DNA, 201 bp, Homo sapiens
ttcaccatgttggccaggatggtcttgatctcctgacctcattagccacccacccctgcgtccctgagtgctgggattacaggtgggagctgccacacccsgcccccaatttttttttttttttttttttgagacggagtctcgctctctgtcaggctggagtgcagtggctccatctcagctcactgcaagctccgcctc

SEQ ID NO: 384470 - DNA, 201 bp, Homo sapiens
attcctttagctttttgtataggtcttatttttcagatactttaatcatctatgctgttttctgttggaacttctcccaagtctttttaatggtgaagacyagaattctatgttttatgttaactcccttaggaaagacatggtcagaactcagtagaatagtaagattacactcctcaattccctatactttttagttat

SEQ ID NO: 384471 - DNA, 201 bp, Homo sapiens
taatctccactactctggaggctgaggcaggaggatcacatgagcctaggagtttgagtctatcttgggcaatgtagcaagaccatatttctttaaaaaawtttttttaatgattgattgtgagtaatgagggagagagaagagtccagtataaatccctgaatgatggggttatagatgggcacatttctcactagattt

SEQ ID NO: 384472 - DNA, 201 bp, Homo sapiens
tggccaggcaggtctcgaactcagacctcaagtgatccatccacctcagcctcccaaagtgctgggattacaggcatgagccactgtgtccagcccaaaayacgatttttgagaagtagttctctctcaagacaaattcccagagatacaagaaattctcattcatctatggtcccttgattaaaaggctctgccttagat

SEQ ID NO: 384473 - DNA, 201 bp, Homo sapiens
tcgctggaacccaggaggcggaggttgtggtgagccgagattgcgccattgcactccagcctgggcaacaagagagaaactccggctcaaaaaaaaaaaaagaaaaaagatgagagaaagaaaattacattctatgtcgtttgggatactttatgcaatagtctgcctcattatttattaatttattcattctgtgtagca

SEQ ID NO: 384474 - DNA, 201 bp, Homo sapiens
ttttgctggatgtagaattcttggctaacagtctttttctttcaacactttgaacatgtcatcccatttgtcttcttacgtccatggttttctgatgacargttagccattaatcttattgaggatctcatcatgtatgtgaaaagtcgtttttcttttgctgctataaatgttatctctttaagttttgtcaatttgatt

SEQ ID NO: 384475 - DNA, 201 bp, Homo sapiens
taagtagaattagtaactttttccctcgaattccctgtactcccttcctcaatattctccctttcccttctttcttttttatttttttatttttatttttwtttttggagacagggtctggctctgtcacccaggctggagtgcagtggtatgatctcggctcactgcaacctctgtctcctgggctcaagcgattctcct

SEQ ID NO: 384476 - DNA, 201 bp, Homo sapiens
gatcgcttgagcccaggagttcaagactgaagtgagccatgatcaccactgcattccagcctgggttgacagaggaacaccttgtctcaaaaaaaaaaaaagtaaaaaaatccagttggactaattagagagtcgctgagtacataatttaaacttagagtattgaagctaaaagcaaatataaatataacctacagttgc

SEQ ID NO: 384477 - DNA, 201 bp, Homo sapiens
caggtgcccacgaccacgcccagccaatttttgtatcttcagtagagatggggtttcaccatcttggccaggctggtcttgaactcctgacatggtgatcsacctgccgcggcctctgaaaatgctgggattataggcgtgagccaccgcacccggccattactaagaacttgtaaaggggaaagggaagaccaatgaaag

SEQ ID NO: 384478 - DNA, 201 bp, Homo sapiens
ggattacaggtgcccacgaccacgcccagccaatttttgtatcttcagtagagatggggtttcaccatcttggccaggctggtcttgaactcctgacatgktgatccacctgccgcggcctctgaaaatgctgggattataggcgtgagccaccgcacccggccattactaagaacttgtaaaggggaaagggaagaccaa

SEQ ID NO: 384479 - DNA, 201 bp, Homo sapiens
tgggattacaggtgcccacgaccacgcccagccaatttttgtatcttcagtagagatggggtttcaccatcttggccaggctggtcttgaactcctgacayggtgatccacctgccgcggcctctgaaaatgctgggattataggcgtgagccaccgcacccggccattactaagaacttgtaaaggggaaagggaagacc

SEQ ID NO: 384480 - DNA, 201 bp, Homo sapiens
catgcttctttgggctggctgtattgctgttgctaaagagcgggagatgtacacagacttggtagaagacctgtgctatagtaaactctgccatccagacwtttttttgcctattgtatactatgcagattaaccttctcatttgtatggtttctatattagtttcacataatttatcatgtttcttaaaataaaattttt

SEQ ID NO: 384481 - DNA, 201 bp, Homo sapiens
tttagtatagtagcatgctgacagttttgtagcctaggagcagtaggctctaccatatagcctaggcgtgtagtaggctgtgccatctaagtttgtgtaawacattctgatattcacacaatgatgaaactgcctgaggatgcattctcagaatgtatttctgtcattttaagtgatgcatgactgtaccactagctcttg

SEQ ID NO: 384482 - DNA, 201 bp, Homo sapiens
gaacctcctctggcactgttcagtttctttagggaagaaccttctaattttcttttgtctgaagcgtgaatgcttgactgtcttttggagtgggatggtaractcttcagcaagtccagacttttatttaatcccccatttcagttcatgtcttaatcctttccactgtttcactagatatttcttaatcttgaactaatc

SEQ ID NO: 384483 - DNA, 201 bp, Homo sapiens
catatgttttcatttctcttgggtatatgtaggagtggaactgctcggtcataaggtaattctgggcttagtcacttgataaattgccacagttttttccrtagtggctgcactattttacactcccacttgtggtatgtgaggattttcatcgctccacatccttaccagtacttcttattttgactttctgattatagc

SEQ ID NO: 384484 - DNA, 201 bp, Homo sapiens
ggattgttgatagctccgtttacaaagtggaagtgatgacagctcccattgatgtggacagttctctaaacaacgcgaggtgacttcagcttatgtggctygttgcctgacctcttcttttaaggtatctctttctaattttgatcatccattttatactcagtttggcaaactctgctgctttaaataatgccaagaagg

SEQ ID NO: 384485 - DNA, 201 bp, Homo sapiens
agataatagctaaaagaggttgaatacctgaaacaagaatttttaaatggcttagaacttgcagttcagtagtatcaaatctaaaattgtatatttttttycagcagaacgcagattttaaaaaattgtatattttgtctaattggttttgcctttgtttcacattgtatcaaggatattccataattacagctattacca

SEQ ID NO: 384486 - DNA, 201 bp, Homo sapiens
cctctggagtagctgggattacaggcatgcgccaccatgcccggataatttttgtatttttagtagagacggggttttgccatgttggcaaggctggtctygaactcatgacctcaagtgatctgcccgccttggcctcccaaaatgctgggattacagatgtgagccactgtgcctagccgttggttcctgcttttagtt

SEQ ID NO: 384487 - DNA, 201 bp, Homo sapiens
tacggttcagcagtaccttatctaaatcagcttttttaaggacagcaacttgaatataattgaaaggtaattttactagcttcctgccctggagtaattaygaagcataggcattcttgattaggttatcatctttatgaagatttctgcctgtatctttatataaagtatgtactggttttgaatagaggcatagttttg

SEQ ID NO: 384488 - DNA, 201 bp, Homo sapiens
tgggcgtggtggtgcaggcctgtaatcccagctacctgggaggctgaggcaggaaaattgcatgaacctgggaggcaggggttgcagtgagccaagatcgygccaccacactctagcctgggcagtagagtgagactccgtctcaaaaaaaaagtgaccctgaatcaaaaactttaccaaattggtagtaaaaaatgtcat

SEQ ID NO: 384489 - DNA, 201 bp, Homo sapiens
gtttgaggccaggctggccaacatggtgaaacttcatctctattaaaaaaaatacaaaaattagctgggcgtggtggtgcaggcctgtaatcccagctacytgggaggctgaggcaggaaaattgcatgaacctgggaggcaggggttgcagtgagccaagatcgcgccaccacactctagcctgggcagtagagtgagac

SEQ ID NO: 384490 - DNA, 201 bp, Homo sapiens
tcacccccaatagaatgaattttaattctgggataaagataactgtttagcatattacttagtattaaaaatagttgcaaattcaatgttttttttttttttaaggatacataaaaatattcccacttaagaacagttccataaaaggtgatcctgaatcagggtgaggtggctcacacctgtaatcccagcactttggga

SEQ ID NO: 384491 - DNA, 201 bp, Homo sapiens
gggtactcaaatacgtaattgaagttgtgaacactatagatcatgagagatgggagagatcattgtatcctgacctacctaagggaaattttgtggagaaygtgagattaagtttgttcttaaagggcaagtaggatatggaaagataggggaggaaatctagtgaagtatttcaggtagggaaaagactttgaacaaaga

SEQ ID NO: 384492 - DNA, 201 bp, Homo sapiens
caccatgcccggctaattttttgttacttttagtagagacagggtttcaccatgttagctaggatggtcttgatcttcttaccttgtgatccacccacctyggcctcccaaagtgctgggattacaagcatgagccaccgcacctggcatgattaattcttaaacatagccatgttgtaataattcattatttatgtcgct

SEQ ID NO: 384493 - DNA, 201 bp, Homo sapiens
ctcaatccatttaattctaccatcaaggtagattgttgataaaaatggtcattatgattaattttttttttttttttgagacagagtcttcttgctctgtmccccaggctggagtgcagtggcacaatctgggctcactgcaagctctgcctcccgggttcacgccattcttctgcctcagcctcctgagtagctgggact

SEQ ID NO: 384494 - DNA, 201 bp, Homo sapiens
aaaaaaaaatgtgtaacatgttcttaaacctactacgattatgcttaacgatggggctatgtaatgagaaattcatcattagacaaatttgtcattgtgcraacatcatagagtatacttccacaaacttaaatggtatagtttactacacatctaggctgtgtacaaacctgtacagcatgttactgttctgaatactgt

SEQ ID NO: 384495 - DNA, 201 bp, Homo sapiens
tgggtggatcacgaggtcaggagatcgagaccagcctgaccaacatggtgaaaccccgtctctactaaaaatagaaaaattagccgggtgtggtggtgagygcctgtaatcccagctacttgggaggctgaggcaggagaatctcttgaacctgggaggcggagtttgcagtgagcagagattgtaccactgcactccagc

SEQ ID NO: 384496 - DNA, 201 bp, Homo sapiens
tagtaaatgtaggtttaaaacaaaagattatttgtattttgccaatgaccagtatgagtgacatgtaacattattgattgatttgttgctatgaaagttaytgtataagatttgtgaggaaaagtaatactgggttgactcctagacatggacatgtgtgtataaaataactgaaacaatttgtttgcagtaatttctaag

SEQ ID NO: 384497 - DNA, 201 bp, Homo sapiens
cttctttaaattggtcagtggcaaaatattttgtttgctgtgaaattagacacacactttattttcaaaaatctagtacagaaatcttttcctttctttgrttttccatagtgcataaaattttggtgaaccgctgcagagattaaaacttagtaaagtgaaaacaatgaatgctttttcttttaaatttaatgtctttag

SEQ ID NO: 384498 - DNA, 201 bp, Homo sapiens
gcagttgcaattaatgtgttcagtgtcatgataagaataagctctaaaatgttaagggagtatgtgaaggactcaatcccgttttagtaggggaggggagygatcagggaaagtttcctggagaaagtgacaggtaaactgccatctaaaaggccagaaggtgttaggccaagatagatgggctaagaggtccacccaaaa

SEQ ID NO: 384499 - DNA, 201 bp, Homo sapiens
ggctccagcccccaattttttaatgttactgatttctaacttcattcctttgtggtcagagaacatagtttgtatttctgttcttttaaaatttttgaggkttgttttattatctggtatgtggtctggtctttcctggtggatgtaccatgtgtgcttgagaatatatattctcctgttgttgggtggagtgttctatag

SEQ ID NO: 384500 - DNA, 201 bp, Homo sapiens
gctgggattacaggcgtgagccactgtgcccagccctcatttcatttttaatttttctgtttatatttaatcttgtaagcactcttgaattacttttgatyccagattgtgtggagaatagtcagtatatatgtggtaaatatatactgtggttgtaccttttccattttgcctgatagcattactttctgtgttctgtat

SEQ ID NO: 384501 - DNA, 201 bp, Homo sapiens
tatatatatggtttagagaattcagtttgagagaattagagaattcagtctgatttgtagcttgatgtcataaaagtctcccataggacaggctattactytgaaaactattaagccttaaaccctatatttctgatgaagatcttaagaagggagagtaaataggctaatgcatgccacatttggctcatgtttaatgtt

SEQ ID NO: 384502 - DNA, 201 bp, Homo sapiens
atgattttagtttcctttattaatagtagaaaatgattgtggagagaactacttctttcacgttatccaacaaagtaagaaaaattacccatttacttcaraaaaatattgaacgttctaacaatattgtggtactgactctcctggagctttgggggcaaaaataaaagcaacaatgcataaagtgacaggtttgataga

SEQ ID NO: 384503 - DNA, 201 bp, Homo sapiens
acagttgagagccactttgcccggctgccatttttaattagaataatttgatgtgaacttattagatatattaacaaaaattctcatactccgtagatatwttttgctggagtctcatgagggccttaacagcctagcaaacaaagaatggaaactataagtatggcagttgttttgggagatataaatatgatttaagtc

SEQ ID NO: 384504 - DNA, 201 bp, Homo sapiens
attatcaaactggcagtgcgtatgtgttctaatttcctgaaatacgatgtctacaattttttcccaccattttcaattttaatgaaatcacagaaccttartaagtcatatttagtcacagtgctgtgaatcatttgttaataaacatttccattgttactttataatagcctgctctctaaagtttcaaataaaagctga

SEQ ID NO: 384505 - DNA, 201 bp, Homo sapiens
ctagtaatgccatatgaaattgtatttaatacagtaacaggttgaggggaacaattgccttagtgctttgttagtctagagcttgaggtatttaagctgcwgtattattttgtggtgtgaggggagcaaaaagaaaactggtggggcaggatctgttttctaccttctactttaaatgcttgaattatctgagaagctagg

SEQ ID NO: 384506 - DNA, 201 bp, Homo sapiens
attttaatcatgactaaaaattacattaaatggagttatgttattttggtaattgcaaatgaatgcctgtttatttccttgtgcagctcttgtgtgggatrcattagggagctctagtaatgccatatgaaattgtatttaatacagtaacaggttgaggggaacaattgccttagtgctttgttagtctagagcttgagg

SEQ ID NO: 384507 - DNA, 201 bp, Homo sapiens
cccgtctcagccttccaaagtgctgggattacaggcatgagccactgtgcccagcctatgtgttctttttcttacagattgtttttttttttttttttttwattgatcattcttgggtgtttctcgcagagggggatttggcagggtcacaggacaatagtggagggaaggtcagcagataagtgaacaaaggtctctggt

SEQ ID NO: 384508 - DNA, 201 bp, Homo sapiens
tatgataaaaattctactaatgtgagtttggtatatttagagctgatctttggtcattcataactacccttgacctcatataaagtattctgacctgttgytgtgaaggattgataaatgaagaacattgtcagcctaaaatatttccttcaaccattgaagtagctcttcataaactataaagaaatattaggtgtgtat

SEQ ID NO: 384509 - DNA, 201 bp, Homo sapiens
gtctcaccatgttgtccagggtggcctcaaactcctgggctcaagggattctcccacctcagcttcctaaagtgtgttgggagtacaggtgtgaatttttwaaaaaaattttttttatcaactcattacattttataatgagatctgaaatctccccactaagttggtaagaaaaggtgtgtttttaatatgaagtgatta

SEQ ID NO: 384510 - DNA, 201 bp, Homo sapiens
gttactgatttctaacttcattcctttgtggtcagagaacatagtttgtatttctgttcttttaaaatttttgaggtttgttttattatctggtatgtggkctggtctttcctggtggatgtaccatgtgtgcttgagaatatatattctcctgttgttgggtggagtgttctatagtgagtataaattctatagtgttcc

SEQ ID NO: 384511 - DNA, 201 bp, Homo sapiens
tgtgatcctcccaaagtgctgggattacaggtgtgagccaccgcgcccggctccagcccccaattttttaatgttactgatttctaacttcattcctttgkggtcagagaacatagtttgtatttctgttcttttaaaatttttgaggtttgttttattatctggtatgtggtctggtctttcctggtggatgtaccatgt

SEQ ID NO: 384512 - DNA, 201 bp, Homo sapiens
ggtaaactgccatctaaaaggccagaaggtgttaggccaagatagatgggctaagaggtccacccaaaagacaatatatggagacccaaaggtaattgagyatagcatattttgggaattaccagcagtttacatagctgtgatctagaatataggttacattctatatctctgtggtatattctgtatcactagagaagt

SEQ ID NO: 384513 - DNA, 201 bp, Homo sapiens
gggattacaggtgtgagccaccgcgcccggctccagcccccaattttttaatgttactgatttctaacttcattcctttgtggtcagagaacatagtttgkatttctgttcttttaaaatttttgaggtttgttttattatctggtatgtggtctggtctttcctggtggatgtaccatgtgtgcttgagaatatatattc

SEQ ID NO: 384514 - DNA, 201 bp, Homo sapiens
gcaactgcccactgaaaatggatagaatgagaagactccaaggaataccaacattgagataatgggtaagggaaaaaggtacaaccaagagccaagagagrcagctggagtggaggccaaagaagacaggagagagtggagacaaggctgtcaggggaagagagtctttaaaaactgggggatgggtggggaaagtagtaa

SEQ ID NO: 384515 - DNA, 201 bp, Homo sapiens
gtggccgttcacagatgctataatagtatgctgtggcctcttaactcctggcctcaaagggatccttgttgcctaagcctctcaagtaactgagcttacargtacatgctaccaaggccggccccagttttttttttttttttttgagaacagagtctcactctgttgcccaggctggagtgcagtggcatgatctcggct

SEQ ID NO: 384516 - DNA, 201 bp, Homo sapiens
tccaaggaataccaacattgagataatgggtaagggaaaaaggtacaaccaagagccaagagagacagctggagtggaggccaaagaagacaggagagagyggagacaaggctgtcaggggaagagagtctttaaaaactgggggatgggtggggaaagtagtaacagtggataactgtggacaagtcaagtaagaactga

SEQ ID NO: 384517 - DNA, 201 bp, Homo sapiens
ggaatcattaagaacgtaaggaggtagaattaattgtgatgccttcttttttttttataaactgcttattagctgttatttttggaacctacatattcacmatttctaagaatatattcattttcaaaaccttttcaaaaatttaaaggcctcttttttttttgagagggagtcttgttctgctgcccagactggagcaca

SEQ ID NO: 384518 - DNA, 201 bp, Homo sapiens
ttttgtggctgtggacacctttcaacattgcctttttggcctttaaagccttcgctttgtcttcggctttagaaggggcaggagcttccttcttcgctttyggcgccatcttgtgaaaagcccttctttacttctttaatcatagtttagttctttgaacatatataatgactactttaaagtcatatattctgttaaatc

SEQ ID NO: 384519 - DNA, 201 bp, Homo sapiens
gaattagagaattcagtctgatttgtagcttgatgtcataaaagtctcccataggacaggctattactctgaaaactattaagccttaaaccctatatttytgatgaagatcttaagaagggagagtaaataggctaatgcatgccacatttggctcatgtttaatgtttaacctgatcccaccttatggtggaatctcca

SEQ ID NO: 384520 - DNA, 201 bp, Homo sapiens
agccttaaaccctatatttctgatgaagatcttaagaagggagagtaaataggctaatgcatgccacatttggctcatgtttaatgtttaacctgatcccmccttatggtggaatctccagggatttgcataaagatttggagtctataattccataccatcaacctatactctgcattctcttcatctcaagacatgctg

SEQ ID NO: 384521 - DNA, 201 bp, Homo sapiens
ttaacctgatcccaccttatggtggaatctccagggatttgcataaagatttggagtctataattccataccatcaacctatactctgcattctcttcatytcaagacatgctgcttaaaaaaaaaaaaaaaaaaaaaaaaagccaggcatggtggcttacaccttaccagcacgttaggatgctgaggcgggtgcatagc

SEQ ID NO: 384522 - DNA, 201 bp, Homo sapiens
tttctagaaacagctgtaaacagtttttgaagacaattcaggagaattagaaaccatatatttgtacatgaaaccacataaacctctgaagttgattcccrggtgtgcagtggctcacaactgtaatcccagcactttgggaggctgaggcaggcagataacttgaggccaggagtttgagaccagcctggccaacatggt

SEQ ID NO: 384523 - DNA, 201 bp, Homo sapiens
gcctcccaaagtgctgggattacaggcatgagccactgtgtccagcccaaaatacgatttttgagaagtagttctctctcaagacaaattcccagagatamaagaaattctcattcatctatggtcccttgattaaaaggctctgccttagatatagttaaaaaatctttctgaaaaccaaaatttctagaaaccaaaatt

SEQ ID NO: 384524 - DNA, 201 bp, Homo sapiens
tcccttcctcaatattctccctttcccttctttcttttttatttttttatttttatttttttttttggagacagggtctggctctgtcacccaggctggartgcagtggtatgatctcggctcactgcaacctctgtctcctgggctcaagcgattctcctgcctcagcctctccagtagttaggaccacaagtgtgcgcc

SEQ ID NO: 384525 - DNA, 201 bp, Homo sapiens
tgttgacagatactgaaagtctcaaatatttgagtcaaatttgctatatactaataaattatgggatttaatttctttgcccaagtaaaaaggtgtgtgtktgttgttgctttcttaaatattttattttgatttctgtgggcacatagtaggtatatattgttggtttcttaaaaatttatgagtacttaatttaatatc

SEQ ID NO: 384526 - DNA, 201 bp, Homo sapiens
atgtgctaataaaagtttatctgtttttacttattcttacactgtaatggaaatactaatgagcaatggaataatggaataaaaagagatagaagaaaggwccacaaggaaggtcatttcagtattaggggataggttgtatcttctaatttattaagtgtagtattacatggtaacttaatgtacaacagttttaaatta

SEQ ID NO: 384527 - DNA, 201 bp, Homo sapiens
  misc_feature (1)...(201): n = A,T,C or G
gatgaggcatggtgagagtctgaaatggcagcgggaatgacaagaatagatttcaaatatgttaaagacgccgaatcagtaacatttaatgattagctggntatggtggcacataatctccactactctggaggctgaggcaggaggatcacatgagcctaggagtttgagtctatcttgggcaatgtagcaagaccatat

SEQ ID NO: 384528 - DNA, 201 bp, Homo sapiens; identical to SEQ ID NO: 83880

SEQ ID NO: 384529 - DNA, 201 bp, Homo sapiens
tagaacttatcctcagcaacaataagttgctgtggaaaggatgagaaatgctgataggtcctactccttacctaaagatgtctgggagctagaagtagagraagagccctgtgttctcctctgcgtctctttgaagtagggtttctacatagctgagccaagggggaaggagctctcttgcttaaaatacagtcatgtgct

SEQ ID NO: 384530 - DNA, 201 bp, Homo sapiens; identical to SEQ ID NO: 83881

SEQ ID NO: 384531 - DNA, 201 bp, Homo sapiens
gctgtcaggggaagagagtctttaaaaactgggggatgggtggggaaagtagtaacagtggataactgtggacaagtcaagtaagaactgaaaagtttccrtgggttagtctttaggcaacattggtgacttgagaggcgtttggaggactgataatgtgaaatgagatttgtgtaaggtggataatgagtagaaattgta

SEQ ID NO: 384532 - DNA, 201 bp, Homo sapiens
tttctgcacttttagataattaggacacttggctgctgtactagcctggaatacaggcagattgtgtattttcactttcttttattaattactttagtggyacagataattaagatttaattatgtaggatagtgcctagaacatagacctttttaggaataagttgtattttagggattagaaggcttttctctctgggc

SEQ ID NO: 384533 - DNA, 201 bp, Homo sapiens
gagtctataattccataccatcaacctatactctgcattctcttcatctcaagacatgctgcttaaaaaaaaaaaaaaaaaaaaaaaaagccaggcatggkggcttacaccttaccagcacgttaggatgctgaggcgggtgcatagcttgagcctgggagttcgagaccagcctgggcaacgtggtgaaactctgtctct

SEQ ID NO: 384534 - DNA, 201 bp, Homo sapiens
gggatagaatcctccttttttatttttagggtgttaaattgatatagtattgtttaatagctaataagatacattttgggctaagtttctgctttttatasctattaggttacaataaaaaaaaactttagtcatatttgcctttctccttgaaagcaggtatgatagtgacaagctgaaccaaatatttaattctgattt

SEQ ID NO: 384535 - DNA, 201 bp, Homo sapiens
gggagatataaatatgatttaagtcatccactctggtttcagatgcatgtgttagcaattgtatataattcaaaacaaaatggaataagaacttctgatgmggttcagagcttgctatctttattgtaattataaacacgaaagttcagaacataaaattccttgacagctttacagatacttgtactctagagagagtat

SEQ ID NO: 384536 - DNA, 201 bp, Homo sapiens
taaaaagctggggataaagactagtttgtttttatgtgtttagcactgtggttcccaatcctggctatacttggagaggtcatttattttattttattttwttttttttcagactgagtctcgctgtgtccccaggctagagtgcagtggcacgatctctcggctcactgccacctctgcctcccaggttcaagcgattct

SEQ ID NO: 384537 - DNA, 201 bp, Homo sapiens
tacaagcaaaaccacattacaggggaaaactacaaattatcttactgtattgtattaaaaattcggtgaactgttcttaaaaccaaccctctgtggccatyttaataagctattgttactacctctttttcattttatgtgttggttttagtatttcatttacatgttccttgaaaatttttattaatctaatttagtatt

SEQ ID NO: 384538 - DNA, 201 bp, Homo sapiens
tattaatttattcattctgtgtagcacctatacatccaaataaaatggagcggtgtcctaggattagtgaaagctgataatggttttaagatctttcagcmcattagagcttacagaactagaaaaatcctaagtggtaaattattttttaatagaactgtacacaagtttatctgaaattttgttccatagttggtgtaa

SEQ ID NO: 384539 - DNA, 201 bp, Homo sapiens
atagatcttctcaaagttactatcattccatctaaacacagttgggatggcactagaggagagttcaaattcatctgaagatgttaagaaaattgtttacwaaaggaaataacattttagtcattttaggactattttctgagatatctcttctggaagatttatttttaaaaaatttaaaacatttttaggatattctta

SEQ ID NO: 384540 - DNA, 201 bp, Homo sapiens
gaaatcttgaggagagaaatgaatagagactagattttctgggaagatgcatttgaaacagtacaagcaaaaccacattacaggggaaaactacaaattaycttactgtattgtattaaaaattcggtgaactgttcttaaaaccaaccctctgtggccatcttaataagctattgttactacctctttttcattttatgt

SEQ ID NO: 384541 - DNA, 201 bp, Homo sapiens
gcccgccccactcctctgcctcaagaggccgcacctcacgccgtcgctgccgcttagccgtgtgattggctaagagggctggcatgctttcccgccccctyccccgccgccgcaccaagaggcgggcgggaccccgcggaagttgtcagtcaaactcctccttcccaccccttgcgaggcccctccccgggccgcgcgccc

SEQ ID NO: 384542 - DNA, 201 bp, Homo sapiens
aattcgcttcaaaggattgtgtgaaattagtgcatataaaacacttagaattgtctttggaatgaagtactaacgttagcagtagtactgtattttaataygtagcacagcagactgctcaatagacattatatacttaatgggtagggtttattaggaaaagatctttctatatcataatacctaaaaataatcaagaat

SEQ ID NO: 384543 - DNA, 201 bp, Homo sapiens
gtgatccacctgccgcggcctctgaaaatgctgggattataggcgtgagccaccgcacccggccattactaagaacttgtaaaggggaaagggaagaccawtgaaagactagggatctccacatttaagcagtgggtaagggagtcaggtataacgctttaattgaaagtcaggatctttaagaagttataatatctgatg

SEQ ID NO: 384544 - DNA, 201 bp, Homo sapiens
tgggtgacgtgcggatcttcttttttttgtggctgtggacacctttcaacattgcctttttggcctttaaagccttcgctttgtcttcggctttagaaggygcaggagcttccttcttcgctttcggcgccatcttgtgaaaagcccttctttacttctttaatcatagtttagttctttgaacatatataatgactactt

SEQ ID NO: 384545 - DNA, 201 bp, Homo sapiens
gttgggtatattctggtccccttttacacaaagtttttgaaaactttttaaaatactcttccacattagcatagtactatctttctgatcattttttctcmatttgatagaggaaaaaagttaggtcaggataacagagactgggatataaaagtcaattgggctaatctaccacttgactgattttattcttccactaaa

SEQ ID NO: 384546 - DNA, 201 bp, Homo sapiens
ataaagtttttatttctggaaatactgaatcaactcatttgaaaccttggttataagtttcttacgtttaatggaaaggaaataatttctaagagtactartatttaatttcatggaaattatatgtgaatctcttggaaaatccaatttaaagaatgtgccgttttaaaaaatatatataatattttatataatttccag

SEQ ID NO: 384547 - DNA, 201 bp, Homo sapiens
caaactcctgacctcaggtgatcctcccgcctcggcctcccaaagtgctgggattacaggcctgagccaccgcacctggctgtgtgttggtacacttaatrgtgtcctataggtctctgaagttctgtttatttttcttcattcttttttctttctgttcttcagattgcataatttctgttgatgtattttcaagttccc

SEQ ID NO: 384548 - DNA, 201 bp, Homo sapiens
agaaattaagtttctttaccattttaaatggaaatttgagattttgactttaactttttctaaagtctcttctctcaggttttgctgaaaagttgtgcagmatataggagtacactgattgggccaattgaggtataggagagtgctgactgtggaactggtttaaaatttttcagctatttgctaagctgaaaaatctat

SEQ ID NO: 384549 - DNA, 201 bp, Homo sapiens
gacttttagtagagacaaggtctatgtactgtatgtacgtagtatatatatgtaacatatatatgtaacatagtatatatgtgtaacatatatatgtaacrtagtatatatgtaacatactatgtatgttgcccaggctggtcttgaactcctgaactcaagcagtcctcttatatggggcctatcatttgcttgtagtca

SEQ ID NO: 384550 - DNA, 201 bp, Homo sapiens
gaagggaaggggcgctctattttgctctctgaacgcaccctctcaagtttcccagtcttctcgtagacggtcaggagagcaatgacagcctggagcagtcrcgcgtgagcgcaaaaatgcccgctggtggaggagcgcttcccctccctcccaagcgatttgccgcatttgttctgacgcaggggcaccccgctcgccgtc

SEQ ID NO: 384551 - DNA, 201 bp, Homo sapiens
ctttattaatagtagaaaatgattgtggagagaactacttctttcacgttatccaacaaagtaagaaaaattacccatttacttcagaaaaatattgaacrttctaacaatattgtggtactgactctcctggagctttgggggcaaaaataaaagcaacaatgcataaagtgacaggtttgatagaaaatgaagatagaa

SEQ ID NO: 384552 - DNA, 201 bp, Homo sapiens
tcccaagtagctgggactacaggcatgcaccaccatgcccagctaatttttttgtatttttggtaaagatgagatggggtttcaccatgatgcccaggctsgtattgatctcttgggcccaagcctgccttggcctcccaaagtgctgggattaaaggcctgagccaccatgcctggcctgcattcattttcaattacgca

SEQ ID NO: 384553 - DNA, 201 bp, Homo sapiens
tgttcgttattcaatactgcccgacattgaaatttgtgtatgatgagggtaaggaactacatttgggtttgtttgtttgtgttttgggtttttttttttttcagacaggatctcaccacatcacccaggatggagtgcagtagtacgattgtggctgacggcagccctgacctcccaggctcaggtgatcctcctgcctta

SEQ ID NO: 384554 - DNA, 201 bp, Homo sapiens
  misc_feature (1)...(201): n = A,T,C or G
ttttggaatcatcaaatgacttagaggaacagacttcatagtaatagtcttcctaaagtagtttgaagatgagcagtcatacaacaccaggattgaagcanagcactgttccttatgtactcatggatatgacagcttttagaaacaaagtagtaactacttaacccttcccctgcctttttttccctccagtattatcaa

SEQ ID NO: 384555 - DNA, 201 bp, Homo sapiens; identical to SEQ ID NO: 83885

SEQ ID NO: 384556 - DNA, 201 bp, Homo sapiens
cataggtgtacatgtagaaacatgctgaaaaactaaattgttagctctagtcttatttcagttaactttatagtcagaaattactactaaaaatgtttttkaaacttgaagttactttcaaggctaaaaagttacacaattgtgagtatagtttcacgattgaggtatttcacaatttcattcacagttgtgagtatattt

SEQ ID NO: 384557 - DNA, 201 bp, Homo sapiens; identical to SEQ ID NO: 83886

SEQ ID NO: 384558 - DNA, 201 bp, Homo sapiens
ctatttattttcatgtttttggtctgcattaatagcatttcattgtagctttcgttttatagcctttatagttattaagtagaataatgtacgttaagctwaaatcatttagaagaagaaatgtgagattaatctacattaaaagaaggggttaggaggggagagttctcgtgagttatgtcttgaataaccgaaatatag

SEQ ID NO: 384559 - DNA, 201 bp, Homo sapiens
agaaaattgacgtgtaagtactttgttgactataaagtacagtgtcatggtagtgataatgtgtaggggacagaaagcaagtagtaacgtctagctggtasaggagatgcacagactcagtacatttaggagagtgacaagaagaaattaggtgctccaggtaagtggactccaaagctttagcagagggatttaagtgaa

SEQ ID NO: 384560 - DNA, 201 bp, Homo sapiens
gagcaagacctcgtttctacaaaaagtaaaaaattaaaattagccagatgtggtggcatacacccgtagtcccagctacttgggaggctgaggcaggaggrtcatttaagcctaggagttcaaggttacaataagcctaggagttcaaggttacaatgacctctgatcatgtcactacactccagcctaggcaacagagtg

SEQ ID NO: 384561 - DNA, 201 bp, Homo sapiens
ctcagttttcatggttttctaaaataaactcatttaaagaatatgtaatgggaagtgtcatattttaaactaccccattttattatttatttattatttttgtaaaaacttacagactcactgttaaaacaactcaaaggagaatcttaacaatggtagaaagtaaaaattcccacccagaggaaatctcttttaaatttt

SEQ ID NO: 384562 - DNA, 201 bp, Homo sapiens
aaataacaggctacatataaaatgtcagtcccagacaggcgtggtggctcaggactgtaatcccagctacttgggaggctggggtagggggatctcttgarcctagggggttgcagtgaactgtgatcacaccagtgcaccccagcctggccgacaatgcaagtctggactgtctcttaaaaaataaaaatggaactgggc

SEQ ID NO: 384563 - DNA, 201 bp, Homo sapiens
ttacatttcactctcttaactttgctgccccctatagcttattagctgctttcctgaaggggagatactgccattagattctggagtttaggtatgatggsatgattctactggtttattgtcattaccataattaaagcccaactattatttgatgtagggtggtcagttttcttttctctgtgatttttggagctggca

SEQ ID NO: 384564 - DNA, 201 bp, Homo sapiens
agccgtgtgattggctaagagggctggcatgctttcccgccccctcccccgccgccgcaccaagaggcgggcgggaccccgcggaagttgtcagtcaaacycctccttcccaccccttgcgaggcccctccccgggccgcgcgccctggcgcgcgcacacgcgcacacactccccagtcgcctgtaccaaccaccttctca

SEQ ID NO: 384565 - DNA, 201 bp, Homo sapiens; identical to SEQ ID NO: 83884

SEQ ID NO: 384566 - DNA, 201 bp, Homo sapiens
tcatgtgatcctccgtctttggcttcccaaaagctgggattacagatgtgaatcactgcctcacccagttttttggttttaatatatttatgcctaaaackggttcaggattatttaaaacaggggaatccaagggagagaatacaatcatgggttcttagtttctgtttttggttgtgccagtaaagccccttcctcgtc

SEQ ID NO: 384567 - DNA, 201 bp, Homo sapiens
cactttatttttccagacgcatttttaagaacaactctaatggttccaccaaaataccctattgagaatttaatctgaattgtattccttgtatagattcmttgggggaaaacattgattcttctcatccatgaatataatatatctccatttatttatctctttcatacatttcaagaatgttttataattatattcata

SEQ ID NO: 384568 - DNA, 201 bp, Homo sapiens
cattatgttggtacacttttttttttttttttgagatggagtcttgctctgttgcccaggctggagtatagtggcatgatcttggctcactgcaacctgtrcctctcaggttcaagtgattctcctgcctcaccctcttgagtagttgggactacaggcacctgccaccatgcccggctaatttttgtatttttagtagag

SEQ ID NO: 384569 - DNA, 201 bp, Homo sapiens
aaatccaatttaaagaatgtgccgttttaaaaaatatatataatattttatataatttccagggttcttggatttccccaccaccaccatcccaaagcccrtttatgctgatggtagaaggaagtgggatgtctgtagagcttaggtcctgctctagagacttgaacaccttgtttttgtttgtttgagacagggtcttgc

SEQ ID NO: 384570 - DNA, 201 bp, Homo sapiens
ggtatgtggtctggtctttcctggtggatgtaccatgtgtgcttgagaatatatattctcctgttgttgggtggagtgttctatagtgagtataaattctrtagtgttccatagacacctcttaggtgtggttggtttatgtgtgttcaaagtcttcttcttgttgatcttccacctaattgttctatccattattgaaag

SEQ ID NO: 384571 - DNA, 201 bp, Homo sapiens
cctgaaagactgacccttctatcattacaaaatgactctctttagatatgagataaagagtatctttatataatgatatttatatctaaataagatataargatgaaaaataatatatatccaaacagccacaagaaaactggagtggctatactaatgttaggaataacactcaaaatcctaaggaaattgaacacttga

SEQ ID NO: 384572 - DNA, 201 bp, Homo sapiens
tcacccggaaatcggtccgcaaggcgcagaggcagaagcgctcccagggctcgtcgcagtttcgcagccagggcagccaggcagagctgcacccgctgccycagctcaaaggtaacctccgagggcgcagccccagcagcgagcgcaggggctggcaacgcttgcctctgcgccagcagagccatttcctgctgggtttct

SEQ ID NO: 384573 - DNA, 201 bp, Homo sapiens
tgttcactgctagtcctcacataaaggaaaaacttttctatttaaacccattttaacatctttagaattcctgtttaggatcatctcttcctcctctccaktttattaccttatctgattgttaattgtggattattttatgaagtgtctaactgaataaagtgctaatccaataaaatgtatttggtaaaataatgcaac

SEQ ID NO: 384574 - DNA, 201 bp, Homo sapiens
gtgcttttaagatgcatttatttccccagtcatattgccttcataagacttttttttttttttttgagacagggtctcgctctgtcccccaggctggagtrcagtggtatgatctctgctcactgcaacctccacatcatgggttcaagcagttcttctgcctcagcctcccgagtagctgggattataggctcccgccac

SEQ ID NO: 384575 - DNA, 201 bp, Homo sapiens
aaattgaagtacagtttaaaatgtgctttaaaaacacatcttttagtcaaatttaaattaattatgtatttagcaaagcaaggcatatctgttttttttttaaggtaattcctagattgtgcagtttgttgtacctttcataatattcatgcagagctttttatattgtggatttagtgatattttctagaagaatgctgc

SEQ ID NO: 384576 - DNA, 201 bp, Homo sapiens
atagctataaaagaatatcgtctttgctattcatagattttaaaatttacacttatttaaaatatcatagtttttttatactactgattttttttctcccrttaaattgtcaaactgtagtttgaaggtttggtgctagggttatttcatagttatttaatttgctttttagtaagatattctagtttcttagtattgtac

SEQ ID NO: 384577 - DNA, 201 bp, Homo sapiens
taaaaggcttttcagtctaacctattttgtttaagattctggaaggcttggtttggtaaagtagttgatgccttacatttatataacattttagcattttraaattattttaccttaaaaattttcttaaattataaaacagtattgttcataccaagtgaaacaatccaaagatatgtaacccttaatccctgtgtatct

SEQ ID NO: 384578 - DNA, 201 bp, Homo sapiens
gaccttgtgatcctcccaaagtgctgggattacaggtgtgagccaccgcgcccggctccagcccccaattttttaatgttactgatttctaacttcattcctttgtggtcagagaacatagtttgtatttctgttcttttaaaatttttgaggtttgttttattatctggtatgtggtctggtctttcctggtggatgtac

SEQ ID NO: 384579 - DNA, 201 bp, Homo sapiens
ggggttttgccatggctggtcaggctggttttgaactcctgaccccaggtgttctgcctgccttggcctcccaaagttatgggattacaggcgtgagccaytgcacccggcctatacctggagagtttaaaacaaaacaaaacaaaacaaaaaatcaatacctgggcacatccctaagagattgtaaattaattggcctaa

SEQ ID NO: 384580 - DNA, 201 bp, Homo sapiens
aatggtttaatttgacagcacttaatattactgccaaaccattagaataaaagtgaagttagctctgagagtacaagagtatttttatcaagggtgagagwctaatgaagtcaatcaaattatcctatttaatcctaaattatcatagttattttataaataccagaaaaacaagcctttctgcagtatctgagaaaatgt

SEQ ID NO: 384581 - DNA, 201 bp, Homo sapiens
tttagcagcaacctaataaatatttagtaaatagcaaagggtttgaaaaactaaaatatatatgtatttttactatattatgaaccttctcaggctatccrtagggatgcttgaaaaaatcatatacttagtattctccctttcacttgaactttgtgtaatggaacaaaagacatttttccactccttaatttttattag

SEQ ID NO: 384582 - DNA, 201 bp, Homo sapiens
catgtagctgctgtggtcaaaaagaagccaagagtgacagttttccttgatggtcatagttctgtttgctgtaactgatctgcaagattttgggaaaataycattccattgggaggaaaaatgacaagcatttgttgccttagttgctgtgaatccagaatctggtcatggcttaggtgggccctctgctcagggtctctt

SEQ ID NO: 384583 - DNA, 201 bp, Homo sapiens
ttattctttatgcacattatagttgttgttgtgaaaagtacctttttattattcatctgatttttactgatgttttataaaggtattgatttttatatatrtattttttaatgtggccacatactgaattttcctactcactctagtaacttgcagggtttttttttaagttttaagggatatataaatatacagttacac

SEQ ID NO: 384584 - DNA, 201 bp, Homo sapiens
ttgactttctctcatagttggtatatgaattcttcttgagatttttggagagccctgatttccagcctagcattgcaaaacgatacattgatcagaaattygtacaacaggtaaggaactcttttgtcttagattctcatatattcatcttagcaatgatttattaacttattattaaaatagtgtagtctttcaaaactt

SEQ ID NO: 384585 - DNA, 201 bp, Homo sapiens
ccccacccttgccagctgcgggtcatgccatgtggcaccaagagactctgcaggcgggcagggcgcatgtgttccttgctctcgttctgtcacaatgctgstcacgcatctctcccgttccttccagaaaccagtaaagacagctctggcaccaagccagccaacaagcggcccatgtcctctccagaaatgtaagcagga

SEQ ID NO: 384586 - DNA, 201 bp, Homo sapiens
gggagacctgagctctggtgaaagcgtagaaggccccagagtgaggcctctgctgtggcctccggtctttggaccaagtcggaccagggtccagcaggttrcttggtagctgccttgcagggcaagggccaaagagccccttgggcagctgctgctgacttcctgtgtctggggcccagatctccctccctcccctcctgc

SEQ ID NO: 384587 - DNA, 201 bp, Homo sapiens
ggccacatcagtcatgcctctggtgtttatctgaaaataccgcgtttccgtctgagggcaccactcagtctggggaggcaggagggaggctggacatgaaygtgaacatgacaggcctgtgagcagggcaggtagatacagcccggctgggcacaaagctcatcccctgagcatgagccgaggccgagggtgggtgggagc

SEQ ID NO: 384588 - DNA, 201 bp, Homo sapiens
ccttaaatgcccctctgagcctggcccacccaagccagcaggtccaggggcttgggtaagagggagggaggaagggctttccggagctgggtctttctagytgggtggctgggtgggtgaaagggctggaggcaacattcccttctgctccttcccggtagagggatggacaagctgtgctggagaatgtgtcagagggtg

SEQ ID NO: 384589 - DNA, 201 bp, Homo sapiens
aagcaggtaggtgcccccttcctgcccatctcccagtgactccgtccatgtttactcaacagggcacatgtgcggagttcctagagggatctagaagcagygaaggacttggggaggctcaagggtggtgtgtgcggggcgtcctggccttacccctggcatgccaaccccccaacctccaggtggtgagttcttgctgcg

SEQ ID NO: 384590 - DNA, 201 bp, Homo sapiens
agggcctctggtttgttgtattatagtatatttcgctgtggaaaatgtcacgtttagtcaccttggagcccactcacctggtcctgttgttttaccccatyccttctctcgcgcgcctattgatttgtttctgaggagagtacaccgttcactattgtagagtaacccctgtgactcaatattaccatagtgcgatgtcgt

SEQ ID NO: 384591 - DNA, 201 bp, Homo sapiens
gccccacccttgccagctgcgggtcatgccatgtggcaccaagagactctgcaggcgggcagggcgcatgtgttccttgctctcgttctgtcacaatgctsctcacgcatctctcccgttccttccagaaaccagtaaagacagctctggcaccaagccagccaacaagcggcccatgtcctctccagaaatgtaagcagg

SEQ ID NO: 384592 - DNA, 201 bp, Homo sapiens
gtaaatcggctgggcatggtggctcatgcctgtaatctcagcactttgggagactgaggcgggtggatcacctgaggtcaggagttctggaccagcctggycaacatggcgaaaccccgtctctactaaaaatacaaaaattgggctggtcgcggtggctcacgcctgccattccagcactttgaaaggccgaggcaggtg

SEQ ID NO: 384593 - DNA, 201 bp, Homo sapiens
cgaaggacttggggaggctcaagggtggtgtgtgcggggcgtcctggccttacccctggcatgccaaccccccaacctccaggtggtgagttcttgctgcrgtatgcccgggtggcacctcctggcaagaagtgtgcctttgtgctgactcgggacggccgcccggtcaaggtgcagcgaaccatcttcagtgagtgtttc

SEQ ID NO: 384594 - DNA, 201 bp, Homo sapiens
gagcacagtcgctcagctggtctgagagtttccggagccccagtgctgttcgttcagtcaacgaagaagcctctgccctcctagagctcgaattttggtgktgggggcgggaggagcagagtgtaagcaagcagacctaggtggtggtgagagtgacagctgtgggaataataccactggagagggttgtgggggggctct

SEQ ID NO: 384595 - DNA, 201 bp, Homo sapiens
ccacaggggaagtgcggtaccaggtgtgtgagaggagggtgcccctgaagaccccaccctgcgaccctgccatggccacctgatgcattcccactcactaygcaagtcccctcccatggacccatctgtgggccaagtccccttcacctctgaacgctcccctacccccacaggggcgcagacggagagggccctatccac

SEQ ID NO: 384596 - DNA, 201 bp, Homo sapiens
caggccagaagtgaggattacatcttcctaggcccgggctggacgcggtggctcgtgcctgtaatcccagcagtttgggaggctgaggcgggcggatcacytgaggtcaggagttggagaccagcctggccaatatagtgaaaccccgtctctactaaaaatacaaaaattagctgggcatggtggtgcatgcctgtaatc

SEQ ID NO: 384597 - DNA, 201 bp, Homo sapiens
ttctttaccttcctgtgtcatgtcaagcagtcaaaaaataagtaaggacttgaacaatgtaactcaaaagacagaatgaatacacacagaactagtttttwtttatttatttatttatttatttatttatttatttatttatttttgagacagggtctctatcgcccaggctgagtgcagtggcacaatcatggctcagtg

SEQ ID NO: 384598 - DNA, 201 bp, Homo sapiens
ctgcgaccctgccatggccacctgatgcattcccactcactacgcaagtcccctcccatggacccatctgtgggccaagtccccttcacctctgaacgctcccctacccccacaggggcgcagacggagagggccctatccacgccctgcccccaactgggaaaaggcccttccctcctccctgggctccctgtgctgcca

SEQ ID NO: 384599 - DNA, 201 bp, Homo sapiens
aaggaaaaagaaaaaaggggcaaggagccccgcggcggcctgggcagcgcctgtgcagacctccctgcaggccgcactgccaactgctgcatttgttgtgytttttaggttgcaattggtgaagttcacactttcattgtaattttagcgtgtggggttttgtcccttttttgttgttgttagctgtgtacagaatgtgta

SEQ ID NO: 384600 - DNA, 201 bp, Homo sapiens
gtactccacccctcaccaggccacacgctggaagccggctggtttctgctccgtcattgcattcggaaaggcgaccccgaacttcgagcccacgtgattgrcaagttcctattgttgcccttccactccggatgggaccctgaccacggaggcctcttttacttccaggatgctgataacttctgccccacccaggtggga

SEQ ID NO: 384601 - DNA, 201 bp, Homo sapiens
ttatcgagtactccgtgtacctggccatccagagctcacaggctgggggcgagctcaagagctccaccccggcccagctggccttcatgcgggtgtactgygggcccagcccctcctgcctggtgcagtcctccagcctttccaacgcccacatcgactacaccaccaagcccgccatcatcttccgcatcgccgcccgca

SEQ ID NO: 384602 - DNA, 201 bp, Homo sapiens
caccggcaccgcctcccaaacagggctgctggtttccgcagccactgctccacctcccccaaatcgtcatggaaagggtggagaatggaggggaaccaggygtccttggaggcagcttgggagggtgactgtgtagtgtcacccacaagggaggctagggcaatggagcaggccaccagcagcagctgtgcagcatggaac

SEQ ID NO: 384603 - DNA, 201 bp, Homo sapiens
ccccatgccctctccccaacaggaggcttcagcagattccaggccgagtgccctcacctgtgtgagaccagccttgctggccgtgccggctccagcatggygccggtgcccggtccagtgcccgtggtggggttgggcagcctgtgcctgggctccgactgctctgatgcggaatccgaggctgaccgcgactccatgagc

SEQ ID NO: 384604 - DNA, 201 bp, Homo sapiens
ctgactgagggtggctagggccccacgtgggtaccaggacacaccaagctgctgggttttgtgttccctttgggaacatttgcaaaccctccaagttgtcyagggtcatctccccagccccagacagaggcacttggctgcccagaaggccaggtcagcaggccccatgccctctccccaacaggaggcttcagcagattc

SEQ ID NO: 384605 - DNA, 201 bp, Homo sapiens
gcctagccctgcagcagacctctgggccaaagctgcactaagtttctggtcctgcctcctcctcccctccgtgatttcggtggcatcccaagtttgcccargctgctagctctgagcccattacagagatggggccactgagatccaggcaggggagaagatgctccagtatcaccctgtgagttgggctggaggcagctt

SEQ ID NO: 384606 - DNA, 201 bp, Homo sapiens
cgagcagagcggaggtgagtggagcaagcggcgccccggggacccccaccccccacccggcctggctgcccccgccccgacgtgcgctcctccaccctgcrcccccaaagtcctgacaacgcacaccccacgaagccggcgcacgcgcccctacgacacccattcggtgctgctccgcacacccccgcacgccgcccgtgc

SEQ ID NO: 384607 - DNA, 201 bp, Homo sapiens
accttccccctcctctccaccttctctctgcccaggagccggccccgaggtgtgggcaggtcacgtggcaccgcatctgcactgctctcctctctggggcyctcgggacccaaatcagccaccgatgtgggaagcaggtactgaggggtaatagccgctctctaaatttagacgggagaactccccagagagctggcagaa

SEQ ID NO: 384608 - DNA, 201 bp, Homo sapiens
aagcccctgcctgggcctggccatggctgcctgtctcgtgtcttatcttgttacctgtggtgagacaccctgactggagaagcatgttcctggaagggggrcggggtgggggatgctgaaatgcggccagaaaggcaggtgggcctttcctcctgggccaggcggggcaaaggttggggggatctgcagcaggggagccag

SEQ ID NO: 384609 - DNA, 201 bp, Homo sapiens
cccccaacacctggcacgcgggctctagaggctgcagcatttggtggcatccctgccaggcacctctggctccccttcggcagaggctcagcagccttggrccccccaggtgcctccctaaacagaccttgagactccccagcgactagcttggcctcttccctaagaaataaagaaggcactttggggtccaaggtaggg

SEQ ID NO: 384610 - DNA, 201 bp, Homo sapiens
aggaaagccccaccacccctggatgaggggggccccaagacttgcccccagggtagctaagacctcactccgagggggctgcccccctcaggcctatgackggcaggtgcagctgcaggggaagggaggcagagcagtctcttccggcagcaggaagtggtaaccgcctatggggaaattgtggggctgagcagaagggga

SEQ ID NO: 384611 - DNA, 201 bp, Homo sapiens; identical to SEQ ID NO: 83904

SEQ ID NO: 384612 - DNA, 201 bp, Homo sapiens; identical to SEQ ID NO: 83903

SEQ ID NO: 384613 - DNA, 201 bp, Homo sapiens; identical to SEQ ID NO: 83905

SEQ ID NO: 384614 - DNA, 201 bp, Homo sapiens
agggaccagtgggtggcctgcctgctcaaaggtagttctgagtcagggttctgcccaaggctcatcgggtggcagggctggtcaaggggcagcgctctgtygtgggggcctccatggtagtcggtaagcccaggtagcggtggactggggctccagccaggtgtccccactcagtcccgcgtgtcctgcctagccctgctg

SEQ ID NO: 384615 - DNA, 201 bp, Homo sapiens
caaatactatgcagatggggaggacgcctatgccatgaagcgggacctcactcagatggccgacgaggtaagcgcctgcatgaagccaagcaaggcgagcrggggcggcactcaggagccccaagacagtggctgcaggcgagaccgactttggatgccagctcttgtggctacgttgccaggagtcacgacctcagtttc

SEQ ID NO: 384616 - DNA, 201 bp, Homo sapiens
cggcaggcttggggttttcaggcagcagagggtggcaggatcggctgctctgatccaagaggctcccggctctcccccagctggggtcttagggggctgtrgtgcatgtccactctacaaatggcaggggggctggaggtggctgtgcctacactgagctcctttgcagcctctcctttctccctctccagggaagaggac

SEQ ID NO: 384617 - DNA, 201 bp, Homo sapiens
gaggttcgttcccaggctctgattggtccggcggcactgggctcgcgcgcagggtgcgggggaagggcgggcttgcgcactgcgtcggccgcgccccggcrccggtggaagggaggtgtcccaggctcccacggcgcccacggcgccctccttccgccccggccaggcccatgggacccggcccgccctctgccgtccgtc

SEQ ID NO: 384618 - DNA, 201 bp, Homo sapiens; identical to SEQ ID NO: 83906

SEQ ID NO: 384619 - DNA, 201 bp, Homo sapiens
acagtggctgcaggcgagaccgactttggatgccagctcttgtggctacgttgccaggagtcacgacctcagtttcctaggctgggctttagaggaggccrtctgcctagcagcctggagggtgatgggagaggcagagggaggaggcttttagaagggaagtggggaggtctagggaccagtgggtggcctgcctgctca

SEQ ID NO: 384620 - DNA, 201 bp, Homo sapiens
gggtgggctccggggacctccggggcgcccactcctgttcctgtgctccgggcgttgtgcaaagtcagatcgtcacagtgcctgcccagccccgagggagsggggccgagcagaccgacggggagcaggcttctcacccgtggtcaccgccgccttagactgagcgcgttccactgccctccttccctgcagccagaggac

SEQ ID NO: 384621 - DNA, 201 bp, Homo sapiens; identical to SEQ ID NO: 83907

SEQ ID NO: 384622 - DNA, 201 bp, Homo sapiens
ggggcaaaggaaaagaaggcgcccgaagggagcagagaataggggcaggatccccactttgcgtcttctttctgggtatgggcagggcacagtgtggcgakggggagaccaagccactcagcccggaggtcatgagccatcacacaactcgccactcgtccagtttgtgtccctctaaagggctcttctagctccgacaag

SEQ ID NO: 384623 - DNA, 201 bp, Homo sapiens
gagggaggaggcttttagaagggaagtggggaggtctagggaccagtgggtggcctgcctgctcaaaggtagttctgagtcagggttctgcccaaggctcmtcgggtggcagggctggtcaaggggcagcgctctgtcgtgggggcctccatggtagtcggtaagcccaggtagcggtggactggggctccagccaggtgt

SEQ ID NO: 384624 - DNA, 201 bp, Homo sapiens
ccagccctgggccgccccgccccaccgggagccgcgctgggggcggggctgggcggagcccgcgcagggtgctggccgcagcgcccccaagtcccggcgcygggcccgctcacggccgcgtgggagcagtggggttcgacggcgcggccgcgaggccgccatggccgctcacgggaagctgcggcgggagcgggggctgca

SEQ ID NO: 384625 - DNA, 201 bp, Homo sapiens
gggctccggggacctccggggcgcccactcctgttcctgtgctccgggcgttgtgcaaagtcagatcgtcacagtgcctgcccagccccgagggagcgggrccgagcagaccgacggggagcaggcttctcacccgtggtcaccgccgccttagactgagcgcgttccactgccctccttccctgcagccagaggacctaa

SEQ ID NO: 384626 - DNA, 201 bp, Homo sapiens; identical to SEQ ID NO: 83909

SEQ ID NO: 384627 - DNA, 201 bp, Homo sapiens
tgccctccttccctgcagccagaggacctaatgaacatgcagcactgcaacctcctctgcctgcccgagaactaccagatgaaatactacttctaccatgscctttcctggccccaggtgggcagcttctgaatttgggcatgggggaaagcaggccgaggaaaatcccatctggccatcttggagggagtggacaagtct

SEQ ID NO: 384628 - DNA, 201 bp, Homo sapiens
ctgaaaagttggggtttcgagcacgactgtctaagggttcctcacttgctctgggtctgcatcccacaccctggaaaagcttcctaccattctacaaagtggggtcactgtcttgacaccctaaattctcaaaggtcagcatagcggtggttttggagaccatcttttcttctgttttgcttgtcagcagaagtgagacca

SEQ ID NO: 384629 - DNA, 201 bp, Homo sapiens
  misc_feature (1)...(201): n = A,T,C or G
gttaaattgtccattcttttttcattctgctcggctgcctctaaattatctttaaaaaataaggagtatggaaatttgaggcctgttgcacaattaataancattaagtttttttagatggcaattagagcactacgaattaaaattcctggaatgtgtatggcgtcttctgctgagctcccccttgtgcatttagctccc

SEQ ID NO: 384630 - DNA, 201 bp, Homo sapiens
attcaagtagcagacaaagtttcttcagggaagagttcagtgcttgtgcattgcagtgacggatgggacaggactgctcagctgacatccttggccatgcygatgttggatagcttctataggagcattgaagggttcgaaatactggtacaaaaagaatggataagttttggacataaatttgcatctgtaagtaaacaa

SEQ ID NO: 384631 - DNA, 201 bp, Homo sapiens
gggtagctatggcaaattaggctctgcgaactcgcctgcaggttgtagtggttaatattactgtgcccacctagcagagctgtggaagtgattgaatgaggcacatgcttgggaatacctctaaagccaggaagcctagagaaatagtaaagtgatgtgaagaatttgtacaaatggctcctaagacttttgccagctcaa

SEQ ID NO: 384632 - DNA, 201 bp, Homo sapiens
aatcatcaaaccaaatacactgtagccctaagatttgaagtgaccaagacaaatcaagaagctctaatgcttctgttacatgtgtctatgtggacagtaarccacttacttgggggatccttttttggagtaaatatagttagatttgtagcctatttttagatatctgagcctgaatagaaagtaatgagatgagatctg

SEQ ID NO: 384633 - DNA, 201 bp, Homo sapiens
gtttcttcagggaagagttcagtgcttgtgcattgcagtgacggatgggacaggactgctcagctgacatccttggccatgctgatgttggatagcttctrtaggagcattgaagggttcgaaatactggtacaaaaagaatggataagttttggacataaatttgcatctgtaagtaaacaaagctaatttctaaaaata

SEQ ID NO: 384634 - DNA, 201 bp, Homo sapiens
tcacgtatttttctttgtcagctcgttttgacaggagccattcaagtagcagacaaagtttcttcagggaagagttcagtgcttgtgcattgcagtgacgratgggacaggactgctcagctgacatccttggccatgctgatgttggatagcttctataggagcattgaagggttcgaaatactggtacaaaaagaatgg

SEQ ID NO: 384635 - DNA, 201 bp, Homo sapiens
tcaaatgtaagcagtatcttataactccctactgactcacgtatttttctttgtcagctcgttttgacaggagccattcaagtagcagacaaagtttcttsagggaagagttcagtgcttgtgcattgcagtgacggatgggacaggactgctcagctgacatccttggccatgctgatgttggatagcttctataggagc

SEQ ID NO: 384636 - DNA, 201 bp, Homo sapiens
ttgtggcttaagtgaaatattacactgccaacaactgttatgttccttggccaatccttaattgcccagttcattcactcatttaacaaatacctgttaartatcttttgggtgccagggcactgttacaggtgctgtaaataaataaaacataaaattcttggggctagaggccccaaaggttggttggctaggtgagtt

SEQ ID NO: 384637 - DNA, 201 bp, Homo sapiens
aaggcacattgctgaattgtattgtcacattttgtgttatatgctttctcagttttgtacccattaattaaaacaaattatcttcatcaatttattcagcraataggtcatggtgataaaaaccacaccgatgctgaccgttctcctatttttctccagtttattgattgtgtgtggcaaatgtcaaaacaggtaaggaat

SEQ ID NO: 384638 - DNA, 201 bp, Homo sapiens
gaaggcacattgctgaattgtattgtcacattttgtgttatatgctttctcagttttgtacccattaattaaaacaaattatcttcatcaatttattcagygaataggtcatggtgataaaaaccacaccgatgctgaccgttctcctatttttctccagtttattgattgtgtgtggcaaatgtcaaaacaggtaaggaa

SEQ ID NO: 384639 - DNA, 201 bp, Homo sapiens
agtataatattgttttctttgcaagtctcagaactgtttaactttttcttaaagggccaaaggccacgtgttctatgccatttcaaaacgtttaagcagartgcagccagattcctaaatgaaaccatagcatctctttttgtcagtgtggaaaatgggcactcttcaccatgctgtgaagatgaaccaaagcctgccctg

SEQ ID NO: 384640 - DNA, 201 bp, Homo sapiens
aaaacaaattatcttcatcaatttattcagcgaataggtcatggtgataaaaaccacaccgatgctgaccgttctcctatttttctccagtttattgattrtgtgtggcaaatgtcaaaacaggtaaggaatatgagggatgaaaatacattcaactcattgtttaaattaaacattttaatataatgattgggatttgac

SEQ ID NO: 384641 - DNA, 201 bp, Homo sapiens
atagaaacacgtgggtttaaattaatagttaagaaaaccagttctcttagacagaaagtagttttaatcacaaaacttaaacaaaattgaatatatcaaamtcaaatgcaaataaactttaggtaaataggcatgtctagactgtaatgaaattgggttttggccaggaccttggcaggaaaaagttagattctctttaaa

SEQ ID NO: 384642 - DNA, 201 bp, Homo sapiens
gcatttcctaacatggcaccacaaagagaataggggtcgggaggccattgcctatggcccgactgaaatttacaacttgatgagggtctttctcaataatraataatttttatttttaataatttctcaaattattaaaataataaaaaatattaaaaaatattttaataatttctcaaataataaatcttttaaatgtgt

SEQ ID NO: 384643 - DNA, 201 bp, Homo sapiens
attatcttcatcaatttattcagcgaataggtcatggtgataaaaaccacaccgatgctgaccgttctcctatttttctccagtttattgattgtgtgtgrcaaatgtcaaaacaggtaaggaatatgagggatgaaaatacattcaactcattgtttaaattaaacattttaatataatgattgggatttgaccccaaaa

SEQ ID NO: 384644 - DNA, 201 bp, Homo sapiens
catcaatttattcagcgaataggtcatggtgataaaaaccacaccgatgctgaccgttctcctatttttctccagtttattgattgtgtgtggcaaatgtsaaaacaggtaaggaatatgagggatgaaaatacattcaactcattgtttaaattaaacattttaatataatgattgggatttgaccccaaaataatacag

SEQ ID NO: 384645 - DNA, 201 bp, Homo sapiens
ccctacagcttttgaattcaatgaacaatttttgattataattttggatcatctgtatagttgccgatttggtactttcttattcaactgtgaatctgctygagaaagacaggtgagttaaaatgctattttttttgatacattaggcttgccaaaatgtatgtagtctaccatgaaatataaaaaatatgatagcttgta

SEQ ID NO: 384646 - DNA, 201 bp, Homo sapiens
gacatgtccttccttcactatatcaactctaataatctccccagagattcccattacgcctatggcatgaaacaggtttttcttattgatggggattgccsttgctccccgggagctggtgaaacaggcagaatttcaagccccatcctcacccactgagacccaccaccgactccttaagctgaatgtgaattttaatga

SEQ ID NO: 384647 - DNA, 201 bp, Homo sapiens
tttcatgttgtttcttaggcaacaggaggaggatatgaaagtgatgatgcatatcataacgccgaacttttcttcttagacattcataatattcatgttakgcgggaatctttaaaaaaagtgaaggacattgtttatcctaatgtagaagaatctcattggttgtccagtttggagtctactcattggttagaacatatc

SEQ ID NO: 384648 - DNA, 201 bp, Homo sapiens
actccctactgactcacgtatttttctttgtcagctcgttttgacaggagccattcaagtagcagacaaagtttcttcagggaagagttcagtgcttgtgsattgcagtgacggatgggacaggactgctcagctgacatccttggccatgctgatgttggatagcttctataggagcattgaagggttcgaaatactggt

SEQ ID NO: 384649 - DNA, 201 bp, Homo sapiens
ctctctgtagaaggttacagaaaggactgtttctttatggtcactgataaacagtaataaagaaaaattcaaaaaccccttctatactaaagaaatcaatygagttttatatccagttgccagtatgcgtcacttggaactctgggtgaattactacattagatggaaccccaggatcaagcaacaagtaagtgaagtagc

SEQ ID NO: 384650 - DNA, 201 bp, Homo sapiens
aaactttctgacttaaccataggtgctgtcatggattcatccagaaaataagacggtcattgtgcgttgcagtcagcctcttgtcggtatgagtgggaaaygaaataaagatgatgagaaatatctcgatgttatcagggagactaataaacaaatttctaaactcaccatttatgatgcaagacccagcgtaaatgcagt

SEQ ID NO: 384651 - DNA, 201 bp, Homo sapiens
attgtttgcttggagatttgctttcttgatagcttaaactttctgacttaaccataggtgctgtcatggattcatccagaaaataagacggtcattgtgckttgcagtcagcctcttgtcggtatgagtgggaaacgaaataaagatgatgagaaatatctcgatgttatcagggagactaataaacaaatttctaaactc

SEQ ID NO: 384652 - DNA, 201 bp, Homo sapiens
aattgtttgcttggagatttgctttcttgatagcttaaactttctgacttaaccataggtgctgtcatggattcatccagaaaataagacggtcattgtgygttgcagtcagcctcttgtcggtatgagtgggaaacgaaataaagatgatgagaaatatctcgatgttatcagggagactaataaacaaatttctaaact

SEQ ID NO: 384653 - DNA, 201 bp, Homo sapiens; identical to SEQ ID NO: 83966

SEQ ID NO: 384654 - DNA, 201 bp, Homo sapiens; identical to SEQ ID NO: 83969

SEQ ID NO: 384655 - DNA, 201 bp, Homo sapiens
ctgagtattacaaatctaacaccaaaacctagaaatctctgttgctgttattggagtcatccacagagggcttgatttctcaagtctgtggtacttggccmtatttttcatacctgtgctgagaatccctgcttcttgttttaggaagtcaataaagtaagaaactgccaaaaaaaaaaaaaaaaaagtcaactgaattgc

SEQ ID NO: 384656 - DNA, 201 bp, Homo sapiens
gagtattacaaatctaacaccaaaacctagaaatctctgttgctgttattggagtcatccacagagggcttgatttctcaagtctgtggtacttggccatmtttttcatacctgtgctgagaatccctgcttcttgttttaggaagtcaataaagtaagaaactgccaaaaaaaaaaaaaaaaaagtcaactgaattgctc

SEQ ID NO: 384657 - DNA, 201 bp, Homo sapiens
ttgaatttctttttttcctcacagggcttgcccaatcaccattggagaataacttttattaataagtgctatgagctctgtgacacttaccctgctctttyggtggttccgtatcgtgcctcagatgatgacctccggagagttgcaacttttaggtcccgaaatcgaattccagtgagtactgcaattaacgtttctctt

SEQ ID NO: 384658 - DNA, 201 bp, Homo sapiens
acaaatctaacaccaaaacctagaaatctctgttgctgttattggagtcatccacagagggcttgatttctcaagtctgtggtacttggccatatttttcmtacctgtgctgagaatccctgcttcttgttttaggaagtcaataaagtaagaaactgccaaaaaaaaaaaaaaaaaagtcaactgaattgctcatatgaa

SEQ ID NO: 384659 - DNA, 201 bp, Homo sapiens
ttcatcaaacacaagaatgccaacggtgggcactgggaagacagcaaagagccccactgctgaggtccctgccttatagagtttatatgtggggaggcacmcaataaaaaaataaacaatgatatattttctggcagagatgagcgctatgagaaaaaatagagctctgaaaccttacaatgacagtaaaacaggctggca

SEQ ID NO: 384660 - DNA, 201 bp, Homo sapiens
gaaggaaagtttgcacttggtttcagtgagaccccaggagggcgctgcggttaacacgggttatgtgactaggaggatatgagaaaccccagccagtattycattttgagtttcctggttctgaggtgttccttgcccatgtcagtggttctggatctgggagagaaagcacaggtccctactgccctaacaaagggagga

SEQ ID NO: 384661 - DNA, 201 bp, Homo sapiens
tctcattgtatttttaacttacaaattcctagtgactagtaatagtgagcatgtctttatgtgcttgttggccattaagtttatcttctttggtgaaggayttgctgaaatcttttgcccatttcttattaaattggattgtctgtctgaagttgtgagggttctttttatattctggatacaagtacttcatcagatatg

SEQ ID NO: 384662 - DNA, 201 bp, Homo sapiens
ttacaatccagtggaagaatacaggaggcaggtaagatgttagatgctattgtctggtatgtgatgaacctgaaacatgcattatgacagtatgtcatcarccatgctttctgaaaatcagcgacatccttgctaaatatcttttcaatggtggtgatattatccacattttgtacaatatatctcattctatctattact

SEQ ID NO: 384663 - DNA, 201 bp, Homo sapiens
acccagctaagctgtgcctggacacctgacccacagaaactgtgagatgataaatgtgtgctgtttatggctgctaagtttgttattcagcaatataaaaytagtatgtctatgttccatttcaagttaattttgtatattttgtgaagtaagggtaaagattcatttatttttccatatggacatcaaactgttccagca

SEQ ID NO: 384664 - DNA, 201 bp, Homo sapiens
gtatttttctttgtcagctcgttttgacaggagccattcaagtagcagacaaagtttcttcagggaagagttcagtgcttgtgcattgcagtgacggatgrgacaggactgctcagctgacatccttggccatgctgatgttggatagcttctataggagcattgaagggttcgaaatactggtacaaaaagaatggataa

SEQ ID NO: 384665 - DNA, 201 bp, Homo sapiens
tctctctgtctctctgtagaaggttacagaaaggactgtttctttatggtcactgataaacagtaataaagaaaaattcaaaaaccccttctatactaaakaaatcaatcgagttttatatccagttgccagtatgcgtcacttggaactctgggtgaattactacattagatggaaccccaggatcaagcaacaagtaag

SEQ ID NO: 384666 - DNA, 201 bp, Homo sapiens
gcaatactgacttgaatttctttttttcctcacagggcttgcccaatcaccattggagaataacttttattaataagtgctatgagctctgtgacacttamcctgctcttttggtggttccgtatcgtgcctcagatgatgacctccggagagttgcaacttttaggtcccgaaatcgaattccagtgagtactgcaatta

SEQ ID NO: 384667 - DNA, 201 bp, Homo sapiens
aagcaatactgacttgaatttctttttttcctcacagggcttgcccaatcaccattggagaataacttttattaataagtgctatgagctctgtgacactwaccctgctcttttggtggttccgtatcgtgcctcagatgatgacctccggagagttgcaacttttaggtcccgaaatcgaattccagtgagtactgcaat

SEQ ID NO: 384668 - DNA, 201 bp, Homo sapiens; identical to SEQ ID NO: 83938

SEQ ID NO: 384669 - DNA, 201 bp, Homo sapiens; identical to SEQ ID NO: 83940

SEQ ID NO: 384670 - DNA, 201 bp, Homo sapiens
aaatccatgccactctaaactgccatcatttggagaaaacaaaattcttaatagagaaaatagtgtgagttaaattgtccattcttttttcattctgctcrgctgcctctaaattatctttaaaaaataaggagtatggaaatttgaggcctgttgcacaattaataaacattaagtttttttagatggcaattagagcac

SEQ ID NO: 384671 - DNA, 201 bp, Homo sapiens
tcttaccacaaaaatggtaactatgaggtaatgtgtatgctacacattaaacagacagtcaatatatataaatttctctctcaattaaaaataaataaaawttttttaaaataacccccccaagaaaatttttttaatgaaatcatcaaaagaacatactaaaattcatattcctaggtcttatttccagatgccctctga

SEQ ID NO: 384672 - DNA, 201 bp, Homo sapiens
ctatttatgtaaaatttctagtaaaggcaaactatagagacaggaagcaaatcagtagttgcctggggctcaaggtgggagaaagattgaccttagatggyacaagtaaactttttgggtgatgcaggtgttctacaactacattatggtgataattgcacaactgtataaatttgctaaatcttattgcactcacactca

SEQ ID NO: 384673 - DNA, 201 bp, Homo sapiens
gtggagctttgggcctgtttgtattcagggcaggaggtgagaagtggagctcagtgaaggaggcataccagagaaatggacatcaaaggaggatattggarggtaaagaaagggtcttaagaagaaagggtcagtggtacttgaaggaggtttattagcgaggtcctttatgaccttgggggtgtctagtgatgtggtggg

SEQ ID NO: 384674 - DNA, 201 bp, Homo sapiens
tccagaaaataagacggtcattgtgcgttgcagtcagcctcttgtcggtatgagtgggaaacgaaataaagatgatgagaaatatctcgatgttatcaggkagactaataaacaaatttctaaactcaccatttatgatgcaagacccagcgtaaatgcagtggccaacaaggtgagtggacttaatgatgtgctggacac

SEQ ID NO: 384675 - DNA, 201 bp, Homo sapiens
ctcccggcacacttcagctacctcattgccctcctcatagacaacccaggtttcagtttattgtgtctccacccagtgatagtttaggcctatacacttarctgattcacatgccttcccccttaaccctaatggtagagagctatatacactgtcatgtacctatttccatccaccaatagacattgcccagtgaatgtg

SEQ ID NO: 384676 - DNA, 201 bp, Homo sapiens
gaggaggatggatcacttgaggtcaggagttcgagaccatcctggccaacatggtgaaaccctgtcctactaaaaatataaaaatattagctgggtgtagwgctgggcacctgtaatcccagctactcaggagtctgaggcaggacaatcgcttgaacccgggaggcagaggttgcagtgagctgagatcgtgccattgta

SEQ ID NO: 384677 - DNA, 201 bp, Homo sapiens
ctttgggaggccgaggcaggcagatcacctgaggtcaggagttcgagaccagcctggccaacatggagaaaccccatctctactaaaaatacaaaaaattrgctgggcgtggtggtgcgttctgtagtcccagccactcaggaggctgaggcacgagaatcccttgaacccaggaggtggaggttgcagtgagccgagatc

SEQ ID NO: 384678 - DNA, 201 bp, Homo sapiens
agcgttggatagcaaatgatggagaagccttgctgtgcattaaggcccttctgctttgggaaatgcacgcatgccagagacaagcaccatttccagatgcktggtctctagtgggggaatacatatgtgtaaattcgtggtaacaaggcagagtgaagcaagtggttaacagcagtcggaatcaagtgctatggaacttct

SEQ ID NO: 384679 - DNA, 201 bp, Homo sapiens
atatttaatgatatttagatactgatgactcaggtatccagaaagttcagctaatttgcctattcctggatcttgcagtttggcctgctgggttatctgaycttgaatgtgtcattcagggagaatgtagcaagtaaccttattagacggtgggtgcctttggtcagaagctggctggttctcctcagcgacctgttttct

SEQ ID NO: 384680 - DNA, 201 bp, Homo sapiens
ggagccattcaagtagcagacaaagtttcttcagggaagagttcagtgcttgtgcattgcagtgacggatgggacaggactgctcagctgacatccttggmcatgctgatgttggatagcttctataggagcattgaagggttcgaaatactggtacaaaaagaatggataagttttggacataaatttgcatctgtaagt

SEQ ID NO: 384681 - DNA, 201 bp, Homo sapiens
tactttcctgtatgtgtcaatgaggcagtagttaaggaaagtatgtattatggtaaactttgagtaaagggcttatttacaaatcagcagtcacagcagakgggtggaacacgtgagttctcatgacgtgcgtggcataaagtgtaactcaagtctctggttctctccagcagccgaatccagtggagcagcgttacatgg

SEQ ID NO: 384682 - DNA, 201 bp, Homo sapiens
tgctttatttttgtttttgtaataatccaactttatgttactctgagagcctatattctcttaatctttaagaaaaaaagaaaatatatctgaaaagtagrtcctcgtactttcaagttcagaaaatggtggtattggctctttcagactgctcacttcaattgagccaagtagcttatggaaaacttagtttttaaataa

SEQ ID NO: 384683 - DNA, 201 bp, Homo sapiens
gacatttcaaatgtacatttgtggtcctttcgtgaacaaataaataggtacgtttatatatgaagacaatgatgacacaggaatatcaagccatttccccsagaggtactgatttagtcagtagtagaaataggattaggagaactgtttatgcaaacagaagtataattggtaatctatgtgctagctgcttttgacctg

SEQ ID NO: 384684 - DNA, 201 bp, Homo sapiens
gggcagcctcaggcctgccatgttaattcttctgcacacttttcttttatagcttctgagctttctatcccaattaggaagatcttccctactcagacttmtaaggaattatctcagccaggcgtggtgagtcacgccttgcaatcccagcactttgggaagtcgaggcaggcagatcacctgaggtcagggattcgagac

SEQ ID NO: 384685 - DNA, 201 bp, Homo sapiens
tttgagagtctgtgttgaggggctctaaaaccacccccacgtgtggtgattcgataacaggactcactggactcatattgtactcacaggtatggcttatkacagcacaaggatacaaaacaaaaccagcaaagagaaaaggcacataggttgaaattcgggggaaaccaggcacaggcttccagagttcttgtccagtgg

SEQ ID NO: 384686 - DNA, 201 bp, Homo sapiens
agtcagagcataatatccagaaagcatgtgacctagaagggtgagatacggggggcagtgatatgtatgaaaagaattctttagaaatggttttccatgtytttctttccatcttttgaccctgctcaggcttactgcttttagggaaacatggctcattcaggtttttgtttttgcacttgccgctttcctttcacattc

SEQ ID NO: 384687 - DNA, 201 bp, Homo sapiens
ggctatgacggaaatattttcaggtgttcttaagccagatataccaaattaccatataaaacaaagcaattttgtaataatttagattaattgcccttttrggtaagtgaatcttctcccttaattgaatggaagatttcttgctaattaacatgactttctttgaagactgaactgtcatacttctcctttgcccccagg

SEQ ID NO: 384688 - DNA, 201 bp, Homo sapiens
ctcttgagataaggaaggaaaaagcaccttgaaaaaaaatgaagactgtgatatccaagagggcaacaactaggtctgtaccgctcctgaagtggctccayggtccagcacagcactcctttatctgaaatgaaagtttaaagtgcactgcagagcatagggttccaatgcagagccatcactcagtcacagcactgtaat

SEQ ID NO: 384689 - DNA, 201 bp, Homo sapiens
tcttactgtagtgaggcttggaacatcaccatatgacccggctgttaaaaaggctgagggtctgactaggagactcttagcccatgtggatctttccctgmtgagtcaaactctgaggagaccaggtggaacttaccagttagtctgtgctcctatttctgttacagatttggtgatctgccgcctgtgagtcatttgcct

SEQ ID NO: 384690 - DNA, 201 bp, Homo sapiens
tgacattgatataaaggaaatctgcttcggtgagataaaagactcactgtcctgtctctcataggtcaactttcgcctgcagtcaataaccatgatacaaycgcatttctctcttgaaacaagtagttacaactcctataaatttggctatgccagcaatgcacatagagatttctgcttgccagtagcaactttcccatg

SEQ ID NO: 384691 - DNA, 201 bp, Homo sapiens
attcatccagaaaataagacggtcattgtgcgttgcagtcagcctcttgtcggtatgagtgggaaacgaaataaagatgatgagaaatatctcgatgttakcagggagactaataaacaaatttctaaactcaccatttatgatgcaagacccagcgtaaatgcagtggccaacaaggtgagtggacttaatgatgtgctg

SEQ ID NO: 384692 - DNA, 201 bp, Homo sapiens
aaagtgctgggattgcaggcataagccaccatgcccagccctttaatttattttttaattgacaaaaattgtatatatcgtgtgcaacgtgttttgaaatrcatacacattgtagaatgagtcaatcaagctacttaacataagcatggcctcacatacatattttgtgtggtcagaacatttagaatttactctcagcaa

SEQ ID NO: 384693 - DNA, 201 bp, Homo sapiens
ctagctccagttccaatctttcattctgtattcattgagtatctgagagtccagtatgtgttaagcactatgccaggtgctaggatatgatggtgagcacmgcaaacagtttctccctcacgaagcttatagttctcatgggattgataaacattcttctgatagtcacgccaatatataataacaagctgtgatcagtgt

SEQ ID NO: 384694 - DNA, 201 bp, Homo sapiens
gtgagaaacatgttggatatagagttttcattttctgaagacaagtcagaaacagcacattcttcctggattaaattcaaggacaaatttgttgtttggcytttctctaaaagatagtgacacagtgattcaattcttcaggcagtgtattacccaaagattcttgaatccttttcaatttgatggctcttttgttgattc

SEQ ID NO: 384695 - DNA, 201 bp, Homo sapiens
ccagagaagtagagaaacagtgtccatgtcctgagattgccacagtggcctgcttctacctagccctccttgcctggtctgcccctgcattctggcccacrccccgtctccagcgtgttcgtccttagagtgaggccgaccagcttatttctcagttccaaaactatcatcggttccctgttgcccacagagtgaaatcca

SEQ ID NO: 384696 - DNA, 201 bp, Homo sapiens
aaaatcattacgagtcattaacacattcaaggacatccctgaaagatgagaggcatatttctattataattaattattctgatttagcttctccttatgtktattctaccaaagatgtactattctttcggccacctgttttatatcacttcagtgtttgaaatgaacctagccaaactctattctagactattaaaaaga

SEQ ID NO: 384697 - DNA, 201 bp, Homo sapiens
tcagaaaatggaagttagtatttaggtaatattttgatgttatttttcatgataaacgtatactaaaaggaagggatcaactttggaagggctagatcacyacggcttaagaatatagaagcatctgacagcttctaagccaagtgctaatgttctgggcaaattttatatgtggattaacaccctcctttcagacttcaa

SEQ ID NO: 384698 - DNA, 201 bp, Homo sapiens
gcctgttgcacaattaataaacattaagtttttttagatggcaattagagcactacgaattaaaattcctggaatgtgtatggcgtcttctgctgagctcycccttgtgcatttagctccccttgtctgttctcccctagtcccctgcacctttattggagctctcacatactgcctgtgctctggttcatcgtttctatg

SEQ ID NO: 384699 - DNA, 201 bp, Homo sapiens
tgacagtagagccttaggcctcaaaccatctacaaccatgttaacagtacatcactcaaatcattcaacattcctgaatgtttacctgtgccaagtactgrccagcgcagtatcagatgttcacagtaatgatatattgccaagagaatgcttaggcatgtcccatatattctgtttatggataaaggagtgcaccaaaca

SEQ ID NO: 384700 - DNA, 201 bp, Homo sapiens
aatctaacaccaaaacctagaaatctctgttgctgttattggagtcatccacagagggcttgatttctcaagtctgtggtacttggccatatttttcatayctgtgctgagaatccctgcttcttgttttaggaagtcaataaagtaagaaactgccaaaaaaaaaaaaaaaaaagtcaactgaattgctcatatgaagtt

SEQ ID NO: 384701 - DNA, 201 bp, Homo sapiens
gtgcttacttgtaaaaagattttcataaaagttagtagagtgcgttatggaggtatatatcttttatgatcatttgaatgacaggtataaatgatcctatsaatggagaattaacataggatttttttgttattgttgtttttgttttttgagacggagtcttgctctgtcacccaggctggagtgcagtggcatgatctc

SEQ ID NO: 384702 - DNA, 201 bp, Homo sapiens
aagaatattctagcctatcctcgtctccagtgcattcattcctccaacccattccagtatggagctcattactggccaaatctagtggctcatttccatckcattctgtttgatctcttccccagcattcaacaattttgaccatcgtcttcttgaaagtcttggtttctgtattcctgcaccatcttgattgttcctttc

SEQ ID NO: 384703 - DNA, 201 bp, Homo sapiens
atttttttccttaggaatacagattccccaggaaattgccagccttctgtctttttttcaactcaaagtatgactaatgtttttgagacttgttgttggcyaggaagtcaagtcacatcaattattcatttaaattggagggtttggggttatttggaggacaaataactagaaatatttgtgtaagtttctgatgaaata

SEQ ID NO: 384704 - DNA, 201 bp, Homo sapiens
ttgtgtatcttggtatctatttccattattttagggtactttttttatcttaatagacaaagaagttatttacatatgtcctttcaatggccccattaagkgaagagtttacatcacaaattatcgtctttatttaagaagtttggaaacggtaagtagaatataagaccataaagatgaccctaactgttaaagataatg

SEQ ID NO: 384705 - DNA, 201 bp, Homo sapiens
agattcgatactttcttatgcaaagaacaaggcacgttagtgttgaatgatagtagacaattaatgtggatttgaaaaaaaaaaatcaaaatctcatgttsatctaaggccctggaaatggttcttcccttaagaacaagcttttcaaaagtgcctgggaaatagtgcccacgtgagggacccactgcaatcaccaaatac

SEQ ID NO: 384706 - DNA, 201 bp, Homo sapiens
caatactgacttgaatttctttttttcctcacagggcttgcccaatcaccattggagaataacttttattaataagtgctatgagctctgtgacacttacyctgctcttttggtggttccgtatcgtgcctcagatgatgacctccggagagttgcaacttttaggtcccgaaatcgaattccagtgagtactgcaattaa

SEQ ID NO: 384707 - DNA, 201 bp, Homo sapiens
ctcacgtatttttctttgtcagctcgttttgacaggagccattcaagtagcagacaaagtttcttcagggaagagttcagtgcttgtgcattgcagtgacrgatgggacaggactgctcagctgacatccttggccatgctgatgttggatagcttctataggagcattgaagggttcgaaatactggtacaaaaagaatg

SEQ ID NO: 384708 - DNA, 201 bp, Homo sapiens
aatgaagaagtttacttagttggagtgcagaatatcgtgggagagaatcccacagaaacaggctggaagtgatatcacggacgtcctggaaatgtgtacckaggagtttagtctttactccagaggcagtgcacaatggcaaatgtttggggatgcattttgattgcataattgactgttttaatgcttgctctgtcatgt

SEQ ID NO: 384709 - DNA, 201 bp, Homo sapiens
aggcattgcctcgagtctcaaccctgccctatacttactaaacaagttattgaagctttgaaaaacttaggaaatggggatacttcacctatatcctggarcggttgtgaggataaaatgagatgatgcgtgcaaagcccctaatgtagtacctggcacagaagagaggtatttcctacatggcagctgctgtgatgatct

SEQ ID NO: 384710 - DNA, 201 bp, Homo sapiens
tcaagcaatactgacttgaatttctttttttcctcacagggcttgcccaatcaccattggagaataacttttattaataagtgctatgagctctgtgacayttaccctgctcttttggtggttccgtatcgtgcctcagatgatgacctccggagagttgcaacttttaggtcccgaaatcgaattccagtgagtactgca

SEQ ID NO: 384711 - DNA, 201 bp, Homo sapiens
tagtcaccgtgtgtgttgtatgctgctgtttcccacttaaacttacttttccatgtaccataattattttaaaaactgtatacttgttccagcgagttgastataattttttctaccctgttatctacctctagctccattgaacatcttccttctgttaagtgatagccataagttcttagtagcgaaattattggatca

SEQ ID NO: 384712 - DNA, 201 bp, Homo sapiens
tgtactccagcctgagcaacagagcaagaacttatctcttaaaaaaaaaaaaaaaggggggaaagaaaagaaaaactttgtagccccaaaaggtttttaargaacaaaaaaccaaataacccttaaaaattttttttctttatttttcaaacttatctatcacaatatgaaagaaaagtttggattaaaaatggtgtagcc

SEQ ID NO: 384713 - DNA, 201 bp, Homo sapiens
actttctgacctgtttttgataatgcagcaaagcttatccttttgctttcttggagggaataatattcaaaaagtctcagaataagctgagtagtatcttrtcacttgcataatgcagctctatggtgtcattcagacaactcttgtggcatttgggtacattaggcaaaagcaggactgtctaaaaggaaattcttaatg

SEQ ID NO: 384714 - DNA, 201 bp, Homo sapiens
atttttagttcgaggtacccttgagatcttgtcagttctgtatatccagccatctcctgggtatctgtacttggttcatttatcataatctcaaaccaagwgtttctaaaatcggccgtgttcatctttctctaaaaccccctcctgtgttcttcacatcttttggtggtaccaccactatttatcccagagatctgggcc

SEQ ID NO: 384715 - DNA, 201 bp, Homo sapiens; identical to SEQ ID NO: 83944

SEQ ID NO: 384716 - DNA, 201 bp, Homo sapiens
cctggtcaggatttgggtttttagagttcagcaatgagaagcttttgaagcttttcacaccactttcaaagtggtgtgagccaaggaatgataacatcagrtgtgctcttctaaaagatcaccctggctactctagggggaatgatcgtagattttgagaccactgcaaccacggcagtggcccagagaagttgctggtag

SEQ ID NO: 384717 - DNA, 201 bp, Homo sapiens
atgccatgtgagggctatgctgttttgattcccattttacagatagggaaatggaggcacacagaaggtgagggggcaaacccagcattcatacccaaggyggagcattgcagagccgctatggctgtcagccatgtattcagatgggcaataagcacatgaaaagatgttctagcagagcaatacaaacgaaaactaccg

SEQ ID NO: 384718 - DNA, 201 bp, Homo sapiens
acgttatgctccagcctgacttctgcctttgtatcaacatcaatcccttgtttactcatcaaagtagtcaccattgtagcaaaacagatgctattaactcrcttcactcacacaatgccatgtgagggctatgctgttttgattcccattttacagatagggaaatggaggcacacagaaggtgagggggcaaacccagca

SEQ ID NO: 384719 - DNA, 201 bp, Homo sapiens
atgcttgtgcttctggggttagaataaaaagcgatccaggctctggggaagagatggttgatagctccccaggtctgtaccatcctccttgctggaacagrgcaggctcctgagtgatagggcaggcgcctgagcggccttttctcgttaaagttgtttctcagtatcttgaaatgtctctgtaagttgcactttgcaatg

SEQ ID NO: 384720 - DNA, 201 bp, Homo sapiens
cttgtgcttctggggttagaataaaaagcgatccaggctctggggaagagatggttgatagctccccaggtctgtaccatcctccttgctggaacagggcrggctcctgagtgatagggcaggcgcctgagcggccttttctcgttaaagttgtttctcagtatcttgaaatgtctctgtaagttgcactttgcaatgaat

SEQ ID NO: 384721 - DNA, 201 bp, Homo sapiens
ccgggagctggtgaaacaggcagaatttcaagccccatcctcacccactgagacccaccaccgactccttaagctgaatgtgaattttaatgaggcccccrggtgattttgcagtaaattaaagttcggaaatagtctaatagtaccagctcatatcctggcttcccagtcctttaagatagcgctagccaatagagaatg

SEQ ID NO: 384722 - DNA, 201 bp, Homo sapiens
tttttttcctcacagggcttgcccaatcaccattggagaataacttttattaataagtgctatgagctctgtgacacttaccctgctcttttggtggttcygtatcgtgcctcagatgatgacctccggagagttgcaacttttaggtcccgaaatcgaattccagtgagtactgcaattaacgtttctcttgaagagcac

SEQ ID NO: 384723 - DNA, 201 bp, Homo sapiens
gcaaggtttgatttttttttcctttttataaaatgaattttagctctgtcttctccttagtgctagttgctttatcttgtcttcacattcatggctatgayggaaatattttcaggtgttcttaagccagatataccaaattaccatataaaacaaagcaattttgtaataatttagattaattgcccttttaggtaagtg

SEQ ID NO: 384724 - DNA, 201 bp, Homo sapiens
ctacagtgtatgtgtatctatagaacacacttaatgtttactttttatcactttcccgaaagctgttaactttaaagtgcttggaaatgtagtttaaaaaktaatattattgaaaagcatgctagcattatttaatactagaagttgacacatctaattaatgttggtgccagattgtaacttttttgtttgaatttttgt

SEQ ID NO: 384725 - DNA, 201 bp, Homo sapiens
tatcttagtgatttttattggcatttgaagtcagaagtgaacttgctgttgcatctatgaaatggtgtctggaggccaagcaagctgggtcctgactccgrccaggtcatgaatacaccatgagtgggctttttcatttcagaccacccctttggctctctctggcctcctgtcccattagtattttcaccactcagtgtt

SEQ ID NO: 384726 - DNA, 201 bp, Homo sapiens
atgtcatcagactagcacctgcaacacatcttcgtattaatccactagggcagctgaataacctgaaagacaatgggtagctatggcaaattaggctctgygaactcgcctgcaggttgtagtggttaatattactgtgcccacctagcagagctgtggaagtgattgaatgaggcacatgcttgggaatacctctaaagc

SEQ ID NO: 384727 - DNA, 201 bp, Homo sapiens
catctgtaatggagataataacagtctctaccccgttggggttttgtgaggattaaatgtaaagtgcttacgacgctgcctggcacgcagtaagtacccartaaatgtcagttctgttcttagtgtgccgttttcccagcaggtgtagagaataaggatgactacccagcacacttttgcccaagactattaataaagtaa

SEQ ID NO: 384728 - DNA, 201 bp, Homo sapiens
gtgacctagaagggtgagatacggggggcagtgatatgtatgaaaagaattctttagaaatggttttccatgtttttctttccatcttttgaccctgctcrggcttactgcttttagggaaacatggctcattcaggtttttgtttttgcacttgccgctttcctttcacattctgcatgaagctctttcgcatcaaaata

SEQ ID NO: 384729 - DNA, 201 bp, Homo sapiens
caaactctgaggagaccaggtggaacttaccagttagtctgtgctcctatttctgttacagatttggtgatctgccgcctgtgagtcatttgccttttctrcttcagttttgttggcaagaaataatattctgtctttaattgcatcttaatcagatggcaaaaagaagttacttgaatcacttgtgctttggcacattaa

SEQ ID NO: 384730 - DNA, 201 bp, Homo sapiens
ttctattctatctgctccctaagacatacctgcaatcttctcattcccttactcagaaactctcctttcctaccttatcgcacattccctagccaggtgtmcacggtcctcaccactctgctgccatcttatcttcccagcattgctctttctcccctcccttgtgtatacaccccgtgctttggctcccataagcaactt

SEQ ID NO: 384731 - DNA, 201 bp, Homo sapiens
ggagcagaccatggtgtgaaatgttgcaagtttcagtaagataaagaatgaaaagaggccatggagtgtgtggccaggaggaggctcacaggagccccagygagaacagattccatggagatgtgagtccttgggtctttctcgcagtcctcttccaccttggtctttctgtaaagattctgcagcttccaggcctcagca

SEQ ID NO: 384732 - DNA, 201 bp, Homo sapiens
tatcatcctctttcttccccttattgcacaaacttctttaaaaattagtccacacatgctgcttccacttccgtactattgactccttacttcttgtggtytggcttctgttccctattgaaactactttactgctcaattccagtggccttggttgagttcttgacttttaaatttctatgcagggattgattctgttga

SEQ ID NO: 384733 - DNA, 201 bp, Homo sapiens
ttacaaacctgagtaggaattttggctgccagtgaccatcatacggtactctaggaaccactgcattccatgtagctgttaatcagggttacactggatgyactgaaattttatatagtggtaactgaaggatgagattcaggacaaatattagcaggttgacctgtgtggcatttgtttcagtcatttttgatagaaaaa

SEQ ID NO: 384734 - DNA, 201 bp, Homo sapiens
tacgcagagcctttccttctcccatcatgcatgtgccattctcacggaacctggatgccctttctccacccctttcagaagctgctagtcatccttcagawcctacctcaagagccacaccctctctggagtcttccccagcttctcttgaaggaatcattccttctttgtgtccctgcagccttttcttcatgcctctgt

SEQ ID NO: 384735 - DNA, 201 bp, Homo sapiens
aatcattttaaacatgatttttaagtccttagaaaagaaaccaaccattgggagtgttattgacacattgtcttgatggaaccaaggccatatgacagacyccggtaaagacacctgggccaaatggtggcagtacacttaggtggagttacagcctatggatttcaggcttaatgctaggaagggtggtcgctaacatct

SEQ ID NO: 384736 - DNA, 201 bp, Homo sapiens
acagtagttctagcattttggaatatcaagtaaagaataaataataatccttacagaattctaactgcttttacaagagatgtgttccttattaaaaaatktttttatagatgagcactgtgtttgtcctataaaataagccttttccatatttgtcatggcttgtttttaaaatattggcaatgagaaagtacggacagt

SEQ ID NO: 384737 - DNA, 201 bp, Homo sapiens
agaacagtggttctttgccagaagcacatatgaaacccacttatggagcttaacaacacagtatccataaaagttaaaaataaaaaaatacagatgtcctsgatagactgcatcagaatatccagacctgtggtcctggcacagttatattttctaaaatatcacagaggaagatagtgatgtgaatttctgggtgaagcc

SEQ ID NO: 384738 - DNA, 201 bp, Homo sapiens
aatcctaccatttgcaacaacataagtaaatctggaggacattatgctaagcgaaataaaccaggcacagaaagacaaataccacatgatttcccttatgwgtggaatctaagaaaacttgaacctatagtaacagagagtagaagggtagttaccaggggctggggaaggggtaagggaaagaggaacatagtggtcaaa

SEQ ID NO: 384739 - DNA, 201 bp, Homo sapiens
gcttactctttagcagtcaggcttagacaaataggctacctttgtttagaagcgttaacacagaactctctgcatccctttcttgattaaagagttctttygagagcttcatgctcacaagggtagtgatattcttgtgtctgtaccaaagactgagaatgatttaggggaaaaaaatgtggattatctcttgaaagtctc

SEQ ID NO: 384740 - DNA, 201 bp, Homo sapiens
tttctcaaataatatagctattagagtcaaatatattttatagacttttagttgaggctttttatttctgatatgcattttaaaaatcatcgagagatgawtaagttcaaaagagctattgtataacatgatgactgtagttaatatatttttgaacaatgttaaaagaatggatgtaaagttttcttaccacaaaaatgg

SEQ ID NO: 384741 - DNA, 201 bp, Homo sapiens
ttgaactcctgacctcaggtgatccacttgcctcggcctcccaaagtgctgggatttacaggagtgagctaccacgccggcccagaaaagcttttagatasaataccttatatgtgttaagtgagttttacatttgtaaatcctttcacataacttcatttttgaaaacctctgtctcgtgaaattactgctagacctcat

SEQ ID NO: 384742 - DNA, 201 bp, Homo sapiens
gctcccccttgtgcatttagctccccttgtctgttctcccctagtcccctgcacctttattggagctctcacatactgcctgtgctctggttcatcgtttstatgtcttattaccactggggcctagtatggaaatagaacctgtaaagtagtaccgtttgctctcagttgccatatttaagtctcagatgtcacatatgt

SEQ ID NO: 384743 - DNA, 201 bp, Homo sapiens
caggtatgtcacatagatattgcatagtaaggtttgggcttctagtttacccatcacccgaatagtgagcatggtatccagtaggtaatttttcaaccctmatacatcagatctttcacttggtctgccttttctgtgaattagttaaaataagcgaatttccatttccttgaattgggtaaaatgactataatacatgtc

SEQ ID NO: 384744 - DNA, 201 bp, Homo sapiens
tgtaaaactaatgaagttacatttctttatttttatttttgtagattcaaggggtaaatgtacaggtatgtcacatagatattgcatagtaaggtttgggyttctagtttacccatcacccgaatagtgagcatggtatccagtaggtaatttttcaaccctaatacatcagatctttcacttggtctgccttttctgtga

SEQ ID NO: 384745 - DNA, 201 bp, Homo sapiens
tttaatgtttttagttaatgtgtgcttcaggtttgtgtattgttgtttttcatattcaacagaaaaggaaaaacagttccttagtctggaaaaagggcgcrgtgaaagaggtttttgtatctgcctccacagattcaactgaccaatcccagccccctgtactgggacggctgtaccttaatttgaaatgttcatggaaaa

SEQ ID NO: 384746 - DNA, 201 bp, Homo sapiens
gcacgcatcgtttgaggcgaagtgggttgcgactggttttgaaacagatacaccagatcttcacaagaataaaattatagcattttagaattgactggcaycctgaagtttacattgttcatttgtttcctggatgggggaactgaggcccagagagggtaactaatatgtcccgggcttcagggcaacttaatggcaaag

SEQ ID NO: 384747 - DNA, 201 bp, Homo sapiens
tgtggggaggcacacaataaaaaaataaacaatgatatattttctggcagagatgagcgctatgagaaaaaatagagctctgaaaccttacaatgacagtraaacaggctggcatgattgagaatgacttgggcattactttgaatttctagttttagattgccagctgctgctccagtaaaggaaataaatccaaaagta

SEQ ID NO: 384748 - DNA, 201 bp, Homo sapiens
gtttttcatgctttgtttgcttgtttttgtttagttccctacagcttttgaattcaatgaacaatttttgattataattttggatcatctgtatagttgcygatttggtactttcttattcaactgtgaatctgctcgagaaagacaggtgagttaaaatgctattttttttgatacattaggcttgccaaaatgtatgta

SEQ ID NO: 384749 - DNA, 201 bp, Homo sapiens
ctcagttgccatatttaagtctcagatgtcacatatgtttgaaattgcatacaaattcagttgatattgaatgttgtgtttcttggtagagtttccaggakggcttctgcatcaacttctaaatataattcacactccttggagaatgagtctattaagagggtaagttgaattttcagatttatctgtctctttccttgc

SEQ ID NO: 384750 - DNA, 201 bp, Homo sapiens
tcagtctcccaaagtgcttaggattacaggcgtgagggagaacctgtgttttccctccttgaacttgttaatgtggtaggctattttaagggattttctartataactttgtagcattaactaagtttgtattgctgggataaactcaacagggtcatgttctttcttactgctgggtttgattgctaatactttctttag

SEQ ID NO: 384751 - DNA, 201 bp, Homo sapiens
catacaaattcagttgatattgaatgttgtgtttcttggtagagtttccaggatggcttctgcatcaacttctaaatataattcacactccttggagaatkagtctattaagagggtaagttgaattttcagatttatctgtctctttccttgcatttattttgatatttgaatattaggtcattttgggctggcctattg

SEQ ID NO: 384752 - DNA, 201 bp, Homo sapiens
aaaaacatatttctagtggcttgtattcctagttgcttaaaaacagtgtgtaaatgtaacgtcattacttctgatgcatctgttttgtttctagacgtctygagatggagtcaatcgagatctcactgaggctgttcctcgacttccaggagaaacactaatcactggtaaggacctgctgacataagatttgcataactt

SEQ ID NO: 384753 - DNA, 201 bp, Homo sapiens
ttcttagctgaatagtttatattaaattagtgccatttgttgtgtatcttggtatctatttccattattttagggtactttttttatcttaatagacaaakaagttatttacatatgtcctttcaatggccccattaagggaagagtttacatcacaaattatcgtctttatttaagaagtttggaaacggtaagtagaat

SEQ ID NO: 384754 - DNA, 201 bp, Homo sapiens
ttagctgaatagtttatattaaattagtgccatttgttgtgtatcttggtatctatttccattattttagggtactttttttatcttaatagacaaagaakttatttacatatgtcctttcaatggccccattaagggaagagtttacatcacaaattatcgtctttatttaagaagtttggaaacggtaagtagaatata

SEQ ID NO: 384755 - DNA, 201 bp, Homo sapiens
tgcacatattgctagaaggaagaaaagaggcccaaggccaaatccagagatgaggtcaagcaatactgacttgaatttctttttttcctcacagggcttgyccaatcaccattggagaataacttttattaataagtgctatgagctctgtgacacttaccctgctcttttggtggttccgtatcgtgcctcagatgatga

SEQ ID NO: 384756 - DNA, 201 bp, Homo sapiens
cagtgtaaaagtgttcctgtttctccacagcctcgccagcatctatcatttcctgactttttaataatcgccattctgactggcatgagatggtatctcaytgcggttttgatttgcatttctctgatgatcagtgatgatgagctttttttcatatctttgttggccgcattgtgtgtcttcttttgagaagtgtctgtt

SEQ ID NO: 384757 - DNA, 201 bp, Homo sapiens
ccaaggccaaatccagagatgaggtcaagcaatactgacttgaatttctttttttcctcacagggcttgcccaatcaccattggagaataacttttattartaagtgctatgagctctgtgacacttaccctgctcttttggtggttccgtatcgtgcctcagatgatgacctccggagagttgcaacttttaggtcccga

SEQ ID NO: 384758 - DNA, 201 bp, Homo sapiens
actgactcacgtatttttctttgtcagctcgttttgacaggagccattcaagtagcagacaaagtttcttcagggaagagttcagtgcttgtgcattgcartgacggatgggacaggactgctcagctgacatccttggccatgctgatgttggatagcttctataggagcattgaagggttcgaaatactggtacaaaaa

SEQ ID NO: 384759 - DNA, 201 bp, Homo sapiens
caccataactatttaaaaaccacatgtgtagagaagcaggaagaggagaaagtggcccacttaaataataaattgcttatttattagctaataactttttwaaaacaacactgtgaatgtttactgtctacttaccagtgatactatttagagcacgctctaaagaaatatttctgcctaactatattttcttgcctagag

SEQ ID NO: 384760 - DNA, 201 bp, Homo sapiens
catcaaaccaaatacactgtagccctaagatttgaagtgaccaagacaaatcaagaagctctaatgcttctgttacatgtgtctatgtggacagtaaaccrcttacttgggggatccttttttggagtaaatatagttagatttgtagcctatttttagatatctgagcctgaatagaaagtaatgagatgagatctgtat

SEQ ID NO: 384761 - DNA, 201 bp, Homo sapiens
aagtttcagtcccagtttttcatgctttgtttgcttgtttttgtttagttccctacagcttttgaattcaatgaacaatttttgattataattttggatcmtctgtatagttgccgatttggtactttcttattcaactgtgaatctgctcgagaaagacaggtgagttaaaatgctattttttttgatacattaggcttg

SEQ ID NO: 384762 - DNA, 201 bp, Homo sapiens
cttgggaacaaatgtgctgatctcataattgaatctattttcagccttttctaagtttctgattaaatatgtgatttttaaaaatatgtctatattagagkttttaattctattaggataaaaagagagtctgatgggaacacatcttcttaattattatgaaagtgagaatgtgagtctaattgatgaaagttcaattag

SEQ ID NO: 384763 - DNA, 201 bp, Homo sapiens
gggaggtgtcttctgtgtctccctgtcacattagcagtctgcttaaaatgcaaatgactgtatttctcacacaaactatagggcaatcatcgattccgaayaacttgattgaaaaaaaactcatcggaggtggcgaaatgagcctccccagagggatcttcctttacttcccctcatgattttcttcatgagctcagcctc

SEQ ID NO: 384764 - DNA, 201 bp, Homo sapiens
gtaaagagtctagagatatagatttggaatagtggttcttaagtcatttgaagttatgggctcctttgagaatacgatgtaaattatagtttcttttcccytcaaacatgcagtcatgtacaaaaccttacctaaaattttagaggacttctggcccctctgaagcccctttgtagggccctggtaaagtaatcctggtat

SEQ ID NO: 384765 - DNA, 201 bp, Homo sapiens
gtgcattgcagtgacggatgggacaggactgctcagctgacatccttggccatgctgatgttggatagcttctataggagcattgaagggttcgaaatacyggtacaaaaagaatggataagttttggacataaatttgcatctgtaagtaaacaaagctaatttctaaaaatagatcactaccattcaggattttaaaac

SEQ ID NO: 384766 - DNA, 201 bp, Homo sapiens
ctcacaggaagaagagaccacatctaaccaaaattggaaaggcctacatggaattgatagttgttagtatagggccttgaagaatggatttaatttccagygaaggacttctgaggtctggggcttgagtgatgagggtggggcactgtccacagagtagggaagtcagaaaaagattttatttgcagaaacaggtggaag

SEQ ID NO: 384767 - DNA, 201 bp, Homo sapiens
agtgcttgtgcattgcagtgacggatgggacaggactgctcagctgacatccttggccatgctgatgttggatagcttctataggagcattgaagggttcraaatactggtacaaaaagaatggataagttttggacataaatttgcatctgtaagtaaacaaagctaatttctaaaaatagatcactaccattcaggatt

SEQ ID NO: 384768 - DNA, 201 bp, Homo sapiens
agttcagtgcttgtgcattgcagtgacggatgggacaggactgctcagctgacatccttggccatgctgatgttggatagcttctataggagcattgaagbgttcgaaatactggtacaaaaagaatggataagttttggacataaatttgcatctgtaagtaaacaaagctaatttctaaaaatagatcactaccattca

SEQ ID NO: 384769 - DNA, 201 bp, Homo sapiens
gagttcagtgcttgtgcattgcagtgacggatgggacaggactgctcagctgacatccttggccatgctgatgttggatagcttctataggagcattgaarggttcgaaatactggtacaaaaagaatggataagttttggacataaatttgcatctgtaagtaaacaaagctaatttctaaaaatagatcactaccattc

SEQ ID NO: 384770 - DNA, 201 bp, Homo sapiens
ttcccctgagtgtagcacttgggaggtttcctcattttggtttggccaggtcttcaggccctatctcctgtgccccaagaggccatgaaaaccagttctgraagtggcctgaaagtgaaagccagtgtgttcctcttgctgtctgcattcctgtttgcagttagtttttggcttctgagtaaaaaagtctctgttatatcc

SEQ ID NO: 384771 - DNA, 201 bp, Homo sapiens
taatgggtgcagcacaccaacatggcacatgtatacatatgtaacaaacctgcacgttgtgtacatgcaccctagaacttaaagtataatttaaaaaaaaragaagaaaagaaaacaaatgcagcgtctgtagaggacgatcaacagatcctgcagctcttagtgtttccttttgataaatctttgttctggacgttaata

SEQ ID NO: 384772 - DNA, 201 bp, Homo sapiens
aggttacagaaaggactgtttctttatggtcactgataaacagtaataaagaaaaattcaaaaaccccttctatactaaagaaatcaatcgagttttatawccagttgccagtatgcgtcacttggaactctgggtgaattactacattagatggaaccccaggatcaagcaacaagtaagtgaagtagcactgttaaaag

SEQ ID NO: 384773 - DNA, 201 bp, Homo sapiens
tgacgagttaatgggtgcagcacaccaacatggcacatgtatacatatgtaacaaacctgcacgttgtgtacatgcaccctagaacttaaagtataatttwaaaaaaaaagaagaaaagaaaacaaatgcagcgtctgtagaggacgatcaacagatcctgcagctcttagtgtttccttttgataaatctttgttctgga

SEQ ID NO: 384774 - DNA, 201 bp, Homo sapiens
tagaaataccatttgacccagccatcccattactgggtatatacccaaaggattataaatcatgctgctataaagacacatgcacacgtatgtttattgcrgcactattcacaatagcaaagacttgaaaccaacccaaatgtccatcaatgatagactggattaaggaaatgtggcacatatacaccatggaatactatg

SEQ ID NO: 384775 - DNA, 201 bp, Homo sapiens
gttttttaacacctgggcacattcaaatgcagtgtctgcagcaaaagtaactatcatcagagtgaacaggcaacctacagaatgggagaaaatttttgcartctacccatctgacaaagggctatatccagaatctacaaagaactcaaacaaatttacaagaaaaaaacaaccccatcaacatgtgggcgaaggatatga

SEQ ID NO: 384776 - DNA, 201 bp, Homo sapiens
tttcagtcccagtttttcatgctttgtttgcttgtttttgtttagttccctacagcttttgaattcaatgaacaatttttgattataattttggatcatcygtatagttgccgatttggtactttcttattcaactgtgaatctgctcgagaaagacaggtgagttaaaatgctattttttttgatacattaggcttgcca

SEQ ID NO: 384777 - DNA, 201 bp, Homo sapiens
atccattccccgcctcttccagcttcttgtaggcatatcattccatcctctgcctctgtggtcacattgccttcccctcttctgtctgtatgaaatctccytctgcctctctcttatcaggatttgtgtgatgtaatttagggcccacctggataatccggaataatctgtcttctcaaaatcactaagttgatcacatct

SEQ ID NO: 384778 - DNA, 201 bp, Homo sapiens
taaatatcttcttggattgtccttaattttatatatctgtgtacctattatctttcatatatatttcagggtgaatatatatatatatatatatatatatrgcaatattttcatgtacatatttagcctgaaatagatatgatatagcattacaatgaagtatttacaaagaatattttagaatattaaaatgcatgaaat

SEQ ID NO: 384779 - DNA, 201 bp, Homo sapiens
gctgccatgaacattcacatacaagtctttgtgtggactcatgcttttatttgcttcgtgtaaatacttaggtgtggcattgctgggccatatgtttagtktatgtttaactttacaaggaactgtcaaactgttttccaaagtggccatgccattgtgccattttgcattcctactggctttaattgtctgcctttaaaa

SEQ ID NO: 384780 - DNA, 201 bp, Homo sapiens
  misc_feature (1)...(201): n = A,T,C or G
tggccatgctgatgttggatagcttctataggagcattgaagggttcgaaatactggtacaaaaagaatggataagttttggacataaatttgcatctgtnagtaaacaaagctaatttctaaaaatagatcactaccattcaggattttaaaactagttgttaaattacatattcagtattacaatgaaaatctgaggag

SEQ ID NO: 384781 - DNA, 201 bp, Homo sapiens
gctgggcgtggtggtgcgttctgtagtcccagccactcaggaggctgaggcacgagaatcccttgaacccaggaggtggaggttgcagtgagccgagatcmtgccactacactccagcctgggccacagagtgagactatgtctcaaaaactaaattaaataaaataaattttaaaaaatttaaaaatacctcagaaccca

SEQ ID NO: 384782 - DNA, 201 bp, Homo sapiens
taccagactggagaagaagtgtgccgtcacctgccttctaggagcttgcaactaaggatcaagaatgaacgcaagtaaagagctctctacgagagaggggmtgcaagtaatgggaaccaagtgctgtgtggaaggaagcaaggaaagacaggctctttgtggcttttgtctttgtggcacagtacatgatactatatgata

SEQ ID NO: 384783 - DNA, 201 bp, Homo sapiens
caccacgcccagctgatttttgtatttttagtagagacggggtttcaccatgttggccaggctggtcttgaactgacctcaggtgatccacccacctcggsctcccaaagtgctggtattacaggcgtgagccaccatgcctggtcaggatttgggtttttagagttcagcaatgagaagcttttgaagcttttcacacca

SEQ ID NO: 384784 - DNA, 201 bp, Homo sapiens
gcacctgccaccacgcccagctgatttttgtatttttagtagagacggggtttcaccatgttggccaggctggtcttgaactgacctcaggtgatccaccmacctcggcctcccaaagtgctggtattacaggcgtgagccaccatgcctggtcaggatttgggtttttagagttcagcaatgagaagcttttgaagcttt

SEQ ID NO: 384785 - DNA, 201 bp, Homo sapiens
aaggaagaaaagaggcccaaggccaaatccagagatgaggtcaagcaatactgacttgaatttctttttttcctcacagggcttgcccaatcaccattggrgaataacttttattaataagtgctatgagctctgtgacacttaccctgctcttttggtggttccgtatcgtgcctcagatgatgacctccggagagttgc

SEQ ID NO: 384786 - DNA, 201 bp, Homo sapiens
gatctctggaacttactcctcctattaactgaaattttgtctcctttgaccaacatctccccattgccttccccaggatgatgatgatgatgatgatgatkattattattattatttttgagatgaagtctcgctcttgtcccccggctagagggcaatggtgtgatctcggctcactgcaacctccgcctcccgtgttca

SEQ ID NO: 384787 - DNA, 201 bp, Homo sapiens
taataagtgctatgagctctgtgacacttaccctgctcttttggtggttccgtatcgtgcctcagatgatgacctccggagagttgcaacttttaggtccygaaatcgaattccagtgagtactgcaattaacgtttctcttgaagagcaccttttagtccataagaatggtagtcatataacttagagaaacggtccttt

SEQ ID NO: 384788 - DNA, 201 bp, Homo sapiens
gtgctatgagctctgtgacacttaccctgctcttttggtggttccgtatcgtgcctcagatgatgacctccggagagttgcaacttttaggtcccgaaatygaattccagtgagtactgcaattaacgtttctcttgaagagcaccttttagtccataagaatggtagtcatataacttagagaaacggtccttttggaat

SEQ ID NO: 384789 - DNA, 201 bp, Homo sapiens
tatgagctctgtgacacttaccctgctcttttggtggttccgtatcgtgcctcagatgatgacctccggagagttgcaacttttaggtcccgaaatcgaaytccagtgagtactgcaattaacgtttctcttgaagagcaccttttagtccataagaatggtagtcatataacttagagaaacggtccttttggaattcta

SEQ ID NO: 384790 - DNA, 201 bp, Homo sapiens
cacttcttgataaccgtcagtgctttactgttttacagttttaattgtttgcttggagatttgctttcttgatagcttaaactttctgacttaaccatagrtgctgtcatggattcatccagaaaataagacggtcattgtgcgttgcagtcagcctcttgtcggtatgagtgggaaacgaaataaagatgatgagaaata

SEQ ID NO: 384791 - DNA, 201 bp, Homo sapiens
tcttgataaccgtcagtgctttactgttttacagttttaattgtttgcttggagatttgctttcttgatagcttaaactttctgacttaaccataggtgcygtcatggattcatccagaaaataagacggtcattgtgcgttgcagtcagcctcttgtcggtatgagtgggaaacgaaataaagatgatgagaaatatctc

SEQ ID NO: 384792 - DNA, 201 bp, Homo sapiens
ttgataaccgtcagtgctttactgttttacagttttaattgtttgcttggagatttgctttcttgatagcttaaactttctgacttaaccataggtgctgycatggattcatccagaaaataagacggtcattgtgcgttgcagtcagcctcttgtcggtatgagtgggaaacgaaataaagatgatgagaaatatctcga

SEQ ID NO: 384793 - DNA, 201 bp, Homo sapiens
tacagagaagtggagagagagagagagagagagagaaagagtgtgtgtgtgtgtatgtgtgtgtggggggaggtcaggaaaagctttccatgttttgaagyaggtaaatgccaacaaagcatatgccaacgaagcccctgcttctgccttcaaatgagagtacctagaggaattgtttcaaatggcaggttatctccaacc

SEQ ID NO: 384794 - DNA, 201 bp, Homo sapiens
aaccgtcagtgctttactgttttacagttttaattgtttgcttggagatttgctttcttgatagcttaaactttctgacttaaccataggtgctgtcatgkattcatccagaaaataagacggtcattgtgcgttgcagtcagcctcttgtcggtatgagtgggaaacgaaataaagatgatgagaaatatctcgatgtta

SEQ ID NO: 384795 - DNA, 201 bp, Homo sapiens
taaccgtcagtgctttactgttttacagttttaattgtttgcttggagatttgctttcttgatagcttaaactttctgacttaaccataggtgctgtcatrgattcatccagaaaataagacggtcattgtgcgttgcagtcagcctcttgtcggtatgagtgggaaacgaaataaagatgatgagaaatatctcgatgtt

SEQ ID NO: 384796 - DNA, 201 bp, Homo sapiens
tcagtgctttactgttttacagttttaattgtttgcttggagatttgctttcttgatagcttaaactttctgacttaaccataggtgctgtcatggattcrtccagaaaataagacggtcattgtgcgttgcagtcagcctcttgtcggtatgagtgggaaacgaaataaagatgatgagaaatatctcgatgttatcagg

SEQ ID NO: 384797 - DNA, 201 bp, Homo sapiens
tttgttcataaagtgctaaaagggccaaggtaaaatcactctgaaagcatatggttgtttttatatgttttttgatgttttaattatactgacagaaataytgactactgtatttttgtccattacaggattcttctctaatacttgatgttcctctgggtgtgatctcgagaattgaaaaaatgggaggcgcgacaagta

SEQ ID NO: 384798 - DNA, 201 bp, Homo sapiens
gttgccactggtccatatgactgctagtggctccccagcctggcctcacccatgtggtgggaatctgcacccagacgccccttacagagtcgcatccctgyggccctcccaacttctccaggcatcccagcatatggcacccacctccacctgggcaccgggcctgggcactggcttcagtcttgggtcctcctcctccct

SEQ ID NO: 384799 - DNA, 201 bp, Homo sapiens
ggcgggcacatcaaggtaagatggggcaatggggagaggccctgaagatcccacctggtttaggtccttgctttgccaagagggtgaatgggtggaggacrggtgccccctctcatggggagggttcctactaagagaaggacagcgactgcacggggagggccctgactcctggacccggggctgtgcctgacctctggc

SEQ ID NO: 384800 - DNA, 201 bp, Homo sapiens
cccttcaggccttcctcctacagacagtagacggaaagcaccaagacctcaagtacatctcaccagaaacggtaaacagcgttgcgtcattttctaggcasatttgggactgtagctccattgttgaccttccctggggacaggctagggccacctgccagctgccagcctgacctgccggaaccaacccccatgacctcc

SEQ ID NO: 384801 - DNA, 201 bp, Homo sapiens
ccagggtggggcaggaattccagcctgcaggagttccgagcagccacgtgctgccagctcacatggttagagagctacatgaggctggcgtaagcacagakagccagttgggggaacagtagtgtctggagggaagggggaagaatcttcatccactccattgtctgaattgttcacccggtaacttttgccatgacaatt

SEQ ID NO: 384802 - DNA, 201 bp, Homo sapiens
acagcaagtgccagcggctcttccgctctccgtccatgccctgcagcgtgatccggcccatcctcaagaggctggagcggccccaggacagggacacgccygtgcagaataagcggaggcggagcgtgacccctcctgaggagcagcaggaggctgaggaacctgtgagtgccttcctcctggggttcactttggcatgca

SEQ ID NO: 384803 - DNA, 201 bp, Homo sapiens
ccccccagccccccacacacaaatgggagctgtgtgatgggagggactcctttatatctgtatatataagatgctgtctttgacacagagtgcacacacatgtcaggcatgattaccactttctgggacagttcatctatgttgtgaagtaggtgatgcaatgattatccaccccgtttttcagatgggaaaatggaggct

SEQ ID NO: 384804 - DNA, 201 bp, Homo sapiens
tccccccagccccccacacacaaatgggagctgtgtgatgggagggactcctttatatctgtatatataagatgctgtctttgacacagagtgcacacacatgtcaggcatgattaccactttctgggacagttcatctatgttgtgaagtaggtgatgcaatgattatccaccccgtttttcagatgggaaaatggaggc

SEQ ID NO: 384805 - DNA, 201 bp, Homo sapiens; identical to SEQ ID NO: 84163

SEQ ID NO: 384806 - DNA, 201 bp, Homo sapiens
catggtggcacacacctgtagtcccagctaactgggaggctgaggcagaagaatttcttgaatctgggaggcagaggttgcagtgagctgatattgcgccrctgcactccagcctgggcaacagaatgagattccgtctcaaaaaaaaaaagaaaaactcctggcatggccttttgagatttgggccctcgccagcctcat

SEQ ID NO: 384807 - DNA, 201 bp, Homo sapiens; identical to SEQ ID NO: 84164

SEQ ID NO: 384808 - DNA, 201 bp, Homo sapiens
aacacagttgcctgcagattgatttggctcttggccgatcagcaacctctgacttcgatgacactttaccctctggccagccctggtctaggccctttctrcaagggaatggagagagagttggtgggctctggcctggacagaccatccccttggctgtgggcatgggtggtgtcttccagagcacagctgttcccatcc

SEQ ID NO: 384809 - DNA, 201 bp, Homo sapiens
ggacgatgtgtcagctctcagggtccatggttgggtttttgtttcattttctaatgtgtcaaagtccaaactagaaactgttttttttttttttttttttttcatattgggacatggtgggggaaagaatacagaaagtgccactactttcaaaccaaggtgctctgtcccctcaggtctctgcatggattcccccagccc

SEQ ID NO: 384810 - DNA, 201 bp, Homo sapiens
cagctccacccatgctctggcagagtgggccagccgcagggaagcctttgcccagagacccagctcggcccccgacctgatggtacatccagagagcggayccctgggaggggcctggggaggcagcctcggagaagaggagggtggccctgaacccccaggcactgggaacttttcctcaggaggatgggggcgggaact

SEQ ID NO: 384811 - DNA, 201 bp, Homo sapiens
tctcctttcctggtccaggcacagatatctctaacaaagattgtgcaactgccttctagaaacggagagttcatccccttgattttacctccttccttccrcctccccaccctcttctgtagccagagtgacctaaaagtgttcttgtggttacattcctgtgctctaaagctttctgtggctccccaaggccctcaaagg

SEQ ID NO: 384812 - DNA, 201 bp, Homo sapiens
acacggaccctccccatgttcagtgctgttaggtctccattagaacctcttccattggcatccacagcacctgggcctccctggctgagctccttctgtcrctattcctgttctgcctggccatctgtcctcccacccctgcctcctcctgggttgccactggtccatatgactgctagtggctccccagcctggcctcac

SEQ ID NO: 384813 - DNA, 201 bp, Homo sapiens
gctgggtgtccccaggcaggctgtaggagatggggtttcagaggtaggtaggtaagtgggaggagctggaggagaggtggagaaggtagggcctgggctcstgccggaggaatgcagccttcattcctctgcctgccgccctgcctggctctctaggtgaggctgctgggccacagccccgtgcttcggaacatcaccaac

SEQ ID NO: 384814 - DNA, 201 bp, Homo sapiens
ctggtttaggtccttgctttgccaagagggtgaatgggtggaggacgggtgccccctctcatggggagggttcctactaagagaaggacagcgactgcacrgggagggccctgactcctggacccggggctgtgcctgacctctggctcctctgacagactgcggtgaacttgcccctggaacgcgacgccgagagcttcc

SEQ ID NO: 384815 - DNA, 201 bp, Homo sapiens
ctggacccggggctgtgcctgacctctggctcctctgacagactgcggtgaacttgcccctggaacgcgacgccgagagcttcctactgaagagccccatygcgccctgtagcctggacaagagagtcatcctcattttccactgtgaattctcatctgagcgtgggccccgcatgtgagtcccagctccgcccagccagc

SEQ ID NO: 384816 - DNA, 201 bp, Homo sapiens; identical to SEQ ID NO: 84155

SEQ ID NO: 384817 - DNA, 201 bp, Homo sapiens
actggctgagtggatgagagggtggggccctctacggagatgagatcttacctatgtaaaaccacgctccagagttcctaaaccacaaccctacctgggargcacccagggctgagagttggtctttaaaacattcttagcctataacctcttctttaaaaatctgttgtctcttctagaacaaattattttaaaccagtt

SEQ ID NO: 384818 - DNA, 201 bp, Homo sapiens
ccacacccaacgcggactggctgagtggatgagagggtggggccctctacggagatgagatcttacctatgtaaaaccacgctccagagttcctaaaccayaaccctacctgggaagcacccagggctgagagttggtctttaaaacattcttagcctataacctcttctttaaaaatctgttgtctcttctagaacaaat

SEQ ID NO: 384819 - DNA, 201 bp, Homo sapiens
tccctgtctcgacgggcatccgaatcctccctgtcgtctgaatcctccgaatcttctgatgcaggtgaggcccaggggagcctggggagatctgcctgtghcaggagagtttgtgggggctgcctgggcctcccaatttccctgccgatcaaactaacatcctccccacaacctggtgggcccaggagcctctcccccacc

SEQ ID NO: 384820 - DNA, 201 bp, Homo sapiens
tgttgtgaagtaggtgatgcaatgattatccaccccgtttttcagatgggaaaatggaggctatttcctatcagaacagaaaaaggggactccagatcccyatgctgagtctaaaggacacttgtgctatctctagcttgttctctcaagtttcttatgcccaagagcttggtcttcactcctggttcagagccctctgca

SEQ ID NO: 384821 - DNA, 201 bp, Homo sapiens
gggacgatgtgtcagctctcagggtccatggttgggtttttgtttcattttctaatgtgtcaaagtccaaactagaaactgttttttttttttttttttttttcatattgggacatggtgggggaaagaatacagaaagtgccactactttcaaaccaaggtgctctgtcccctcaggtctctgcatggattcccccagcc

SEQ ID NO: 384822 - DNA, 201 bp, Homo sapiens
ggggacgatgtgtcagctctcagggtccatggttgggtttttgtttcattttctaatgtgtcaaagtccaaactagaaactgttttttttttttttttttttttcatattgggacatggtgggggaaagaatacagaaagtgccactactttcaaaccaaggtgctctgtcccctcaggtctctgcatggattcccccagc

SEQ ID NO: 384823 - DNA, 201 bp, Homo sapiens
gggggacgatgtgtcagctctcagggtccatggttgggtttttgtttcattttctaatgtgtcaaagtccaaactagaaactgttttttttttttttttttttttcatattgggacatggtgggggaaagaatacagaaagtgccactactttcaaaccaaggtgctctgtcccctcaggtctctgcatggattcccccag

SEQ ID NO: 384824 - DNA, 201 bp, Homo sapiens
taggggaaggctctctggggcggctctgctagaccaccaacccttaggctggcctccagccaggcagccttgctcacaccctgggctcaccttgccctgcwcctgagaggacctttcctaaaccagtcaacgaagagaagacgctttagggcctctgtagaatgaaccttccttgacctgagaagagggggccctcagggc

SEQ ID NO: 384825 - DNA, 201 bp, Homo sapiens
aagtctgcaaggggagagctgggttgttccagtaggagaacctggtcttggtccatccttcaggaagggtcctggaaaggtgggggtctgacagtttaggrgaaggctctctggggcggctctgctagaccaccaacccttaggctggcctccagccaggcagccttgctcacaccctgggctcaccttgccctgctcctg

SEQ ID NO: 384826 - DNA, 201 bp, Homo sapiens; identical to SEQ ID NO: 84161

SEQ ID NO: 384827 - DNA, 201 bp, Homo sapiens
ggacagcgactgcacggggagggccctgactcctggacccggggctgtgcctgacctctggctcctctgacagactgcggtgaacttgcccctggaacgckacgccgagagcttcctactgaagagccccatcgcgccctgtagcctggacaagagagtcatcctcattttccactgtgaattctcatctgagcgtgggcc

SEQ ID NO: 384828 - DNA, 201 bp, Homo sapiens
ccaaggggcgcagcgagggttgccttggccccacccagcgcttactggcacgcagaaccctgggaggactgccaggctctgagtcagcggggcctggggcrgcaggaagggaggggcctcacgtggctgggcctcctctgcctcgtggggcctcctggctctcagccctgcaggcagtgcggctgtttgaaaggacaaatc

SEQ ID NO: 384829 - DNA, 201 bp, Homo sapiens
tcatcctcattttccactgtgaattctcatctgagcgtgggccccgcatgtgagtcccagctccgcccagccagctagtgtctgccctggccttccctgcycaggctcacaggtgctggcaccattgagatggccaggggtgcaagtccaggtcctcctctgtcccatctgatggcctagagctgacctcagccccacttc

SEQ ID NO: 384830 - DNA, 201 bp, Homo sapiens
tcttccgctctccgtccatgccctgcagcgtgatccggcccatcctcaagaggctggagcggccccaggacagggacacgcccgtgcagaataagcggagrcggagcgtgacccctcctgaggagcagcaggaggctgaggaacctgtgagtgccttcctcctggggttcactttggcatgcacctgggcagccaccccct

SEQ ID NO: 384831 - DNA, 201 bp, Homo sapiens
cctggtttaggtccttgctttgccaagagggtgaatgggtggaggacgggtgccccctctcatggggagggttcctactaagagaaggacagcgactgcasggggagggccctgactcctggacccggggctgtgcctgacctctggctcctctgacagactgcggtgaacttgcccctggaacgcgacgccgagagcttc

SEQ ID NO: 384832 - DNA, 201 bp, Homo sapiens
caaaaatatttacacttagggtttggagctattcaagaggaaatgtcacagaagcagctaaaccaaggactgagcaccctctggattctgaatctcaagaygggggcagggctgtgcttgaaggccctgctgagtcatctgttagggccttggttcaataaagcactgagcaagttgagaaaccagcattgtgtcctgtgg

SEQ ID NO: 384833 - DNA, 201 bp, Homo sapiens; identical to SEQ ID NO: 84159

SEQ ID NO: 384834 - DNA, 201 bp, Homo sapiens; identical to SEQ ID NO: 84160

SEQ ID NO: 384835 - DNA, 201 bp, Homo sapiens
ctccattgttgaccttccctggggacaggctagggccacctgccagctgccagcctgacctgccggaaccaacccccatgacctcctacagatggtggccytattgacgggcaagttcagcaacatcgtggataagtttgtgattgtagactgcagatacccctatgaatatgaaggcgggcacatcaaggtaagatgggg

SEQ ID NO: 384836 - DNA, 201 bp, Homo sapiens
tggctgtcaatagggaacagcctggaaaaggtggtaagaagatccagctgctcctggtgtctgactgtcctttctttctcttgcagaaagtggtttctggrgaagttaaagcctgaaggtattatctgctttgtttcttccctggatctgttgggaatgagaatctgggctttgtctaggggagggaccccaactagtaat

SEQ ID NO: 384837 - DNA, 201 bp, Homo sapiens; identical to SEQ ID NO: 84281

SEQ ID NO: 384838 - DNA, 201 bp, Homo sapiens
acctcggtgcgtacccaccttgatgcagttcccgccgcgcgccgccagggggtgccgcgacccgagccgaccgccccgagtctgcgggagggtggtgggargggcgccttggggccagagatatctgtgccttgctgagaggctcccctgcgcagcataggtagaagtgctgtcgatcctaggagggtggtggaaagggtt

SEQ ID NO: 384839 - DNA, 201 bp, Homo sapiens
cccccacttagctttgggggcccttttatccccccctccaacccaaaccctctccccaccaggctgggcccctctcacctaggatgacagcttcctcctcrttctcatctgcttctgcccaggccacccgctgggctcgacgctgggcctgtaggcggctgcccaggtccctccggcgccgaggcctgcctccagctctcg

SEQ ID NO: 384840 - DNA, 201 bp, Homo sapiens
cgccacagttcagcctgcgggctgcaggcccctcgggaggccctgcttatgccacacgcccttactctgtgccctggcgaagccattccctggaagggacytccccaggtggctccgttgtcagagtgctcaaccccaaggatattcaaggggggcgtgatgggctcaggctggtggggcacccccaggcttgcttctgtg

SEQ ID NO: 384841 - DNA, 201 bp, Homo sapiens
ataaaccaggacctgcccttgtgccaggtctatggcccaccttctaggttggaggtgccagggagctgcataagaagcaaggctgccttgcctggtcaagrgtcagaggtcagggtaggggctggcctcaccttctgctcctcctccaggcgaagccgctcctcctccttcttccactcagcttcgcgctgggactcgagt

SEQ ID NO: 384842 - DNA, 201 bp, Homo sapiens
ctcctgaggcctgatagacccagaagtgcaaactgaaggtgacaattcccaaagctatttttttctgtttattttatttatttatttattttttgttagtragaaaccacacttggatcaaagctacatctatagcccagacttctctaacctcagatttccttatccaactgccaaggtgcttgactatctctcagcctt

SEQ ID NO: 384843 - DNA, 201 bp, Homo sapiens
tgagctcaagcaacccacccgccttggcctcccaaagtgttgggattacaggtatgagccaccgagtgcagccactgtatttctaaaaggtgaaaaatttwaaaactgttaaacaagtaaactataatcattttaaaatactacataatcattttttggatttccttggttgtagaaaaagtgcctattacagttggttag

SEQ ID NO: 384844 - DNA, 201 bp, Homo sapiens
acaggtcaccacccaaagcagtggttcccacacattttttttctttttcagacgcagttttgctcttgttgcccaggctggagtccgatggcacgatctcygctcactgcaacccccacctcccgaattcaggcgattctcctgaatcctgaattctctgaactgggattacaggcatgcaccaccatgcccagctaattt

SEQ ID NO: 384845 - DNA, 201 bp, Homo sapiens
cgaaggcacacagcagcagcagctgaagcacctgcaggcccgtgaagtagtggatcttcctctggggcaccctccggatgtagtgtgtcggggggtacgcmgtctgtgggcggcagggaccgggtgtgggcaggcatggggctgtgtccccacccacgccactccctcgcagggccaagcgctcacctgctccttgagcag

SEQ ID NO: 384846 - DNA, 201 bp, Homo sapiens
gatcccgagcctagggaaatggaggctgcagtgagccgtgattgcgccactgcactccagcctgggcaacagtgtgagaccctgtctcattaaaaaaaacmtgtgtatttggtctttgacccctttcctagcaaacaactttaaaatcctcagaaactccacactgatgtctttttgtgtgctaatgaggtggctggcagc

SEQ ID NO: 384847 - DNA, 201 bp, Homo sapiens
ctgccaccatgaccagctaattttttgtattttttgtagaggggtttcactatattggccaggctggtctcgaactcctgacctcaggcgatccacccatygcagcctcccaaagtgctgggtttacaggcgtgatccactgagcccggcttaatttttgtatttttagtagacacggagtttcgccatgttggccaggct

SEQ ID NO: 384848 - DNA, 201 bp, Homo sapiens
cacagttcagcctgcgggctgcaggcccctcgggaggccctgcttatgccacacgcccttactctgtgccctggcgaagccattccctggaagggacttcyccaggtggctccgttgtcagagtgctcaaccccaaggatattcaaggggggcgtgatgggctcaggctggtggggcacccccaggcttgcttctgtgccc

SEQ ID NO: 384849 - DNA, 201 bp, Homo sapiens
gccagagcgtgcccagcatgatgaggaggctgagcacggcggtcgcctggcctgagtgtgtggccgagggcagctccgtggggctggcgaggaagctggcrttgagggcagtgtggaggctggcgttgaggctggcgccgaggcctgacaggctgacaagggatgaagtcctttttgtgtgatagtcgtccaagtaatgcc

SEQ ID NO: 384850 - DNA, 201 bp, Homo sapiens
gatttttaaaaattcactggctgccaggagctgctgggccccactcccctttccttggggtctgtgagctttggtctccagggatgagatgaggtagggtwgggagggggtgcacttccttcctgaatctgggctccctgagctgctactgtcacccctcaggtacgcagagatgcctaaggcggagaagaacgctgtctc

SEQ ID NO: 384851 - DNA, 201 bp, Homo sapiens
tggaggcattctttttcatttccccttggctgtcaatagggaacagcctggaaaaggtggtaagaagatccagctgctcctggtgtctgactgtcctttckttctcttgcagaaagtggtttctggagaagttaaagcctgaaggtattatctgctttgtttcttccctggatctgttgggaatgagaatctgggctttgt

SEQ ID NO: 384852 - DNA, 201 bp, Homo sapiens
ggaggtgccagggagctgcataagaagcaaggctgccttgcctggtcaagggtcagaggtcagggtaggggctggcctcaccttctgctcctcctccaggmgaagccgctcctcctccttcttccactcagcttcgcgctgggactcgagtcgtttccgctcctcacgttcagcctcctctgcctggagagaggtcttcat

SEQ ID NO: 384853 - DNA, 201 bp, Homo sapiens
gaccggcccagagtcctctagggttcagttaatattggctttggaacactgccttcctttgccagccttgaatacatggtatctcccccagaccaccaccrtacactcccacgtacacacagactccccttcccccaaatgctcagacaatggattccagccctacatcctccccacacacatccaccgctgcattcacac

SEQ ID NO: 384854 - DNA, 201 bp, Homo sapiens
tctctgttttgttttatttttaaaagatggttggatttctctgtcttcctgtgacctgactttctgtgtgtctgtttccctgataagtgccggagtaccarggggagccggatgagatttccatacagaaatgtcaggaggcagttcgccaggtgcttgccctgcccttgtcccacacttgctcttcttgtccaggtagct

SEQ ID NO: 384855 - DNA, 201 bp, Homo sapiens
tttggtttgttacctatattcataattgaaaaagttactacatttcaattaagggttactaagaataaagttttttttcccaatccatgttcataggcctyctgaattctgggtatcttctgttagagaattcctggtctaggaggatggctagggtttctgggagcattgagaagagaagagtgtgttctggatgggggc

SEQ ID NO: 384856 - DNA, 201 bp, Homo sapiens
taattgaaaaagttactacatttcaattaagggttactaagaataaagttttttttcccaatccatgttcataggccttctgaattctgggtatcttctgwtagagaattcctggtctaggaggatggctagggtttctgggagcattgagaagagaagagtgtgttctggatgggggcttagcacaagcagagacctgac

SEQ ID NO: 384857 - DNA, 201 bp, Homo sapiens
ttagtagacacggagtttcgccatgttggccaggctagtttcaaacacctgacctcaggtggtcccacctcggcctcccaaagtgctgggattacgggcaygagccaccactcccagcctattttatttttttgagacagaacctcactccatcgcccaggctagagtgcagtggtgtgatcttggctcactgcaacctct

SEQ ID NO: 384858 - DNA, 201 bp, Homo sapiens
aagccctcctctgcccccaaatccccatggccactcctctagggactctgcataatggttagtgtttctacttcaataaaagaaaacaggtcaccacccamagcagtggttcccacacattttttttctttttcagacgcagttttgctcttgttgcccaggctggagtccgatggcacgatctccgctcactgcaacccc

SEQ ID NO: 384859 - DNA, 201 bp, Homo sapiens
tccctgagctgctactgtcacccctcaggtacgcagagatgcctaaggcggagaagaacgctgtctcccatcgcttccgggccctgctggagctgcaggartactttggcagtttggcagcttgacttctgcagctggaggaggcccctcaggccggggatctggggagggctagcccaaaacctcccgcatcgggcaggc

SEQ ID NO: 384860 - DNA, 201 bp, Homo sapiens
gcctcttcttgagctaaagggataatccccaaaggtacaaggcaaaagcctcaaatgcccccagtttctgagaaacgcccagacgccccctcctcaggctyaagccagctgccaagtactggagaagacaatcctgagggctctcctggtctcctggaagcagggatatggaggcctctgtgtcaacagaatgtctctatc

SEQ ID NO: 384861 - DNA, 201 bp, Homo sapiens
cccacacattttttttctttttcagacgcagttttgctcttgttgcccaggctggagtccgatggcacgatctccgctcactgcaacccccacctcccgarttcaggcgattctcctgaatcctgaattctctgaactgggattacaggcatgcaccaccatgcccagctaattttgtactttttggtagagatggggttt

SEQ ID NO: 384862 - DNA, 201 bp, Homo sapiens
ggcatagtggcaggcacctataatcccagctatttgggaggctggggcatgagaatcgcttgagcccaggaggcggaggttgcagtgagccgagatcacgsccttgcacactgagagtgagacgctgtctcaacaacaacaaaattattaaaacctgctaaatataagtaaatgtttccctgacttgtgaaccactctagc

SEQ ID NO: 384863 - DNA, 201 bp, Homo sapiens
gggttcaagcatagaatgttaattcttggccaggtttggtgatttacacctgtaatcctagcactttgcgaggccccagcgggaggctttcttgagcccargtgttcaagatcagcctggacaccataacaagaccccatctttgcaaaaaattttaaaatgaggccgggcgtgatggctcacatctgtaatcccagcact

SEQ ID NO: 384864 - DNA, 201 bp, Homo sapiens
cccgcccgcccaggtgcgcacgcgcaggagccgcggcgcgacggtccacaaaggctcagaaggccagaaaacccggtaccaccaaccctggtgcagcggcwtctcctacctgatgccgcccggccccggctgcgagtcaggaagaggataaagccgactagcagagccgccgctaccaagtaccacacaggcgccaccatg

SEQ ID NO: 384865 - DNA, 201 bp, Homo sapiens
ggaagaggataaagccgactagcagagccgccgctaccaagtaccacacaggcgccaccatgacgagggcctcagtgcagaaccactgcgtccaccctgargccgggatctcataggccccgcccctatttcccaatctagactccgcccactactcggagccccgcccagcggcacatcacagagaggctttaatgtcag

SEQ ID NO: 384866 - DNA, 201 bp, Homo sapiens
tttcctgggctcaagtgatcttcccacctcagcctcccaaagtcctgggattacaggcatgagccaccgcgcctggccagattttctttttcttttctttyttttttttttttactttgataacaacatgacatttcatgtcactggattacaatttgttctttttctaacattttcactgtggaatttccctactacagc

SEQ ID NO: 384867 - DNA, 201 bp, Homo sapiens
ttgaacccaggaggcggaggttgcagtgagctgagatctcgccactgcactccagcctgggcaacaagagtgagactccgtctccaaaaaaaaaaaaaaaagaggctgagcacagaggctcacacatgtaatcccagcactttgtgaagcaaaggcaggaggattgcttgaggccaggagtttgagaccagcctgggtaac

SEQ ID NO: 384868 - DNA, 201 bp, Homo sapiens
caagggtcagaggtcagggtaggggctggcctcaccttctgctcctcctccaggcgaagccgctcctcctccttcttccactcagcttcgcgctgggactygagtcgtttccgctcctcacgttcagcctcctctgcctggagagaggtcttcataggggcacatccctcacccccggctagagtgtgcccaccgcccaga

SEQ ID NO: 384869 - DNA, 201 bp, Homo sapiens
ccccgagtctgcgggagggtggtgggaagggcgccttggggccagagatatctgtgccttgctgagaggctcccctgcgcagcataggtagaagtgctgtsgatcctaggagggtggtggaaagggttccctggggccagagtagttgcctacgccttgctgaggggtgcccctgggcaggacaatggaagtgttgtcaat

SEQ ID NO: 384870 - DNA, 201 bp, Homo sapiens
ttgatctctcaggctcaagtcatcctcccacctcagccttccgagtagctaggacctcaggtgtgagctaccacatctggctaattaaaaaaaaaaaaaaattggtagagatagagtctgactgtgttgcccagactggtctcgaactcctgggtttaaaccatcctccctcctcggcctccccaagcgctgagattacag

SEQ ID NO: 384871 - DNA, 201 bp, Homo sapiens
aatactacataatcattttttggatttccttggttgtagaaaaagtgcctattacagttggttagtttttgtgggtttttttttgttttttttttttcttycctgagatggagtctcgctctgtcgcccaggctggagtgcagtggcccgatctcggctcactgcaagctccgcctcccttgttcacaccattctcctgcc

SEQ ID NO: 384872 - DNA, 201 bp, Homo sapiens
tctagggactctgcataatggttagtgtttctacttcaataaaagaaaacaggtcaccacccaaagcagtggttcccacacattttttttctttttcagaygcagttttgctcttgttgcccaggctggagtccgatggcacgatctccgctcactgcaacccccacctcccgaattcaggcgattctcctgaatcctgaa

SEQ ID NO: 384873 - DNA, 201 bp, Homo sapiens
gactgggcccctcctgcccactgcccacccgcctgtaccggatggggatcatggcgatcatgatgaggggaaagatcatcttcatgtagggcagggagctyatgccgaaggcacacagcagcagcagctgaagcacctgcaggcccgtgaagtagtggatcttcctctggggcaccctccggatgtagtgtgtcggggggt

SEQ ID NO: 384874 - DNA, 201 bp, Homo sapiens; identical to SEQ ID NO: 84278

SEQ ID NO: 384875 - DNA, 201 bp, Homo sapiens
tttgtatttttagtagagatgggggtttcaccgtgttggccaggctggtctcgaactcctgaccttgtgatccacccaccttggcctcccaaagtgctggrattacaggcgtgagccaccgcgcccggactatatatgttttaaaaatcactaaacaatcccacatagtgtttatggaaacaaccgtggaaaaagtacgaa

SEQ ID NO: 384876 - DNA, 201 bp, Homo sapiens
ctcctcattgtgcagtggctcttggccggctgtagggaagacagaaatgacaatgctgcctataagcccagcccggcccatggcaggaggagcggcagccyggaagcctcacctcctctgcttagcggcctgctgcccacagcacaaggccccgacttctcagtctgactggcaaggccttttccaccaggcccacagctt

SEQ ID NO: 384877 - DNA, 201 bp, Homo sapiens
aggggaggctcccagggtgctgttccagccacaggcagctctgctggggtggacactaggaatctgggtggcccagtccatggttggggaggcagccagawggcactgagagtcctgggctctaaggctccaggtcaccccacatcagctgtgtagccagtggtttcgcctttctggccttggcttgtaagctgtacatct

SEQ ID NO: 384878 - DNA, 201 bp, Homo sapiens
tttttttactttgataacaacatgacatttcatgtcactggattacaatttgttctttttctaacattttcactgtggaatttccctactacagccagtaygtattgtactcactaatgtgttcatgaagtggggagttgggtacctgcttcctgttgcggtgtttcatcttattgttaaagtcttccttgtattttcagg

SEQ ID NO: 384879 - DNA, 201 bp, Homo sapiens
agcagcagcagctgaagcacctgcaggcccgtgaagtagtggatcttcctctggggcaccctccggatgtagtgtgtcggggggtacgcagtctgtgggcrgcagggaccgggtgtgggcaggcatggggctgtgtccccacccacgccactccctcgcagggccaagcgctcacctgctccttgagcagcagggccacgc

SEQ ID NO: 384880 - DNA, 201 bp, Homo sapiens; identical to SEQ ID NO: 84301

SEQ ID NO: 384881 - DNA, 201 bp, Homo sapiens
attgtactcactaatgtgttcatgaagtggggagttgggtacctgcttcctgttgcggtgtttcatcttattgttaaagtcttccttgtattttcaggaaygctgtcatagtagccggcatctggcttgtccacggagttcagggtacttagcttcctatcaggagaaaacgttttctgtctatctttctttctgtctatc

SEQ ID NO: 384882 - DNA, 201 bp, Homo sapiens; identical to SEQ ID NO: 84282

SEQ ID NO: 384883 - DNA, 201 bp, Homo sapiens; identical to SEQ ID NO: 84283

SEQ ID NO: 384884 - DNA, 201 bp, Homo sapiens
tcaagcagtcttcccaccaggtagctgggactacaggcttacaccaccaggctaggctaatttttgtattttttgtagagatggggtttcgcctttgccaygtggctcaggctggtctcaatttcctgggctcaagtgatcttcccacctcagcctcccaaagtcctgggattacaggcatgagccaccgcgcctggccag

SEQ ID NO: 384885 - DNA, 201 bp, Homo sapiens
tggatgctgatccctattcctgttcatatctttcccctttcttccctgctgggggatggaacaatgaggcttctaccagatatcagctccgactggctttrcttgaatcaagagtttgcccctgttcaatcagccatagccatggagtgggggtcatgtgtgggggatcaggatgacacccactggatatgtctgaggcag

SEQ ID NO: 384886 - DNA, 201 bp, Homo sapiens
cactgcggaagccccacccggcacacgactagcgcacggacgcgcatgcgtcccgcccgcccaggtgcgcacgcgcaggagccgcggcgcgacggtccacwaaggctcagaaggccagaaaacccggtaccaccaaccctggtgcagcggcatctcctacctgatgccgcccggccccggctgcgagtcaggaagaggata

SEQ ID NO: 384887 - DNA, 201 bp, Homo sapiens; identical to SEQ ID NO: 84288

SEQ ID NO: 384888 - DNA, 201 bp, Homo sapiens
gtgagtgactacctccacccccttacagggcgtcaggcccaaaaccaccagaactgcaaaatgatgaggtacctgatactgcaggtcattccctgtcttarcatcaacagcctttcacgttgtcccgaggaaagacgggataggagaagcatgcctttcttttgtaaagtgtgagaatgcgacctgtaagtggagatggta

SEQ ID NO: 384889 - DNA, 201 bp, Homo sapiens
tcacgacgtcaggagttcgagaccagcctggccaacatggtgaaaccccgtctctactaaaaatgcagaaattagctgggcgtcgtggggggtgcttgtartcccagctactcaggaggctgaggcaggagaatcgcttcaacccaggagacagaggttgcagtgagccaagatcatgccattgcactccaggccaggtga

SEQ ID NO: 384890 - DNA, 201 bp, Homo sapiens
atcattttaaaatactacataatcattttttggatttccttggttgtagaaaaagtgcctattacagttggttagtttttgtgggtttttttttgtttttkttttttctttcctgagatggagtctcgctctgtcgcccaggctggagtgcagtggcccgatctcggctcactgcaagctccgcctcccttgttcacacca

SEQ ID NO: 384891 - DNA, 201 bp, Homo sapiens
agggaagcagcaaacaccagcccagcaggcaacaagccctcagtctgccttagggaaaaaggaaggcagtgccctttcgcacttcccagagctgcaccccmtccctccggcttgcctcacgctgggcctttcgcgcttgtttctcctccagcttccgcagtttcttagctccaattttccccgacaggtgagtttccgctg

SEQ ID NO: 384892 - DNA, 201 bp, Homo sapiens
tttatttatttatttttaattttttaattattttattttattttattttattttgagacaagagtctcgctctgtcgcccaggctggagtgcagtggcgcratctccgctcactgcaagctctgcctcccgggttcacgccattctcctgtctcagcctcccgagtagctgggactacaggcgcccaccaccacacctggc

SEQ ID NO: 384893 - DNA, 201 bp, Homo sapiens
accccaaacctctggctgagaatattgccctcacttaaagaaggagctggaacccgagtgcagtgcctcacgcctgtaatcccagcactttgggaggctgrggtgggcagaacatctgaggtcaggagttcaagaccagcctggccaacatcatgaaacttcatctctactaaaaatacaaaaattaactgggcatggtga

SEQ ID NO: 384894 - DNA, 201 bp, Homo sapiens
tatttatttatttttggtgtgtgagacagggtctcagtctgtcgctgaggtaggagtgcagtggtgtgatcacagctcactccctgggctcaagctatccrcctgcctcagcctcccaagtagctgggactgcaggcacatgcctagccagtttttttgcattttttgtagagataggattttgctacgttgtccaagctt

SEQ ID NO: 384895 - DNA, 201 bp, Homo sapiens
gctttcagcctgatggatatgagcagacgtaaggagccctgcttttcttccctggggtgtggggttggtacagccatggtttgggttgggccagtgccccrcccaagtgcaggcatgcggatatgggcaggggaggctcccagggtgctgttccagccacaggcagctctgctggggtggacactaggaatctgggtggcc

SEQ ID NO: 384896 - DNA, 201 bp, Homo sapiens
tgggagctgcagggttgaggaacaaaggggctgtacttaattctgggtttcaagaggaacttggcccttgtgactgccttagccagggcctgccctgggarttggaggactgcccctcctggaccccagcagtgcatatcctgtcacccacagttgcaagccaaaatgtcccctctttatgtgcttttatttatttagaga

SEQ ID NO: 384897 - DNA, 201 bp, Homo sapiens
gcggatgacagctcacgtgctcacatggagaatcactagatggtgataagtgttctcttttctcttggaacaggtcgttcagattctaggagataagtttmcatgcactttggtggcacagaaaattgaccgtatgtctctgttttgttttatttttaaaagatggttggatttctctgtcttcctgtgacctgactttct

SEQ ID NO: 384898 - DNA, 201 bp, Homo sapiens; identical to SEQ ID NO: 84285

SEQ ID NO: 384899 - DNA, 201 bp, Homo sapiens; identical to SEQ ID NO: 84286

SEQ ID NO: 384900 - DNA, 201 bp, Homo sapiens
aggaccttgggtggtaaagctgtacttggtgggagtgagggcgtggggaggaaccatgcaaatcgccttccatggtttttaaatgcagtaaataacatttytggatgagacttgtttccaaaataaaccagctatatctgttttgaaccctgccccaggcaggtgtctgtctcagtctcctttggcaggtgcaggaagttt

SEQ ID NO: 384901 - DNA, 201 bp, Homo sapiens
gtaccacaagtctcattagttggtacctaggacaataaatagtagatggtttaattatgttttataatgaaagaaagcatatattgaggagggactgcaayattaactattaattagatacataaatgttactcttcattagtttgcatttcttaaaatagataaacactcagagatcatgtttaattctctgctgactaa

SEQ ID NO: 384902 - DNA, 201 bp, Homo sapiens
tcagagtcacaagggtttgtaaaatttgcaaaaataagatactatagttggttaagaccaccgtctctttccactcctagttcttccttcaatatcatttytctcttgtggtgctctggagtggcagtgagcactttgggaatcagactagtgggatttgtgttggagagagatctagttctggtttagtggggtatgttt

SEQ ID NO: 384903 - DNA, 201 bp, Homo sapiens
attaggcagtgaattaataaaaatgttgtgctatttgtatggattttgtaatgtttatgatgtttgtgtgctatgattccttttcccagcctaaataaaawttaacttccatgcctaattttgtatttataattttttctaaaagagagttccttaaacctggatctaccccctgattgtgacaatgagaataaaatgaaa

SEQ ID NO: 384904 - DNA, 201 bp, Homo sapiens
agaggaagggtcccacttccacccccaatgcaacacacctgctataccaaaaggcagccagattgcttttttaaaagggtccctgatctcatttcccctgrctgggtgagacctcccaaaaggggtcaccaaccacctcctacaggtgtgttcaggctagcaacaggtcagtaccctcctgggatggagcttccagtggaa

SEQ ID NO: 384905 - DNA, 201 bp, Homo sapiens
aaatcatgagtgaactcccattcacaattgctacaaagagaataaaacacctaggaatacaaattacaagggatgtgaaggacctcttcaaggagaactayaaaccactgctaaaggaaataaaacaggacacaaacaaatggaaaaacattccatgctcatggataggaagaatcagtatcatgaaaatggccatccgga

SEQ ID NO: 384906 - DNA, 201 bp, Homo sapiens
gtatgattgtctttcactttgagatgcgtttgtaatacgaacaggtgcatccaagctaagttggggttaataatgaatggaagaatctgtagtgactgttrgaaccaaaattaatgtgaataaagcagagaggctgccagagagatgagatcaagtacagattaagtaccacaagtctcattagttggtacctaggacaat

SEQ ID NO: 384907 - DNA, 201 bp, Homo sapiens
atatttcactctcaggaagagtggaaattgagtatgattgtctttcactttgagatgcgtttgtaatacgaacaggtgcatccaagctaagttggggttartaatgaatggaagaatctgtagtgactgttggaaccaaaattaatgtgaataaagcagagaggctgccagagagatgagatcaagtacagattaagtacc

SEQ ID NO: 384908 - DNA, 201 bp, Homo sapiens
ctgaaaactcaaaaagccagagtgcctcttctcctccaaaggactataacacctctccagcaagggcacagaactgagctaatgctgagatggctgaattkacaggagtaggcttcagaagatgggtaatattgaacttcactgagctaaaggagcatgttgtaacccaatgcaaagaagctaagaatcatgataaaacaa

SEQ ID NO: 384909 - DNA, 201 bp, Homo sapiens
ccaaggcctcagaaaaaaaaccccagacataccctcagagtcacaagggtttgtaaaatttgcaaaaataagatactatagttggttaagaccaccgtctstttccactcctagttcttccttcaatatcatttttctcttgtggtgctctggagtggcagtgagcactttgggaatcagactagtgggatttgtgttgga

SEQ ID NO: 384910 - DNA, 201 bp, Homo sapiens
tatatccctgaatgtgtcatgctatctcatgctatatcgctgaatgtgtcatgctatctcatactatacccctgaatgtgtcatgctatctcatactatayccctgaatgtgtcatgttatttcatgctgtatccctgaatgtgtcatgctacatcatgcttacatccttttcaacacctgttccctctgtcctaagtgct

SEQ ID NO: 384911 - DNA, 201 bp, Homo sapiens
acagaaatgtattttctcacggttctaggggctagaagtccaagatcaaggtgtcagcaggtttggtttctcctaacgcttctctccttgcaaatgaccakcttctcactctgtcctcacatggccttttctctgggcaagtgaatctctggtgtttcttcctcctcttacaatgacagttcatactgaattggggctcta

SEQ ID NO: 384912 - DNA, 201 bp, Homo sapiens
ctgcagctcacgcttttcaccctgaaatgtgtaatccccccctcaactagggcataatgctaacatttttttaacctcacttataaatattcttctatgcrtaattatccacccaaatgcacttcttgttcctgtagctgtatcttatagataaaacaaatattgttatacataaaatcatgttttcctttggcttccaat

SEQ ID NO: 384913 - DNA, 201 bp, Homo sapiens
tacaggactgtgtgaaaagaccaaacctacatttgattggtgtacctgagagtgacgaggagaatggaaccaagctggaaaacatacttcaggatattatmcaggagaacatcccaacttagcaagacaggccaacattcatattcatgaaatacaaagaacaccacaaagatactcctcaagaagggcaaccccaacaca

SEQ ID NO: 384914 - DNA, 201 bp, Homo sapiens
aaaagtaaggatggagggcagctgcagtggggaactataaaatgacaattaaaagatgaaaacaatatatatatatatatatataattctacctctataayctctttacttcaatatttccaaagtgtcttcatcttacttgataagtacatacagcataaaatctttcatcactgttaagcactccttgacactgtcagt

SEQ ID NO: 384915 - DNA, 201 bp, Homo sapiens
catgcaacatcatgctatatccctgaatgtgtcatgctatctcatgctatatcgctgaatgtgtcatgctatctcatactatacccctgaatgtgtcatgytatctcatactatacccctgaatgtgtcatgttatttcatgctgtatccctgaatgtgtcatgctacatcatgcttacatccttttcaacacctgttccc

SEQ ID NO: 384916 - DNA, 201 bp, Homo sapiens
ctcactgccagcacagcagtctgagctcacccagaggggcatctgccattaccgaggcttgagtaggtggttttcccctcacagtgtaaacaaagatgccrggaagttcaaactgggaggagcccaccagagcccagcaaggccactgcggccagactgcctctctagatttcctcctctgtgggcagggcatctctgaaa

SEQ ID NO: 384917 - DNA, 201 bp, Homo sapiens
ctcctcttcaacatagtactggaagttctggccagggcaatcagccaggagaaagaaataaagcatattcaaataggaagagacgaagtcaaactatcttwgtttgcagatgacatgatcctatatctagaaaatcccattgtctcagctcaaaagcttcttaagctgataagcaacttcagcaaattctcaggatataaa

SEQ ID NO: 384918 - DNA, 201 bp, Homo sapiens
aacttaaatttacaagaaaaaaacaaccccactgaaaagttggcaaaggatatgaacaaatacttctcaaaagaagacatttatgcagccaacaaacataygaaagaaagctcatcatcactggtcattagagaaatgcaagtcaaaaccacagtgagataccatctcatgccagttagaatggcgatcattaaaaagtca

SEQ ID NO: 384919 - DNA, 201 bp, Homo sapiens
ccttttcccagcctaaataaaatttaacttccatgcctaattttgtatttataattttttctaaaagagagttccttaaacctggatctaccccctgattrtgacaatgagaataaaatgaaaagaaaagatgcagacattcaggaggaatcatgaagagggaagaggcccaacctgaggaattggaagaatgaaggcatc

SEQ ID NO: 384920 - DNA, 201 bp, Homo sapiens
agaaagactgggttgcctttctattctttctacagaaaatattacacagtcctttgcttacaaagaggtgatcaacaagtacatagcccccaccccccccmaaaaaaaagaagtatcagggaaaaatcaaggtgttcaggtatattaggcagtgaattaataaaaatgttgtgctatttgtatggattttgtaatgtttat

SEQ ID NO: 384921 - DNA, 201 bp, Homo sapiens
taaagtataatttaaaaaacacaatttgcattttaatttaaaattgcaccagaaatctttacagtaattctgataaggtcattaaatcattctttcctttaaaaaaaaaaatgaagactgacaacaaatatgatagaaaggccaacttataactacttgagaacactggacaagtgtcagagtgatgtggaaaatttcaac

SEQ ID NO: 384922 - DNA, 201 bp, Homo sapiens
agaactataaaaatatcaagaattcttctctgctgcaagccctaaacatatacatagtatatgacctagaaattatgattgaaaaaacaccaccttcagarattgggcagaatttcagcaaacacaccagcatgtaaacatagcaccaaccagctgccatggacaaactaacaggcacagtagcacttggccattctgaac

SEQ ID NO: 384923 - DNA, 201 bp, Homo sapiens
tgtcaaaggggagtttgaagagggaagagttggtcagccatgcccaattcgaatagcggttttggggaatgagtactgattaagatcattggctttaacawttaagaccattggctttaacatttaagacagaagtttcagtaaagtaggagatgttaatgaggaagtaagtagttagaaaatgtgggtactgggctgttt

SEQ ID NO: 384924 - DNA, 201 bp, Homo sapiens
atgcaaatggctgcattctgttctaatttttttataattattatttttcttttcttaaagtaaactttgaggacttacaataacaggcatttatgtatttmtccttacaagagtagttaactacgtacccctgaaaagatagaagaactccatgagaataggggccctctattggttttgtttatttacgtagactcagtt

SEQ ID NO: 384925 - DNA, 201 bp, Homo sapiens
aagtttacagatcaacacagaactgtttgcatctttccagtcctaatgttcctaaaaaaactttcatctgtaagttttgcttcaataattattcttatttrgcgatgggaagggcagaggatattttgattctgtctgcctttcttgggttccacctttctttcattgctggcccctcactacagttgccctactgaaatg

SEQ ID NO: 384926 - DNA, 201 bp, Homo sapiens
tttacagatcaacacagaactgtttgcatctttccagtcctaatgttcctaaaaaaactttcatctgtaagttttgcttcaataattattcttatttggcratgggaagggcagaggatattttgattctgtctgcctttcttgggttccacctttctttcattgctggcccctcactacagttgccctactgaaatggtg

SEQ ID NO: 384927 - DNA, 201 bp, Homo sapiens
gaagggtcccacttccacccccaatgcaacacacctgctataccaaaaggcagccagattgcttttttaaaagggtccctgatctcatttcccctggctgkgtgagacctcccaaaaggggtcaccaaccacctcctacaggtgtgttcaggctagcaacaggtcagtaccctcctgggatggagcttccagtggaaggag

SEQ ID NO: 384928 - DNA, 201 bp, Homo sapiens
atacacaagtatcaatagctgaactgatcaagcagaagaaaggatatcagagattgaagatcaacttaatgagataaagcatgaagagaagattagagaaraaagaatgaaaaggaatgaacaaagcctccaagaaatacaggactgtgtgaaaagaccaaacctacatttgattggtgtacctgagagtgacgaggagaa

SEQ ID NO: 384929 - DNA, 201 bp, Homo sapiens
taaaatatgaaaggcgaaaagtagggggtagaactagagtgatggcatcagacatgtcaaaggggagtttgaagagggaagagttggtcagccatgcccawttcgaatagcggttttggggaatgagtactgattaagatcattggctttaacatttaagaccattggctttaacatttaagacagaagtttcagtaaagt

SEQ ID NO: 384930 - DNA, 201 bp, Homo sapiens
tcacaattcctccagagcaagggaacaaaactggacagagaattagtttgatgaactgacagaagtaggcttcagaaggtgggtaataacaaactcctgtrtgctaaaggagcatgttctaacccaatgcaaggaagctaagaatcttgaaaaaaggttagacaaatttctaactagaataaccagtttagagaagaacat

SEQ ID NO: 384931 - DNA, 201 bp, Homo sapiens
ttcaattatttattccaccacatcatattgaccctccctccaaaagaaagtttacagatcaacacagaactgtttgcatctttccagtcctaatgttcctaaaaaaactttcatctgtaagttttgcttcaataattattcttatttggcgatgggaagggcagaggatattttgattctgtctgcctttcttgggttcca

SEQ ID NO: 384932 - DNA, 201 bp, Homo sapiens
cagaaaactattttggaatgtatggagccataagcaagtcagtggaaaattcttccaaccatcagatgtataacattggaagtggatgatttggttttcaytgacagctaatcaaaaaacagatgttctgtcccattaggaatatattattggacagtgcagcatatacattataactgtataaccacattataataataa

SEQ ID NO: 384933 - DNA, 201 bp, Homo sapiens
ttcttccaaccatcagatgtataacattggaagtggatgatttggttttcattgacagctaatcaaaaaacagatgttctgtcccattaggaatatattaytggacagtgcagcatatacattataactgtataaccacattataataataaacacactgtactttgtttctgtttatattggaaatgtaaaaaacaggta

SEQ ID NO: 384934 - DNA, 201 bp, Homo sapiens
cccagccctttgactaatctttagcctttctttgcagtcttctcctcctctgtcaatcccttaaatatggtaccctgctcttttctcaatatccaagctcygctggccaatgcgtctattaagtcagcacctaactgatccctcacaaaattacactttagcccagatctctctcatatcctagcagataaatatctagag

SEQ ID NO: 384935 - DNA, 201 bp, Homo sapiens; identical to SEQ ID NO: 84309

SEQ ID NO: 384936 - DNA, 201 bp, Homo sapiens; identical to SEQ ID NO: 84310

SEQ ID NO: 384937 - DNA, 201 bp, Homo sapiens
caagtacaggcgctaattgttgtgagaaatttgtaagtgtgacttgctctccccagctggcagtgtagtggggctgccaggccccagctttgttccctggktcccctgaagcctgcaaatgtcatcatcaaaagtaaggatggagggcagctgcagtggggaactataaaatgacaattaaaagatgaaaacaatatatat

SEQ ID NO: 384938 - DNA, 201 bp, Homo sapiens
cctacaaaggatcacaattcctccagagcaagggaacaaaactggacagagaattagtttgatgaactgacagaagtaggcttcagaaggtgggtaataacaaactcctgtatgctaaaggagcatgttctaacccaatgcaaggaagctaagaatcttgaaaaaaggttagacaaatttctaactagaataaccagttta

SEQ ID NO: 384939 - DNA, 201 bp, Homo sapiens
ataggtcatctgccaggtatccctggcccaagtcaccgacgtcgacaaggcagtggccgcagccaaggatgcctttgagaatggacggtgggggaagatcrgtgcgcgggaccggggccggctgatgtacaggtgggagcccaacatgtacctgccagccactgccaccatcagcttctgggcagtggcacgggggggact

SEQ ID NO: 384940 - DNA, 201 bp, Homo sapiens
  misc_feature (1)...(201): n = A,T,C or G
gtccgcatgccccaccagctcttcattgggggggagttcgtggatgccgagggcgccaagacctctgagaccatcaatcccaccgatggaagtgtgagtgnaggcccagcaccccttctccacattccccagcctccctgtccttccttccctgcccccactggcctctgggggtcctgaccctgagagtctctgcttgga

SEQ ID NO: 384941 - DNA, 201 bp, Homo sapiens
tgctccctgttatgatcacagttgccgcatctcccaagcagtccctacacgctgcactcctctgggttccatgaagttctccacaccccaagccctcaggstcagggtcagggtcagggtcagggtcaggttcagggtcagggtcagggccctgctgtccctggccctgggccatggcaccatcctgtgctccccaaccag

SEQ ID NO: 384942 - DNA, 201 bp, Homo sapiens
aggaagtgaaggagctgtgtgatggcctggagttagaaaatgaagatgtgtacatggcatccacctttggggacttcatccagctgttagtgaggaagctkcgaggggacgatgaggagggcgagtgcagcattgactacgtgagtgctgggccctccctgcagcaggccctgcagagccctcaggcagctgcatctatga

SEQ ID NO: 384943 - DNA, 201 bp, Homo sapiens
ctaataaatatgaagctatattccattgtggttttaatttgcatttccccagtgcctaatgatgttgagtgtcttgtcatattcttatttgccgtccatakttctccttttgagaggcatctgttcaatcttttgctcatttttaattaggttgtttgctttcttagtattgagttttgagggttctttattctgaataca

SEQ ID NO: 384944 - DNA, 201 bp, Homo sapiens
catctgctgtctagacattggcctttatttcttttggataaatacttgagagtgaaataggaagtatgtttaattctttagaaagtgctaaactgctttcyaaagtggtagcaccatttacatccctgccagcagtgtgtgcaagctccagttgctcagggtactacatctttcccaatagtgggaatggtcaggctttta

SEQ ID NO: 384945 - DNA, 201 bp, Homo sapiens; identical to SEQ ID NO: 84328

SEQ ID NO: 384946 - DNA, 201 bp, Homo sapiens
tgctttcttcttcccaggcagccgtgtcacacagacctgcagctgagatgggtgccatctccctgggttgcttctgcagaggaggcctctcctccccagtrgagcctcctacctgccggctattgactgagtgtccagctgaggacagcatccctgcagtgcatttcttgcccactgatgtgatgtgttcatgactcccag

SEQ ID NO: 384947 - DNA, 201 bp, Homo sapiens
gaatcaagggagggcaacccgacctcggcatgctcaggctgaagccagtctgtgtaaacgcgtcagcccccacgttgctccctagtcagcccttctgtgayggggatggggccacctctccacctctggagatgccaggctcaggagcatgcccccaccatcctggactgaacagttggtttattggtgctggaaagacag

SEQ ID NO: 384948 - DNA, 201 bp, Homo sapiens
cctcataactcccaggctgcccacagctgcacatccgtcagaatcaagggagggcaacccgacctcggcatgctcaggctgaagccagtctgtgtaaacgygtcagcccccacgttgctccctagtcagcccttctgtgatggggatggggccacctctccacctctggagatgccaggctcaggagcatgcccccaccat

SEQ ID NO: 384949 - DNA, 201 bp, Homo sapiens
caccctgggcagctgtaagtggaccccttcctgtcctatgcaaactctcaggccccgtgaagacctgggagtgcccattactggttctgcctcagctcagyacagcagaggctgggtctaggtgtcccggagggggcagttcaggagctcccagataaatggctgcagagcaccctgtcagggtggcgggaccaccgtggg

SEQ ID NO: 384950 - DNA, 201 bp, Homo sapiens
ggatgggtgagcatcaggtgtctagggcacagcatgctgtgaaggagttaggagggccaggtgaaggagccatgcagggccgggcctcctgggtaatgggrctaagaggagaattctgtatgtggttctgagaaggagcagagtccagctcttttggatgtttgtattaggaaatttactagagaccatgtcactgctcca

SEQ ID NO: 384951 - DNA, 201 bp, Homo sapiens
ggagccatgcagggccgggcctcctgggtaatggggctaagaggagaattctgtatgtggttctgagaaggagcagagtccagctcttttggatgtttgtrttaggaaatttactagagaccatgtcactgctccactcggaatcctcgggtggcttcccagtgcccttgacatggaatcaaactcctcgcttggccatgc

SEQ ID NO: 384952 - DNA, 201 bp, Homo sapiens
tttatggctgcatactgacatttttctatcctgtccatcctatagaattggccaagtccttgcagaagacagagagcacactcaaaatgagtcatttgagrggagttaatgaaagactcatctgcaaagggagagggagggggtagggacacagacaggacagtgcggtgcccttgggacggagcatcaggaggggctgag

SEQ ID NO: 384953 - DNA, 201 bp, Homo sapiens
cttttggatgtttgtattaggaaatttactagagaccatgtcactgctccactcggaatcctcgggtggcttcccagtgcccttgacatggaatcaaactyctcgcttggccatgcaatccgggcctggtatcctggccccctccccagtccactgtggttggctgtgctggcctcgtggatcccaggccctccaccctca

SEQ ID NO: 384954 - DNA, 201 bp, Homo sapiens
agccctccaccgttaggacattcttcttcgacctgagtcctgtgtttgccactccttcttgactgtgaccttgtggcatcatgagccaaagcacgcctatrgtagatacacacgtgaacatatccaaaacacaggtttcaaagcagggcttgcttttatggctgcatactgacatttttctatcctgtccatcctatagaa

SEQ ID NO: 384955 - DNA, 201 bp, Homo sapiens
tcgtggatgccgagggcgccaagacctctgagaccatcaatcccaccgatggaagtgtgagtgcaggcccagcaccccttctccacattccccagcctccstgtccttccttccctgcccccactggcctctgggggtcctgaccctgagagtctctgcttggacatgtgcctttgagagggacgggaaagaatgccaggt

SEQ ID NO: 384956 - DNA, 201 bp, Homo sapiens
ccgttcaatagacaaggaaggctaaaggcagggactgggtcacaccctgctgaatccaggagcttcaattatgacatcgttaggattctatttctctctcyttcactcgttgattctccttttctctgtgtgatttgtttcattctcagtttggctgccctgaattagaggaaagatagccactatagctcaaggattcta

SEQ ID NO: 384957 - DNA, 201 bp, Homo sapiens
ctgggactggttcatgtcaatatttcttacaagcatagatttaaaaacaaataaaatactagctcttcaaattcagagatatatagaaaggttatacatcrtggtcaagtggtattcattccaagaatgcaaaggtggcttaacatttaaaaatcaatcattatgatccaccacaataaaataaaaatctcatgacctata

SEQ ID NO: 384958 - DNA, 201 bp, Homo sapiens
agtcacagaacaggtccagcttccagggttggggaaagaaactccacatcttgctagcaggtgctgcaccttcacatggccaaggctgtgactgcaggggygggcattgtgaccagttttgcaattgaccatgcatatgagttggggctgagtgggctgagttgggcctatgtgcttggcactgtggacctctagtaactc

SEQ ID NO: 384959 - DNA, 201 bp, Homo sapiens
tcacataagggcgggatctgccaggtcagctgggggctggctggtcctgtggtggtggtgggttccaggagggagagcgggagcccagggagggggtctcrgagtgagcacgttgtgttcattgcattctgttggccaaaatgagtcacagaacaggtccagcttccagggttggggaaagaaactccacatcttgctagc

SEQ ID NO: 384960 - DNA, 201 bp, Homo sapiens
ccaggtctcagctacccctggcccctctccctctcccagccctgctcagacctgcctgggctactggcttcgggggcttcttctcacccaccatcttctgrtatttctccccttgacagaaactgacatttttcaactcaacgctgaacacttcaggcctggtgcccgagggagacgctttgcccatcccaggagcccatc

SEQ ID NO: 384961 - DNA, 201 bp, Homo sapiens
gtgcccttgacatggaatcaaactcctcgcttggccatgcaatccgggcctggtatcctggccccctccccagtccactgtggttggctgtgctggcctcrtggatcccaggccctccaccctcatgccccactgagcacttgcacctgtgtcccacctccagccctcaccagctgtcctccagctctcatctgtgatgca

SEQ ID NO: 384962 - DNA, 201 bp, Homo sapiens
cagtaggtgccctcagtacctgcaggtctcagctgtggagccaaggcctgaggagtggagtccgggctctggagggctgggctcaagtcctcctctagctsttcaccgtgcagccccctaaggccatcgctaggatggctatcattaggcctcttgctcacagctgcactcggcctccaggatgtatggtctggagaccga

SEQ ID NO: 384963 - DNA, 201 bp, Homo sapiens
ccagggggggagcaagctgaggttggcttagcttccgcgaagagcaccgccccccaccgcccctaggttgtggagagcagcatctaatcccagtggatagyggcagggatgcgggagaaacagccagcaaccgccacacatggtttcagagagatggtacctgggaaaccagggaaaaagacggcctatgagcagaggggt

SEQ ID NO: 384964 - DNA, 201 bp, Homo sapiens
gacagcaagtgtccacttggctctgttttaaatttaggcccagtttgctgctggggatccatcttgaaggattggctatttcaggtttgcatttgttcacygtgcacattcagagttccagatcctcctggaagagcggcgtgtttattcatgataacaactctatgcagtaggtgccctcagtacctgcaggtctcagct

SEQ ID NO: 384965 - DNA, 201 bp, Homo sapiens
gattggataaataaaatgtacatatacaccatggaatattacacaaccataaaaaggagtgaaagcatgtcttttgcagcaacatgggtggactagaggcygtaatcctaagtgaattaaggcataaacagaaaaccagatactgcacgttctcacttgtaagtgggagctcaacattgagcacacatgcacataaaatgg

SEQ ID NO: 384966 - DNA, 201 bp, Homo sapiens
accagcttctttaccagtctttctccttggtgctgaaagcatttgactagaccccaaagttccaacatatttgattcatgtaagttccatagttatttagrtaaggggatacatttttggagcttcttgttctgccatctgctgtctagacattggcctttatttcttttggataaatacttgagagtgaaataggaagta

SEQ ID NO: 384967 - DNA, 201 bp, Homo sapiens
caaggctcagcaaggatggacatgaggcatttgtgtgatccaaaggtgctgagagccagcaacttccttcttgaaagtggaacaccttgaaggtctgtttwaaaaaaatcctatttattccaaagatatccctggagcagttgctctggccctgacttggcctgccctggtgttgcagggccagctggacagacagccctc

SEQ ID NO: 384968 - DNA, 201 bp, Homo sapiens
cgtggcagtatggggcctggcctttgctcgctcttggtgtccagtctgccatgctcccctgtcagaaggtctaggctgctgttgatgtctgcaatgtagtrttttgggtatccaagattgatatatgcagttgcaagagaatatctgtctgtggtcaggttccctagaagcagcatctaaggtaaaaattcttgtgcaagt

SEQ ID NO: 384969 - DNA, 201 bp, Homo sapiens
acaaggtccttattgcccaccctggcttcagcaagctgcgtctggaatatgacccagccctgcttcaactttttgtggcagaggtgggaggtggggggtgrcagccaatatcttatgagaggctgaaaatcatttaaattgattgacatttaccagcttctttaccagtctttctccttggtgctgaaagcatttgactag

SEQ ID NO: 384970 - DNA, 201 bp, Homo sapiens
aggagcagctgggccccaccttcctagtccccagccatgcctagaggcctggcacatctgtcctccatcagctggactgtcatggggaccccagagaagcygggggttgaggtgaggtgggcatgaggacagcagccagcatcagagggccctgggatgtggcagctccttctttcccagaaggtggtcactccaggacca

SEQ ID NO: 384971 - DNA, 201 bp, Homo sapiens
gcctccctgtgttcagggagtcaccatgggagggcactgtagctggagcccagggggtgaggggcagagtcaggtgggcacagctggggaccttgggtgtyaacagcacatgtgcggcaaggctcagcaaggatggacatgaggcatttgtgtgatccaaaggtgctgagagccagcaacttccttcttgaaagtggaaca

SEQ ID NO: 384972 - DNA, 201 bp, Homo sapiens
gtgccttggtgtggatctctttgatcctgcttggacttcattcattgtatgtcttagatgtgtatattcatttctttcctcatgtttgggaactttggggycactatttcttcaaatacatatttagagaaacctttttctcttttttcctctggagctcctgtgagtatgttggtgtgtttcatggtatcctataaatcc

SEQ ID NO: 384973 - DNA, 201 bp, Homo sapiens
aagagaatatctgtctgtggtcaggttccctagaagcagcatctaaggtaaaaattcttgtgcaagtgatttattgagggaatgttccagaaaatcatgcsaggcagtaagggcagaggaaagcaaagcaaaagtaaaggttcaggagaagtctagcctggggctgctcccagggtgggttttggagtattaactgcaccc

SEQ ID NO: 384974 - DNA, 201 bp, Homo sapiens
tcttgggctcaagtgatcctcctgcctcagcctcctgagtagcaggactgcaggcatgcaccactacacctagctaacttaaaacaattttttttacagamaaagtcttgctatgttgcccgggctgattttgaactcctaggctcaagtgatcctcccacagtgcttgaattacagggtgaggcgttacacttggcccat

SEQ ID NO: 384975 - DNA, 201 bp, Homo sapiens
cagccgggggtagggagagggcaggcagggatcttcccacacactgacagggtccggacaaaccccatgggcgtggtacccccagccgtgttgctgtgtcyggcctaccagagtgaggcgtggcagtatggggcctggcctttgctcgctcttggtgtccagtctgccatgctcccctgtcagaaggtctaggctgctgtt

SEQ ID NO: 384976 - DNA, 201 bp, Homo sapiens
gacctctcgaggccatacatcctgatttggccccagtcctggtgagttactcacacgcgtgcctgaggaggcttacccaagagtgcatggccactgtgctwggccggtgacagcaaacaccagagcagcaggtgctggtgcagccctgatccatgatctgcactgaggatgcgcctgcaactggacctagagagccccagc

SEQ ID NO: 384977 - DNA, 201 bp, Homo sapiens
ggagttgcaactgtttttttgcatgttatttttgtatcctgcaattttgctgaattcctttattagctctaacagttttttggaggtgcagaatatttaargttttctttttctgttttttagacatggtcttgctctgtcacttaggctggaacagtggtttgatcatagcccaatgcagcctcaaattcttgggctcaa

SEQ ID NO: 384978 - DNA, 201 bp, Homo sapiens
catgcaaccacaaagataatgttgagggagaaaatctacaaaacactgcatggttccatttatgtaaaatgaatacatataaaggggatatatatatatawcaagcgaaaccattcgatgctgttagaagtcccatcattcttggtgaatgtagtgactagaagaggctcaaagagttcctggagtttttctctttctggt

SEQ ID NO: 384979 - DNA, 201 bp, Homo sapiens
gattgtttcctttgctttgcagaagctttttactttgatgcatatgacttgtatatttttgcttttgtttccagttcttttggtgtgatattcaggaaatsattgcaaagaccaatgtcatggagactttcccctatgctttcttctagttttatagttttaagtcttaagtttttcatatattttgagttgaatattttt

SEQ ID NO: 384980 - DNA, 201 bp, Homo sapiens
cacatcttggctgttgtgaatcaatgtggaagtgcatgggaatttgagatcagttcttttggacaaatacccagcagtgagattactgggtcatatgatarttcttcttttaattttttcaggaacctccatatcattctccacagaggctgcaccattttacattcccaccaacagtgcacaaaggttccatttttccca

SEQ ID NO: 384981 - DNA, 201 bp, Homo sapiens
cccggcatggctccatcatctatcacccgtcactgctccctaggcaccgaggggcctcggccatcaactggtgagatggggcaaaaacacagggggccatycccatacatgtccctccatcagcctgacttgtcactttccattagcccaaagcatttctagggctgcagagtgggcatcgtgcaggtgcctgtcctgtgg

SEQ ID NO: 384982 - DNA, 201 bp, Homo sapiens
cgtagctggaggcctccaggcccttgtagtgcccctggggcccagctgtattggtggtgaaatattttgagtctcaccactgggcttgcggagaccccagrcccagtactcactctgacttggcctcaggcagggtggagcagcacattcagggccaggctgaccgtgggcaggccagatgctgaagatggggagacttgg

SEQ ID NO: 384983 - DNA, 201 bp, Homo sapiens
ccagcaacagccattctttttgctctgatgagcttggccactctagtacttcatacaagtggaatcatgcagcatttgtccttctgtgactggctttttaygcttagcatgatgtcctcaaaattcagcccttttgtagcacatggcaggactgccttctttttatggctgaatcctatttcattgtacagatagaccata

SEQ ID NO: 384984 - DNA, 201 bp, Homo sapiens
agaactaccatccaacccagcaatcccattactgggtatatacccaaaggaaaatagatcattatatgaaaaagacacatgcgcttgtatgttcgtcgttrgactattcacaacagcagtgacagggaatcaacttaggtgcccaacaatggtggattggataaataaaatgtacatatacaccatggaatattacacaac

SEQ ID NO: 384985 - DNA, 201 bp, Homo sapiens
cgtcagagaagtaagagtcgaattaggagggtgcagagtcagaagccaaaacaagataatggcttaagtggggagctacgctgagtctgggaggaggcagygtcagggagcccactctgaagtctcgttgagatggagacctgagggacagagaggacttagccaggttggggacagggtttgtgcagggcgtggctcgga

SEQ ID NO: 384986 - DNA, 201 bp, Homo sapiens
agtggggagctacgctgagtctgggaggaggcagtgtcagggagcccactctgaagtctcgttgagatggagacctgagggacagagaggacttagccagrttggggacagggtttgtgcagggcgtggctcggagtaggggctgggggcgtgggacggggcaggaatcacggcattccctgggaggaacagcaggtggca

SEQ ID NO: 384987 - DNA, 201 bp, Homo sapiens
tgctgcagctggaggacagggcaccagccacaggggtctgagcagggcacccacagcatctgcccagagacctgcaaagacaggaatgcaaagaaggcaaytaagtgtcttaagaggaagctggggttatcagctctctcacaagagctttgtccactgtccagaggtggtcagggtgggaggggagtgaagagagaccag

SEQ ID NO: 384988 - DNA, 201 bp, Homo sapiens
tggcaggtgtttcttgggtgactgctgtgtaccaggcaagtctggtcagtctggggaagggtccaggctcaatgtgggccctggggctgggaaggaggcarggtcctattgctggggatagcaacccactggatctccccaggtgcaggccgtgaggctgatcgctgagggcaaagcccccagactccctcagcctgagga

SEQ ID NO: 384989 - DNA, 201 bp, Homo sapiens
tggcagctccttctttcccagaaggtggtcactccaggaccattaagcctcctgggatgaggcaacaacttggaggtacatagagaagcccagcctggccycaggccatccatgagtctgttcaggggttgttgtcctggagtggcacttgtccccagctcccctggggccagcctctcatcaggtcttgctttgcagagt

SEQ ID NO: 384990 - DNA, 201 bp, Homo sapiens
tgcccttgacatggaatcaaactcctcgcttggccatgcaatccgggcctggtatcctggccccctccccagtccactgtggttggctgtgctggcctcgyggatcccaggccctccaccctcatgccccactgagcacttgcacctgtgtcccacctccagccctcaccagctgtcctccagctctcatctgtgatgcat

SEQ ID NO: 384991 - DNA, 201 bp, Homo sapiens
gaagatcagtgcgcgggaccggggccggctgatgtacaggtgggagcccaacatgtacctgccagccactgccaccatcagcttctgggcagtggcacggrggggacttctgtggaggcccttttacctgccaggaggagctgggtcctggggaggctatgggaccgaggccatcagatgggccaggctggggctccttgc

SEQ ID NO: 384992 - DNA, 201 bp, Homo sapiens
caggccatccatgagtctgttcaggggttgttgtcctggagtggcacttgtccccagctcccctggggccagcctctcatcaggtcttgctttgcagagtktttggcagcggatcctccccaaagtcctggaggttgaagactccactgatttcttcaagtcaggggccgcgtctgtggacgttgtgaggtaaggccagga

SEQ ID NO: 384993 - DNA, 201 bp, Homo sapiens
tactccgcagctgtgtagcttctggctgcagctggaccccccaaggcctgggccttctacatgtgctcaactgcttagagctgtggggagggggacacccrgccctgcccccaccctcaccctttcttgctcgaatgtcaaagctagaggctttgctggtaccaggaccagcttccacccaagggctctgcctgccaggct

SEQ ID NO: 384994 - DNA, 201 bp, Homo sapiens
cactgtcttctgcctgcttttctgggggctcctgcagttattctgggctcatgggcactatgtccccaccttagggtcaacagggacagtcaacacctcayaggagggagtgtcaccatatcttcaggctcccgccatcagttgtggaacttgggggccatttgtagaggctccctggggaggtccacctctgcaggactc

SEQ ID NO: 384995 - DNA, 201 bp, Homo sapiens
atttgacttgttattatagtttctgtcacttcgatattctcattttgttcatacatcactttcttgatttcctttagttttttgtccataatttcctttakctcattgaacatatttaaggcatttgacataatgtctttgaccaataattccgatatctgatcttcctcaggggtaccttcttcaaattattttttgttc

SEQ ID NO: 384996 - DNA, 201 bp, Homo sapiens
tatttgacttgttattatagtttctgtcacttcgatattctcattttgttcatacatcactttcttgatttcctttagttttttgtccataatttcctttrtctcattgaacatatttaaggcatttgacataatgtctttgaccaataattccgatatctgatcttcctcaggggtaccttcttcaaattattttttgtt

SEQ ID NO: 384997 - DNA, 201 bp, Homo sapiens
tcctcatgtttgggaactttggggccactatttcttcaaatacatatttagagaaacctttttctcttttttcctctggagctcctgtgagtatgttggtrtgtttcatggtatcctataaatccttcaggctcttttcatttttcttcattcttttttctttctgcttctcagactggataatttcaagtttgctcatct

SEQ ID NO: 384998 - DNA, 201 bp, Homo sapiens
tgcatgggtttgtgcttgtcactggggcctttctttcaggtggaaatggcagtgaacaagcgcactgtccgcatgccccaccagctcttcattgggggggmgttcgtggatgccgagggcgccaagacctctgagaccatcaatcccaccgatggaagtgtgagtgcaggcccagcaccccttctccacattccccagcct

SEQ ID NO: 384999 - DNA, 201 bp, Homo sapiens
tgatagaggggacatggccaaaacgaggggaggccagtctggggctgtgcagctccccggtgttggtggaggggcctggcctgtggctgttcaggagaacrctccaagagcctgctgtgggctcggcaggtagtgggccacaaccccctatgccttcatgagctgaggctgggcagttgctgcccatggcagaaacgttgt

SEQ ID NO: 385000 - DNA, 201 bp, Homo sapiens
cgcgggaccggggccggctgatgtacaggtgggagcccaacatgtacctgccagccactgccaccatcagcttctgggcagtggcacgggggggacttctstggaggcccttttacctgccaggaggagctgggtcctggggaggctatgggaccgaggccatcagatgggccaggctggggctccttgcctgaggctcag

SEQ ID NO: 385001 - DNA, 201 bp, Homo sapiens
tgggaaagaccgtgggggagctgctggctctgcccagataccactgtggtccacggctgagaatctgacggtggtccaggctgctggtgttcagtagggcyggccgagcctgctgggcacccctgcatctgccctgcagaccttcagagggagatggcagcagcttcacttctcctgcactgctaccctggcacccaggga

SEQ ID NO: 385002 - DNA, 201 bp, Homo sapiens
tccattttaattaagctgagcactcttttttattaaaggtaagggtggattttggaattatataaatgttatgccaagttaaatgaaaggattgagttatrtgcaggaattccctgtgataatgagagggatttttagagaaagatcccagaagctgttctatctgccacaaatcagacatggagaaggggacatgaacgt

SEQ ID NO: 385003 - DNA, 201 bp, Homo sapiens
aggggcctggaggagacactccagccaggaggcactgggggcctctctggtgtggtggcacctgtgctacccagacctgcatagcagggaggagttggccrtgaagacccaggggcccgtgtttctggctgagggttcagcaggtccttgggggaaccagctttggtcgtggagctgcagagaggccagagtggtgggagt

SEQ ID NO: 385004 - DNA, 201 bp, Homo sapiens
ttactgggagggaacttgtgacaagtccgtgagcaagatgcttgcagaggggggtcgtgctgggaagaaggcaagaagaggggcctggaggagacactccmgccaggaggcactgggggcctctctggtgtggtggcacctgtgctacccagacctgcatagcagggaggagttggccatgaagacccaggggcccgtgtt

SEQ ID NO: 385005 - DNA, 201 bp, Homo sapiens
aaatgttaggcaagactagaatttaacaacaggtgtgttatagtttttgaaacataatttttacttttcagtttcctatttttattaaaagaatttatgadaggactgatttgctttattatacttggcttaattatttgtatacagtgcagcaataataattatttgctacataggccttttaaatcagctttgatggaa

SEQ ID NO: 385006 - DNA, 201 bp, Homo sapiens
gagtctgggaggaggcagtgtcagggagcccactctgaagtctcgttgagatggagacctgagggacagagaggacttagccaggttggggacagggtttrtgcagggcgtggctcggagtaggggctgggggcgtgggacggggcaggaatcacggcattccctgggaggaacagcaggtggcaaggcctctgtggctgg

SEQ ID NO: 385007 - DNA, 201 bp, Homo sapiens
ttctgggaaagctgggctccctacccttcctggctaggcacccatctccaggctgagtgccctgtgtgggtgtcaggcaacctagaatcagagagaagccytcccagggagcctgggttcagggcctctctttggtctatcagaaacacctctgggtgtggggtcattaagcctctgtgcctcagctcccatctctttgaa

SEQ ID NO: 385008 - DNA, 201 bp, Homo sapiens
aagaaatacaaaagctggcttgccagttaagacatttattttagagaaaatcaacctgaaaggagccttctggccaagttaggtcagaggcacactctcttacagactgagtttttaaggattcaggatgggagagtttatcagaggcttggactgcttctgtgtctctttgttgtgcttatctgggagggagagttgtgt

SEQ ID NO: 385009 - DNA, 201 bp, Homo sapiens
tgctgacggagaggctggaccatcgggcaccgtgtctcccatgtgcaacgggcttttatctctcttgcagggttcttctttgagccaactgttttcacagrcgtggaagaccacatgttcatagccaaggaggagtccttcgggcctgtcatgatcatctctcggtttgctgatgggtagggaatcctgctgatgtctcaa

SEQ ID NO: 385010 - DNA, 201 bp, Homo sapiens
gtgcctgtcctgtggctgccagatgtcagccacagaacaggctgtgcaacgttatcaatgagtgaaggctctagagcactgggagcaggtgttgctaagcwctctgcattcccacagttattggagaagctggcactgtcagtgttcccatcccccagctgagacagagagggcaccagaaggcgcagggacagagagggc

SEQ ID NO: 385011 - DNA, 201 bp, Homo sapiens
gaaagaaatacaaaagctggcttgccagttaagacatttattttagagaaaatcaacctgaaaggagccttctggccaagttaggtcagaggcacactctcttacagactgagtttttaaggattcaggatgggagagtttatcagaggcttggactgcttctgtgtctctttgttgtgcttatctgggagggagagttgt

SEQ ID NO: 385012 - DNA, 201 bp, Homo sapiens
gcccctccctcgtggctggggccccctccctcttgagcctgggtgcacagcacctcccacctggggggctagtggaagccctcctgcctgcacaccatgtytgcatcttggacgccctctgtccagtcagaagcagcccttggctgggtgaggtgtgcccctcccagggagaataaagcttctgaagagagaccgtccaca

SEQ ID NO: 385013 - DNA, 201 bp, Homo sapiens
caacgtcctgcccttctgcagccaattcatccccatggagataatcagtgccccccggcatggctccatcatctatcacccgtcactgctccctaggcacygaggggcctcggccatcaactggtgagatggggcaaaaacacagggggccatccccatacatgtccctccatcagcctgacttgtcactttccattagcc

SEQ ID NO: 385014 - DNA, 201 bp, Homo sapiens
acagagggctccattgggcagccctgcctcagatgctctgacacccggtcacttcccattcttggcacctcccggtctcttccctcaggctcttgctcacrtgggcccagactccttggctctccttctccctctctgattcctttcccaccaccttcctctttcctgtcacagagaaacaacttcctgcttcatctcaga

SEQ ID NO: 385015 - DNA, 201 bp, Homo sapiens
cgacttcataatttgtggtaatggggaactgcatttgcactctcccctggcattttgtaaaagaaaagaaaaaaacacagagagtactgagcgcaccctgrgagtttcggattcagaatgaggtggaaaagtcagaattaggtgaaattgttaacctgggacaagttcctgggagatactggcatctcttgtactaggaaa

SEQ ID NO: 385016 - DNA, 201 bp, Homo sapiens
aggtgggaaactcgacttcataatttgtggtaatggggaactgcatttgcactctcccctggcattttgtaaaagaaaagaaaaaaacacagagagtactragcgcaccctgggagtttcggattcagaatgaggtggaaaagtcagaattaggtgaaattgttaacctgggacaagttcctgggagatactggcatctct

SEQ ID NO: 385017 - DNA, 201 bp, Homo sapiens
tacatatcaaacatcttgacacccaacattccatgccagtttggaaggtttcaaaaagaaatcccctaattctacaatccatttccagctcacctgctgtygcattgaatattctgacattagggatccattgggtcatgtgtacatgtttcatctggtctctcttacagtggcagtctcccctcagtggcctgccaccca

SEQ ID NO: 385018 - DNA, 201 bp, Homo sapiens
cttgaatcctgctccagtgccaacaggctgctgggcttttctggaataaattggagatcccctccccacctgatcatggggtggcattagggtcctggagragggctatagagaagcccagcctggtcccaggtcccacacagagcttctctgacccagcacccatgattgggaaggtctccatgttctgaactgggggtc

SEQ ID NO: 385019 - DNA, 201 bp, Homo sapiens
gcaaaggtggcttaacatttaaaaatcaatcattatgatccaccacaataaaataaaaatctcatgacctataggaagaacatttggtaaaagtcaactcyttgtcatgattggcagccagaaatatattaataagacaactttcataatatgctagtctatctaccaaaattccccaaagctaaccaatggtcaaatatt

SEQ ID NO: 385020 - DNA, 201 bp, Homo sapiens
acaaacagccctctcccagggccctgtcttcccttcctgtgtaaaccctcccagggttgtcctttggccatgcttctcctccacacctgctcatgtggacrggggccgcctcactggggccccaggaggaggccagggaagcaggcaggggtatctgtgtgcaactggcttagggagaacttgtcatggctctgcttccac

SEQ ID NO: 385021 - DNA, 201 bp, Homo sapiens
gaggggatcctacctgactcattctgtgaagccagcatctgcctaataccaaaatctggcagagacataacaaaaaaagaaaacttcaggccaatatcccygatgaacatagacacaaaaatcctcaacaaaatactagcaaaccaaatccagcagcacatcaaaaagttaatatactgtgcttaagtgggctttattctt

SEQ ID NO: 385022 - DNA, 201 bp, Homo sapiens
aagggagctggaatttaaagtggcggtgtttgtctgagatgacagtactcctgctctatcattccagaccctatggttataaaaggacaagaggggacatsttctttctagctacttcctgctgatgcgggggtggagagttttttggtcttagattgactgtaggatcaacaccatttgtagatgtttttgggtagttgc

SEQ ID NO: 385023 - DNA, 201 bp, Homo sapiens
caacttatgtaacatttttaaatttaatttttaaaatgaaagatttttttttcactgtgaagggcagtaacattaaattttcccagtgggtatgagtgaaygatttacttagtacattgatatacttaactattagcatttttgggaagctggatttgatacaaatttattttgaaaaacatggtttatgaaattttataa

SEQ ID NO: 385024 - DNA, 201 bp, Homo sapiens
gtctgcagcaagtgggtgaatgcctctgcaggataatttcggaggaataggataaagtagtggatccacaaatacttcaggaaggaagcgagggaagatcsaggaaaggagagagggacagagggtgtcatcctcacagctatccggtggagtaaacggtgctggcccattgcatggatcagaaacggaggtctgcacatc

SEQ ID NO: 385025 - DNA, 201 bp, Homo sapiens
tgtatttcatgttaggaaaagcgctaaaatgaagacacaagccaaagtggagagcacatggaagtggaaactaatacaaccactctggaaaactggcagcrtctgttaaagctggaaattttcacacctatgacccaggaattccaccctaagtacacacctgacagagatgtgtacatgtgtaccatgaagaccatgtgc

SEQ ID NO: 385026 - DNA, 201 bp, Homo sapiens
  misc_feature (1)...(201): n = A,T,C or G
gaagatccaggaaaggagagagggacagagggtgtcatcctcacagctatccggtggagtaaacggtgctggcccattgcatggatcagaaacggaggtcngcacatctaagagtggcagaactggggtagagggcaggaccccagctccttgaagaagggccttgtgaggacagatgaggccgtgccaggcctgagccca

SEQ ID NO: 385027 - DNA, 201 bp, Homo sapiens
agccaagcatttcttggggacaccaagaaaccttgcttggtgtcccctgcccaggctccatgctcccgagagagagaaggaactccaccctcaccgtccaygcagctccccaggagcgtcagagggcagaggagggggctcagggccgcacagcaggagaatggccccaagggagggagggacgggcctaagaaccatggg

SEQ ID NO: 385028 - DNA, 201 bp, Homo sapiens
ccttggaagtttgagagaatttttctttagaacatttcaggcttaaagcatttagggaggtcatacatgaatcactttttaagtttttgttgtgtttagtkgtctagtttatggaaaagtctcttcttgtgcagatttcaaatgtattagcatgaagttgtatataataatctcataatttttatctcctttttggatttt

SEQ ID NO: 385029 - DNA, 201 bp, Homo sapiens
gcagggtggagcagcacattcagggccaggctgaccgtgggcaggccagatgctgaagatggggagacttgggggtcacaggctctagtgaggcatcaggkgtggcgggactgtgtgtggtggactttgtgcaaaccttgagggcagtcttgtcccccacacagtctcagactctccagacccctgacccccagccgactg

SEQ ID NO: 385030 - DNA, 201 bp, Homo sapiens
ttctggcactaggattggatggacttgggatcaggtctcagctctgtcacctgccaaccggcggccccatttccctcaacagcactccgttaaaagcacgstgagacccacatcaaagaacaagccaggtgggagagccatctgcagcgtggtgacacccatcacacgggtgccgtgacccggtgcttatgtcgggtcatc

SEQ ID NO: 385031 - DNA, 201 bp, Homo sapiens
aagtggtgcaagactgtggagtaaacacaggccacataaaccactatgcatgtacatgagtcacattttcagaattgtaatcagtgttaaaacatcatttrtgtatgtatgaaaaatattgaacattttattaaataactttttaacatggtttgaaattttctatttctctaaaaactagagtgagaaaattcccagtct

SEQ ID NO: 385032 - DNA, 201 bp, Homo sapiens
ttgcccctgcccgaggacaggctggcagggacggccacaggcagaggtgctgtccaggcatgcagcaggagggaaggaggccctggggagcccttgctgtktgggcgcagcaggaagagcagctgcagtgtccactgtcccctcgtcctcctcagctcctggccactgccttttatttttcggttgtgttaaacttgtctt

SEQ ID NO: 385033 - DNA, 201 bp, Homo sapiens
tgtcacctgccaaccggcggccccatttccctcaacagcactccgttaaaagcacggtgagacccacatcaaagaacaagccaggtgggagagccatctgyagcgtggtgacacccatcacacgggtgccgtgacccggtgcttatgtcgggtcatccgcaggtggctggtgtggcccaggccctgctgacggagaggctg

SEQ ID NO: 385034 - DNA, 201 bp, Homo sapiens
aagaaggcaactaagtgtcttaagaggaagctggggttatcagctctctcacaagagctttgtccactgtccagaggtggtcagggtgggaggggagtgargagagaccagctgagcacacacaccctgctccccacagatcaacccagaagaccctgggttgaagcatctctcagccacgccctgtggagtctggctggg

SEQ ID NO: 385035 - DNA, 201 bp, Homo sapiens
gccaagagtctgcttttagctttcctgtcttagtgcccctgaaggaaagggaatgtgcttgttccttattattaaggcccactgttttactggggcccatygtatgagggtgaagtttggcagttacccaagatactttccccccacctccctttgtgtcccagctgtcttatccgtgttttactgtctgctctttctggc

SEQ ID NO: 385036 - DNA, 201 bp, Homo sapiens
catttccctcaacagcactccgttaaaagcacggtgagacccacatcaaagaacaagccaggtgggagagccatctgcagcgtggtgacacccatcacacrggtgccgtgacccggtgcttatgtcgggtcatccgcaggtggctggtgtggcccaggccctgctgacggagaggctggaccatcgggcaccgtgtctccc

SEQ ID NO: 385037 - DNA, 201 bp, Homo sapiens
  misc_feature (1)...(201): n = A,T,C or G
cctcaacagcactccgttaaaagcacggtgagacccacatcaaagaacaagccaggtgggagagccatctgcagcgtggtgacacccatcacacgggtgcngtgacccggtgcttatgtcgggtcatccgcaggtggctggtgtggcccaggccctgctgacggagaggctggaccatcgggcaccgtgtctcccatgtgc

SEQ ID NO: 385038 - DNA, 201 bp, Homo sapiens
tggacggtgggggaagatcagtgcgcgggaccggggccggctgatgtacaggtgggagcccaacatgtacctgccagccactgccaccatcagcttctggrcagtggcacgggggggacttctgtggaggcccttttacctgccaggaggagctgggtcctggggaggctatgggaccgaggccatcagatgggccaggct

SEQ ID NO: 385039 - DNA, 201 bp, Homo sapiens
gtggtgttgatgctcgccctgaggatgggaagggcagatccatgacatttttccaagaaagaaagaggagagccgggggtgcttgtgccaggggttggggraactggttctgattgggcctggaccagcatctcatgcctcacccccaacctgggcccatgattgacaatggcctggagttcatccagagagtggggacct

SEQ ID NO: 385040 - DNA, 201 bp, Homo sapiens
catcttgactgctggacagccttactgggtgccttagtgggagctgagcacccacatccacagggccagctggctgggcactgctgccctccataggtccsagactgaatccttcagaggacacagaccagttagcatcttggtgaggtcaagacccaggtctcctgaacccatctgtgagcctcatagtcaccttcaggc

SEQ ID NO: 385041 - DNA, 201 bp, Homo sapiens
aaatatgccaagaagaagaatgccagacacctgagagaatggtgtccagaggccaggccatgccttgtgtacagctaccgagctgaggatgcaaagaaagmaaaactgcttttctgtaaatagttaagagtatatgtccttttaaaaaaaatgtggcaaaaaaacacataatacaacatctaccttcttaaaattatagct

SEQ ID NO: 385042 - DNA, 201 bp, Homo sapiens
agcaaaactgcttttctgtaaatagttaagagtatatgtccttttaaaaaaaatgtggcaaaaaaacacataatacaacatctaccttcttaaaattatarctgtatattgtaggattgttaactatgagcacagtgttggtcagcagatctttagaactttttctcgcacaactaaacctttctgtccgttgaacagcca

SEQ ID NO: 385043 - DNA, 201 bp, Homo sapiens
  misc_feature (1)...(201): n = A,T,C or G
ggaaaggagagagggacagagggtgtcatcctcacagctatccggtggagtaaacggtgctggcccattgcatggatcagaaacggaggtctgcacatctnagagtggcagaactggggtagagggcaggaccccagctccttgaagaagggccttgtgaggacagatgaggccgtgccaggcctgagcccacctcccgct

SEQ ID NO: 385044 - DNA, 201 bp, Homo sapiens
  misc_feature (1)...(201): n = A,T,C or G
gcccattgcatggatcagaaacggaggtctgcacatctaagagtggcagaactggggtagagggcaggaccccagctccttgaagaagggccttgtgaggncagatgaggccgtgccaggcctgagcccacctcccgcttcccctcaccctggccaggttggcagatctcatggagcagcaccaggaggagctggccacca

SEQ ID NO: 385045 - DNA, 201 bp, Homo sapiens
  misc_feature (1)...(201): n = A,T,C or G
ggggtagagggcaggaccccagctccttgaagaagggccttgtgaggacagatgaggccgtgccaggcctgagcccacctcccgcttcccctcaccctggncaggttggcagatctcatggagcagcaccaggaggagctggccaccattgaggccctggatgcgggtgccgtctacacgctggccctgaagacccacgtg

SEQ ID NO: 385046 - DNA, 201 bp, Homo sapiens
ccttttcttttgaggttttaagataacttggggttcctggcctgtcagaaagtgacattctttacttaccacacatcagaaaccctgtacagggactgtgmacacaaaatatgaggccagttttccaagggtttcattggcttcttaagtttgattccttagaggagagcacaccattccagtcaaagccttgggaaaata

SEQ ID NO: 385047 - DNA, 201 bp, Homo sapiens
  misc_feature (1)...(201): n = A,T,C or G
ctcaacagcactccgttaaaagcacggtgagacccacatcaaagaacaagccaggtgggagagccatctgcagcgtggtgacacccatcacacgggtgccntgacccggtgcttatgtcgggtcatccgcaggtggctggtgtggcccaggccctgctgacggagaggctggaccatcgggcaccgtgtctcccatgtgca

SEQ ID NO: 385048 - DNA, 201 bp, Homo sapiens
ccgggatagcctggggatgtcagtacagtggggccagcttgccagaggatgttgctgtctgatgctcaggacatgggccaaactctgagtcccaaggcagktgatcaagatattaagaagagacttttagttcccactaaggaaacaaataatcctatacattcaacttgtgtgtatggaagtgtgacaagtaattgaaaa

SEQ ID NO: 385049 - DNA, 201 bp, Homo sapiens
gtatccaggagttgatttctgtaacggatataatttaaactgtaaaagataataaaaattgaaaaatgttaggcaagactagaatttaacaacaggtgtgytatagtttttgaaacataatttttacttttcagtttcctatttttattaaaagaatttatgataggactgatttgctttattatacttggcttaattatt

SEQ ID NO: 385050 - DNA, 201 bp, Homo sapiens
tttcttatttatttttttacatgaataggactttttttggactgttaggggttgctttctcagctctttaggctttgacttgaatatgatgtatccaggarttgatttctgtaacggatataatttaaactgtaaaagataataaaaattgaaaaatgttaggcaagactagaatttaacaacaggtgtgttatagttttt

SEQ ID NO: 385051 - DNA, 201 bp, Homo sapiens
tcccaaataaaggaagtgaggccagtgttcaggaggctcagtaggctgcttgttctttgtatccaagatacaaagccatttgatcggggtgcggtttgggkcggcaggacaggagcagagaataaggaacaaaagcaaccgggtttggctacagggtggagacaggacagtcagaggcacacagtgggccctggtgagaag

SEQ ID NO: 385052 - DNA, 201 bp, Homo sapiens
caaataaaggaagtgaggccagtgttcaggaggctcagtaggctgcttgttctttgtatccaagatacaaagccatttgatcggggtgcggtttggggcgrcaggacaggagcagagaataaggaacaaaagcaaccgggtttggctacagggtggagacaggacagtcagaggcacacagtgggccctggtgagaagagc

SEQ ID NO: 385053 - DNA, 201 bp, Homo sapiens
acctcagcctcccaacgtgctggggttgcagtcatgagcgactgggactggttcatgtcaatatttcttacaagcatagatttaaaaacaaataaaatacyagctcttcaaattcagagatatatagaaaggttatacatcgtggtcaagtggtattcattccaagaatgcaaaggtggcttaacatttaaaaatcaatca

SEQ ID NO: 385054 - DNA, 201 bp, Homo sapiens
taaccctagtgctttctattttggaaggctactggctccagttctttaatcagtataggcctattcagattatctatttctctttgtgtgagttttggaaygttgtactttcaagggattgtttcatttcatttaacttaccaaatttgttgatatagagttgttcatactagtattttattatccttttaatgaccgtag

SEQ ID NO: 385055 - DNA, 201 bp, Homo sapiens
gcagagaataaggaacaaaagcaaccgggtttggctacagggtggagacaggacagtcagaggcacacagtgggccctggtgagaagagcagaggggtgtkccgggtgctcgagtcacacctgtgtctgattagggttgattaggggtgcagagtttgcaagatgtgagatgccctggccttggaggaggagggtcagcag

SEQ ID NO: 385056 - DNA, 201 bp, Homo sapiens
atataagaaagtaatcaatttttgtatattaaccatgactttacatccagcaactttggcagaataacttattatttccagttttctgttgctttgttggyattttccacatagccaattatgttttttgagaacaagaacagtttatttcttccttcccaatctgtagacttttcattttcttttcttttctaattacat

SEQ ID NO: 385057 - DNA, 201 bp, Homo sapiens
acagggtggagacaggacagtcagaggcacacagtgggccctggtgagaagagcagaggggtgttccgggtgctcgagtcacacctgtgtctgattagggytgattaggggtgcagagtttgcaagatgtgagatgccctggccttggaggaggagggtcagcagactagagccttgggcccctccccttcacttaatttc

SEQ ID NO: 385058 - DNA, 201 bp, Homo sapiens
tctgtgaccctcatttaaattattggcctgattctgtcaaatctgagaattgtcccactctgggcctcctctgcctccctgacccttgtgcgggctccctrcatcttgcctcgctcagcgtcacagcagcctcccaagtggccttgtgagcctgctgatcctttattcacacagctgccagggtctggtgacctctcctct

SEQ ID NO: 385059 - DNA, 201 bp, Homo sapiens
agccaaggtgagtgctgggtccctccacaccctcatcctgcctgtgagcagactggggttgtagagggcagcctgaggaggctggggttcagcccagatgstgcaggttgtaattctttgaggccagaacacagggcagcccaggtcagggatgcatgaagagagccgtggaggaggaggaccctggcacctgggagggta

SEQ ID NO: 385060 - DNA, 201 bp, Homo sapiens
tgcagctgcctcgtggggagccccttcccctcatgtcttcagccgcaccctggcccaacagccactcgagctccctagtgagccaagcatttcttggggayaccaagaaaccttgcttggtgtcccctgcccaggctccatgctcccgagagagagaaggaactccaccctcaccgtccatgcagctccccaggagcgtca

SEQ ID NO: 385061 - DNA, 201 bp, Homo sapiens
ctctctcctgggcttgcagacggctctccaccctctatgtcctcgcatggtcattgcccaaatctcctcttcttagaaggacaccagtcagattggattarggtccatctcaatgacctcattttgccttaatcacctatgtaaaggccacatctccaaacacagtcccattcagaggtacaggggatgagggtttcagca

SEQ ID NO: 385062 - DNA, 201 bp, Homo sapiens
ctcagagtggactcttgggtgaagcctggaaagagaagagaccaggggaggactggacagaatggagcaagagcctggtctcaggtcagcctgggcctgamcatggacaggggccctggagcacgaatccccctacacaggcatacccctggagccaagtggccaggctgtgggcccctgtggcaggtaggcttggctgtg

SEQ ID NO: 385063 - DNA, 201 bp, Homo sapiens
ccaggatacagacccagggactactggagataaagtggcggtcatggggggagtgtgactgcggggacacagagctgtgcacacaaggtcctgtctggggrtcttaacggagtcatgagacttccacagaagggtgactgcaagggccagagtcccagggataattctcaggacagtcacaatcccaaataaaggaagtga

SEQ ID NO: 385064 - DNA, 201 bp, Homo sapiens
tggggattttctgcccttggaagtttgagagaatttttctttagaacatttcaggcttaaagcatttagggaggtcatacatgaatcactttttaagtttytgttgtgtttagttgtctagtttatggaaaagtctcttcttgtgcagatttcaaatgtattagcatgaagttgtatataataatctcataatttttatct

SEQ ID NO: 385065 - DNA, 201 bp, Homo sapiens
acaaagccatttgatcggggtgcggtttggggcggcaggacaggagcagagaataaggaacaaaagcaaccgggtttggctacagggtggagacaggacastcagaggcacacagtgggccctggtgagaagagcagaggggtgttccgggtgctcgagtcacacctgtgtctgattagggttgattaggggtgcagagtt

SEQ ID NO: 385066 - DNA, 201 bp, Homo sapiens
gcaggggagagtagctcccgtcaggctctgcagccaccttgcatggcctcggggatctggtgggcacaggacagtgtctcccaccagatttatccactcarccacacctggaagagcaggcttgatgctggcctcgggacagatgggccatcctgagtccccttgggaggtttgtaatgcctggcttctcagttcctcagc

SEQ ID NO: 385067 - DNA, 201 bp, Homo sapiens
tggctgccgggaacacagtggtgatcaagcctgctcaggtgagcgtgggttcactctggacagggcctgcaggccacagagaggatcaggaactcactctrtaagggaggaagggaagggcctctcttggccacacgggcactggaagaagggtcctgctaatgccagctgccctccatgggccccactctcagtgggcag

SEQ ID NO: 385068 - DNA, 201 bp, Homo sapiens
ccccttgtgggacaccttcatcactgcctcaggtccgaccacaggaactgtgaaatccttccttttggccgggcgcagtggctcatgcctgtaatcccagmactttgggaggccaaggtggatggatcatgaggtcaggagttcgagaccagcctgaccaatgtggtgaaaccccgtctctactaaaaatacaaacaaaaa

SEQ ID NO: 385069 - DNA, 201 bp, Homo sapiens
ggaagaagggtcctgctaatgccagctgccctccatgggccccactctcagtgggcagaggcgtatgtggcaggcagagctctccaaagcagactcttttwcagccatggctgcttgaggccatctggctgtgctggaacttgcagctgctcgggtgagcagaggcagggatttctgcactctggattcatggggcagaaa

SEQ ID NO: 385070 - DNA, 201 bp, Homo sapiens
gttacctctcacctctcctcttgaggtgactgaggattgagtggggcccacaggaggagatcaggacacatgggtgcctcctttcctaattagaagaggcrgctgggccctggcagagccgggggctggtgtcccaggaggagcagtgacctggtgttcttgtccattctctgaaggggatgagttctgttttcttcaaca

SEQ ID NO: 385071 - DNA, 201 bp, Homo sapiens
gctactggcttcgggggcttcttctcacccaccatcttctgatatttctccccttgacagaaactgacatttttcaactcaacgctgaacacttcaggccyggtgcccgagggagacgctttgcccatcccaggagcccatcggccaggggtggtcaccaaagcaggactcatcctctttgggaatgatgacaaaatggta

SEQ ID NO: 385072 - DNA, 201 bp, Homo sapiens
tgggttccatgccaaggtctcacaaggccaaagctaaggcgctggctggactgggccttatctggagactctgggacagaacctgcatccagacgagttckggtgttgacagagttcaattccgtgtggatgcagggctgaggccgcaggtccttcctggctgcaggtccctgctcagggcactgtatctcccagcggcag

SEQ ID NO: 385073 - DNA, 201 bp, Homo sapiens
tgggtcatgtgtacatgtttcatctggtctctcttacagtggcagtctcccctcagtggcctgccacccacagagccacagaggggactggggtagagcargccaggtgccatgaactgccctgtcttgaaccagggctggcttctctgagaccagcgatctctgtctaattgctgccttattccttctccaggtccttcc

SEQ ID NO: 385074 - DNA, 201 bp, Homo sapiens
caaggatgggacagtgcaggccgttatcatccagcccttgctgcagctggaggacagggcaccagccacaggggtctgagcagggcacccacagcatctgyccagagacctgcaaagacaggaatgcaaagaaggcaactaagtgtcttaagaggaagctggggttatcagctctctcacaagagctttgtccactgtcca

SEQ ID NO: 385075 - DNA, 201 bp, Homo sapiens
ctcacaaggccaaagctaaggcgctggctggactgggccttatctggagactctgggacagaacctgcatccagacgagttctggtgttgacagagttcarttccgtgtggatgcagggctgaggccgcaggtccttcctggctgcaggtccctgctcagggcactgtatctcccagcggcagcaggtcactctcgggctt

SEQ ID NO: 385076 - DNA, 201 bp, Homo sapiens
tccttttgtgactcctggctcagaggaataagcctaatttgtaggctgaaagccatttgagagatgtggcatctttctcatgaacaagtgtgacttgaccraggccatagaactggttagttacagaaatatgctcaaatacatatcaaacatcttgacacccaacattccatgccagtttggaaggtttcaaaaagaaat

SEQ ID NO: 385077 - DNA, 201 bp, Homo sapiens
ctgaaggggcttcccactgtccagacaaggcggtgggagctggggaagattcttaaatggctgcctcagattggctttgtattctggggagtcctggcccrctatccactgccagggataacctgggtaagattcatgacctcgctgggcctcgacttctcacctggaagtggggtgagccagagctgcccccacgtggtt

SEQ ID NO: 385078 - DNA, 201 bp, Homo sapiens
tcccaggccctccaccctcatgccccactgagcacttgcacctgtgtcccacctccagccctcaccagctgtcctccagctctcatctgtgatgcatccgycagacctctgctcccagcctgccctctctaatctataatctcattttattctctgtgtgagcattcagactgatgctgccctgtgcccatgcctgtcatc

SEQ ID NO: 385079 - DNA, 201 bp, Homo sapiens; identical to SEQ ID NO: 84324

SEQ ID NO: 385080 - DNA, 201 bp, Homo sapiens
cagctggtactgctgagaggcagggtggcaggctatgggccggagcccacagctgcaggaggggcccggggatcatatgtgagggctgcttgcccctgccsgaggacaggctggcagggacggccacaggcagaggtgctgtccaggcatgcagcaggagggaaggaggccctggggagcccttgctgtttgggcgcagca

SEQ ID NO: 385081 - DNA, 201 bp, Homo sapiens
aggcagacctgccatcagctccctgaggccactgaggctcctccaggtcttgtttgtgccccaggagaaagggcctcaggggtcacatgggctttgagccrgctcccaggtctcagctacccctggcccctctccctctcccagccctgctcagacctgcctgggctactggcttcgggggcttcttctcacccaccatct

SEQ ID NO: 385082 - DNA, 201 bp, Homo sapiens
tcctatttggtttcctctgagctgcttggatcttggtttggtatctgtctttaattttggaaaattatcagtcattatcacttcaaacatttttactattyctttctttctttttattccatctgatatccctattacaaggatttacacctatggcaattgtcccaccattcttggatattctgttttgtcttttttatt

SEQ ID NO: 385083 - DNA, 201 bp, Homo sapiens
cctatagaattggccaagtccttgcagaagacagagagcacactcaaaatgagtcatttgagaggagttaatgaaagactcatctgcaaagggagagggarggggtagggacacagacaggacagtgcggtgcccttgggacggagcatcaggaggggctgaggatggggccttggcagaaggggcatggctgtcttgtgg

SEQ ID NO: 385084 - DNA, 201 bp, Homo sapiens
ccaatcaccagctggggtgatggagtgctctgataggctgtctccgtcacatgcttcctgctgggaaggccgtgacctgtggtcacatggcctgagcggcrgggcggctcagtcacctgggcagctggtactgctgagaggcagggtggcaggctatgggccggagcccacagctgcaggaggggcccggggatcatatgt

SEQ ID NO: 385085 - DNA, 201 bp, Homo sapiens
tctttgggtttttgtagaaactccttaaataggctctggcttgcagttctcttatccgtaatccccttgttactatactggagccctgtggatgtagtagyaaggtgttttggtggggggaagtgttttacagtcctacaattaggtcttagtgtttcagtgagcctgcacccctgggctgtgaccttcacaagtgtttct

SEQ ID NO: 385086 - DNA, 201 bp, Homo sapiens
tgtgagcattcagactgatgctgccctgtgcccatgcctgtcatcatcccagcacacctgcagtgtcccataaatactgcagaatgactgagtgatcagasctagagagccccagccccgggtccaccctcactgtgcctgcacgcggtgccagaggagggcctggccagggtaaggggctgcccatctcctcccctggcc

SEQ ID NO: 385087 - DNA, 201 bp, Homo sapiens
cacaaatcaggggagattctgattggccagcttgggggtcatgtgatcctcatgagccaatcaccagctggggtgatggagtgctctgataggctgtctcmgtcacatgcttcctgctgggaaggccgtgacctgtggtcacatggcctgagcggcagggcggctcagtcacctgggcagctggtactgctgagaggcagg

SEQ ID NO: 385088 - DNA, 201 bp, Homo sapiens
gccttctggccaagttaggtcagaggcacactctcttacagactgagtttttaaggattcaggatgggagagtttatcagaggcttggactgcttctgtgwctctttgttgtgcttatctgggagggagagttgtgtgcctgttttcatacatttttcctgcagctgcaggtatagtccctgagtctgtttttacttattt

SEQ ID NO: 385089 - DNA, 201 bp, Homo sapiens
  misc_feature (1)...(201): n = A,T,C or G
gaagacccacgtgggcatgtccatccagaccttccgctactttgctggctggtgtgacaagatccaggtggggcccaggctcccacccagtgtgagcacangcagactggcccagccatataggggaactccaagggcagcacagtcatctgcatgctgcgcagcaaatgaccacaactggtggcttggaacaacacctgt

SEQ ID NO: 385090 - DNA, 201 bp, Homo sapiens
tggcatctttctcatgaacaagtgtgacttgaccaaggccatagaactggttagttacagaaatatgctcaaatacatatcaaacatcttgacacccaacrttccatgccagtttggaaggtttcaaaaagaaatcccctaattctacaatccatttccagctcacctgctgtcgcattgaatattctgacattagggatc

SEQ ID NO: 385091 - DNA, 201 bp, Homo sapiens
tatctctcttgcagggttcttctttgagccaactgttttcacagacgtggaagaccacatgttcatagccaaggaggagtccttcgggcctgtcatgatcrtctctcggtttgctgatgggtagggaatcctgctgatgtctcaagggccctgactctctcccacgtgttactggggtcttcatgtgggctttgggaggta

SEQ ID NO: 385092 - DNA, 201 bp, Homo sapiens
cctcaacacggagtggctggaaatgaagccctgccctcagctcatgtttctgtgggcagcagtggcagtctaggctggggtttgttggggctcatctgggwttgtcagagcttgcccaaacatctgcagtgagactcaggggcagcggggcagcgggcggcttcgtgggacagctgtcgttgccctgggggcctgcattct

SEQ ID NO: 385093 - DNA, 201 bp, Homo sapiens
ttgttcattggtctatatatctgtgtttatgccagtatcatactattttgattattgtagttttgtagtaaattttgaaatcaggaaatgtgagtcctctractttgttctttttcaggattgtttgaactattcacagtcccttgatagtccatatgattttaagatgatttttgtaatttctgcaaaaaatcacttggg

SEQ ID NO: 385094 - DNA, 201 bp, Homo sapiens
gggacaccaagaaaccttgcttggtgtcccctgcccaggctccatgctcccgagagagagaaggaactccaccctcaccgtccatgcagctccccaggagygtcagagggcagaggagggggctcagggccgcacagcaggagaatggccccaagggagggagggacgggcctaagaaccatggggtggttgtctcactgg

SEQ ID NO: 385095 - DNA, 201 bp, Homo sapiens
gcaaggtgtgagggacagtgcgggtctctggagcaatagccagtggaggagcctcagaagcctgtaggctgtgtctcagctcaggagtatgggttgctgtstggggacccacaggggccctgccagtgaaaggttgggccctatgggacgggcctgagtacattgtgctggggcctctgtgtagggtctgggccatcttga

SEQ ID NO: 385096 - DNA, 201 bp, Homo sapiens
agtatgggttgctgtgtggggacccacaggggccctgccagtgaaaggttgggccctatgggacgggcctgagtacattgtgctggggcctctgtgtaggrtctgggccatcttgacagcaacagaacattatcttccccaaaccattctgaagtctgctcagcccatgagagactgagggtcagagagcacccagaacta

SEQ ID NO: 385097 - DNA, 201 bp, Homo sapiens
tttttatattgatttcaagttgaaatgataatattcttgattagttgggttaaataaaatataataaaatatactattaggattaatttcacctgcttctyttcaggttttttttttttttcaatggagtctcacagtgtcacccaggctggagtgcagtgtcgtgatcatggctgcagcctctgcctccctggctcatgc

SEQ ID NO: 385098 - DNA, 201 bp, Homo sapiens
cttttattattcccttgtgtgttctcctgagtggttcttctatttttttttttttttttttgcagctttttgggttgaaagtttagttcagtttttttctrgttcaaataaggaaagcatttgaaaaagttttggtgatggccaggcgcagtggctcacacctgtaatcccagcactttgggaggccgaggtgagtggatc

SEQ ID NO: 385099 - DNA, 201 bp, Homo sapiens
ccagaccttccgctactttgctggctggtgtgacaagatccaggtggggcccaggctcccacccagtgtgagcacacgcagactggcccagccatataggrgaactccaagggcagcacagtcatctgcatgctgcgcagcaaatgaccacaactggtggcttggaacaacacctgtttattagcttgtggtcctgcaggt

SEQ ID NO: 385100 - DNA, 201 bp, Homo sapiens
gcccccactggcctctgggggtcctgaccctgagagtctctgcttggacatgtgcctttgagagggacgggaaagaatgccaggtcgtttccagcccaccytactggagtggagtggagaggaggtgcagggtggtggcaggtggcaggagggctcggaagggtcttgcacctgcttcagagactgggaacagagttcctc

SEQ ID NO: 385101 - DNA, 201 bp, Homo sapiens
ccgactctttgtggaggactccattcatgatgagttcgtgcggagagtggtaagtcctgccccagggtctgcgggcggctggttcactgggacagcagcgcctggctggagggggttggaggaggggagacagggcagggtcaagtgaggctgggctcctcctggaggacactccccccgggggtcagggaacccacagcg

SEQ ID NO: 385102 - DNA, 201 bp, Homo sapiens
gccgactctttgtggaggactccattcatgatgagttcgtgcggagagtggtaagtcctgccccagggtctgcgggcggctggttcactgggacagcagcgcctggctggagggggttggaggaggggagacagggcagggtcaagtgaggctgggctcctcctggaggacactccccccgggggtcagggaacccacagc

SEQ ID NO: 385103 - DNA, 201 bp, Homo sapiens
acaaaacaaaacaaaacaaaacaaacaaacaaaactaaaaaacgaaatcatgctatgaacctcaaatatacacagtaaaatttattaaaaaaaaaaaaaaagaagagcaaagcagagctctgagcagcttcctgccccagcatccctggttctgctgctttcttcttcccaggcagccgtgtcacacagacctgcagctga

SEQ ID NO: 385104 - DNA, 201 bp, Homo sapiens
gttcagtttcaaatatgttgaatttgagaagccagaagacatccaagtgcagatgccaagcaggcagaggagtgaccaatggatctgaatcccagaggagyttggctggagaggccgatttggttggggggtgacatacctgaagatggcccttggaagcctgtgagatcagctgagcacgcaatgtaagctgaggagaga

SEQ ID NO: 385105 - DNA, 201 bp, Homo sapiens
tattccaaacctgccaaactggaaccttcatgggcgtgcctgggcatgtgaattttacaagcctggaggcaggggagtggtggaagatggagggactggayaggtgcaggagctctggactgagcgagtcatgggatggaaaagggaggtgtcaagaatgactcttgggttcttggattgaaccaaatggctgccaggaga

SEQ ID NO: 385106 - DNA, 201 bp, Homo sapiens
taactatgagcacagtgttggtcagcagatctttagaactttttctcgcacaactaaacctttctgtccgttgaacagccactccccatttccttctcccyagccccagcaacagccattctttttgctctgatgagcttggccactctagtacttcatacaagtggaatcatgcagcatttgtccttctgtgactggctt

SEQ ID NO: 385107 - DNA, 201 bp, Homo sapiens
ttctatgaatctcctgtcttttttccctctgtttctcctgctgtactactttcttttgcattaagcaaatatttcctagcataacattttaatgctttcartaattattttcagtatacatttttagttattttcttagtggttactctaggacttatcatatacttatcaaaatcaacttcagatttatacgaacttaat

SEQ ID NO: 385108 - DNA, 201 bp, Homo sapiens
tttttatagtttcccccttgcttttattattcccttgtgtgttctcctgagtggttcttctatttttttttttttttttttgcagctttttgggttgaaartttagttcagtttttttctggttcaaataaggaaagcatttgaaaaagttttggtgatggccaggcgcagtggctcacacctgtaatcccagcactttgg

SEQ ID NO: 385109 - DNA, 201 bp, Homo sapiens
ccttaccttttccatggctatttttatagtttcccccttgcttttattattcccttgtgtgttctcctgagtggttcttctatttttttttttttttttttgcagctttttgggttgaaagtttagttcagtttttttctggttcaaataaggaaagcatttgaaaaagttttggtgatggccaggcgcagtggctcacac

SEQ ID NO: 385110 - DNA, 201 bp, Homo sapiens; identical to SEQ ID NO: 84327

SEQ ID NO: 385111 - DNA, 201 bp, Homo sapiens
agcagctgggcagggaggattcacctgggcctgggtcctgcagccctgctcctttgaccccgtgccagggccagctctgcacactccagtcccggggctcrgcctttcccctaaccagtgagtgtgggcgtcagttcgggctgctgtagaagagaccaccaatccagggcctaatcaatggaaactcgtctcctggttctg

SEQ ID NO: 385112 - DNA, 201 bp, Homo sapiens
ccatctttccatctccttcctccaggctggtggaggaagtgaaggagctgtgtgatggcctggagttagaaaatgaagatgtgtacatggcatccaccttyggggacttcatccagctgttagtgaggaagctgcgaggggacgatgaggagggcgagtgcagcattgactacgtgagtgctgggccctccctgcagcagg

SEQ ID NO: 385113 - DNA, 201 bp, Homo sapiens
atcagaaatggtccagtatcccatgccatcctgccctgctaggaagaggggctgctgccagaccaattcttactgtagcatccaggacagaaacagcaggygtgagctgcctctcagagggaccttgggtgccttatcaggaagcctggctttgagagtggatgtcaggccctgggtgaggtggagggaattggcaggtcc

SEQ ID NO: 385114 - DNA, 201 bp, Homo sapiens
cacctggtgggccgtgattctggaactaatggtctctgcctggcagggaggccgccaggacctctgggcttcacccctccccaccttcacaggggacctcrcctcagtgggaatgttctggagccggaacccaaggttggaatcccagctcctcccctttctagggcaagctcccagcctgtctgtactcagtctccccaa

SEQ ID NO: 385115 - DNA, 201 bp, Homo sapiens
aggagttcggaccccgctggatgccaagcatgtaggcgccgggaaatgaacctggcatgaggcacctcacctcgccacccagtggccccagggcaggagtrgggagaagggcttggaacacagccaccgggctctgggttttccctgctagaggaaactgggcagtgacctctcgaggccatacatcctgatttggcccca

SEQ ID NO: 385116 - DNA, 201 bp, Homo sapiens
agaacaaaggaggaacaggcagaggacgagagccgctcagcaggaggagttcggaccccgctggatgccaagcatgtaggcgccgggaaatgaacctggcrtgaggcacctcacctcgccacccagtggccccagggcaggagtggggagaagggcttggaacacagccaccgggctctgggttttccctgctagaggaaa

SEQ ID NO: 385117 - DNA, 201 bp, Homo sapiens
atgggtatggtggtcagtgttcataaagatgaggaactcctgcacagcactgaggaacaggaaatatagaacaaaggaggaacaggcagaggacgagagcygctcagcaggaggagttcggaccccgctggatgccaagcatgtaggcgccgggaaatgaacctggcatgaggcacctcacctcgccacccagtggcccca

SEQ ID NO: 385118 - DNA, 201 bp, Homo sapiens
acagacccagggactactggagataaagtggcggtcatggggggagtgtgactgcggggacacagagctgtgcacacaaggtcctgtctgggggtcttaasggagtcatgagacttccacagaagggtgactgcaagggccagagtcccagggataattctcaggacagtcacaatcccaaataaaggaagtgaggccagt

SEQ ID NO: 385119 - DNA, 201 bp, Homo sapiens
ccatgtgcttcttgagcacctgctccatgccaggcattgttgtaaggatttgaggacaattgtatttaatctcccagtaacactggatcagtcaggtccasggtgggaaacaagagtaaacccaaaaaatgtccaaaatgggtatggtggtcagtgttcataaagatgaggaactcctgcacagcactgaggaacaggaaa

SEQ ID NO: 385120 - DNA, 201 bp, Homo sapiens
tgagcacacacaccctgctccccacagatcaacccagaagaccctgggttgaagcatctctcagccacgccctgtggagtctggctgggctttagcttgcmgaaagctccagaacatctttgaaaggcaatggggcgagggtcaggccgagaggcaagttccagttctggcagagcatgcatacagagtaccattcttaca

SEQ ID NO: 385121 - DNA, 201 bp, Homo sapiens
gagccaactgttttcacagacgtggaagaccacatgttcatagccaaggaggagtccttcgggcctgtcatgatcatctctcggtttgctgatgggtaggraatcctgctgatgtctcaagggccctgactctctcccacgtgttactggggtcttcatgtgggctttgggaggtagtctacgggcagtcaggaggagaac

SEQ ID NO: 385122 - DNA, 201 bp, Homo sapiens
acagcctgcgggagctcacagcaccctgtgcgtgcatttatcaaacagccatccatgtgcttcttgagcacctgctccatgccaggcattgttgtaaggayttgaggacaattgtatttaatctcccagtaacactggatcagtcaggtccagggtgggaaacaagagtaaacccaaaaaatgtccaaaatgggtatggtg

SEQ ID NO: 385123 - DNA, 201 bp, Homo sapiens
cggaactgtagcacagcctgcgggagctcacagcaccctgtgcgtgcatttatcaaacagccatccatgtgcttcttgagcacctgctccatgccaggcaytgttgtaaggatttgaggacaattgtatttaatctcccagtaacactggatcagtcaggtccagggtgggaaacaagagtaaacccaaaaaatgtccaaa

SEQ ID NO: 385124 - DNA, 201 bp, Homo sapiens
ctcacccgatgatccaggagcccctgtggtggccacctgcccatgggcctctgcccttcctcctcgctcgcagcccaacccaacccaatcttgcccccggygctgcagcccggcacattttctcctcggaaggtcttatgcagctggggtgtggagtgggccggggtgtggagtgggccaggctctcctctgcacctccct

SEQ ID NO: 385125 - DNA, 201 bp, Homo sapiens
tgtgaaattcattgagctacacatctatgatttgtgcactttctgtatgtatgaagtacacattactttaataaaattttccaaaataaaatcttattttsgtaaaaggacaatttaaagaactgtattaagtgaataatagttcaggttttacagatatgcgtgaggtgaatgaatgaccaatctttggagaatgtgcat

SEQ ID NO: 385126 - DNA, 201 bp, Homo sapiens
aggtgcagcctcgcagtgctttccatgcagtacacggaactgtagcacagcctgcgggagctcacagcaccctgtgcgtgcatttatcaaacagccatccrtgtgcttcttgagcacctgctccatgccaggcattgttgtaaggatttgaggacaattgtatttaatctcccagtaacactggatcagtcaggtccaggg

SEQ ID NO: 385127 - DNA, 201 bp, Homo sapiens
agatgcagggacgtagccttgaacatgatggctgtcagggttcgcttcttactgggagggaacttgtgacaagtccgtgagcaagatgcttgcagaggggkgtcgtgctgggaagaaggcaagaagaggggcctggaggagacactccagccaggaggcactgggggcctctctggtgtggtggcacctgtgctacccaga

SEQ ID NO: 385128 - DNA, 201 bp, Homo sapiens
tggtgtgtttggtttgtgaaattcattgagctacacatctatgatttgtgcactttctgtatgtatgaagtacacattactttaataaaattttccaaaawaaaatcttattttcgtaaaaggacaatttaaagaactgtattaagtgaataatagttcaggttttacagatatgcgtgaggtgaatgaatgaccaatctt

SEQ ID NO: 385129 - DNA, 201 bp, Homo sapiens
tcctggtgtccaccaggggaatccatgaggcccatggccacccagggaaggctgtggctgccaagtccccaggacgtgatctgggccccttatgaatcctscccgagttccctcagctccctcctaaccctagtccccatgtcctgctgagaggaccagcaccctcctgggacaggcccacaagccaagccttccaagcag

SEQ ID NO: 385130 - DNA, 201 bp, Homo sapiens
ccaggggaatccatgaggcccatggccacccagggaaggctgtggctgccaagtccccaggacgtgatctgggccccttatgaatcctccccgagttcccycagctccctcctaaccctagtccccatgtcctgctgagaggaccagcaccctcctgggacaggcccacaagccaagccttccaagcagcctgcctgggca

SEQ ID NO: 385131 - DNA, 201 bp, Homo sapiens
tgctggggagctgtcaggcagccccaggcctcacacttgtcatggggctgagatgcaccagccacatagcactgccaaggcctggggcctcagggccctgygaggcatccccttttcccagccacagcttgatgcagacgtagctgggggcagccatgagagaagagatgggccagtgagtctgggcagtaacgccaagtc

SEQ ID NO: 385132 - DNA, 201 bp, Homo sapiens
ctgggggcagccatgagagaagagatgggccagtgagtctgggcagtaacgccaagtctctccacccccttccacctgaaggggcttcccactgtccagasaaggcggtgggagctggggaagattcttaaatggctgcctcagattggctttgtattctggggagtcctggcccactatccactgccagggataacctgg

SEQ ID NO: 385133 - DNA, 201 bp, Homo sapiens
tccttaccttttccatggctatttttatagtttcccccttgcttttattattcccttgtgtgttctcctgagtggttcttctatttttttttttttttttttgcagctttttgggttgaaagtttagttcagtttttttctggttcaaataaggaaagcatttgaaaaagttttggtgatggccaggcgcagtggctcaca

SEQ ID NO: 385134 - DNA, 201 bp, Homo sapiens
ttccttaccttttccatggctatttttatagtttcccccttgcttttattattcccttgtgtgttctcctgagtggttcttctatttttttttttttttttttgcagctttttgggttgaaagtttagttcagtttttttctggttcaaataaggaaagcatttgaaaaagttttggtgatggccaggcgcagtggctcac

SEQ ID NO: 385135 - DNA, 201 bp, Homo sapiens
agaggagctcctgggaaagaccgtgggggagctgctggctctgcccagataccactgtggtccacggctgagaatctgacggtggtccaggctgctggtgktcagtagggccggccgagcctgctgggcacccctgcatctgccctgcagaccttcagagggagatggcagcagcttcacttctcctgcactgctaccctg

SEQ ID NO: 385136 - DNA, 201 bp, Homo sapiens
tttccttaccttttccatggctatttttatagtttcccccttgcttttattattcccttgtgtgttctcctgagtggttcttctatttttttttttttttttttgcagctttttgggttgaaagtttagttcagtttttttctggttcaaataaggaaagcatttgaaaaagttttggtgatggccaggcgcagtggctca

SEQ ID NO: 385137 - DNA, 201 bp, Homo sapiens
ttcttttgcattaagcaaatatttcctagcataacattttaatgctttcagtaattattttcagtatacatttttagttattttcttagtggttactctargacttatcatatacttatcaaaatcaacttcagatttatacgaacttaatcccagtgaaatgtacaaatgttacttctggataggtctgttatcttctcc

SEQ ID NO: 385138 - DNA, 201 bp, Homo sapiens
gcagcagcttcacttctcctgcactgctaccctggcacccagggactgggctctggggagcatgggtgccagggtgtgaattcagcagcctaactgaattracaatagaatagtcctgcaaggcagcctctcagagcttcccgaatagtgcactcgggtgatggatactttagaaagtgtgtcctgggaactggattgatg

SEQ ID NO: 385139 - DNA, 201 bp, Homo sapiens
atttccttaccttttccatggctatttttatagtttcccccttgcttttattattcccttgtgtgttctcctgagtggttcttctatttttttttttttttttttgcagctttttgggttgaaagtttagttcagtttttttctggttcaaataaggaaagcatttgaaaaagttttggtgatggccaggcgcagtggctc

SEQ ID NO: 385140 - DNA, 201 bp, Homo sapiens
atcagtgcgcgggaccggggccggctgatgtacaggtgggagcccaacatgtacctgccagccactgccaccatcagcttctgggcagtggcacgggggggacttctgtggaggcccttttacctgccaggaggagctgggtcctggggaggctatgggaccgaggccatcagatgggccaggctggggctccttgcctga

SEQ ID NO: 385141 - DNA, 201 bp, Homo sapiens
gtatattcatttctttcctcatgtttgggaactttggggccactatttcttcaaatacatatttagagaaacctttttctcttttttcctctggagctcctgtgagtatgttggtgtgtttcatggtatcctataaatccttcaggctcttttcatttttcttcattcttttttctttctgcttctcagactggataattt

SEQ ID NO: 385142 - DNA, 201 bp, Homo sapiens
caacaagctgggtgtaatgtgccttggtgtggatctctttgatcctgcttggacttcattcattgtatgtcttagatgtgtatattcatttctttcctcaygtttgggaactttggggccactatttcttcaaatacatatttagagaaacctttttctcttttttcctctggagctcctgtgagtatgttggtgtgtttc

SEQ ID NO: 385143 - DNA, 201 bp, Homo sapiens
aggatattgaattttgtcaaattctttttctgcattaaatgagatgaccatgtgtttttctcttcattccattaatgtggtatgttacactgattgattttcataggtgaagtatccttgcattccaagaattaatcccacttggtcatggtatgtaatattcttaaaatgctgctgaaatcaatttgctagtattttgtt

SEQ ID NO: 385144 - DNA, 201 bp, Homo sapiens
acttgtatatttttgcttttgtttccagttcttttggtgtgatattcaggaaatgattgcaaagaccaatgtcatggagactttcccctatgctttcttckagttttatagttttaagtcttaagtttttcatatattttgagttgaatatttttatgtgtggggcaagataaggatccgatttaattattttgcatgtgg

SEQ ID NO: 385145 - DNA, 201 bp, Homo sapiens
gaacagggactgtagggaccaggaggccctgtctctgattccacagccacactcacacgtgtagccctggtggagtccatagcgtcatcacaagcatagcrtggcaggcagcaggcttagggaagaatgacgtgtgccctccaaacatacttcccaagaagtttcatagctgccaggatagctgagatcaactgcctataa

SEQ ID NO: 385146 - DNA, 201 bp, Homo sapiens
ggatggcagccttatcctccagtggtgggagttggggcgtggtgtctctctgtcactgcatgggcctcagcgtcttcacttcccacacagttacctctcayctctcctcttgaggtgactgaggattgagtggggcccacaggaggagatcaggacacatgggtgcctcctttcctaattagaagaggcggctgggccctg

SEQ ID NO: 385147 - DNA, 201 bp, Homo sapiens
  misc_feature (1)...(201): n = A,T,C or G
caccatccccatcaaccaggccagacccaaccgcaacctgaccttgaccaggaaggagcctgttgggtgagttcctgcccagggcgaggtgcagcctcgcngtgctttccatgcagtacacggaactgtagcacagcctgcgggagctcacagcaccctgtgcgtgcatttatcaaacagccatccatgtgcttcttgagc

SEQ ID NO: 385148 - DNA, 201 bp, Homo sapiens
  misc_feature (1)...(201): n = A,T,C or G
ccaagggctctgcctgccaggctcagagtggagcaaacaccttgcccctctggctgcccccctgcctgtctctcaagcctcaggtcacacctaagctggtngctttgacttcctcctggagaccctggtggagacttgctgcctagaggggaaggggtgtggaccctgggcccctgggtgactgcccctgttcctcttcca

SEQ ID NO: 385149 - DNA, 201 bp, Homo sapiens
gcaagagcatggtctgcaaaaccgaatggagattagggttggggcagggagggctgtgggggtcgggcatgcccagcctttcataggttccagtccccttygcaagcccctcaattctagaaaggcactggccacgccaagtggtccctagagttcctggaggtcaggaagagctgtgaaacaagcacgacaggtggcggg

SEQ ID NO: 385150 - DNA, 201 bp, Homo sapiens
tgggagaagagagggtgcggccagatgagccgagaacacaggtgtcttggggcctggctctttcgctggggtcctgggaacgtctaggggtgcgaagccargttatggcgtggtcccaacgaagctcctcacctggcaggagagaccctgccttggccttgcggtcagaatggcttctgtttctgttatactccagaggcc

SEQ ID NO: 385151 - DNA, 201 bp, Homo sapiens
ctgaagccttttggtctaatgttttgtggttccttgaattattttttcttattgggcgcatagaagctgtctggagatctacctccccttttgtaattgtrgtaaaatacacataacaaaatttaccttttcttttgttttttttttgagacagagtctcactctgttgccaggctggagtgcagtggtgtgatctcggct

SEQ ID NO: 385152 - DNA, 201 bp, Homo sapiens
tgtgcccccttctagagaaccgtgagagcctggtggtgaactatgaggacttggcagccagggagcacgtgctggcctacttcctgcctgaggcaccggcrgagctgctgcagatctttgatgaggctgccctggaggtggtactggccatgtaccccaagtacgaccgcatcaccaaccacatccatgtccgcatctccc

SEQ ID NO: 385153 - DNA, 201 bp, Homo sapiens
ggattacaggcgtgagccaccgcgcccggccaacagctgactttttgtatttgtttttattttgagttagttatcatccttgagggatccggagacttcayatagaaatccggatgctttttgaaaatccaagatctgtgggtgctggctctgtgttcctctctggtaacgctgacggagctgaggcatagctgcccttgc

SEQ ID NO: 385154 - DNA, 201 bp, Homo sapiens
gggcccggaagggaggtgagggttggggtatgctgacttgggagctgccagtctcctgatgggggctccatcataatgggtcatgaagtgggtgggccttrgttgacagccatttattgaatgcttacagtctgttgagtccagttctgtgcctgtagtctgacagcaggggagtgaggtgagtcctgttactgccttcct

SEQ ID NO: 385155 - DNA, 201 bp, Homo sapiens
cgcagaccatctatcagaactaccagcgtatccgaatccaggagagtccaggcaaagtggcggctggccggctgccccgctccaaggacgccattctcctygcagatctggtggacagctgcaagccaggagacgagatagtaagtggccggggcaggctgggagggagccaagttgcagagggaactggcagaagcagtt

SEQ ID NO: 385156 - DNA, 201 bp, Homo sapiens
tgtgtgtccctcgcagaccatctatcagaactaccagcgtatccgaatccaggagagtccaggcaaagtggcggctggccggctgccccgctccaaggacrccattctcctcgcagatctggtggacagctgcaagccaggagacgagatagtaagtggccggggcaggctgggagggagccaagttgcagagggaactgg

SEQ ID NO: 385157 - DNA, 201 bp, Homo sapiens
gtgttagcagctttctctttggggagccagcattcaaagaaggacacagtgtttttaaagcctgggtgctggggagaaagaatgcattaaaagatggtctrgctgggcgtgactcattcttcaagggagagggtggccctgagttgggcattctgggtgttgggctgttggtcagggagccagtgtctgcctgcttttgtg

SEQ ID NO: 385158 - DNA, 201 bp, Homo sapiens
gcagagcaggtgacatatcagcgcaaccgctttggggcccagcaggacactattgaggtccctgagaaggacttggtggataaggtatgggcccggaaggraggtgagggttggggtatgctgacttgggagctgccagtctcctgatgggggctccatcataatgggtcatgaagtgggtgggccttggttgacagccat

SEQ ID NO: 385159 - DNA, 201 bp, Homo sapiens
agagggtccacccgaagctcaaccagatggaccaggacaaggtggccaagatgtacagtgacctgaggaaagaatctatggtgagagcccaggcagagccrggaggtgctatgcagagaaggaagtgcagtgtgagccttctgaccaatgcagcgggggtggtggtcagtcaggccaaaaggtgccagagcagggaggcat

SEQ ID NO: 385160 - DNA, 201 bp, Homo sapiens
cactggacacttcctccttgcaggctcgtcagatcaacatccacaacctctctgcattttatgacagtgagctcttcaggatgaacaagttcagccacgayctgaaaaggaaaatgatcctgcagcagttctgaggccctatgccatccataaggattccttgggattctggtttggggtggtcagtgccctctgtgcttt

SEQ ID NO: 385161 - DNA, 201 bp, Homo sapiens
ggaggggctggccaatggcagcgctgctgagcccgccatgcccaacacgtatggcgtggagcccctgccccaggaggtcctgaagaagtacatcatctacrccaaggagagggtccacccgaagctcaaccagatggaccaggacaaggtggccaagatgtacagtgacctgaggaaagaatctatggtgagagcccaggc

SEQ ID NO: 385162 - DNA, 201 bp, Homo sapiens
aatcaatggtcggggtgggtaggccttgcttctcacacaggcattgttgcagcccagcccaggcctcatgcttagttaactctcttcccactgtgcccccytctagagaaccgtgagagcctggtggtgaactatgaggacttggcagccagggagcacgtgctggcctacttcctgcctgaggcaccggcggagctgctg

SEQ ID NO: 385163 - DNA, 201 bp, Homo sapiens
aggagggcgctacgacccctcgctgactttctctgagaacgtggacctcacagagcccatcatctcacgctttgacatcctgtgtgtggtgagggacaccrtggacccagtccaggtatagctcgcatgtgcccggtttccatgaactgtggtttggggacctcaggtgaggcttggggtcatacagtgtgcccaacacag

SEQ ID NO: 385164 - DNA, 201 bp, Homo sapiens
aaaatcaatggtcggggtgggtaggccttgcttctcacacaggcattgttgcagcccagcccaggcctcatgcttagttaactctcttcccactgtgcccscttctagagaaccgtgagagcctggtggtgaactatgaggacttggcagccagggagcacgtgctggcctacttcctgcctgaggcaccggcggagctgc

SEQ ID NO: 385165 - DNA, 201 bp, Homo sapiens
gaccgcagtagcaggtgtctcttgcctccccagacagcgatgaggaggacgaggagcgccctgcccgcaagcgccgccaggtggagcgggccacggaggayggcgaggaggacgaggagatgattgagagcatcgagaacctggaggatctcaaaggccactctgtgcgcgagtgggtgagcatggcgggcccccggctgg

SEQ ID NO: 385166 - DNA, 201 bp, Homo sapiens
agagaaggcacagagagaggaagtcacttgcccaagatcacacagcttagacacagaacccaggcagcctggttccagcatcggtactcaagacagcttarctgtaaagcatagagcaggtgctgagtctggccgtcagaaggcatcccagagggatggtgtggcaggagtggggactgtcaactgatgtgctgagtcgcc

SEQ ID NO: 385167 - DNA, 201 bp, Homo sapiens
gtctcttgcctccccagacagcgatgaggaggacgaggagcgccctgcccgcaagcgccgccaggtggagcgggccacggaggacggcgaggaggacgagsagatgattgagagcatcgagaacctggaggatctcaaaggccactctgtgcgcgagtgggtgagcatggcgggcccccggctggagatccaccaccgctt

SEQ ID NO: 385168 - DNA, 201 bp, Homo sapiens
catctgggccaccaaagcgttttttgacaagcttgaaaatggacagattttatataaaaatctggattactactttgatctttgtaataggaattgactcyttttttttttttttttttttttgagacggagttttgttcttgtttcccaggctggagtgcaatggcacggtctcggctcactgcaacctccgcctcctgg

SEQ ID NO: 385169 - DNA, 201 bp, Homo sapiens
cctccccagacagcgatgaggaggacgaggagcgccctgcccgcaagcgccgccaggtggagcgggccacggaggacggcgaggaggacgaggagatgatygagagcatcgagaacctggaggatctcaaaggccactctgtgcgcgagtgggtgagcatggcgggcccccggctggagatccaccaccgcttcaagaact

SEQ ID NO: 385170 - DNA, 201 bp, Homo sapiens
gggcattgtatccctttctagagggactgtgccttaccattcctaacaagtaggttgaggaattggtgggggatgcaactgtgccctcctcctctcacttsccactctccccctcccccgcttctactcatcccctccaggtggcaagcacaaggtacgtggtgatatcaacgtgctcttgtgcggagaccctggcacagc

SEQ ID NO: 385171 - DNA, 201 bp, Homo sapiens
ggtggctcacgcctgtaatcctagcactatgggaggccaaggcaggcggatccacttgtcaggagttggagaccagcctagctaacaatggtgaaatcccmtctctactaaaaatacaaaaattaaccgggcacaatggcgtgcatctctaatcccagctactcgggaggctaaggcacgagaatcgcttgaacttgggag

SEQ ID NO: 385172 - DNA, 201 bp, Homo sapiens
aggcttctcttgtacatttccagccccggacctggaattggacatttctccaagaagccccgtgggaagtgttacttgctttcagagggagataggagttwgagacacctctaaagctgcatgaatttgatggtgcaggcaggacatacaggatgcagcctgatgggggtgtctcccctccaccttcagggctggttttcc

SEQ ID NO: 385173 - DNA, 201 bp, Homo sapiens
cgtagaggagctgacggccagtcagagggaggcagcagagcgggccatgcggcagcgtgaccgggaggctggccggggcctgggccgcatgcgccgtgggytcctgtatggtaggtccagttgtctgcctgcccgagggactgggaagctgggaaggagtctgggaggggagtagaaggtgctggggatgaccgcagtagc

SEQ ID NO: 385174 - DNA, 201 bp, Homo sapiens
tgttcctctctggtaacgctgacggagctgaggcatagctgcccttgcaggtagggcctgtgtccccaggtttaccccgtcccctactctgtcagtttcayggccctgcctgccttccgtgggccctggacactgatctggtaaagtattaaagagatcagggtcatgcccaacacttagagattttaaagaactaacaga

SEQ ID NO: 385175 - DNA, 201 bp, Homo sapiens
aagttctgtgactcttgggaagagccaactaatgaaaagctttagagtcgggcacggcttgataccagggcctgatgcagttgcagcagctgtggaagtgrgtgtctttgagctggggatgtcgtggttccctgatgccagagcatgtgggtgacctactctgtgagtatctgttcccattcttgtcggtctccctccctt

SEQ ID NO: 385176 - DNA, 201 bp, Homo sapiens
agggactggctctggatgatgaggacgtagaggagctgacggccagtcagagggaggcagcagagcgggccatgcggcagcgtgaccgggaggctggccgrggcctgggccgcatgcgccgtgggctcctgtatggtaggtccagttgtctgcctgcccgagggactgggaagctgggaaggagtctgggaggggagtaga

SEQ ID NO: 385177 - DNA, 201 bp, Homo sapiens
gtgtaggcattcacacatttgcgctgcttgccctccagtcccacagggaagtccccctggatgcagtggttgctttacaggagggggattgagttgggcartctgccctgcatagcaagcaggaagctcttggccctggagggagacattacctcatcctgcaaggttgctcgctacaaaaattatacggggaaatgagct

SEQ ID NO: 385178 - DNA, 201 bp, Homo sapiens
ttatagaacactaaaagtcatgggtgaggctgatttccccattgacccccacttctcttcctagtccctccctttgtggccatttacaattacacagcaamcacagggtttcatgactacacgtgtttatttgtacaagcgcagcgtcccctgtgtgtgcccagtgctgtgcctgtgcgcagtgcatcccaccgagctctc

SEQ ID NO: 385179 - DNA, 201 bp, Homo sapiens
tggcgcccaggccccttgactgccttgctgctgtggctgttggctgtcctcttctcaccgctctgcagtgcagttctgcgaactgtcccagctggagccaycttgccagaaaatgcctcagaggttccacctgtggccacctacagccaaaagctgacccgtctcgtctcgggtggggcagctgcaggccagatgccagct

SEQ ID NO: 385180 - DNA, 201 bp, Homo sapiens
gactttctctgagaacgtggacctcacagagcccatcatctcacgctttgacatcctgtgtgtggtgagggacaccgtggacccagtccaggtatagctcrcatgtgcccggtttccatgaactgtggtttggggacctcaggtgaggcttggggtcatacagtgtgcccaacacaggggacaggtgctgcaggggccata

SEQ ID NO: 385181 - DNA, 201 bp, Homo sapiens
ctgatgccctcacctccagccctggccgtgaccttccaccatttgaggatgagtccgaggggctcctaggcacagaggggcccctggaggaagaagaggakggagaggagctcattggagatggcatggaaaggtaatttcattcaaggccctggactcagcagatagttttgcagagagcccattgtgtgcctggtggcc

SEQ ID NO: 385182 - DNA, 201 bp, Homo sapiens
gaacccctgacctcaggtgatccacgtgcttcagcctcccaaagtgctgggattacaggtgtgagccaccacacccggcccgttacaggtttttatgtgamcagatctttaattctgttggctatgtaggagtgagattgttggtcttgtgtttaatcttttgaggaactgccagactgttttcaaaagcagctgcactat

SEQ ID NO: 385183 - DNA, 201 bp, Homo sapiens
gaggacgtagaggagctgacggccagtcagagggaggcagcagagcgggccatgcggcagcgtgaccgggaggctggccggggcctgggccgcatgcgccrtgggctcctgtatggtaggtccagttgtctgcctgcccgagggactgggaagctgggaaggagtctgggaggggagtagaaggtgctggggatgaccgca

SEQ ID NO: 385184 - DNA, 201 bp, Homo sapiens
gtgagcacccacctttcctctgcaggggtgttagcagctttctctttggggagccagcattcaaagaaggacacagtgtttttaaagcctgggtgctgggragaaagaatgcattaaaagatggtctggctgggcgtgactcattcttcaagggagagggtggccctgagttgggcattctgggtgttgggctgttggtca

SEQ ID NO: 385185 - DNA, 201 bp, Homo sapiens
ggctggccggctgccccgctccaaggacgccattctcctcgcagatctggtggacagctgcaagccaggagacgagatagtaagtggccggggcaggctgrgagggagccaagttgcagagggaactggcagaagcagttgtggctgggccggtggcggtgtctatggtcgcaggggcactcgggctaggatctgtttttg

SEQ ID NO: 385186 - DNA, 201 bp, Homo sapiens; identical to SEQ ID NO: 84344

SEQ ID NO: 385187 - DNA, 201 bp, Homo sapiens
ggtggtgtagcctaccccacagtggggcagtaccatccaccacctcacccagagatgaggtgccggagggacctcatcagcctcagctgatgggctgccgsagggattgcagttcccagatggggttctgacatctgtcttgtccaagttttcccttcttgaacttttttttttttgaagtaagttttcagtcgcccaggc

SEQ ID NO: 385188 - DNA, 201 bp, Homo sapiens
caccttcagggctggttttcctgccttagtcccctctccccaggcgagggccagtgctttctgagcttctttgtctgtcctacaaggagggaaggatgtgrgtgtggccagtgcaggggggtatgaaggctgaaagctatcaaaacatggctctgctgcaggtggagttggaagcagtctcctacaagcaagaaatgtctt

SEQ ID NO: 385189 - DNA, 201 bp, Homo sapiens
ccaccacaccggctaatttttctatttttagtagagatgcggtttcggttttaccatgttggccaggctggtcttgaacccctgacctcaggtgatccacstgcttcagcctcccaaagtgctgggattacaggtgtgagccaccacacccggcccgttacaggtttttatgtgaacagatctttaattctgttggctatg

SEQ ID NO: 385190 - DNA, 201 bp, Homo sapiens
caccgcttcaagaacttcctgcgcactcacgtcgacagccacggccacaacgtcttcaaggagcgcatcagcgacatgtgcaaaggtgtggcttccctacrcccccgcctcagcccctgtagcgcctccctaaatcctccccagaaagttgtctgagccgagtgaacacgtgaagcacagggcatatggctgagaggtctg

SEQ ID NO: 385191 - DNA, 201 bp, Homo sapiens
atatttcacattcgccaaggacatctcgtgcaaccctcctctgcacccgtgtgtgtttccctgggagtgcccagagtgggactgcatggcgtagggcattktatccctttctagagggactgtgccttaccattcctaacaagtaggttgaggaattggtgggggatgcaactgtgccctcctcctctcacttcccactct

SEQ ID NO: 385192 - DNA, 201 bp, Homo sapiens
ggagtctgggaggggagtagaaggtgctggggatgaccgcagtagcaggtgtctcttgcctccccagacagcgatgaggaggacgaggagcgccctgcccrcaagcgccgccaggtggagcgggccacggaggacggcgaggaggacgaggagatgattgagagcatcgagaacctggaggatctcaaaggccactctgtg

SEQ ID NO: 385193 - DNA, 201 bp, Homo sapiens
gaccctctggcccgcccctccgtgtcccttctggtcgccagtggacgccgacgtcatgacgtcgcgttccgtagggctcttcccgggctttggtgggtcaygtgaaccacttttcgcgcgaaacctggttgttgctgtagtggcggagaggatcgtggtactgctatggcggtgagcgcgctggcgcgtggcgggcgggcg

SEQ ID NO: 385194 - DNA, 201 bp, Homo sapiens
tctgtgcctaccacgccaaaggagctgcatgcttgaggaactctcttctggcaccttctcttcctttgccttgagcttcagccactaatctcccactctgytgattgaagaggtgagagacccataggtgagcgtgtggcgggcatggcatgcctgggcactaataaggcatctgcccgggccatccccatgtgcttctgg

SEQ ID NO: 385195 - DNA, 201 bp, Homo sapiens
cctagggatccagctgtggccaacgggaatttcttcagaaaaacaacccagaatggtggtgttttttgtttttttttgtgatggagatggggtctcactaygttgtccaggctggtctcaaactcctggctcaagatcctctcacattggcttcccaaagtgctgggcttacaggtgtgagcccttgtgcccaggcagttg

SEQ ID NO: 385196 - DNA, 201 bp, Homo sapiens
gtggcaggatgggggcgggacttccggaagccatttggctgagtggcaggggaaccggaagtggaggagctgctgctggtgctggggccggaggagggackcgccggagcgggaccgacgggaccgagcgagcgaccgacgcgccacccgccgacgcctcagccgcttggggcccgcacggaccctctacttcagtgagtg

SEQ ID NO: 385197 - DNA, 201 bp, Homo sapiens
cgcctcagccgcttggggcccgcacggaccctctacttcagtgagtgcatccagggtcgcagggaaccggtggcttagaggcgggggtcggaaggggctgygaggtgttattgtgagaggcccgcgacctcccctcccccacccttgcggcccctccccccacgccgccccatccacttggggggggcctcgcgagcgcgc

SEQ ID NO: 385198 - DNA, 201 bp, Homo sapiens
gcctccacggcctttcccaggagggtagcgcggcgggcgccccgccccgccctgccctgccctgccctgccgggcccacccgcggtaggccttgcgcaccscagctcgccccggctgggcgctgcagctcctgcccgggtctccgctgctgccttttccctttatcacaggggtctaacttctcactcttctctcccctcg

SEQ ID NO: 385199 - DNA, 201 bp, Homo sapiens
cctgtaattccagcactttgggaggccaaggcagcaggatcacttgagcctaggagttcaagatcagcctgaacaatatggtgagatccccatctattggaaaaaaaaaaaaaaaggtcaggcagctattcgggaggatcgcttgagtgcaggaggcggaaactgcagtgagccatgatttctccactgtgcttcagtctg

SEQ ID NO: 385200 - DNA, 201 bp, Homo sapiens
ccaccatgcccggctaatttttgtttgtttttagtagaaacggggtttcaccatattggccaggctggtctcgaactcctgacctcgttcgtgatctgccygcctcatcctcccaaagtgctgggattacaggcgtgagccactgcgccagaccaggtcatgtaggaattcatatgctgttgggatgtttggattttatcc

SEQ ID NO: 385201 - DNA, 201 bp, Homo sapiens
ctgtaattccagcactttgggaggccaaggcagcaggatcacttgagcctaggagttcaagatcagcctgaacaatatggtgagatccccatctattggaaaaaaaaaaaaaaaggtcaggcagctattcgggaggatcgcttgagtgcaggaggcggaaactgcagtgagccatgatttctccactgtgcttcagtctgg

SEQ ID NO: 385202 - DNA, 201 bp, Homo sapiens
acttatttatacctgccttattccagaaaggattgtgttaagagtccacctgttaagtacagtgactagtacatagtatttgcttaggaaatatttgttgyatgaatgttgctcaataagccttccatattctttgtttttaaattggatatacaaaagtgttaattatggtgttgtccataatactaaaactttggaaat

SEQ ID NO: 385203 - DNA, 201 bp, Homo sapiens
aaaaaatgttcaacaacagtaactggttgaacagctgttctttctaggccaagaagtctcacagggaaagaaatatcagtttctttttttattaaaaaaatttttttttggctagatgtgtggctcacacctgtaatcccagcactttggaaggctaaggtgggcagattgcttgagctcaggagttcaagaccagcctgg

SEQ ID NO: 385204 - DNA, 201 bp, Homo sapiens
tgtaattccagcactttgggaggccaaggcagcaggatcacttgagcctaggagttcaagatcagcctgaacaatatggtgagatccccatctattggaaaaaaaaaaaaaaaggtcaggcagctattcgggaggatcgcttgagtgcaggaggcggaaactgcagtgagccatgatttctccactgtgcttcagtctggg

SEQ ID NO: 385205 - DNA, 201 bp, Homo sapiens
acccaacctggctaatcttttgtatttttagtggagacaggatttcaccatgttggccaggctggtctcgaactcctgacctcaggtgatcctcctgcctyggcccccccaaaatgctgggattacaggtgtgagccaccatgcccggcctctatgtagtcttttctaatcagaacataatatcatttgctcaagagtagg

SEQ ID NO: 385206 - DNA, 201 bp, Homo sapiens
tttgtattttttgtagagacgggggtttcaccatgttggccaggctggtcttgaactcctgacctcaagcgatccacctgctttggcttcccaaagtgctwggattacaggcatgagccactgcacccagccgatgatgttgttttttttttttgaaatcatgatgatattctagtatcatttagaactgagctaatttgt

SEQ ID NO: 385207 - DNA, 201 bp, Homo sapiens
atttagaaagaagtatcttcatctagactcaccaattgttaacattttaccgtatctgcctaattattgtgtctgtatctattttgttttagttttttttgttgttgttgttgttggttttttgagatggagtctcactcttgcccaggctggagtgcagtggtgcaatcttggctcactgcagcctccacccccctgcca

SEQ ID NO: 385208 - DNA, 201 bp, Homo sapiens
aaaccagttctaatatattgctggagtccttacagattagcatatagcccttttgttgagaatttggaaatatgtccaaaatccataaaaatactgatttmttttgactaagaatttccagtgtaggaaaaattatatatatatatatccctttatcacacttactagattcacaaaaagaggccactggcaagtctgtcc

SEQ ID NO: 385209 - DNA, 201 bp, Homo sapiens
agtgcatccagggtcgcagggaaccggtggcttagaggcgggggtcggaaggggctgtgaggtgttattgtgagaggcccgcgacctcccctcccccaccmttgcggcccctccccccacgccgccccatccacttggggggggcctcgcgagcgcgcgccttctctgcgggcccagcgtcggcttcccagcagccggcgc

SEQ ID NO: 385210 - DNA, 201 bp, Homo sapiens
cctgggaggttggggctgcagtgagctgcccctcatagctgccactgtactccagtagtctgggtgacagagtgaaaccctgtctcaaaatctcaaaaaaraaaaaaaaaaagaaaggtagttggtactacagtacctgcaatagggagttgacatgataggaaaaagcacctattcactaaacttttattctttctcata

SEQ ID NO: 385211 - DNA, 201 bp, Homo sapiens
cgtgtttgcacaaaatatggaagcaaggaaaaagctgtccctaatcctgtcaccctaagagaggaagtgttttgttttcttttttaaataaataaatgaawatatatatatatatagtttgtttgtttgtttaattagagatggggttttgccatgttgcccaggctggtcttgaactcctgagctcatgtgatctgctca

SEQ ID NO: 385212 - DNA, 201 bp, Homo sapiens
ctaagattatggacatgagccaccacacctggccaaaatctattttagagagtgtcttgtgcctttataacagaaagaggcactctgggcggagattaccmctgtttataaacttggatttgactgaaaaggattgagtcctagtttgccggtgtctcacatttggaagttaacagatattttcaaagtctgcattcaaat

SEQ ID NO: 385213 - DNA, 201 bp, Homo sapiens
gtggatcacctgaggtcaggagttcgagaccagcctgaccaacatggtgaaaccccatctctactaaaaatacaaaaattagctgggcatggtggtgggcrcctgtaatcccagctactcgggaggctgaggcacaaaaattggttgaacccgggaggtggaggttgcagtgagctaagatcgcgccactacactccagcc

SEQ ID NO: 385214 - DNA, 201 bp, Homo sapiens
gggaggctgaggcacaaaaattggttgaacccgggaggtggaggttgcagtgagctaagatcgcgccactacactccagcctgagtgataaagtgagattccatctccaaaaagtaaaataaaaagtttaaactatgttctttagcattgatgggtaaaatttgttttcttttttctttctttcttttcttcatagtgaag

SEQ ID NO: 385215 - DNA, 201 bp, Homo sapiens
gtaggagtggaccctgccactggccccatcggagccggaaagccaaggaggaagggacagagctagaatcagtgccactttgcagcagcaaggatccagaygaagtggaaacagagagcaggggccctcccaccacctctgacctccttgccccagacctgctggagcaaggggactggagcctgtcccagaacaagagcg

SEQ ID NO: 385216 - DNA, 201 bp, Homo sapiens
aaaacagttattccagggttattccagggtgaatagctctgattcatcaagacagcattcattccacctctttttctcatagtatattatggtgtgggttccatgtggcattaatagatgatgtgtatctatgagcttgattattctgacagccaaatggagaatggattgaagggtagacaacgttggaggtgggaagac

SEQ ID NO: 385217 - DNA, 201 bp, Homo sapiens
agctgtgttacgccacttcactccagctaacgactgactgagaccctgtcggggtaaaaaacaaaaaacaaaacacagccggctgggtgctgtgactcatkcctgtaattccagcactttgggaggccaaggcagcaggatcacttgagcctaggagttcaagatcagcctgaacaatatggtgagatccccatctattgg

SEQ ID NO: 385218 - DNA, 201 bp, Homo sapiens
cttggctcactgcagcctccacccccctgccaccctgggttcaagatattcttgtgtcttagcctcccaagtagctgggattacaggcgcccgccaccacrctcagctaatttttgtatttttagtagagacagggttttgccatgttggccaggctggtttcaaactcctgacctcaagtgatctgcctgtctaggcctc

SEQ ID NO: 385219 - DNA, 201 bp, Homo sapiens
aaaaaaaaaaaggtcaggcagctattcgggaggatcgcttgagtgcaggaggcggaaactgcagtgagccatgatttctccactgtgcttcagtctgggcwtcagagtgaagccctatctcaaaaaaaacaaaaaaaaagccggccgggcgtggtggctcacgcctgtaatcccagcactttgggaagccaaggtgggcgg

SEQ ID NO: 385220 - DNA, 201 bp, Homo sapiens
aaaaaaaaaaggtcaggcagctattcgggaggatcgcttgagtgcaggaggcggaaactgcagtgagccatgatttctccactgtgcttcagtctgggcawcagagtgaagccctatctcaaaaaaaacaaaaaaaaagccggccgggcgtggtggctcacgcctgtaatcccagcactttgggaagccaaggtgggcgga

SEQ ID NO: 385221 - DNA, 201 bp, Homo sapiens
cagccggctgggtgctgtgactcattcctgtaattccagcactttgggaggccaaggcagcaggatcacttgagcctaggagttcaagatcagcctgaacratatggtgagatccccatctattggaaaaaaaaaaaaaaaggtcaggcagctattcgggaggatcgcttgagtgcaggaggcggaaactgcagtgagcca

SEQ ID NO: 385222 - DNA, 201 bp, Homo sapiens
ctggaccggaggaaccacccaccagcccacggaggctaccgggcattcaggataagggccgccttcttcttcagaataaccatacccactccctctgaaayaaagtggagagtcttaggtctgagtggaaactctaaatcttttaattcttggttcaactttcttcatctgttttcctggttcagactaaaacatctaact

SEQ ID NO: 385223 - DNA, 201 bp, Homo sapiens
gttcaagatattcttgtgtcttagcctcccaagtagctgggattacaggcgcccgccaccacactcagctaatttttgtatttttagtagagacagggttytgccatgttggccaggctggtttcaaactcctgacctcaagtgatctgcctgtctaggcctcccaaagtgctgggattacaggcgtgagccaccatgccc

SEQ ID NO: 385224 - DNA, 201 bp, Homo sapiens
tgtttttgtagagatgggatcttgatatattacccaggctgatctcaaactcctgacctcaagttattctcctgtcctggcctcccaaaatgttgagagtwcaagcatgggccaccacacccagccagaagtgccagttaataattttttttttcttcttcaaaccagcacaacagatttgttttggactgtaaagacaaa

SEQ ID NO: 385225 - DNA, 201 bp, Homo sapiens
ctaatttttgtgtttttttagtagagacgaggtttccccgtgttggtcaagccggtcttgaactcctgacctcaggtgatccacgcaccttagcctcccaraatgctgggattacaggcgtgagccaccacatccctggcctaaaaggttttcttaagggtagtgttgaaagacttgccaaatagaatagaaatcgtatca

SEQ ID NO: 385226 - DNA, 201 bp, Homo sapiens
cctttagcatagcagtcttaaattccacgactctacaaatgcaagctattttattggtgttgaaaggtagttggggccgggcacggtggctcaggcctgtratctctcagcaccttgggaggcagaggtgagtggatcgcttgagttccagaccagcctgggaaacatagcaaaaccccatctttacaaaaaatgccaaaa

SEQ ID NO: 385227 - DNA, 201 bp, Homo sapiens
agccacaggccaaaatcattgtattggtatgtagtctttggtgggtagagagtttgttatctttaggtcagctgaggaatctttttagaaatgtgattgcycatgaatattagagaaccttgaggtggaagcagtttatcatacttccgttgacctcttctttaatgtattttactgtcttactggtttcatcattcccca

SEQ ID NO: 385228 - DNA, 201 bp, Homo sapiens
ggtgcagagagcacaggaagccccatccagctgaggaccctttctatggatgcccccacctccaggctctaccctgtgggtctgtttctggagcgagtggygagctcagacttggtgcttcagaactaccacatcccagctggggtgagtgagccccacacccctcgagctgagaacctccctccccagtcattccctgat

SEQ ID NO: 385229 - DNA, 201 bp, Homo sapiens; identical to SEQ ID NO: 84369

SEQ ID NO: 385230 - DNA, 201 bp, Homo sapiens; identical to SEQ ID NO: 84370

SEQ ID NO: 385231 - DNA, 201 bp, Homo sapiens; identical to SEQ ID NO: 84371

SEQ ID NO: 385232 - DNA, 201 bp, Homo sapiens; identical to SEQ ID NO: 84372

SEQ ID NO: 385233 - DNA, 201 bp, Homo sapiens
ccaggccctgaagaagaaggtgctgcagaacgcccgggggagcctgaccctggacgtccagcccagcatcttccactacaccatagaaggtgtgggccacrtgggaagatccagcctcagagaccctggagtggccagggacggggatgggggactgaagggagtgtggggaggcagccaggaggcccggggctgccttgt

SEQ ID NO: 385234 - DNA, 201 bp, Homo sapiens; identical to SEQ ID NO: 84373

SEQ ID NO: 385235 - DNA, 201 bp, Homo sapiens
gccctggcctctgtaggaatgggcctgaatggcgcttcaaccgattgcggctgaatccagaagtgctgtcgcccaacgctgtgcagaggttcctcccgatsgtggatgcagtggccagggacttctcccaggccctgaagaagaaggtgctgcagaacgcccgggggagcctgaccctggacgtccagcccagcatcttcc

SEQ ID NO: 385236 - DNA, 201 bp, Homo sapiens
ggcaaagcttgacaacaggggtcagttcctttcttgcagaaaatccctcccccctactacagggagggcctgcatgggtgaggtggtgccagacttggggygccaggtcccgggaatgacctcagttaccctgtcagcacctgtgggcagaagctaccatctcatccctgcttagacctgagtggcctttgtccagcacct

SEQ ID NO: 385237 - DNA, 201 bp, Homo sapiens
cagccagctggacataaataaagctttgagttttgcagaaatgtggctgacaggggaaattcctccccaccattccctgggggcatccatggagcccccamgcactctggctgtaggtgaggatggcatgaagcacaaagcttggtttctgtcctgcagaagatgcagacacttcactggggctgctgccccagaggcact

SEQ ID NO: 385238 - DNA, 201 bp, Homo sapiens
cttgcatgggcgcatgtgagcatgtgcatcttctgcctgccatcactgtcaacagctcacaacagccagctggacataaataaagctttgagttttgcagraatgtggctgacaggggaaattcctccccaccattccctgggggcatccatggagcccccacgcactctggctgtaggtgaggatggcatgaagcacaaa

SEQ ID NO: 385239 - DNA, 201 bp, Homo sapiens; identical to SEQ ID NO: 84375

SEQ ID NO: 385240 - DNA, 201 bp, Homo sapiens
cctcgagctgagaacctccctccccagtcattccctgatccccgctctgcaccgtccgcagacattggtgcgcgtgttcctctactctctgggtcgcaacsccgccttgttcccgaggcctgagcgctataacccccagcgctggctagacatcaggggctccggcaggaacttctaccacgtgccctttggctttggcat

SEQ ID NO: 385241 - DNA, 201 bp, Homo sapiens
cccagctggggtgagtgagccccacacccctcgagctgagaacctccctccccagtcattccctgatccccgctctgcaccgtccgcagacattggtgcgsgtgttcctctactctctgggtcgcaaccccgccttgttcccgaggcctgagcgctataacccccagcgctggctagacatcaggggctccggcaggaact

SEQ ID NO: 385242 - DNA, 201 bp, Homo sapiens
acatgtgtacatgtgtctcttcacacatggtgttgaggtcttgcatgggcgcatgtgagcatgtgcatcttctgcctgccatcactgtcaacagctcacarcagccagctggacataaataaagctttgagttttgcagaaatgtggctgacaggggaaattcctccccaccattccctgggggcatccatggagccccca

SEQ ID NO: 385243 - DNA, 201 bp, Homo sapiens
gagcgcacctgtatgtgtgtgcgtcttgcatctgtgcacatgctgtgtgtttctctgtacctgcatttgcacgtgttgtgtgtgcatgcgtgtgtgcacatgtgtctgtgtgcatgtatgtgtggtgtgtgtgcacgagtgtctctgtgtgtgcatgtgcaggtgccggcatgggtgtagtgtctgtgcacatgtgtacat

SEQ ID NO: 385244 - DNA, 201 bp, Homo sapiens
ggagcgcacctgtatgtgtgtgcgtcttgcatctgtgcacatgctgtgtgtttctctgtacctgcatttgcacgtgttgtgtgtgcatgcgtgtgtgcacatgtgtctgtgtgcatgtatgtgtggtgtgtgtgcacgagtgtctctgtgtgtgcatgtgcaggtgccggcatgggtgtagtgtctgtgcacatgtgtaca

SEQ ID NO: 385245 - DNA, 201 bp, Homo sapiens
cacagccccagttctgccagcctgaacttcctccatgccctggaggtcatgttcaaatccaccgtccagctcatgttcatgcccaggagcctgtctcgctrgaccagccccaaggtgtggaaggagcactttgaggcctgggactgcatcttccagtacggtgaggccagggacccgggcagtgctatggggaagggacac

SEQ ID NO: 385246 - DNA, 201 bp, Homo sapiens
gaggcaggtggggatgcaggtggctggtggctccattgttctcagaagcaaggcacgaggtggggcggttgatggcactggggaggatgtttcctggcccrtgcagagggtggcgcctggtcaggtgggcagggagaggctgatgcttggagtcagtcacctgcaggaatgttgtcattaggacgggggaaggactggacg

SEQ ID NO: 385247 - DNA, 201 bp, Homo sapiens
cccgctctgcaccgtccgcagacattggtgcgcgtgttcctctactctctgggtcgcaaccccgccttgttcccgaggcctgagcgctataacccccagcrctggctagacatcaggggctccggcaggaacttctaccacgtgccctttggctttggcatgcgccagtgccttgggcggcgcctggcagaggcagagatg

SEQ ID NO: 385248 - DNA, 201 bp, Homo sapiens
gctgcttaagttaggggaggtttggccgggctcagcaggtgcaaggaagcacttcctacgacctgggcttcccatggatctgggacctctgcgggttcttsggtaggaagggtgcagagagcacaggaagccccatccagctgaggaccctttctatggatgcccccacctccaggctctaccctgtgggtctgtttctgg

SEQ ID NO: 385249 - DNA, 201 bp, Homo sapiens
ctgcaacaggtggacagcctgcatccccacaggatgagcctggagccctgggtggcctacagacaacatcgtgggcacaaatgtggcgtgttcttgctgtragcggcgagctgagagctgggagcagggtgggcagcctgggtgtaggggggaggcgagagaggcaggacccaaaagcacatctgccctgggcccctgtgg

SEQ ID NO: 385250 - DNA, 201 bp, Homo sapiens
gaagctgcaacaggtggacagcctgcatccccacaggatgagcctggagccctgggtggcctacagacaacatcgtgggcacaaatgtggcgtgttcttgytgtaagcggcgagctgagagctgggagcagggtgggcagcctgggtgtaggggggaggcgagagaggcaggacccaaaagcacatctgccctgggcccct

SEQ ID NO: 385251 - DNA, 201 bp, Homo sapiens; identical to SEQ ID NO: 84381

SEQ ID NO: 385252 - DNA, 201 bp, Homo sapiens; identical to SEQ ID NO: 84382

SEQ ID NO: 385253 - DNA, 201 bp, Homo sapiens
aggctggggctgggctgggctgatccggagaatttgggatgagagcagggagacttgggtgtcggggcagtctgggcaggaggaggacactgaaggatgtytcccagcaccaaagtctgagggctgcctcccgctccccggataggcgacaactgtatccagaaaatctatcaggaactggccttcagccgccctcaacag

SEQ ID NO: 385254 - DNA, 201 bp, Homo sapiens; identical to SEQ ID NO: 84383

SEQ ID NO: 385255 - DNA, 201 bp, Homo sapiens
cctcaccttcctgccagggagattggtgcgaggctggggctgggctgggctgatccggagaatttgggatgagagcagggagacttgggtgtcggggcagkctgggcaggaggaggacactgaaggatgtctcccagcaccaaagtctgagggctgcctcccgctccccggataggcgacaactgtatccagaaaatctat

SEQ ID NO: 385256 - DNA, 201 bp, Homo sapiens; identical to SEQ ID NO: 84384

SEQ ID NO: 385257 - DNA, 201 bp, Homo sapiens
gcaagataaaaggattgcagctgaacagggtggagggagcattggaatggcactcagggcaaaggcagaggtgtgcatggcagtgccctggctgtccctgyaaagggcacaggcactgggcacgagagccgcccgggtccccaggacagtgctgccctttgaagccatgccccggcgtccaggcaacaggtggctgaggct

SEQ ID NO: 385258 - DNA, 201 bp, Homo sapiens
accatgggggcccaatttctccctctccaccacccagtggggaatggaggccacagggaggggtcggggattcctcaccttcctgccagggagattggtgygaggctggggctgggctgggctgatccggagaatttgggatgagagcagggagacttgggtgtcggggcagtctgggcaggaggaggacactgaaggatg

SEQ ID NO: 385259 - DNA, 201 bp, Homo sapiens; identical to SEQ ID NO: 84386

SEQ ID NO: 385260 - DNA, 201 bp, Homo sapiens; identical to SEQ ID NO: 84387

SEQ ID NO: 385261 - DNA, 201 bp, Homo sapiens; identical to SEQ ID NO: 84388

SEQ ID NO: 385262 - DNA, 201 bp, Homo sapiens
gaaggtgtgggccacgtgggaagatccagcctcagagaccctggagtggccagggacggggatgggggactgaagggagtgtggggaggcagccaggaggyccggggctgccttgtgctcagcagtgcatcctccccgcagccagcaacttggctctttttggagagcggctgggcctggttggccacagccccagttctg

SEQ ID NO: 385263 - DNA, 201 bp, Homo sapiens; identical to SEQ ID NO: 84389

SEQ ID NO: 385264 - DNA, 201 bp, Homo sapiens; identical to SEQ ID NO: 84390

SEQ ID NO: 385265 - DNA, 201 bp, Homo sapiens
tgagccccacacccctcgagctgagaacctccctccccagtcattccctgatccccgctctgcaccgtccgcagacattggtgcgcgtgttcctctactckctgggtcgcaaccccgccttgttcccgaggcctgagcgctataacccccagcgctggctagacatcaggggctccggcaggaacttctaccacgtgccct

SEQ ID NO: 385266 - DNA, 201 bp, Homo sapiens; identical to SEQ ID NO: 84392

SEQ ID NO: 385267 - DNA, 201 bp, Homo sapiens
tctgagaaggctgcaccacgtgcatgggctgcggaccaagccagatggaaacccggcttctgtcctaggtgctgaaacacctccaggtggagacactaacycaagaggacataaagatggtctacagcttcatattgaggcccagcatgttccccctcctcaccttcagagccatcaactaatcacgtctctgcacccagg

SEQ ID NO: 385268 - DNA, 201 bp, Homo sapiens
attccctgatccccgctctgcaccgtccgcagacattggtgcgcgtgttcctctactctctgggtcgcaaccccgccttgttcccgaggcctgagcgctakaacccccagcgctggctagacatcaggggctccggcaggaacttctaccacgtgccctttggctttggcatgcgccagtgccttgggcggcgcctggcag

SEQ ID NO: 385269 - DNA, 201 bp, Homo sapiens
cgaggcctgagcgctataacccccagcgctggctagacatcaggggctccggcaggaacttctaccacgtgccctttggctttggcatgcgccagtgcctygggcggcgcctggcagaggcagagatgctgctgctgctgcaccatgtgagcaggcccgggctggggaggggcctgggcggggtctgggcagcatgggcgg

SEQ ID NO: 385270 - DNA, 201 bp, Homo sapiens
gttcctctactctctgggtcgcaaccccgccttgttcccgaggcctgagcgctataacccccagcgctggctagacatcaggggctccggcaggaacttcyaccacgtgccctttggctttggcatgcgccagtgccttgggcggcgcctggcagaggcagagatgctgctgctgctgcaccatgtgagcaggcccgggct

SEQ ID NO: 385271 - DNA, 201 bp, Homo sapiens
cttcggtaggaagggtgcagagagcacaggaagccccatccagctgaggaccctttctatggatgcccccacctccaggctctaccctgtgggtctgtttytggagcgagtggcgagctcagacttggtgcttcagaactaccacatcccagctggggtgagtgagccccacacccctcgagctgagaacctccctcccca

SEQ ID NO: 385272 - DNA, 201 bp, Homo sapiens
agccccagttctgccagcctgaacttcctccatgccctggaggtcatgttcaaatccaccgtccagctcatgttcatgcccaggagcctgtctcgctggaycagccccaaggtgtggaaggagcactttgaggcctgggactgcatcttccagtacggtgaggccagggacccgggcagtgctatggggaagggacaccat

SEQ ID NO: 385273 - DNA, 201 bp, Homo sapiens
caccgtccagctcatgttcatgcccaggagcctgtctcgctggaccagccccaaggtgtggaaggagcactttgaggcctgggactgcatcttccagtacsgtgaggccagggacccgggcagtgctatggggaagggacaccatgggggcccaatttctccctctccaccacccagtggggaatggaggccacagggagg

SEQ ID NO: 385274 - DNA, 201 bp, Homo sapiens
cagggagacttgggtgtcggggcagtctgggcaggaggaggacactgaaggatgtctcccagcaccaaagtctgagggctgcctcccgctccccggatagrcgacaactgtatccagaaaatctatcaggaactggccttcagccgccctcaacagtacaccagcatcgtggcggagctcctgttgaatgcggaactgtcg

SEQ ID NO: 385275 - DNA, 201 bp, Homo sapiens
caggccctgcgccaggagagcctggccgccgcagccagcatcagtgaacatccccagaaggcaaccaccgagctgcccttgctgcgtgcggccctcaaggrgaccttgcggtgggtgctggctgaggcctccctgtggccctggccccctgctggagagcagcccccactgggtggtggcagacagaatctggggctgata

SEQ ID NO: 385276 - DNA, 201 bp, Homo sapiens
tactctctgggtcgcaaccccgccttgttcccgaggcctgagcgctataacccccagcgctggctagacatcaggggctccggcaggaacttctaccacgkgccctttggctttggcatgcgccagtgccttgggcggcgcctggcagaggcagagatgctgctgctgctgcaccatgtgagcaggcccgggctggggagg

SEQ ID NO: 385277 - DNA, 201 bp, Homo sapiens
cgccaggagagcctggccgccgcagccagcatcagtgaacatccccagaaggcaaccaccgagctgcccttgctgcgtgcggccctcaaggagaccttgcrgtgggtgctggctgaggcctccctgtggccctggccccctgctggagagcagcccccactgggtggtggcagacagaatctggggctgataaacagcgtc

SEQ ID NO: 385278 - DNA, 201 bp, Homo sapiens
ggagctcttcttcctctggaatccctcttcaacgccctggggattaacgtggagcatgtccttctgcgctcggggctgcttaagttaggggaggtttggcygggctcagcaggtgcaaggaagcacttcctacgacctgggcttcccatggatctgggacctctgcgggttcttcggtaggaagggtgcagagagcacagg

SEQ ID NO: 385279 - DNA, 201 bp, Homo sapiens
ggctagcggggacatggtcccatccagcacggcctcgtgcttggccccacaggtacgacttgggaggagcaggcatggtgtgtgtgatgctgccggaggaygtggagaagctgcaacaggtggacagcctgcatccccacaggatgagcctggagccctgggtggcctacagacaacatcgtgggcacaaatgtggcgtgt

SEQ ID NO: 385280 - DNA, 201 bp, Homo sapiens
ggctgctgcagatctggagggagcagggttatgaggacctgcacctggaagtacaccagaccttccaggaactagggcccattttcaggtaaagccctcchtggccctcgctgggaacacccagagccctgcccttgctgcccaggaccctgccgggcactcagcactgccattcccagcaggtcccggcactctgcatcc

SEQ ID NO: 385281 - DNA, 201 bp, Homo sapiens
ggggagggtggacaggagacactttggattgggactgcagggtggggctagcggggacatggtcccatccagcacggcctcgtgcttggccccacaggtaygacttgggaggagcaggcatggtgtgtgtgatgctgccggaggacgtggagaagctgcaacaggtggacagcctgcatccccacaggatgagcctggagc

SEQ ID NO: 385282 - DNA, 201 bp, Homo sapiens
ccgggtccccaggacagtgctgccctttgaagccatgccccggcgtccaggcaacaggtggctgaggctgctgcagatctggagggagcagggttatgagsacctgcacctggaagtacaccagaccttccaggaactagggcccattttcaggtaaagccctccctggccctcgctgggaacacccagagccctgccctt

SEQ ID NO: 385283 - DNA, 201 bp, Homo sapiens
gcagatccagggccagttctcccatgacgtgatccctctcgaaggcaaggcaccaggcaagataaaaggattgcagctgaacagggtggagggagcattgraatggcactcagggcaaaggcagaggtgtgcatggcagtgccctggctgtccctgcaaagggcacaggcactgggcacgagagccgcccgggtccccagg

SEQ ID NO: 385284 - DNA, 201 bp, Homo sapiens
tccagcctcagagaccctggagtggccagggacggggatgggggactgaagggagtgtggggaggcagccaggaggcccggggctgccttgtgctcagcartgcatcctccccgcagccagcaacttggctctttttggagagcggctgggcctggttggccacagccccagttctgccagcctgaacttcctccatgccc

SEQ ID NO: 385285 - DNA, 201 bp, Homo sapiens
cttgctgatgacgctctttgagctggctcggaaccccaacgtgcagcaggccctgcgccaggagagcctggccgccgcagccagcatcagtgaacatcccyagaaggcaaccaccgagctgcccttgctgcgtgcggccctcaaggagaccttgcggtgggtgctggctgaggcctccctgtggccctggccccctgctgg

SEQ ID NO: 385286 - DNA, 201 bp, Homo sapiens
atttgggatgagagcagggagacttgggtgtcggggcagtctgggcaggaggaggacactgaaggatgtctcccagcaccaaagtctgagggctgcctccygctccccggataggcgacaactgtatccagaaaatctatcaggaactggccttcagccgccctcaacagtacaccagcatcgtggcggagctcctgttga

SEQ ID NO: 385287 - DNA, 201 bp, Homo sapiens; identical to SEQ ID NO: 84409

SEQ ID NO: 385288 - DNA, 201 bp, Homo sapiens
gatccctctcgaaggcaaggcaccaggcaagataaaaggattgcagctgaacagggtggagggagcattggaatggcactcagggcaaaggcagaggtgtrcatggcagtgccctggctgtccctgcaaagggcacaggcactgggcacgagagccgcccgggtccccaggacagtgctgccctttgaagccatgccccgg

SEQ ID NO: 385289 - DNA, 201 bp, Homo sapiens; identical to SEQ ID NO: 84411

SEQ ID NO: 385290 - DNA, 201 bp, Homo sapiens; identical to SEQ ID NO: 84412

SEQ ID NO: 385291 - DNA, 201 bp, Homo sapiens; identical to SEQ ID NO: 84413

SEQ ID NO: 385292 - DNA, 201 bp, Homo sapiens
tctgggcaggaggaggacactgaaggatgtctcccagcaccaaagtctgagggctgcctcccgctccccggataggcgacaactgtatccagaaaatctaycaggaactggccttcagccgccctcaacagtacaccagcatcgtggcggagctcctgttgaatgcggaactgtcgccagatgccatcaaggccaactcta

SEQ ID NO: 385293 - DNA, 201 bp, Homo sapiens; identical to SEQ ID NO: 84414

SEQ ID NO: 385294 - DNA, 201 bp, Homo sapiens
gcctgggcggggtctgggcagcatgggcggggcttgagcaatgtgggactggcctcggcagagtgggagtggcctgcatgtttcctggactgggcagagcsggtactgggagaacctgggccaggttgaggctgtgtaggtcctgggcaggagttggtatggtgaggagcgtaccatctgggtgaggttgctgctaaaccg

SEQ ID NO: 385295 - DNA, 201 bp, Homo sapiens
agctggggtgagtgagccccacacccctcgagctgagaacctccctccccagtcattccctgatccccgctctgcaccgtccgcagacattggtgcgcgtkttcctctactctctgggtcgcaaccccgccttgttcccgaggcctgagcgctataacccccagcgctggctagacatcaggggctccggcaggaacttct

SEQ ID NO: 385296 - DNA, 201 bp, Homo sapiens; identical to SEQ ID NO: 84416

SEQ ID NO: 385297 - DNA, 201 bp, Homo sapiens; identical to SEQ ID NO: 84418

SEQ ID NO: 385298 - DNA, 201 bp, Homo sapiens
gggggaaggactggacgaggatgtcacagtggcgacagcccccactccatggcaggaggagaacgcttttgggaatagtggggtttaggtaaaagggcacycaagggtgggggccttcactgaggctggcctacagacgacatctgggagggagtcaggacccaggaaggcaagtccagaaggctgggtgcacataacgga

SEQ ID NO: 385299 - DNA, 201 bp, Homo sapiens
gagggctgcctcccgctccccggataggcgacaactgtatccagaaaatctatcaggaactggccttcagccgccctcaacagtacaccagcatcgtggcrgagctcctgttgaatgcggaactgtcgccagatgccatcaaggccaactctatggaactcactgcagggagcgtggacacggtcaggccggcaaccagcc

SEQ ID NO: 385300 - DNA, 201 bp, Homo sapiens
gctgcctcccgctccccggataggcgacaactgtatccagaaaatctatcaggaactggccttcagccgccctcaacagtacaccagcatcgtggcggagstcctgttgaatgcggaactgtcgccagatgccatcaaggccaactctatggaactcactgcagggagcgtggacacggtcaggccggcaaccagccccac

SEQ ID NO: 385301 - DNA, 201 bp, Homo sapiens
gggctcagcaggtgcaaggaagcacttcctacgacctgggcttcccatggatctgggacctctgcgggttcttcggtaggaagggtgcagagagcacaggragccccatccagctgaggaccctttctatggatgcccccacctccaggctctaccctgtgggtctgtttctggagcgagtggcgagctcagacttggtgc

SEQ ID NO: 385302 - DNA, 201 bp, Homo sapiens
tcggggctgcttaagttaggggaggtttggccgggctcagcaggtgcaaggaagcacttcctacgacctgggcttcccatggatctgggacctctgcgggktcttcggtaggaagggtgcagagagcacaggaagccccatccagctgaggaccctttctatggatgcccccacctccaggctctaccctgtgggtctgtt

SEQ ID NO: 385303 - DNA, 201 bp, Homo sapiens
gcacctgctcttcctccccctcaaggacagggagctcttcttcctctggaatccctcttcaacgccctggggattaacgtggagcatgtccttctgcgctyggggctgcttaagttaggggaggtttggccgggctcagcaggtgcaaggaagcacttcctacgacctgggcttcccatggatctgggacctctgcgggtt

SEQ ID NO: 385304 - DNA, 201 bp, Homo sapiens
ccagcagcccattcccctgcacctgctcttcctccccctcaaggacagggagctcttcttcctctggaatccctcttcaacgccctggggattaacgtggrgcatgtccttctgcgctcggggctgcttaagttaggggaggtttggccgggctcagcaggtgcaaggaagcacttcctacgacctgggcttcccatggat

SEQ ID NO: 385305 - DNA, 201 bp, Homo sapiens
gtggtggcagacagaatctggggctgataaacagcgtcacccagcagcccattcccctgcacctgctcttcctccccctcaaggacagggagctcttcttyctctggaatccctcttcaacgccctggggattaacgtggagcatgtccttctgcgctcggggctgcttaagttaggggaggtttggccgggctcagcagg

SEQ ID NO: 385306 - DNA, 201 bp, Homo sapiens
aggcaaccaccgagctgcccttgctgcgtgcggccctcaaggagaccttgcggtgggtgctggctgaggcctccctgtggccctggccccctgctggagarcagcccccactgggtggtggcagacagaatctggggctgataaacagcgtcacccagcagcccattcccctgcacctgctcttcctccccctcaaggaca

SEQ ID NO: 385307 - DNA, 201 bp, Homo sapiens
ggtgtggaaggagcactttgaggcctgggactgcatcttccagtacggtgaggccagggacccgggcagtgctatggggaagggacaccatgggggcccartttctccctctccaccacccagtggggaatggaggccacagggaggggtcggggattcctcaccttcctgccagggagattggtgcgaggctggggctgg

SEQ ID NO: 385308 - DNA, 201 bp, Homo sapiens
tgggctgggctgatccggagaatttgggatgagagcagggagacttgggtgtcggggcagtctgggcaggaggaggacactgaaggatgtctcccagcacyaaagtctgagggctgcctcccgctccccggataggcgacaactgtatccagaaaatctatcaggaactggccttcagccgccctcaacagtacaccagca

SEQ ID NO: 385309 - DNA, 201 bp, Homo sapiens
gctggctcggaaccccaacgtgcagcaggccctgcgccaggagagcctggccgccgcagccagcatcagtgaacatccccagaaggcaaccaccgagctgsccttgctgcgtgcggccctcaaggagaccttgcggtgggtgctggctgaggcctccctgtggccctggccccctgctggagagcagcccccactgggtgg

SEQ ID NO: 385310 - DNA, 201 bp, Homo sapiens
gtgtctcctgcagacggtgtttcccttgctgatgacgctctttgagctggctcggaaccccaacgtgcagcaggccctgcgccaggagagcctggccgccrcagccagcatcagtgaacatccccagaaggcaaccaccgagctgcccttgctgcgtgcggccctcaaggagaccttgcggtgggtgctggctgaggcctc

SEQ ID NO: 385311 - DNA, 201 bp, Homo sapiens; identical to SEQ ID NO: 84422

SEQ ID NO: 385312 - DNA, 201 bp, Homo sapiens
gcagtgctatggggaagggacaccatgggggcccaatttctccctctccaccacccagtggggaatggaggccacagggaggggtcggggattcctcaccktcctgccagggagattggtgcgaggctggggctgggctgggctgatccggagaatttgggatgagagcagggagacttgggtgtcggggcagtctgggca

SEQ ID NO: 385313 - DNA, 201 bp, Homo sapiens
gcaaggtctgaccctgcagctgtgtctcctgcagacggtgtttcccttgctgatgacgctctttgagctggctcggaaccccaacgtgcagcaggccctgmgccaggagagcctggccgccgcagccagcatcagtgaacatccccagaaggcaaccaccgagctgcccttgctgcgtgcggccctcaaggagaccttgcg

SEQ ID NO: 385314 - DNA, 201 bp, Homo sapiens; identical to SEQ ID NO: 84424

SEQ ID NO: 385315 - DNA, 201 bp, Homo sapiens; identical to SEQ ID NO: 84426

SEQ ID NO: 385316 - DNA, 201 bp, Homo sapiens
tgcaggttgccatggttggaatggggggttcctttctgtggaggactcagggaaaggggtttggatgggcattaggatttgaagtcttgggctctgtcgtkctcagggtatgcatgtctgcacccctcacagggaggttgtcctgggaggggtgtcccgggggctgagtcctcctgtgcaaggtctgaccctgcagctgtg

SEQ ID NO: 385317 - DNA, 201 bp, Homo sapiens; identical to SEQ ID NO: 84428

SEQ ID NO: 385318 - DNA, 201 bp, Homo sapiens
ttgggaggagcaggcatggtgtgtgtgatgctgccggaggacgtggagaagctgcaacaggtggacagcctgcatccccacaggatgagcctggagccctrggtggcctacagacaacatcgtgggcacaaatgtggcgtgttcttgctgtaagcggcgagctgagagctgggagcagggtgggcagcctgggtgtagggg

SEQ ID NO: 385319 - DNA, 201 bp, Homo sapiens; identical to SEQ ID NO: 84429

SEQ ID NO: 385320 - DNA, 201 bp, Homo sapiens; identical to SEQ ID NO: 84431

SEQ ID NO: 385321 - DNA, 201 bp, Homo sapiens
cccggcgtccaggcaacaggtggctgaggctgctgcagatctggagggagcagggttatgaggacctgcacctggaagtacaccagaccttccaggaactrgggcccattttcaggtaaagccctccctggccctcgctgggaacacccagagccctgcccttgctgcccaggaccctgccgggcactcagcactgccatt

SEQ ID NO: 385322 - DNA, 201 bp, Homo sapiens
gccttgttcccgaggcctgagcgctataacccccagcgctggctagacatcaggggctccggcaggaacttctaccacgtgccctttggctttggcatgcrccagtgccttgggcggcgcctggcagaggcagagatgctgctgctgctgcaccatgtgagcaggcccgggctggggaggggcctgggcggggtctgggca

SEQ ID NO: 385323 - DNA, 201 bp, Homo sapiens
cgccttgttcccgaggcctgagcgctataacccccagcgctggctagacatcaggggctccggcaggaacttctaccacgtgccctttggctttggcatgygccagtgccttgggcggcgcctggcagaggcagagatgctgctgctgctgcaccatgtgagcaggcccgggctggggaggggcctgggcggggtctgggc

SEQ ID NO: 385324 - DNA, 201 bp, Homo sapiens
gcagatctggagggagcagggttatgaggacctgcacctggaagtacaccagaccttccaggaactagggcccattttcaggtaaagccctccctggcccwcgctgggaacacccagagccctgcccttgctgcccaggaccctgccgggcactcagcactgccattcccagcaggtcccggcactctgcatcctttggaa

SEQ ID NO: 385325 - DNA, 201 bp, Homo sapiens
gggaaaggggtttggatgggcattaggatttgaagtcttgggctctgtcgttctcagggtatgcatgtctgcacccctcacagggaggttgtcctgggagkggtgtcccgggggctgagtcctcctgtgcaaggtctgaccctgcagctgtgtctcctgcagacggtgtttcccttgctgatgacgctctttgagctggct

SEQ ID NO: 385326 - DNA, 201 bp, Homo sapiens
tcccagctggggtgagtgagccccacacccctcgagctgagaacctccctccccagtcattccctgatccccgctctgcaccgtccgcagacattggtgcrcgtgttcctctactctctgggtcgcaaccccgccttgttcccgaggcctgagcgctataacccccagcgctggctagacatcaggggctccggcaggaac

SEQ ID NO: 385327 - DNA, 201 bp, Homo sapiens
gagggtggacaggagacactttggattgggactgcagggtggggctagcggggacatggtcccatccagcacggcctcgtgcttggccccacaggtacgayttgggaggagcaggcatggtgtgtgtgatgctgccggaggacgtggagaagctgcaacaggtggacagcctgcatccccacaggatgagcctggagccct

SEQ ID NO: 385328 - DNA, 201 bp, Homo sapiens
ctacagacgacatctgggagggagtcaggacccaggaaggcaagtccagaaggctgggtgcacataacggaaggaaggggagcgcacctgtatgtgtgtgygtcttgcatctgtgcacatgctgtgtgtttctctgtacctgcatttgcacgtgttgtgtgtgcatgcgtgtgtgcacatgtgtctgtgtgcatgtatgtg

SEQ ID NO: 385329 - DNA, 201 bp, Homo sapiens
aaccgattgcggctgaatccagaagtgctgtcgcccaacgctgtgcagaggttcctcccgatggtggatgcagtggccagggacttctcccaggccctgargaagaaggtgctgcagaacgcccgggggagcctgaccctggacgtccagcccagcatcttccactacaccatagaaggtgtgggccacgtgggaagatcc

SEQ ID NO: 385330 - DNA, 201 bp, Homo sapiens
gcatcgtggcggagctcctgttgaatgcggaactgtcgccagatgccatcaaggccaactctatggaactcactgcagggagcgtggacacggtcaggccrgcaaccagccccacccagagagggtgatgccaagcctgcctcccaggcactgcctgccaatgtcacacggcgcccacgtgtcccatccccaggctatggg

SEQ ID NO: 385331 - DNA, 201 bp, Homo sapiens
cactgaaggatgtctcccagcaccaaagtctgagggctgcctcccgctccccggataggcgacaactgtatccagaaaatctatcaggaactggccttcarccgccctcaacagtacaccagcatcgtggcggagctcctgttgaatgcggaactgtcgccagatgccatcaaggccaactctatggaactcactgcaggg

SEQ ID NO: 385332 - DNA, 201 bp, Homo sapiens; identical to SEQ ID NO: 84438

SEQ ID NO: 385333 - DNA, 201 bp, Homo sapiens
ccaggctgctgttcccccttcagcataatctctgcaactttgagggtctgagaaggctgcaccacgtgcatgggctgcggaccaagccagatggaaacccsgcttctgtcctaggtgctgaaacacctccaggtggagacactaacccaagaggacataaagatggtctacagcttcatattgaggcccagcatgttcccc

SEQ ID NO: 385334 - DNA, 201 bp, Homo sapiens
gtgtgggccacgtgggaagatccagcctcagagaccctggagtggccagggacggggatgggggactgaagggagtgtggggaggcagccaggaggcccgrggctgccttgtgctcagcagtgcatcctccccgcagccagcaacttggctctttttggagagcggctgggcctggttggccacagccccagttctgccag

SEQ ID NO: 385335 - DNA, 201 bp, Homo sapiens
aacgcccgggggagcctgaccctggacgtccagcccagcatcttccactacaccatagaaggtgtgggccacgtgggaagatccagcctcagagaccctgsagtggccagggacggggatgggggactgaagggagtgtggggaggcagccaggaggcccggggctgccttgtgctcagcagtgcatcctccccgcagcca

SEQ ID NO: 385336 - DNA, 201 bp, Homo sapiens
tcctcctgtgcaaggtctgaccctgcagctgtgtctcctgcagacggtgtttcccttgctgatgacgctctttgagctggctcggaaccccaacgtgcagyaggccctgcgccaggagagcctggccgccgcagccagcatcagtgaacatccccagaaggcaaccaccgagctgcccttgctgcgtgcggccctcaagga

SEQ ID NO: 385337 - DNA, 201 bp, Homo sapiens
cccaggccctgaagaagaaggtgctgcagaacgcccgggggagcctgaccctggacgtccagcccagcatcttccactacaccatagaaggtgtgggccasgtgggaagatccagcctcagagaccctggagtggccagggacggggatgggggactgaagggagtgtggggaggcagccaggaggcccggggctgccttg

SEQ ID NO: 385338 - DNA, 201 bp, Homo sapiens
tctgcctgccatcactgtcaacagctcacaacagccagctggacataaataaagctttgagttttgcagaaatgtggctgacaggggaaattcctccccaycattccctgggggcatccatggagcccccacgcactctggctgtaggtgaggatggcatgaagcacaaagcttggtttctgtcctgcagaagatgcagac

SEQ ID NO: 385339 - DNA, 201 bp, Homo sapiens; identical to SEQ ID NO: 84440

SEQ ID NO: 385340 - DNA, 201 bp, Homo sapiens; identical to SEQ ID NO: 84586

SEQ ID NO: 385341 - DNA, 201 bp, Homo sapiens
aaggtcatccctgagctgaacaggaaggtcactggcatgatcttccatgtctcccaccaccactgtgtctgtcagtcatggatctgatctgctatctagaraaacctggcaaatataatgacatcaagaaggtagtgaaacaggctacgtgcagtaaaactcatgcctgtaattctagcactttgggaagacgaggtgggt

SEQ ID NO: 385342 - DNA, 201 bp, Homo sapiens
aaagtctgagtacattcttatttcattacagataggtgatcttcagctttgcaaactggatgaactagattgcttgatcaaaggaattttatacattgacycagtcggattcaatggacggtcacagtgctattactttgaaaaccctgctgattctgaaaagtgtcagaagttaccatttgatttgaaaaatccgtatcc

SEQ ID NO: 385343 - DNA, 201 bp, Homo sapiens
tgaattttcttgagtcaaatgaagattaaaggtacgctagtgataggagttggccatctagaggtggttgtctagttcagatgtatggacgacaatcagarccactaaaagggtagcattttattgctcctttagtatgaaaaattagggcatctgctatacgttgaggaagaaactacctaaaaggaacatcattagatc

SEQ ID NO: 385344 - DNA, 201 bp, Homo sapiens
attcttatttcattacagataggtgatcttcagctttgcaaactggatgaactagattgcttgatcaaaggaattttatacattgactcagtcggattcartggacggtcacagtgctattactttgaaaaccctgctgattctgaaaagtgtcagaagttaccatttgatttgaaaaatccgtatcctctgcttctggtg

SEQ ID NO: 385345 - DNA, 201 bp, Homo sapiens
tcttggctcactgcagcttctgcctcatgggttcaagcgattctcctgcctcagcctccggagtagctgggactacaagcgcacgccaccacagccagctratttctgtatttttagtagagatagtttcaccatgttggccaggatgatcttggtctcttgaccttgtgattcacctgccttagcctccccaagtgttgg

SEQ ID NO: 385346 - DNA, 201 bp, Homo sapiens
ggctagagtgcagtggtgcgatcttggctcactgcagcttctgcctcatgggttcaagcgattctcctgcctcagcctccggagtagctgggactacaagygcacgccaccacagccagctgatttctgtatttttagtagagatagtttcaccatgttggccaggatgatcttggtctcttgaccttgtgattcacctgc

SEQ ID NO: 385347 - DNA, 201 bp, Homo sapiens
tttttttggtctctgctgtcttcttactggctgtaccacttttgaagaagctcttgaaatggcatctcgtggagatagcaccaaagtggataaactagtaygagatatttatggaggggactatgagaggtttggactgccaggctgggctgtggcttcaaggtaagggggcatgtgtgttctaagaaatacaggcgggcc

SEQ ID NO: 385348 - DNA, 201 bp, Homo sapiens
atatacccagcctattgaacatcatagcttagccaaacctaccttaaatgtgcttagaacccttatattagcctacagttgggcaaaatcttctagcatamagctagatgatttaataatgaataatataaaagataattattttacaataaaatgtcgaatatcttgtaatttattgaatactgtactaaaaataaaaaa

SEQ ID NO: 385349 - DNA, 201 bp, Homo sapiens
tctactaaaaatacaaaaattagctgggcgcaatggcgggcgcctataatccccagctactcgggaggctgagacaggagaatctcttgaatctgggaggyggaggttgcagtgagctgagatcgcaccactgtactacagcctgggcaacagaacgagactctgtctcaaaaacaaaaacaaacaacaacaacaaaacaa

SEQ ID NO: 385350 - DNA, 201 bp, Homo sapiens
tccattccctcatgttccaccttgtgctcagtaaaccctgtcactccacagcagggtttttgagacagtctcgctgtgtcacccaggtggagtgcagtggkgcgatctcagctcactgcaacctctgccttccaggctcaagcaattctcctgccttagcctcctgcgtagctgagactacaggcatgtgccaccatggct

SEQ ID NO: 385351 - DNA, 201 bp, Homo sapiens
cctttattctcatcttagcacgttgtagtttataaccacctgtttctgtcttgatagtagcatcctagtcttcagtggaccccccccatatatatatataatggttaactgtatcttctatatttttattataaaataaaaggtacagaaagctgcctaaaacaaactgtatagtgaactattaagacaaacagccttgcc

SEQ ID NO: 385352 - DNA, 201 bp, Homo sapiens
atcctttattctcatcttagcacgttgtagtttataaccacctgtttctgtcttgatagtagcatcctagtcttcagtggaccccccccatatatatatataatggttaactgtatcttctatatttttattataaaataaaaggtacagaaagctgcctaaaacaaactgtatagtgaactattaagacaaacagccttg

SEQ ID NO: 385353 - DNA, 201 bp, Homo sapiens
gcgcgcctctgctctggctggactgccgcggaggaggcgagaaggaatccgacgctggggggcttgctcgggcggcagcgactgctgctgcggatgggagsgggccggctcggcgcgcccatggagcgccacggcagggcttccgccacctccgtctcgtcggctggggagcaggcggccggggaccccgaagggcggcgg

SEQ ID NO: 385354 - DNA, 201 bp, Homo sapiens
tttttttttgtttattttaacttatctgtataaaacattgtattcaaaactagttattgttggtcagatttaatacaaatgtttttcctaatctgttttcytctcctgtgacattatctagcatgctttgcagtgggtccagagttgtctggggatcaagtttaagtagccctggaccaactggactaaatttgatcagca

SEQ ID NO: 385355 - DNA, 201 bp, Homo sapiens
ccgttgtcttctggcatctgtgctgctgatgaaaagtctgatactgacttttatgtgatttatgtatctttataggaattcagttttttccttatgatatsttgaaatttcaataggatgtgtctaagttgtcttccccttctctgctgaccgataaacactgttcagcccttagagtaacctgatgattggtgtcttccc

SEQ ID NO: 385356 - DNA, 201 bp, Homo sapiens
aaaagagaaaaagaaaatactgtaagtcaaaatgcatttaatatacccagcctattgaacatcatagcttagccaaacctaccttaaatgtgcttagaacmcttatattagcctacagttgggcaaaatcttctagcataaagctagatgatttaataatgaataatataaaagataattattttacaataaaatgtcgaa

SEQ ID NO: 385357 - DNA, 201 bp, Homo sapiens
aagggaaagggaggaggtgttagcatggccccaggcgtgtcaggctaatttgcacctgaggctcttcatacttggcagacagccagactgcactggggacrtgggccctgtgttttgtactttgcatgttggctcacatgcatatgtaccttaaaggtgtatatcaggcaccttatcttttcacagacttgtttcctacca

SEQ ID NO: 385358 - DNA, 201 bp, Homo sapiens
cagcggccccacctcggtctcccgccagcgcgtcgaaagcctgaggaaaaagcggccgcgtaagtgttccgtggggcgccctcccggcccgccctgccccmccttccggcccaccctgtccccttccggccccgccgccgtttttcccgcgcgcggacactgtccccgcacggtggtccctcgttggtgcgtggcctgaca

SEQ ID NO: 385359 - DNA, 201 bp, Homo sapiens
tttgaactgattgctttattttttttctaatgtgaaagtcattttttttttctcctctggagttacctctaaattttgacacatttaaactatcacttctrtattcttgtgtagaattaatcagaatctatcttttcttcccttttccaacaagacagaactgctgcttgctttcatttccttctcccttctcttccctct

SEQ ID NO: 385360 - DNA, 201 bp, Homo sapiens
cctcctcctgggttcaagtgattctcctgcttcagcctcccgagtagctgggattacaggcatgcactgccacaccgggctaatttttgtatttttagtaraaacgaggttttgccatgttggctagtctggtcttgaattcctgacctcaggtgatccgcccgccttagcctcccaaagtgctggaattacaggcatgag

SEQ ID NO: 385361 - DNA, 201 bp, Homo sapiens
gttggctcaatactttgatatttttctttttcgtctttgccgtagtattttttttttaagttatgcatctaaatcaagacagaatcacatttctttgcccyaaaacccttttgcctagaattatgttctttggaaaccctagcgtttgaaataagttgctactgtggtaagggtaaatttaattttcagaaaaaagctgtt

SEQ ID NO: 385362 - DNA, 201 bp, Homo sapiens
agagtttttccctcctcctgtgcagtccaaccccagctctcaagcccatgatttgcttgctttcagatgtaaaaatgattagcttgccttttttttttttyccccctttttgagacggagtctccctctgtcgcccaggctggagtacagtggtgcaatcttggctcattgaaatttactcctcctcctgggttcaagtga

SEQ ID NO: 385363 - DNA, 201 bp, Homo sapiens
ataaactgcatccatttaaaatatacagttccatgagtttcgacagatgtgtatagacacacacacacacacacacacacacacacacacacacacacacmccccttttacccccaaacaagagttgggttaccagagtttttccctcctcctgtgcagtccaaccccagctctcaagcccatgatttgcttgctttcaga

SEQ ID NO: 385364 - DNA, 201 bp, Homo sapiens
ctgtactacagcctgggcaacagaacgagactctgtctcaaaaacaaaaacaaacaacaacaacaaaacaaacaaaaacaccaaacaggccaggtgcagckgctcacgcctgtaatcccagcactttgggaggccgaggtgggcggatcatgaggtcaggagttcaagaccagcctgaccaacatggagaagccctgtctc

SEQ ID NO: 385365 - DNA, 201 bp, Homo sapiens
ctgcagtgtttcttttgttttttgtttttttgagacggagtctcgctctgtcacctaggttggagtgcgtggcacagtcttggggctcactgcagcctccrcctcctgggttcaagcagtcctcccacctcagtctcttaagtagctgggattacaagtgtgcgcccccacaccctgctaatttttgtactttcagtagaa

SEQ ID NO: 385366 - DNA, 201 bp, Homo sapiens
cagttgtcctagtaccatttgttgaaaagatgattctttccctgttaaattctcttggcccctttgtcaaaaattagttgaccatagatgtttgggtttaytcctggactcttaagttatgttccattgatatatatgtctgtttttataccagtaccatactgccttgatactgtagcgttgtattaagttctgaagtaa

SEQ ID NO: 385367 - DNA, 201 bp, Homo sapiens
ctgagtaccttggaggtcttaatatcaggaaatatgttaagggctgtgaatagactgaaatatctgaaaattaatggccaggactcactaactagaaggcrggggccttctcttatcagtgagctctaggctggatgtgttagctcacgtctgtaatctcagtactttgggaggctgaggcgggtggatcgcttgagctta

SEQ ID NO: 385368 - DNA, 201 bp, Homo sapiens
agtgcagtggtgcgatctcggctcactgcaacctccacctcccgggttcaagcgattctcctgcctcagcctcctgagtagctgggactacagtgcgtgcygccacacccagctaatttttgtatttttagtagagacagggtttcaccatattgtccaggatggtctcgatctcttgacctcgtgatccgcccaccttgg

SEQ ID NO: 385369 - DNA, 201 bp, Homo sapiens
tcttatctatcttctgtcacttgtgcttttggtgttatgtgtaagaaatctaagatcatgaagaattgcctaatttaagatcatgaagaattgtttattttcttttaagagttttatagttttagctcatatatatatatgtgtgtgtgtgtatttttttctttttttcttttttgagatggagtcttgctctgtcaccag

SEQ ID NO: 385370 - DNA, 201 bp, Homo sapiens
atcttatctatcttctgtcacttgtgcttttggtgttatgtgtaagaaatctaagatcatgaagaattgcctaatttaagatcatgaagaattgtttattttcttttaagagttttatagttttagctcatatatatatatgtgtgtgtgtgtatttttttctttttttcttttttgagatggagtcttgctctgtcacca

SEQ ID NO: 385371 - DNA, 201 bp, Homo sapiens
aatcttatctatcttctgtcacttgtgcttttggtgttatgtgtaagaaatctaagatcatgaagaattgcctaatttaagatcatgaagaattgtttattttcttttaagagttttatagttttagctcatatatatatatgtgtgtgtgtgtatttttttctttttttcttttttgagatggagtcttgctctgtcacc

SEQ ID NO: 385372 - DNA, 201 bp, Homo sapiens
taatcttatctatcttctgtcacttgtgcttttggtgttatgtgtaagaaatctaagatcatgaagaattgcctaatttaagatcatgaagaattgtttattttcttttaagagttttatagttttagctcatatatatatatgtgtgtgtgtgtatttttttctttttttcttttttgagatggagtcttgctctgtcac

SEQ ID NO: 385373 - DNA, 201 bp, Homo sapiens
ttaatcttatctatcttctgtcacttgtgcttttggtgttatgtgtaagaaatctaagatcatgaagaattgcctaatttaagatcatgaagaattgtttattttcttttaagagttttatagttttagctcatatatatatatgtgtgtgtgtgtatttttttctttttttcttttttgagatggagtcttgctctgtca

SEQ ID NO: 385374 - DNA, 201 bp, Homo sapiens
gagtgcagtgttgcgatcataactggctgcagcctgtgtctcctgggctcaggtgtttctcctgcctcagtctcctgagtcactaggactacagctgtgcrctgccttgcctaattttttttttgtagagatagggtcttgctatgttgcctaggctgtcctggcctcaagtgatcctcccaccttggcttcccaacatgt

SEQ ID NO: 385375 - DNA, 201 bp, Homo sapiens
tggtgaactgccccttgagttgcaccaggcctgaaactgtattccgtgcacctctaaggtggctgcccttcttctcgtgagaatccaggtcatctctcacycacatatcccctccgttttccttctgtctatttgcaggtactcacgattcagaactgtggcattctgggcattaaggctctttgttttgaggggaaacaa

SEQ ID NO: 385376 - DNA, 201 bp, Homo sapiens
ggagtgcagtggcgtgatctcggctcactgcaagctctagctcctgggttcatgccattcttctgcttcagccttccaagtagctgggactacaggtgccygccaccacgcccggctattttttttgtatttttagcagagatggggtttcactatgttggccaggatggtctcgatctgctgacctcatgatccgcccgc

SEQ ID NO: 385377 - DNA, 201 bp, Homo sapiens
atttgggttgtttccattttttggttataatgttgaacatttatatgtaagtctttgtatgtatgcacacacacacacacacatatatatatatatatatwtttttttttttttgagacggagtcttggtctgtcgcccaggctggagtgcagtggcgtgatctcggctcactgcaagctctagctcctgggttcatgcca

SEQ ID NO: 385378 - DNA, 201 bp, Homo sapiens
acatttgggttgtttccattttttggttataatgttgaacatttatatgtaagtctttgtatgtatgcacacacacacacacacatatatatatatatatwtttttttttttttttgagacggagtcttggtctgtcgcccaggctggagtgcagtggcgtgatctcggctcactgcaagctctagctcctgggttcatgc

SEQ ID NO: 385379 - DNA, 201 bp, Homo sapiens
gaacatttgggttgtttccattttttggttataatgttgaacatttatatgtaagtctttgtatgtatgcacacacacacacacacatatatatatatatatatttttttttttttttgagacggagtcttggtctgtcgcccaggctggagtgcagtggcgtgatctcggctcactgcaagctctagctcctgggttcat

SEQ ID NO: 385380 - DNA, 201 bp, Homo sapiens
atttattggttgatgaacatttgggttgtttccattttttggttataatgttgaacatttatatgtaagtctttgtatgtatgcacacacacacacacacmtatatatatatatatatttttttttttttttgagacggagtcttggtctgtcgcccaggctggagtgcagtggcgtgatctcggctcactgcaagctcta

SEQ ID NO: 385381 - DNA, 201 bp, Homo sapiens
atagtgctgtggcctgagcttggtatcagccccattgtccctgtaagcagagatctgaatttctgtttgaaggttgataaatgctgtggttttttttttttgttttttttgttttttttttggtcacacttattcagctgctgcagtagtttctatgtagagtgtatttgggtctgtagtagcaggagtctgtctcagcac

SEQ ID NO: 385382 - DNA, 201 bp, Homo sapiens
ttttttttatctttagtagagactgggtttcaccatgttggccaggctgatcttgaactcctgaccttgtgatccacctgtctcagcctcccaaagtgctrggattacaggcgtgagccaccgtgcccggccgatcctcttcatttttagttgctatacagtgctccataatacgaataataatttagtcattcctttatt

SEQ ID NO: 385383 - DNA, 201 bp, Homo sapiens
ccactgcaccagacctgcttttgtttccccatggtagccgccctgaacctacggcttggatagaatacccctacgttctctctctcaccttcatagctgaycccagttttaatagcattcctcttttgaggcttatgcatggttattgcctctgtaaacctagttctgctgctgctatctcttttttttttttttttttga

SEQ ID NO: 385384 - DNA, 201 bp, Homo sapiens
ggaatgcagtggtgcgatcttggctcactgcaacctctgcctcctgggttcaagcgattctcctgtctcagcctaccgagtagctggggttacaggtgtgyaccaccacacctggctaatttttctatttttagtagagatgggggtttcacgatgttggccaggctggtctcgaactcatgacctcaagtgatccacctg

SEQ ID NO: 385385 - DNA, 201 bp, Homo sapiens
tttatttattaaattatttttaagttttttttgagatgaagtcttgctctgtcgcctaggctggaatgcagtggtgcgatcttggctcactgcaacctctkcctcctgggttcaagcgattctcctgtctcagcctaccgagtagctggggttacaggtgtgcaccaccacacctggctaatttttctatttttagtagag

SEQ ID NO: 385386 - DNA, 201 bp, Homo sapiens
attttaggacatttttatcatcctagaaagaaaccttgtgttcattagctacgactctccattccccccacagcccctgccaaacagtaatttattttcamtgtaggtttgcctcttctgaacatttcatataagtggtatcatacagtatatgatcttttgtgattacttcttcatatagcatatgttttcaaacattca

SEQ ID NO: 385387 - DNA, 201 bp, Homo sapiens
ggctggtctcgaactcctaacctctggtggtccacccatcttggcctcccagagtgctgggattacagatgtgagccattacatccggctgtttttttttyttttccccagagttctatttgtgtttactagatccaccttattagccatgatattaaaattctctttctaccataattttgtaggtgtgtgtgcaatcta

SEQ ID NO: 385388 - DNA, 201 bp, Homo sapiens
aattttaggacatttttatcatcctagaaagaaaccttgtgttcattagctacgactctccattccccccacagcccctgccaaacagtaatttattttcwatgtaggtttgcctcttctgaacatttcatataagtggtatcatacagtatatgatcttttgtgattacttcttcatatagcatatgttttcaaacattc

SEQ ID NO: 385389 - DNA, 201 bp, Homo sapiens
tatctttagtagagactgggtttcaccatgttggccaggctgatcttgaactcctgaccttgtgatccacctgtctcagcctcccaaagtgctgggattayaggcgtgagccaccgtgcccggccgatcctcttcatttttagttgctatacagtgctccataatacgaataataatttagtcattcctttattatttaaa

SEQ ID NO: 385390 - DNA, 201 bp, Homo sapiens
gaacacctgacctcaagtgatctgcctgcctcggcctcccaaagtgttggaattacaggtgtgagccaccgttcctggcctcaactttttgactaacatgycttggagttcttcccacttcagaacataaagatcctcttcatttttgttttgttttgagacggagtctcgccctgtcacctaggttggagtgcagtggtg

SEQ ID NO: 385391 - DNA, 201 bp, Homo sapiens
tcccaagtagctgggattacaggcatgtgccaccacgcccggctaattttgtatttttagtagagacagggtttctccatgttggtcaggctggtctcgawttcctgatctcaggtgatctgcctgcttcagcctcccaaagtgctgggattacaggggtgagtcaccttgcccggcccagattctgcctgttattctgca

SEQ ID NO: 385392 - DNA, 201 bp, Homo sapiens
caatgtttgttttccgtgggtttccaaagagctgctctctaatactttaagtcccttttattcgtcaatttcgggcttactggaaaatggtgaactgcccyttgagttgcaccaggcctgaaactgtattccgtgcacctctaaggtggctgcccttcttctcgtgagaatccaggtcatctctcacccacatatcccctc

SEQ ID NO: 385393 - DNA, 201 bp, Homo sapiens; identical to SEQ ID NO: 84588

SEQ ID NO: 385394 - DNA, 201 bp, Homo sapiens
ggcggcggcaggagccactgcggcgccgggcgagcagcgcgtcggtgcccgcggtcggggcctcggctgagggcacgaggcgggatcgactgggctcttasagcggccccacctcggtctcccgccagcgcgtcgaaagcctgaggaaaaagcggccgcgtaagtgttccgtggggcgccctcccggcccgccctgccccc

SEQ ID NO: 385395 - DNA, 201 bp, Homo sapiens
gttctgacttatttttcttccccatttagtttttccatggtttggactggatatcggtggaactctggtcaagctggtatattttgaacccaaagacatcrctgctgaagaagaagaggaagaagtggaaagtcttaaaagcattcggaagtacctgacctccaatgtggcttatgggtctacaggcattcgggacgtgca

SEQ ID NO: 385396 - DNA, 201 bp, Homo sapiens; identical to SEQ ID NO: 84592

SEQ ID NO: 385397 - DNA, 201 bp, Homo sapiens; identical to SEQ ID NO: 84594

SEQ ID NO: 385398 - DNA, 201 bp, Homo sapiens
gaaaggacctagctctgaaacctgtgtaaatttcatgcttccacacacatgtgtgtgtagaataatgatgtattctatgtatgtgatttagaagttgataygtactgatcagtagaaaaattattgagggaaggtagtatgaaaagagaggattagccgggcgtggtggctcatgcctgtaatcccagcactttgggaggc

SEQ ID NO: 385399 - DNA, 201 bp, Homo sapiens; identical to SEQ ID NO: 84595

SEQ ID NO: 385400 - DNA, 201 bp, Homo sapiens
ctttcttgctgagtatatttaataaatatgtaaggctagatgtttccgtttaagtactactttgggtatatcctattggtttctatatattgtattctcaytgtcattcatttaaaaataaattttgttttgatttcctttttaatcccagagttaatagtttaaaaatttcaaagtagatagatttatttctttgtttgt

SEQ ID NO: 385401 - DNA, 201 bp, Homo sapiens; identical to SEQ ID NO: 84597

SEQ ID NO: 385402 - DNA, 201 bp, Homo sapiens
aatcacttgaaccaggaggcaaaggttgcggtgagccgagatcgtgccattgtactctagcctgggcaaaaagagctaaactccatctcaaaaaaaaaaaatgaggattagatggaagaagagaatgtttcggcttaagggtcagaggtcacttcaggaaaaacaggcatctagggattgggataaacaatttttttaaaa

SEQ ID NO: 385403 - DNA, 201 bp, Homo sapiens
gctgggattacaggcgtgagccaccgtgcccagccgggtttttttttttttgagatggagtctcgctctgtcatccaggctggagtgcagtgatgtagtgtaggctcactgcaacctccacctcctgggttcaagtgattctgctacctcaggctcccaagtagctgggattacaggcatgtgccaccatgcccggctaat

SEQ ID NO: 385404 - DNA, 201 bp, Homo sapiens
tgctgggattacaggcgtgagccaccgtgcccagccgggtttttttttttttgagatggagtctcgctctgtcatccaggctggagtgcagtgatgtagtgtaggctcactgcaacctccacctcctgggttcaagtgattctgctacctcaggctcccaagtagctgggattacaggcatgtgccaccatgcccggctaa

SEQ ID NO: 385405 - DNA, 201 bp, Homo sapiens
ttgtttctgttggcttattaaaaagtctgagtacattcttatttcattacagataggtgatcttcagctttgcaaactggatgaactagattgcttgatcwaaggaattttatacattgactcagtcggattcaatggacggtcacagtgctattactttgaaaaccctgctgattctgaaaagtgtcagaagttaccatt

SEQ ID NO: 385406 - DNA, 201 bp, Homo sapiens
accatcttggccaggctggtctcaaactcctgaccccgtgatccacctgcctcggcctcccaaagtgctgggattacaggcgtgagccaccgtgcccagccgggtttttttttttttgagatggagtctcgctctgtcatccaggctggagtgcagtgatgtagtgtaggctcactgcaacctccacctcctgggttcaag

SEQ ID NO: 385407 - DNA, 201 bp, Homo sapiens
gtttcaccatcttggccaggctggtctcaaactcctgaccccgtgatccacctgcctcggcctcccaaagtgctgggattacaggcgtgagccaccgtgcscagccgggtttttttttttttgagatggagtctcgctctgtcatccaggctggagtgcagtgatgtagtgtaggctcactgcaacctccacctcctgggt

SEQ ID NO: 385408 - DNA, 201 bp, Homo sapiens
ttagtagagacggggtttcaccatgttagccaggatggtctctatctcctgacctcgtgatccgcctgccttggcctcccgaagtgctgggattacaagcrtgagccaccatgcccagcctactgaactatgtatttcccattggaaagtgtgatgttgtgaaatatatatattggtcttttgcccatttcctggcataca

SEQ ID NO: 385409 - DNA, 201 bp, Homo sapiens
tcctgggttcatgccctttctcttggctcagcctcctgagtagctgggactacaggtgcccgccaccacgcctggctaattttttttttttttttttttttgtatttttagtagagacggggtttcaccatgttagccaggatggtctctatctcctgacctcgtgatccgcctgccttggcctcccgaagtgctgggatt

SEQ ID NO: 385410 - DNA, 201 bp, Homo sapiens
gcttgagcccggaagattgaggttgcactgagctatgatcatgccactgcactcgagcctgggcgacagagggagaccctgtctccgttttttttttttttctttttttttttctcaaaacatttcaaaaaataggaggaggaagatagactaggctattgtagagcatcaggcaatgaaaagaatggctattttgattat

SEQ ID NO: 385411 - DNA, 201 bp, Homo sapiens
tttgagacagtttcactcttgttgcccaggctggagtgcaatggcgtgatctcggctcaccacaacctccacctcccaggttcaagtgattctcctgcctyagcctcccgaatagctgggattacaggcatgcgctaccacgcctggctaattttgtatttttagtagagacaaggtttctccatgttggtcaggctggtc

SEQ ID NO: 385412 - DNA, 201 bp, Homo sapiens
aataaaaggtgaaaaataaatagaaacagttttgcatggattcttttgtacgttgtttatttagttgtatataattttatcgtgttaatttttgcagccayacacatctggcaatcgttttttaatttttgatttttctctatggtagctttttttatggatgagttatgattttacctctgagaatatttttgattctgt

SEQ ID NO: 385413 - DNA, 201 bp, Homo sapiens
ctccagcctgggaaacagagcaacacgctgtctctaaaaataaaaataaaaggtgaaaaataaatagaaacagttttgcatggattcttttgtacgttgtktatttagttgtatataattttatcgtgttaatttttgcagccacacacatctggcaatcgttttttaatttttgatttttctctatggtagcttttttta

SEQ ID NO: 385414 - DNA, 201 bp, Homo sapiens
gtgaaagatagagtggtagttatttatgtttcagagacttttaaaaaatccatacacaagtctttcaggatcttctcattccttttttagttatttctttwaaaaagtagtctgatatcttaccttacaggttggagaccctgatggattctgcatcgttttaggatttgcctctgattcttgctagtgttctcttttctg

SEQ ID NO: 385415 - DNA, 201 bp, Homo sapiens
tacacaaagtagctaaagttattaggcagcatctgtaaggagaaggcacgggaaaggacctagctctgaaacctgtgtaaatttcatgcttccacacacaygtgtgtgtagaataatgatgtattctatgtatgtgatttagaagttgatatgtactgatcagtagaaaaattattgagggaaggtagtatgaaaagagag

SEQ ID NO: 385416 - DNA, 201 bp, Homo sapiens; identical to SEQ ID NO: 84609

SEQ ID NO: 385417 - DNA, 201 bp, Homo sapiens
gagactccatctcaaataaataaataaacaaataaataaaaatcaagtttgtttttcctagcatttaccactgtttgatatgatcttctttatttgtttayttgtcatggttcatgtcctagtctcctgcatgtggaccctgtgagagccagggccttgtctgccaccatatccttgatgttatgaactgtgcttgccaca

SEQ ID NO: 385418 - DNA, 201 bp, Homo sapiens
agttcgagaccagcctgggcaacagagcaagaacccgtctctacaaaaatatttaaaaaaaaaaaaaaagaaagaaacctcatttgtttaatatgaccttkgcccttgcagaatttataatcttgcttgtgagttaacatttacaaaattaccaatcaaatccttttattttagaggtgaagatatggagactctaagggg

SEQ ID NO: 385419 - DNA, 201 bp, Homo sapiens
ggaacttcacagatgagctaattgtaccttttgttttagtcctttttccagcctctcccagctaggcagaacatctgtacagtcctcccacttgttcacaragttccctctttatcttgcatcctctggagcttgttaggagagggtcagcctccatacatgggacttaccatggttcccaaaccagccatgcaaccaagc

SEQ ID NO: 385420 - DNA, 201 bp, Homo sapiens
aataataataacctataaatactaataaatgagccagtatagtataagtgagtactatactaagcagtgaaggaagaataatttcatggagggaagtccayggtagaagcaggctgctaggtattattatcgttttcacatactattcactttatgaagagatttaacatagctcagggtaatatggtctcattcaaatgc

SEQ ID NO: 385421 - DNA, 201 bp, Homo sapiens
tctggagcttgttaggagagggtcagcctccatacatgggacttaccatggttcccaaaccagccatgcaaccaagcttatgattgcttaaaaatatactrcaacagaccaggcgcggtggctcacgcctgtaatcccagcactttgggaagccgaggtgggcggatcacgaggtcaggagatcaagaccatcctggctaa

SEQ ID NO: 385422 - DNA, 201 bp, Homo sapiens
ggaagaggaaggccgcagccagcgcagagtgccctgacctccacccggccatgtattctacatgttgcctcacctccaccacagaagctgaggcccaggaragccaacccagacctgctggcccagggtcccactagggacgtaggctagcccatatgctgcctggatgacagaccgagggaggggcacactagctggcct

SEQ ID NO: 385423 - DNA, 201 bp, Homo sapiens
atttctgttgtttatgagccacccagtctatggtattctgttacaggagcccaaactaactaaggctatattatgcatatatttaagatcttttatatttrcccacatatctttcttctctagtgtttttcattcctttcccaagatctgttcttctgtttggcatcattttccttcacctgaagaacttattttagtatt

SEQ ID NO: 385424 - DNA, 201 bp, Homo sapiens
cagcctttagaattgtaggaaataaatttctgttgtttatgagccacccagtctatggtattctgttacaggagcccaaactaactaaggctatattatgyatatatttaagatcttttatatttacccacatatctttcttctctagtgtttttcattcctttcccaagatctgttcttctgtttggcatcattttcctt

SEQ ID NO: 385425 - DNA, 201 bp, Homo sapiens
tttccctctcaaattggcacattctctgtgagctttggagacttcacagtgtggctcacagtttgggaacaatttgcatcatcatctgactggtaagttcyagttctgtggtaactcaagtgtttcaaatagcttaatacgcaatagggcacggaggttcgttctgcttctgttggaatcaaacacacatttccacaatgt

SEQ ID NO: 385426 - DNA, 201 bp, Homo sapiens
cctgtgtttcctgccaccacgtggcctttgcacttgcggtttcctcttactggaatttcctcccgccctccctgcttgcttcagtctggttaactcctacrtatttatcctctatatctctgcttgcccgactcctttttggaggagcttttcctgatcctctaggtcaaggggagctcccaacatctccccattagtgcc

SEQ ID NO: 385427 - DNA, 201 bp, Homo sapiens; identical to SEQ ID NO: 84612

SEQ ID NO: 385428 - DNA, 201 bp, Homo sapiens
gtagtgattttatttatttttattgtcttatttttaattttgatttttaaaataaaatttaccatctttactatgtttaagtgttagttgaatagtgttamgtatagtcacataagtcagtatacagttttaaacaatgtatataacaatatatattaaacataggaattttggactgaatgtttttatccctccctccca

SEQ ID NO: 385429 - DNA, 201 bp, Homo sapiens
cctccccgtgcccctggagaccagcctcccagctggcaggaactgtgcaggaggagttgatactcaggatctgaatgtgagggccgaggagggcgaagagygtgggtggggaggggatgttgctttggggtctcatggtccccagagggcactagggagtcacttttggctccgctggtgcatgaagtcacctgtggccac

SEQ ID NO: 385430 - DNA, 201 bp, Homo sapiens
ccaaaatctgactaggtttttaaactgaggtaagaaacataaaggaattacttgaaaagaatttattaatcaccatccatgaaagtagactttgtatactyacaactaatggtcaagatcttacactaccacatctacatgtaaatttatgcaaatgaatctcatttgttcatgtaaattttaatttcttccaacacgaga

SEQ ID NO: 385431 - DNA, 201 bp, Homo sapiens
atcaggcttcacctccaaggacacctatctaagccattttaaccctcgggattacctagaaaaatattacaagtttggttctaggcactctgcagaaagcmagattcttaagcaccttctgaaaaatcttttcaagatattctgcctaggtaagtctgttgtctgcatgtctccccactaatgtgagtcatatagatggag

SEQ ID NO: 385432 - DNA, 201 bp, Homo sapiens
agggcagtgctccagtggtacagaagtgagacataatggaatcaggcttcacctccaaggacacctatctaagccattttaaccctcgggattacctagaraaatattacaagtttggttctaggcactctgcagaaagccagattcttaagcaccttctgaaaaatcttttcaagatattctgcctaggtaagtctgttg

SEQ ID NO: 385433 - DNA, 201 bp, Homo sapiens
ttgttcacctgtgtctttcttcctgttttcccttggtgaatgcagtaatttttagtattccatttagtataagtgtacatatttttagtatttattttttmtctcccctgttaacctcttctgtgtcttgtgtgagtttgtgtggtttttctaggaattgcaatatgcatccttgacatatctattgtctcatgaaggatg

SEQ ID NO: 385434 - DNA, 201 bp, Homo sapiens
ttattaagatggtcttatgattttcctcctgtattctgaaaatgtgaattacattggaaaattttgaatgttacaccaaagtggcataaactacttggtcwtgaagtataattgagctataattttcttctagtgtgcttcacaaattttgatatcagcatgatgctggctggagtcataaaatgagttgggagtgatatc

SEQ ID NO: 385435 - DNA, 201 bp, Homo sapiens
caggcagagaaagaatgggctgattgtcagaagcacattgcagagacagccggcaagtggaaagagcactgactgcagggttggcggtccctaggcttgcycgtgccaatagctgatgtcatgactgcatctccaggactcagtgtcttcatctgtaaaaggagtgacctgattctgatattctgagattctgtgagtgtg

SEQ ID NO: 385436 - DNA, 201 bp, Homo sapiens
ataaaggaattacttgaaaagaatttattaatcaccatccatgaaagtagactttgtatactcacaactaatggtcaagatcttacactaccacatctacrtgtaaatttatgcaaatgaatctcatttgttcatgtaaattttaatttcttccaacacgagaaattggcaatagcctattagccagaggtagccacgcct

SEQ ID NO: 385437 - DNA, 201 bp, Homo sapiens; identical to SEQ ID NO: 84620

SEQ ID NO: 385438 - DNA, 201 bp, Homo sapiens
cttacttagccttgatttccttgacctgttttgatggttctttctcaggagagcctgcaggaacttctgaggatggggctttggggatgtgaggacaatgraaaacagcttgtcagggagatactgatgcactgccagccttgctgagacagggcaggaggaaccgcctctaaatctcaggatagttcacctggaatgtgg

SEQ ID NO: 385439 - DNA, 201 bp, Homo sapiens
tttacaatatccttttaataccttattatgtctgtaggatctgtagtgatctctcctctttcattcttgatattggtaatttgtcttgttttctttctgtkgtcttgatcaaccttgctacagattgatcattttattaatcttttccaaaaaccaacttttggctatgttgatttttctctattgtctgtccattttcta

SEQ ID NO: 385440 - DNA, 201 bp, Homo sapiens
agaccttaaaattcctggcaacatgcctccaccctggattggggaataaaaaatgaaaagttttttttttttctttttgactttaaattttattaaagttkgaggtttttcaaactgatgtgctttatttaaaattcaagtgagacatttttagtctttttgatatttatattttctttgtcactatgatgtaaattacag

SEQ ID NO: 385441 - DNA, 201 bp, Homo sapiens
aagaaataacatactatgttaggtgaacttcaagaaaagtgaaagaaccttagatgtaattgtggcactatccctagagggcactactaaggctgtggtaraacaggacagtgctccaagccagcagagaggaccagaggtaactgttgataggcatgggtggtgggcaggtaagtgatcgattcattcaacaaatatttg

SEQ ID NO: 385442 - DNA, 201 bp, Homo sapiens
accaggagggcacattgctggggtcagaagaggggacaggcaccgaggcaggggctgggaggatgccgccgtggggctgcagggtgttctccagggacctyaagcgggagctccccgcatgccctgtagtcctggctgggttcaaggaggcgtttgggtcatttcagccttagcagctctcctcccagtctctctgaggaa

SEQ ID NO: 385443 - DNA, 201 bp, Homo sapiens
tagtgataggacagatgtcctaaataggtatcgtaccgttacagtaattagtaggaagcaaagaaaaatcaatggaacagagcagatagccctaaatcagrtcccagtaagttttgtaagtaagcatgtgacaaaggagcaacaagccgaggaggaaaggaaacaaagcaaaatagtgcagatagcacagaagccactcag

SEQ ID NO: 385444 - DNA, 201 bp, Homo sapiens
gccccgccgccatccccacttccactcgtgggctggcaggagggcaggctcctctccaggctgcgttttctgcacccagggggtgcctcagtgaaagtgasgctcatttaaacctgactctgccgccctgcagccccctgcagcgctaattaccctgtagttctaaactgattgctgtacactaagcttaagccctccttt

SEQ ID NO: 385445 - DNA, 201 bp, Homo sapiens
gctgcaagtaaaaggctaacccagcttctcaccagcagcttttggatgtcagtgcttgtcccttgcctcactgccatgctgctgtagccatccaagcctayagaacttggctgtgagtgtggctaatgctgacatcaccagatacaaccaaaatctgactaggtttttaaactgaggtaagaaacataaaggaattacttg

SEQ ID NO: 385446 - DNA, 201 bp, Homo sapiens
gatttcatatccagatattttgctaaactgttatattgtaataatttacttgtagattatttttcattctctctctatatcatcatgttatctgctaatartaacagttttttctttttcctcctcaatacttacatttttaacctttttttaacctgccgtactgtccaggatgttgaatgaaattggtatttgttaaca

SEQ ID NO: 385447 - DNA, 201 bp, Homo sapiens
ttttgtaggtaatctttatctgattaaggaagtcttattctatttccagtttggcaaggattgtttttgttgtgaatggatatagaatttaagctttttcttttttttttttctgcatctgttgaatggatcagaagatatttttcctttaacatgtacatgtgatgatttgtattaattgaattttgaatgttaaatcac

SEQ ID NO: 385448 - DNA, 201 bp, Homo sapiens
taatccctgccactgacaagcctgataaagtgagacccagagtgacgtgggcttcctgtttctaatggactatgtgtccatcctcttattaaaagtcagckcctcctcttgggctctggatcatatcctctcagtctttccaagccctttgctcctgtgcttgtcttctgtttgctacatccatttccccctctcttccta

SEQ ID NO: 385449 - DNA, 201 bp, Homo sapiens
tgcctggggtcagtccacaaagacaccctgcttccattctacatctcctaggtctgtgaattgacatttgaagatacaacagttgcaataatctgagacartttgcctgccacatgcaacttcttgcaatgggcaatcttaataccacacaggtttcctttactccctttccccaccccaacacacttggtgagcaggatc

SEQ ID NO: 385450 - DNA, 201 bp, Homo sapiens
attcctcaatacctcagattgaatagtaaaatacgtactgttaaggccattttactcaccaaaactgaggcttaagagtctcaaaagttagtttttccagytgtccattttacaaattgctagtagcaaaccaggataacaacttacatctttggactttctggatgtctcctgctgtgctccattactagggcagtcagc

SEQ ID NO: 385451 - DNA, 201 bp, Homo sapiens
tttgttttagcacatttacaatatcattctcttgtcttctagcaagcttcctagtcctgcaaagtcagctgttagtgtaactatcacttgtgttttttctstagatgtttttaacatcttttgtagtctttggtgttgcagttttttatcagtaaaatgtctaggagggaattgcttttcaaatattttgcttgtgattca

SEQ ID NO: 385452 - DNA, 201 bp, Homo sapiens
tctaaaacttggctataccactgtctagcagcgtgacctgggcaatttactttacatttttgtgccttgattttctcatatgctgaaatggggataataayagcccttaactcacaaaacttctgtaaattttagtaatatgtccaaaatgcttaaaccagttcctgaaaaatagtaagcaccatatacatatttgctact

SEQ ID NO: 385453 - DNA, 201 bp, Homo sapiens
tgtatttttagtagagacggggtttcaccgtgttagccaggatggtctcgatctcctgaccttgtgatatgcccacctcggcctcccaaagtgctgagatkacaggcgtgagccactgcacccggccatctttttttttttttttttttttttttgagcagagtattgctctgtcacccaggctggggtgcagtggtgtag

SEQ ID NO: 385454 - DNA, 201 bp, Homo sapiens
ggacacatgtcattatatatttgtccaaatccatggaatgtacaataccaagagtgaatcttaacgtagattacagactttgggtgataatggtatgccartgtaggccttctgcttgattttgcggtgaacctaatattgctgtaaaaaacaaaatcaatttttaaaaaatgacagctttttattgggtattctgtctct

SEQ ID NO: 385455 - DNA, 201 bp, Homo sapiens; identical to SEQ ID NO: 84613

SEQ ID NO: 385456 - DNA, 201 bp, Homo sapiens
  misc_feature (1)...(201): n = A,T,C or G
aaagcaacagacagatagggaccaaagagaaatccaaatggagaatgagtggtaacgagagagcgagagcaagagagatgagataggcccatgtgtgtgcntgttagtaaatttgtgtatgtgcacgtgcatgtgtgcaccagagtaatggaagacacagggagagggttgaagaaatggatactgagcaaagaggagtaa

SEQ ID NO: 385457 - DNA, 201 bp, Homo sapiens
tagcacaacagggtgaatatagtaaaaaataatttatttgtaccttcaaaaataactagacaagtataattgggttgtttgtaacacacaaaaaataagtrcttgaagtggtggataccccatttaccctgatgtgattattttgtattgcaggcctctatcagaatatctcatgtaacccataaatatatacacctactc

SEQ ID NO: 385458 - DNA, 201 bp, Homo sapiens
ttttttttttttctttttgactttaaattttattaaagtttgaggtttttcaaactgatgtgctttatttaaaattcaagtgagacatttttagtcttttkgatatttatattttctttgtcactatgatgtaaattacagggatttggggaaaatatgggattttttttttttttttggagatatagatctcactctgtt

SEQ ID NO: 385459 - DNA, 201 bp, Homo sapiens
agtgagacagggaaagcaagcaatctgatgcaggggggattaatgtggaaaactagggctcagccactttaattccatctttcttatttttaaccacacawggcattattttttatgtctattagaatcacccacatgttggccttctcagttaattcttcattccttcttgcatttcagaccttccactggggttcacat

SEQ ID NO: 385460 - DNA, 201 bp, Homo sapiens
gcagggatgtgatcacagctcatcatagtctcgaactcctggactcaagggatccttctgcctcagcctctccaataactaggtcttcaggcacacgccaycatgcctagctaattttaaaatttttttgtagagatgaggtctcactatgttgtccaggctggtctcatcctccaggcctcaagtgatcctcctgccttg

SEQ ID NO: 385461 - DNA, 201 bp, Homo sapiens
atggttacttggattttccgtttgttcttttgtctgttttggtaagtggtacttttcaagaagtttgtcctttttatcttggttgtcaactttattggcatttttttttttttacaatatccttttaataccttattatgtctgtaggatctgtagtgatctctcctctttcattcttgatattggtaatttgtcttgttt

SEQ ID NO: 385462 - DNA, 201 bp, Homo sapiens
cctccgagagctctctcccctcctctgagggctagatgaagagaatccaatggaaggctctggggccttagagccacacaatggaagaagtctgagtgccsaaaggaccactgggggagtacccttcccttgcctgccatcatggtctgtgatgtgaaaacaaacatttattttgttaagccactgaggtttgaggtctgt

SEQ ID NO: 385463 - DNA, 201 bp, Homo sapiens
ttgtcaactttattggcatttttttttttttacaatatccttttaataccttattatgtctgtaggatctgtagtgatctctcctctttcattcttgataytggtaatttgtcttgttttctttctgttgtcttgatcaaccttgctacagattgatcattttattaatcttttccaaaaaccaacttttggctatgttga

SEQ ID NO: 385464 - DNA, 201 bp, Homo sapiens
gtctttatagcagcatgatttataatcctttgggtatatacccagtaatgggatggctgggtcaaatggtatttctagttctagatccctgaggaatcacyacactgacttccacaatggttgaactagtttacagtcccaccaacaatgtaaaagtgttcctatttctccacatcctctccagcacctgttgtttcctga

SEQ ID NO: 385465 - DNA, 201 bp, Homo sapiens
tcctctccagcacctgttgtttcctgactttttaatgatcaccattctaagtggtgtgagatggtgtctcattgtggttttgatttgcatttctctgatgrccagtgatgatgagcattttttcatgtgtctgttggctgcataaatgtcttcttttgagaagtgtctgttcatatcctttgcccactttttgatggggtt

SEQ ID NO: 385466 - DNA, 201 bp, Homo sapiens
ggagcaggtagacccaaccaaggataatttttgttttctatgtagataccagtttagtggttggtaggaattcccccaaatcaacaccttgctaagctcatctctctctctctctctcttttaatataacagcttattgagataaaactcacataccatacaattaatgcacccatttaaattgcgaaattcagtagtttt

SEQ ID NO: 385467 - DNA, 201 bp, Homo sapiens
accacctgacccgtgtctgccgcatgccagaggaaggagcaggaggcaacagggcagtggtgcttcatagttgggagctgcctgggtgttgctgggcaggrtgcggggcaggagaggggctggggggttgcatatgtagacacctggtccttggcccatgggggcaggtccatcccccagctctctgtgtggtttcaggcc

SEQ ID NO: 385468 - DNA, 201 bp, Homo sapiens
gagcaggtagacccaaccaaggataatttttgttttctatgtagataccagtttagtggttggtaggaattcccccaaatcaacaccttgctaagctcatctctctctctctctctcttttaatataacagcttattgagataaaactcacataccatacaattaatgcacccatttaaattgcgaaattcagtagttttt

SEQ ID NO: 385469 - DNA, 201 bp, Homo sapiens
ggccagaatctggaagactgacaacaccaaatgctgatgaggctgtggggaaagaggaactcttatttattgttcgtgggaattaaaaatggtgtagccaytttggaagacaattcgactattccttgcaaaactattcaatctagcagttgcactccttggtatgtaacccagaaagctgcatgtattacactcctcagt

SEQ ID NO: 385470 - DNA, 201 bp, Homo sapiens; identical to SEQ ID NO: 84621

SEQ ID NO: 385471 - DNA, 201 bp, Homo sapiens
ttggttctgtggactcgtcctctaagtttctaagtttctcctggtttccttgttctgtcagcccagtgagtttctgcatttgccacctctgttacactccrgagtccacctttactctcttagccattaaccactttttacttagtcaattctttatactaaattttatattaataatttctgactcaagtttaaggtggg

SEQ ID NO: 385472 - DNA, 201 bp, Homo sapiens
aatctgaaatttttgtgcgagagaagactttattaaaaacagtatttctttaatggttacttggattttccgtttgttcttttgtctgttttggtaagtgrtacttttcaagaagtttgtcctttttatcttggttgtcaactttattggcatttttttttttttacaatatccttttaataccttattatgtctgtagga

SEQ ID NO: 385473 - DNA, 201 bp, Homo sapiens
gtagatcttttttaccttctcctagaccttaaaattcctggcaacatgcctccaccctggattggggaataaaaaatgaaaagttttttttttttcttttkgactttaaattttattaaagtttgaggtttttcaaactgatgtgctttatttaaaattcaagtgagacatttttagtctttttgatatttatattttctt

SEQ ID NO: 385474 - DNA, 201 bp, Homo sapiens
aaagacattatatactcaatttcttttttaattaactttccttgaaagtattgcttaatagtttttacattctccatgtaacagactttctggatctggtsttcagtctgtacaccagatgtagatcttttttaccttctcctagaccttaaaattcctggcaacatgcctccaccctggattggggaataaaaaatgaaa

SEQ ID NO: 385475 - DNA, 201 bp, Homo sapiens
gaaacctctaaatttaatgtttcaatgtataggcataaagttatttgtaatatcttgttattatcttttaaatgtctgcagcatctgccatgaggttcccmtttttattcctgacactgggcatatgagccttctctcttttttgccttgatcattctagctagaaatttgttaattgtatttatcttttcagagaaccaa

SEQ ID NO: 385476 - DNA, 201 bp, Homo sapiens
aaagtcaagacacaacatgagagggattagaagttccagtgtgtttgagaaagttccagtttggcactgtttactgttgcaaccattttaatagatacacrctccatgagctggctcttgtctccctcttcagccagttgaaagggcttcttgaacaggtttgcacatttccacaggggctttggagaactgagtttttct

SEQ ID NO: 385477 - DNA, 201 bp, Homo sapiens
atatgtatatatcacattttatttacctattcagaagttgacggttgcattgtttgcaccttttagctgtttataaacattcattacaagtttttgtatgkatatatgttttcatttctcttgggtatatacctagacagatttcctgggtcatgtggtaactctatatttaaccttttaaggaactgccagactgttttc

SEQ ID NO: 385478 - DNA, 201 bp, Homo sapiens
tctcaaaaaaaaaacaaaacaaaaaaaagaaactcctccttcctcccctagtttgaagcattcaataaatacaaacagaaaatcagaaaacaagggtggtrggggatggcagatgaagtgttacctacactaatatttctcaaactgcaagttgccattcatcaatgtatcataaaatcaatttggtgcaccaaatccaca

SEQ ID NO: 385479 - DNA, 201 bp, Homo sapiens
ttttcaaactgatgtgctttatttaaaattcaagtgagacatttttagtctttttgatatttatattttctttgtcactatgatgtaaattacagggattkggggaaaatatgggattttttttttttttttggagatatagatctcactctgttgcctaggctggatggagtgcagggatgtgatcacagctcatcatag

SEQ ID NO: 385480 - DNA, 201 bp, Homo sapiens
cgccagctctgccagctttacatgctctttgacccagatatgatctcatggagagaaaggggccctggccaggccagcctgagaatgctccctccgtggcstgactcaacccctctcctccctgcctggggcaggcggccccactgccgccccctgccagccccggctgccactgccctctgccccaaccctggcaattgt

SEQ ID NO: 385481 - DNA, 201 bp, Homo sapiens
tttccttgaaatcaaacagaccgaccaagtcatgagcaaacaaggactagggtcattctggtcctaacttgtaaatctctttgaccgctgacccagctccrgttttttaaggtcctactttctggggaaatgttcaacagtctcactttaagcaaacctttgtgatgcaggaagctgcaagtctctctgtaacatcctggg

SEQ ID NO: 385482 - DNA, 201 bp, Homo sapiens
ctggccttggggcacagcagctctctgaagaccagatgggccccatcagggtgcagcatacggacccacggaaccaagcacccaggctctactctgatgcyaaatagcttggtggctgccgtgcggtgcaccctagaggaagaggggcagctgagatttggcagaatctgggattcagtcgaggggacctgggtttgaggc

SEQ ID NO: 385483 - DNA, 201 bp, Homo sapiens
ttctttaacaaaaaatatggataattatttttatggatacacacatttaaaaatttcccttttaggtctatacacaaaatgcaaattttaataaactgtaragaggatcttggccagaatagcatgagaaatgataactattagattatgcagttaactcaccatcaccttctatttgctgtttattcaaagaagagaaag

SEQ ID NO: 385484 - DNA, 201 bp, Homo sapiens
tgtccaaaacagagctaccatctgctccagatctgctttatttctggtattcttagctccttgaatggcaccatcatataataaattggacaagccagaasctggaagtcaatttgtcctttccctctctgtcatgttccatatctaacttaacatcaagctctgtccattttacttcctgacttcctctgtaacccattt

SEQ ID NO: 385485 - DNA, 201 bp, Homo sapiens
acagggaacctcatgcactgctgatgggggtgtagactggtatagccttgctgggggcaatctggtggttcttactcaaattaaatatgtggataccttargattcaccagttctactactgggaatgccccccataggaattctcacacaggtctctatatgaaggagacatggatgtctctggaatcattgtgttgggg

SEQ ID NO: 385486 - DNA, 201 bp, Homo sapiens
tgggaggacggtgtcactagactgtggattagggatggtaaagtagggaggatgctattttgcaactatagtaacgacttagtgttttggaaaggaaaagragttaaacttgaaatacgtgactagaacagttgtcatgtttataatgtgaaaagggtgaaatcatttgggggaggggccgtctgtaagaaatcattatgc

SEQ ID NO: 385487 - DNA, 201 bp, Homo sapiens
gactttaaattttattaaagtttgaggtttttcaaactgatgtgctttatttaaaattcaagtgagacatttttagtctttttgatatttatattttcttkgtcactatgatgtaaattacagggatttggggaaaatatgggattttttttttttttttggagatatagatctcactctgttgcctaggctggatggagt

SEQ ID NO: 385488 - DNA, 201 bp, Homo sapiens
gggtgatttttagcttgtaatttttttcttctcataagtaaccttgatattaggctttagctagacttataaagttagttgaggggtattttctctttttktattctctgagtttgtgtaagattagaattattgattacttgaatatgtggtagaattcactggtaaagccatctgctctgaagattttgtatgaaacta

SEQ ID NO: 385489 - DNA, 201 bp, Homo sapiens
tttttgttttctatgtagataccagtttagtggttggtaggaattcccccaaatcaacaccttgctaagctcatctctctctctctctctcttttaatatracagcttattgagataaaactcacataccatacaattaatgcacccatttaaattgcgaaattcagtagtttttagtatactttcagagttgtgcaacct

SEQ ID NO: 385490 - DNA, 201 bp, Homo sapiens
gtgtctacttcttggcttttgaaggtacctgagtgatggttggcaaaagcaacagacagatagggaccaaagagaaatccaaatggagaatgagtggtaaygagagagcgagagcaagagagatgagataggcccatgtgtgtgcatgttagtaaatttgtgtatgtgcacgtgcatgtgtgcaccagagtaatggaagac

SEQ ID NO: 385491 - DNA, 201 bp, Homo sapiens
cagaaagccagattcttaagcaccttctgaaaaatcttttcaagatattctgcctaggtaagtctgttgtctgcatgtctccccactaatgtgagtcatayagatggagtctcagggcacgactgggttttgtgtctctcgttgttgcttcacagcccttttggcatcacccatttatttaactaggataaaaacgaatat

SEQ ID NO: 385492 - DNA, 201 bp, Homo sapiens
tctggactcaccatatgcatccactaaaatctagagcaggccctgcgggagcacatcaaatttgatgggttatagttttggtgataattttgtttatttgytattaattaccaagcacatgaaatgctcccaaattactgatgcctcttactccaggagttgcttaatttggctctgccttggaattctttcctggcgact

SEQ ID NO: 385493 - DNA, 201 bp, Homo sapiens; identical to SEQ ID NO: 84618

SEQ ID NO: 385494 - DNA, 201 bp, Homo sapiens
agagaaatccaaatggagaatgagtggtaacgagagagcgagagcaagagagatgagataggcccatgtgtgtgcatgttagtaaatttgtgtatgtgcaygtgcatgtgtgcaccagagtaatggaagacacagggagagggttgaagaaatggatactgagcaaagaggagtaaacccccaaattttccaggcctttgg

SEQ ID NO: 385495 - DNA, 201 bp, Homo sapiens
gtttttacattctccatgtaacagactttctggatctggtgttcagtctgtacaccagatgtagatcttttttaccttctcctagaccttaaaattcctgrcaacatgcctccaccctggattggggaataaaaaatgaaaagttttttttttttctttttgactttaaattttattaaagtttgaggtttttcaaactga

SEQ ID NO: 385496 - DNA, 201 bp, Homo sapiens
ttcctcacccccacactctactccaactccccgacacacacacacagacacacacacacagcctcctcgcccctcccccagctcccctcccctccctcagscctcagctttctcttgacagatgggagggcagtgagcactccctctttaaaacaacatttaatcgccgttttctgttcttggacatcaaagctggggctt

SEQ ID NO: 385497 - DNA, 201 bp, Homo sapiens
ccagggacctcaagcgggagctccccgcatgccctgtagtcctggctgggttcaaggaggcgtttgggtcatttcagccttagcagctctcctcccagtckctctgaggaactcctctcctgaccaaagtggagagctgaggcccggcgccagcagaggtttgctgaagactcaggcaagttgcagcccgtgagaagaggc

SEQ ID NO: 385498 - DNA, 201 bp, Homo sapiens
cccttaacacactcaatgtttcttccccttttctcacttatctgatcttctgctacttctttctcctttgtccgcccctgctctctggtttctcttgtacmctctgtttatttaattttgatcatttgtttgtttgttcctttcttcctcctttaacaaattcaaataggatacaagccactctgtcccatctcctgccct

SEQ ID NO: 385499 - DNA, 201 bp, Homo sapiens
ctcctcccagtctctctgaggaactcctctcctgaccaaagtggagagctgaggcccggcgccagcagaggtttgctgaagactcaggcaagttgcagccygtgagaagaggcataagggaagccaaggccaaggccgcctccctccactcagcacggccaggccttcccatgtgggagcccctcacgcccctggcaccag

SEQ ID NO: 385500 - DNA, 201 bp, Homo sapiens
gacctgttttgatggttctttctcaggagagcctgcaggaacttctgaggatggggctttggggatgtgaggacaatggaaaacagcttgtcagggagatwctgatgcactgccagccttgctgagacagggcaggaggaaccgcctctaaatctcaggatagttcacctggaatgtgggaagacattctcagaaagggtt

SEQ ID NO: 385501 - DNA, 201 bp, Homo sapiens
cctttaccaagcaggtctaagtcagaccttcgatgccaatccccacttccctccagcactcacacatccagggatgtctggggagaggaggcccgctccgrgctccggtgtggtcaagccctgctggttctcccattctggggtacagaggtgctcataaacactgtccttgcctgcatctctgagtgccctcaaatcccc

SEQ ID NO: 385502 - DNA, 201 bp, Homo sapiens
gctgagatttggcagaatctgggattcagtcgaggggacctgggtttgaggccagctctgctgtgcaccgcgtgaccttcactgtatctcaaaggctcccraaggcctcacttcctcaaccctaagactggggtcagcaaatacctagcccacccatcctcaggacaattgtgaagccaactagtgtaacgacgtgaatca

SEQ ID NO: 385503 - DNA, 201 bp, Homo sapiens
ccaagcaggtctaagtcagaccttcgatgccaatccccacttccctccagcactcacacatccagggatgtctggggagaggaggcccgctccgggctccsgtgtggtcaagccctgctggttctcccattctggggtacagaggtgctcataaacactgtccttgcctgcatctctgagtgccctcaaatcccctgaggc

SEQ ID NO: 385504 - DNA, 201 bp, Homo sapiens
ctgggaaagaagcaggcaggcctcgaagggtttgcagaaggagcccagagtgcccctagggctgggtcactgagaccctgggacgtgacagtaaaaggctrcagggcaatgggacaaactcttacttcctgaggtcctgaaccttccgaaagcctagaaaacccataatggagggtcgctgaagtcagctcctgcctttaa

SEQ ID NO: 385505 - DNA, 201 bp, Homo sapiens
tatctcaaaggctcccgaaggcctcacttcctcaaccctaagactggggtcagcaaatacctagcccacccatcctcaggacaattgtgaagccaactagwgtaacgacgtgaatcagctttctaaacaccacgatgctataaacgtgagttatcaatggggacaggctctggctggtctggaaggggagctggggtccta

SEQ ID NO: 385506 - DNA, 201 bp, Homo sapiens
cggtagaagcaggctgctaggtattattatcgttttcacatactattcactttatgaagagatttaacatagctcagggtaatatggtctcattcaaatgycaaaatgacccctcagttcttctttctctcctttcccgatagaggtggccctaaggacacacatctgggacaatacggccatttttagccttgacccaag

SEQ ID NO: 385507 - DNA, 201 bp, Homo sapiens
gtgatcttaggacaggtcatcttttcactctccttgcctctgtgcgcttccagccatctcaaatggatgcaactaaatggtttggaaaacccctccaacaygaaacttctaggattctaggactctaggactctactatagagccaactataaagatcctcagaaaaacacatacccctggctccctatcacctgtcagca

SEQ ID NO: 385508 - DNA, 201 bp, Homo sapiens
agcatttcactttgttttcccctccacgccgaccagtgtggtcttcagcatagagtgagcttctagtgacacgagctggagggaaagaggaagtgcatcakgacggctcgtccaatggacaaggtaagggaaagatcttccctaataactctccatttgggaaggagggagtcacaaatggcaggggaggtggggacactg

SEQ ID NO: 385509 - DNA, 201 bp, Homo sapiens
ctggatattagacagtctctgaaaagttccttgatgcttttactttgtctagctacattctcccccaccctgatgtctcatctatttctgttgcttttagrgtgtacctctgggagattattccttaactgttccctggccacgtttgaagtgagtcctgggattgagtctgccttgggacagtgtggctttcaggaccag

SEQ ID NO: 385510 - DNA, 201 bp, Homo sapiens
aataatgagcctttaatgcttgaagccttttccagtttcattcctgtaatttagggtccagaagcaggtagctttcctatatccaagaaaacccaaatttytggattttcctcctacttacattcatttcttctcgggaaattgtcagttattacctgaacacatctcttcatagtaatatcttgctacaaacgctgagga

SEQ ID NO: 385511 - DNA, 201 bp, Homo sapiens
aggaaacaaagcaaaatagtgcagatagcacagaagccactcaggttttcagcttttgccagcaggatattagggaggctccaccctgatttccagcctcyctgtgccaggcagatgtggatctccagcaagctggccacctgccacagcaacactgctggtacctggctctgccaaaggccctatcaccctggatgccat

SEQ ID NO: 385512 - DNA, 201 bp, Homo sapiens
atcttgatgatcatgatgattgtttcagtgatacctaggaaacattcccgccttttacaaggatgcctctctcttaaataggtgctcttgccaccttatckccccaggaaaattcacagggcaggttaagaaaccttcaactagctatttcctcaattgtaaacatttctactcacaggtctcagagcacttcaaactcag

SEQ ID NO: 385513 - DNA, 201 bp, Homo sapiens
ttaacatagctcagggtaatatggtctcattcaaatgccaaaatgacccctcagttcttctttctctcctttcccgatagaggtggccctaaggacacacrtctgggacaatacggccatttttagccttgacccaagagatctgggttccccatgactggagtggaaaacaatgtctgtgggtttgtgtttttcagagtc

SEQ ID NO: 385514 - DNA, 201 bp, Homo sapiens
tgtctgttatgagggccatggagttttgctcttgttgcccaggctggagtgcaatggcacaatcttggctcaccgcaacctcctcctcccgggttcaggcrattatcctgcctcagcctccgaagtagctgggattacaggcatgcgccactgtgcctggcctgagggccactctttatatcctcaggttttatggtcccc

SEQ ID NO: 385515 - DNA, 201 bp, Homo sapiens
aggtaaatgaatttttcatcccatttctgttggaaattagctgtgcagataacttttatataaaataagaatgttgaatttagataatctctgatattccyttttttttttttttttttttttttttttttttttttagcgacacagtctcgctttgtagcccaggctggagtgctggtggcacagatcgtggctcactgc

SEQ ID NO: 385516 - DNA, 201 bp, Homo sapiens
ctggtcaacaatatcttttatgctacaatttttcaggataagttttgtagaaacaaccatcctagcagaatagattgttttgtttgggaatctcatatgtrtgtgtgtgtgtgtgtgtgtgtgtgtgtgtgtgtgtgtgtgtgtgtatgtatttatgtatgtatgtatatgttggtctaattcaacttgctgtgaacactt

SEQ ID NO: 385517 - DNA, 201 bp, Homo sapiens
gaactttttttttttttttttaaaggcctgtatttgtgaatggttacctcaggaaaagtaaatatttgtcaaaatagcaagaacaaatttactcctcaagytgaatattttaagtggcttttggacaactttacgccgactattcttttagagtaagaaaatagtttttaagagtataggctaaattaacttcaaaatgca

SEQ ID NO: 385518 - DNA, 201 bp, Homo sapiens
acctggtcaacaatatcttttatgctacaatttttcaggataagttttgtagaaacaaccatcctagcagaatagattgttttgtttgggaatctcatatrtgtgtgtgtgtgtgtgtgtgtgtgtgtgtgtgtgtgtgtgtgtgtgtatgtatttatgtatgtatgtatatgttggtctaattcaacttgctgtgaacac

SEQ ID NO: 385519 - DNA, 201 bp, Homo sapiens
tcctcctttcccccagggctaatagtagtatattttgtttaccatttgagagtttctgtcacatattaaatgcttgtggaataaacaaatgaattaatttsttcccagagggtagttaggtccagaaaagccatacaaaaccctcacctttgcatcagcaccttttcactatgtagagcagggcagaatgggcctctaggg

SEQ ID NO: 385520 - DNA, 201 bp, Homo sapiens
gacctttcccagttgaattaaatatccagacttcatcttaaaaaccttaagaatagctgactcaggggtgtgtgcctgtagtcccacctcttcctgaggckgaggcagaaggatcccttgagcccaggtgttcgaggccaacctgggcaacatagctgagactccatctgtaagtgaaaagaaacaaaaaccttaagaatg

SEQ ID NO: 385521 - DNA, 201 bp, Homo sapiens
caaagtgctgagattataggcataagccaaggattctcactcttaatgcattctcttttctttggacagatctgtggtttttctacttgaaggacacaatrttttccaaactagcacatttgcagaggtttgctgtacttagtcgcggagttcattcttcagtggcttctgctacatctgttgcaactaaaaaaacagtcc

SEQ ID NO: 385522 - DNA, 201 bp, Homo sapiens
ggtcaacaatatcttttatgctacaatttttcaggataagttttgtagaaacaaccatcctagcagaatagattgttttgtttgggaatctcatatgtgtrtgtgtgtgtgtgtgtgtgtgtgtgtgtgtgtgtgtgtgtgtgtatgtatttatgtatgtatgtatatgttggtctaattcaacttgctgtgaacacttta

SEQ ID NO: 385523 - DNA, 201 bp, Homo sapiens
aatagatttgtgatgaaagcaagactctgagctagtgtatgtttaattagaaattaatacaggctttgaaaaatagcaatgaaagttaagttcctctggtmttttatctagtcatgtttttcctgtgtttacagtccccgttgtcctccaaaaaacaaaaaaaggacagtcttaatatttgtataatttttctttaaacgt

SEQ ID NO: 385524 - DNA, 201 bp, Homo sapiens
aagggatgtttaaacgtttatctttgagcatgtacgttttactatttttctttagattgggatgcttggaaggtgtgtctacgacttcgagataatggacytctggccaagccaacccatggcgacattatcaggtttgcgcctccgctggtgatcaaggaggatgagcttcgagagtccattgaaattattaacaagacc

SEQ ID NO: 385525 - DNA, 201 bp, Homo sapiens
gcaactaaaaaaacagtccaaggccctccaacctctgatgacatttttgaaagggaatataagtatggtgcacacaactaccatcctttacctgtagcccyggagagaggaaaaggtacgtttcaaattaatccgtcttttcccttttcttgaaaccttttataaaaaaaaattgcttccatattttcacaatatacattt

SEQ ID NO: 385526 - DNA, 201 bp, Homo sapiens
cctacagaagttttagatatttgtggctaaataaaagattttaggctgggcacagtggctcacacctttaattcgaaaactttgggaggccgtggtgggcrgactgcttgagcccagagggatggacagttcctctgtctcctgccccatgcctagtctctggcagtcttctctgatttggtctccctgcctctggtctct

SEQ ID NO: 385527 - DNA, 201 bp, Homo sapiens
tgggattacaggcataagccaccgctcccagcccaagcttcccttagttgagcaagttctgttaattttgttttgccaggctgcactttgcccatacatayggcaagggatgtttaaacgtttatctttgagcatgtacgttttactatttttctttagattgggatgcttggaaggtgtgtctacgacttcgagataatg

SEQ ID NO: 385528 - DNA, 201 bp, Homo sapiens
aatctttttattttttgatagtttaacattttaaaaaaatctgaacatttttctctcctgataggagtggaggctggagagactgcctgtaaactagctcktaagtggggctataccgtgaagggcattcagaaatacaaagcaaagattgtttttgcaggtatgtgaaattaaatattaacttctatgattgaaacatac

SEQ ID NO: 385529 - DNA, 201 bp, Homo sapiens
cccatgcctagtctctggcagtcttctctgatttggtctccctgcctctggtctctgccctacagttgtagctgtctcatagcattgtgcctgatggtatyggactgtggtaggtgcttaacaaatacttagtgtttagcaggtactcagtcaacacacagtgcattagctctggaaagagtcttactcttattgattggt

SEQ ID NO: 385530 - DNA, 201 bp, Homo sapiens
tcaaacttcttgtggtgttttgcggggatagtgcttattgaattttgggtttctttgaaataatcactgtttgtttcccctttgtagctgggaacttctgrggtaggacgttgtctgctatctccagttccacagacccaaccagttacgatggttttggaccatttatgccgggattcgacatcattccctataatgatc

SEQ ID NO: 385531 - DNA, 201 bp, Homo sapiens
cttcttgtggtgttttgcggggatagtgcttattgaattttgggtttctttgaaataatcactgtttgtttcccctttgtagctgggaacttctggggtasgacgttgtctgctatctccagttccacagacccaaccagttacgatggttttggaccatttatgccgggattcgacatcattccctataatgatctgccc

SEQ ID NO: 385532 - DNA, 201 bp, Homo sapiens
ataccactacacccagctaatttttcaattttttttagtgatggagtcttgctctgttgcccaggctggtctcaaactcctgggctcacgtgatcctttgrcctcagcctcccaaagtgctgagattataggcataagccaaggattctcactcttaatgcattctcttttctttggacagatctgtggtttttctacttg

SEQ ID NO: 385533 - DNA, 201 bp, Homo sapiens
taatctttttattttttgatagtttaacattttaaaaaaatctgaacatttttctctcctgataggagtggaggctggagagactgcctgtaaactagctygtaagtggggctataccgtgaagggcattcagaaatacaaagcaaagattgtttttgcaggtatgtgaaattaaatattaacttctatgattgaaacata

SEQ ID NO: 385534 - DNA, 201 bp, Homo sapiens
tccaaaaaacaaaaaaaggacagtcttaatatttgtataatttttctttaaacgtaggttttagaagaagaaaaccttgctgaaaatgcagacaaattggrcattatcttgagaaatgaactcatgaagctaccttctgatgttgtaactgccgtaagaggaaaaggattattaaatgctattgtcattaaagaaaccaaa

SEQ ID NO: 385535 - DNA, 201 bp, Homo sapiens
acttctggggtaggacgttgtctgctatctccagttccacagacccaaccagttacgatggttttggaccatttatgccgggattcgacatcattccctawaatgatctgcccgcactggaggtatttcactagcgtcatagtgctcagctcattgggaatagaaattaaagctgttgaatatatgaattaaaagtacatt

SEQ ID NO: 385536 - DNA, 201 bp, Homo sapiens
agattacttgtgggtaagggatgctggtgaaagaggctttgcaagaatagtatttagaaacgagatgaagccaaaatacgataatccagcactgattaatrgagttgctgctggcagaagtggtgagaagataaaaacatgatgtcacaaactcccaacctctctgttattttacatggtgtctttccttcttgaatgtca

SEQ ID NO: 385537 - DNA, 201 bp, Homo sapiens
cgtgctcttcaggatccaaatgtggctgcgttcatggtagaaccaattcagggtgaagcaggcgttgttgttccggatccaggttacctaatgggagtgcsagagctctgcaccaggcaccaggttgtcacgttagctgtttgtgataaggctgaatgtcgagttagctgtttgtgatgaggctgaatgggctcctcccca

SEQ ID NO: 385538 - DNA, 201 bp, Homo sapiens
aatataatttactgtggccaggcatggtggctcatgcctgtaatcctagcattttgggaggccaaggcaggaggagtctttgagccctggagttcaagacmagccttctgggcaacatagggagaccctgtctctatttaaaaaaaaaaaaaaaatatatatatatatatatatatatatatacacacacacacacacaca

SEQ ID NO: 385539 - DNA, 201 bp, Homo sapiens
gttttctccctgctagaaaggaagctccctgaggatagggatcttgccagttgtgatcatgatctatttcccaacttttttttttttttttttttgagacrgagtttcactcttgtcacctagtctgcagtctggctcactgtaacctctgcctccagggttcaagtgattctcctgcctcagcctcctgtgtagctggga

SEQ ID NO: 385540 - DNA, 201 bp, Homo sapiens
tttatttttaaattttatttattttattttattttttttataggcaggattttgctctggtgcccaggctggagtgcagtggcacaatctcaactcactgmatcctctacctcccaggctcaagcaatcctcccacctcagcctctgtaacgggaccatacgcgcgcactaccatgcccagcatttttctgtagcgtcagg

SEQ ID NO: 385541 - DNA, 201 bp, Homo sapiens
tgtaagaattctggatattagatccttatcagacacatgatttacaaatattttttttccatcctaagggttattacagtctacttctcatgatttttgtytgttatgtgtaacttctgcttttttatttttaaattttatttattttattttattttttttataggcaggattttgctctggtgcccaggctggagtgca

SEQ ID NO: 385542 - DNA, 201 bp, Homo sapiens
tttaaggaagacctaaaatacacttggtatttaatttaattaatttatttatttttcgagacggagtcttgctctgtctcctaggctgcagtgccgtggcrcaatcttggctcactgcactctgcctcctgggttcaagcaattctctgcctcagcctcctgagtagctgggattacaggcgcctgtcaccacgcccagct

SEQ ID NO: 385543 - DNA, 201 bp, Homo sapiens
ttttctttagattgggatgcttggaaggtgtgtctacgacttcgagataatggacttctggccaagccaacccatggcgacattatcaggtttgcgcctcygctggtgatcaaggaggatgagcttcgagagtccattgaaattattaacaagaccatcttgtctttctgagggtagccagctgttttcagtggtccctgg

SEQ ID NO: 385544 - DNA, 201 bp, Homo sapiens; identical to SEQ ID NO: 84653

SEQ ID NO: 385545 - DNA, 201 bp, Homo sapiens; identical to SEQ ID NO: 84654

SEQ ID NO: 385546 - DNA, 201 bp, Homo sapiens
aatagaggttcatatataggcattcagagggcttgctagcactcttaatttttggactttatgccgtatagtaattgtctaaaattattttcctttcttaygtattttaggtatttacttatgggatgtagaaggcagaaaatattttgacttcctgagttcttacagtgctgtcaaccaagggcattgtcaccccaagat

SEQ ID NO: 385547 - DNA, 201 bp, Homo sapiens
ctgagctaaaacaagctttaactacaaatatgtattaaatagaggttcatatataggcattcagagggcttgctagcactcttaatttttggactttatgycgtatagtaattgtctaaaattattttcctttcttatgtattttaggtatttacttatgggatgtagaaggcagaaaatattttgacttcctgagttctt

SEQ ID NO: 385548 - DNA, 201 bp, Homo sapiens
gtatgtttaattagaaattaatacaggctttgaaaaatagcaatgaaagttaagttcctctggtcttttatctagtcatgtttttcctgtgtttacagtcyccgttgtcctccaaaaaacaaaaaaaggacagtcttaatatttgtataatttttctttaaacgtaggttttagaagaagaaaaccttgctgaaaatgcag

SEQ ID NO: 385549 - DNA, 201 bp, Homo sapiens
tattactaaacttttcaactaccacaaagttcttcctatgaatacaggtaaaacatttcctttttttgttaaataccctcaaaaataatctttttattttytgatagtttaacattttaaaaaaatctgaacatttttctctcctgataggagtggaggctggagagactgcctgtaaactagctcgtaagtggggctata

SEQ ID NO: 385550 - DNA, 201 bp, Homo sapiens
gaaaagccatacaaaaccctcacctttgcatcagcaccttttcactatgtagagcagggcagaatgggcctctagggagatagtggcctgacaaaggaaakagttggtgagtctacaagattcttataggatactcttgaaattgtgtgcagttaaaacatttttacaaatttgagggcacatcagaattacacatttatt

SEQ ID NO: 385551 - DNA, 201 bp, Homo sapiens
tagagcagggcagaatgggcctctagggagatagtggcctgacaaaggaaatagttggtgagtctacaagattcttataggatactcttgaaattgtgtgyagttaaaacatttttacaaatttgagggcacatcagaattacacatttattgttggtggggggacagtgaaataaggatggctattttccctgtggaaac

SEQ ID NO: 385552 - DNA, 201 bp, Homo sapiens; identical to SEQ ID NO: 84630

SEQ ID NO: 385553 - DNA, 201 bp, Homo sapiens
tttcctttcttatgtattttaggtatttacttatgggatgtagaaggcagaaaatattttgacttcctgagttcttacagtgctgtcaaccaagggcattktcaccccaagattgtgaatgctctgaagagtcaagtggacaaattgaccttaacatctagagctttctataataacgtacttggtgaatatgaggagtat

SEQ ID NO: 385554 - DNA, 201 bp, Homo sapiens
actatatctctactaaaactacaaaataaataaataaataaataacatgtgtggtgtggtggtgggcacctgtaatcctagctacttgggaggctgaggcrggagaattgcttgagtccaggaggcagagattgcagtgagctgagatcacgccactgcactcaagcctgggtgacagcgagactctggggaaaaggatgc

SEQ ID NO: 385555 - DNA, 201 bp, Homo sapiens
ttgctgaaaatgcagacaaattgggcattatcttgagaaatgaactcatgaagctaccttctgatgttgtaactgccgtaagaggaaaaggattattaaaygctattgtcattaaagaaaccaaaggtatggagataaaacatttactcaagataattttttaaggaagacctaaaatacacttggtatttaatttaatta

SEQ ID NO: 385556 - DNA, 201 bp, Homo sapiens
tttattttatttattttattttttgagacactgccttgctctgttgggctggagtgtctgtcgccaggctggagtacagtggcatgatcttggctcactgygacctccacttcctgggttcaagcgattctcctgcctcagcctcctgagtagctgggactacaggcatgtgccacaccacgacaggctaatttttgtatt

SEQ ID NO: 385557 - DNA, 201 bp, Homo sapiens
tggaaacgaaagtgatcactaataggggtattttttttccccaataggttctctttattgctgatgaaatacagacaggattggccagaactggtagatgrctggctgttgattatgaaaatgtcagacctgatatagtcctccttggaaaggccctttctgggggcttataccctgtaagtttcatgttccccctctttc

SEQ ID NO: 385558 - DNA, 201 bp, Homo sapiens
ctaaaattattttcctttcttatgtattttaggtatttacttatgggatgtagaaggcagaaaatattttgacttcctgagttcttacagtgctgtcaacsaagggcattgtcaccccaagattgtgaatgctctgaagagtcaagtggacaaattgaccttaacatctagagctttctataataacgtacttggtgaata

SEQ ID NO: 385559 - DNA, 201 bp, Homo sapiens
gggagtatgagatggtatctcattgtggttttaacttgcattttcctaatgattagtgatgttgaacatcttttcatgtgtttcttgccatttgtatatcytctttgaagaaatagctattcaagtctttccccattttttaaattgggttgtttgtccttttgaaattgagttgtaagaattctggatattagatcctta

SEQ ID NO: 385560 - DNA, 201 bp, Homo sapiens; identical to SEQ ID NO: 84643

SEQ ID NO: 385561 - DNA, 201 bp, Homo sapiens
ttttttttttttttttttttttttttttttagcgacacagtctcgctttgtagcccaggctggagtgctggtggcacagatcgtggctcactgcagcccaraactcagggctcaagagatctttccaccttagtcttagtctcctaagtaccagatactacaggtacgcatcgccacacctggctaatattcatatttttt

SEQ ID NO: 385562 - DNA, 201 bp, Homo sapiens
gaaaagaaacaaaaaccttaagaatgagtattagtaatgttttgaatgatattattttgtccccagttattctttaataaaactgcctaaacttaacaggkaaatgaatttttcatcccatttctgttggaaattagctgtgcagataacttttatataaaataagaatgttgaatttagataatctctgatattcctttt

SEQ ID NO: 385563 - DNA, 201 bp, Homo sapiens
agatttctcatacagtgccaagcacagtaacttgaacacagaaggttctttaatagaaatgcgtttacaggattttgatacatcatggctcatccagtttytgacctttcccagttgaattaaatatccagacttcatcttaaaaaccttaagaatagctgactcaggggtgtgtgcctgtagtcccacctcttcctgagg

SEQ ID NO: 385564 - DNA, 201 bp, Homo sapiens
atatatgtgtaaatttactgttttaatttgctgatgaaatacttgtaatatgttttgcctggtacatgatacgtatttgctgaatgtttcataaaaatttwtgagggatttcctcttcttgggattatttcttcatatatgagatttttctttctgaactccatattcctctcatttgcctgtcagatttttttcatagca

SEQ ID NO: 385565 - DNA, 201 bp, Homo sapiens
tgggcctggtcctcctccatccctcttctggtattttctgttccccccactcccctgtacccagtttttcaggcacccagtgtcctctggcctcagccccycagctctcaagatcctcgcagaggctcccctccagatctcatgccacatccagagaattgtcaatctcctctccagacaactgtaaatgtgccaggccca

SEQ ID NO: 385566 - DNA, 201 bp, Homo sapiens
gagccctggagttcaagaccagccttctgggcaacatagggagaccctgtctctatttaaaaaaaaaaaaaaaatatatatatatatatatatatatatayacacacacacacacacacacacacacacttatatattttatatataaaaaacatatatatatgtgtaaatttactgttttaatttgctgatgaaatactt

SEQ ID NO: 385567 - DNA, 201 bp, Homo sapiens
aaacatatatatatgtgtaaatttactgttttaatttgctgatgaaatacttgtaatatgttttgcctggtacatgatacgtatttgctgaatgtttcatwaaaatttatgagggatttcctcttcttgggattatttcttcatatatgagatttttctttctgaactccatattcctctcatttgcctgtcagatttttt

SEQ ID NO: 385568 - DNA, 201 bp, Homo sapiens
taggttggcagatgtaaactctttcgttgaagtcattaagtatcagtttcttggccgggtgtggtggcttatgcctgcaatcccagcactttgggaggccraggcaggcagatcacctgaggtcatgagttcgagaccagcctggccaacatggtgaaactatatctctactaaaactacaaaataaataaataaataaat

SEQ ID NO: 385569 - DNA, 201 bp, Homo sapiens
tgcagtgagctgagatcacgccactgcactcaagcctgggtgacagcgagactctggggaaaaggatgcttagtagaatgcttagtgctgagaaatgacayggtgaattgactgtctttcaggtgtctgcagtgctgtgtgatgatgacatcatgctgaccattaagccaggggagcatgggtccacatacggtggcaatc

SEQ ID NO: 385570 - DNA, 201 bp, Homo sapiens
ggcgggagaattgcttgagtccaggaggcagagattgcagtgagctgagatcacgccactgcactcaagcctgggtgacagcgagactctggggaaaaggwtgcttagtagaatgcttagtgctgagaaatgacatggtgaattgactgtctttcaggtgtctgcagtgctgtgtgatgatgacatcatgctgaccattaa

SEQ ID NO: 385571 - DNA, 201 bp, Homo sapiens
taatgttttagggtatgactaagtcattaggttgttactggtagttaggttggcagatgtaaactctttcgttgaagtcattaagtatcagtttcttggcygggtgtggtggcttatgcctgcaatcccagcactttgggaggccgaggcaggcagatcacctgaggtcatgagttcgagaccagcctggccaacatggtg

SEQ ID NO: 385572 - DNA, 201 bp, Homo sapiens
agttaaaacatttttacaaatttgagggcacatcagaattacacatttattgttggtggggggacagtgaaataaggatggctattttccctgtggaaacraaagtgatcactaataggggtattttttttccccaataggttctctttattgctgatgaaatacagacaggattggccagaactggtagatggctggctg

SEQ ID NO: 385573 - DNA, 201 bp, Homo sapiens
aatgcttagtgctgagaaatgacatggtgaattgactgtctttcaggtgtctgcagtgctgtgtgatgatgacatcatgctgaccattaagccaggggagyatgggtccacatacggtggcaatccactaggctgccgagtggccatcgcagcccttgaggtaaagactgatacagccacacagtgtctattctttaaagc

SEQ ID NO: 385574 - DNA, 201 bp, Homo sapiens
tgtgttgggtgctggggttgggtgaagttagtgtggggccatggcctacatagactgtggtttgaatcttgatattggaggtcctgttgtgccatgttccwcttagaagctgttgaaaagaggaggcttggagttgcccttgttaggtttctgggactggatgaaaggaataacttgaattttggttagggagactagcaa

SEQ ID NO: 385575 - DNA, 201 bp, Homo sapiens
aaaaccctcacctttgcatcagcaccttttcactatgtagagcagggcagaatgggcctctagggagatagtggcctgacaaaggaaatagttggtgagtstacaagattcttataggatactcttgaaattgtgtgcagttaaaacatttttacaaatttgagggcacatcagaattacacatttattgttggtgggggg

SEQ ID NO: 385576 - DNA, 201 bp, Homo sapiens
agaagctgttgaaaagaggaggcttggagttgcccttgttaggtttctgggactggatgaaaggaataacttgaattttggttagggagactagcaattarttgagaagatgtagtttgactgttgggttctttatatgatattcaaatgagaggttctgacttgttttttaagctttatttttttaaaaaacaagtatgt

SEQ ID NO: 385577 - DNA, 201 bp, Homo sapiens
agaatgaggcaaaaaaggaaatgtaggctagtgtaacttaaaggtgaggtatttggagcttctgataattgaatggcagtgaatttgaagtcagaatttaygttagtgcgaaaacttgatttgcatacttaatgtaaaatatgtgtggtatatgctttcagatttccaagtgtggtagaaaggaagttattaaaacttatt

SEQ ID NO: 385578 - DNA, 201 bp, Homo sapiens
tccacagacccaaccagttacgatggttttggaccatttatgccgggattcgacatcattccctataatgatctgcccgcactggaggtatttcactagcrtcatagtgctcagctcattgggaatagaaattaaagctgttgaatatatgaattaaaagtacattatatgacagtaatgcaaatttatctcacttaagtt

SEQ ID NO: 385579 - DNA, 201 bp, Homo sapiens
tctaaaattattttcctttcttatgtattttaggtatttacttatgggatgtagaaggcagaaaatattttgacttcctgagttcttacagtgctgtcaamcaagggcattgtcaccccaagattgtgaatgctctgaagagtcaagtggacaaattgaccttaacatctagagctttctataataacgtacttggtgaat

SEQ ID NO: 385580 - DNA, 201 bp, Homo sapiens
caagtgtggtagaaaggaagttattaaaacttattcctgtttcttctgtagcgtgctcttcaggatccaaatgtggctgcgttcatggtagaaccaattcrgggtgaagcaggcgttgttgttccggatccaggttacctaatgggagtgcgagagctctgcaccaggcaccaggttgtcacgttagctgtttgtgataag

SEQ ID NO: 385581 - DNA, 201 bp, Homo sapiens
aataaaactgcctaaacttaacaggtaaatgaatttttcatcccatttctgttggaaattagctgtgcagataacttttatataaaataagaatgttgaawttagataatctctgatattcctttttttttttttttttttttttttttttttttttttagcgacacagtctcgctttgtagcccaggctggagtgctggt

SEQ ID NO: 385582 - DNA, 201 bp, Homo sapiens
tgaaacatgaattaactagtcttttagaaagtaagtatagatggaataagtatgcctagtttttggcaactttctcctaatcatgaatttatctttaagcttttttttttttttccttccagaggtgattcctatgcacatgctctaatttccttttaattattagtttctttcatagcttagtttttacttcatggctta

SEQ ID NO: 385583 - DNA, 201 bp, Homo sapiens
gctattttccctgtggaaacgaaagtgatcactaataggggtattttttttccccaataggttctctttattgctgatgaaatacagacaggattggccaraactggtagatggctggctgttgattatgaaaatgtcagacctgatatagtcctccttggaaaggccctttctgggggcttataccctgtaagtttcatg

SEQ ID NO: 385584 - DNA, 201 bp, Homo sapiens
cacctggtcaacaatatcttttatgctacaatttttcaggataagttttgtagaaacaaccatcctagcagaatagattgttttgtttgggaatctcatatgtgtgtgtgtgtgtgtgtgtgtgtgtgtgtgtgtgtgtgtgtgtgtgtatgtatttatgtatgtatgtatatgttggtctaattcaacttgctgtgaaca

SEQ ID NO: 385585 - DNA, 201 bp, Homo sapiens
  misc_feature (1)...(201): n = A,T,C or G
tgaacacagaaggttctttaatagaaatgcgtttacaggattttgatacatcatggctcatccagtttctgacctttcccagttgaattaaatatccaganttcatcttaaaaaccttaagaatagctgactcaggggtgtgtgcctgtagtcccacctcttcctgaggctgaggcagaaggatcccttgagcccaggtgt

SEQ ID NO: 385586 - DNA, 201 bp, Homo sapiens
gttgcattaaataaactttaatccttattttgccatgaatgattggcaatagatttgtgatgaaagcaagactctgagctagtgtatgtttaattagaaaytaatacaggctttgaaaaatagcaatgaaagttaagttcctctggtcttttatctagtcatgtttttcctgtgtttacagtccccgttgtcctccaaaaa

SEQ ID NO: 385587 - DNA, 201 bp, Homo sapiens
tggcaagggatgtttaaacgtttatctttgagcatgtacgttttactatttttctttagattgggatgcttggaaggtgtgtctacgacttcgagataatkgacttctggccaagccaacccatggcgacattatcaggtttgcgcctccgctggtgatcaaggaggatgagcttcgagagtccattgaaattattaacaa

SEQ ID NO: 385588 - DNA, 201 bp, Homo sapiens
atcactgtttgtttcccctttgtagctgggaacttctggggtaggacgttgtctgctatctccagttccacagacccaaccagttacgatggttttggacmatttatgccgggattcgacatcattccctataatgatctgcccgcactggaggtatttcactagcgtcatagtgctcagctcattgggaatagaaattaa

SEQ ID NO: 385589 - DNA, 201 bp, Homo sapiens
tctgatgacatttttgaaagggaatataagtatggtgcacacaactaccatcctttacctgtagccctggagagaggaaaaggtacgtttcaaattaatcygtcttttcccttttcttgaaaccttttataaaaaaaaattgcttccatattttcacaatatacatttttctagatgtgtttaatgtgtatattgcagaca

SEQ ID NO: 385590 - DNA, 201 bp, Homo sapiens
tagaatgcttagtgctgagaaatgacatggtgaattgactgtctttcaggtgtctgcagtgctgtgtgatgatgacatcatgctgaccattaagccagggragcatgggtccacatacggtggcaatccactaggctgccgagtggccatcgcagcccttgaggtaaagactgatacagccacacagtgtctattctttaa

SEQ ID NO: 385591 - DNA, 201 bp, Homo sapiens
cagttactcatgaacttttactcacaatttcagcatccactaatgattcttgcctgaataaatgattacggtggtagttgccaaatggtgatttaatctayaatttggaataaataacagccttaaccaaataaaaccaaagtttattacttagctttgtaccagaaaatgacaatataagagtatcacacattttggtca

SEQ ID NO: 385592 - DNA, 201 bp, Homo sapiens
tttaaaaataaatcatggcactgttgattctgatatttcagaaactggctagttttaagggcaaaagggaactgagtggccattttgtgctggatttggcmcagtaacattaacccatttcatcctcagtgacacttcaacctccttttacaaatggggagactgaagctcagaaagattgacagaatcacccagagttac

SEQ ID NO: 385593 - DNA, 201 bp, Homo sapiens
ctgcagatcggcctgcccatcgctcccctcttccagcctatgattttttttctccagcctctgtcgaaataaagaaaattacggaagcagaaccttccttmcagtaacgtgcaggttaattagatggtgggggatgggggggcaacaggactttcagcatgaaaacctcccgttgggggctttttgcaaaccctgctgagc

SEQ ID NO: 385594 - DNA, 201 bp, Homo sapiens
taaaacttattcctgtttcttctgtagcgtgctcttcaggatccaaatgtggctgcgttcatggtagaaccaattcagggtgaagcaggcgttgttgttcyggatccaggttacctaatgggagtgcgagagctctgcaccaggcaccaggttgtcacgttagctgtttgtgataaggctgaatgtcgagttagctgtttg

SEQ ID NO: 385595 - DNA, 201 bp, Homo sapiens
ctgtttcttctgtagcgtgctcttcaggatccaaatgtggctgcgttcatggtagaaccaattcagggtgaagcaggcgttgttgttccggatccaggttrcctaatgggagtgcgagagctctgcaccaggcaccaggttgtcacgttagctgtttgtgataaggctgaatgtcgagttagctgtttgtgatgaggctga

SEQ ID NO: 385596 - DNA, 201 bp, Homo sapiens
cttaacaggtaaatgaatttttcatcccatttctgttggaaattagctgtgcagataacttttatataaaataagaatgttgaatttagataatctctgawattcctttttttttttttttttttttttttttttttttttttagcgacacagtctcgctttgtagcccaggctggagtgctggtggcacagatcgtggct

SEQ ID NO: 385597 - DNA, 201 bp, Homo sapiens
taacaggtaaatgaatttttcatcccatttctgttggaaattagctgtgcagataacttttatataaaataagaatgttgaatttagataatctctgatawtcctttttttttttttttttttttttttttttttttttttagcgacacagtctcgctttgtagcccaggctggagtgctggtggcacagatcgtggctca

SEQ ID NO: 385598 - DNA, 201 bp, Homo sapiens
cacttggtattttaattgggtgttgggatgttctgtttgaaactgctgactgacataatgaccaaaccttttagacagattattgtctgatttataattayattaagagtataaaaaatatagctcttttctaaatgaaggcacatttaaccaatttgacccttgttcctttaagacacttatttttctgccttaaattag

SEQ ID NO: 385599 - DNA, 201 bp, Homo sapiens; identical to SEQ ID NO: 84655

SEQ ID NO: 385600 - DNA, 201 bp, Homo sapiens
gacgggacccacgcgattggtatcctgccctccgccccagccaatgagcggcgagggtgtcttgggggcggggcagaatcagcctttaagttgcagtgackctccggcgtcactgttgcgcttcatagacgccgcgtgtacccggttgtcctcaggcgctgtcaggtaccgtctgggcgccgctgtcctggggctctggtt

SEQ ID NO: 385601 - DNA, 201 bp, Homo sapiens
catggagactcaccctattacttcctgacttcaggtaagatccaccttctatctagcctttaccccccatccatccttgtccctgatctgatttattggcyttccctgagagacttctttggctcaacatctcaggagcctgggagaagatcagggatgtatctcctccccatctccctccctgcagcctttctgacagca

SEQ ID NO: 385602 - DNA, 201 bp, Homo sapiens
tatcaaccagctgggtgctaaggcactccaggagaatctcctttcacctgctttctcttaccttctgggcaaacagcaggtctccctctgtggtacaaccytgggtgtttagactggtctccagttcaccatctcttgatcttttcgccccagatcctgccataggagaagccgaaccccgctgtttcggatgagatggtg

SEQ ID NO: 385603 - DNA, 201 bp, Homo sapiens
cccaaatactccctaacagctcgctttgtcctccgaatctccttacctgttgtcagccggctcagccctggctcggtttccagctccttcgccgtctctcsgggtctatctacccacctccgcctctctcagtgggccccgccccttccccccctcccagacacgtgcggcccggcacgtgcctccccctgcttacacaga

SEQ ID NO: 385604 - DNA, 201 bp, Homo sapiens
agccggctcagccctggctcggtttccagctccttcgccgtctctccgggtctatctacccacctccgcctctctcagtgggccccgccccttcccccccycccagacacgtgcggcccggcacgtgcctccccctgcttacacagatctcgcgccctcattggttgtgtcgccggtaacacgtgactctagttactgaag

SEQ ID NO: 385605 - DNA, 201 bp, Homo sapiens
tggattatattaaactttctcttctagactctataatacaaacttggctatctgcctacttctccagtcaaatccttctccattccattcattaatttctyttcctcccactcactacaggcacagtcactggccttctgagcttgtgtgtactggctctgttgagctcatttactttcatatctgtgactttgcacttag

SEQ ID NO: 385606 - DNA, 201 bp, Homo sapiens
aatttttgtatttttagtagagatggggtttcgccatgttggccaggctggtctcaaactcctggcctcccaaagtgctgggattacaggggtgagccacsgcgctcagcctactttaactttcattcactctaatatacaacccctctcagcctcaggaaaacgcaccactgaggttcatttttcagaaaataaatagag

SEQ ID NO: 385607 - DNA, 201 bp, Homo sapiens
tgggaaacacagagttatcagtttttccatccaacatcttcatagattctctacttaaagttctccccttcaccacctccacccagcccaaagacttaagytcagggattcccccctaccctatgcttgcatagatttgtacccatctcattcaaaagtcccttgatgcccctcctcagtgtcttagcaaacttactgagg

SEQ ID NO: 385608 - DNA, 201 bp, Homo sapiens; identical to SEQ ID NO: 84777

SEQ ID NO: 385609 - DNA, 201 bp, Homo sapiens
tagatttgtacccatctcattcaaaagtcccttgatgcccctcctcagtgtcttagcaaacttactgaggacaatttataaagttctggcttttttctccyccccagataggttaacaaatctgttttgggcctactacttagtttctcctcatcaaactcatttttattcttgttaatcagatacatttcaacattgccc

SEQ ID NO: 385610 - DNA, 201 bp, Homo sapiens
ccttcaaccccatcgctctaattgcttttaaactcccggactctttcaaaatgccttcctaacatttctctccaggctccttttgcttctctccgattctcttgtcattacagatgaaggcttcattagcgatatactgtattccatgtttattatactagtctgtccgaagagctcctactttttaatgtaatcttcatc

SEQ ID NO: 385611 - DNA, 201 bp, Homo sapiens
tgctccataccttttggggagttgtgttctttgatgcctgtgagaggagacggtactgggctttgggcctggtggttgggagtcacctactgacatcgggmctggtgagttggagacaggggcctgagttagggagaaaagcatttaatggtgagtgggatgtgggggaaagggtatcctcacttcttaacatttttaact

SEQ ID NO: 385612 - DNA, 201 bp, Homo sapiens
tcattcctcctaccacttctctgtccccctccagaaagactgccacctctttacaacaacctctgtcttcctttcctttgggcttagagaaagatccatcyttccccatcactgtaaggagtccttctgtgcctttcagctatccctgaccataccagggaggccaattcaattcaattgtttctattttttatctattat

SEQ ID NO: 385613 - DNA, 201 bp, Homo sapiens; identical to SEQ ID NO: 84778

SEQ ID NO: 385614 - DNA, 201 bp, Homo sapiens
ttttgagacagaacctcactccgttgcccaggctgtagtgcagtagcgcaatctcagctcactgccacctctgcctcttgggttcaagctatatttgcccytcagcctcccaggtagctgggattacaggcgtgcgccaccacatctggctaatttttgtatttttagtagagatggggtttcgccatgttggccaggctg

SEQ ID NO: 385615 - DNA, 201 bp, Homo sapiens; identical to SEQ ID NO: 84785

SEQ ID NO: 385616 - DNA, 201 bp, Homo sapiens
aatcttagtgaaacatggccaagttgagatgaatacctgcaatgaagtactaattatttggttctcccatccaccaaagcctggtattccagccctctatktattccacgtcactagggatgtcctgtctccccccagcccccaatccccaatcaactcacaggttccgttgttactggtttcacagttacaggcttcgga

SEQ ID NO: 385617 - DNA, 201 bp, Homo sapiens
aatttttttgtagagacaaggtctgttgctcagcctggacttaaactatgttgctcagcctggtctggaactcctgggctcaagcgatcctcccacgtcaycatcccaaagtgctgggattatagggatgagcctaaatctcttccttcagtggctgataattgaccaggctggaaacactaactagagatactggtaaga

SEQ ID NO: 385618 - DNA, 201 bp, Homo sapiens
ctttcacctcctgctgaatctctctatgatcaatggttatttagcatcccaatttaaaaattcttttcctataatacggctttctcttcccttctctcccmccgccctgccatacatcagagaaccgccatccgttctgcctctgaactttgcctcttgactctaccaggttgtaagacccacccactttgccctctggca

SEQ ID NO: 385619 - DNA, 201 bp, Homo sapiens; identical to SEQ ID NO: 84783

SEQ ID NO: 385620 - DNA, 201 bp, Homo sapiens
gagaatccataggtccagaagcaggggctatagaacagctcctggagtacccaaagatcggaacctgcaactgaagagcaaagcgagggagtttgaaaccrgagtttaaggattaggaaatgaactgggagattggggtgtactgcgtgggataatacttgttctccccctccccaatattaccggtctcaaacacaatag

SEQ ID NO: 385621 - DNA, 201 bp, Homo sapiens
gttttaaagctagatgtcctagctgtgtctggtccatcttttccataggagatgcaggagaggaagcagctgaatcactgtggtggcttggaaaatgctasagaggggagaaatgagaaaaaaagaaatgtggagaaagcattcagatgagctccacctggttacttaaacctttgcattccttgggaactcagtttgcaa

SEQ ID NO: 385622 - DNA, 201 bp, Homo sapiens
tccccttaaccacaagatgttggtgctctgaagggaaagactggagaatttgagagagatatctgggagtcagaaaggtacagagagaatatggggattargtcgagggagaatctaatctctttcctactcttaccctccttcctagacattcctgaacccctggtatgaggccagcctgctgcccatctatgcagtcac

SEQ ID NO: 385623 - DNA, 201 bp, Homo sapiens
gctgatgcacttgggccaggtgtggttgggatccatggagactcaccctattacttcctgacttcaggtaagatccaccttctatctagcctttacccccyatccatccttgtccctgatctgatttattggccttccctgagagacttctttggctcaacatctcaggagcctgggagaagatcagggatgtatctcctc

SEQ ID NO: 385624 - DNA, 201 bp, Homo sapiens
tgctgtcagaaaggctgcagggagggagatggggaggagatacatccctgatcttctcccaggctcctgagatgttgagccaaagaagtctctcagggaargccaataaatcagatcagggacaaggatggatggggggtaaaggctagatagaaggtggatcttacctgaagtcaggaagtaatagggtgagtctccatg

SEQ ID NO: 385625 - DNA, 201 bp, Homo sapiens
cccagccacagtgatcaagaaaagcgcgaaggccgggccgaacgcgacgaaagtgcagccgaaaaacaccgcagcccccatggctggtcaggtgggaaggkgggtgggggcctgaccaggacaggcaaatgggaggggcgcgccagctggggagtccgcgtggggtggcaacgcgaccccacgaggggcgcggtgcaatgt

SEQ ID NO: 385626 - DNA, 201 bp, Homo sapiens
accagcctggcaccgagcctttggacctgcacaacaatggccacacaggtaaaagcacaggctccaaggagttgtaggctccagctcagatcttaggagtsagatccttttgtagttcatgggcatgatgatggggtgttcctgagcatgcgtaagatgtgccgccctcaaatcttgtcaagatgttggcacattacccat

SEQ ID NO: 385627 - DNA, 201 bp, Homo sapiens
agttaaaaatgttaagaagtgaggataccctttcccccacatcccactcaccattaaatgcttttctccctaactcaggcccctgtctccaactcaccagkcccgatgtcagtaggtgactcccaaccaccaggcccaaagcccagtaccgtctcctctcacaggcatcaaagaacacaactccccaaaaggtatggagca

SEQ ID NO: 385628 - DNA, 201 bp, Homo sapiens
gtcatgctggggggataaggccaatctctgagggacagacttagtgcctgccggggacagcggggggatggtggcagctaggatcaaggccttgaaggggrtgcagacattccatgattcaattccctcttccttcctttagctccacattgtacattatgactctgattcctatgacagcttgagtgaggctgctgagag

SEQ ID NO: 385629 - DNA, 201 bp, Homo sapiens
attacccatctgacataaataaacaaacaaataacctcaggagtcagaggaaagcagcattttcctaacctacgaattctcaaaaacctttgtccatgaakttggagatatgagaatggggatcaggatcctgtagccaaagcgggaatcgaaatgtttataaccaagctcagtaggtaggtatcattgcactgacttggt

SEQ ID NO: 385630 - DNA, 201 bp, Homo sapiens
tgagccattcccctttccaggaagaagaggctggaaaaccgaaagagtgtggtcttcacctcagcacaagccacgactgaggcataaattccttctcagayaccatggatgtggatgacttcccttcatgcctatcaggaagcctctaaaatggggtgtaggatctggccagaaacactgtaggagtagtaagcagatgtc

SEQ ID NO: 385631 - DNA, 201 bp, Homo sapiens
tgcaactctctctgccctctaccctgtatctgggtggacttccccgaaaatatgtagctgcccagctccacctgcactggggtcagaaaggatccccaggkgggtcagaacaccagatcaacagtgaagccacatttgcagaggtaccagggaacaaagagctgggactcagacaaagtaacagggatgggtggtcctggg

SEQ ID NO: 385632 - DNA, 201 bp, Homo sapiens
gtctctgccttctcctggctgtttatttcattgctagaaagattcggtgaggccctactttccattcctccagtcccttcttcttttttttttttttttttggtaggtgggagacggagtcttgctctgttactcagtctggagtgcagtggtgtgcaatctcagctcactgcaacctctgccttctgggttcaagcaatt

SEQ ID NO: 385633 - DNA, 201 bp, Homo sapiens; identical to SEQ ID NO: 84793

SEQ ID NO: 385634 - DNA, 201 bp, Homo sapiens
ttctcaccctagctcctcccttctggatctcctcctgccttgagtttcacatatatggctcctagatcctgctctaatcatcaaatcctacacctcctgayttggcagaaaagctagttaagtcctcagtaaatcgtgtaggagtgagggagctggggtggaaaggaagctgggtgggaactctgagcttagctgccaggt

SEQ ID NO: 385635 - DNA, 201 bp, Homo sapiens
cattctctaacgagggatttaggatgtacattccaatcgggatttccagtcccgtggggagcaaacatcagttcacattcctgagacgtgcagcctccatsctccacggacgcagctccttggtggcaggtttcattcagtgccacatgtcctgcctcagccctttgttgggctggaaggaagaccctgagcccctcttcc

SEQ ID NO: 385636 - DNA, 201 bp, Homo sapiens
atttattgctactcggcaggagcaaggagggcagagggagcttcagatgggtgcatcctcctggctggtgcctctggtgaagagcatggaggagaaagagrtttcaatgtctggcttgaaagtatctgtgggtttcacattctctaacgagggatttaggatgtacattccaatcgggatttccagtcccgtggggagcaa

SEQ ID NO: 385637 - DNA, 201 bp, Homo sapiens
ccttgaagggggtgcagacattccatgattcaattccctcttccttcctttagctccacattgtacattatgactctgattcctatgacagcttgagtgargctgctgagaggcctcagggcctggctgtcctgggcatcctaattgaggtcagtagcccccagtcccttccaggtttctctccacttcctctgcaaccct

SEQ ID NO: 385638 - DNA, 201 bp, Homo sapiens
gactcattccaaactctctccctttccttctcttccaggtgggtgagactaagaatatagcttatgaacacattctgagtcacttgcatgaagtcaggcayaaaggtgagccttaaaaatctatagcaggaagtaagattagactttcaaaaactatccttaaaagccttgggatgaagcaattacatagagccaaggaat

SEQ ID NO: 385639 - DNA, 201 bp, Homo sapiens
cagctgggatggggatctgaagtcccactgacccattttcttctcttacagcaggatcctcgtataccacaggtaagccagccttataagataatgcgggraggggaggtgtcctcaccgagtgggggaaaggctcaaaatctatgttagtcctaggctgacaccttttacctttatctcccccaggtgaaatgctgagtc

SEQ ID NO: 385640 - DNA, 201 bp, Homo sapiens
gactgcagagagggaggtggagcagtacagaatgccagagggaggggagtgtggaggccagggttctgccccaggctgcgctggctgtaacccaaactatwctgccttgcaggtcaacactggacgtatgagggtgagcagatctcaaggcctcccgacaaccctttcacactgggacctcctcacctggcaggaagacac

SEQ ID NO: 385641 - DNA, 201 bp, Homo sapiens
tctgatggtggtagtgattgttcctaaagtctctcctttcctcctgccctggcctctctgccggaggtcagtgtcctcttcagtgacaaaagccgccctaratctgggctccctggagagggaggtggctgggtctggcagttacagccgctgtctctccatggtgctgctacacccctcccccactgggcatacaaatgg

SEQ ID NO: 385642 - DNA, 201 bp, Homo sapiens
agaggggaagggaggtgagtcttgggcagggtgagagcagagcactgacacagggggagtcctggacacaacaagggggtccccaggtggtggggataagygcagattcaaacccaccagtcactgactggctgaacccaggctgctcctggtaaagcttagagactaacggtcacaaaaggacaaagcaaaaccctggag

SEQ ID NO: 385643 - DNA, 201 bp, Homo sapiens; identical to SEQ ID NO: 84792

SEQ ID NO: 385644 - DNA, 201 bp, Homo sapiens
agggcaccccaggcccaggggtcccccctaggttccctcagtcctcgggtgggatgcgcagggcagaatacaccatcacccgactgtcctcctgccgtcgscctgcagaggggaagggaggtgagtcttgggcagggtgagagcagagcactgacacagggggagtcctggacacaacaagggggtccccaggtggtgggg

SEQ ID NO: 385645 - DNA, 201 bp, Homo sapiens
gaggagatacatccctgatcttctcccaggctcctgagatgttgagccaaagaagtctctcagggaaggccaataaatcagatcagggacaaggatggatrgggggtaaaggctagatagaaggtggatcttacctgaagtcaggaagtaatagggtgagtctccatggatcccaaccacacctggcccaagtgcatcagc

SEQ ID NO: 385646 - DNA, 201 bp, Homo sapiens
agaaaaaaataccagaatcgaggacaagaaaaacagagtgggaggggcttttcaaggatctacgctttagaatttacaccatccttccaaatcgtagctgygtttccgggaactgagttgtgtttaccttggcttccgactatgttggcaacaggtttcctgcaagaaacaggcgcgtctccacaccctcgtccctcctcc

SEQ ID NO: 385647 - DNA, 201 bp, Homo sapiens
accatgtgggccttctcggaattgcccatgccgctgctgatcaatttgatcgtctcgctgctgggatttgtggccacagtcaccctcatcccggccttcckgggccacttcattgctgcgcgcctctgtggtcaggacctcaacaaaaccagccgacagcagatgtgagcagcggcacacgggtccgggcagggggcaagg

SEQ ID NO: 385648 - DNA, 201 bp, Homo sapiens; identical to SEQ ID NO: 84821

SEQ ID NO: 385649 - DNA, 201 bp, Homo sapiens; identical to SEQ ID NO: 84822

SEQ ID NO: 385650 - DNA, 201 bp, Homo sapiens
agtagccctgtcatttatagctggattggcactaatagctaggccatgatcttctcccattgaatataaacagtttcacagaaccccaacgttacacaggktcattctgtgaccgtgatggagcaagactaaaactagacccctccctctgtaatcatgtttgagcacaggcaaaaccacaagaacactgagcaacccaca

SEQ ID NO: 385651 - DNA, 201 bp, Homo sapiens
acctgaagctgggagaggttgagagtagaacaccgaatttgaattccccccaccatcatcaccctccttcctcttggagcttggacccagaaacagccccrttaacctccttgctcgtgtaggtttgttctggagattcccaagcccaggctgtgtgtctgtttttaaaaataatgtatttccatagtaacagctcctgcc

SEQ ID NO: 385652 - DNA, 201 bp, Homo sapiens
gcagaggtccagctgatgtcaacagagagaaagcagaacctgaagctgggagaggttgagagtagaacaccgaatttgaattccccccaccatcatcaccmtccttcctcttggagcttggacccagaaacagccccattaacctccttgctcgtgtaggtttgttctggagattcccaagcccaggctgtgtgtctgttt

SEQ ID NO: 385653 - DNA, 201 bp, Homo sapiens
gactggctctcagacctccagggagtctcagtatactcgtcatcaacaagataactgaatgctgcctcctctgggatcccacaagctcctcctttccaccwgcttctggcgtctcactgtcgctgcctgtgaaaggtccttctactcttataatctactgaaatgatacttctcttcctcaagaccacttactctggtcac

SEQ ID NO: 385654 - DNA, 201 bp, Homo sapiens
gccgctgccccgggggagcatggcccgggcgggccgcggggaggaggtgggctcccccggggctgggcgcgcggggtcgggggctctccgcgactgagtgyccaggactagtgggtgccacagggcgaggagaggaggtcctcgggggtcgcgatgccggggtctctgtctccgtggtccgggtctctcctagcttggtca

SEQ ID NO: 385655 - DNA, 201 bp, Homo sapiens
gactttgggaaattcaggggaaaaaagcaatatgcgtagtaattatagaagataagggaagctacttactttgcaaataacaatgcagatttattaaaagkgagaaagaaaaatagtagccctgtcatttatagctggattggcactaatagctaggccatgatcttctcccattgaatataaacagtttcacagaacccc

SEQ ID NO: 385656 - DNA, 201 bp, Homo sapiens
ggcgaagaggatcagcaaggccgcccagcccacgtcccgctgcccccagcccggatccatgctccgcgcgggctccgatcccggtcccggctggggctcakccgctgccccgggggagcatggcccgggcgggccgcggggaggaggtgggctcccccggggctgggcgcgcggggtcgggggctctccgcgactgagtgc

SEQ ID NO: 385657 - DNA, 201 bp, Homo sapiens
tggggagagagaagtctgagtgttaaaggtgtggcctgatatatgactttgggaaattcaggggaaaaaagcaatatgcgtagtaattatagaagataagrgaagctacttactttgcaaataacaatgcagatttattaaaagtgagaaagaaaaatagtagccctgtcatttatagctggattggcactaatagctagg

SEQ ID NO: 385658 - DNA, 201 bp, Homo sapiens
ttttcctaccatctctccccgcaggaatcctgtactatgtctacatggggctgctggcagtgttctgtaccaatgccatcaatatcctagcaggaattaayggcctagaggctggccagtcactagtcatttctgcttccatcattgtcttcaacctggtagagttggaaggtaggtgggattgggggtggggagagagaa

SEQ ID NO: 385659 - DNA, 201 bp, Homo sapiens
ctggagtctcctctgagtcagaactagggtcagggctagtccagtgcccatagggtgtgatgtgagagaagggattggtaatgcctcttgccactggctcrgatcctcttcccccacacaggtacccatcacgggtgtttgtgggagataccttctgttactttgctggcatgacctttgccgtggtgggcatcttgggac

SEQ ID NO: 385660 - DNA, 201 bp, Homo sapiens
cgggtctctcctagcttggtcagcagtcggacccgttagtcgccggccagtgcccgactcctcccaccgcgcgggccccgccggaccctggaggggactgstctgcagagacgctggggctcgcgggccggcaccggctccgggagggctgcgtgcgcagagctgacactgacaacaccgccggcgccccgcccccacccg

SEQ ID NO: 385661 - DNA, 201 bp, Homo sapiens
gcccttatcataacccaccttgtggtggtgaagctaaacctgcgcatacctctatggagttttctgcgtcttcagttggtcgtattctgaaatttctctctacccagtagtagttagggatgagtgcgtggaggccccaggaatagatgaattcagggccttggatcctgcagagttgctgcacaactggagtctcctctg

SEQ ID NO: 385662 - DNA, 201 bp, Homo sapiens
ggcccttatcataacccaccttgtggtggtgaagctaaacctgcgcatacctctatggagttttctgcgtcttcagttggtcgtattctgaaatttctctctacccagtagtagttagggatgagtgcgtggaggccccaggaatagatgaattcagggccttggatcctgcagagttgctgcacaactggagtctcctct

SEQ ID NO: 385663 - DNA, 201 bp, Homo sapiens
ctttgggaaattcaggggaaaaaagcaatatgcgtagtaattatagaagataagggaagctacttactttgcaaataacaatgcagatttattaaaagtgrgaaagaaaaatagtagccctgtcatttatagctggattggcactaatagctaggccatgatcttctcccattgaatataaacagtttcacagaaccccaa

SEQ ID NO: 385664 - DNA, 201 bp, Homo sapiens
gaaggtaggtgggattgggggtggggagagagaagtctgagtgttaaaggtgtggcctgatatatgactttgggaaattcaggggaaaaaagcaatatgcrtagtaattatagaagataagggaagctacttactttgcaaataacaatgcagatttattaaaagtgagaaagaaaaatagtagccctgtcatttatagct

SEQ ID NO: 385665 - DNA, 201 bp, Homo sapiens
cagagttgctgcacaactggagtctcctctgagtcagaactagggtcagggctagtccagtgcccatagggtgtgatgtgagagaagggattggtaatgcytcttgccactggctcggatcctcttcccccacacaggtacccatcacgggtgtttgtgggagataccttctgttactttgctggcatgacctttgccgtg

SEQ ID NO: 385666 - DNA, 201 bp, Homo sapiens
gaaatagatctcaggttgactccacattcaatgctcttcctattagccacagggaggagggttcaaatagtggcccagtcacatgaagctatcttcccccygcagactcaatatcaagacaggcaaactggagatgagctattccaagttcaagaccaagagcctctctttcttgggcacctttattttaaaggtaacagg

SEQ ID NO: 385667 - DNA, 201 bp, Homo sapiens
tcctgactctcaaggaaccactggtttttgggatagaacttgggccagggctaggaacacaggctccacggtgacatgtcatttgattgtaaattaagtgytctgattagtaagaactaagcagggggccacatgctctcaatggagacaataaagtgttgtctttttcttattgtttatgtaggtatatttcctatatgg

SEQ ID NO: 385668 - DNA, 201 bp, Homo sapiens
gagaaaaaaataccagaatcgaggacaagaaaaacagagtgggaggggcttttcaaggatctacgctttagaatttacaccatccttccaaatcgtagctkcgtttccgggaactgagttgtgtttaccttggcttccgactatgttggcaacaggtttcctgcaagaaacaggcgcgtctccacaccctcgtccctcctc

SEQ ID NO: 385669 - DNA, 201 bp, Homo sapiens
gctgcaggtgaggatgggaatcgagtttatacctccgtgtctccctttctgcgtgattcttactccagtccatttctccttgcagatcctgggcagtgccrtcaccttctccattcgatatcagctcgttcgactcttctatgatgtctgagtcccttgatcattgtcctttacctcacagtctctaggattcctgactca

SEQ ID NO: 385670 - DNA, 201 bp, Homo sapiens
  misc_feature (1)...(201): n = A,T,C or G
atctggacttgggtaggtagtcctaccactgctgcccctatggcacctacttcagggaacccttcctggtgctccacattctcctccaagtgttccttttntgtctctgtgtcttcccagatcctttctggtagcccttcatcctatcgtccgtcctcaccacttttctaaaaattcttaaatcctcctcccctaggtggc

SEQ ID NO: 385671 - DNA, 201 bp, Homo sapiens
ttggaaggtaggtgggattgggggtggggagagagaagtctgagtgttaaaggtgtggcctgatatatgactttgggaaattcaggggaaaaaagcaatakgcgtagtaattatagaagataagggaagctacttactttgcaaataacaatgcagatttattaaaagtgagaaagaaaaatagtagccctgtcatttata

SEQ ID NO: 385672 - DNA, 201 bp, Homo sapiens
aggtgttgaggaacactagaaacagaggggactgtgacctggggactttttctgcaggaagaaaacagcccaaagatgagagtgattcgcgtgggtacccrcaagagccaggtgggtgcaggagccggggtggaggaggtttgtcagaacagttatgatgctcacagcatcacaaattgggggactcagagggttagttcc

SEQ ID NO: 385673 - DNA, 201 bp, Homo sapiens
tgcccgacactgtggtccttagcaactctccacagcggggaaacctcaacacccggcttcggaagctggacgagcagcaggagttcagtgccatcatcctrgcaacagctggcctgcagcgcatgggctggcacaaccgggtggggcaggtagggcctgcccctatcctctccccagctcatctgcatctcctttctgcct

SEQ ID NO: 385674 - DNA, 201 bp, Homo sapiens
tctctctgggcagtgtggtgggaaccagctccctgcgaagagcagcccagctgcagagaaagttcccgcatctggagttcaggagtattgtatccttttaraagagtgacggatccttttggaagagtgacggagacagcagccaaggaaaaagacaaggtctagagggctctgggagtccggagagtggaaggggcttcc

SEQ ID NO: 385675 - DNA, 201 bp, Homo sapiens
tgaggaacactagaaacagaggggactgtgacctggggactttttctgcaggaagaaaacagcccaaagatgagagtgattcgcgtgggtacccgcaagarccaggtgggtgcaggagccggggtggaggaggtttgtcagaacagttatgatgctcacagcatcacaaattgggggactcagagggttagttcctagtat

SEQ ID NO: 385676 - DNA, 201 bp, Homo sapiens
cccttcaggatctgcctaacctgtgacagtctaaagagtctgagccgtggctgggaagggcaggactaatccaaatctctacccgcagcttgctcgcatahagacggacagtgtggtggcaacattgaaagcctcgtaccctggcctgcagtttgaaatcagtgagttttctggaaaggagtggaagctaatgggaagccc

SEQ ID NO: 385677 - DNA, 201 bp, Homo sapiens
ccttcaggatctgcctaacctgtgacagtctaaagagtctgagccgtggctgggaagggcaggactaatccaaatctctacccgcagcttgctcgcatacmgacggacagtgtggtggcaacattgaaagcctcgtaccctggcctgcagtttgaaatcagtgagttttctggaaaggagtggaagctaatgggaagccca

SEQ ID NO: 385678 - DNA, 201 bp, Homo sapiens
tcaggatctgcctaacctgtgacagtctaaagagtctgagccgtggctgggaagggcaggactaatccaaatctctacccgcagcttgctcgcatacagayggacagtgtggtggcaacattgaaagcctcgtaccctggcctgcagtttgaaatcagtgagttttctggaaaggagtggaagctaatgggaagcccagta

SEQ ID NO: 385679 - DNA, 201 bp, Homo sapiens
tagtcctaagattttccaaaagaccaagtgcagcatctgtaacagtgccttggagttgccctcagtccacttcctgtgtggccactccttccaccaacackgctttgagagttactcggaaagtgatgctgactgccccacctgcctccctgaaaaccggaaggtcatggatatgatccgggcccaggaacagaaacgaga

SEQ ID NO: 385680 - DNA, 201 bp, Homo sapiens
attatgtgcctctgtccccatcatgaatcgtagcacagtgctaggctcagtaaatgctgatcaataatgagcacctgattgattgactctctcctcagttkctatgtccaccacaggggacaagattcttgatactgcactctctaaggtaacaacatcttcctccccagttcttgtccccactcttctttccttccctga

SEQ ID NO: 385681 - DNA, 201 bp, Homo sapiens
tccccactcttctttccttccctgaagggattcactcaggctctttctgtccggcagattggagagaaaagcctgtttaccaaggagcttgaacatgccckggagaagaatgagtaagtaaagataggagagtgtggtgccctcccagtctcttgctgggaccctagtatgctaggtctcttgctgggacccggggtgtca

SEQ ID NO: 385682 - DNA, 201 bp, Homo sapiens
aggctccaccactgaagtagaggcaggggtgggtggagaaggggtgaaggctggctgctcataccctttctctttgcccccctctcccatctctatagagkggacctggttgttcactccttgaaggacctgcccactgtgcttcctcctggcttcaccatcggagccatctgcaagtaagagtcttgcaagtaaggggct

SEQ ID NO: 385683 - DNA, 201 bp, Homo sapiens
ggttaaagggaccagccttggagtatttccccactctgagactcagctggccacaggccaggttctgaagttcctttcttccaagccagtgattctggttyttggacaaggtgttgaggaacactagaaacagaggggactgtgacctggggactttttctgcaggaagaaaacagcccaaagatgagagtgattcgcgtg

SEQ ID NO: 385684 - DNA, 201 bp, Homo sapiens
aggaggaggaaaggaacagtgactgcctagtgttaaaatctcattgtaacttctctctgggcagtgtggtgggaaccagctccctgcgaagagcagcccasctgcagagaaagttcccgcatctggagttcaggagtattgtatccttttagaagagtgacggatccttttggaagagtgacggagacagcagccaaggaa

SEQ ID NO: 385685 - DNA, 201 bp, Homo sapiens
ttgtcgcgggccgcattgcccgccagctccaggatctcagcggtgaggtactccagcactgccgccaggtacactggcgcgccggcgccaacgcgctcggsgtagtggcccttccgcagcagccggtgtacacggcccactgggaactggaggccggcgcgcgacgagcgcgacttggccttggcgcgggccttgccgcca

SEQ ID NO: 385686 - DNA, 201 bp, Homo sapiens
tttccatgagggcggtggtggcccttaaaaagggcctttgtggtggcatggggaggcctggcggccggccgcggcgcgggccctcttagtactcctgggargcctgggtggccttcttgccgcccgagggcgccttcggccccacggtggcgctggtcttcttgggcagcagcacggcctggatgttgggcaggacgcctc

SEQ ID NO: 385687 - DNA, 201 bp, Homo sapiens
agacgcccgccgcagtgtaactgctgtcgcgcgcgcgccgcgaggccgcctttataagcccccaggacacacctctgcgccctcctgattggctcttttckccaatacccgcctccggttggttgcggttaacccttgggtgtcgcggctcggctgagggagcgcgcccgctgattggtcgaatttgaaaaccttttgccc

SEQ ID NO: 385688 - DNA, 201 bp, Homo sapiens
ctcatacagcatgaagatggccctgaggatgacccacagttggtaggcatcactgctcgtaacattccacgagggccccagttggctgcccagaacttggrcatcagcctggccaacttgttgctgagcaaaggagccaaaaacatcctggatgttgcacggcagcttaacgatgcccattaactggtttgtggggcacag

SEQ ID NO: 385689 - DNA, 201 bp, Homo sapiens
ccactgaagtagaggcaggggtgggtggagaaggggtgaaggctggctgctcataccctttctctttgcccccctctcccatctctatagagtggacctgkttgttcactccttgaaggacctgcccactgtgcttcctcctggcttcaccatcggagccatctgcaagtaagagtcttgcaagtaaggggcttgggcagg

SEQ ID NO: 385690 - DNA, 201 bp, Homo sapiens
actgggaactggaggccggcgcgcgacgagcgcgacttggccttggcgcgggccttgccgccagtcttgccgcggcccgacatgctagcgaggtagaccgrtgaagcacgacggctcaaacactagaacagacgcccgccgcagtgtaactgctgtcgcgcgcgcgccgcgaggccgcctttataagcccccaggacacac

SEQ ID NO: 385691 - DNA, 201 bp, Homo sapiens
accctttctctttgcccccctctcccatctctatagagtggacctggttgttcactccttgaaggacctgcccactgtgcttcctcctggcttcaccatcrgagccatctgcaagtaagagtcttgcaagtaaggggcttgggcaggggtaggcatcatgtgaacctttgcctttccctttggggcctgaccctctgcttc

SEQ ID NO: 385692 - DNA, 201 bp, Homo sapiens
ttgcccccctctcccatctctatagagtggacctggttgttcactccttgaaggacctgcccactgtgcttcctcctggcttcaccatcggagccatctgmaagtaagagtcttgcaagtaaggggcttgggcaggggtaggcatcatgtgaacctttgcctttccctttggggcctgaccctctgcttcagggttatctc

SEQ ID NO: 385693 - DNA, 201 bp, Homo sapiens
gctaatttttgtatttttagtagagactgggtttcaccatgttagtcaggctggtctcaaactcctgacctcaggtgatccaccagcctcggcctcccaargggctgggattacaggcttgagccccgcacccggtcagtacttccatttttatatgctactatattgtcttgacttttacaatgaatatgtagtacattt

SEQ ID NO: 385694 - DNA, 201 bp, Homo sapiens
aactcaagaaataccagtgagttggcaatcgagagagaatagaggtgatctgaacttaaatctcttccctcattctgtgcccttccctcctcccccaggcrggaaaaccctcatgatgctgttgtctttcacccaaaatttgttgggaagaccctagaaaccctgccagagaagaggtaagtggggcctggataggcagct

SEQ ID NO: 385695 - DNA, 201 bp, Homo sapiens
aaactcaagaaataccagtgagttggcaatcgagagagaatagaggtgatctgaacttaaatctcttccctcattctgtgcccttccctcctcccccaggygggaaaaccctcatgatgctgttgtctttcacccaaaatttgttgggaagaccctagaaaccctgccagagaagaggtaagtggggcctggataggcagc

SEQ ID NO: 385696 - DNA, 201 bp, Homo sapiens; identical to SEQ ID NO: 84924

SEQ ID NO: 385697 - DNA, 201 bp, Homo sapiens
aataccagtgagttggcaatcgagagagaatagaggtgatctgaacttaaatctcttccctcattctgtgcccttccctcctcccccaggcgggaaaaccytcatgatgctgttgtctttcacccaaaatttgttgggaagaccctagaaaccctgccagagaagaggtaagtggggcctggataggcagcttggtgggat

SEQ ID NO: 385698 - DNA, 201 bp, Homo sapiens
aaagtcagccagctagagagggaaagacagactcaggcagagggaaccgcacgaggccccagattgcccgacactgtggtccttagcaactctccacagcrgggaaacctcaacacccggcttcggaagctggacgagcagcaggagttcagtgccatcatcctggcaacagctggcctgcagcgcatgggctggcacaac

SEQ ID NO: 385699 - DNA, 201 bp, Homo sapiens
gaaagtcagccagctagagagggaaagacagactcaggcagagggaaccgcacgaggccccagattgcccgacactgtggtccttagcaactctccacagyggggaaacctcaacacccggcttcggaagctggacgagcagcaggagttcagtgccatcatcctggcaacagctggcctgcagcgcatgggctggcacaa

SEQ ID NO: 385700 - DNA, 201 bp, Homo sapiens
gagggaaagacagactcaggcagagggaaccgcacgaggccccagattgcccgacactgtggtccttagcaactctccacagcggggaaacctcaacaccyggcttcggaagctggacgagcagcaggagttcagtgccatcatcctggcaacagctggcctgcagcgcatgggctggcacaaccgggtggggcaggtagg

SEQ ID NO: 385701 - DNA, 201 bp, Homo sapiens
ggccttgggcgtggaagtgcgagccaaggaccaggacatcttggatctggtgggtgtgctgcacgatcccgagactctgcttcgctgcatcgctgaaaggrccttcctgaggcacctggtagggcctgtgctccacctgtggagggctggggacttggagagctgggaaaggtggcagggaagatttcttacatgaatgct

SEQ ID NO: 385702 - DNA, 201 bp, Homo sapiens
aattccagtcccttcaggatctgcctaacctgtgacagtctaaagagtctgagccgtggctgggaagggcaggactaatccaaatctctacccgcagcttvctcgcatacagacggacagtgtggtggcaacattgaaagcctcgtaccctggcctgcagtttgaaatcagtgagttttctggaaaggagtggaagctaat

SEQ ID NO: 385703 - DNA, 201 bp, Homo sapiens
agggaaagacagactcaggcagagggaaccgcacgaggccccagattgcccgacactgtggtccttagcaactctccacagcggggaaacctcaacacccrgcttcggaagctggacgagcagcaggagttcagtgccatcatcctggcaacagctggcctgcagcgcatgggctggcacaaccgggtggggcaggtaggg

SEQ ID NO: 385704 - DNA, 201 bp, Homo sapiens
gtcccaagatgcccaccacggcaaaggtcatgccagcaaagtaacagaaggtatctcccacaaacacccgtgatgggtacctgtgtgggggaagaggatcygagccagtggcaagaggcattaccaatcccttctctcacatcacaccctatgggcactggactagccctgaccctagttctgactcagaggagactccag

SEQ ID NO: 385705 - DNA, 201 bp, Homo sapiens
tcatccctaggctgggaaaattgttggagtgcagagggctcccaagccccttctcatgcccagatggaaattccagtcccttcaggatctgcctaacctgygacagtctaaagagtctgagccgtggctgggaagggcaggactaatccaaatctctacccgcagcttgctcgcatacagacggacagtgtggtggcaaca

SEQ ID NO: 385706 - DNA, 201 bp, Homo sapiens
cacctttccctctctgaaattgtcagctaaagtttatgttgctaggtgtccccgtgtaatttgggtggtgctgcctgtctgaaaattgctcctatgttgtygttttccccacagcctcacctaatttcatcttctacgttgtttaattggaggacgtaagtttgacactgtggtttaggtagtatttaggattgccatggg

SEQ ID NO: 385707 - DNA, 201 bp, Homo sapiens
aaagatcaggcctgatgtcctaggatgtttttccatcagggggccttgggcgtggaagtgcgagccaaggaccaggacatcttggatctggtgggtgtgckgcacgatcccgagactctgcttcgctgcatcgctgaaagggccttcctgaggcacctggtagggcctgtgctccacctgtggagggctggggacttggag

SEQ ID NO: 385708 - DNA, 201 bp, Homo sapiens
acttggatatgctgtgcacattcaatgaacttaaggaattgtttgaacctagtagttctgggaccttagagtcctttctgtgggctccctgtggcccagawttttggtggccacgtttaatatcaagcctagcctaatttgcaaagggtctcccagggttaatttattggagtgatcacatggagtagaccagagtctgag

SEQ ID NO: 385709 - DNA, 201 bp, Homo sapiens; identical to SEQ ID NO: 84895

SEQ ID NO: 385710 - DNA, 201 bp, Homo sapiens
cacggcaaaggtcatgccagcaaagtaacagaaggtatctcccacaaacacccgtgatgggtacctgtgtgggggaagaggatccgagccagtggcaagargcattaccaatcccttctctcacatcacaccctatgggcactggactagccctgaccctagttctgactcagaggagactccagttgtgcagcaactctg

SEQ ID NO: 385711 - DNA, 201 bp, Homo sapiens
cttcgtcccggccccagcgcagacctatgaatgaagatggagggagagctgatgtgaaaggcctgggtcccggccgcagaaggggcgccagaccgaaatcrgcgatcgcgtctctcccaccaaagcctcccggccagcggccgcgtctgaaagtcctgggctaagcaccacgccgggggggtaccagacaccccggctgca

SEQ ID NO: 385712 - DNA, 201 bp, Homo sapiens
gggaaccgcacgaggccccagattgcccgacactgtggtccttagcaactctccacagcggggaaacctcaacacccggcttcggaagctggacgagcagyaggagttcagtgccatcatcctggcaacagctggcctgcagcgcatgggctggcacaaccgggtggggcaggtagggcctgcccctatcctctccccagc

SEQ ID NO: 385713 - DNA, 201 bp, Homo sapiens
cctgttacctttaaaataaaggtgcccaagaaagagaggctcttggtcttgaacttggaatagctcatctccagtttgcctgtcttgatattgagtctgcrgggggaagatagcttcatgtgactgggccactatttgaaccctcctccctgtggctaataggaagagcattgaatgtggagtcaacctgagatctatttc

SEQ ID NO: 385714 - DNA, 201 bp, Homo sapiens
cgaagagcgcccaagccgcatccggaaggcccgaaccctaccggagggcggacggcggacagggcagggcccgaggccgacgcggcaggcggtgcgggacrggagcgggggcgggcggggactcgaggccgggcggcgaaggcgggcgaggggaggggaggggaagggagccgcggcccgcttgccccgcagtctgaagcg

SEQ ID NO: 385715 - DNA, 201 bp, Homo sapiens
cctcatacagcatgaagatggccctgaggatgacccacagttggtaggcatcactgctcgtaacattccacgagggccccagttggctgcccagaacttgrgcatcagcctggccaacttgttgctgagcaaaggagccaaaaacatcctggatgttgcacggcagcttaacgatgcccattaactggtttgtggggcaca

SEQ ID NO: 385716 - DNA, 201 bp, Homo sapiens
tccccgcagccccttagcgactcgggatggggcggctgagtcacgaacgccgaggcgggcaggtgcggcgccgccggcctccccccggcaggctcgggtcytccgcgccacggaggtccccgaagagcgcccaagccgcatccggaaggcccgaaccctaccggagggcggacggcggacagggcagggcccgaggccgac

SEQ ID NO: 385717 - DNA, 201 bp, Homo sapiens
acctcaacacccggcttcggaagctggacgagcagcaggagttcagtgccatcatcctggcaacagctggcctgcagcgcatgggctggcacaaccgggtkgggcaggtagggcctgcccctatcctctccccagctcatctgcatctcctttctgccttacagtcatccccaatttaggatttttagactttatgattgt

SEQ ID NO: 385718 - DNA, 201 bp, Homo sapiens
gtattgtatccttttagaagagtgacggatccttttggaagagtgacggagacagcagccaaggaaaaagacaaggtctagagggctctgggagtccggasagtggaaggggcttccagcaagcagcccgtggggtcagtggcctgtctgtctttccatgcactcatccgtccactcatttacagtctaatgttttcttag

SEQ ID NO: 385719 - DNA, 201 bp, Homo sapiens
gcatctcctttctgccttacagtcatccccaatttaggatttttagactttatgattgtgtgaaagcgatatacgttcagtagaaactgtacttagtaccyatacagccattctgttttttactttcagtacagtattcattacatgagatattcactttattgtaaaacaggcttggtgtcagatgattttgtccaacta

SEQ ID NO: 385720 - DNA, 201 bp, Homo sapiens
tgagtcaggaatcctagagactgtgaggtaaaggacaatgatcaagggactcagacatcatagaagagtcgaacgagctgatatcgaatggagaaggtgayggcactgcccaggatctgcaaggagaaatggactggagtaagaatcacgcagaaagggagacacggaggtataaactcgattcccatcctcacctgcagc

SEQ ID NO: 385721 - DNA, 201 bp, Homo sapiens
ggagggcgccggaagtgacgcgaggctctgcggagaccaggagtcagactgtaggacgacctcgggtcccacgtgtccccggtactcgccggccggagccyccggcttcccggggccgggggaccttagcggcacccacacacagcctactttccaagcggagccatgtctggtaacggcaatgcggctgcaacggcggtg

SEQ ID NO: 385722 - DNA, 201 bp, Homo sapiens
cgaactttaggcagcgcagcctcctagtcttatggaacatctgaggcagaagaaacctgagtccaaccttttcattttatagatgaacaaacagatcctgrtgggacagtgtacccaaggtcacccagccaagaggctgagcaggactgtacgtcagatccgtttacctcagtccttaatgcatgcagtccagccagatta

SEQ ID NO: 385723 - DNA, 201 bp, Homo sapiens
gccttgggcgtggaagtgcgagccaaggaccaggacatcttggatctggtgggtgtgctgcacgatcccgagactctgcttcgctgcatcgctgaaagggycttcctgaggcacctggtagggcctgtgctccacctgtggagggctggggacttggagagctgggaaaggtggcagggaagatttcttacatgaatgctc

SEQ ID NO: 385724 - DNA, 201 bp, Homo sapiens
ggaagtgcgagccaaggaccaggacatcttggatctggtgggtgtgctgcacgatcccgagactctgcttcgctgcatcgctgaaagggccttcctgagghacctggtagggcctgtgctccacctgtggagggctggggacttggagagctgggaaaggtggcagggaagatttcttacatgaatgctctgtatacagtg

SEQ ID NO: 385725 - DNA, 201 bp, Homo sapiens
tcacagggtggtgttaagagcccttgcagctcacaagaacttcttgttacaggaaggaggctgcagtgtgccagtagccgtgcatacagctatgaaggatrggcaagtaagtggggggaaatgggcgggaagccagggaaaggaggactgtggcatttcttcctgtgcatcccaggtttctaggtagtcccctctcagact

SEQ ID NO: 385726 - DNA, 201 bp, Homo sapiens
cagggtggtgttaagagcccttgcagctcacaagaacttcttgttacaggaaggaggctgcagtgtgccagtagccgtgcatacagctatgaaggatgggyaagtaagtggggggaaatgggcgggaagccagggaaaggaggactgtggcatttcttcctgtgcatcccaggtttctaggtagtcccctctcagactgtg

SEQ ID NO: 385727 - DNA, 201 bp, Homo sapiens
ggaaaggaggactgtggcatttcttcctgtgcatcccaggtttctaggtagtcccctctcagactgtgctgaggcaactgttttcttccccagctgtaccygactggaggagtctggagtctagacggctcagatagcatacaagagaccatgcaggctaccatccatgtccctgcccaggtaccaaagctggagggcgag

SEQ ID NO: 385728 - DNA, 201 bp, Homo sapiens
ggaggactgtggcatttcttcctgtgcatcccaggtttctaggtagtcccctctcagactgtgctgaggcaactgttttcttccccagctgtacctgactrgaggagtctggagtctagacggctcagatagcatacaagagaccatgcaggctaccatccatgtccctgcccaggtaccaaagctggagggcgagggggt

SEQ ID NO: 385729 - DNA, 201 bp, Homo sapiens
gattgctgactactttggcagaggtgttttcaacaaattgactctgctgaccgaccctcccacagccagactgacctccagcctggaggctgggctgcaaygcgacctactcatgcactccaggaggggcacttaagcagcctggaggaagatgtgggcaacagtggaggaccaagagaacagacacaatgggacctgggc

SEQ ID NO: 385730 - DNA, 201 bp, Homo sapiens
ttttttttttttttttggtccgagtagcttttaaagggccagtagctcggttgccctccggaaggaatggggaaatcagagagcggtgatactgggttaaragtggaaggattgtttggaacggaactccggtccctgcgggcatctgggtgggattcccatcaggcctgggatgcacggctctagatttagtgacccaga

SEQ ID NO: 385731 - DNA, 201 bp, Homo sapiens
ttgcctgagctcaggagttcgagaccagcctagggaacacagtgaaaccccgtttctactaaaaatacaaaaaattagccgacgtggtggcatgcgcctgyagtcccagctacttgggaggctaagacaggagaatcgcttgaacctgggaggtggaggttgcactgagccgagaccgcgccattgcactccagcctgggt

SEQ ID NO: 385732 - DNA, 201 bp, Homo sapiens
ctctggcaggaggaagaggcgtgtcctcttgagttcttgacttgggctctggcctgttaatatttccatgttggtgaaaccagaggcagcactctaggtgmacgaactttaggcagcgcagcctcctagtcttatggaacatctgaggcagaagaaacctgagtccaaccttttcattttatagatgaacaaacagatcct

SEQ ID NO: 385733 - DNA, 201 bp, Homo sapiens
tctgcttcgctgcatcgctgaaagggccttcctgaggcacctggtagggcctgtgctccacctgtggagggctggggacttggagagctgggaaaggtggyagggaagatttcttacatgaatgctctgtatacagtgctaactcattcttgttgaatgttgtgtatggataggaccaggtctgggcccacagttgccttt

SEQ ID NO: 385734 - DNA, 201 bp, Homo sapiens
cctgactggaggagtctggagtctagacggctcagatagcatacaagagaccatgcaggctaccatccatgtccctgcccaggtaccaaagctggagggcragggggtaataaacaagagtgcatataatctcttgttctcaccaaatcccacctccttccctcatacagcatgaagatggccctgaggatgacccacagt

SEQ ID NO: 385735 - DNA, 201 bp, Homo sapiens; identical to SEQ ID NO: 84918

SEQ ID NO: 385736 - DNA, 201 bp, Homo sapiens
ctcttgttctcaccaaatcccacctccttccctcatacagcatgaagatggccctgaggatgacccacagttggtaggcatcactgctcgtaacattccaygagggccccagttggctgcccagaacttgggcatcagcctggccaacttgttgctgagcaaaggagccaaaaacatcctggatgttgcacggcagcttaa

SEQ ID NO: 385737 - DNA, 201 bp, Homo sapiens
ggctgggaagggcaggactaatccaaatctctacccgcagcttgctcgcatacagacggacagtgtggtggcaacattgaaagcctcgtaccctggcctgyagtttgaaatcagtgagttttctggaaaggagtggaagctaatgggaagcccagtaccccgagaggagagaacacaacatttctggctttgcctatagct

SEQ ID NO: 385738 - DNA, 201 bp, Homo sapiens
ccactcttctttccttccctgaagggattcactcaggctctttctgtccggcagattggagagaaaagcctgtttaccaaggagcttgaacatgccctggwgaagaatgagtaagtaaagataggagagtgtggtgccctcccagtctcttgctgggaccctagtatgctaggtctcttgctgggacccggggtgtcagat

SEQ ID NO: 385739 - DNA, 201 bp, Homo sapiens
caccactgaagtagaggcaggggtgggtggagaaggggtgaaggctggctgctcataccctttctctttgcccccctctcccatctctatagagtggaccyggttgttcactccttgaaggacctgcccactgtgcttcctcctggcttcaccatcggagccatctgcaagtaagagtcttgcaagtaaggggcttgggca

SEQ ID NO: 385740 - DNA, 201 bp, Homo sapiens
ctctttgcccccctctcccatctctatagagtggacctggttgttcactccttgaaggacctgcccactgtgcttcctcctggcttcaccatcggagccayctgcaagtaagagtcttgcaagtaaggggcttgggcaggggtaggcatcatgtgaacctttgcctttccctttggggcctgaccctctgcttcagggtta

SEQ ID NO: 385741 - DNA, 201 bp, Homo sapiens; identical to SEQ ID NO: 84891

SEQ ID NO: 385742 - DNA, 201 bp, Homo sapiens
ggcccacagttgccttttcagtgatgtcctcaggtctgtggtcacagggtggtgttaagagcccttgcagctcacaagaacttcttgttacaggaaggagrctgcagtgtgccagtagccgtgcatacagctatgaaggatgggcaagtaagtggggggaaatgggcgggaagccagggaaaggaggactgtggcatttct

SEQ ID NO: 385743 - DNA, 201 bp, Homo sapiens; identical to SEQ ID NO: 84892

SEQ ID NO: 385744 - DNA, 201 bp, Homo sapiens
cactcatccgtccactcatttacagtctaatgttttcttagccccagacaagtgttcagagtgcaaggcattggggataatggtgagcaagataaacattyccctgcatatgtagagtttacgtcttacttagggataatgcagttatactgaactgaatagtgactacttctggagggatagggagtacttccttttttt

SEQ ID NO: 385745 - DNA, 201 bp, Homo sapiens; identical to SEQ ID NO: 84935

SEQ ID NO: 385746 - DNA, 201 bp, Homo sapiens
gactcaggcagagggaaccgcacgaggccccagattgcccgacactgtggtccttagcaactctccacagcggggaaacctcaacacccggcttcggaagmtggacgagcagcaggagttcagtgccatcatcctggcaacagctggcctgcagcgcatgggctggcacaaccgggtggggcaggtagggcctgcccctat

SEQ ID NO: 385747 - DNA, 201 bp, Homo sapiens
tagcaactctccacagcggggaaacctcaacacccggcttcggaagctggacgagcagcaggagttcagtgccatcatcctggcaacagctggcctgcagygcatgggctggcacaaccgggtggggcaggtagggcctgcccctatcctctccccagctcatctgcatctcctttctgccttacagtcatccccaattta

SEQ ID NO: 385748 - DNA, 201 bp, Homo sapiens
  misc_feature (1)...(201): n = A,T,C or G
tttttatgagtgtttctggtcttcctgctcgattgtatatactcagagggcaggaaccagggattatgtgcctctgtccccatcatgaatcgtagcacagngctaggctcagtaaatgctgatcaataatgagcacctgattgattgactctctcctcagttgctatgtccaccacaggggacaagattcttgatactgca

SEQ ID NO: 385749 - DNA, 201 bp, Homo sapiens
tctcatgcccagatggaaattccagtcccttcaggatctgcctaacctgtgacagtctaaagagtctgagccgtggctgggaagggcaggactaatccaartctctacccgcagcttgctcgcatacagacggacagtgtggtggcaacattgaaagcctcgtaccctggcctgcagtttgaaatcagtgagttttctgga

SEQ ID NO: 385750 - DNA, 201 bp, Homo sapiens
  misc_feature (1)...(201): n = A,T,C or G
atccctgaggagggcagaaggtactgaggaaggttaaagggaccagccttggagtatttccccactctgagactcagctggccacaggccaggttctgaanttcctttcttccaagccagtgattctggttcttggacaaggtgttgaggaacactagaaacagaggggactgtgacctggggactttttctgcaggaaga

SEQ ID NO: 385751 - DNA, 201 bp, Homo sapiens
agagtcactggagggcttgtttccttatcacctcctcatttaagaaacaagcactttgattctgattcgtattccttccctcctcttctcctgcagctcargtgctccaatgacagcttttctgtgattgctgactactttggcagaggtgttttcaacaaattgactctgctgaccgaccctcccacagccagactgacc

SEQ ID NO: 385752 - DNA, 201 bp, Homo sapiens
cttccagaaggtgctgcggcctccccgcagccccttagcgactcgggatggggcggctgagtcacgaacgccgaggcgggcaggtgcggcgccgccggccwccccccggcaggctcgggtcttccgcgccacggaggtccccgaagagcgcccaagccgcatccggaaggcccgaaccctaccggagggcggacggcggac

SEQ ID NO: 385753 - DNA, 201 bp, Homo sapiens
cctgacccaggacttccctccaggtgtggatgacactgtcacggtgctcctgcagtacccaggggaggtccatggcagcttcacctgcagcatcaccgtgyagctctccaacacggcctccgtgagcggcaccaagggcatggtacaggtgaggcatggcgggcccaagcgctggggatcgtgcccctaaaataggagggg

SEQ ID NO: 385754 - DNA, 201 bp, Homo sapiens
gctcctatgaggagctggccaaggacccgagcgtgggtgagtggcgagggcgatgggggtgctggccgccgcccctggagcggtgccccctggctgccccstgggagatgcaaggctcctcaggatggtccaatccctttgggttccataaagacctttggctgggaggagaactataaaacgggcttggtctgggactgg

SEQ ID NO: 385755 - DNA, 201 bp, Homo sapiens
gctcctcaacccctgctggtgcccgaccgagctggtggtgaagggggagcataaggagttcccgctgcccccagtcccaaaggactgcaattttgacaacrgggcaggcatgagttatgaggccaagcacgtctgggagtgcctacgcaagggtaaggatatggatgcggggcaggcgccaggcctggtagggggatgttg

SEQ ID NO: 385756 - DNA, 201 bp, Homo sapiens
ggtgaagggggagcataaggagttcccgctgcccccagtcccaaaggactgcaattttgacaacggggcaggcatgagttatgaggccaagcacgtctgggagtgcctacgcaagggtaaggatatggatgcggggcaggcgccaggcctggtagggggatgttgggcccctccccacctgctctgtcaccctgctgttta

SEQ ID NO: 385757 - DNA, 201 bp, Homo sapiens
ggaattctgggaattgtagttctttgggtcttgggcgcgtgggtaggaggggtccctaactacactctccccacaggtatgaaggaaagtcctgtgattcycctgtcggaaagtgagctcctggctgacatccttgaagaggtgaggaaggccattggagtcaccttcccccaagacaaacgctgatgtatccccgaataa

SEQ ID NO: 385758 - DNA, 201 bp, Homo sapiens
gtgaagggggagcataaggagttcccgctgcccccagtcccaaaggactgcaattttgacaacggggcaggcatgagttatgaggccaagcacgtctgggagtgcctacgcaagggtaaggatatggatgcggggcaggcgccaggcctggtagggggatgttgggcccctccccacctgctctgtcaccctgctgtttag

SEQ ID NO: 385759 - DNA, 201 bp, Homo sapiens
cagccccttcctaaggacagctccctaagggagacaggggtgtgaccgaccacctggtccctgggtgctagggcggggcctcgaagttgtgggcggagctmggctgtctgggtgggcggggctgctgacctcttgacctactcccaccctagaggtggcctacattggcacccagcacccccagcacaaggcggcggtgat

SEQ ID NO: 385760 - DNA, 201 bp, Homo sapiens
tctctccctccagctcctcaacccctgctggtgcccgaccgagctggtggtgaagggggagcataaggagttcccgctgcccccagtcccaaaggactgcrattttgacaacggggcaggcatgagttatgaggccaagcacgtctgggagtgcctacgcaagggtaaggatatggatgcggggcaggcgccaggcctggt

SEQ ID NO: 385761 - DNA, 201 bp, Homo sapiens
gacctcttgacctactcccaccctagaggtggcctacattggcacccagcacccccagcacaaggcggcggtgatgctgtgcttggcggcgggcaaggccrttctgtgcgagaagcccacgggcgtgaacgcggcggaagttcgcgagatggtcgcggaggcccgatcccgagccctcttccttatggaggtgagggcaga

SEQ ID NO: 385762 - DNA, 201 bp, Homo sapiens
tgacctcttgacctactcccaccctagaggtggcctacattggcacccagcacccccagcacaaggcggcggtgatgctgtgcttggcggcgggcaaggcsgttctgtgcgagaagcccacgggcgtgaacgcggcggaagttcgcgagatggtcgcggaggcccgatcccgagccctcttccttatggaggtgagggcag

SEQ ID NO: 385763 - DNA, 201 bp, Homo sapiens
tttcactgtgttagccaggatggtcttgatctcctgtcctcgtgatccgaccacctcggcctcccaaagtgctgggattacaagcgtaagccaccgcgccyggccatttttctttttaatcaatcctgccacttgaagattatatggtaagggaaatctgcagtctatacacaatactgagttgctccaagcccttgagga

SEQ ID NO: 385764 - DNA, 201 bp, Homo sapiens
tatccccctatgattgggaccccagaagggattagaactggttggttaactcctttccttgtggtctgcaggccatctggacccgcttctttcctgcctcygaggctctgaggtctgttttggcccagggaactctaggagacctccgggtggctcgggcagaatttgggaagaatctcatccacgttccccgggccgtag

SEQ ID NO: 385765 - DNA, 201 bp, Homo sapiens
gggcggaggatggggacccgcccccggggtgggcggggcgtcaggtacttaattcgcgcctggagggaccgaaggtgccgagggctccgcatcgcaaccawggcgctgcgctggggcatcgtgtctgtcggcctcatctccagcgacttcacagccgtgctgcagacgctgcctcgctctgagcaccaggtctgcccgccc

SEQ ID NO: 385766 - DNA, 201 bp, Homo sapiens
gttggttaactcctttccttgtggtctgcaggccatctggacccgcttctttcctgcctccgaggctctgaggtctgttttggcccagggaactctaggasacctccgggtggctcgggcagaatttgggaagaatctcatccacgttccccgggccgtagaccgggcccaggctgggggggccctgctggacatcggcat

SEQ ID NO: 385767 - DNA, 201 bp, Homo sapiens
gcggtggcggcccgcgatctgagccgtgcgaaggagtttgcacagaaacacgacatccccaaggcctacggctcctatgaggagctggccaaggacccgarcgtgggtgagtggcgagggcgatgggggtgctggccgccgcccctggagcggtgccccctggctgccccctgggagatgcaaggctcctcaggatggtcc

SEQ ID NO: 385768 - DNA, 201 bp, Homo sapiens
aacccactggcctgcatgctctatacctacatctaatctcttcttataaggacaccagtcatattgtcatattggataagggcccaccctaatgacctcatttttttttttttttttgagttggagtctcgctctgtcgcccaggctggagtgcaacggtgcgatcttcagctcactgcaacctccacctcccgggttcaa

SEQ ID NO: 385769 - DNA, 201 bp, Homo sapiens
agaggttgaagtgagccaagatcgcgccactgcactccagcctgggcgacagagtgagacttggtcttagaaataaataaataggccgggcgcggtggctsacgcctgtaatcctagcactttgggaggccaaggcgggcagatcatgaggtccggagatggagaccatcctggctaatacggtgaaaccgcatctccact

SEQ ID NO: 385770 - DNA, 201 bp, Homo sapiens
tgctatgttgtccaggctggtctggaacttctgacctcaggtgatccgcccgccttggcctcccaaagcgctggggttacaggcatgagccacagcgcccrgcccccagttccaggagtttttttttgttgttgtcattttgcatttttctacatagatgatgtcatctatgaacaaagagttttatttctaccttctgta

SEQ ID NO: 385771 - DNA, 201 bp, Homo sapiens
cccggggatggacagggcaagctcttagccaccaggttcaagagggaggcccctgtgcaccacctggcatgttcctggaggcagcctcagcagcaccgttrgtgaaggcagcagtgccacttcttctctccctccagctcctcaacccctgctggtgcccgaccgagctggtggtgaagggggagcataaggagttcccgc

SEQ ID NO: 385772 - DNA, 201 bp, Homo sapiens
gctgagatggcgtcactgtactctagcctgggcgacagagtgagactccatctcaaaaaaaaaaaaagctgccccactttgcagaagaggcccttgccttrgcttccactcagctggaaagtatccaagagtgcctgagccacccagatgtgatgcccttcatctttgacctttaaccccaaggagcaagaggcagttcat

SEQ ID NO: 385773 - DNA, 201 bp, Homo sapiens
cttgccatgcaagaagtgaagtctcttgcccaaggttccacaggcaggatttggggcctgtgcagtctcagagactctgccctgagagaccctgccctgayccaggacttccctccaggtgtggatgacactgtcacggtgctcctgcagtacccaggggaggtccatggcagcttcacctgcagcatcaccgtgcagctc

SEQ ID NO: 385774 - DNA, 201 bp, Homo sapiens
gtgctcctgcagtacccaggggaggtccatggcagcttcacctgcagcatcaccgtgcagctctccaacacggcctccgtgagcggcaccaagggcatggyacaggtgaggcatggcgggcccaagcgctggggatcgtgcccctaaaataggagggggacaaatggcctctggagctagatgagagcttaaccagccaat

SEQ ID NO: 385775 - DNA, 201 bp, Homo sapiens
taaatctagcctacgtgcacatccggtcacagcacctttccttgaacttattcatgatacagattccttttctacatagacacagtaacaatctgatctctctttcttttccccacacaaacctgagtgtcttgaggtttggaaaggccttgatgtaagctactatgaagataatttcaatattgggggatttaataacgg

SEQ ID NO: 385776 - DNA, 201 bp, Homo sapiens
aaatctagcctacgtgcacatccggtcacagcacctttccttgaacttattcatgatacagattccttttctacatagacacagtaacaatctgatctctctttcttttccccacacaaacctgagtgtcttgaggtttggaaaggccttgatgtaagctactatgaagataatttcaatattgggggatttaataacggc

SEQ ID NO: 385777 - DNA, 201 bp, Homo sapiens
aatctagcctacgtgcacatccggtcacagcacctttccttgaacttattcatgatacagattccttttctacatagacacagtaacaatctgatctctctttcttttccccacacaaacctgagtgtcttgaggtttggaaaggccttgatgtaagctactatgaagataatttcaatattgggggatttaataacggct

SEQ ID NO: 385778 - DNA, 201 bp, Homo sapiens
tagaccgggcccaggctgggggggccctgctggacatcggcatctactgtgtccagttcacctccatggtctttggagggcagaagccagagaagatttcygtcgtgggaaggcgtcatgaaacaggtaccatctatcctggaatatttcatggtgatgggaatgattctgtctctctgggagcactgaactgaggacaag

SEQ ID NO: 385779 - DNA, 201 bp, Homo sapiens
atctagcctacgtgcacatccggtcacagcacctttccttgaacttattcatgatacagattccttttctacatagacacagtaacaatctgatctctctttcttttccccacacaaacctgagtgtcttgaggtttggaaaggccttgatgtaagctactatgaagataatttcaatattgggggatttaataacggctt

SEQ ID NO: 385780 - DNA, 201 bp, Homo sapiens
acaccacgcctggctaattttttgtatctttagtagagacagggtttcaccgtgttagccaggatggtcttgatctcatgaccccacgatctgcccacctyagcctcccaaagtgctgggattacaggcgtgagccaccgcgaccagccagcacttcattcttttgccttgccatgcaagaagtgaagtctcttgcccaag

SEQ ID NO: 385781 - DNA, 201 bp, Homo sapiens
atcacttgaaccagggaggcggaggttgcagtgagctgagatcacaccactgcactccagcctggggatagagtgagactccgtctcaaacaaacaaacaracaaatagcggtaagtggggcacatgcctatactcccagctactcaggaggctgaggcgggaagatagcttgagcccaggagtacaaggctgctgtgagc

SEQ ID NO: 385782 - DNA, 201 bp, Homo sapiens
cctacattggcacccagcacccccagcacaaggcggcggtgatgctgtgcttggcggcgggcaaggccgttctgtgcgagaagcccacgggcgtgaacgcrgcggaagttcgcgagatggtcgcggaggcccgatcccgagccctcttccttatggaggtgagggcagaggagcccttccaatatccagcgtaaaagtgct

SEQ ID NO: 385783 - DNA, 201 bp, Homo sapiens
gcggaggatggggacccgcccccggggtgggcggggcgtcaggtacttaattcgcgcctggagggaccgaaggtgccgagggctccgcatcgcaaccatgscgctgcgctggggcatcgtgtctgtcggcctcatctccagcgacttcacagccgtgctgcagacgctgcctcgctctgagcaccaggtctgcccgccctc

SEQ ID NO: 385784 - DNA, 201 bp, Homo sapiens
cgacttcacagccgtgctgcagacgctgcctcgctctgagcaccaggtctgcccgccctccggattctggggaagaggaggcggggggcgggactccagartctaaaggaggagggagtttagggttcaggactagtgagtgggtcgtcattgcagtgaaacgtctgtttccttgctacctccttctccatctctgttctg

SEQ ID NO: 385785 - DNA, 201 bp, Homo sapiens
tacgtagaaaatgaagacataagaaactccattttgaactgtactaagaaaaattgtttctgctttgagatgctattaacctgtaactttagccccaaccstgtgctcacagaaacatgtcctgtattgaatcaaagtttaatggatttagggctttgcaggatgtgccttgttaacaatatgtttgcaggcagtatgctt

SEQ ID NO: 385786 - DNA, 201 bp, Homo sapiens
gtggctggaggcgagatatgctggcagtgatactgctctgttactctttgctacactgagatgtttgtgtaaagtgaaacataaatctagcctacgtgcayatccggtcacagcacctttccttgaacttattcatgatacagattccttttctacatagacacagtaacaatctgatctctctttcttttccccacacaa

SEQ ID NO: 385787 - DNA, 201 bp, Homo sapiens
gtgcacatccggtcacagcacctttccttgaacttattcatgatacagattccttttctacatagacacagtaacaatctgatctctctttcttttccccrcacaaacctgagtgtcttgaggtttggaaaggccttgatgtaagctactatgaagataatttcaatattgggggatttaataacggctttcccccagatc

SEQ ID NO: 385788 - DNA, 201 bp, Homo sapiens
gatcatacctatcaacagccactgcactccagcttgcataatgcagcaagaccccatctctttaaaaaaaaaaaaaaaaaaaagtactctgtgtgtgtgtgtgtatacacatacattttttctgaactagttgatagtaacatttatagccctttacccctaaagacctcagtatgtatttcctaagaatagaaatattct

SEQ ID NO: 385789 - DNA, 201 bp, Homo sapiens
cttttgctgttgcttttaagaaatagattgtatgtttcaggaaatgctctatgtacagtgaagtgtgatgagaaagtgaaagtgttttctgtccgtggaayatcctttgatgctgcagcaacaagtggcggtagtgccagttcagaaaagggtgagtgttcatttggagtttttttgttttgtttcttacttttttaattc

SEQ ID NO: 385790 - DNA, 201 bp, Homo sapiens
ctcggtcatcagcgggtggccagctttgtctctgccgctccgcggcccgggcttactcgaaggtccccggggaatagcctcacctttgccccacttcccartctagcccctaacttcccgccgtctattggctgcgcagccgcccaatgggcaggcggaaaccgcgggctcgtgctcccggcctagggcgtcttatctcgt

SEQ ID NO: 385791 - DNA, 201 bp, Homo sapiens
atggtcgcacgcgccactgcactccagcctgggcgacagagcgagactccatctcaaaaaaaaaaaaaaaaaaaaaaagaatattagtggtacagtgataracacaaatagctagattttcgctatagaacaagtattttataaataaatttatagaataatattgtgtacagaatagttttctttaaagcatacatgctt

SEQ ID NO: 385792 - DNA, 201 bp, Homo sapiens
agtattacagtcaatgtcatataacatttctggtcatgattaaaagctgctatattttattactaaaaggattaaaggaagtatttaaagtacagaaatayacattttaaaaattacaaaatgtatgttaaaatagggataggtgactttatatattatccttttgggtatgactcagaaagattttatagcttattcttg

SEQ ID NO: 385793 - DNA, 201 bp, Homo sapiens
tggctgcgcagccgcccaatgggcaggcggaaaccgcgggctcgtgctcccggcctagggcgtcttatctcgttcgcgcgtctcgcgagcattaggtgacyggctgaggcggcgccagttggccgggcacggggctgctgtaaggccgaggttgcggcggaagcggagaccatgttccgagcggcggctccggggcagctc

SEQ ID NO: 385794 - DNA, 201 bp, Homo sapiens
cctggctaattttttttttttttttttttttttttttgtagagacggggtttccccatgttacccaggctggtctcgaactcttgtcctcaagtgatccayctgcctcggcctcccaaagtcctggaattacaggcctgagctaccgcacctggccttagacatcttttttcttgtgcgtattccttgtttaataaaaagt

SEQ ID NO: 385795 - DNA, 201 bp, Homo sapiens
agtgtaccttcttagtgtggatgcctgttcgagtttcttccttctaggtgtggtagtacctgtcctgcttttaaagacatccagggttatacagatatctrctgatatgtttcttcaccgttatggttcattttttcctatacttaatagagttagaagacaactggtcaatagttatttcttgccttgtctgtgaagtaa

SEQ ID NO: 385796 - DNA, 201 bp, Homo sapiens
taccacccttctaaatttgttctatcttttcttatctaaattcaataatccacaactgtcacacttggtaattgatgtttattaaatttcatatctcatarttcaatatattgcattaaggtggcttaatactgtaaaactcatgaaactcttaatgtagttagagtaatggtaagtactcaatctcaaaggctatttaaa

SEQ ID NO: 385797 - DNA, 201 bp, Homo sapiens
tgctgggattacaggtgtgagccaccgtgctctgccaaggttaataattcttactgctttatcaaggaccttaggtgaaagtggctttaaaaaaaaaaaamaacaaaaaactgtgagtatgtggccatgaagaatgcagtgagtttggtgccactgacttgaaactaccactaaggcagtgttacccaccatcattttcac

SEQ ID NO: 385798 - DNA, 201 bp, Homo sapiens
ttgataatgactgtttatatttcttaggtgatacagattttcagtgaataggagtctcagccagtttaaacttgtatagtatgcaggaaaacatgttttttatatatttcaaaacaatatgcagtcttgtccattaaaaaaaaatcttacatcccagtgctctattctatgagatattcattcacagttttaagatgctgt

SEQ ID NO: 385799 - DNA, 201 bp, Homo sapiens
cgagacaccttctcaaaaaaaaaaaaaaaaaaaaaaaaaagggggtttgattatggtatacctaggggtgtgtctttttgtatttaacctgcttcagatarcaagcttcttaaatctataaatgtatgccttttaccacatttgggacgttttatgttactattttttctgcttcatttttttttcctcacttttgttctg

SEQ ID NO: 385800 - DNA, 201 bp, Homo sapiens
gattgcaccactgcattccagcctgggtgacagagcgagacaccttctcaaaaaaaaaaaaaaaaaaaaaaaaaagggggtttgattatggtatacctagkggtgtgtctttttgtatttaacctgcttcagatagcaagcttcttaaatctataaatgtatgccttttaccacatttgggacgttttatgttactatttt

SEQ ID NO: 385801 - DNA, 201 bp, Homo sapiens
ggccatgggggctacaaagtccggcggagtcaaaggaatgagaaaagatgaaagaaagtgggaccagggggccaacgctagtatggaggttgcaaaggccscaagctctggaagcccacactatttattggtgatcaaacaaagaaacaggtggtgaggatgtgggggttgaaaggaagtggtatatcaagcaaatgagct

SEQ ID NO: 385802 - DNA, 201 bp, Homo sapiens
gcccataagcacacagagcacagctgaacaatggcaacaccctccattacttcttgattctctaatcgaccccaattagggccaactcccagtaactgttmaaaggaaacaagcacaggtgactgcacttgtgtgttttcccttgcctgagtttgagcttcctcagcccaccatgttttaaactgcaagtactgggacgga

SEQ ID NO: 385803 - DNA, 201 bp, Homo sapiens
aaagtcttggcacctctgggaaactccattgcgcactgtgagagaatgaaagaaaaaaacggtaaataacatcttagtattactatgaaaataggtttgaytttgcagaatccctgaaagggtcttggggctctcggggttatcctgaccatattttgagaattgctggttgtctaatagttttgtaatatattgtacaga

SEQ ID NO: 385804 - DNA, 201 bp, Homo sapiens
acaccttttaaatttagactagaacttccaagtaatagactgactgttcctgagggtaagggtcccctaactcccatggggaccttctttggtggctcccyaggaaggagacaggaattgtgctgcagaggtctatggcagcactgtctgctgtggcgggggacagctgtatgtttgttaagggcactggctgtgccggat

SEQ ID NO: 385805 - DNA, 201 bp, Homo sapiens
ccacggagtcgaggaactaataactagttgaatctctctggtatgatcagagtcaattattcccatatgcacagtgacaccttttaaatttagactagaacttccaagtaatagactgactgttcctgagggtaagggtcccctaactcccatggggaccttctttggtggctccctaggaaggagacaggaattgtgctg

SEQ ID NO: 385806 - DNA, 201 bp, Homo sapiens
ttaaggtttatttatttagaggaaaatatacttcacatggttggatatttggatgttttctccagtaatgctgaactacaggagaagagctatggaaaaastggagaggttgcttaatcagccggaagagggaggtttttctgagtgagtgtggtgtgatataagaggagaacaaggaagttgaaggcatagcaaaggaat

SEQ ID NO: 385807 - DNA, 201 bp, Homo sapiens
ggccactgctaaaaatgatactccaatccagtctgatctgtttgtccttctgaaggttctgattggccatttttattttttcctagtccttctcctgagcratatcccatatttttcatcatttgtccactaatatcactatattgatccataggaatagatatttcagcaccccattgttgcaataagtctctaccccat

SEQ ID NO: 385808 - DNA, 201 bp, Homo sapiens
ataagcaccttaaatgtgcactcctacaaatccttgatagttgtttttttaaatttgaatagtgactcctgggtttaaaaagtacatattgtaacaaataytcagatagcgaaaattcttcaagtgaggaacattggatgtatagattaatttggaaagagtcaaaatctttgcaacatttgatcttctatctgtgaccat

SEQ ID NO: 385809 - DNA, 201 bp, Homo sapiens
taggtttttggcagccatatcctactgttggcaagaattacacttgtggccatccaaaatctctcccctcccccacttgaattgcctgctattaaaccacrtctcctttgtctaggaataattcagtatttctttgtttttaaagctgaacgcagtattttcatttattcttatttaatttgggtctgttttctctaccat

SEQ ID NO: 385810 - DNA, 201 bp, Homo sapiens
aaaggaatggtaaaaaaagcaatcctttagatctatcactataagaggctagtattttggagtcattgttggggagggcagccctggttgtagcttgcccrtcggttgaattacagcattaacagccctcaaatctgttagcattctccatttacccgattttttcttaatgacaaatacaggagaattccaaggggagaa

SEQ ID NO: 385811 - DNA, 201 bp, Homo sapiens
atattcctttacaagtttcttgttagatacgggttttacaaatattttctcacagtccatggcttacctatttattttcttaatggtatcaaattgaggargttcccttctgtttctgatttgctgagagttttaggaatgtgttttgaattttgtcagatgttttctgcatctgttaagatgattggatagctttttgtt

SEQ ID NO: 385812 - DNA, 201 bp, Homo sapiens
tgaactttagtgccaacttcccctctaactggacagccttttctgtcccaagtctccagagagaaatcaggcctgatgagggggagtccctggaacctggrccccagccttggtgggggaacctctggaatgcatggggcgggtcctaactgttagggacatttccaagctgttagttgctgtttaaaacaaataaaattg

SEQ ID NO: 385813 - DNA, 201 bp, Homo sapiens
ccatggtgtatatgtgccacattttcttaatccagtctatcattgttggacatttgggttggttccaagtcttttctattgtgaatagtgctgcaataaayatacgtgtgcatgtgtctttatagcagcatgatttatagtcctttgggtatatacccagtaatgggatggctgggtcaaatggtatttctagttctagat

SEQ ID NO: 385814 - DNA, 201 bp, Homo sapiens
atggttaccatgggtgtggatggcagtggggggtccaggtccagccctgtaggctctaccgtcccgctgagctgctcctgctgcttaagtgcatgcattgrgctgcctccagcctgagggcccagctgttaccaccctcggggtttaaatatccaggtttgcccctccaagtcacaaagagatgttcttgtaatattccct

SEQ ID NO: 385815 - DNA, 201 bp, Homo sapiens
cagacagctggcaggagcagagtgattatgtttccatggttaccatgggtgtggatggcagtggggggtccaggtccagccctgtaggctctaccgtcccrctgagctgctcctgctgcttaagtgcatgcattgagctgcctccagcctgagggcccagctgttaccaccctcggggtttaaatatccaggtttgcccct

SEQ ID NO: 385816 - DNA, 201 bp, Homo sapiens
agagcctggctgacaacctgtatactgtgcacagtgatgtgtgggccttcggggtgaccatgtgggagatcatgacacgtgggcagacaccatacgctggyatcgaaaacactgagatttacaactacctcattggcgggaatcacctgaaacagcttccagagtgtatggaggacgttcttacactcccactccatccaa

SEQ ID NO: 385817 - DNA, 201 bp, Homo sapiens
cctcatcttgcttcaaaagagaccgaaagagacgtggtttgggcaaggctttgacagtgtcatttcccggggagagccagccattcacttctgggcagccyggtccttcaatcaagaaaggcccaagtgcatcgaggccacattggaaagcttgggcatcaacagcgaactaaaggaaaaactggaggatgtgctcatccc

SEQ ID NO: 385818 - DNA, 201 bp, Homo sapiens
aaattttgaagacagtacagtgaatttctataaatcctatacctggttttccttattatttttaatgtaaataatttttaataattaccacaagattctaraatgaagttttttaaacatgggaaattctgtgatggtttctgtcaaggtttctagtgattttttttattgtggtaaaatataaaatttgccgttttaacg

SEQ ID NO: 385819 - DNA, 201 bp, Homo sapiens
aggaggtggagcttgcagtgagccgagattgcaccactgcattccagcctgggtgacagagcgagacaccttctcaaaaaaaaaaaaaaaaaaaaaaaaaagggggtttgattatggtatacctaggggtgtgtctttttgtatttaacctgcttcagatagcaagcttcttaaatctataaatgtatgccttttaccaca

SEQ ID NO: 385820 - DNA, 201 bp, Homo sapiens
caggaggtggagcttgcagtgagccgagattgcaccactgcattccagcctgggtgacagagcgagacaccttctcaaaaaaaaaaaaaaaaaaaaaaaaaagggggtttgattatggtatacctaggggtgtgtctttttgtatttaacctgcttcagatagcaagcttcttaaatctataaatgtatgccttttaccac

SEQ ID NO: 385821 - DNA, 201 bp, Homo sapiens
gtggtctttgtcgccccatgttgggtgccatgaatattggggtgatcagacccaacaccaggccatgggggctacaaagtccggcggagtcaaaggaatgrgaaaagatgaaagaaagtgggaccagggggccaacgctagtatggaggttgcaaaggccccaagctctggaagcccacactatttattggtgatcaaaca

SEQ ID NO: 385822 - DNA, 201 bp, Homo sapiens
gttttatctataacagttgctgtttaaggttatggctgtgtagtctattgagaaaagaaggttgagaaagcatttgccattctgtataactcttgtcctgrttgaggcagtcttaggggtattgtttttttgagcacataacattggatctctgaattctagatagaaccacttacatgatgtgtttaaatttttatttat

SEQ ID NO: 385823 - DNA, 201 bp, Homo sapiens
gaatatctggagccatccaacatttagctgggatgaaagacagcaaggtaattgtacatcagtgatgttaaaagaaaacgtttccacattttaggatttgkcttaccttgtatgtttccatgtagttacaatgcatgtagtcaagccattcacactaacgtagatctgggaactgaaagaaataaaagctaccgttcactg

SEQ ID NO: 385824 - DNA, 201 bp, Homo sapiens
aggatcagctgaggccaggaattcgagaccagcctggacaacaacgcaagaccccgcttctacagaaaaaaacaaaacataaaccaaaaaatgagctggaygcagtagcgtgcgcctgtagtcccagctactcaggaggccaaggcagaataatctcttgagcccaggagttcaaggttacagtgagctatgatcacacca

SEQ ID NO: 385825 - DNA, 201 bp, Homo sapiens
tttgtttgttgttgttgttgttgttattgttgaaatcagatgataacagcttggaacactaaccctctagaaaggtgctatgatatgatttgcagggtctrtaccaccagcctgcaatatagatgagtgcttcagttaagcttacacaccttcagccaccagttccctctcacatggtataggagttgctgagtgtgtagt

SEQ ID NO: 385826 - DNA, 201 bp, Homo sapiens
tatggaggtactttgaaatgatgtaaatatcccagttttcctcaaactttttttttttttttttttttgagacatagtctcgctctgtcgctgaggctggrgtgcagtggtgtgatctcggctcactggaacttctgccttcagggtgcaaatgattctcatgtctcagcctcctgagtagcttggattacaggcatgcac

SEQ ID NO: 385827 - DNA, 201 bp, Homo sapiens
cgacatggtggtgggcgcctgtagttccagctactcaggaggcggaggcgggagaatggcatgaacctgggaggtggagcttgcagtgagccatggtcgcrcgcgccactgcactccagcctgggcgacagagcgagactccatctcaaaaaaaaaaaaaaaaaaaaaaagaatattagtggtacagtgatagacacaaat

SEQ ID NO: 385828 - DNA, 201 bp, Homo sapiens
aaagttacttttcccattgtaatacatattttatatggaggtactttgaaatgatgtaaatatcccagttttcctcaaactttttttttttttttttttttgagacatagtctcgctctgtcgctgaggctggagtgcagtggtgtgatctcggctcactggaacttctgccttcagggtgcaaatgattctcatgtctca

SEQ ID NO: 385829 - DNA, 201 bp, Homo sapiens
gcaggtggtgggtagatgtgttacttggagcatgtggaaattctcttttgatcctttcagtttttttcagtgaataagaagcaaagtcatcagctgagaawgaggatgctaaagaggtataggaagtttgaaaagaagaaaatatatgaaattatagtttaggaaacagctaatgaaaggactgggggaacttagtataac

SEQ ID NO: 385830 - DNA, 201 bp, Homo sapiens
tctcccctgagggaagtcagaattactggaatgatgtccttgagtagacaagagacaatgtggacatagctgcaggtggtgggtagatgtgttacttggarcatgtggaaattctcttttgatcctttcagtttttttcagtgaataagaagcaaagtcatcagctgagaatgaggatgctaaagaggtataggaagtttg

SEQ ID NO: 385831 - DNA, 201 bp, Homo sapiens
atggtggtgtgcacctgtggtcccagctgcttgggaggctgaggcaggagaaatcacttaagcccaggaggttaaggctgcagtgagctgtaattatgccmctgcactccagcctgggtgacagaacaagaccctctctaaaaaaataaataataaaaggcataggtagtggttacatggttgtcttcactgtatgataat

SEQ ID NO: 385832 - DNA, 201 bp, Homo sapiens
tataaaatatactagtacttagaattctaaatcaatgtctttgtttacagttatcagtgaatatcctaactagctgaataatagagcttgaaaaaaatgamaaatattttttccccttagttggtgcttcccgtgctgctgttgatgctggctttgttcccaatgacatgcaagttggacagacgggaaaaatagtagcac

SEQ ID NO: 385833 - DNA, 201 bp, Homo sapiens
ggctgaggtgggaggattacttgaactcaggagtttgaggctatcctgggcaacataataagaccctatctcaaaaataaataaataaaataaattagctrggcatgttggcatatgcctgtagtcacagatacttgggaggctgaggtgggaggattgcttgagccagaaggtcgaggctatggtgagttgtgatcatgc

SEQ ID NO: 385834 - DNA, 201 bp, Homo sapiens
cttttcctctcataactattgttaaaagaggattgatcctaaagtgtagagaggcaatgggttataaaataataaaatgaaaatttgtttcctttaaaacsttttcaataatggacatgtatttttttactctttagtcatattctgtactactcttctgcttaaaataggattttagagttatagaatttttagagcagg

SEQ ID NO: 385835 - DNA, 201 bp, Homo sapiens
atagcttatctcaagtccccactcttgaaattaaaaaaaaaatgttctgtagctaaccattaatgcatttaggaagaggatacatttccaaaaccatattwaaaaaaataaagttaggaattacagttaaaagattaccataaactgttaacgatgtgcatatagttaacacttaacacttaaaaatggttaagatggggc

SEQ ID NO: 385836 - DNA, 201 bp, Homo sapiens
ccaatgggcaggcggaaaccgcgggctcgtgctcccggcctagggcgtcttatctcgttcgcgcgtctcgcgagcattaggtgactggctgaggcggcgcmagttggccgggcacggggctgctgtaaggccgaggttgcggcggaagcggagaccatgttccgagcggcggctccggggcagctccggcgggcggtgagt

SEQ ID NO: 385837 - DNA, 201 bp, Homo sapiens
ctgaataatagagcttgaaaaaaatgacaaatattttttccccttagttggtgcttcccgtgctgctgttgatgctggctttgttcccaatgacatgcaakttggacagacgggaaaaatagtagcaccagtaagtattgcaataaaatatgctgtgtaaaatgttatggggataagtactgtatgtatttgttgaacagt

SEQ ID NO: 385838 - DNA, 201 bp, Homo sapiens
ttttgtcatggtttaggttactgttaatgtgatagctaatccagagtgtctcaaatcctcttaaaatcttagcacattcatacctgttctttatgacctaytgtgttttcaagatattcctcctttagcatgcacagtagctacattcttcctaagttgttgcagctcatagttttgagttactgattgtattgtttttgg

SEQ ID NO: 385839 - DNA, 201 bp, Homo sapiens
gaatatcctaactagctgaataatagagcttgaaaaaaatgacaaatattttttccccttagttggtgcttcccgtgctgctgttgatgctggctttgttmccaatgacatgcaagttggacagacgggaaaaatagtagcaccagtaagtattgcaataaaatatgctgtgtaaaatgttatggggataagtactgtatg

SEQ ID NO: 385840 - DNA, 201 bp, Homo sapiens
ctagcgttccttcactgtggtctttgtcgccccatgttgggtgccatgaatattggggtgatcagacccaacaccaggccatgggggctacaaagtccggyggagtcaaaggaatgagaaaagatgaaagaaagtgggaccagggggccaacgctagtatggaggttgcaaaggccccaagctctggaagcccacactatt

SEQ ID NO: 385841 - DNA, 201 bp, Homo sapiens
ttgaaatggctcaggagctacctttattagtgcccacactgaccaaatggaaactggaatttttgctctgtctttatacacctttttaaaatctcttcccrttgtctcccattcatccaactccatagtcccttgttccggaaaccatgggcaaaactgctttactgtactaaagagtgataacaaattctgagtactaac

SEQ ID NO: 385842 - DNA, 201 bp, Homo sapiens
accacggagtcgaggaactaataactagttgaatctctctggtatgatcagagtcaattattcccatatgcacagtgacaccttttaaatttagactagamcttccaagtaatagactgactgttcctgagggtaagggtcccctaactcccatggggaccttctttggtggctccctaggaaggagacaggaattgtgct

SEQ ID NO: 385843 - DNA, 201 bp, Homo sapiens
ggaatgggagccagaggctcaacaatggccactgctaaaaatgatactccaatccagtctgatctgtttgtccttctgaaggttctgattggccatttttrttttttcctagtccttctcctgagcaatatcccatatttttcatcatttgtccactaatatcactatattgatccataggaatagatatttcagcacccc

SEQ ID NO: 385844 - DNA, 201 bp, Homo sapiens
cctgaccaacatggagaaactccatttctcctaaaaatacaaaattagctgggagtggtggcacatgctgtaatcccagctacttgggaggctgaggcacragaattgcttgaacctgggaggcagaggttgcggtgagctgagatcgcaccatcgcactccagcctgggcaacaagagtgaaactctgtctcaaaaaaac

SEQ ID NO: 385845 - DNA, 201 bp, Homo sapiens
acagaaaacttacaagtagagaacaaaaaacctatatttttatgggccatttgagtaagttgctgtgatcatccccaaataggttatataggacattttcytaataactacaatacaactttttaaattaggatattaacattgatacataataccatctaagcatcagaccctgacattcaggttttgcctgttattcca

SEQ ID NO: 385846 - DNA, 201 bp, Homo sapiens
ggaaatatattaaatgctttgaagactttgacataaactatacagcctccgagagaattttgattcattaactcagggtgtgtgtgtgtgtgtgtgtgtgkatatacacacacatatacgcatatatgtgcatatacatatatacacacgtaatttatgtatgtacattttgttaaggatctgaaactttttttggaaact

SEQ ID NO: 385847 - DNA, 201 bp, Homo sapiens
tatgttacctgggctggagtgcaggggttggtcacaggcatgatcataacacaccacagcctctaactcctagcctcaattaatcctgccacttcagcctsttgagtggctgggactgcaggtatgtgccaccatgcctgactggcacacacattatttgtggaaatctttcaattttacataagtagacatctgtaggtc

SEQ ID NO: 385848 - DNA, 201 bp, Homo sapiens
tcacaaggtctgtgtagttcttgatcctagtaaaatgcccagcagttcttaaatccagcttattattcaagtattttaaagcagtggaacattttatcaaattaagtcatattacatcaaataaaacattgataaaagcagcattttatcaactcagatttataagttcacattgataagatttatttccataaagccttt

SEQ ID NO: 385849 - DNA, 201 bp, Homo sapiens
cagaatatgtcatagacttaccttgcaagaaatgttaaaagttcttttagagagaaggaaatgatagaggtcaaaaactctggtgtatataaagcaagtgwgagcattgaagagggaatgagtgaaggtaaaataagttttatttttcttaattgatctaataggtaacagtttaaaataataacattgtattcaattaca

SEQ ID NO: 385850 - DNA, 201 bp, Homo sapiens
tttttagagcaggaaaagaggtcttttgagattatatttttctttctgacaatgctatttttttttttaagcacaagaatgtttgccaagtgcaatcttasaggaatgacccatgtataaaacagctaaaaatggtggtgctttgatgtgtgctggtaattaggaactcaaactgtggagtcagactacctggacttagaa

SEQ ID NO: 385851 - DNA, 201 bp, Homo sapiens
aggaggtgaggctaccttctaagagtagggggcagaatgtgttggcagtttaagaaacatcaggaggcaggcacagtggctcatgcctgtaatccaagcaytctgggaggccaaggtgcgaggatcgtttgagcccaggagttcaagaccagcccaggcaacacagcaagaccctgcctctacaaaaaataaataattggc

SEQ ID NO: 385852 - DNA, 201 bp, Homo sapiens
agctccagtttcctcatctgtgaagtcagagtaatactagtacctccatcatagactttgtaggaattttaaataggatactatgtataaaactgcttagyacagtgctccatcaatgttagtttggttaatctggttaaagcaaagttgggtaggggggcattctagcagctgtacatgcctagtccctaccttatccca

SEQ ID NO: 385853 - DNA, 201 bp, Homo sapiens
ggcaggaggatcacttgagtccaggagttggagagtggcctgggcaacacagtgagaaccccatctctccaaaaaatgaaagaattatctgagcatggtgrtacacccctgtggtcccagctactcaggaggctgaggtgggaggatcacttgagcccaggagatcaaggcttctgtgagctgattgtaccactgcactcc

SEQ ID NO: 385854 - DNA, 201 bp, Homo sapiens
gagctgagactgcgccattgcactccagcctgggcaacaagagcaaaactctgtcttggaaaagaaaaaaaaagtgtgtggttgatctaataaaaaaagayagatgatagagaaaatcctctcaaccctttcatggggagtgtggtaaggatatattcggtaaaattttaaaaagttatatattctaaaccaaattagtgt

SEQ ID NO: 385855 - DNA, 201 bp, Homo sapiens
caaagctcatagtcatcggtacaagtgttttagaattttgattttcacttaaaagttcaaattttgtccttgataagaaatactatcagttgttatctcaraattgatgaggtcactttattcacagtaagatatctgcgaaaaatgcaaatgcctgtcagattttctttgaagtaaaaattgtgtttcatgaaaaaagta

SEQ ID NO: 385856 - DNA, 201 bp, Homo sapiens
cttcccttattggtgtcagctctgtgctggatactggagtctagggttatagtggtaagaaatatcagacattgctcctgtactcagtatcaaagggggamgagaagacaatcaggtgaatatgatcaggtgtgataagtgctgtaatgaaggcaattacaaggtaccatgttggtgctagcaaagctaactagtccgaga

SEQ ID NO: 385857 - DNA, 201 bp, Homo sapiens
tctgggacttaaaataagtaagaccagaaggtacaagcaagttccacgagctggcagcctagacccccatgaacaccactactacctcaacacacctcccstggtgcacccttctggttgtaggtaggatcctttatgaccagctgacaagaggaggaaaaatcctatacttggtcaatggagggtctgctcagtatgtga

SEQ ID NO: 385858 - DNA, 201 bp, Homo sapiens
cacttgaaccatgaggtggaggttgcagtgagctaagattgtgccactgtactccggcctgggtgacagagacactgtctgaaaaaaaaaaaaaaaaaaaaagacatctgaacaaaggtttgaaggaggtgaggaagcgacccatgaggagatctgagggagagtgttccagaccagagcaactagtaaagtgcacagagc

SEQ ID NO: 385859 - DNA, 201 bp, Homo sapiens
aaaaaaaatgttcacttcccttattggtgtcagctctgtgctggatactggagtctagggttatagtggtaagaaatatcagacattgctcctgtactcartatcaaagggggacgagaagacaatcaggtgaatatgatcaggtgtgataagtgctgtaatgaaggcaattacaaggtaccatgttggtgctagcaaagc

SEQ ID NO: 385860 - DNA, 201 bp, Homo sapiens
ggctgaggcaggagaattccttgaacctagaaggcggaggttgcagtaagctgagactgtgccactgtactccagcctgggtaacagagtgagatgccgtytggaaaaaaaaaaaaaaaaaaaaaaaggatacgtgtaatggcatttagggcccatgtagataatccaggataaactccctctcaagatccttagctttat

SEQ ID NO: 385861 - DNA, 201 bp, Homo sapiens
aggctgacctgcttttaaccagcagattgtagattaggttaactggtgacagtggtacattttcagtgtttcattagtgacaaaccacatttctctcttckgttgtgagaaggactgataggaaacatattttccttctcatgctgtgggaaaggagtatttggagactgaccagtcacaagtcaagtaacaataatttat

SEQ ID NO: 385862 - DNA, 201 bp, Homo sapiens
ggggccatactccctctgggggctctaggagataatctgttattttcctcttccagcttctggtggctactctgatatccctgggcttgtggccacatcaytacaacctctgcctctgtcttcatatcatcttctctgtgggactgcattcagtctccttctgtgtccctcttataaggatacatggcaggcgtggtggct

SEQ ID NO: 385863 - DNA, 201 bp, Homo sapiens
gtacaagagcaaagataataattagatctgatctcttttcagaaaccatgcaagcagaagagagtgtagtaaaatgtttaaagtgctgagagaaaacactyaccaatgtaggattttataccctgtgaaattatcctttaaaaatggaagagaaataaagactttctcagacaaaaattggcagaatatgtcatagactta

SEQ ID NO: 385864 - DNA, 201 bp, Homo sapiens
attccagtaataattcctgaacagttaaagaaggtggttcaggaggaggattacttactgaagctagctttaaatactgacaaatctggtttttaaaccarattaagtaggtgcttcagaatgggcatggtggctcatgtctgtaatcccagcactttggggtgccaaggcaggaggatcagctgaggccaggaattcgag

SEQ ID NO: 385865 - DNA, 201 bp, Homo sapiens
caggcacagtggctcatgcctgtaatccaagcactctgggaggccaaggtgcgaggatcgtttgagcccaggagttcaagaccagcccaggcaacacagcragaccctgcctctacaaaaaataaataattggctggacatggtggcgtgtacctgtggtcccagcgacttgggaggctgagatgggaggaacgcttgagc

SEQ ID NO: 385866 - DNA, 201 bp, Homo sapiens
agggttcaagtgattcttgtgccttagcctcctgagtagctgggactatggcgtgtgccaccatgcccagctaattttcgtatttttaggagaaatggggwttcactctactgaccaggctggtctcgaactcctgacttcaggtgatccatcggcctcggcctcccaaattgctgggattacaggcgtgagccactgcga

SEQ ID NO: 385867 - DNA, 201 bp, Homo sapiens
ccagggttcaagtgattcttgtgccttagcctcctgagtagctgggactatggcgtgtgccaccatgcccagctaattttcgtatttttaggagaaatggrgtttcactctactgaccaggctggtctcgaactcctgacttcaggtgatccatcggcctcggcctcccaaattgctgggattacaggcgtgagccactgc

SEQ ID NO: 385868 - DNA, 201 bp, Homo sapiens
acaattaatgaatttacattgacatcagcatttcccagagtccatagtttacattaggattcactctttgtgttgtaccttctatgggtttggacaaatgkataatgacaggtatctaccattattatatcatacagaatagtttcactgcccccgcccccactccccctggaaaaaacaaaacaacaacaacaaaaaacc

SEQ ID NO: 385869 - DNA, 201 bp, Homo sapiens
ttgtttttaagtagagtttggcctgtgtggtagtacacatctgtagtcctagctactcaggaggctgaggcaggaggatcccttgggcccaggaattggasgccagcctgggcaacatagaaagacactgtctctaaaaataaaattttttgaaaatagactttatgttttagagcagttttaggttcacagcaaaatcca

SEQ ID NO: 385870 - DNA, 201 bp, Homo sapiens
cccaatgacatgcaagttggacagacgggaaaaatagtagcaccagtaagtattgcaataaaatatgctgtgtaaaatgttatggggataagtactgtatrtatttgttgaacagtgatctcagtgatttaccttactcagtgttcctgagcagttagccagtaccatggtgaatatgtcattttcacaaggtctgtgtag

SEQ ID NO: 385871 - DNA, 201 bp, Homo sapiens
tgagatggagacttgctttgtcacccaggctggagtgcaagggtgcaatcttggctcactgcaacctccgcctcctgggttcaagcaattctcctgccgcrgccttcggaagagctgggattacagactcctgccaccacgcccagctaatttttgtatttttagtagagacaacagggtttcaccatgttggccaggctg

SEQ ID NO: 385872 - DNA, 201 bp, Homo sapiens
tgatgggctagtaaaacatactttttttagttttcctttcttttctttaatctcctccggtagctgtttctcacactcagaatctgaagttagttttttayactcgtcctcctcttcctcatctgaatctgcctcatcatcgtttgaaatggctcaggagctacctttattagtgcccacactgaccaaatggaaactgga

SEQ ID NO: 385873 - DNA, 201 bp, Homo sapiens
ggctagatgtgggtaagagagaattttattacattccaacctggaaatttctaataaatttacagtgttgacacagatgcctcaaatcttatttggtagayattttaagaatattaatatattgtaagggaagttaaaatagaactatcagtctgtgtgaaatgttttcttggtaaaagtcaaactctttgtttttatttc

SEQ ID NO: 385874 - DNA, 201 bp, Homo sapiens
ggatgaaagacagcaaggtaattgtacatcagtgatgttaaaagaaaacgtttccacattttaggatttggcttaccttgtatgtttccatgtagttacartgcatgtagtcaagccattcacactaacgtagatctgggaactgaaagaaataaaagctaccgttcactgccttaaaaattattggtcacagaggcagtg

SEQ ID NO: 385875 - DNA, 201 bp, Homo sapiens
tggcaaccactaatctactttctgtttctatacattggccagtcctggatgtttcatataaattgaattatgtaatatgtgatctttgtgattggcttctytcagttagcataaggttttcaaagttcatccatgttatagcctgtgttagtactttgtttctttttcttgccaaataatatccattgtaggggtatgtaa

SEQ ID NO: 385876 - DNA, 201 bp, Homo sapiens
ctttatggtagaatggttcatattcctttgggtatattcccaattatggtattgctgggtcgaatgttctaagttctttgagaaatcgccacattgctttscgcagtggctgaactaatttacatcctcaccagcagtatataagcgttccttttctctgcaaccttgccagcatctgttgttttttgagttttaaataat

SEQ ID NO: 385877 - DNA, 201 bp, Homo sapiens
ttcaagcgattctcccacctcagcttcccgagaagctgggatcacaggtgcgcatcatcacgcctggctaattttttttttttttttttttttttttttgkagagacggggtttccccatgttacccaggctggtctcgaactcttgtcctcaagtgatccacctgcctcggcctcccaaagtcctggaattacaggcctg

SEQ ID NO: 385878 - DNA, 201 bp, Homo sapiens
gaatagtgctgccatgaacatgcacatgcatgtatctttatggtagaatggttcatattcctttgggtatattcccaattatggtattgctgggtcgaatrttctaagttctttgagaaatcgccacattgctttccgcagtggctgaactaatttacatcctcaccagcagtatataagcgttccttttctctgcaacct

SEQ ID NO: 385879 - DNA, 201 bp, Homo sapiens
catttaggtgaaatgagaaacaagattggtaaacttgggtcagaaacttacctgatggtttgtaccttttctcctttttttttttttttttttttttctgkgcatggatattttcccatccactcctgggatttttctctctgaggcatagctggagctctttctagatgtctgtagacattagacttttgtttgtttgtt

SEQ ID NO: 385880 - DNA, 201 bp, Homo sapiens
attaggtctcacttgtaagtttttatttttgttgcaatttcttttggagtgttcgtcatgaaatctttgccagggtctatgttcaaaatgccatttcctaygttttcttcttgggtttttatagttcgaggtcttacatttaaatcattttttgtttgtttgttttttgagatggagacttgctttgtcacccaggctgga

SEQ ID NO: 385881 - DNA, 201 bp, Homo sapiens
gattttctttctttctttctttcttttttttttttgagacagagtctcactgttgcccaggctggagtgcagtggcgccatctcgactcactgcagcctcygctgcctgggttcacgccattcatctgcctcagcctcccaagtagctgggactacaggtgcccgccaccacgcccggctaatttttgtatttttagtaga

SEQ ID NO: 385882 - DNA, 201 bp, Homo sapiens
cccagctacttaggaggctgaggcaggagaattgcttgaacccaggaggcggaggttggagtgagctgagatcgcgccactgcactgcagtctgggcgacwgagcgagactctgtctcaaaaaaaaaaaaaaaaagaagcaaaaaaaccctcccctgccctctataccctcattacacctagtttccaaagatggttgggg

SEQ ID NO: 385883 - DNA, 201 bp, Homo sapiens
gcctgtaatcccagctacttaggaggctgaggcaggagaattgcttgaacccaggaggcggaggttggagtgagctgagatcgcgccactgcactgcagtytgggcgactgagcgagactctgtctcaaaaaaaaaaaaaaaaagaagcaaaaaaaccctcccctgccctctataccctcattacacctagtttccaaaga

SEQ ID NO: 385884 - DNA, 201 bp, Homo sapiens
agagctagagaacacaccaagaggcaaataggtaggcatttgcagttagttaatattcttgcagggatattaatcctaattattgttatttattaatttgytcttgaaattgatttattgaagaataagaagatgcagaaaaatatttatgtggtgagtgaaacaacaatttcaaggtcatttgagtactctttttactgt

SEQ ID NO: 385885 - DNA, 201 bp, Homo sapiens
gtctttcatccttatgtgtgtggcaatggtctttaaagtcatctgttaacaaagatagtttttatatctataataaagagctagagaacacaccaagaggmaaataggtaggcatttgcagttagttaatattcttgcagggatattaatcctaattattgttatttattaatttgctcttgaaattgatttattgaagaa

SEQ ID NO: 385886 - DNA, 201 bp, Homo sapiens
agccaggcgccatggttcacacctgtagtcccagctacttgggaggctgaggcacgagacttgcttgaacctgggcatttgaggctgcattgagcccaggwagcaccactgccctccggcctgggcaacagagtgagacgctgtttcaaaaaaaaaaaaaaaggttaagatggtaaattttatgtattcttttaaaccact

SEQ ID NO: 385887 - DNA, 201 bp, Homo sapiens
ccaaagtgttgtttgccaggtttctccactgtcaagttaatactcctccttttgtaatttttaactaatttgtgaggcgattcattgagactatgtgactstcctatttctcatcagacttttacccagtcttagcatctgttgatgatttttgcctgagaaatgattactatgatgcaaaatggtgattttctatttcca

SEQ ID NO: 385888 - DNA, 201 bp, Homo sapiens
aactacactgtaattggcaatatctggaagtttcaccataaaatactgttttctaatctatggatgttcaattttgccagttgtcccattagtacagtttrtagcaattttccttattctggtctaagatactctagatgtcctgcaagtggttttcatgtctctttactctgttagaaaggttcctcagccttcctttgg

SEQ ID NO: 385889 - DNA, 201 bp, Homo sapiens
tttcatgatattaattagtgaattacaggtgatgagcacctgatactcatttggctacatttaaaggtcatgactcatgcgtggcctggtctcttcttttycctgggtctgcctacacgtttctaggttatcttatgcagaaatcacttatgcaggaattgacactctgaaaatagcatccaaccctaggagaagtgggtt

SEQ ID NO: 385890 - DNA, 201 bp, Homo sapiens
taaaagaacaaagaggttcactttctaactacactgtaattggcaatatctggaagtttcaccataaaatactgttttctaatctatggatgttcaatttkgccagttgtcccattagtacagtttatagcaattttccttattctggtctaagatactctagatgtcctgcaagtggttttcatgtctctttactctgtt

SEQ ID NO: 385891 - DNA, 201 bp, Homo sapiens
ccattttcctttattggattacagatttttgtgaccttgccgtaacctgtaattgttagactgtgagcttcttgaggacagggcacagagaattagtcatstttatattacctgtaaggtacagtaagaatatcaacaacagtaaaatcagttacccagtgctgctcaactctttcctattatggtacacttagacagtta

SEQ ID NO: 385892 - DNA, 201 bp, Homo sapiens
aacagaatgagaccctgtttccaaaaaaaaaaaaaaagaagaagaagaagaagaattaactgagacttggggaactgtgactttcccaaggattcctgctrctgaggacaaagttagcacatgcatctatttcagtacaagcacaagaacacacctttattttatttttgttgctttttaaatatgtactacacaggctgt

SEQ ID NO: 385893 - DNA, 201 bp, Homo sapiens
taaaatcagttacccagtgctgctcaactctttcctattatggtacacttagacagttagaatatttgtaccacaggggattctggccacccagtacttcragtccacacaactcttttgtacaaattataaagtactggtgtctcaagttactttactgccatctgttggaaagttattgtaataaaaatgcagggctat

SEQ ID NO: 385894 - DNA, 201 bp, Homo sapiens
ataaaaatgcagggctatagtgactgttaagagtggtgccctccttcagagttattcagtgtgcagcctgctcagctgtacatggtagtcctgaggctacytcaggagcccacctggccacctagtgggctgagaaaatcaatatttgaataaacctcaacccgtgagtgacacatcaatgtgtcttgggaaatctgatac

SEQ ID NO: 385895 - DNA, 201 bp, Homo sapiens
ataaggagacagaacagtgtcagtcatcattccctttgtaattattgagggcagaggggcaggaagaggtacaaatatcatcaacatttaccaaaaaactrtggtatggaggcctttttgttaggctctggaaacacaaaggttcagcccatacctttgagaagtttgttattttttattcagagagaatgtgtgtgtgtg

SEQ ID NO: 385896 - DNA, 201 bp, Homo sapiens
gttttcatttcttttggatggatgtctaggaatggaattgctgggtcacctggtaactctgagtttaacattttgaataaccgtcaggttgttttcaaagyggctgcccccttttacattcccaccaaaaatttgtgagggctccagtttttctatatactcattaatgtatgttattgtctgtctttttaaatatagccc

SEQ ID NO: 385897 - DNA, 201 bp, Homo sapiens
cttaaagctgtttaacgtcccttactaacaggctgacaagatactttagctttcatattgttagaatatcccagaataattgttttattttattctattgkattttattttatttatttatttatttttgagacggagtctcgctctgtcgcccaggctggaatgcagtggcgcgatctcggctcactgcaacctccgcct

SEQ ID NO: 385898 - DNA, 201 bp, Homo sapiens
actttagctttcatattgttagaatatcccagaataattgttttattttattctattgtattttattttatttatttatttatttttgagacggagtctcrctctgtcgcccaggctggaatgcagtggcgcgatctcggctcactgcaacctccgcctcctgggttcacgccattctcctgcctcagcctcccgagtagc

SEQ ID NO: 385899 - DNA, 201 bp, Homo sapiens
gaatgtgagcagattccaaggtgactggacagtagcaagtggatctgaacaaagagcagcagccactgacccaccacagcttttgtttttgtcttgggacrtatcagggattttgttgaatatttaaaatactttctgctagttggtaattgttccttgtttgttagaattagatatgtcagtatattaagaatgtcccat

SEQ ID NO: 385900 - DNA, 201 bp, Homo sapiens
gacaccattgattttggcaactcagaagcagttcaattacacacacatctgtgctggagcatctgccttcggaaaggtgagaaggttgagaatgtggaatytgatatcactgcttgaaagggttagatttcattgtgctgaaagtatgcaacagactgtttatgtagccaatctggatttatctgaattgatgtggtagtt

SEQ ID NO: 385901 - DNA, 201 bp, Homo sapiens; identical to SEQ ID NO: 84960

SEQ ID NO: 385902 - DNA, 201 bp, Homo sapiens; identical to SEQ ID NO: 84962

SEQ ID NO: 385903 - DNA, 201 bp, Homo sapiens
gcaaggctggcagagggcagggctcttcctcccaggatagcagtgggagccctgctgcctccagagcctgagcatgtctgctgggctggagggctggaaascccagccctaggtgcactttctgctctctttctgaaagggagggtcagcctgattgcatttcacgctgtctttcactaagggtttttgtttgagtttaca

SEQ ID NO: 385904 - DNA, 201 bp, Homo sapiens
acccattactttaaataccattactgcagccacacgccttggaggtgaagtgtcctgcttagtagctggaaccaaatgtgacaaggtgagaaatttttaakgtcagccatagcaaatattatctccatcaagagacaggaaaagatggcaacagagaattatgcttaggattgtaacccaaactgggctctaatcctcatt

SEQ ID NO: 385905 - DNA, 201 bp, Homo sapiens
gcctgagctaccgcacctggccttagacatcttttttcttgtgcgtattccttgtttaataaaaagttctgaccctcccctcccctaaagagttcaaaccyatgtctttcaggttagtgtcctgtcttcccctcaggacatgttttctcccggttggggatctagacataaacaagtgaaagtcatgaatttggggaaatt

SEQ ID NO: 385906 - DNA, 201 bp, Homo sapiens
  misc_feature (1)...(201): n = A,T,C or G
aaaagatggcaacagagaattatgcttaggattgtaacccaaactgggctctaatcctcattaaatggtcagtgtcacaaccattaccatgtgtgaaaaangaactaaaaggtttcttccctaagcattttatcttttgaaatgcagtagaatacttgatttagttccactggcaccatcatgtgccatcaggtaccaagt

SEQ ID NO: 385907 - DNA, 201 bp, Homo sapiens
caagcgattctcccacctcagcttcccgagaagctgggatcacaggtgcgcatcatcacgcctggctaattttttttttttttttttttttttttttgtaragacggggtttccccatgttacccaggctggtctcgaactcttgtcctcaagtgatccacctgcctcggcctcccaaagtcctggaattacaggcctgag

SEQ ID NO: 385908 - DNA, 201 bp, Homo sapiens
ttaagcaatacattttgcctctattttatttaacatatcttttgcctaagacttaaattgctaacagcaaacactttggaaagtattatataatataaatrcatattaataatgtgacctcttttatttcaggaactttatattgctgttggaatatctggagccatccaacatttagctgggatgaaagacagcaaggta

SEQ ID NO: 385909 - DNA, 201 bp, Homo sapiens
gtggagcttgcagtgagccgagattgcaccactgcattccagcctgggtgacagagcgagacaccttctcaaaaaaaaaaaaaaaaaaaaaaaaaagggggtttgattatggtatacctaggggtgtgtctttttgtatttaacctgcttcagatagcaagcttcttaaatctataaatgtatgccttttaccacatttgg

SEQ ID NO: 385910 - DNA, 201 bp, Homo sapiens
tggatacattgaaggtagaatcacagagcatgcaattgctttttatcctcatccatactttctgcagcattcctccccaccctaagacacagtcttattaygccaaattgttcttgtcttcaggcttttggtaactatagaacaagttgattcaaaaaacaagctcatctcatttttagatgattaactcactttggggac

SEQ ID NO: 385911 - DNA, 201 bp, Homo sapiens
aattctcactcttctagattctaaagccacgaggcctatctctaggactctccctccttctttctgtttctgttggttcctttaatccccaccgtgccccrccacgccttgtataacccttaattgctgtactccctggcaacatctctcactttctctccaaatggtcttactatctgatttagaaggaaagtgcctcag

SEQ ID NO: 385912 - DNA, 201 bp, Homo sapiens
ttctaaattctcactcttctagattctaaagccacgaggcctatctctaggactctccctccttctttctgtttctgttggttcctttaatccccaccgtsccccgccacgccttgtataacccttaattgctgtactccctggcaacatctctcactttctctccaaatggtcttactatctgatttagaaggaaagtgc

SEQ ID NO: 385913 - DNA, 201 bp, Homo sapiens
gattgaataatgtagtagtttcttttacctcctcattttcaactttcttgagttgagatctgagcttactaattttccatcatccttgttttctaatatgygtttgaggttataaatccttctaagtatcggccaggcatggtggctcatgcctgtaatcccagcactttgggaggccgaggtgggtggatcacctgaggt

SEQ ID NO: 385914 - DNA, 201 bp, Homo sapiens
tattcaattacatatgctcatgtattacaattacttatgtgctcatgtataagtgaaatgaatcacaatgtaagaaacaggagataggaattaggattatyttgctattaagtggtacttgcaccacctgtgaagtagtaaagtgttatttgaaagtggacttggattagctgtaaatgaatattgcaaactctaggacca

SEQ ID NO: 385915 - DNA, 201 bp, Homo sapiens
caggaggctgaggcggcaggatcacttgaaccatgaggtggaggttgcagtgagctaagattgtgccactgtactccggcctgggtgacagagacactgtytgaaaaaaaaaaaaaaaaaaaaagacatctgaacaaaggtttgaaggaggtgaggaagcgacccatgaggagatctgagggagagtgttccagaccagag

SEQ ID NO: 385916 - DNA, 201 bp, Homo sapiens
tagtattgcaaaaaagcaatccttaaaccttcaatttgcactgtacaggtgggtccactagatgctgtggctcatgatagatcttcagatgtttggtgggyacccacacagacacctggttgtcacctggagagacacaagcaaatcgtcttccccatataattatctttcctttttcccagctttttgtatgtgcatccc

SEQ ID NO: 385917 - DNA, 201 bp, Homo sapiens
tgattatttttgaattacacaatcactacaatgaatatatattaaaatgtcccaattctgtcatctcaccctccttttaagactttaacatataactttcsagggttttcctgtaactttctgtggttttcctgtgcgaaatttctattacataacacgtgtacccatagaaacagtaatagttttgtcagaataaaggca

SEQ ID NO: 385918 - DNA, 201 bp, Homo sapiens
cgcctcggcctcccaaagtgctgggattacaggtgtgagccaccgctcctggccgaggattttctttagataaaaacatcacttcattttttagttttgtstaaaatcatttatcattgctgtattttttcccccaattttttttttttttttttgaaatagagtcttactctcacccaggctggagtgcagtggtgtgat

SEQ ID NO: 385919 - DNA, 201 bp, Homo sapiens
agggttaggaatatgggagattggtgcaggttagggagcatgcagagcattatggggatcagtgtatgggttatgaaggataacctttgagtttggggctyatggggacagacataatgaagggcagggtgtgattagtcctggctgactcaagatagtggtggtgaggctgtgcgtttttggaggttgttagttgtattg

SEQ ID NO: 385920 - DNA, 201 bp, Homo sapiens
aggattcatgtaaaaatattcttcagtgattccttgatatcaatactggacaatagaagtaaagcaggaaacacagtcatgtctacagacttgtcaggcaraagtataattttgcagatgaaatattatcttcatattcatgtttacagctaaatattttattcagcaagttacgtaccactggaatgtgacagtgccatg

SEQ ID NO: 385921 - DNA, 201 bp, Homo sapiens
acccaaaagtagcaacctccacaggagctggtggtggggtagggggacttgaagtcttgttgatgaattgttggaggttccgtgttaaaaactccaggtgrgcagggcacggtggctcatgcctgtaatcccagcactttgggaggccgaggtgggcagatcatttgaggccaggagtttgagaccagcctggccaacttg

SEQ ID NO: 385922 - DNA, 201 bp, Homo sapiens
cagcactttgggaggccgaggtgggcagatcaccaggtcaggagatcgagaccatcctggataacacggtgaaaccccgtctctactgaaaatacaaaaarttagccgggcatggtggcaggcgcctgtagtcccagctactcaggaggctgaggcaggagaatggcatgaacccaggaggtggagcttgcagtgagccga

SEQ ID NO: 385923 - DNA, 201 bp, Homo sapiens; identical to SEQ ID NO: 84959

SEQ ID NO: 385924 - DNA, 201 bp, Homo sapiens
ctggggcacaagaatcacttgagcctgggaggcagaggttacagtgagccaagatggtgccagtggactccagcctaggcaacagagcaagactctgtctmaaaaaaaaaaaaaaaaaaaaagttctgaagtacagttatatatgtatttgattaatacaaaagtagagaagttaatcactccttaaaaaatgcagtttgg

SEQ ID NO: 385925 - DNA, 201 bp, Homo sapiens
tggggcacaagaatcacttgagcctgggaggcagaggttacagtgagccaagatggtgccagtggactccagcctaggcaacagagcaagactctgtctcwaaaaaaaaaaaaaaaaaaaagttctgaagtacagttatatatgtatttgattaatacaaaagtagagaagttaatcactccttaaaaaatgcagtttggg

SEQ ID NO: 385926 - DNA, 201 bp, Homo sapiens
cttaaataattgagaggctgtattcatcagtggtgagttcagctggaatctttgtgagctaaggcagccgaaagccccttggaagactgggtaattgataytttgcacaagtggctggaccagttttcagagtatctgtgtgacattccctgcagcccccttggacagctctcctctgtccaagcagtcacaaagcagctc

SEQ ID NO: 385927 - DNA, 201 bp, Homo sapiens
tgaggtaggagggtcacgtgggcccaggagattgagacttcagtgagccatgattacaccactgcacttcagcctgggcagcagagtaagaccctgtctcaaaaaaaaaaaaaattcagtttgggggaaaaaaactaaagattataaaaatattaaacatatggcagactcctctttgttaccatgtgagtaacacaagcc

SEQ ID NO: 385928 - DNA, 201 bp, Homo sapiens
ctgggcagcagagtaagaccctgtctcaaaaaaaaaaaaaattcagtttgggggaaaaaaactaaagattataaaaatattaaacatatggcagactcctstttgttaccatgtgagtaacacaagccaggtgcattctttttaagttgcctgtcccagagagatgtgatttgggacaatccacaggttatgggcacaact

SEQ ID NO: 385929 - DNA, 201 bp, Homo sapiens
  misc_feature (1)...(201): n = A,T,C or G
tctctaaaaataaaagattctgcctgtcaagaagataccagtgaaaattctcaccccatgccaacagggctggattgtgggagagacactaggtagtgtangtcagagcaaatagggaacagttgaagtaaggagactggtgttgggggtcagccaagactttgtatctccatctagtcaacagatgtttattaagaccat

SEQ ID NO: 385930 - DNA, 201 bp, Homo sapiens
ccagttcagacatagctagaattctgcttctctaaaaataaaagattctgcctgtcaagaagataccagtgaaaattctcaccccatgccaacagggctgrattgtgggagagacactaggtagtgtacgtcagagcaaatagggaacagttgaagtaaggagactggtgttgggggtcagccaagactttgtatctccat

SEQ ID NO: 385931 - DNA, 201 bp, Homo sapiens
tatcaaatgtgtttaattctcagaggaactgacaccattgattttggcaactcagaagcagttcaattacacacacatctgtgctggagcatctgccttcrgaaaggtgagaaggttgagaatgtggaatctgatatcactgcttgaaagggttagatttcattgtgctgaaagtatgcaacagactgtttatgtagccaa

SEQ ID NO: 385932 - DNA, 201 bp, Homo sapiens
tgaagtaaattccaagcatcaaaggagtgctagttttgttgccttttgctgttgcttttaagaaatagattgtatgtttcaggaaatgctctatgtacagkgaagtgtgatgagaaagtgaaagtgttttctgtccgtggaacatcctttgatgctgcagcaacaagtggcggtagtgccagttcagaaaagggtgagtgt

SEQ ID NO: 385933 - DNA, 201 bp, Homo sapiens
atttgggtctgttttctctaccattgaagcctcttgaatcttttaaagcttgatttcgttttctactttcctttcaactttatattgtttgaaaatcctcycattttttgccactttgaatagctatggaaagcatcatcagcactgctctttctgatgatcaatagtaataagttccctacttcataaagtaaggggaca

SEQ ID NO: 385934 - DNA, 201 bp, Homo sapiens
catgtcatctgtgtgactggcatgagctcatggtctctccactgaggaaagctgggagaagtggtgccagcacttaatgccacccctgagcaaatgcctgytggctccatggtaaacatgggccttttaataggctggagacagtgacattcggaagaaacaacatgtcgacaatttccttaataaattttgtacgaacac

SEQ ID NO: 385935 - DNA, 201 bp, Homo sapiens
ctttggtatgaagtggaagtgctttctacattcttcacagtttgtcacacagaatattaaatatacatgtaatccaaggtcaagatttaataaggttaatmtttttttttttttttttttttccttgagacggagtctcactcttattgcccaggctggagtgcagtggcaccatcttggctcactgcaacctccacctcc

SEQ ID NO: 385936 - DNA, 201 bp, Homo sapiens
acacatttgtgagaactatttatgcaggtgagtactcaaggaagataattaatcaacatgttaaattttagtgaaaagcataaattaatcttgaagatagrattttaaatcaaaccatacaattgctttaagtggaccatcttaaaggtttctgaggaaaattttagtctagaattgctggtggcccttgacatggcattc

SEQ ID NO: 385937 - DNA, 201 bp, Homo sapiens
atatgtatccttgcacaaagattgtgttagaaatctgtaaagaaatcatcccaacttcctaggcaagcactggctaggaagctgggcagaaattctaactktatggtcagtactaaatgcaaagaagaaactaacagctgtcaaagaaaatttttcccagtacactcccctggaagaattgtatcaagttagtaacaactt

SEQ ID NO: 385938 - DNA, 201 bp, Homo sapiens
tttggtgaatatattccttactggggcgatctcgtttttaaaaaatcaaatatttaaaatattttaaaaatcaaatatttaatacttttgattaaaaaataaaaaatacaatatttgtataattatatttcttaatgttatatattttatatttttaatattttatttttattttttgtattttatgtattgtaattatat

SEQ ID NO: 385939 - DNA, 201 bp, Homo sapiens
ctaagagagtaaattttaagtgttctcaccacaaaaagtaattgtgatgtgatagatatgttaattagcctgattgtggtaattatttcataatgtttacytatatcaaaacatcacattgtatactttaaatatatataatttttatgtgtcaaatatacctcagtaaagctggggagggagaacctgccttttactagg

SEQ ID NO: 385940 - DNA, 201 bp, Homo sapiens
ctttgccattttccataagaatagttccaagattttattttttccttatgcctatggtgccattcctcatcttttcacatgatagaacacctgaacttccytccttccccacttgactgtacttcatgatctgtagccttcaacattttggatctcttcattatttgaaaaactgttctattttataattgtatatgaaca

SEQ ID NO: 385941 - DNA, 201 bp, Homo sapiens
gtggtgtctcattgtgactttgatttgcgttttcctaataactagtgatgttaagcacataagcatatgaaaagatgttcattggccactcgtatatctcytttagggaagtgtttatccacctcttttgcccattttcagttgggctgtttctctttttgttgacttgtgtgaattctttacatattctggatactaaac

SEQ ID NO: 385942 - DNA, 201 bp, Homo sapiens
ctactaaaaatacaaaaaaaattagccgggtgtggtggtgagtgcctgtaatcacagctacttgggaggctgaggcaggagaattgcttgaacctgggagrcggagcttgcagtgagctgagactgcgccattgcactccagcctgggcaacaagagcaaaactctgtcttggaaaagaaaaaaaaagtgtgtggttgatc

SEQ ID NO: 385943 - DNA, 201 bp, Homo sapiens
tgggggagagttaatagaattgtagattacagtggggtcagaggaatgttggaggtgaatgtctgctggaaagaggaggtcagaaagacgctgaaaattgrgagtattaagcaatcttggtaaagaaaatgtctaggatatgatcatgggtgtggctgaggtagggtggtgggcaagctcactggaggagagttgttcaaa

SEQ ID NO: 385944 - DNA, 201 bp, Homo sapiens
cccatctctaccaaaaaaaaaattagccaggcgccatggttcacacctgtagtcccagctacttgggaggctgaggcacgagacttgcttgaacctgggcrtttgaggctgcattgagcccaggtagcaccactgccctccggcctgggcaacagagtgagacgctgtttcaaaaaaaaaaaaaaaggttaagatggtaaa

SEQ ID NO: 385945 - DNA, 201 bp, Homo sapiens
tatgttaaaatagggataggtgactttatatattatccttttgggtatgactcagaaagattttatagcttattcttgctgtttttctttttttaattaaraagcaaaaaaaccggctgggtgcagtggctcatgtctgtaatcccagcactttgggaggctgaggtgggtggatcacgaggtcaggagtttgagattagc

SEQ ID NO: 385946 - DNA, 201 bp, Homo sapiens
tctatcttttcttatctaaattcaataatccacaactgtcacacttggtaattgatgtttattaaatttcatatctcatagttcaatatattgcattaagrtggcttaatactgtaaaactcatgaaactcttaatgtagttagagtaatggtaagtactcaatctcaaaggctatttaaaaagctgtgcttgaagttgtg

SEQ ID NO: 385947 - DNA, 201 bp, Homo sapiens
gccgggcacggggctgctgtaaggccgaggttgcggcggaagcggagaccatgttccgagcggcggctccggggcagctccggcgggcggtgagtccggastgggaaggcgaacccagggacggccccccgtcaacccgccgtccctatggggtcttgcaaagatcactggccccctcagattcgaccagccctcgcgccc

SEQ ID NO: 385948 - DNA, 201 bp, Homo sapiens
tcataatttttatggcaaatgatgtgtgaaacataataaaaaatatgatgccggatatatattggtaataaatagcttgttactggcaattcttgtgaaawgtgatttaaataatttaaattattttttatttttaattattttattaattttatttaattatttatttattacaaagtcctttccaaaatatgatgctct

SEQ ID NO: 385949 - DNA, 201 bp, Homo sapiens
gattctggggatacaaaatataaacaggtatggtatttgctttctaagaactttcatttcattccaggaactgtcctgacttcccttcaattcataccctycttttaagtttccagctctgggtaaattccatgctatgctttcttcactccagctccagagcttaaggttattgctgaattaagccacgtaaccatgcca

SEQ ID NO: 385950 - DNA, 201 bp, Homo sapiens
acctcctacccaggccaggacttgtttgttcagtttttctgtgggaaaaggttttcaagtgaagctttaatcatacctggtaaacagaatgaagcaggtamgctcttctaattaagcacttattaaagtgcttaaagtttttcataatggaagtgtgtttttattttcaaacaaaggcactgtaaaaattttagataagga

SEQ ID NO: 385951 - DNA, 201 bp, Homo sapiens
aaactgctgtttagtgtcatattttaaaaacatatttccattatcaattattttggtattgaatgcattttgactgaaacaatagggatcaactttcgtgrctgatttcaaacccattatttgtgattatactgtactcctatactgtaggagtacagtatgtaaccaaatgtaattggtagtagaatttgaccagttcct

SEQ ID NO: 385952 - DNA, 201 bp, Homo sapiens
ttataaaacttttaacaggcttaacttcttctaatttgaaatgcatgcactacctctttgtagcttctaaatgaactggcccaaaaccagtcagattttayagttggatggtaggtttctttactgaactatgaaaacagcagtgccaatggggaaaatgtgattgctgcattaagaaaaaataaataaataaaagaaaga

SEQ ID NO: 385953 - DNA, 201 bp, Homo sapiens
agtgtgatgagaaagtgaaagtgttttctgtccgtggaacatcctttgatgctgcagcaacaagtggcggtagtgccagttcagaaaagggtgagtgttcwtttggagtttttttgttttgtttcttacttttttaattcatagactgtattataataagagatgacctctgcctacatttctaatgaatagtatttgaaa

SEQ ID NO: 385954 - DNA, 201 bp, Homo sapiens
tttctaggttatcttatgcagaaatcacttatgcaggaattgacactctgaaaatagcatccaaccctaggagaagtgggtttgctggggtgaggaacccytcatgtagaaccacagcgaggggctatgggccttagtggagaggcttcagcctgagaacagagctacaggtggttccctcagcaagaggactggcccatt

SEQ ID NO: 385955 - DNA, 201 bp, Homo sapiens
actcttttatattatgtcagacatgcaagccctgcctcagtttctctcccaacactcagctcttctcccaacatgccccccttttcttttttgtaaaaccrccacagctatcattgcttgttcttgacggcagctttctctccagcggtggcttccgcatctgcagactaaaaggagacagcacaagcacataattattag

SEQ ID NO: 385956 - DNA, 201 bp, Homo sapiens
ataggtatttgatgtttggctgccacttacaagagagaacattccatgtttggtttttctgttcctgcattaattcacttaggataatggcctccagcacygtccatgttgctctaaaggacatgatctcattctttttaatggctgtgtagtattccatggtgtatatataccacattttctttacccagtccatccctt

SEQ ID NO: 385957 - DNA, 201 bp, Homo sapiens
acccggccaaatttgaactttttgaggcttaatagcactttgttctaacttcattccttgatattgaaagggagtagaagtttggattttatcgggggctrtaattaaccctgccgcatttacagccttttctgtttgtagcacatcaattcttccctagtttcagctgcacacaaaatatcatccatgtaatggataata

SEQ ID NO: 385958 - DNA, 201 bp, Homo sapiens
gtgattgctgcattaagaaaaaataaataaataaaagaaagaaactccaacaccagcagccttaaagtatatttttagccagaccagttcagacatagctmgaattctgcttctctaaaaataaaagattctgcctgtcaagaagataccagtgaaaattctcaccccatgccaacagggctggattgtgggagagacact

SEQ ID NO: 385959 - DNA, 201 bp, Homo sapiens
gtatggaggctgcaaaggccccaagctctgggaggccatgctatttattgatgatcaaacaaagaaacaggtggtgaggatgtgggggttgaaaggaagcratgtatcaagcaaatgagctacagctgtgatggtgtagcattttctttgaaacgtatggctacttgagataatgggtgtgctagaagcaaggagccagca

SEQ ID NO: 385960 - DNA, 201 bp, Homo sapiens
attaattagcattacctattttggcttatgatctaaagaaaatagaagtcaaataatagcgtacagaaaggacttttttagcctaatttttgtgtgaaaaytttaaattgcaaattgtatcatgtataacatgtatatacagctgttagactaataattccctaggtgatattttgctcaccaagtagaaccgtatctgga

SEQ ID NO: 385961 - DNA, 201 bp, Homo sapiens
tttggacaactcagcaagcctgcctgagactctgctttctcttctataaaataggaatcatttctaccctatagagttgttgtcatagttaaatgaggtcrtgtgtataaagtacagcatagttactggcgtaacatagacagtacatatagctgtgatgactagtgtgttgtcttgaattctaataaaacaggagctaat

SEQ ID NO: 385962 - DNA, 201 bp, Homo sapiens
tggctcagggagggacatcccaggtggtgcctcggctcagagttgaactggttggtctttctccctttgctccctcctgtcatggctgccctgcctcagcyccaagcagctgttcactggactagtatttacagctcatcatcatcatagcattaagtataatgcttactatataccaggcactgttctagcactttatac

SEQ ID NO: 385963 - DNA, 201 bp, Homo sapiens
agagtgctactagctcagctctcgccctttctcattttcctgagacagtctgtactacacctgtgcggaatgactagcgccctgagcacattatcagaackactgtccagagaaaattgttgaattgcatagccccagatctctacaaatgtgtctatgggaactgaattctgatttttgtcgtctattagtatttcaact

SEQ ID NO: 385964 - DNA, 201 bp, Homo sapiens
tttttatgtgtcaaatatacctcagtaaagctggggagggagaacctgccttttactaggtgtgtataattttggacaactcagcaagcctgcctgagackctgctttctcttctataaaataggaatcatttctaccctatagagttgttgtcatagttaaatgaggtcgtgtgtataaagtacagcatagttactggcg

SEQ ID NO: 385965 - DNA, 201 bp, Homo sapiens
cccctaaagagttcaaacccatgtctttcaggttagtgtcctgtcttcccctcaggacatgttttctcccggttggggatctagacataaacaagtgaaartcatgaatttggggaaattccaggaacctgagccagaagaatgctgctctatgcagcagttggaaaacagttttgtggacagattacaagtctggcctaa

SEQ ID NO: 385966 - DNA, 201 bp, Homo sapiens
ggaaaaagtggagttgaagtggggtggtatatctagagtgctactagctcagctctcgccctttctcattttcctgagacagtctgtactacacctgtgcrgaatgactagcgccctgagcacattatcagaacgactgtccagagaaaattgttgaattgcatagccccagatctctacaaatgtgtctatgggaactga

SEQ ID NO: 385967 - DNA, 201 bp, Homo sapiens
gttacataaattaaaagaaagaaacatcatcaacaacaacaacaaaaataatttcggagccttgcctcttttgtgagtcagtctccttgaagggcttccarctggtgcatgtgtgtggtgggtgtgcattagaggctttctaattgacatgcaagtggttgatagagcaataaatctaaacagtgtagcttgtcattattc

SEQ ID NO: 385968 - DNA, 201 bp, Homo sapiens
gtttcacaatatagttaatgtccttgttttaaaaaaattcttttaactttgtagttgagcaactgggttattaaatttacattttgaacaaaaaatgtgasgtacataatgaagtgtgtgctagtgatatacatcccacctgctctggacatattagactagatgtgaagaagacatttgcttagttccctatatgtcctg

SEQ ID NO: 385969 - DNA, 201 bp, Homo sapiens
aaatagctgagatacagctgctgagtagactggatggtctctcttagattcataagcaccttaaatgtgcactcctacaaatccttgatagttgtttttttaaatttgaatagtgactcctgggtttaaaaagtacatattgtaacaaatattcagatagcgaaaattcttcaagtgaggaacattggatgtatagattaa

SEQ ID NO: 385970 - DNA, 201 bp, Homo sapiens
tttgtttttatttgcaggtagttcctgaaatgactgagatattgaagaaaaaatgaatcaggatcatgccttaaaaagaaaacttttgttaaagtattccmctgaaatcacagatatttgtgggtattataacaatcattggaaagcatggagagctacatttcataatttgagggaaaatttctaacagatgccagaatg

SEQ ID NO: 385971 - DNA, 201 bp, Homo sapiens
actgattaaagagttgcctgagttagatttggtggtgagaagtgggagaaggggctgttatcatggttgcggttcagtggtgagtcaaaatgtatggaaasattctagcaaaggagcttactattggatcctaagaagtgatggacagttttctccactcctgaggtccagaaatagatggctgtgaaccattgtctgcag

SEQ ID NO: 385972 - DNA, 201 bp, Homo sapiens
cagggtctcactctattagctaagctggagtggagtggtgccatcacatctcactgcagcttcaacctcctgggctcaagtgatcctcctgcttcagcctyccaagtagctgggatcacagatgtgtcccaccacacccagctaatttgttttttattttttgtagagatggggtcttgctgtgttgcctaggctggtctc

SEQ ID NO: 385973 - DNA, 201 bp, Homo sapiens
ttgtctttttttaaaaaaacttaagtgacttttattgggtcttactgagtagggagctgcctctgcaatatctaaaagagaacagaaacaagaatccagayctttcagtgtgctcaggccatcagacactcaatgaacctgagttagcatttcctttttcctaaataaggcatcatgtggtatgctttaaaggtgtgcagt

SEQ ID NO: 385974 - DNA, 201 bp, Homo sapiens
gtgttgcccaggctggagtggagtggtgcaatctcggctcactgcagcctctacctcctgggttcaaacaattctcccacctcagcctcctgagtagctgrgactacaggtgccctccaccatacctggctaatttttgtatattttttgtggagatggggtttcaccatgttggccaggctgattcttggaagttcttta

SEQ ID NO: 385975 - DNA, 201 bp, Homo sapiens
caacatggtgaaaccccatctctacaaaaaatacaaaaattagctgggtctggtgacgtgtgcctgtggtcccagctacttgggagactgaggtaggaggktcacgtgggcccaggagattgagacttcagtgagccatgattacaccactgcacttcagcctgggcagcagagtaagaccctgtctcaaaaaaaaaaaaa

SEQ ID NO: 385976 - DNA, 201 bp, Homo sapiens
attcctccccaccctaagacacagtcttattacgccaaattgttcttgtcttcaggcttttggtaactatagaacaagttgattcaaaaaacaagctcatstcatttttagatgattaactcactttggggactagattgtttccttttccaggttacatggtgctgctctaggagcagttggacactttatgcttgtaaa

SEQ ID NO: 385977 - DNA, 201 bp, Homo sapiens
agatacttgggaggctgaggtgggaggattgcttgagccagaaggtcgaggctatggtgagttgtgatcatgccacagcactccagcctgggcaacagagmaagaccctgtctcaagaaaaagaaaagaaattcatttcagtgtctcttcagttgattttttgcttagcacactggtctctagtggggtcggagaaggcag

SEQ ID NO: 385978 - DNA, 201 bp, Homo sapiens
agagtggcttgaccagaaattaacaaaaagtgatcgaccagagctaacaggtgccaaagtggtggtatctggtggtaagtgaaatattaatcttaaaagawgtaaattgaaaatactttgatttttttttttatttttagtatttattttagaagtacacagatctttttcaaatgtaagaagttgggaagtttgggatat

SEQ ID NO: 385979 - DNA, 201 bp, Homo sapiens
catacctatcaacagccactgcactccagcttgcataatgcagcaagaccccatctctttaaaaaaaaaaaaaaaaaaaagtactctgtgtgtgtgtgtgtatacacatacattttttctgaactagttgatagtaacatttatagccctttacccctaaagacctcagtatgtatttcctaagaatagaaatattctctt

SEQ ID NO: 385980 - DNA, 201 bp, Homo sapiens
tgacagagcaacaccctgtctcaaaaaaaaaaaaaaaaaaaaagagtagcgactttggctcataatgtttctctttttttatggctgcataagattccatrtttagctaaggacagttaacttggttccagttttttgcatttatatactttactgcaagaaaacatggtcatgcatgtatctgtgtaaacatgggctgga

SEQ ID NO: 385981 - DNA, 201 bp, Homo sapiens
tcatacctatcaacagccactgcactccagcttgcataatgcagcaagaccccatctctttaaaaaaaaaaaaaaaaaaaagtactctgtgtgtgtgtgtgtatacacatacattttttctgaactagttgatagtaacatttatagccctttacccctaaagacctcagtatgtatttcctaagaatagaaatattctct

SEQ ID NO: 385982 - DNA, 201 bp, Homo sapiens
atcatacctatcaacagccactgcactccagcttgcataatgcagcaagaccccatctctttaaaaaaaaaaaaaaaaaaaagtactctgtgtgtgtgtgtgtatacacatacattttttctgaactagttgatagtaacatttatagccctttacccctaaagacctcagtatgtatttcctaagaatagaaatattctc

SEQ ID NO: 385983 - DNA, 201 bp, Homo sapiens
gctacagtccatctgataacagagggctactaagtgactaatggtgggtagtgagtgtacattgcatggacgtgttgaacaaagggatgatttacatcccwgtctagacagagtgagacaatgttagatttcatcatgctactgagaatgacatgcaatttaaaacttatgagttgtttatttctggagtttcccatttaa

SEQ ID NO: 385984 - DNA, 201 bp, Homo sapiens
atctgcctgtcttggcctcccaaagtgctgggatcccagcctctctctctctctttctcactctctctctctcccgctctctctctctctctctctctctctctatatatatatatatatatatatttttttttttttttttttttttgagacagggtctcattctgtcacccaggctggagtgcagtggcataatcacag

SEQ ID NO: 385985 - DNA, 201 bp, Homo sapiens
tccaaacacaaaaataaattggtaaacagaattcccaataccaacagttaactattgtaggccagtatttaactcctttccttcccccaacttctgctgamttattttaaaacaaatacaagatatcacatcattccatctgtaaatacttctctgtgtgtcactaaagtagaggttcccaaattatggtttcagaatacc

SEQ ID NO: 385986 - DNA, 201 bp, Homo sapiens
gatctgcctgtcttggcctcccaaagtgctgggatcccagcctctctctctctctttctcactctctctctctcccgctctctctctctctctctctctcyctctatatatatatatatatatatatttttttttttttttttttttttgagacagggtctcattctgtcacccaggctggagtgcagtggcataatcaca

SEQ ID NO: 385987 - DNA, 201 bp, Homo sapiens
atatcttcattcgtccttacatgagctgcaccccataacatgtaaagtcccttgcccagagtctagcacacagtaggcctggcacatggtgggtggtcacrcatgttagcctcttcctccttccaggcgttttgtactttccagatgatggtagcaagaagtccagtgtccacagggatttgactctgcctgaagaatggt

SEQ ID NO: 385988 - DNA, 201 bp, Homo sapiens
tgatctgcctgtcttggcctcccaaagtgctgggatcccagcctctctctctctctttctcactctctctctctcccgctctctctctctctctctctctmtctctatatatatatatatatatatatttttttttttttttttttttttgagacagggtctcattctgtcacccaggctggagtgcagtggcataatcac

SEQ ID NO: 385989 - DNA, 201 bp, Homo sapiens
ttacaggcgcctgccaccacacccagctaatttttgtatttttagtagagacagggtttcatcatgttggacaggctggtctcaaactcctgacctcaagyagtctgcctgcctcagcctcccaaagtgctgggattacaggcgtgagccactgtgcccagcccatttttactatttataatgttctgttttcttattttt

SEQ ID NO: 385990 - DNA, 201 bp, Homo sapiens
tgcttgaactcgggaggcagaggttttgcagtgatccaagactgtgccactgcactccagcctgggtgacagagtaagactctgtctcaaaaaaaaaaaamaaaaaaaaaacaagacaaaacactcatatctgaaatgtggtttacatagaatgttcttccaggcaaaaaaaacaagattaaaattactggttttgaaaat

SEQ ID NO: 385991 - DNA, 201 bp, Homo sapiens
aatcaacccgtatcagccttccaaagtgctgggattacaggcgtgagccaccctgcctggccgctgtggatttttaaataaacgtcctttatcatgttaaagaagctttcttctgttcttagtttactaagtgttttgttatgaagtgatgttgagttttgcccagtgtttttttctgtgtgtattgagatgatgtgtttt

SEQ ID NO: 385992 - DNA, 201 bp, Homo sapiens
aggcaatcaacccgtatcagccttccaaagtgctgggattacaggcgtgagccaccctgcctggccgctgtggatttttaaataaacgtcctttatcatgwtaaagaagctttcttctgttcttagtttactaagtgttttgttatgaagtgatgttgagttttgcccagtgtttttttctgtgtgtattgagatgatgtg

SEQ ID NO: 385993 - DNA, 201 bp, Homo sapiens
ataggctttgttttttatagcagttctggattcatggcaaacttgaacagaaagtgtagagagttcccatatatgacttatccacacacatgcactgcctmccccaatatcagtatcctactggtatatttattacaatcgatgaatttatattgacacattattataacccaaagtccatagtttacattaacgttcact

SEQ ID NO: 385994 - DNA, 201 bp, Homo sapiens
caggcaatcaacccgtatcagccttccaaagtgctgggattacaggcgtgagccaccctgcctggccgctgtggatttttaaataaacgtcctttatcatgttaaagaagctttcttctgttcttagtttactaagtgttttgttatgaagtgatgttgagttttgcccagtgtttttttctgtgtgtattgagatgatgt

SEQ ID NO: 385995 - DNA, 201 bp, Homo sapiens
tgcctctactaaaaatacaaaattagccaggcatggtagcacatgcctgtaatcccagctactcgggaggctgaggcaggagaatcgcttgaactcaggaygcggaggttgcggtgagccaaattcatgccattgcactccagcctgggcaacaagagtgaaactccatctcaaaaaaaaaaaaaaaattctgatttcact

SEQ ID NO: 385996 - DNA, 201 bp, Homo sapiens
ggattgtctgagcccaggatgtcaagcctgcagtgagctgagattgcaccactgcactccagcctgagtgacagagtgagaccctgtctcaaaaataaatwaattaattaaaaataaaaacgatcaatgtggaaaaaacttgaagactgtgcaaatagccatatgttgcttaacgatgggaatacattgtgaaaaatgtgt

SEQ ID NO: 385997 - DNA, 201 bp, Homo sapiens
ttttcataggccttcaaagcaacaaccatggagttaaattcatttcctcaacttggcaggattttttttttcccctattgaagtattttgtcttttttttktgtgtgtgtgacagggtttcactcttcgctctgttgcccaggctggagtgcagtggcatgatgatagctcactgtagccttaaactcccctgggctcaag

SEQ ID NO: 385998 - DNA, 201 bp, Homo sapiens
ttttttgcttgcaggccagacaaaaacaggcagtgtgagtcaatttaatttaatgtgtgactcatagatgctaacccttgccttagctgcttagtaacttkccctagtcatgtgttaccccatgaaaagaatggcctacttctgtcatattgtctctaacctctgtcatttcatttatgatgctatgtattatgtgtacct

SEQ ID NO: 385999 - DNA, 201 bp, Homo sapiens
catagtttagtcattggtacatatttctggagatggtctaaagatctattttttaaaaactgattttagttaaatcagaggttagcaaatcacagcctgcmggccaaatctggcctatcatacattttgtttgtctctttgttgtgtttttggtgtttttttttctttcttttttttttcctttccttttttttttttttt

SEQ ID NO: 386000 - DNA, 201 bp, Homo sapiens; identical to SEQ ID NO: 84967

SEQ ID NO: 386001 - DNA, 201 bp, Homo sapiens
gtatctctactttcaaaggtagttaccttgttttcctacaatcaaattgttgttaaggaaattttattttcttgctctctttcagcaaatcaactaaggtratttctgaaagaagttgaatcatttattacctgttgcattctgacatgtatcagaagttggcaagttaagtgtaatttaaaatagtacaaaattttatca

SEQ ID NO: 386002 - DNA, 201 bp, Homo sapiens
gggaggccgaggcgggcggatcatgaggtcaagagatcaagagcatcctggccaatattgtaaaaccccgtctctactaaaaaatacaaaaattagctggrcatggtggcacgcacctgtagtcccagctgctcgggaggctgaggcaggagaatcacttgaacctgggaggcgaaagttgcagtgagctgagattacgcc

SEQ ID NO: 386003 - DNA, 201 bp, Homo sapiens
tctactttcaaaggtagttaccttgttttcctacaatcaaattgttgttaaggaaattttattttcttgctctctttcagcaaatcaactaaggtgatttytgaaagaagttgaatcatttattacctgttgcattctgacatgtatcagaagttggcaagttaagtgtaatttaaaatagtacaaaattttatcaaaaag

SEQ ID NO: 386004 - DNA, 201 bp, Homo sapiens
ctgtgattgctcatatattgatatcagtgtattttcttttcttttttcttttttttttttttgagacagagtcctactctgtcgcccaggctggagtgcartgatatgatctcggctcactgcaaccttcgtttcccgggttcaagagattctcctgcctcagcctcccaagtagctggcattacaggctcccgctaccag

SEQ ID NO: 386005 - DNA, 201 bp, Homo sapiens
attgatttttgtgcaggaaagacgaaaaaaggcagtcagggacaggttgactgaggagatatgtgtaaaagagagaaagcggcatggtactggaggcagcmccatgagcagaggccaggcgtggaggggtctgatgtcaatggggaatgattctcagggggtcaggctgcatgggaggagtgctgggaggtgaaggtaaag

SEQ ID NO: 386006 - DNA, 201 bp, Homo sapiens
ctatggatgtgatccttccttgaaatgcctgtatgtctttgttcatgccttttgtatgctctttttattattttatcatggcatatatggttagtttcttktcttctctccttgctaagctactagttctttgaaggcagatgataaatcatactcatttatatgctcatttaatgtatgtaacatttaattgaaatgtat

SEQ ID NO: 386007 - DNA, 201 bp, Homo sapiens
ggacccatttcttcacatgaggaggaatcagggtcttgacccctggacacttaaccttaggacccatttcttcacatgaggaggaatcagggtgctgcccmctggacacttaaagaaccttaggacccatttcttcacatgaggaatcagggtgctgccccctggacacttaaagaaccttaggacccatttcttcacatg

SEQ ID NO: 386008 - DNA, 201 bp, Homo sapiens
ttatttttattttttttttgagatggagtttcgctcttgttgcccaggctggagtgcaatggcgcgatcttggctcaccgcaacctccgcctcccaggttsaagcaattctcctgcctcagcctcctgagtagctgagattgcaggcatgcaccactacgcccagctaattttgtatttttagtagagacggggtttctcc

SEQ ID NO: 386009 - DNA, 201 bp, Homo sapiens
cagctttattgagatataattcacatgccacatgttcaaccatttaaagtgtaaaattcatttacttttagtatattcatatagttgtacatcattaccayaatcaattttagaacatttttactacccacaaaaaaaccataccacacactccttagccattatcctcaactctcctactcttcatcctctccatcccta

SEQ ID NO: 386010 - DNA, 201 bp, Homo sapiens
tctcctgcctcagcctcctgagtagctggaactacaggcacgtgccaccaagcccggctaatttttgtatttttagtagagacggggtttcaccatgttgrccaggatggtctccatctcttgacctcatgatctgcccacctcaacctcccctcccaaagtgttaggattacaggtgtgagccaccatacctgaccctaa

SEQ ID NO: 386011 - DNA, 201 bp, Homo sapiens
agttgggactataggcacatgccacaacgcctggctaatttttgtatttttagtagagaccaggtttcgccatgttgaccaggctggtcttgaactcctgrcatcaagtgatctgcctgtcttggcctcccaaagtgctgggatcccagcctctctctctctctttctcactctctctctctcccgctctctctctctctc

SEQ ID NO: 386012 - DNA, 201 bp, Homo sapiens
cattctaaactcaccagcagtggagcagtaaacccggccacggtcaggcatggcacatgtcctgcaatgatggggactggacctgttgccttaaactcacrcctgctttgtttttccaggtctataagggagaattccaactacctgactttcttaaagaaaaaccacaggtactgtgtctgctttttcctcctgatgtat

SEQ ID NO: 386013 - DNA, 201 bp, Homo sapiens
gataaaaatgccagatattcattttcccatatactcttgtgggtggaatgaccacttgaccatttttttgtagccagtgatacataaggagatttttttttaacagggaaaaaaagagcttacaaattttatgtgcacatgtgtgcatgggagttatacaattcttttaaaaaaaaaactcaaatggctagatgattgaca

SEQ ID NO: 386014 - DNA, 201 bp, Homo sapiens
aagcgattctcctgcctcagcctcccgagtagctggtattacagacatgtgccaccacgcccggctaattttgcatttttagtagagatggggcttcaccmtgttggtcaggctggtctcaaactcctgacctcaggtgatctgcccgcctcagcctcccaaagtgctgggattacagttgtgagccaccgtgcccggcct

SEQ ID NO: 386015 - DNA, 201 bp, Homo sapiens
tttagggtaccctgagccctctcctagccagcccacatttgtgagcactcggtaaacacagagcaggagggaattacagtgaatggggatttccctcagtsctgcccactggctgctcttgaactgacaggcttctttctcattctaaactcaccagcagtggagcagtaaacccggccacggtcaggcatggcacatgtc

SEQ ID NO: 386016 - DNA, 201 bp, Homo sapiens
gatatgaatgtattccactagctgagtcacatcccctctttgatatcctaaaacttacatatactgagatacagagttagccatttcctttttttttttttcttggcaaggtcttgttctgtcacccaggctgcagtgcagtggcgccatcatagctcactgcatccagaatctcctgggcccaagcgatccgcctgcctt

SEQ ID NO: 386017 - DNA, 201 bp, Homo sapiens
ctggctttcagcttatcttggctttcaacataccttcctcactaagcttgattgtttctagcttctgacttaaagtgagagatatgcgactattcctttcrtttggacacttagagcccattgttggattattaatcggccttttttcaatatcaatgtgtcacaggaacagggaggcccaaggagagggagagagatggg

SEQ ID NO: 386018 - DNA, 201 bp, Homo sapiens
gtaagactctcactttcttaccacttgtgtgttcattggagtagcacttgaatttacttcaagaacttttcctttgtattcacaacttgactatttgatgsaagaggcctggctttcagcttatcttggctttcaacataccttcctcactaagcttgattgtttctagcttctgacttaaagtgagagatatgcgactat

SEQ ID NO: 386019 - DNA, 201 bp, Homo sapiens
gaagagaattagggccttgctctggattaggctttggcttaagggaatgtcatggctggctttatctgtctagtccactaaaacttttgccatgtctacaktaagactctcactttcttaccacttgtgtgttcattggagtagcacttgaatttacttcaagaacttttcctttgtattcacaacttgactatttgatgc

SEQ ID NO: 386020 - DNA, 201 bp, Homo sapiens
atctggcatcatttctctttagcctgatgcacttcctttagcagttcttatagtaaagacatgttgactactaatgctcttaggtttttttttttttttttaatttgaaaatgtgtttgttttttttttaatttgagaatattttgctggacatagagttctaggctattggtcgttttgtattttttttaactttcaaca

SEQ ID NO: 386021 - DNA, 201 bp, Homo sapiens
tgtgactaaagaatctatttcatacacacttgtggtttttgaaaggatttcaaaatacccactgaaattaaaaaacacccacccttcccccccccctcccccaccgtctctgcctatctttaaagtgacagataattttgaggaagaaaagatgaagtgtgaactatagtggtgtttttgggccttttgtggtaatgcata

SEQ ID NO: 386022 - DNA, 201 bp, Homo sapiens
ctgttgaaagccaaagatagaatctttaaagcggcaagagaaaagcagctcatcatgtacagggtaacctcagtaagatgaacagcagacttctcaccagwaactatggtgcccagaaggcaatgggttgatgtactcacatccctgaaaggaaaaagcccaacaaaaactaccatatctggcaaaactccccttgagaaa

SEQ ID NO: 386023 - DNA, 201 bp, Homo sapiens
ggtaacctcagtaagatgaacagcagacttctcaccagaaactatggtgcccagaaggcaatgggttgatgtactcacatccctgaaaggaaaaagcccarcaaaaactaccatatctggcaaaactccccttgagaaatgaaagagaaagaagatattcctcataaaccaaaactgtgagaattgtagctagcagacctg

SEQ ID NO: 386024 - DNA, 201 bp, Homo sapiens
ggcaatcaacccgtatcagccttccaaagtgctgggattacaggcgtgagccaccctgcctggccgctgtggatttttaaataaacgtcctttatcatgtdaaagaagctttcttctgttcttagtttactaagtgttttgttatgaagtgatgttgagttttgcccagtgtttttttctgtgtgtattgagatgatgtgt

SEQ ID NO: 386025 - DNA, 201 bp, Homo sapiens
ggttcccagaaaaaggagaccgtccaataatcaactgccagaggacaggaaggatgaaaccatatttttctctcctcttcactttcaggagccctgcacayttcccatatttcagtatataatttttgagtaaattagcaaggtgagatcttttcaccagtctaattctactaaaaaaaaaaaaaagtaggcttagtatta

SEQ ID NO: 386026 - DNA, 201 bp, Homo sapiens
gcaatcaacccgtatcagccttccaaagtgctgggattacaggcgtgagccaccctgcctggccgctgtggatttttaaataaacgtcctttatcatgttraagaagctttcttctgttcttagtttactaagtgttttgttatgaagtgatgttgagttttgcccagtgtttttttctgtgtgtattgagatgatgtgtt

SEQ ID NO: 386027 - DNA, 201 bp, Homo sapiens
cagctgcaaataagtatatactgtaggtttccatttatatgaagttcaaaagtagctaaaaccaatcttttgtgatagtagttagaatagtggttattctrgggggctgactgggaggcaacacaaaagagactgttgaggggctagaaatgatcactgtcctatctaggtggtggttacatggctgtatatataaaattt

SEQ ID NO: 386028 - DNA, 201 bp, Homo sapiens
cactgcaacctcctcctctcgggctgaagtgattctcctacctcagcctcccaagtagctgggattacaggcatgtgccaccacgcccagctaatttttayatttttagtagagatgaggttttgccatgttgcccaggctggtcttgaactcctgacctcaagtgatccacccacctcagcctctcaaagtgctgggatt

SEQ ID NO: 386029 - DNA, 201 bp, Homo sapiens
attttttaaaaaagaaggagttgaatgtttagtttgtcagatggtaataagcgctttgaaataagaaataaagcagggaataggaggttgccaagagctgrgatgtaggaattgtcagggaaggactcattggtaaggtgatatttgagtagagaactgtaggagagcaagtcaacaaagcaggcaaaaattccagccatc

SEQ ID NO: 386030 - DNA, 201 bp, Homo sapiens
gtctggcccgtccggcccctgctcccacgccccttcccccatcgccggcatttcccgggctcggcttcgccccggccgccggggcctctcccctctgcccyttctctcccttctcgcagccctgggaccacgtcctagccccgcagtcccctgggatgagaccctcgtctcgccgggatcggacatttgcccccacgtcta

SEQ ID NO: 386031 - DNA, 201 bp, Homo sapiens
ttacagacgtgagccactgtgccccgccaggtacctgtttttttgtaggttcagtatacactgtgagctggtgctctgctaagtatgctctggtagaggaygggacataggcaaatctctgggcttcaggcattcaacatcttttggactaagtaaaatatatatgatttgatgaatagtgacctttgaagaataggtaag

SEQ ID NO: 386032 - DNA, 201 bp, Homo sapiens
aaattagctgggtgtggtggcagggacctgtaatcccagctacttgggaggctgaggcaggagaatcacttgaacccaagaggtggatgttacagtgagcmgaaatcgtgccattgcactccagcctgggtgacaagagagagacttcgtctcaaaaaaaaaaaattggctgggcgtggtggtgggcacttatagtcccag

SEQ ID NO: 386033 - DNA, 201 bp, Homo sapiens
gacctgttgccttaaactcacgcctgctttgtttttccaggtctataagggagaattccaactacctgactttcttaaagaaaaaccacaggtactgtgtctgctttttcctcctgatgtatactagattggctcttgcattgaagtaatatttttaaagagataatgaaattaaaaagacagaaacaagaaaaccaaaaa

SEQ ID NO: 386034 - DNA, 201 bp, Homo sapiens
gaatagaagaaccatttgaagtaataatgactattttcaaaactaaagacagatgccaaaccacaaatccagtttagaaagttaagaaaacaagcaagatmaataccaaatgccaggtgcggtggctcacacctgtaatcccagcattttgggaggccgaggtgggcagatcacttgaggtcaggagttcaagaccagcct

SEQ ID NO: 386035 - DNA, 201 bp, Homo sapiens
cttgaatagagggagaaggaaagacacttgagaatctggtaaaaacaaaaacaacaacaaaaaaaaacccaaaacaaataaaacattctagtagcttcagsccctccactgggcatggtgtcttcttgacccacagacaataggcaggcaaagtagatggaagcaagtgctaacatgatacacagctcccagggcttagac

SEQ ID NO: 386036 - DNA, 201 bp, Homo sapiens
ccacttccattagataaagaaaatgtgtacatatacaccatgaaatattgcacagccataacaaagagcgaaatcatgttctttgcagcagtttggatggmgcttgaggccattatcctaagtgaattaatgcagaaacagaaaaccaagtacctcatgttctcacttgtaagtgagaggtaaacactgggtacaaatgga

SEQ ID NO: 386037 - DNA, 201 bp, Homo sapiens
tctcctgcctcagcctcccgagtagctgggactacaggcacccgccaccatgcccagctaattttttttgtatttttttttagtagagatggggtttcacygtgttggccgggatggtctccatctcctgacctcgtgatccgcccgcctcggcctcccaaagtgctgggattacaggtgtgagccaccgcgcccggtctc

SEQ ID NO: 386038 - DNA, 201 bp, Homo sapiens
tgcccctggggcctggaaagtaggggctgggacttcatttcttgaatagagggagaaggaaagacacttgagaatctggtaaaaacaaaaacaacaacaamaaaaaacccaaaacaaataaaacattctagtagcttcaggccctccactgggcatggtgtcttcttgacccacagacaataggcaggcaaagtagatgga

SEQ ID NO: 386039 - DNA, 201 bp, Homo sapiens
tctttcatgaagttgcagtcaagctgtcagctgggctgcagtcatccaaggctcagctgggagaggatctgccttcaagctctctcatgtgactgttggcrggcctcaggttttcactggctgttggctggagatgccagttatttgccacatgagcctctgtctacggcagttgacaacatgcagctggcctacctcaga

SEQ ID NO: 386040 - DNA, 201 bp, Homo sapiens
gcactccagcctgggagacagagcaagactccgcctcaaaaaaaaaaaaaatgttcagggaatcacaagaaaatagagatagaaaattaaatgaaatttaraaagcaatccatgtatgtagtgagaaatttgacaaagaaatagaaacaagaaaacaaatagaaatcctatctataaacaatacagtaactgaactggaat

SEQ ID NO: 386041 - DNA, 201 bp, Homo sapiens
agcaaccaagcaagagagcaagatagagtgctcaagacaaaagataacagactttttgtaacttaatctcagaagtaacatcccatcacttttgccaaatyctggttgttagaagccagtcactagatctgtcccacacttgaagagggttaaacaaggtcatgttcttcataagattaatccaagtacagaattggctta

SEQ ID NO: 386042 - DNA, 201 bp, Homo sapiens
ttaactgtctttcagtgtctctgaaaacttgatttgggactatttcctttgaacagaaataatagcattcctgcctgataaatgtcctgtggtcaaataawatgatttcctaatcattctgcacactaaacttccccccaccaggaaatcaatgccttaatgctaaatttcctctgtactactttctgtaagagtaagagg

SEQ ID NO: 386043 - DNA, 201 bp, Homo sapiens
ttcccaagagaccaattttatatgtttctatctgttgcaattagcatttttattgagttcaaattgttccttctctggccactagatgcttctacacattrcctcctgagtacttttgctgtgacctcagttgtgtctgatagcttccttgctacctggtatgataacatctggtgtgacaagatagtacatgctcagctg

SEQ ID NO: 386044 - DNA, 201 bp, Homo sapiens
atgtgactaaagaatctatttcatacacacttgtggtttttgaaaggatttcaaaatacccactgaaattaaaaaacacccacccttcccccccccctcccccaccgtctctgcctatctttaaagtgacagataattttgaggaagaaaagatgaagtgtgaactatagtggtgtttttgggccttttgtggtaatgcat

SEQ ID NO: 386045 - DNA, 201 bp, Homo sapiens
atgaagagacatatccttgcctctatattttttggttgcccagggttacagcttttcatatacaaaaagcataataaatacttgattcttttgcttttttkgggccagttttcaagataatggtttggttccttttcatcttcccaagagaccaattttatatgtttctatctgttgcaattagcatttttattgagttca

SEQ ID NO: 386046 - DNA, 201 bp, Homo sapiens
catgtgactaaagaatctatttcatacacacttgtggtttttgaaaggatttcaaaatacccactgaaattaaaaaacacccacccttcccccccccctcccccaccgtctctgcctatctttaaagtgacagataattttgaggaagaaaagatgaagtgtgaactatagtggtgtttttgggccttttgtggtaatgca

SEQ ID NO: 386047 - DNA, 201 bp, Homo sapiens
tagccgttgtttagtgagcatctactacattccagtcaattcagattttttctctagatttttggtgaccttctgattactattaatttacatttttttttattgttctctacatgtcaaacaaaacaaagcaacaatatcaaaaacccacatgctttttcttcatactgtctatattattgaatgacagacaaacatctg

SEQ ID NO: 386048 - DNA, 201 bp, Homo sapiens
actggatatccacatgagaagaatgaagttagactcttacctcacatcatatacaacaaccaactcaaaatggatcaaagttttatcttggaaaaaaaaaattttttttttcttttgagacagggtctcactctgtcacccaggctggagtgcagtggtgtgatcttggctcactgcaacctccgccttctgggttcaagc

SEQ ID NO: 386049 - DNA, 201 bp, Homo sapiens
attcagtgctgaaaaggctctgggtacaattcagttgtcattcataataaaagctcttaagaaggaacaggaaaaacactacctagatatagtaaagactkcactcaacatgtttttactaagcatccattatatgcccagtaatattccagcagttaacagacaaaacatttagagccatctcattttttaaaaaagaag

SEQ ID NO: 386050 - DNA, 201 bp, Homo sapiens
tcacttaagcccaggaggccatggctgcagtgagctgtgattgcactactgcactgcagactggacgacagtgtggaaccctgtctcaaaaaaaaaaaaaagaaaaaagaaaaaaagggaaagggaagtgaaatagtggctaaaaccccaaatttgatggaaaagcatgcatttatgcatacaagaagctcagtaaactcc

SEQ ID NO: 386051 - DNA, 201 bp, Homo sapiens
gtgttatctcctatttctttatgttatcctggattcagagccatagaatactacctagattctttaggaaagtctttgtgtgcctgacattctgtttattmttttcatatatttaaaaaaatatatttaatacatgtatttttccataaaatatatgttgtcatattgggttcagatcttggctttaccacttactgactg

SEQ ID NO: 386052 - DNA, 201 bp, Homo sapiens
tgtgttatctcctatttctttatgttatcctggattcagagccatagaatactacctagattctttaggaaagtctttgtgtgcctgacattctgtttatycttttcatatatttaaaaaaatatatttaatacatgtatttttccataaaatatatgttgtcatattgggttcagatcttggctttaccacttactgact

SEQ ID NO: 386053 - DNA, 201 bp, Homo sapiens
gtacttagtggtcattgtacttttagtactgtcaaattctcttctgcttaaaaaaaaaaccaactagatttaagtaagaatgtgattcatgaagcagtacrgttttttttagtcttctacctaatggttttagtgatcattgatgaatcattgcccagacctactattttattaagtctggccaaatggtggtagtctaat

SEQ ID NO: 386054 - DNA, 201 bp, Homo sapiens
acagtgcctccctttcattcccacagcacattgtatacctccatacctttgttccttctgccttgattgtccttcttctcatcttacaactttgtcctttraaactcaactcacatgacacctcttctgtgccacagatcctcctgctacaatgtacctacctttacttgtgtactttcacattatattgtgatgatttat

SEQ ID NO: 386055 - DNA, 201 bp, Homo sapiens
cgtgaatgaagtgatgtgtgggcatcgttaggttaggtattataagtaatctagagatgatttaaagtataagggaagatgtatgtaggttatatgtaaakactgtgccattttatatgagagatttgggcatctgtggattttggcatttgtggggagtccagaaacctaggggattgtcctaatgacatgcagtaccag

SEQ ID NO: 386056 - DNA, 201 bp, Homo sapiens
tacaaatggccaacagttatatgaaaaaaatgcttagcatcgctaatcatcagagaaatgcaaattaaaactacagtgtacctcatacctgttagaatggstattataaaaaagataggccaggtgcagtggctcacacctgtaatccctgcactttgggaggccgaggtgggtggatcacgaggtcaggaggtcgagacc

SEQ ID NO: 386057 - DNA, 201 bp, Homo sapiens
taggtgcacaaagaccaataggtggtcattataggaatgtaggtgaaagataatgaggccagtgaggctaaggggttagatttgggagtgaatttgtggartaaggagaactggttaggtgtataggtgagagagagggagaaggaagggtcaaggatgacatactgagttcaggcttgggtgtctgggtaatggtggttc

SEQ ID NO: 386058 - DNA, 201 bp, Homo sapiens
ccagcccagaaaggggctcccacagtgcagcggtgggctgaagggctcctcaggtgccaccaaagtgggagcccaggcagaggaggcgcccagagcgagcragggctgtgaggactgccagcacgctgtcatctctcactatcacttaacatctttaagtgatagaagtggatgcaaggtttatccatgttgtagcatgta

SEQ ID NO: 386059 - DNA, 201 bp, Homo sapiens
agttgatcttaagggtgccaagaatacacaatagggaaaagacagtctcttaaataatgttgggaaaactggatatccacatgagaagaatgaagttagaytcttacctcacatcatatacaacaaccaactcaaaatggatcaaagttttatcttggaaaaaaaaaattttttttttcttttgagacagggtctcactct

SEQ ID NO: 386060 - DNA, 201 bp, Homo sapiens
cctgattagtgccctctttctcaattgttttgtaatccagacaactgttagtcattaaaacataatttatagtggttttaaagcatgattttctaaaaaawtttaaataaatatttattcatattatgttgttttcagagtggagagatctacagaccaagtaatcaagccagtcaatgtaggagctctatcaaaatgggt

SEQ ID NO: 386061 - DNA, 201 bp, Homo sapiens
aaatgatacctatgaaagaaaaaaatagagatttaactggtgactaatagatgtctgcaaaggagacaacagaagtggaacaaaagcatggatcaaatgtstcattgtggaagactttccagggttgaaaatgacctgaagaataaaagagctcactgtattctaaagaacattatgaaaacgtgtctgtacctagacata

SEQ ID NO: 386062 - DNA, 201 bp, Homo sapiens
tgttatatgggcttaggatcgtggcaccccaaaacaattacatggtaacatcaaagatctctgatcgcacatcaccgtaacagatacaataatgaagaagsttcaaatattgcaagaattaccacagtgtcataaagagacatgaagggagtgcatgttgttggaaaaatgtcaccaacagacttgctcaccacaggatta

SEQ ID NO: 386063 - DNA, 201 bp, Homo sapiens
tggcgaaggtgttttccttagttatggggtgagagtgggagaaaaataacattttgactgagaatataggatttatatctctaagcctaaaaatactgggktggtttttttttttttttttttttggtacaattctgggtagtctgcaagtaatattgagtcagcacattttagggacatattacccaatattgaatggat

SEQ ID NO: 386064 - DNA, 201 bp, Homo sapiens
actaaaattggctgtatatgtaatgagttcggaagtgtcgttaagaattggtgttgctggtgcagtgactgatgcctgtaattccagcactttgggaggcyaaggcaggcagattgcttgagcccaggggttcaagaccagcctgggtaacatgatgaaagcccgtctctataaaaaaatatgaaaattagcatggcatgg

SEQ ID NO: 386065 - DNA, 201 bp, Homo sapiens
agaaagaggtggctggcgaaggtgttttccttagttatggggtgagagtgggagaaaaataacattttgactgagaatataggatttatatctctaagccyaaaaatactgggttggtttttttttttttttttttttggtacaattctgggtagtctgcaagtaatattgagtcagcacattttagggacatattaccca

SEQ ID NO: 386066 - DNA, 201 bp, Homo sapiens
tggagaggttaagggagaaactacataaaggttccctggttttaagcttgagaatcagagagaaagtggttcattgaccaatggaggaaagggaagagtaraagagatttactagggaaggtaggttccatttagtgttcgttgagtgtaacatgccggtgaacatccagatagaattgtcccttagcctttaaatgatca

SEQ ID NO: 386067 - DNA, 201 bp, Homo sapiens
aaaactgtttttcctctctgctatgaattttgtaattattttattgattgcagaatatctttttgaggcaatgattgaaattgcaaagtttttttcatcasttccagattactttctttctgtttattcatagttccttgtttcattttcgatgtttatttgttgactatttgctttatatcagatgactttataggtatt

SEQ ID NO: 386068 - DNA, 201 bp, Homo sapiens
ctgcaacctctgcctcacgagttcaagtgactcttctgcctcagcttcctgagtagctgggattgcaggtgcgtgccaccacacccagctaattttttttktgtgtgtgtgtttttaatagagatggggtttcaccatgttagccaggatggccttgatctcctgacctcatgatccgcctgcctcggcctcccaaagtgc

SEQ ID NO: 386069 - DNA, 201 bp, Homo sapiens
taccctcttgaccatataatggaagtcagctaagcttagtcccacctggacctagaacatggtgtttgtttcccataggtgaatatatttttgaaaaatatatttttgaaaaataagtaaaacaaaaccaaatcaggaaataatcattgagaagttacaatatgaacaccttaacaaagatgagtaacaatgtggtgtttt

SEQ ID NO: 386070 - DNA, 201 bp, Homo sapiens
ccatctcccaggctcaggtgatcctcccatctcagcctcccgagtagctgggattacaggcacgcatcaccatgcccagctaattttttttttttttttttgtatttttggtagagccccatgttggccagactggtctcaaactcctgagttcaggcaatccatgtacctcagcctcccagagtactggggttacaggtg

SEQ ID NO: 386071 - DNA, 201 bp, Homo sapiens
tatgggattatgtcaaacaaaaaagctctgcacagtaaaggaaactatcaacagagtgaagagacaacctatagaatgggttgatatatttgcaaaccatrtatctgatatggagttaatatccaaaatatataaggaactcaattcggcaagaaaacaaatctaaaaaaatgggcaaagaacctgatagacatttatcaa

SEQ ID NO: 386072 - DNA, 201 bp, Homo sapiens
tctcagctcactgcaagctctgcctcctggattcatgccattctcctgcctcagcctcccgagtagctgggactacaggcacccgccaccatgcccagctmattttttttgtatttttttttagtagagatggggtttcaccgtgttggccgggatggtctccatctcctgacctcgtgatccgcccgcctcggcctccca

SEQ ID NO: 386073 - DNA, 201 bp, Homo sapiens
aatgatcttcccaccttagcttcctgttagtagctgggattacaggtgcatgccatcatgcctggctaatttttttttttttttttttttttttttttggkggagacagggtctcactatgtgttacccaggctggattcgaactcctggcctcaagcagtcttcctgccatggcctcccaaagtgctgggattaccgctg

SEQ ID NO: 386074 - DNA, 201 bp, Homo sapiens
atcttttcctagttagaaaagcaacatacaagttctttaaagcaagcttgaaaaataaaagcatggctacacacacacacacacacacacacacacacagacacacacacacacacggaaaccataggacaagcatttaatgtttcagtgccatcaaatgtcagcttgttattggtcgtttgggtttttcattttttctgt

SEQ ID NO: 386075 - DNA, 201 bp, Homo sapiens
tatcttttcctagttagaaaagcaacatacaagttctttaaagcaagcttgaaaaataaaagcatggctacacacacacacacacacacacacacacacasacacacacacacacacggaaaccataggacaagcatttaatgtttcagtgccatcaaatgtcagcttgttattggtcgtttgggtttttcattttttctg

SEQ ID NO: 386076 - DNA, 201 bp, Homo sapiens
taatatcttctattttcaattagtttaaattggaaagcttttaaatctttgaaggcattctatttcacttataatttcttttaagattctcttgtatttaytaactcttgtcttccttctagtttagtttatttttgtaatgatttttccttccatttctaaattcctgagctctatcaccttatttctaatatgatttat

SEQ ID NO: 386077 - DNA, 201 bp, Homo sapiens
cacagtatttgacttcaaaatatactgtaaagctatagtaatcagaatagcatggtactggcataaaaacagacatataaacgaatggaactgaatagagmgcccccagaaataaacccacatatttatggtcagttgatcttaagggtgccaagaatacacaatagggaaaagacagtctcttaaataatgttgggaaaa

SEQ ID NO: 386078 - DNA, 201 bp, Homo sapiens
ctaaaaatacaaaaattagctgggtgtggtagtgggtgcctgtaatcccagctactcaggaggctgaggctggagaattgcttgagcccatgaggtggackttgcagtgtgctgagattgtgccactgcactccagcctgggcaacaagaatgtgactccatctcaaaaaaaaaaaaaaaaaaaaaaaaaaaaattgcaga

SEQ ID NO: 386079 - DNA, 201 bp, Homo sapiens
aaaaaaaaattgcagaaatccaggtgagagatgtttgcttggacttggggagcagcagtggagttaatgagaagtggccagatttgcatatattttgaggyatagttgataagatttcctgatggatttgatgtgaagtatgagagaatgtagttgaaaaataactctggttttgtcctgagcaactgtaagaatggagtt

SEQ ID NO: 386080 - DNA, 201 bp, Homo sapiens
aaacggtctttgttttaaactttcctatccatatgaaacacaatgatgttggggtaagaggggccttttctctaaatgaaaatacaatacttattctgtayaattctagagggcccagagatgtggaaataatgtatttgtaagaattatattaaacaatctttatttgataaatagtaccttacaatcctaatgctatct

SEQ ID NO: 386081 - DNA, 201 bp, Homo sapiens
cagagactgtggggttttctaggtataaagtcatatcgtctgcaaatatggaagatagttgacttccactcttcctggatgcctttatttttcttactackctatctaggacttccagtactgtgttgagtaggagtggtgagagagggcatcctggtcttattctggttctcaatgggaatacttccagtatggtatgct

SEQ ID NO: 386082 - DNA, 201 bp, Homo sapiens
cctggtcttattctggttctcaatgggaatacttccagtatggtatgcttccagcagcacatcaactggtgctgctccctttaaagcacttttgattgatytcttgttagtttagctattgttcattacttgatgctgaaattgctcttattgaagtttgatagatagcattagaattgtaaggtactatttatcaaataa

SEQ ID NO: 386083 - DNA, 201 bp, Homo sapiens
caaagtgctgggattacaggcatgagccactgcacccagtcaagaaatccttcttcacttagtctatcctaatgccatataccactctattttaattactrcagttttagaaaatgtcttcgagttagccaggcgcggtggcttatgcctataatcccagcactttgggaggctgaggtgggcggatcacttgaggtaagg

SEQ ID NO: 386084 - DNA, 201 bp, Homo sapiens
gctgatgcgggactaagaggcaactctgagagtttcaatgtggaatgtttgtgtggctccccaaccagaccgtgacctccttgaagattgggactgcatcrtatcttgttctcattttctattttattttaatgatctatcctttgggttgaacgaatgtgtttcttgaacccgataagtgcaacactgagtaaacacttg

SEQ ID NO: 386085 - DNA, 201 bp, Homo sapiens
gtttctactcagatgttcctcacattccttaaaactcacagtccacctcctaacaatctaaaatctaccaactatcaattcctggcaatttaggctttacygctcctctcctgaaaggccttaaagtattagaactgggccctattattagaacctatttcccagttctaatattcctcccacatttttggtatgtgtgac

SEQ ID NO: 386086 - DNA, 201 bp, Homo sapiens
acaaaaacaaaaaaaaccccaggttatctccatgaatgtgaatattgatgtggtccttctgtcaggaagacatcacctgagaccacacacagaaagcctawttttccttaggatacagtcctacatcagggttgacaaagtttttttgtaagggttagatagtaaatattttagattttgcaagccatatggtctcttcct

SEQ ID NO: 386087 - DNA, 201 bp, Homo sapiens
gtaacctgcacgtgtacccctgaatctaaaataaaaattgatttaaaaaaggacactaaaggaaatgtaacctatacagctacacaaaacagtaaacacarcccaactcttagccagagaaacataaagcctcaaacaagaggactttttaccgcagtttcttctacccagtatatcatgtctgctttcaacaaaaactta

SEQ ID NO: 386088 - DNA, 201 bp, Homo sapiens
gtcatttctgctgatcttaaagagaaacacttgactgatatgcataggtttcccatgttcttccccttgagaggccatagttaactgcatttgctgctagyggctcttgtaaactcagtggttatacagcaaagcctttgcaaagtcttttattttagagctctttttcagacaagaaatgattatactttttcttcaaat

SEQ ID NO: 386089 - DNA, 201 bp, Homo sapiens
ccatagaatactacctagattctttaggaaagtctttgtgtgcctgacattctgtttattcttttcatatatttaaaaaaatatatttaatacatgtattyttccataaaatatatgttgtcatattgggttcagatcttggctttaccacttactgactgtgggaccttgaatcagatacctaacctttgtatgcctcat

SEQ ID NO: 386090 - DNA, 201 bp, Homo sapiens
taataatatgtaaagagcttaggatagtatctggcatctaagtgctataaatgtgtgttagctcttattatttttaccacaactaccaccaccactgcatrtattactgctagtgtccatgccaggagaaccatgtctgttccctaggtggcatatgggtgtgtgtatgtaaagatgaggtgactgtgtggtcttgtgctg

SEQ ID NO: 386091 - DNA, 201 bp, Homo sapiens
tacaaattcttatgtggagatgtgtttcagtcctcttgggtagaactgcttgatcacatggtaactattttttaatttattttgtttcttattaaaaaaawtttttttttttttttttttttgagacagggactcactctgttgcccaggctggagctatggtgtgattatggctcactgtagcctcaacctcccaggctc

SEQ ID NO: 386092 - DNA, 201 bp, Homo sapiens
ccaccacgcccagctaattttttgtatttttagtagagacggggtttcactgtgttagccaggatggtctcgatctcctgacctcgtgatctgcctgcctyggcctcccaaaatgctgggattacaggcatgagccaccgcacccggctgagactggcttctttcacacagcataatgcctttgagattcatccaagttgt

SEQ ID NO: 386093 - DNA, 201 bp, Homo sapiens
taatcctggtgcaagatgctggcagtggtagtggatgtgttgagaagtagtctgattctgactgtattttgaaagtagagccaacagatttttttttttttctcagatttggatgttgggtatgagaaagagatgaatcaaatatttattaaatcctttataatcaagcacacttcaccctcccttacctaacaattcctc

SEQ ID NO: 386094 - DNA, 201 bp, Homo sapiens
aagagcagttctattaatagtgattcctcagatacgtttattgcagtgtttcagtgctttttctctcccctggagataaaactgagcctgaacattctggkattctttttttttttttttttttttttttttttttgtgagatggagtttcactcttgttgcccaggctggagtgcaatggcacgatcttggctcaccaca

SEQ ID NO: 386095 - DNA, 201 bp, Homo sapiens
tgaaaacaacaaacataaaagtttctgtgtgtcaggaatatggacacagcatagctggatcttctgcttcagagtccctcacaaggctgcatcagggctcractggggaaggaatgatttcctagttcatgtggtatttggcaagattcagttccttctctgtcttaggtggagggccttagtttcttgctgtgtgtttct

SEQ ID NO: 386096 - DNA, 201 bp, Homo sapiens
aacccacatgctttttcttcatactgtctatattattgaatgacagacaaacatctgtccttcaagtcaaatattaattaatcatagactcctttctcttyttcttcaccccgccttatctaattggccactgtcttagctttttttttttttttttttttaaagatggagtcttaccctgttgcctagtctggagtgcag

SEQ ID NO: 386097 - DNA, 201 bp, Homo sapiens
attgaagccttaatcatttcttttcttccaacatgttgagcatctgttctgattttcctgaccccacttgcctcattctccaattattcttcccatagttrtcagcactgaatgctaataataatactttgttcatatcagttgttattaaaactcttcacttattccttattatcttcaaggtaagcccagcttcccagt

SEQ ID NO: 386098 - DNA, 201 bp, Homo sapiens
gcttcccagtcatgacatacaagactctatgtgtgaccccaatacttaacacagatgtgtttcagaattcagaattttttggattttagaaaagtaatacrgtttatgcaatacatatataacatcctctgctcattcctgaacactgatgggagtgaatggcaggtgcttttaataattacgctgaggtaaattatgcta

SEQ ID NO: 386099 - DNA, 201 bp, Homo sapiens
cctgtaatgttcccacctagacacatacacatattattcttttttattttcttatttatttacacatattattcttaatattttgatgtattttctctccwctgcattatgttaaacaaaggtaagattacgtatatcatcttacctttatatacacagttttgtatccagtccttttaatattcacgagcattttcccat

SEQ ID NO: 386100 - DNA, 201 bp, Homo sapiens
gaggataatattaacaagagcatggtggtgagaattaatcatcatccaagagcctggctcataataagcgcacaatagtattgttattttcattatgaacyatgaaatatttcagctgaaagggacctggaggccatcaagcccaactccctgtttactgataaggaagctggtcccagagggagcaggtcgtttgtcagg

SEQ ID NO: 386101 - DNA, 201 bp, Homo sapiens
aactaaaccagggtaaagtatctgagatttttaaaaggtgtttgatatctattgatactaaaaaacctttgggctggccacagtggctcacgcctgtaatsccagcattttgggaggctgaggtgggtggatcacttgagctcaggagttcaagaccagcctggacaatgtggcaaaaccccatctctacaaaaaatacaa

SEQ ID NO: 386102 - DNA, 201 bp, Homo sapiens
tgaggataatattaacaagagcatggtggtgagaattaatcatcatccaagagcctggctcataataagcgcacaatagtattgttattttcattatgaaycatgaaatatttcagctgaaagggacctggaggccatcaagcccaactccctgtttactgataaggaagctggtcccagagggagcaggtcgtttgtcag

SEQ ID NO: 386103 - DNA, 201 bp, Homo sapiens
ttgggctggccacagtggctcacgcctgtaatcccagcattttgggaggctgaggtgggtggatcacttgagctcaggagttcaagaccagcctggacaaygtggcaaaaccccatctctacaaaaaatacaaaagttagccaggtgtggtggcacatgcctctggtttcagctgcttgggaggctgaggtgagaggattg

SEQ ID NO: 386104 - DNA, 201 bp, Homo sapiens
cgggtggatcacctgaggtcaggtgttccagaccagcctggccaacatggcgaaaccccgtctctactaaaaatataaaaattagccaggcggggtggcargcgcctataatcacagctactgagaaggctgagtcaggagaatcgcttgaacctggaggcagaggttacagcgagccgagatcatgccattgtactcgag

SEQ ID NO: 386105 - DNA, 201 bp, Homo sapiens
ctctctaaagttgtcaaattttgctttattttgaggctattttttgagagcttacaaatttagattcattagcattttctagcaaattgaacattttattrtaacatacggactatcactaaaaatgctttttgtcttacagagtagaattgctaaataaaatacaggatgctcaattaaatttgaatttcagataaatgt

SEQ ID NO: 386106 - DNA, 201 bp, Homo sapiens
acatattacccaatattgaatggataatcatgcttcatggttactgtgactcacatagtaaattggtaatgaaacgttaacatattttataccctgtcccmccatagtctctaatcctaaaattatagtatatttcagtaaatggtgctgtctaggttacatcgtcagccttcttgcatagattcttaaccttttagactt

SEQ ID NO: 386107 - DNA, 201 bp, Homo sapiens
gttgtcaaattttgctttattttgaggctattttttgagagcttacaaatttagattcattagcattttctagcaaattgaacattttattgtaacatacrgactatcactaaaaatgctttttgtcttacagagtagaattgctaaataaaatacaggatgctcaattaaatttgaatttcagataaatgttgagtactt

SEQ ID NO: 386108 - DNA, 201 bp, Homo sapiens
tctgtcctgaatcaaaaatcgtccccgcttcctggtagcacccgatctggaagaaacccaaaatcacctaaccaaaacctgaatcatataatagtcttttytaatactcttttactgagacattccacaattcccaattatatgtgttattccttgctgaaatgaataatgaacccaacatgtgcaactacagctatgttc

SEQ ID NO: 386109 - DNA, 201 bp, Homo sapiens
gtgggcctcagttttgattagtttttattagcctacctttgaattcattgatcccttctttttctgtgtccagtctgctgttaaacccatctggtgacttmttcatttcagatcatttatttttcagttctagaatttccctttctctgctggaattctttgctctttacccattctgttgatcttttcctctaaattatt

SEQ ID NO: 386110 - DNA, 201 bp, Homo sapiens
caggctgataagaacaggcaacacgagctattttgcagctagtaaactttcatcttagactaaacttctttggttcaggtgagggtaactaagggggttgsgggggggtgacaagcaggcattggctgtccaagcaggagcctactgtatcctgttttcttctgtagtctactgacctaagttgatttaaggcactttgtc

SEQ ID NO: 386111 - DNA, 201 bp, Homo sapiens
tttttttaagtttcccccctccccccaagacagggtttcccaatgttgcctaggctggtctcgaactcctggcctcaagtgattctcccacctcaccctcytaagtagctgggactacagacatgtgccactgtgcccagctgcctatacagtgtttttattttattttatttttttaagatggagtcttgctttatcacc

SEQ ID NO: 386112 - DNA, 201 bp, Homo sapiens
ccctcctaagtagctgggactacagacatgtgccactgtgcccagctgcctatacagtgtttttattttattttatttttttaagatggagtcttgctttrtcacccaggctggagtgcagtggcattatcttggcttaccgcaacctctgcctcccggattcaaatgattctcctgcctaagcctcccaagtagctggga

SEQ ID NO: 386113 - DNA, 201 bp, Homo sapiens
cctatacagtgtttttattttattttatttttttaagatggagtcttgctttatcacccaggctggagtgcagtggcattatcttggcttaccgcaacctstgcctcccggattcaaatgattctcctgcctaagcctcccaagtagctgggattacaggcacccgcctccatgcctggctaatttttgtatttttagtag

SEQ ID NO: 386114 - DNA, 201 bp, Homo sapiens
ccctggacacttaaagaaccttaggacccatttcttcacatgaggaatcagggtgctgccccctggacacttaaagaaccttaggacccatttcttcacatgaggaggaatcagggtgctgccccctggacacttgaagaaccttaggacccatttcttcacataaggaggaatcagggtcttgacccctggacactttaa

SEQ ID NO: 386115 - DNA, 201 bp, Homo sapiens
gcaggaggctgaggtgggaggattgtctgagcccaggatgtcaagcctgcagtgagctgagattgcaccactgcactccagcctgagtgacagagtgagamcctgtctcaaaaataaataaattaattaaaaataaaaacgatcaatgtggaaaaaacttgaagactgtgcaaatagccatatgttgcttaacgatgggaa

SEQ ID NO: 386116 - DNA, 201 bp, Homo sapiens; identical to SEQ ID NO: 84965

SEQ ID NO: 386117 - DNA, 201 bp, Homo sapiens
attttatctagattactttgttggattatgcttgtttatgatcacttttatttttgtagggttggtagttacgtctccttttcattgttattggtcggtcyagctaaaagattgttaattttgctgatcttttcaaagaaccagtttttggttttgttgattttctctgttctattttctgttttatttatttcactgtag

SEQ ID NO: 386118 - DNA, 201 bp, Homo sapiens
gaaatttgtccattttatctagattactttgttggattatgcttgtttatgatcacttttatttttgtagggttggtagttacgtctccttttcattgttwttggtcggtctagctaaaagattgttaattttgctgatcttttcaaagaaccagtttttggttttgttgattttctctgttctattttctgttttattta

SEQ ID NO: 386119 - DNA, 201 bp, Homo sapiens
agaaatttgtccattttatctagattactttgttggattatgcttgtttatgatcacttttatttttgtagggttggtagttacgtctccttttcattgtyattggtcggtctagctaaaagattgttaattttgctgatcttttcaaagaaccagtttttggttttgttgattttctctgttctattttctgttttattt

SEQ ID NO: 386120 - DNA, 201 bp, Homo sapiens
tttagaaatttgtccattttatctagattactttgttggattatgcttgtttatgatcacttttatttttgtagggttggtagttacgtctccttttcathgttattggtcggtctagctaaaagattgttaattttgctgatcttttcaaagaaccagtttttggttttgttgattttctctgttctattttctgtttta

SEQ ID NO: 386121 - DNA, 201 bp, Homo sapiens
tgggactacaggcgcccgccacgacggctggctaatttttgtatttttagtagagacggggtttcaccgtgttagccaggatggtctggatctcctgaccytgtgatccgcccgccttggcctcccaaagtgctgggatgtgagccaccgcgcccggccaatgtcctggtttttctttgtggaaaattttaaattactctt

SEQ ID NO: 386122 - DNA, 201 bp, Homo sapiens
atgatatgatctcggctcactgcaaccttcgtttcccgggttcaagagattctcctgcctcagcctcccaagtagctggcattacaggctcccgctaccasgcccagctaatttttgtatttttagtagagacggggtttcaccatgttggccaggctggtctcgaacgcctgacctcaagtgattcccccaccttggcct

SEQ ID NO: 386123 - DNA, 201 bp, Homo sapiens
tgcactccagcctgggtgacagagcgagactccgtctcaaagaaaaaataaaaaaaaataaaaaaagataacaagtgttggcaaagatgtggagaaaaggragacctatacactgttggtgagactgtaacttggtacagccgttatggaaaacaacatggaggttcctcaaaaaattgaaaatagagctaccatatgatc

SEQ ID NO: 386124 - DNA, 201 bp, Homo sapiens
tgggcctcagttttgattagtttttattagcctacctttgaattcattgatcccttctttttctgtgtccagtctgctgttaaacccatctggtgacttcwtcatttcagatcatttatttttcagttctagaatttccctttctctgctggaattctttgctctttacccattctgttgatcttttcctctaaattattt

SEQ ID NO: 386125 - DNA, 201 bp, Homo sapiens
aagtgaatatcccaataaagcaagtcacacataatttggtttcccagtacatataaaagttatacactacattgtagtctgttcagtctgtagtagcattrtgtcaaaagaaaacacaatgcatatgccttaatttaaaatactttattgctaaaaaaaaaatgctagcaatcatccaagccttcagcaagtcataatcat

SEQ ID NO: 386126 - DNA, 201 bp, Homo sapiens
atcaaagtcttgatgttggtggctagagagaacttcttaggttttctacctgtattagtccgttttcatactgctataaagaactgcccaagacggggtartttataaaggaaagaggtttaattgactcatagttcagcatggctggggaggcctcaggaaacttaaaatcatagtagaaggtcaagaggaagcaaggca

SEQ ID NO: 386127 - DNA, 201 bp, Homo sapiens
gcactttatgactatgtatcagtctgggctcagtcagggaaacattgagccactgttaagtgttataggagtgaggggtttaatatagtaattaaggcctrtgcaaatatgggaggactagagaagtgaaggtctgcacgttttttattgtatactggacacgttgtttacaataggagtagggaatgagctggatacagc

SEQ ID NO: 386128 - DNA, 201 bp, Homo sapiens
cctgctagagatgccacaggtggaactaagaaagcaatctctgtgtcactcaggctttgagaaacttccttcagaatcataaaacattagaactgggaagrttaaaaaatctttagtctttttttcccagctccagtctcttgtgaataattaacagtaaagttaaagattatgggaattacgtgcctccttttttccctt

SEQ ID NO: 386129 - DNA, 201 bp, Homo sapiens
cagagttagccatttcctttttttttttttcttggcaaggtcttgttctgtcacccaggctgcagtgcagtggcgccatcatagctcactgcatccagaayctcctgggcccaagcgatccgcctgccttagcttcttgactataggtgtgcaccaccacacctagctaaattttttttatttttaactttttgtagagac

SEQ ID NO: 386130 - DNA, 201 bp, Homo sapiens
taagtgatggtttccagccttggcaaacccttgcagcctccagccacaagtcccctggacctcagagaatgtatatactgtatgtgcaccctaataacatrtttccttaaaactagtactactggatcctctaactttagtacatgtctttcatgtccaacttttcagaggccgccaaactagcaaccctaaactcatttg

SEQ ID NO: 386131 - DNA, 201 bp, Homo sapiens
tgataatcgggatcaatcagcctagctattatagtacctgccttacttgtctttggctaagtggcatgaggagcaagaagtgctgagttaacagtctcagytctctgttcagtggaaataatgttgtgtctcccccaaagaagcacttctcccttgaggattaagacctgtaaactgggagagcccacagctgctgcgagt

SEQ ID NO: 386132 - DNA, 201 bp, Homo sapiens
cctgcagtttccaaggtgagaggaaggaattggaggtgtgtattcagtctcctcactggtctgggaatcttcccagggagcccactcccgtcccatcaggragagccaggagagctgaactatctggggtaaagtggggacaaagagcagggcactgattgtagcaactagtatatggatcttgcagctactctgtactct

SEQ ID NO: 386133 - DNA, 201 bp, Homo sapiens
cccctggacacttaaagaaccttaggacccatttcttcacatgaggaatcagggtgctgccccctggacacttaaagaaccttaggacccatttcttcacatgaggaggaatcagggtgctgccccctggacacttgaagaaccttaggacccatttcttcacataaggaggaatcagggtcttgacccctggacacttta

SEQ ID NO: 386134 - DNA, 201 bp, Homo sapiens
ttattttcgtcggttttacagttcctaacttttgaggcatttgttccctggaggatactaaaagaaggaaatcttcagacagctgcccactgaatttttgygtgagcctttatttgatattttacccagaccccttttggttttttattacagtaacatcgcatacctaggttttttttttcttcttcatataagccttac

SEQ ID NO: 386135 - DNA, 201 bp, Homo sapiens
tgtaggtgcatacataaaagtggagagctccttcacctgctgtttctgctccaggagtttgctctgactccctgtctttctttggctcctttccctgcttsctctgaccagaaagaaaacaattcctatcagagttttagccacctacgtgtgctgcttagtgactgaagctgtcccaccctcaaggaaaaacttgatgag

SEQ ID NO: 386136 - DNA, 201 bp, Homo sapiens
ggtccctttggcatttcaataacagtatctgtgttctctggagcttcctttaaagaaccttaggatccatttcttcacgtgaggaggaatcagggtgctgrcccctggacacttaaagaaccttaggacccatttcttcacatgaggaggaatcagggtgctgacccctgggacacttaaagaaccttaggacccatttct

SEQ ID NO: 386137 - DNA, 201 bp, Homo sapiens
ctcatctctactgaaaatataaaaattagccgagtattgcagaatttgcctgtaatcccagctacttgggaggctgagggagaatcacatgaaccgggagktggaggttgctgagccaagattacaccactgcactacagcctgtgtgacagaacaagactgcctcaaaaaaagaaaaaattagctaggcatggtggcgag

SEQ ID NO: 386138 - DNA, 201 bp, Homo sapiens
ctcctgttggcaggttggacacttagccatgattgttgccaggtcagccttgacaggtggaagcctgtgtcactgagcacatgcatgaccttcattcctgytgctctcacagtaggatatgaactttgttcattagcgttctgagcaagggaaacagtggctgataaaataatgagtcattttgtccacttggttattgag

SEQ ID NO: 386139 - DNA, 201 bp, Homo sapiens
gggtccctttggcatttcaataacagtatctgtgttctctggagcttcctttaaagaaccttaggatccatttcttcacgtgaggaggaatcagggtgctkacccctggacacttaaagaaccttaggacccatttcttcacatgaggaggaatcagggtgctgacccctgggacacttaaagaaccttaggacccatttc

SEQ ID NO: 386140 - DNA, 201 bp, Homo sapiens
cataggcaaggaaacccagaactcaagagtggctgtttacttctggttacctgttcagccagggccccagccacccatccccacctccagtggctttcttygtgtgctggacttgcagatgtttttgccctactgcaatttttgtttgtttgtttgtttcttggttggtttttcaagtttgcccttgcttgttttaatgta

SEQ ID NO: 386141 - DNA, 201 bp, Homo sapiens
atctgccaggcatggtggcttacgcctgtaatcccagcactttgggaggccgaggtgggcagatcacgaggtcaggggatcgagaccatcctggctaacayggtgaaaccccatttctactaaaaatacaaaaaataagcagggcctggtggtgggcacctgtagtcccagctactcgggaggctgaggcaggagaatggt

SEQ ID NO: 386142 - DNA, 201 bp, Homo sapiens
tgtatttctcaaaggcttggtaaaggagtgagttctctagacattcctgggatgtagttaggagatcagtgaacagatcagtcatacgtattaaatacacyccagtattccttattttctaaccttttgaataaattttattttgagactgagttttgctcctgttgcccaagctggagtgcaatggcactgtctcagctc

SEQ ID NO: 386143 - DNA, 201 bp, Homo sapiens
ggctgaaggaagagaattgcttgaagccaggaggcagagaggttgcagtgagccgagattgcagcactgcactctagcctgggtgacagagcgagacttcrtctcaaaaataaataaataaataaataaaaataaaatctgatattgatagtgattttttctcatagtttacttgctgacctttgttttttttttttatat

SEQ ID NO: 386144 - DNA, 201 bp, Homo sapiens
ggttcaagcaattctctgcctcagcctcccaagtagctgggattgcaggcacccatcacaaatgcctggctaatgtttttgtatttttggtagagatgggktatcaccatcttggtcaggctggtcttgaactcctgacctcatgatccacctgcctcggcctcccaaagtgctgggattccaggtgtgagccaccgcact

SEQ ID NO: 386145 - DNA, 201 bp, Homo sapiens
taatgagtaatgagattgaagccatataaaaaaagtctctcaaccaagaaaagcccaggacctgttgcttcactgctaaattctgccagacatttaaagarctaataccaatcctactcaaactcctcaaaacaaaaatttttttggaagagaagggattacttcccaactcattctacaagggcaacattaccctgatac

SEQ ID NO: 386146 - DNA, 201 bp, Homo sapiens
acaaaaattagctgggtgtggtggcagggacctgtaatcccagctacttgggaggctgaggcaggagaatcacttgaacccaagaggtggatgttacagtragccgaaatcgtgccattgcactccagcctgggtgacaagagagagacttcgtctcaaaaaaaaaaaattggctgggcgtggtggtgggcacttatagtc

SEQ ID NO: 386147 - DNA, 201 bp, Homo sapiens
ttaccctgataccaaaaccagacaggatgcaacaagaaaatgacaggccaacatccctgatgaacacagatgcaaaaatcctcaacaaaatactaacaaaycaagtgcaacaatacattaaaaagatcatcctgggatacgaagaggggaagaacagacttacttgagggtggggggttggaggaaggagaggatcagaaa

SEQ ID NO: 386148 - DNA, 201 bp, Homo sapiens
acttcgtctcaaaaataaataaataaataaataaaaataaaatctgatattgatagtgattttttctcatagtttacttgctgacctttgttttttttttwtatataatgtttttatttttactttatataatgatgtattgtgcatactccataccaggcataaaataccaaggattttatttgcatatatataagatga

SEQ ID NO: 386149 - DNA, 201 bp, Homo sapiens
aaaaatacaaagcctgggtgatagagcgagactttatctcaaaaaagaaaaaaaaaagaaggaacatatctcaaaccatatatgacaaacccacagctaaygtcatgttcaacagtgaaaagctgaataatgaataatttttctctaagattaggaacagacaaggatgcccactctaaccacttctgttcaacttagtac

SEQ ID NO: 386150 - DNA, 201 bp, Homo sapiens
cttattttacttaacataatgacccccacttccatccatgttgttgcagatgacagggtcattcttttctatggctgaatagtacatatatatatatatawaatatttcctttatccatttatctgttgatggacacttagattgatcccaaatcttggctattgtgaatagtgctgcagcaaacgtgagaatgcagatat

SEQ ID NO: 386151 - DNA, 201 bp, Homo sapiens
gagaagcacttgtgaaagtcacggcccaggcacacaggctcactaaaagactgagaactaattatgtgattataagacactccccccaccacacacacctyaccaccacaccaatcagtctcctgtgtaatgatagtggattactgctaaatgaactaattttcagaccctattctattttaataaggagtctttagggaa

SEQ ID NO: 386152 - DNA, 201 bp, Homo sapiens
ttccacaaaacttagtgctcacatggaaccttcccgtggcccagaaacagctataagattgggattaagctgggcatggcagctcatttctgtaatcccaytttgggaggccaagttgggtggataatttgagcccaggagttcaagaccagcctgggcaacatagcaaaatcccacttctaccacaaaaacaaaagttag

SEQ ID NO: 386153 - DNA, 201 bp, Homo sapiens
tgatgaaataatctgtacaccaagcctctgtgacacacagtttacccacataacaaaccagcacatgtacccctcaacctaaaaaaaaaaaaaaaaaaaaatcatcatgataaagtggaaatccgagggatgcaaggatgattcagcatacccaaatcaataaacatagtacattacattaatacaatcaagaccaaaaac

SEQ ID NO: 386154 - DNA, 201 bp, Homo sapiens
ggtaggaagaaataaataattcccatgtatttaagcactgttgtaggaagcacctgtgattgctcatatattgatatcagtgtattttcttttcttttttcttttttttttttttgagacagagtcctactctgtcgcccaggctggagtgcaatgatatgatctcggctcactgcaaccttcgtttcccgggttcaagag

SEQ ID NO: 386155 - DNA, 201 bp, Homo sapiens
cacccaccatcgcaatctcctcttccttctcttactcttaaacctccagacactttcccactctctgcaatgccggattcatcgcttttttttttttttttgagagatggagtctctatgttgcccaggctggcttcgaactcctgacctcaagctatccttctgcctcggcctccaaagtgctgggattacaggcgtgag

SEQ ID NO: 386156 - DNA, 201 bp, Homo sapiens
gctccttagaccactgtggtctttcccaattatttttgcctgaaatgaggggttttgcccagagtttttgctgctcacatttgtgcatagtgtggacttayggttctaattttattctaaggatctttatatttctcagggttttttgttttgttttttgaaaaagtcttagtttcttagcaggttatttttggtttattt

SEQ ID NO: 386157 - DNA, 201 bp, Homo sapiens
atgccactgcactccagcctgggtgacagagcgagactccatctcaaaaaaaaaaacaaaaaacaaaaccaacttgacagtagaaattactccttgatccrtggactacagaatggatactgtgttagcaagcatgaaaacagcattcatctccttgtatatctctatcagaactcatgggtgacaaggtgcattgtcaac

SEQ ID NO: 386158 - DNA, 201 bp, Homo sapiens
gtagctaaggtgatcactcaaatttgacagtgaatcaagctgagctggggctgagcagtagctttaattgatttcagtttgcctctggattcaaatgagawtaaggaaatttgacttttagcccaaccttagctttctatatcatttagacgaggggttcatttctttgattttagcaagattgcagctgggaggcagttg

SEQ ID NO: 386159 - DNA, 201 bp, Homo sapiens
tacaaaattttcttttgcaaatactaaatgttggaaaatgatggagcagtgggcagtgatccttagcttatgtggtctttgaactccctgcagtaatattkggacctctatgtcttgatgcaagttgattttcctgggaatagaatctatatcgttcctcatattttccaggatttcatgaaacaaagagttaagaactac

SEQ ID NO: 386160 - DNA, 201 bp, Homo sapiens
tggtttagcctattgttcttaggctacaaaactgtacagcttgttactgtactgaatattgtaggcagttgtaacactatgataagtattatataaacatrtctaaacataggaagatacagtaaaaatacagaattataatcttatgggaccactgtcataagtgtggtttattactgaccaaaatgtcattatgtggca

SEQ ID NO: 386161 - DNA, 201 bp, Homo sapiens
taagatatatttaacataaaatttaccactctgacactttttaaagtgcacaattcagtggcattaaatacattcacattgttgtgcaactgtcaccaccrtccatctccagaacattttttgtcttcccaaactgaaattctgtacccatactcttcattgcctggtccctgtcaactgcagttttttgtgtcacttgta

SEQ ID NO: 386162 - DNA, 201 bp, Homo sapiens
agataacctgggaaagattcaatgagcttgaagatatgtcagtagaaagttccaaaacttaaactgcaaagagaaaaaagaataaatgacagaacatggcrgggcctggtggctcacactgtatctccacacttcaggaggcccaggtgggaagatcacttgagaccaagagttgagggccagcctaggcaacagagagag

SEQ ID NO: 386163 - DNA, 201 bp, Homo sapiens
tgggataataaactgaatctctgttaaagatttggaagttgtttcatatttcttctataatttctcattgttagaatgtggagataatgactgcttggagrtaaagcaagtctgaatagcagagatcagccttgggttggactccagacattcttgggcttattaaatatttggttgactcactgatagaaatagttttat

SEQ ID NO: 386164 - DNA, 201 bp, Homo sapiens
ttctcattgttagaatgtggagataatgactgcttggaggtaaagcaagtctgaatagcagagatcagccttgggttggactccagacattcttgggcttrttaaatatttggttgactcactgatagaaatagttttatttattttccattctttaccaggtacatagcttcaaaattacttcattaacaaaagctgttt

SEQ ID NO: 386165 - DNA, 201 bp, Homo sapiens
tgcaaggcacaatctcagctcactgcaacgtccgtctcctgagttcaagcgattctcctgcctcagcctcccgagtagctgggattacaggtgcccgccaycaagcccagctaattttttgtatttttaatagagatggggtttcaccatactggttggccaggctggtcttgaactcctgacctcaggtgatccacccgc

SEQ ID NO: 386166 - DNA, 201 bp, Homo sapiens
agcattttgaaatttttagtggtagagaaaaataaaagcttcgtctaacctaatctcttcattttatggacaagaagactgagtcacagtaagattaaaaygatttgttcagatttagatggcaaggccagaattcgaatctgtgccttggtctcaatgaggtcgtgcttttctccgtggcattttactacgtgttgtgct

SEQ ID NO: 386167 - DNA, 201 bp, Homo sapiens
tttccttcttttgtttttgagatggagtctctctgtgtcatccaggctggagtgcagtggcatgatctctgctcactgcaacctccatctcccaggctcargtgatcctcccatctcagcctcccgagtagctgggattacaggcacgcatcaccatgcccagctaattttttttttttttttttgtatttttggtagagc

SEQ ID NO: 386168 - DNA, 201 bp, Homo sapiens
ctagtttcaaggagctcacagcctactggaaaaacagacaaagtaaccatgtagtgtgagatgtgatatagggtaaatacaagggcactaggaaggacacytgtgtcgtatgtggcagagagctttcaggaaagctgcgcaggaaagatggcattaaagtggaatgttgaaggatgagtgagagtcatcaggcagagagac

SEQ ID NO: 386169 - DNA, 201 bp, Homo sapiens
ctctctctttctcactctctctctctcccgctctctctctctctctctctctctctctatatatatatatatatatatatttttttttttttttttttttttgagacagggtctcattctgtcacccaggctggagtgcagtggcataatcacagctcactgcagcctcaaccccacgggctcaagcaattctcctgcctc

SEQ ID NO: 386170 - DNA, 201 bp, Homo sapiens
gtgctgggatcccagcctctctctctctctttctcactctctctctctcccgctctctctctctctctctctctctctctatatatatatatatatatatatttttttttttttttttttttttgagacagggtctcattctgtcacccaggctggagtgcagtggcataatcacagctcactgcagcctcaaccccacgg

SEQ ID NO: 386171 - DNA, 201 bp, Homo sapiens
tttgccatgtagcagtatattaaggaagttttttattccttctgggcctcagtttccttatgtgtaaaattctagaacagaaatgttcctttaccttattwttcgttgcagcaatgtaagggattgcaaaaaagattttgattcattcatcaacaagagtgcaaagtgatgatagaggcagatgaaatagactgatcaata

SEQ ID NO: 386172 - DNA, 201 bp, Homo sapiens
aagtgctgggatcccagcctctctctctctctttctcactctctctctctcccgctctctctctctctctctctctctctctatatatatatatatatatwtatttttttttttttttttttttttgagacagggtctcattctgtcacccaggctggagtgcagtggcataatcacagctcactgcagcctcaaccccac

SEQ ID NO: 386173 - DNA, 201 bp, Homo sapiens
atttgccatgtagcagtatattaaggaagttttttattccttctgggcctcagtttccttatgtgtaaaattctagaacagaaatgttcctttaccttatktttcgttgcagcaatgtaagggattgcaaaaaagattttgattcattcatcaacaagagtgcaaagtgatgatagaggcagatgaaatagactgatcaat

SEQ ID NO: 386174 - DNA, 201 bp, Homo sapiens
caaagtgctgggatcccagcctctctctctctctttctcactctctctctctcccgctctctctctctctctctctctctctctatatatatatatatatatatatttttttttttttttttttttttgagacagggtctcattctgtcacccaggctggagtgcagtggcataatcacagctcactgcagcctcaacccc

SEQ ID NO: 386175 - DNA, 201 bp, Homo sapiens
tgcctgtcttggcctcccaaagtgctgggatcccagcctctctctctctctttctcactctctctctctcccgctctctctctctctctctctctctctctatatatatatatatatatatatttttttttttttttttttttttgagacagggtctcattctgtcacccaggctggagtgcagtggcataatcacagctc

SEQ ID NO: 386176 - DNA, 201 bp, Homo sapiens
ctgcctgtcttggcctcccaaagtgctgggatcccagcctctctctctctctttctcactctctctctctcccgctctctctctctctctctctctctctctatatatatatatatatatatatttttttttttttttttttttttgagacagggtctcattctgtcacccaggctggagtgcagtggcataatcacagct

SEQ ID NO: 386177 - DNA, 201 bp, Homo sapiens
tgaggcaggagaatggcgtgaacctgggaggcggagcttgcagggagccgagatcgcaccactgcactccagcccactgcactccagcctgggtggcagarcgagattccgtctcaaaaaaaaaaaaagtttatcatagaaaattggaaaatatggataagttaggtaagaaaataaaaatcatgctgcattgtaaacatt

SEQ ID NO: 386178 - DNA, 201 bp, Homo sapiens
tctgcctgtcttggcctcccaaagtgctgggatcccagcctctctctctctctttctcactctctctctctcccgctctctctctctctctctctctctctctatatatatatatatatatatatttttttttttttttttttttttgagacagggtctcattctgtcacccaggctggagtgcagtggcataatcacagc

SEQ ID NO: 386179 - DNA, 201 bp, Homo sapiens
tctcgctacattccccagcctgggctcaaacgatccttctgcctcagcctcccaaagtactaaaattacaggtgtgagccacggtgcttggcctgcattaycattttgtagtgaagttttctttttatttcaagagagaacctattgccatccactttgagaatcctgttctatttcatgcttgcagactgtatttaagga

SEQ ID NO: 386180 - DNA, 201 bp, Homo sapiens
gcttattcacccagttacccaaattaggtctcctcacttaaaattcatgaatgactccactgttactacaggatagagtctagacttcttagaatgacatwtacttttctagtatttgggtattttctcattatctttttgttgttgatttctaatgtgaccattatggtcagagaacactcattatggtttgtttcagtc

SEQ ID NO: 386181 - DNA, 201 bp, Homo sapiens
aactcggtaaagtgtagtacttaacaatgacagttttataaaggatgcagatcaggaccagccataagatagaagtgggcccaggagggtcctgaatgcakagcttctgtgcctcctccctatgaaagcagggcacgtcaccctcccggcacacccatgtgttcaccaaccgggaagtgccactgaacttccacacccagc

SEQ ID NO: 386182 - DNA, 201 bp, Homo sapiens
ctttcttcctctagccattccatgttcctttggtcctcagtagtcacctcagatggtctttgttctttgcctggtggggtggcctaaaccttcattctggrgtgtatgtaccaataaatggccatattgttttgctctaatatcccgttaactttccataataaacaagtgtaatagaaaatcctaggttccaggcaattt

SEQ ID NO: 386183 - DNA, 201 bp, Homo sapiens
tgccaacacacctggcttatttttgtatttttagtagagacagtatttcacaatgttggccaggctggtctcgaactcctgacctcaggtgatccgcccayctcggcctcctgaagtgctgggattacaggcttgagccaccatgtccggccgacaaaactattaaaaacagtaactacaacggttatttaggagacagac

SEQ ID NO: 386184 - DNA, 201 bp, Homo sapiens
cttcacatgaggaatcagggtgctgccccctggacacttaaagaaccttaggacccatttcttcacatgaggaggaatcagggtgctgccccctggacacytgaagaaccttaggacccatttcttcacataaggaggaatcagggtcttgacccctggacactttaagaaccttaggacccatttcttcacacgaggaat

SEQ ID NO: 386185 - DNA, 201 bp, Homo sapiens
agtgaaaccccatctctactaaaaatacaaaaaaaaaaattagctgggcgtgttgggcacctgtaatcccagctacttgggagggtgaggcaggacaatcrcttgaactcaggaggcagaggttgaagtgagctgagaacgtgccactgcactccagcctgggaaagattgcgagactccctctcaaaaaaaaaaacaaaa

SEQ ID NO: 386186 - DNA, 201 bp, Homo sapiens
agaaacagggagtctcacggctgacatgcctagaggagcccggcatcctgcctctgggcatcactgtcatgcccatatggaagtcagaaaaaatggacacycatggcctgagtgcagccgacttccctttccagcaaggcgatgatgcatgttgcctccaggctgctgctgtcagtgattagcttgtcaataggaagagga

SEQ ID NO: 386187 - DNA, 201 bp, Homo sapiens
agtatgctgagctctctgtgtgccttatctcatttagtttttatatttaccctttcacactcacccataggtgccttaaacatcttaattttatagatgarggacttgaggctcccagaagttgaggagcttgtcctccgtcccacagttggaagatggtagagccaggctgtggactcaggtctttgtcttcatctatac

SEQ ID NO: 386188 - DNA, 201 bp, Homo sapiens
aggcctccagggactgacacaaggaaggaattcagagcctcagacttgggaaggaatttcacaggaaatggccttgctgtgcccagaattctctgacaactgtccttagggcactgcacttgatatcatgtaatgacaaggggacatataaataatctggttgaaatgacaggtcgaggttagtaaccacttgcgcacatt

SEQ ID NO: 386189 - DNA, 201 bp, Homo sapiens
tattgtgttatttgctctattgaagttgtttggaaatgaaccttcggtatcttcaaggtatgcctttatatagagaagtacattcaagtgagatgcaacaccctgtgtatcattgcactgatatgttgtacaattgaattatagctttctatgtaaaagtcctcctgcattaatgggtgactccctattatagggttcagg

SEQ ID NO: 386190 - DNA, 201 bp, Homo sapiens
acttaactctttggactgtttggttgttgggggtgggaaaaataatattcatttacagataacagagtatataaactaccagcacatttctaagaactgargtaattatctgggatgggaattctattctgagtttattgcatactctaattaggtcacttcatatctgattaacttttaatatattgcttcttgcttttt

SEQ ID NO: 386191 - DNA, 201 bp, Homo sapiens
gcccttattgggctatggcttctttcttcctttcccatcagttcactaggatttggagagggagggagaaaaatacatgtatttaatatagtaagtttaascagaagctcccaccaaatccaatttgattggttttgattttttactactctctttgatagttcttgggttaattttgcatttattttccacgtgctcact

SEQ ID NO: 386192 - DNA, 201 bp, Homo sapiens
tttgcacttccctgatagtgatgttgaacaacttttcatataactacctattggctatttgtgtatctttgggagaatgtcctattcatgtcctttgtccmttataaaaaataaagttattttagtttattttattttttgctagtgaggtccttatatattttggattttaatcccttattggctacagattgagtatcc

SEQ ID NO: 386193 - DNA, 201 bp, Homo sapiens
tgatgctagggctaacatatctggtattctcttgggcctttttcttatacctttgcctcatggatgtgatatggctcctgaaattttagatgtcacatctrcattcaaagtgagagtaaggcaggatggcaaagagggagaagtgccagatgtattttccttttttatctgggattcaaaatttttctggaatctccctca

SEQ ID NO: 386194 - DNA, 201 bp, Homo sapiens
gcttatcagtatgagagtttatatttgtttactctagctattcacatcctaactacatagtatactgtgattccatttcatttcttgtacaagtcttattatttttttggtaatagtcactctttcatctccaaactttcctcaaaatctgaaacattttctctcaataatttcaaaccaacatgtattcagtcagtttat

SEQ ID NO: 386195 - DNA, 201 bp, Homo sapiens
gcatcttgtgcgcaccatactggctagagaatgttcacatgctttacaagctgaggatgctcaccaagccctgttggagactatgcaaaacaagtttatcmgtaagtataacattaagaagattacatcttctaaatatggattatttcacttctataagcactatgagtcaggtactccatttgtatttctagacctacc

SEQ ID NO: 386196 - DNA, 201 bp, Homo sapiens
ctccctggttcaagcgattctcctgtctcaacctcccgagtagctgggattacaggcgctcgccaccgcacccagctaatttttgtatttttagtagagaygggatttcgccatgttggccaggcttgtctcaaacttctgacctcaggtgatccacccgccttgacctcccaaagtgctaggattacaagcgtgacccac

SEQ ID NO: 386197 - DNA, 201 bp, Homo sapiens
atccctcacggaattattttcccagctaactactctcttaaatgatgcataagggtgttctaatgctattgaaataagcagggtgttcggtgctgcttttyctcaactgttggtttctttggatttctaggatgtggagagcatcttgtgcgcaccatactggctagagaatgttcacatgctttacaagctgaggatgct

SEQ ID NO: 386198 - DNA, 201 bp, Homo sapiens
ctcagcctctcgactagctgggattacaggaacgcgccaccatgcccagctttttgtatttttagtggagacggggttttaccatgttggccaggctggtsttgaactcctgaccttgtgatctgcctgcctcggcctcccaaagtgctgggattacaggcgtgagtcactgtgcccggccaaaaaataaggaaatctgta

SEQ ID NO: 386199 - DNA, 201 bp, Homo sapiens
gagagcatgtgtgtcggatatatgtcagcccaggatgggaaagccaaggtaagtgggaaaaaacggtcataacctgaaaaccttgtagccatcgcataaayctctaaccagctaagttgatgtggatgaattttttcagctttttttgggcagtagctttgtggtcttcataagcatccgaataagaacagttaacaatgc

SEQ ID NO: 386200 - DNA, 201 bp, Homo sapiens
tagagtgtgttctgagtaacctgcttttttttattttggaataggcagctaagtaacttctttatgtttcttttcttttcttttttctttttgagactccttttttttttttttttttttttgagacagagcttactttgtcgcccaggctggagtgtagtggtgcgatctcggctcactgcaacttctgcctcctgagtt

SEQ ID NO: 386201 - DNA, 201 bp, Homo sapiens
cctgaatataaacacttgcttgtttttaatctgagtagtttatgtcttaaagtatggaatggaactagtggtcaatttttattaatctaagtgtctcccatacttctttaagcttttggaaagtttgagaagttgtgattttgcaatgaataatctctccccttggtttcataggcaattgaaaagctgcaggccggtgct

SEQ ID NO: 386202 - DNA, 201 bp, Homo sapiens
taaattatatgagcagtgtttcccaccaatattagcaaagttatgaagaagcctatgatattgttgttttcattggtgacttttctgagtaatataaaagytggttaaattcctttcttttcttttttttttgtgagattcatgaatacaaaagttaaggattggatacttaagtttcccattttcagtaggaaaatcctt

SEQ ID NO: 386203 - DNA, 201 bp, Homo sapiens
agaagtgcctaaagtagaaggggaagattcttcacgaacctaacagttagatatataccctgaaattgtgtgctgtgaagtgtgccttgtcccagtgttayggttaggtttgtccccagtttactgtggacatcgaataattgagtggggaggctctcacgtttgccataattttttatactctagagtgaggttctctca

SEQ ID NO: 386204 - DNA, 201 bp, Homo sapiens
ggcattaaaccttcaatatcacgatgttaaaagcaacaacacaaggctgggtgtggtggctcacgcctgtaatcccagcactttgggaggcccaggcaggyggatcatttgaggtcaggagttcaagaccagcctgaccaacatagtgaaaccccgtctctactaaaaatacaaaaaaaaaaaaaaaaaaattagcccggc

SEQ ID NO: 386205 - DNA, 201 bp, Homo sapiens
ggtggagttagcgctgcacctctgaggccaggtgagccgctccgaagcggagggcggagtcagagccgcttgtgggaggctgcttccgaccacgtggtacsccgaatgaccaatggggagacttgatgtcagccccgcttcctcaccctggcaacgggcgggtgactacttccggtgcagtgaaggctcggggctgaagcg

SEQ ID NO: 386206 - DNA, 201 bp, Homo sapiens
aacagaggcctaactaaaacaactaataatcctagattgtctgtactctttaatagttaaataccaactgtttggtattaactatttaatagttaaacgcyaagccgaactaaaaacctttagtgtatgagtcatacttgtcatcttgaagctcttaccctaagtcgaggacacgttttcttgggggtgtctctcaagtag

SEQ ID NO: 386207 - DNA, 201 bp, Homo sapiens
ttaactatttaatagttaaacgctaagccgaactaaaaacctttagtgtatgagtcatacttgtcatcttgaagctcttaccctaagtcgaggacacgttktcttgggggtgtctctcaagtaggtcgttagtcttgagttggctgcgttgctggaaagggattatccagtctcttcttggaggatatcagcttgatttct

SEQ ID NO: 386208 - DNA, 201 bp, Homo sapiens
tttgcgcagagacctttaaaacgacagttggaggaggcttgcatcaacagatgccctgagggtagtatctgccttcaggactcctttgtttctctgggttkgaccattttcttaattttaaaatcttaatttatttctcttattctcctactatccctgtatacattgaaaagactttttaaacccttaatttaacatact

SEQ ID NO: 386209 - DNA, 201 bp, Homo sapiens
atcacctgagctcaggagtttgagacgagtctggccgacatggtgaaaccctgtctttactaaaaatacaaaaaattagccaggcgtggtggcacgtgccygtaatccccgctacttgggaggccgaggcaagtgaattgcttgaacctgggaggcaggggttgtagtgagtccagattgtgccactgtactccagcttgg

SEQ ID NO: 386210 - DNA, 201 bp, Homo sapiens
gctaggttgttgtttgaaatctttcttattttttaatgtgtttatagccataaaattttcccttcataaggcttttgatgtactttgtaagttttggtgtrttaatttttattcttatctgaggattttctgattcctttgtgatttctttctgtattttagttttcacaatttgtgcattttccagttttcttctaccat

SEQ ID NO: 386211 - DNA, 201 bp, Homo sapiens
tcccttaagttttaaagctaggttgttgtttgaaatctttcttattttttaatgtgtttatagccataaaattttcccttcataaggcttttgatgtactytgtaagttttggtgtattaatttttattcttatctgaggattttctgattcctttgtgatttctttctgtattttagttttcacaatttgtgcattttcc

SEQ ID NO: 386212 - DNA, 201 bp, Homo sapiens
acccggctaattttttttttgtatttttagtagagatgaggtttcaccatgctggccaggctggttttgaactcctgacttcaaatgatttgcctgcctcsgcctccaaagtgctgggattacaggtgtgagccaccacgcccagcctccatactgttttgattgctgtagctttgcagtaagttttgaaattaggaagtg

SEQ ID NO: 386213 - DNA, 201 bp, Homo sapiens
ttagtacatcccacacctcaacttttagttattttattttttatatatatatttttgagatggattctcactctgtagcccaagctggagtgcagtggtgygatcttggctcactgcaacctctgcctcccaggctcaagtgattcttgtgcctcagcctcccgtgtagctgggactacaggcatgcaccaccacacccgg

SEQ ID NO: 386214 - DNA, 201 bp, Homo sapiens
gccaccgtgcctggcctcaacttgtaattattaaatttgtggaagaatttcaattaattatctaacaattaacttttctatggactctttgaatgaaatayatgttaatagtttaaggttaagcttacactaactggaagaattttcctaaatcttaagaagtatgttggaaatcatgcttatacttccccctgcagtttc

SEQ ID NO: 386215 - DNA, 201 bp, Homo sapiens; identical to SEQ ID NO: 84979

SEQ ID NO: 386216 - DNA, 201 bp, Homo sapiens
taacttttctatggactctttgaatgaaatatatgttaatagtttaaggttaagcttacactaactggaagaattttcctaaatcttaagaagtatgttgsaaatcatgcttatacttccccctgcagtttctctcaccttgaataattgtgattcattaccttaaaacaggataggttttcagatggagttcagttgggg

SEQ ID NO: 386217 - DNA, 201 bp, Homo sapiens; identical to SEQ ID NO: 84977

SEQ ID NO: 386218 - DNA, 201 bp, Homo sapiens
atacttccccctgcagtttctctcaccttgaataattgtgattcattaccttaaaacaggataggttttcagatggagttcagttggggtagtattgtaayagcttgggtcaatggaaagatgtaagaagattggattctagtatttgctgtacttagagaaatataagtagcagtattgagtcctttcagaatactgaaa

SEQ ID NO: 386219 - DNA, 201 bp, Homo sapiens
tgtaagctcttatttttcttctcatttcctctcctactttaggctattgaattatctgagtttttgtaagctactgaaattctttaaggaataaatttggkatataaacatgaattaagtatccttagttactctgtttagaagacaaaacatatacaaattactagttttcacataatgactatactcaatagagctggc

SEQ ID NO: 386220 - DNA, 201 bp, Homo sapiens
ctcaccttgaataattgtgattcattaccttaaaacaggataggttttcagatggagttcagttggggtagtattgtaatagcttgggtcaatggaaagaygtaagaagattggattctagtatttgctgtacttagagaaatataagtagcagtattgagtcctttcagaatactgaaaagtgctgagaaaaattctgga

SEQ ID NO: 386221 - DNA, 201 bp, Homo sapiens
tatatttaatttgagaataaacacttatctttagttttggtcagtctattcagttaagtcatgtctggattattgaacagatgcaaacagtcattgttctyttctctttagactttgggatatactttttgatttaaaaaatgatgttcttgccactgagcttaaggaaacaatacataaacatattttaaaaacttgccc

SEQ ID NO: 386222 - DNA, 201 bp, Homo sapiens
atttatgaacaagcaaatggaaagtggggaactgagtgtgttaaatataaagctatctttaactgttctattaaaaagcaaagatttattttccatctgtratctgaatgtgcctatttgtgttctcttttatggcagtggaatttctgtggagccacacgacggagagcatgtgtgtcggatatatgtcagcccaggatg

SEQ ID NO: 386223 - DNA, 201 bp, Homo sapiens
ggcagatattgaaattgatgtgaattccttaaatactaattgtggattgaaatgactgaaatgttctaatggtctttattgcctagaaagtgtatctggcygtatatttaaaaaatgtgataatttgtattttcccaaatagtgaaaagtacaccgttcttaactccatgcatggggaagaggaagagacaaggcaaaaga

SEQ ID NO: 386224 - DNA, 201 bp, Homo sapiens
ttatggagtctttatgtttctctgcattttttgttttattttttgaggtgtacacacacagttacacttcatggagttgcatccagccaagtatccatgtycttcttgtgaagaggcagagaaaatcacctctcccaagaatttccaccttctgaacaagggaaatgtatcctgaagagctgtacgcagatgggaggcaac

SEQ ID NO: 386225 - DNA, 201 bp, Homo sapiens
cacacatgtactgtaacacaggacatcaacactataacacattcagagtggggaatttatttatgtttcccttttctggagtatgtgcaaatgtaagcaaygttttctagtgggttggaagtctttttattaaaaaaagcttagtagaggacttaaaagttactagtatccctctttcctctccagttctgaccatgtcat

SEQ ID NO: 386226 - DNA, 201 bp, Homo sapiens
gaaaactgctaaacaatttgccatttgtgttctcactagcaacatatataattcattcagatttccacagatctgcagttttgccaatacttagttttgtyaatcttttaaattttagtcattttagtggttatataatggtatctggtggttttaatttgcatttccctaatggctactgttaatgaaaaaattatttat

SEQ ID NO: 386227 - DNA, 201 bp, Homo sapiens
tgcagtgaacagatgcatgcatgtgtctttatgacagaacaacttgtattcctttgggtatatactcagtaacggggttgctaggtcaaatggtagttctstttttagctctttgatgaattaccacactgctttccacaatggctgaactaatttacacttccaccagcagtgtgtaagcactttttctccgcaacctca

SEQ ID NO: 386228 - DNA, 201 bp, Homo sapiens
caaatggagtttctttattgatgatttagcagaaactttaaaagaagttgactcttgttccagaaaaatgaaatatcacagaaaatattctcatgctcacaaaaaaacaaacaatattggttggaaatgttggataatgaggagcatccaagaactagatgattttgaggcagtttaaagggatcacagaggaaagtctct

SEQ ID NO: 386229 - DNA, 201 bp, Homo sapiens
ctcccacccttcaccctcagttaggctccactgtcttttgttcctctctgtgtgtccatgtgtttccatcatttggctcccacttataagtgagagcatgyggtattttttgttcctgtgttagtttgctaaggataatggccatctccatccatgctcgtgctaaagacatgatcttactcttttttatggctgcatagt

SEQ ID NO: 386230 - DNA, 201 bp, Homo sapiens
agttggagaaggagcctacagatgggcagtagatcatggaataccctcttgccctcctaacatcatgaccacaagtgagtaaaaacttaaaaaaaattaarctatatgagcatatatacctaaagtataatattgcttctgttatgacccatgtagtacagatatttatggaagaatacttatatgttgaaagatttgtag

SEQ ID NO: 386231 - DNA, 201 bp, Homo sapiens
gttttttttttaagtctagaaaagaaggaaggtgctttgcataagtaaccaatataatctttatttattaactttcattttaggttcaggggtacacgtamaggtttgttatataggtaaattgcaggggtttggtgtacagattatttcatcacccaggtaataagcatagtacccagtaggtagttttttgaccaggaa

SEQ ID NO: 386232 - DNA, 201 bp, Homo sapiens
gttaggggtggttagtgagattcttgcaagtgaggttcacgcaagaggtgatgttactgggaaatcacaaagactaggggacgataaagggagtgagtggstaacataaataaagtaagaggtaaaaaaattgagaagtcatggagttggaaggatagtctccatgcaccatgaagtcaactaggtattatgacaggacgg

SEQ ID NO: 386233 - DNA, 201 bp, Homo sapiens
acctttcttcctattttgcatacttggtaatttttattgggtttcagacattgtgagttttacctttttgggtgctgtgtatttttgtattttaaaaactwttcttacattttattctaggatgtggctaagttacttaaaaacagcttgagcctttcaggtctcgctttaaacttacatgagacgaaaagcatttggcct

SEQ ID NO: 386234 - DNA, 201 bp, Homo sapiens
gtgtaaaagaaaggtctgaaagttgtaacaagcaataacataaagcttcaattagttggaaagccttactttctataactattatgaccctgtccctcctstcttagacacagactagatgataatggctctgccaaccttaaataatggaattcagaagctatgattaaaggtagagcttattcatgcacaaagcttgag

SEQ ID NO: 386235 - DNA, 201 bp, Homo sapiens
tgacaaagcagcacttgcattcctgggataaattctacttggtcataatatattatcctttttatatattgttggcttcagtttgctaatatttggtaaakaatttttacatatatgtttatgagtgatactggtttatagttttcttgtaataactttggtttgggttccttttgctttttggatgtgtggggatatata

SEQ ID NO: 386236 - DNA, 201 bp, Homo sapiens
ttagaatttgtttttccatttctgtaaatagcctgccagaattttgattgtgattctaatatatgcatttattaagatttttaaacgctcccaactgtttyatagtttccagtgtatagatcttgcacagcttttattatatttatacctggtacttcacttttttttgatgctgtggtaaatggaaattaagcatgttaa

SEQ ID NO: 386237 - DNA, 201 bp, Homo sapiens
acatttatgttgctgcgaaggacatattttcattcttttttatatttacgtattttccagggcgtatatgtaccacattttctttaatccaccattaatakgcacctcggttgattctatgtctttgctattgtgaatagtcctgtgatgaacatatgagtgcatgtgccttttttgtagcatactttattttcctttggg

SEQ ID NO: 386238 - DNA, 201 bp, Homo sapiens
ttttcatatgaattttagaatttgtttttccatttctgtaaatagcctgccagaattttgattgtgattctaatatatgcatttattaagatttttaaackctcccaactgttttatagtttccagtgtatagatcttgcacagcttttattatatttatacctggtacttcacttttttttgatgctgtggtaaatggaa

SEQ ID NO: 386239 - DNA, 201 bp, Homo sapiens
tgatggagagtggcctctaggggccagtagatgaactgctacacaaacttgtctcatgacatgaaatcccaatctggttttagtagaagacactatccttsttcaggcatgacatgaatattgtttccataaacctcatttacatttgccaaaattttaaaccttatatagccttgtttgtcacaattagaatatgaaaga

SEQ ID NO: 386240 - DNA, 201 bp, Homo sapiens
acacacacacacacacacacacacacacacacacacacacacacacaaaagaaaagaaaaagtgtttgttcatgtcctttgcctactttttaatgggattwtttgtttttagtttattgagttaagttccttatagattcaggatattagacatttgtcagaaacatagtttgcaaatattttctcccattgtgtggattg

SEQ ID NO: 386241 - DNA, 201 bp, Homo sapiens
ctcaccacttcaactatataagttgaggaaagttcatgcactgttttctgttagtctgtttctattgcttataacagaatacctaaaactaacagaatatmtgagtagtttgtaaagaaaattaatttatttcttacagtcatggaggcttagaagtccaaggccaaggggctgcatgtgatgagggccttcttgctggcg

SEQ ID NO: 386242 - DNA, 201 bp, Homo sapiens
gttcctttgcatttacataagtattttaaaaccaacttgtcaatctttacaagaagagaaagactgccggaatttatattgggattgtgttgaacctgttratcaatttaataatactgaattttccagttcatgaacatagtatttctttccatttattggatttaaaaaatatctctcaagattattttgtggtttcca

SEQ ID NO: 386243 - DNA, 201 bp, Homo sapiens
agatgtatgtaacaaagcttctgcccaaaaccgactttcaattacagaaacctaaagattcaaaaccaagactggatgagaaatgctcatatgggtgctawaggagctaaaagaagaacttctaagttgagttgggtgcctggtcaaggcttcccttgagaaaaagccagagacatggtatcacagagagatgtatgagca

SEQ ID NO: 386244 - DNA, 201 bp, Homo sapiens
attgatgacaagcttcccattctcagccttgatggtgccatgggatttgccatgggtggaatcatatgggaacatgtagactatgtagttgaggtcaaggraggggtcactgatggtgagaacatctgctttaccagagttaaaagcagccctggtgaccagcgcccgatactgccaaatctttttactttggccttcacc

SEQ ID NO: 386245 - DNA, 201 bp, Homo sapiens
tttagaatcctccttcatggtaagtcttcagggggagtcaagatagccctaaatttggagttcagaggctttcattcacatctcaatttttccacttcctytctgaccataagcaaaccacattatcattctgtctcattttttttttcatctgaaaaaaataggtatagtatacatctttctgtctgacatggtattttg

SEQ ID NO: 386246 - DNA, 201 bp, Homo sapiens
aaagacagttcccttgggctgtcttgaccaaggaaatggtgacccatagcctccccttacagacctgaagggaaaccctcagtagtaaaactccgtagaaygtcaaaatcagaaagaactctgaatataattgagttgaagtttttcacttttaccgaaaaagacattgaaacccagagagccagtgatttcccgatccag

SEQ ID NO: 386247 - DNA, 201 bp, Homo sapiens
ctttgatttcttccattgatggcttttgtgaatatcatggtaaaattttgaacagttaagagttagggttattacagtagctaataatgactgactaagamggaagccttattacttggcttgagatttcagctattaaaaaacctcagtttacttaggagtaaaagtttgataaaacacagtatctcattttttgaatga

SEQ ID NO: 386248 - DNA, 201 bp, Homo sapiens
aaggcagactttattcaagggaggaactattgtgatagctgtaggaaccactgctgtattagttgctttcgcattgctataaaggaatacctgaggctggrtaatttataaagaaaagaggtttatttggctcttggctctgcaggctatacaagcatgacaccagcatcagctcagcttctggtgagacctcaggaagtt

SEQ ID NO: 386249 - DNA, 201 bp, Homo sapiens
ccgttcctggacattatttttattttttgtagagatggggtcttgttatgctgcccaggctcatctcaaactcctggactcaagcaatcctcctgccttgrcctcccagagagctgggattaacaggcatgagccgctgtgcctggcccctatagtattttaaagcaaatccctgacattgtagtttacccttaaatagtt

SEQ ID NO: 386250 - DNA, 201 bp, Homo sapiens
agggcccaacacatagtaggcatttggtggacagctctttaatgagtgactgcatgttgagctttagggtagaactttgagttaggatggtgcgtagatayaacattttgttcccactgtcctttcttcccagtaatctccagatttaagatcaaaagctgtattcatcatagcagctttgaaaaaaattaaatatatata

SEQ ID NO: 386251 - DNA, 201 bp, Homo sapiens
agctctggtactacaaatgtatccattttgtggcctattttgtgccatgttttccacatttttgcactttttaatggtgattttgccatttaaaattgcgycaagcatagtactgaagtgctgtctggtgtttcagagtgcgagaagatggtagtgtctcatggggaaaaatgtgcattttggataagcttcatttaggca

SEQ ID NO: 386252 - DNA, 201 bp, Homo sapiens
gaggaactattgtgatagctgtaggaaccactgctgtattagttgctttcgcattgctataaaggaatacctgaggctggataatttataaagaaaagagrtttatttggctcttggctctgcaggctatacaagcatgacaccagcatcagctcagcttctggtgagacctcaggaagtttaaaataatggtaggagaca

SEQ ID NO: 386253 - DNA, 201 bp, Homo sapiens
tttggggacttaggtcgtggtgtttagacattttcttttgtatgaaagggggactcttgagtagggagatgatcatacttttagaagatacatgaagatakctctttcttctctgagagtgttctggcatgatgaggaatgatccagacgctgagaggcaaaactagtcaaggagttaaatacattgctcttagtcctgtt

SEQ ID NO: 386254 - DNA, 201 bp, Homo sapiens
ctgagattacagatgcacgccaccatgcccagctgctttttgtatttttagtagagatggggttttaccatgttgaccaggctggtcttgaactcctgacytcaggtgatccacctgcctcggcctcccaaagtgttgggattacagacatgagccaccatgcctggccccatttttctttaataaacttattttagaaca

SEQ ID NO: 386255 - DNA, 201 bp, Homo sapiens
ttggtcccatatattcattgacagatgaatgaataaagaacatatggtatatacatacatagagtatccatttgggaatatgaaaaagttctggagctagrtggtgctgatggttgtacaacagtgtgaatgtacttaatgccactgaattgcatactttaaaaatggttaaatggtaattttatattatttatgatagga

SEQ ID NO: 386256 - DNA, 201 bp, Homo sapiens
aggtaagattgtctttaaagaggcatgtaatgattgacagcatgggctttagaattagtcagacttggatttcaatcctggagtccctgctttataagccrgggcaagttacaactttgatccttagtttcctcatctattgatgctttgatagaattctgaaaattagttgaataataaaaatgaagtgcatgtaataga

SEQ ID NO: 386257 - DNA, 201 bp, Homo sapiens
aaacttacctctcacataaagccataggagggagacttaagtataaaacatgatgtacacaagggggggttatcaaaagaagtgcaaagaaactccacttytaattagaatgaagaaagttacaagagactgttgcttctactcccaactatgtgaatgagctgcataatctatagaatcataaatttttaaaaagtatcc

SEQ ID NO: 386258 - DNA, 201 bp, Homo sapiens
agttggcccttgtggccctttgatatatccccatcattatgatttcttttttttatttttgaacacttcctttctggtagtataagatgctccaggctcattttttttttttgagacagttgctgtctcactgtgttgcccaggctggtggagtgcagtggcatgatcacagctcactgcaacctcagcctcccaggctca

SEQ ID NO: 386259 - DNA, 201 bp, Homo sapiens
aatttttaatgatcgccgttctaattggtgtgagatggtatctcattgtggttttgattttcatttctctgatgagcagtgatgatgagcattttttcatstgtctgttggctgcataaatgtcttctattgagaagtgtctgttcatatcctttgcctactttttgatggggtttttttcttgtaaatttatttaagttc

SEQ ID NO: 386260 - DNA, 201 bp, Homo sapiens
gcccaactaagctatggtgatagaaatcagaaagtgattgttcaggaaaagggcatgagggaatttgggggcagtaatagaaatgtcctgtgtggaaaatrttctccttaggatttggtttcatggggatacaaatcattaaaaatcatcaaaccctttactgaacatctatgcactttattgtgtgtaaaatcatacctc

SEQ ID NO: 386261 - DNA, 201 bp, Homo sapiens
aggtagcatgatgcctccagctttgttctttttgcttaggattgtcttggcaatgcaggctctttttttggttccatatgaactttaaagtagtttttccmattctgtaaagaaagtcattggtagcttgatggggatggcattgaatctataaattaccttgggcactatggccattttcatgacattgattcttcctac

SEQ ID NO: 386262 - DNA, 201 bp, Homo sapiens
ctggctagagaatgttcacatgctttacaagctgaggatgctcaccaagccctgttggagactatgcaaaacaagtttatcagtaagtataacattaagargattacatcttctaaatatggattatttcacttctataagcactatgagtcaggtactccatttgtatttctagacctacctctagggtctagcagagga

SEQ ID NO: 386263 - DNA, 201 bp, Homo sapiens
tcttgtgccagttttcaaagggaatgcttccagctattgcccatccagtatgatattggctgtgggtttgtcatagataactcttattattttgagatacrttccatcagtacctagtttattgagagtttttagcatgaaggctgttgaattttgtcgaaggccttttctgcatctattgagataatcatgtggtttttg

SEQ ID NO: 386264 - DNA, 201 bp, Homo sapiens
gagactatgcaaaacaagtttatcagtaagtataacattaagaagattacatcttctaaatatggattatttcacttctataagcactatgagtcaggtaytccatttgtatttctagacctacctctagggtctagcagaggaaaagacccacagttaatactgattgtgaaaagaaattccaccacagtagatagtacc

SEQ ID NO: 386265 - DNA, 201 bp, Homo sapiens
gcattttttttttttttttacgagtttcactcttgttgcccaggctggagtgcaatggtgtgatcttggctcactgcaacctccgcctcctgggttcaagsgattctcctgcctcagccccccgagtatgtgggattacaggcatgcgccaccatgcctggctagtttttttgtatttttagtagagatggggtttctcca

SEQ ID NO: 386266 - DNA, 201 bp, Homo sapiens
tacaggcatgcgccaccatgcctggctagtttttttgtatttttagtagagatggggtttctccatgttggtcaggctggtctcgaactcccgacctcagrtgatctgccctcctcggcctcccaaagtgctgggattacaggcgtgagcgactgcacctggcagttgtgcagttttgagtgagtttcttaatcctgagtt

SEQ ID NO: 386267 - DNA, 201 bp, Homo sapiens
catgtattcagtcagtttatttttccctccccttagaattacctttcctggcctcttctggcttcatgctccaatttggacagtttgctctctcagcttgrtgcatagctgtgtcatctggaatcccattatcttctcttgttttggatcctctgtatccagatcttattttcttcctcattatttacctcccttcttcat

SEQ ID NO: 386268 - DNA, 201 bp, Homo sapiens
tctaggataggaaataaaacaccaccaaaagatttggagctgcctagactaaactctgccaatttacatttctacctacaacgtcttatgatcattcaacraaacacttaccaggagtaatataacatttaaaaaatctttccaaagttagaagagatttaacatgtactccttgttccttctactgtcccccatgctcac

SEQ ID NO: 386269 - DNA, 201 bp, Homo sapiens
ggagaatcgagaatcgcttgaacctgggaggtggagggtgtagtgagctgagattgtgccaccgcactccagcctaggtgacagagtaaaactctgtcttaaaaaaaaaaaaaaaaaaaaaagaaggaaaacgctataaatactttttaactagtcaaatatattgatcttggccatcttttgtggtctctgggtttcgtt

SEQ ID NO: 386270 - DNA, 201 bp, Homo sapiens
tcacagttctggaagttaagcggtccaagatctaggttcccgcctgtttggtttctggtgagcgttccttttctggcttgccttctcactgtgtccttacrctagagataggggtgtagggaaggggttgttgagagagagaaaaatttctttcttataaagacactaataacatcatgagggccctaccctcattttatc

SEQ ID NO: 386271 - DNA, 201 bp, Homo sapiens
acctataacattagtgagaattatattttaagtcactgagatttggacgttgtttttgcagcccagtatagctattctgactgttactccagggtgggctkttgccaggcatgtttgatgaagtgagagcagcagggaggtttttgggagtaaggggatggatgtaagttgatgaagcatggaattttagttagttaagaa

SEQ ID NO: 386272 - DNA, 201 bp, Homo sapiens
ctcttgtgcagctgcaggaataggccatattctcttccctgggctctatacttctggctggaattgtctgtgtgcctcagggggatagaagaaacttctamggcctgccagtccttgaaatgcctagtggtcatggagatggtgtggcttcctgatggcatatgggcatacctaggatggaaggggacattgggaagggcc

SEQ ID NO: 386273 - DNA, 201 bp, Homo sapiens
tggctgcctccatgttaaaactcagcgctgtgatcatgggcaggcaacttaaccctctgtataaatgttttctcattaatcagataggattaataagtgtrgttacatgacagaattgaaggatcagctaactcatccgatagatttaagaatttggcactgggcctggagcacattaggaaatagttactttgattgcct

SEQ ID NO: 386274 - DNA, 201 bp, Homo sapiens
ctttttttgtggaagatttggtattgagctacatttctacaattggtttttcttggagtctgttggccttaatttaaatttttgtagtctctttatatatyccactgatgatttgtttgtattaatcatttcctgaaaggcaggcgtatattagtgatgaagggtatggtctccgatattggctgcctccatgttaaaact

SEQ ID NO: 386275 - DNA, 201 bp, Homo sapiens
atacccaaagaagaacacgtttggaagtacgtttagacgtcattgaagaaggtgtggctatcattcactgtatggcagagaagttgctgggttacccaggycagagctggtctacagtcattgtgtgagtaggatcaatcctgtgaggcagaggcaagctcaggctggtaggtgggcacacagaggtcaagatgctgtgag

SEQ ID NO: 386276 - DNA, 201 bp, Homo sapiens
agaatggcaactatgaatgcaaaactgaataaaattaagtttctcttttcatcttagaataactttaattttcctaagtcatacttatatatcatgtttamtatttcattctattttcccctagtgttgaatcctacttttaaggggtttacttatttatacttaaaaatgataaaaatacattttgaaataatgagtttc

SEQ ID NO: 386277 - DNA, 201 bp, Homo sapiens
tttccagcttcatccacgtccctgcaaaggacatgaactcatccgtttttatggctgcgtagtattccatggtgtatacatgctacattttctttctttcttttttttttttttttttgagaaatcttgttcttgtcccccaggcttgagtgcaatggctcgatctcagctcacagcaaactccgcctaccaggttcaaat

SEQ ID NO: 386278 - DNA, 201 bp, Homo sapiens
cgggttcaagtgattctcctgcctcagcttcctgagtagctgggattacaggtgagcaccaccatgcccagctaatttttgtatttttagtagagatgggktttcaccatgttggccaggctggtctcgaatgcctgaccttgtaatcctcccgccttggcctcccaaagtgctgggattacaggtgtgagctgctgtgcc

SEQ ID NO: 386279 - DNA, 201 bp, Homo sapiens
catttgttgagcatgtgccatggtcaggtactgtgctgagtactttttacataatgattctctttttcaagtaaagctgtagttcagagaggtcaaacagrgcctgaatgcccgaggaatatagtgtgtcttccctcaatgaaggtagaataatgtgagaaggaagaagaaaggctaaatttaaatttaattagctatttt

SEQ ID NO: 386280 - DNA, 201 bp, Homo sapiens
accaggcctggctaatttttaaatgttttgtagagatgaggtcttgctatgttgcccaggctggcgtaatctcaaactgttggcctcaagcaatactcccrcctcggcctcccaaagcactgagattacaagtgtgagccactgcacacctggcctttttataaaactttaataagatcttcttgggccaagggtaaaccc

SEQ ID NO: 386281 - DNA, 201 bp, Homo sapiens
aataccgtccagctctgcagtttcacagcattctgagggaagggaattgccagattggttgatgcagcagggtccaccagacactgcagaaattattaaayattgtctcagaattatagacggaaatttgtgtctcaggaggaaactggctgggcatggtggctcatgcctgtaatctcagcactttcggaggctgaggcg

SEQ ID NO: 386282 - DNA, 201 bp, Homo sapiens
ataaaaattagtaaggatatgaataatagacccaacttgaccaaagtggtatttatagaacattacattcaacaagttattattttcaagttcataaggartatttaccaagagaagctgacaattattttcaactgaatgataattaaaacaatatatcagaatttataggatgcaattaaaacattaaaaggaaaagta

SEQ ID NO: 386283 - DNA, 201 bp, Homo sapiens
tattgggcatattaaagaatgaaatcatgtcatttgcaacagcatggattgaagtggaggtcattatgttaagtgaagtaaggcaggcacagaaagacaamtttagcatgttctcacttacgtgtgagagctcaaacatgctgatctcatggagatagagagtacagtgataaataccagagacttggaaaggtgtgtgag

SEQ ID NO: 386284 - DNA, 201 bp, Homo sapiens
tagtctgtatacacaatggaatactattgggcatattaaagaatgaaatcatgtcatttgcaacagcatggattgaagtggaggtcattatgttaagtgargtaaggcaggcacagaaagacaactttagcatgttctcacttacgtgtgagagctcaaacatgctgatctcatggagatagagagtacagtgataaatac

SEQ ID NO: 386285 - DNA, 201 bp, Homo sapiens
caggacctcaaaagcacagacaaaaaatcccaaaagagacaaataggactcttattaaactaaagagctgcttcacaggaatggaaacaattgacagaatragcagacaaccagttgaatgggagaaaatatttgcaaacttttcttctgacagaggactaataatcagaatatacaagaactcaaacaactcaatgttta

SEQ ID NO: 386286 - DNA, 201 bp, Homo sapiens
tgggagtctaaatctctttttaggtctctcagaacttcctttatgaatctgggtgctcttgtatttggtgcatatatatttaggatagttagctctttttrttgaattgatccctttaccattatgtaatggccttctttgtctgttttgatctttgttggtttacagtctgttttatcagagactaggattgcaacccct

SEQ ID NO: 386287 - DNA, 201 bp, Homo sapiens
ccttaatattgattcagaactaagattgctttttaacaaaagagcatgtttgaggtggacgtcagcactgaagccagtctgatggggtatgattatgttaytaagtcccttgtgtggaaattttttgttatccttgctggtggcccgtgaaagacaccttactatttaatgtgaaatataggtaggaaagagtgtagagtc

SEQ ID NO: 386288 - DNA, 201 bp, Homo sapiens
ccattatgtaatggccttctttgtctgttttgatctttgttggtttacagtctgttttatcagagactaggattgcaacccctgcttttttttgctttccktttgcttgttagatcttcctccacccctttattttgagcctatgtgtgtctctgcacgtgagatgggtttcctgaatacagcacactgatgggtcttgac

SEQ ID NO: 386289 - DNA, 201 bp, Homo sapiens
tgtgtcttttagttggggcatttagcccatttacatttaaggttaatattgtgatgtgtgaatttgatcctgtcattatgatgttagctggttattttgcygttaattgatacagtttcttcatagcattgatggtctttacaatttggcatgtttttgcagtgcctggtactggttgttcctttccatgtttagtgcttc

SEQ ID NO: 386290 - DNA, 201 bp, Homo sapiens
caattatgtgtcttggagttgctcttctcgaggagtatctttgtggtgttctctgtatttcctggatttgaatgttggcctgccttgctaggttggggaarttctcctggatgatatcctgaagagtgttttccaagttggttccattctgcctgtcactttgaggtataccaatcagacgtagatttggtcttttcacat

SEQ ID NO: 386291 - DNA, 201 bp, Homo sapiens
aaaataggaaaacttctgatatgagcagtctgatacagattgaatcataaaggataaatataataaagaacactttattgcttatttgtcatgtaataccyatcctgactatcctttgtatattatccagccagcctgtagctccacagaacttttgtgagtagtgtaaagaacatttattcagacaaggattgacttata

SEQ ID NO: 386292 - DNA, 201 bp, Homo sapiens
ttgctcttctcgaggagtatctttgtggtgttctctgtatttcctggatttgaatgttggcctgccttgctaggttggggaagttctcctggatgatatcytgaagagtgttttccaagttggttccattctgcctgtcactttgaggtataccaatcagacgtagatttggtcttttcacatagtcccatatttcttgaa

SEQ ID NO: 386293 - DNA, 201 bp, Homo sapiens
tataaagctgtgaagttgtgcagcattgtttttaaaagaaatgatttattttgcacattttgacatataaaataggaaaacttctgatatgagcagtctgwtacagattgaatcataaaggataaatataataaagaacactttattgcttatttgtcatgtaatacctatcctgactatcctttgtatattatccagcca

SEQ ID NO: 386294 - DNA, 201 bp, Homo sapiens
ggttccattctgcctgtcactttgaggtataccaatcagacgtagatttggtcttttcacatagtcccatatttcttgaaggctttgtttgtttctttttkctcttttttctctattcttgtcttctcactttatttcattaatttaatcttcaatcactgatatccttttttccacttgattgaatcagctattgaagat

SEQ ID NO: 386295 - DNA, 201 bp, Homo sapiens
cttgtcttctcactttatttcattaatttaatcttcaatcactgatatccttttttccacttgattgaatcagctattgaagattgtgcgtgtgtcacaawgttctcatgccatggttttcagctccatcaggtcatttaaggtcttttctacactgtttattctagttagccatttgtctaaccttttttcaaggttttt

SEQ ID NO: 386296 - DNA, 201 bp, Homo sapiens
tgaagattgtgcgtgtgtcacaaagttctcatgccatggttttcagctccatcaggtcatttaaggtcttttctacactgtttattctagttagccatttrtctaaccttttttcaaggtttttagctttttgcgatgtgttagaacatgctcctttagctcggagaagtttgttattaccgaccttctgaagcctacttc

SEQ ID NO: 386297 - DNA, 201 bp, Homo sapiens
ccgaccttctgaagcctacttctgtcatctcctcaaagtcattctccatccagctttgttccattgctggcgaagagctgtgatcctttggagaagaggcrctctggtttttagaatattcagtttttctgctctggtttctcctcatctttgtggttttatctaccttttgtctttgatgttggtgacctacagatgggg

SEQ ID NO: 386298 - DNA, 201 bp, Homo sapiens
ctttctgtttgttagttttccttctaacagtcatgtccctcagctgcaggtctgttggaatttgctagaggtccactccagaccctgtttgcctgggtatyaccagcagaggctgcagaacagcaaatattgcagaatggcaaatattgctacctgatcctttctctggaagctacatctcagaggggcacccacctgtat

SEQ ID NO: 386299 - DNA, 201 bp, Homo sapiens
tctcctgagtaggtggacttacagtttcggataacttgtgtttttttaagaatgtggatatgaatttaaaggaaaaaaatttcttgttctattatttttgmttggaataagtcataaggataatggtagcatagaattcttccccaagtgactttagtacatcccacacctcaacttttagttattttattttttatatat

SEQ ID NO: 386300 - DNA, 201 bp, Homo sapiens
tttgcagcaagtattgatatgatcttgtgatttttcctggtctgttaattgattttctaatgttggactagtcttgtattactgggatgtatttcacttgrctataatgtattgttctttttatatattgctggattagatttgttaatattttgttaaggatttttgcatgtatattcaagagggatgatgttcctcatt

SEQ ID NO: 386301 - DNA, 201 bp, Homo sapiens
tatgagcagtctgatacagattgaatcataaaggataaatataataaagaacactttattgcttatttgtcatgtaatacctatcctgactatcctttgtrtattatccagccagcctgtagctccacagaacttttgtgagtagtgtaaagaacatttattcagacaaggattgacttatattgtgaaaattttgctgag

SEQ ID NO: 386302 - DNA, 201 bp, Homo sapiens
aactgcgtatgagtgagaatagaaatgatttaaagctgcataaaactacttttgtgatagtatttactgtttagctgtgtaataatttaagccatgagtaktcgtgtgatctctaccatcacttacacacactcattcaacatgcactctgaggcccttcaaactgttccattttaaagagaaaagcttccaattcattat

SEQ ID NO: 386303 - DNA, 201 bp, Homo sapiens
aaagcaaaaatggacagaagagattatatcaagttaaaaagcttctccatagcaaagggaacaacaaagtgaagagacaacccaaagaatgggagaagatatttgcaaactatccatctgacaagggattaataaccagaatatataaggagcccaaacaaccctataggaaaaaatctaataatctgatcaaaaaatggg

SEQ ID NO: 386304 - DNA, 201 bp, Homo sapiens
gcactccagcctgggcaactgagcgagactctgtctcaaaaaaaaaaaaaaaaaaaaaaaagaatggggttatgggtttttaggtggaagaccttagagakaaattgtcattctcatcatacgatatcaagggtacatattatgaccatgacttatcgctgttgatgttgacttgtatcacatgccttacacagtgtagtg

SEQ ID NO: 386305 - DNA, 201 bp, Homo sapiens
gcatggtgtacacatttcctgacagttcatgacacacatgtactgtaacacaggacatcaacactataacacattcagagtggggaatttatttatgtttmccttttctggagtatgtgcaaatgtaagcaacgttttctagtgggttggaagtctttttattaaaaaaagcttagtagaggacttaaaagttactagtat

SEQ ID NO: 386306 - DNA, 201 bp, Homo sapiens
tgagccaccatgcctggccccatttttctttaataaacttattttagaacagtttaaagatttacaaaacaattgtgaagatattttagagcaggggtccrtaaccctagggcctcagactggtatcagtctgtggcctgttaggaactgggccacacagtaggaggggaatggtgggcaagtgagcattaccgcctgagc

SEQ ID NO: 386307 - DNA, 201 bp, Homo sapiens
catggtgtacacatttcctgacagttcatgacacacatgtactgtaacacaggacatcaacactataacacattcagagtggggaatttatttatgtttcscttttctggagtatgtgcaaatgtaagcaacgttttctagtgggttggaagtctttttattaaaaaaagcttagtagaggacttaaaagttactagtatc

SEQ ID NO: 386308 - DNA, 201 bp, Homo sapiens
attagtaatttcctgttaatgtctgacttctcgttaaaggaagattggaaattggacaaacataaatcattttatataaaaatgattttataatgtgccastctagtttttgtacaatatttgaaaactaaattgtttgcatctgtaagagctgttaatagaggtctcataatagatcctcagagatgcagtataccctgg

SEQ ID NO: 386309 - DNA, 201 bp, Homo sapiens
acatggctatgcaaatatctgtttgagtccctgctgtccattttttttgggtaccccgaaatggaattgctggatcacatggttattctatttttattttytgagaagccaccatattgtctgttttccatagtggctgcaccatttcatgttctatcaacagtgcaccagggttccagtttctccatacccttaccaata

SEQ ID NO: 386310 - DNA, 201 bp, Homo sapiens
gtacaaaaaaataagaaagaatgaataagaccctactatttgatggcacaacagggtgactatggccaataataatttaattatacattttaaaataactaaaagagtgtaattggatcatctgaaacacaaaggacaaatgcttgagggatggataccctatagttgatggtgtgattatttcacattgcattcctgtat

SEQ ID NO: 386311 - DNA, 201 bp, Homo sapiens
gcggttggccgagattgcaccattgcactccagcctgggtgacagagactccttctcaagaaaaacaaaaacaaaaacaggaaaagaattacaaaacactkcttaaagaaatcagagatgacacagacaaatggaaaaacgtgagatgattgccacaatcaaactaattaacataatccatcaactcacatagttaccttt

SEQ ID NO: 386312 - DNA, 201 bp, Homo sapiens
agtggtacagtcttggctcactaaagcctttgcctcccaggttcaaggttcaagtgattctcctgcttcagccttctgagtagctgagattacaggcaccygccatcacgcctggctaatttttgtatttttagtggaaatggcatttcatcatgttggccgggctggtcacaaactcaattaaaatgattttgataggac

SEQ ID NO: 386313 - DNA, 201 bp, Homo sapiens
aaaaaaataagaaagaatgaataagaccctactatttgatggcacaacagggtgactatggccaataataatttaattatacattttaaaataactaaaagagtgtaattggatcatctgaaacacaaaggacaaatgcttgagggatggataccctatagttgatggtgtgattatttcacattgcattcctgtatcaaa

SEQ ID NO: 386314 - DNA, 201 bp, Homo sapiens
ggaccacccatctgctttctgtccatggatttacctcttctggatattttatattgatagaatcatgccatttatgtggcctttgctgtctggcttttttygcttagaataatgtttttaaagtttgttcacagtgtagcatgtatcagtacttcattttttggaggagcagtattcaacattattcatgtatctatcaca

SEQ ID NO: 386315 - DNA, 201 bp, Homo sapiens
tttgttagttttccttctaacagtcatgtccctcagctgcaggtctgttggaatttgctagaggtccactccagaccctgtttgcctgggtatcaccagcrgaggctgcagaacagcaaatattgcagaatggcaaatattgctacctgatcctttctctggaagctacatctcagaggggcacccacctgtatgaggtgt

SEQ ID NO: 386316 - DNA, 201 bp, Homo sapiens
ctacctgatcctttctctggaagctacatctcagaggggcacccacctgtatgaggtgtctgtcagcccctactgggaggtgtcttccagttaggctacayggggctcagagacccacttgaggaggcagtctgttcgttctcagagctgaaatgaaatgctgggagaaccactgctctctttagagctatcagacaggga

SEQ ID NO: 386317 - DNA, 201 bp, Homo sapiens
gagataggggtccaacttcattttcttacatgtggctatctaattgtcccagtaccatttattgaaaagactataccttctggccaggcgcggtggctcaygcctgtaatcccagcactttgggaggctgaggcgggtggatcacgaggtcaggagatcgagaccatcctggctaacacggtgaaaaccctgtctctacta

SEQ ID NO: 386318 - DNA, 201 bp, Homo sapiens
atttttggtattgttaattgtttttaaaattcagccattttgatatgtgtgtagtggtattattgagtgtccctagtgatttatgtgtgtagtggtattcaatttgagtgtccctagtgacttataagagccttttcatatgctttttgaccatttagatagccttgttgagaagtgcatatttgcatcttttgcagattt

SEQ ID NO: 386319 - DNA, 201 bp, Homo sapiens
tttttggtattgttaattgtttttaaaattcagccattttgatatgtgtgtagtggtattattgagtgtccctagtgatttatgtgtgtagtggtattcaatttgagtgtccctagtgacttataagagccttttcatatgctttttgaccatttagatagccttgttgagaagtgcatatttgcatcttttgcagatttt

SEQ ID NO: 386320 - DNA, 201 bp, Homo sapiens
ttttggtattgttaattgtttttaaaattcagccattttgatatgtgtgtagtggtattattgagtgtccctagtgatttatgtgtgtagtggtattcaatttgagtgtccctagtgacttataagagccttttcatatgctttttgaccatttagatagccttgttgagaagtgcatatttgcatcttttgcagattttt

SEQ ID NO: 386321 - DNA, 201 bp, Homo sapiens
tttggtattgttaattgtttttaaaattcagccattttgatatgtgtgtagtggtattattgagtgtccctagtgatttatgtgtgtagtggtattcaatttgagtgtccctagtgacttataagagccttttcatatgctttttgaccatttagatagccttgttgagaagtgcatatttgcatcttttgcagattttta

SEQ ID NO: 386322 - DNA, 201 bp, Homo sapiens
ttggtattgttaattgtttttaaaattcagccattttgatatgtgtgtagtggtattattgagtgtccctagtgatttatgtgtgtagtggtattcaatttgagtgtccctagtgacttataagagccttttcatatgctttttgaccatttagatagccttgttgagaagtgcatatttgcatcttttgcagatttttat

SEQ ID NO: 386323 - DNA, 201 bp, Homo sapiens
ggtttcaccgtgttagtcaatatagttttttttgttttgttttgtttttgagatggagtcttgctctgtcacccaggctggagtgcaatggcatgatctcrgcacactgcagtctccgcctccagggttcaagtgattctcctgcctcagcctcccaagtagctgagattacaagcatccgccaccatgcccagctaattt

SEQ ID NO: 386324 - DNA, 201 bp, Homo sapiens
acttcatctgtttcatgcatctcagtttttttcctatagggttttttgtttttgtttatttttattttgttttattttatttttgagacagggtctcactstgtcacccaggctggagtgcagtggcacagtcatggctcactgcagccttgacctcctgggctcaagagatcctcctgcctcagcctcctgagtagctgg

SEQ ID NO: 386325 - DNA, 201 bp, Homo sapiens
cgtctctactaaaagtacaaaaaattagccgggtatggtggcgggcacctgtagtcccagctagaggttgaggcaggagaatggtgtgaacccaggaggcrgagcttgcagtgagctgagatcgcgccacttcactctagcctggccaacagagcgagactccgtctcaaaaaaaaaaaaaaatcttacacttgcttctct

SEQ ID NO: 386326 - DNA, 201 bp, Homo sapiens
cattgttttttaacatgtagtataaatcatcaaccaaatacctttttaaaattctttttaagaaaacctatctcatagtaattggtttgtttctcatcttyacaatcgttgatcctagtttttctcctttcagcaggctgggcactggcctgggtatttagtagacatttaataaatgtgtgccagtttccattttctctc

SEQ ID NO: 386327 - DNA, 201 bp, Homo sapiens
acatttttaagtgtatagaagttttataaaatgtatagaatgcatttaagtgggtaggtggattgggaataaaaggaaaaagaaaagatgggaaatttctrtaaggatatcagtcacttagaaaatgaatgcggttttataagagccttcaagaatattcattaggaagctcatggtagaattgaatgccttttgcttgcc

SEQ ID NO: 386328 - DNA, 201 bp, Homo sapiens
  misc_feature (1)...(201): n = A,T,C or G
ctttgctctcatggtcatattggctatatttttatgatttttcttggctaattcctgagcagttgcccccttaatattcggggcatgaggaaaaggtgcanttttagaaatgctttaactttgtatttgaataaaatgtattgtcactactctagagaacttcagtaagacttgagtgcctttcctctgttaggcaagtta

SEQ ID NO: 386329 - DNA, 201 bp, Homo sapiens
aattcttaaattattttcaaattaaaaattttttaaatgtcactcttgggtcttgtggcacatttgattagttctttgggtcttgtacttgaaatgatgcmgttcaaaaaatatcacccttggtttataaccaagtctgcattggatgaatgattacattcccccaaactattgcctttttctcattttgaattcctgact

SEQ ID NO: 386330 - DNA, 201 bp, Homo sapiens
tgtatgtgtatttagttctatgcagttttatcatgtgtgagttcatgtattcaccacaagtcatgatacagaaccccttaatcatcacaagaatccctcaygttccccctttataaccacatcacctgactatcactcacccacccacccaccctgactttaatccctggcaaccaatagtctcctgtctctataattttg

SEQ ID NO: 386331 - DNA, 201 bp, Homo sapiens
  misc_feature (1)...(201): n = A,T,C or G
cccttcaagaggtggaactcaatttccctgcccttgactgtgagccaaacactagagactcgcttccaaccaataaatttatggcagaagtgaaagtgtcngatttctgagactaggtcaaaaaggcattgtggcttcctccttgggctctctgttgaatcactccctctgggtgagaccaactgccatgtcatgaggaca

SEQ ID NO: 386332 - DNA, 201 bp, Homo sapiens
tctcctgtctctataattttgtcatttcaaaaatgttatatagatggaatcattcagtatgtgaccttttaggattgtctctttatactcagcaaaattcygtggagattcatccatgttttggtgtgtatcagtagttcatttctttttattactgagtggtattccctggtgtggacacaccataatttgttgaacctt

SEQ ID NO: 386333 - DNA, 201 bp, Homo sapiens
atcatcaaccaaatacctttttaaaattctttttaagaaaacctatctcatagtaattggtttgtttctcatctttacaatcgttgatcctagtttttctsctttcagcaggctgggcactggcctgggtatttagtagacatttaataaatgtgtgccagtttccattttctctctgtaaatgtcactctctttaggaac

SEQ ID NO: 386334 - DNA, 201 bp, Homo sapiens
tcaaagatgtttctccttcactgttataaatgctgtgatatttagctggttatactcacatgtccaaactgcaaaataaggaaaatataaattaagcgtayctctttgggcaatatttgccactaattcttgggctctaggctttatattttcagaattttatttatctttttatttaacaattattcattgacagctatg

SEQ ID NO: 386335 - DNA, 201 bp, Homo sapiens
tcaaatgaatggatgaaaatttttgtgtaaggtagtcctagatgtatgaaactcccaggagtttgggagaaataagtgaagatcctttctgaaggagtacrctgtcagctcagatctcaaagaaatctcatatatgaatctaaaatagaaggataaaataaagtaaaacacgtaaaagagagttaccatgagagagagcat

SEQ ID NO: 386336 - DNA, 201 bp, Homo sapiens
taaaatataactttgaaatatgatcagggaaaaattattaatgagctattttacattatcgtttttagtattaagtcttcagaaccagtttgagttttccmcatctcaattataacactaaatttttattagatatatttgatctgtatttatatttcataaaaatttactgtgaaatagtaaatttacataccaagttat

SEQ ID NO: 386337 - DNA, 201 bp, Homo sapiens
gaatattaacaagtcttggtgaggatgtggagaaattggaaccctcatatatcactgataggaatgtaaaaatggtgctgctactttggacaacagtttgkcagttcctcaaaaagttaaacatagagttaccatgtgacccagcaattccatttctaggtatatgcccaagaaaatgaaaagataggtccacatgaaaac

SEQ ID NO: 386338 - DNA, 201 bp, Homo sapiens
caaaggttagctgaagtattagacatttttcttgtggatctatgtattgacttaagtacacttagccagtttcacataatgatttgtaacaatgattacawatatgataaaaacatcacagatatttgatgataagctacattcatgatttatttttctccctcatcttaactgtaaagaccaaatactatgatttccttc

SEQ ID NO: 386339 - DNA, 201 bp, Homo sapiens
gtggaacacctacaggatgtattgaccatgaatcccttaaaagagacttccatttcacaatagtggccaatggcatttagtcattgaatggatgtatccagctaaatagatttattggaccatattttagatttgacaggaaacacctagatacaaattggccttagtcttaaccaaattttaactgcttttgataatcta

SEQ ID NO: 386340 - DNA, 201 bp, Homo sapiens
ttcaagcgattctcctgtctcaacctcccgagtagctgggattacaggcgctcgccaccgcacccagctaatttttgtatttttagtagagacgggatttygccatgttggccaggcttgtctcaaacttctgacctcaggtgatccacccgccttgacctcccaaagtgctaggattacaagcgtgacccaccacacctg

SEQ ID NO: 386341 - DNA, 201 bp, Homo sapiens
gatggtttagactccaaatcatcttgtcaataggtgactgatatccatcaactttgcttctaaaatgtgtacaagttagtacacaaatgtataccttgcatttttatcttcttttttgtttaactagagtacatcttacagagggtcacaaagttgcaaaataaatcatttttctttccttgtgacataagatacatatgt

SEQ ID NO: 386342 - DNA, 201 bp, Homo sapiens
ttttctcataataagatgtccagaggtcctatgtgccagctccacaatgtctctgatggtcctgcctccttgtgtcttattggctagaactgtgtcccatsatcccctctagttacagagacactgagaaacaatttcttagctggacacatgattgtctcctccacaaaatggggcttcttttcgatggaaagaatgaat

SEQ ID NO: 386343 - DNA, 201 bp, Homo sapiens
tccgatatgacttgcaaatatcttatcccattccacgagttgccttttcactccattgattgtgtctttcactccattgtgtcttttaaatttttatctatttttttcttttattgtctgtgttttggtgttatatccaacctttcccctatgttgttttctaagagatttatagttttagctcttacacttaggtctttg

SEQ ID NO: 386344 - DNA, 201 bp, Homo sapiens
tatatagagatataattttttttttttttttgagacaaggtcttgctcttgaccaggctggagtgcagtggcgcaaacatggctcactgcaaccttgactkcccagactaagatgattctcccatctcagctgctggagtagctgggactacaggtgcatgccaccatgcctggctaatttttgtattttttatagagaca

SEQ ID NO: 386345 - DNA, 201 bp, Homo sapiens
cctcctgagcagctgagactacaggcgcccgccaccacgcctggctaatttttgtatttttagtagagatggggtttcaccatgttggccaggctggtctsgaactcctgacctcaggtgatccacccaccttggtctcccaaagtgctgggattacaggcatgagccaccgtgcccagccaggatttaaaatattaggtg

SEQ ID NO: 386346 - DNA, 201 bp, Homo sapiens
agtagagatggggtttcaccatgttggccaggctggtctggaactcctgacctcaggtgatccacccaccttggtctcccaaagtgctgggattacaggcrtgagccaccgtgcccagccaggatttaaaatattaggtgagcttattaataaagcaacggcagggtttgagagttgaatccagttttgaaagaagttctg

SEQ ID NO: 386347 - DNA, 201 bp, Homo sapiens
caaggcccttcaccagccaaaagattatgaattgcttgctgaaggttcagatgagtaacattttttagcaataaattattttaaagttaaggtatgcatatttttttaaacataatgctattatacacttaatagactacagtaaagtgtaaacataacttttatgtgcactcggaaaccaaaatatttatttgactcact

SEQ ID NO: 386348 - DNA, 201 bp, Homo sapiens
tggtggtctggaacgaaacctgcactatttccaagttatgcctgtaatttaaagtgtgaaaaaaaaactagataaatttgggatttttttattgcattgatttttttttcttttaaagtaatcgattatacaaacattatcacagtacaagtagaaatacaaattaaagccagaagactttattctgcttggtattctacc

SEQ ID NO: 386349 - DNA, 201 bp, Homo sapiens
atcccctctagttacagagacactgagaaacaatttcttagctggacacatgattgtctcctccacaaaatggggcttcttttcgatggaaagaatgaatsttgtataaacatctgctgtctgcctcaggggttggactagatgatccttgatctggacgactcttcctagctctggaagttgggaactttgtttaataaa

SEQ ID NO: 386350 - DNA, 201 bp, Homo sapiens
atttggagaagtgcatgggctttgattggtgttttttccaccagaagtcatggcttcttgcagtctttaatttttcttttccagtccttttttttttaacytttggcctcaacattatcaccagcaaacatttattgaatgctatttatgtacaggcttttaaatagatcttagagaatgaatagaggatatggcacctag

SEQ ID NO: 386351 - DNA, 201 bp, Homo sapiens
ggcaggtaggcagcctaaatgtgtgagacaggtctagagaggtagacaagtagaagagagtggggctgactggccatgtgtgttccattgtaagatatttwaaaaaaaaatgtgtaacaccaaactacactttgctggtcaaaccaaacgctggtttttgcagcttgtaattcctggtgggggaatgtcagttgataaagt

SEQ ID NO: 386352 - DNA, 201 bp, Homo sapiens
tcagactcttccgatgagcagtaagaggaggactggggaactgatcactgactagcaccctgtggtggtgatagatgacctttcacagtaggtttggatgragtggaggggatacaaatcccagtgtgagtgggtaagggaagagactgaggagataaataggaaacagtgagtacagacacatctttgaaggaatttttc

SEQ ID NO: 386353 - DNA, 201 bp, Homo sapiens
gcaggtaggcagcctaaatgtgtgagacaggtctagagaggtagacaagtagaagagagtggggctgactggccatgtgtgttccattgtaagatattttaaaaaaaaatgtgtaacaccaaactacactttgctggtcaaaccaaacgctggtttttgcagcttgtaattcctggtgggggaatgtcagttgataaagtt

SEQ ID NO: 386354 - DNA, 201 bp, Homo sapiens
tggtcagcatggtagtgtaattatcttcagcaaagtttggtttatgggtgcaggcatggagtaagatttaattatggttggaattttgtcaggtgagtatratggggcaagagcagaccaatttagctgatggtttctgcagagaattaattataatgatggactatggactttggctacttagggccaaaatgaggactt

SEQ ID NO: 386355 - DNA, 201 bp, Homo sapiens
aaagggagtgagtggctaacataaataaagtaagaggtaaaaaaattgagaagtcatggagttggaaggatagtctccatgcaccatgaagtcaactaggwattatgacaggacggatatcagccaggggcataaatctttgaggggtgatggagagtggcctctaggggccagtagatgaactgctacacaaacttgtct

SEQ ID NO: 386356 - DNA, 201 bp, Homo sapiens
tctgtgggtgtagggtctttttgtcctttagttattagccccttccgggatatagttccataacagaccctgcttatatggaatcactaaaattagtgtgwtaattcagtgtttactccagcttattaacatagctctattagattgtgaatgtctgtgtttctgcatatttggataaacttgttcttctgtaggtagagt

SEQ ID NO: 386357 - DNA, 201 bp, Homo sapiens
ctgaatgtttgggttttaaaataatgtatataatttataggatcccattttattttttattttttattatactttaagttctagggtacatgtgcataacrtgcaggtttgatacacaggtatacatgtgccatgttggtttgctgaacccatcaactcctcatttacattaggtatttctcctaatgctatccctccccc

SEQ ID NO: 386358 - DNA, 201 bp, Homo sapiens
ttttttattatactttaagttctagggtacatgtgcataacgtgcaggtttgatacacaggtatacatgtgccatgttggtttgctgaacccatcaactcmtcatttacattaggtatttctcctaatgctatccctcccccagtcccccatcccccaacaggccccagtgtgtgatgttcactgccctgtgtccaagtga

SEQ ID NO: 386359 - DNA, 201 bp, Homo sapiens
atttacccgaatgtcatctttgtgtttcatctggcatccttgttttcaacgtggagaatgaggtatgagcgacacacagtaagataaataacatatggcawtcctttctcattctgttgatatttctgattggttggctgaactcgggaattgtatcttcaaattgctctggcctatttaatacttttaatttaagacaat

SEQ ID NO: 386360 - DNA, 201 bp, Homo sapiens
accaagttattacaggtatacttaaatcttcctaatagtttaatatattagaaaattaaaattttataaaattaaaaattcagctttccatttgtccttgmctcattttaatttctgaatagctacatttggctcgtggctactgttttggttcttacagctcctgatagtgattcttaacatgactgtttagggagtaga

SEQ ID NO: 386361 - DNA, 201 bp, Homo sapiens
agtagagctggggaaatggggctttctggtggtagaagtaggcagtggaaatcagtaactttcttaacccatctccaacttaatgggctcagattgaccartgctttccattttcaccataaaacctattacttgatgccaatagccccttaaacacccaaagctaatagaataccttttggtgtaccatctgcctctgtt

SEQ ID NO: 386362 - DNA, 201 bp, Homo sapiens
gcttggccttgaaacatccggggagagttgggcaggtaagtaattatgggttttttaaactagcctttcaaagtaaagcatggaatttttagctcacaatkttttaaccagtgggaacattttttctttagaaaaaatgaatgtcattgttttttaacatgtagtataaatcatcaaccaaatacctttttaaaattcttt

SEQ ID NO: 386363 - DNA, 201 bp, Homo sapiens
tgagtactgatgctgattcttgcctttagtactaaggggcaacttgtaacttactgtttgtgtttacacatagatacatccgttctttttctgagaccctrgaaatgacacatgctctctagcacaaagtacctgcttaatggaaaagcagtgatttcttccccaactgcccttttttttttttaaagaataaaaagaaaa

SEQ ID NO: 386364 - DNA, 201 bp, Homo sapiens
ctttctggttaaaattggagactatctacagtcctaagtgttagtatcagaacctgttgtgctccttatttgcagataattattactatgatcttgtccayattctcagatttttggggctttggattttctttgtttatatctcctttattcatgtgatgatattagcctggtttctgcagtgactgttatggaatgagc

SEQ ID NO: 386365 - DNA, 201 bp, Homo sapiens
aactccattttgccccttactgcctctttcttccccacatgtctggcaaagccttcagaggctaggatcatggatcacacagttgggtctcaactcaaacrcttgtctccaggcttaactagcttagagatataaacagatggatggcctgggggacagggtttagtgttgagcaatgcagttttattatcagggactttt

SEQ ID NO: 386366 - DNA, 201 bp, Homo sapiens
ttcatgcagtccacataggtgagagtagataattctagctaaattattattatttttgagacagagtctcactgtgtcacccaggctggagtgcagtggcktgatctcggctcactgcaacctccacctcctgggttcaagcgattctcccatcccagcctctgagtagctgggactacaggtgcacaccaccatgcctag

SEQ ID NO: 386367 - DNA, 201 bp, Homo sapiens
tatttaaaatctgaccacttctcagcacgttaatggccaccaacagttctgtggtgccatcatctctaatctggatcattgctagcctcctagctggtctmttgctttttgccccattccccctttatttgttttgcaaccctgcaactggtgttcaaaccgaactcaaacgatatacctctattttgaaatgttaagcca

SEQ ID NO: 386368 - DNA, 201 bp, Homo sapiens
tccagaataggaaaatccatagagataaggtagattagtggtagaggtaagggaatggggagtgagtgctaatgggcacagggtttcttttagtggtgacraaaattttctggaattagaacattgcacattttgcaaatatattaaaaactactgaattgaaaagttatttaagtggatgaattttctgatatatgaatt

SEQ ID NO: 386369 - DNA, 201 bp, Homo sapiens
ctactcgggaagctgaggcaggagaatcgctcaaacctgggaggtggaggttgctgtgagccaagatcatgccattgcactccagcctgggcaacaagagygaaattctgtctcaaaaaaaaaaaaaaaaagactgatagatggtgtctcttggcagatttcagagagtgcagattagaagcttaattttctggtgggaag

SEQ ID NO: 386370 - DNA, 201 bp, Homo sapiens
aagaagtgcttgaggatcttgatcccgcttgtttaaaattcccattgaaagctctgctcttgtctgcagctgatctggttgcaacacttttggcacctggygagtggagagtttgttcaacttaaattttttagtcagtattgtgtaagctgaagcaattgagatatctattgccttgtgaaaagtttatggggcaatgcc

SEQ ID NO: 386371 - DNA, 201 bp, Homo sapiens
attaggatattgcataacttatttgataaagcaacttcaaggtttgagaggactgactttaattttgaaagctctactgtgagtaaaatgtgattaaacarcattgcatgctacaaagaaatctttcatgaaaggaagtcaattaatgcagcaaacttcattgccatcttattttaaggaattgtcacagccacctcagtc

SEQ ID NO: 386372 - DNA, 201 bp, Homo sapiens
gtcttttggttgcataaatgtcttcttttgagaagtgtctgttcatcttctttgcccactttttgatggggttgtttgtttttttcttgtaaatttgttgsagttcattgtagattctggatattagccctttgtcagatgagtagattgcaaaaattttctcccattctataggttgcctgttcactctgatagtagttt

SEQ ID NO: 386373 - DNA, 201 bp, Homo sapiens
ttcagcctggcacacaggcttcatagtgcatttggggcttagcctctttctgtttggctgtctttagtaggtggctttattcttcatgagaacaagatagytgttccactttcaggcacaaagtctgaagcagatggcagcagccaataaaatttgtgctagtgaagtctgccctttaataagctctgctagaaaactttg

SEQ ID NO: 386374 - DNA, 201 bp, Homo sapiens
tgcttttggtgttttagacatgaagtccttgcccttgcctatgtcctgaatggtattgcctaggttttcttatatggtttttatggtttcaggtctaacakttaagtctttgatccatcttgaattaatttttgtataaggtgtaaggaagggatccagtttcagccttctacatacggctagccagttttcccagcacca

SEQ ID NO: 386375 - DNA, 201 bp, Homo sapiens
cactgtggcattacttgcaatggcaaaaaaccaaaattggtaacaatctaaatgtccatcaataggatactaaataaagaagtgataacatctatgtccargagcatattcattgttgaaaagtctaagctaaatttgtgtgtgctgagatggaggatctctgagttatattgttgaatttaaaaagtcagattgagaata

SEQ ID NO: 386376 - DNA, 201 bp, Homo sapiens
ttctcagattttttttgctagatacttactttgcattgctttgttgttgttttgtgaaagaacagacttctaattttaaaacacaaggtgaagaaatgttaaaaaaaaaaaaaaaaaaaaacaaaggcgtaagatcaagtgatgagttaaaatgccagttctgccatccttgatgtagttctccctttgattgttctcact

SEQ ID NO: 386377 - DNA, 201 bp, Homo sapiens
cttctaaatatggattatttcacttctataagcactatgagtcaggtactccatttgtatttctagacctacctctagggtctagcagaggaaaagacccrcagttaatactgattgtgaaaagaaattccaccacagtagatagtaccacatgaaatcttccatataactaagctaatccccaagctgtaagacactgac

SEQ ID NO: 386378 - DNA, 201 bp, Homo sapiens
ctttttaaaagcaacaaagaaatctcttgtctcatttctagtacagtattaggtacatatatgattgattaaatcaagaagctgaggctttaattgaattmtcagtttggtttggtttattactgctaatctttgtggcagagtcagtaaatttatccgaagattgaatatctctcccatatgtatatgggattatagttt

SEQ ID NO: 386379 - DNA, 201 bp, Homo sapiens
atactttgcatggtagggctggaccataaagtgaccatgcaagctgaaaccatgcagagtgggcttaatggtgtaaatttagcttgttccatgacctttamatatttttgtcaaaacgttaaaaactcttggtggagtacagtgactcacacctgtcatcccagtgctttgggaggccgaggcaagaggatcacttgaggc

SEQ ID NO: 386380 - DNA, 201 bp, Homo sapiens
tctcagattttttttgctagatacttactttgcattgctttgttgttgttttgtgaaagaacagacttctaattttaaaacacaaggtgaagaaatgttaaaaaaaaaaaaaaaaaaaaacaaaggcgtaagatcaagtgatgagttaaaatgccagttctgccatccttgatgtagttctccctttgattgttctcactt

SEQ ID NO: 386381 - DNA, 201 bp, Homo sapiens
tgaggctaggagtttcgagaccagcctggataacatagcaagaccctgtctctctatatgtaaatacaaaagaaaaactggctgggcatggtggcatgcayctgtagtccccgttactcaggatgctgaggtgggaggatagcttgagcccaggagtttgaggttacagtgagccataatcatgctactgcactccagcct

SEQ ID NO: 386382 - DNA, 201 bp, Homo sapiens
ctcagattttttttgctagatacttactttgcattgctttgttgttgttttgtgaaagaacagacttctaattttaaaacacaaggtgaagaaatgttaaaaaaaaaaaaaaaaaaaaacaaaggcgtaagatcaagtgatgagttaaaatgccagttctgccatccttgatgtagttctccctttgattgttctcacttg

SEQ ID NO: 386383 - DNA, 201 bp, Homo sapiens
tgcagttactcagagttaataataccatggtaattgaaatttgaaccatgttgtcgagggactggtgtgatttaaataaactctggtaattgaaatttatrtatattaggcaaagcaaggactatttttctgtcaaataacctggactgtttgtcctgtgatgtttccttcaatctgagttttgctcattgtatacacaca

SEQ ID NO: 386384 - DNA, 201 bp, Homo sapiens
ggtaggctaagatcaaagaaaataaatgcacaaaaaacaacatgttttcctcagattgttccatttgtacttgtctgtgcttgccagaagaggagaccctsacactggaaaaacaaactgagtgaatgcatggcataatctagattccataaatataagtttcaaacagccagccctggatgtgactggaagggactctta

SEQ ID NO: 386385 - DNA, 201 bp, Homo sapiens
ctctttgcttccaggatttgcctcagggtcactttcattgttcacagtcaaaccttcaccaggcagccagttctctcaagtcaggctccttgctctttatkttcccctgcccagcagaggacctgacacattagcagctatttaatgaaggtttatttgaatggatgaatctatatgtatttttccatttcctttttttta

SEQ ID NO: 386386 - DNA, 201 bp, Homo sapiens
tgtcatcttgaagctcttaccctaagtcgaggacacgttttcttgggggtgtctctcaagtaggtcgttagtcttgagttggctgcgttgctggaaagggrttatccagtctcttcttggaggatatcagcttgatttcttgcatcctgggagctggttatttcactgtttagcataaagacttacacctcagctccctgt

SEQ ID NO: 386387 - DNA, 201 bp, Homo sapiens
cagtgtacctgatggcttgactgttgttgcagccattagtacatctcccttcttgccacctttctctccccaaatctcaacaaaaccagttgtttttaatyttaacactacccatcaccctcctacactcactgaaatgtcttcagcccctaacctctagaagagctgaggacatcatggaaggaaggtaagtctttctct

SEQ ID NO: 386388 - DNA, 201 bp, Homo sapiens
ccatttggtatgtgttagaagaacaaaatcatcagtgagagccacaggaattaactggatggagaaatcactctaagctctgctaagtttcacatggcagycttaatggaattggaggaatttaagctggatgttggataaagggtcagacttatatgtctgggtagaaagaaagataaaagtcctgggttcagaggcctg

SEQ ID NO: 386389 - DNA, 201 bp, Homo sapiens
atccccaaaaaactgttgccatgaccgttgctcttgactggtatgtttttgctctgatgggtttacttccatctctttgtagccattgctttgattgtgcyttgtcttctggatcctattagtaaagccatgtttcatctgctgttatagttctttgaagaagtgcttgaggatcttgatcccgcttgtttaaaattccca

SEQ ID NO: 386390 - DNA, 201 bp, Homo sapiens
cacttctggacaccagaatgaggtgttttcttcatttaagtaaaggaggggcgggtgcaaaagttcctatctattaaattgaccaccttcttcctttagarttttgggagggaaggtggctgcttctgtatgagaggttttctgcagtgtggaaatgcaaatgatattactccaaaatatattttgtttatcttcaaaatg

SEQ ID NO: 386391 - DNA, 201 bp, Homo sapiens
gaattctgttcactggatggtacaactctggtttcactcacagcagagaagattaatattgtgaaagaatttggtcttcatatttgggactatacatttgratgacagttgcttttttggctgcctttgaaatagttttggatcaagtagtgacgtggatttaagattctggaccataattttgcatatttcacatggtgt

SEQ ID NO: 386392 - DNA, 201 bp, Homo sapiens
catgcttttactttgtagtaatgggaacatgaaaaatgattttaggcttttccggccatttcttgatgaggtatgtggatctcatcagatatattcatccwggctgaatctagtagaagagagggtccaagatcagacctagcagttcctgaggagcatggaactctctatgtatgcccttgtttttctctgggagttgtt

SEQ ID NO: 386393 - DNA, 201 bp, Homo sapiens
agatcagacctagcagttcctgaggagcatggaactctctatgtatgcccttgtttttctctgggagttgttactctcaaaaatatacttcattttggaawtcagttttgagctacctaaagccatatatggtagcgtggtgtagttagtggaaatcctgtgttttgactacgtggaaacaatttagacttttggattttt

SEQ ID NO: 386394 - DNA, 201 bp, Homo sapiens
ggagttgttactctcaaaaatatacttcattttggaattcagttttgagctacctaaagccatatatggtagcgtggtgtagttagtggaaatcctgtgtkttgactacgtggaaacaatttagacttttggatttttgagtgtaaaatgtcttctagtcctatattaataggaatattacacaaaagggatttaattaga

SEQ ID NO: 386395 - DNA, 201 bp, Homo sapiens
ctgtatgttcatgtgtactcattgtatagctcccatttatgagagagaacatatagtatttgattttctgtttttgagttatttcatttaggataatggcmttgagcttcatccatgttactgtaaaaggtgtgatttttattattttttatggctgcatagtattccatggtttatatatactacatttttttggcttaa

SEQ ID NO: 386396 - DNA, 201 bp, Homo sapiens
tgagataggttgttgtttagacattactttcatatctagatgttaggagaattggcttctattctaaactgaaatcctgagagcctgcctgattgtgtcartttggaaaagagatttccaagtccgaggagattgtccaccagtcccctacccttattttaaaattggtgatgtgcaagttggaataagaacatactccat

SEQ ID NO: 386397 - DNA, 201 bp, Homo sapiens
ttttggtattattttgctgtagttcttttcagctcaggaaatttacttgaagtaagatttattttaaaaaatatattaaatttagctgaacagtatatgtkggaaggatatctgtaaactgatcagtgagccgactggctaggaatagggtttggttgagcatacgaatgtttaaattccatagttctgtttaacataaat

SEQ ID NO: 386398 - DNA, 201 bp, Homo sapiens
tcactctagtagaatggtagtttaactgattccaggttggcagtgtttttttctgtttgcttgttttttttgccatagcatctttaagatattagtcttgyggcttcttttgttgcttggagatatttagttatcagtttaatttaaaaatttttgaatttttttgtaggtgaatttttttccttttctttttggtgagtt

SEQ ID NO: 386399 - DNA, 201 bp, Homo sapiens
tgtcagtgtaaggtgtactgatctttaaacacaaactttagtttgggctcctgtttctcagcattctttgggataataatctgaatggtgtattctcaagtttttttttttttttttttttaagtgtatgaatcaccttggggatcttgttaaaaggcaggctatgatccagtgggtctgggatgagtcttgggattctac

SEQ ID NO: 386400 - DNA, 201 bp, Homo sapiens
gatttttatatataagtgagaacatgctgtagttgtctttttttgtttggcttatttcacttagcctgatatcctctaagttcatccatgttgtcacaaaygacaggattttcttggttttaaaggctaaatcacacacacacacacacacacacacacacacacacacactttcttcattcattcattcattcattgata

SEQ ID NO: 386401 - DNA, 201 bp, Homo sapiens
tgtctttttttgtttggcttatttcacttagcctgatatcctctaagttcatccatgttgtcacaaatgacaggattttcttggttttaaaggctaaatcmcacacacacacacacacacacacacacacacacacactttcttcattcattcattcattcattgatagacacttaggtagtttccatatcttggctattg

SEQ ID NO: 386402 - DNA, 201 bp, Homo sapiens
tctgcctctttctctgcccttattgggctatggcttctttcttcctttcccatcagttcactaggatttggagagggagggagaaaaatacatgtatttartatagtaagtttaagcagaagctcccaccaaatccaatttgattggttttgattttttactactctctttgatagttcttgggttaattttgcatttatt

SEQ ID NO: 386403 - DNA, 201 bp, Homo sapiens
tactcttgtataggtatttgagtaacttttttcagttcttttgggtatatacctagaagtgaaattgctgggtcatatggtaattaattctatgtttaacttttttttttttttttttttttgagacagagttttgcgcttgttgcccaggctggagcaatggcgccgtctcagctcactgcaacctccgcctcccaggtt

SEQ ID NO: 386404 - DNA, 201 bp, Homo sapiens
acacacacacacacacacacacacacacacacacacacacacaaaagaaaagaaaaagtgtttgttcatgtcctttgcctactttttaatgggattttttstttttagtttattgagttaagttccttatagattcaggatattagacatttgtcagaaacatagtttgcaaatattttctcccattgtgtggattgtctg

SEQ ID NO: 386405 - DNA, 201 bp, Homo sapiens
catcttctaaatatggattatttcacttctataagcactatgagtcaggtactccatttgtatttctagacctacctctagggtctagcagaggaaaagamccacagttaatactgattgtgaaaagaaattccaccacagtagatagtaccacatgaaatcttccatataactaagctaatccccaagctgtaagacact

SEQ ID NO: 386406 - DNA, 201 bp, Homo sapiens
accccagaagtccccttttgacaccttctggtctttatcccctccaaagttaaacagtatgctcacttttaacaccatggttagttctgcctggttttatktattatataaatagaatcaggaatacgtatcacttgtgtctaatcttcagtcagcattcaagcttgttagattcaacaatgttacatgcagtaggagttt

SEQ ID NO: 386407 - DNA, 201 bp, Homo sapiens
aaaaacaatttctttgtgacatgctgcttcatggcccttgctggactcaaggccttcgtgggtttgccaccttggttccctctgtagaaggttcttgtgaratgcagaattcactaaatacaactagtgccttttatggcacagggctgtttttggtattattttgctgtagttcttttcagctcaggaaatttacttgaa

SEQ ID NO: 386408 - DNA, 201 bp, Homo sapiens
ggggaagaaagaatccagtagtggctcagtctgagtccgaaagcctcaaaaccagggaagctgacagtgcacccttcagtctgtggccaaaggctcaagakcccccagcaaaccaatggtgtaagtgcaggaatccaaaggctgaagaacctgaagtatgatgtccaagggcaggaggagcaggaggaagcatccagtata

SEQ ID NO: 386409 - DNA, 201 bp, Homo sapiens
gcaaagttgtgcacccatcaccactatctactttcagaacattttcatcacccccaaaagaaatcctatactcatgacagtcactccccattagattctcygctttctctcccaggccttgtaaccactaatctactttctgtatctatggattttcctatactggcatttcatataaatggaatcatagaatatatggcc

SEQ ID NO: 386410 - DNA, 201 bp, Homo sapiens
cctgctttgtctttgctgtgctggcagccagttggatagcacctacccacattgagggtgggtcttcctctcctaatccactgactcaaatgtcagtctcytctggcagcaccctcacagacacacccagaagagcaaggaaaagagagtggctgaagctttgtcaattacacacttcctctgacatggtagatgggatga

SEQ ID NO: 386411 - DNA, 201 bp, Homo sapiens
  misc_feature (1)...(201): n = A,T,C or G
aaaaacttagctcacaccatgtcccacttcccttccttcttgatttttgttggaattctactctaacttgaaataatatgtttaattttattgtattttancacactgtttcttgatatattaactttatataatgtctatcaaacattcctcaccacttcaactatataagttgaggaaagttcatgcactgttttctgt

SEQ ID NO: 386412 - DNA, 201 bp, Homo sapiens
aaatttcattctggaaaggagaagggagtagatgtgtaggtggtggccaccggtatcctactaaacttgacacttgccatcattctgtgatcagtaataargatgaaccaaaaactaaaagagataataataaggatgataacagtagttagcatttgttgagcatgtgccatggtcaggtactgtgctgagtacttttta

SEQ ID NO: 386413 - DNA, 201 bp, Homo sapiens
ctgaggaaccggggcttcctgccaacggcctcagagatctgagtgagccttcaggtgacagcagtctatggcaacatcttgactgaaatctcatcggagascctgctaaagaaccacccaatgaagccaccgtggaatttctgacccacagaaactgagataataagtgtttgctgtcttaaaccaccgcattttgagaga

SEQ ID NO: 386414 - DNA, 201 bp, Homo sapiens
ttttcaagatttctttgctattctagttcctttgcatttacataagtattttaaaaccaacttgtcaatctttacaagaagagaaagactgccggaatttmtattgggattgtgttgaacctgttgatcaatttaataatactgaattttccagttcatgaacatagtatttctttccatttattggatttaaaaaatatc

SEQ ID NO: 386415 - DNA, 201 bp, Homo sapiens
ttgttctctttctaatttcttttgttggatagttagcttattaattttttcttcttttctgatgttaaaattttggacataaatttccctcttagtactayttttactgtatcccacaagttttgaaatgctacatttttgtttttcatttttaagtattttttgtttccattttgatttatttgatccataaattattta

SEQ ID NO: 386416 - DNA, 201 bp, Homo sapiens
tttaattagctatttttatttttactagaaaagttatagattaggtatttagagagttaaaaaaatcatgtaattttcatttaaatctgttcttaccaaarccatgcatcttttatttttggctaacagagagctggccatagaaaatggatgtttttgttttgaaaaatcaaatatagtagataaaaaaatgccaccaca

SEQ ID NO: 386417 - DNA, 201 bp, Homo sapiens
agggataggcaaacaatgacctgtgggccaaatctggttcatggcctgtttttgtatagctcataagctaagaatgattttttagtttttaagacttgttkcaaaaaacattaagaagattttatagaaagaaattacatgtagcattcaaagcctaaaatatttactatttggccttttacaaatttgttttcaactgct

SEQ ID NO: 386418 - DNA, 201 bp, Homo sapiens
cttttttctgaactcagttatttgagaggaataaatcataggtctttgagctccagtgacacacacaggggctatagaggtttgaaatatctttccaggcrctggaaaattccactgcttctaagaatcataccaccagattgtgaactatttgagggcagaagccatgtcatattgaacttaataggttcccaataatta

SEQ ID NO: 386419 - DNA, 201 bp, Homo sapiens
atagacaaatataggaataactatttgtttttcataaataagtttttatgtggttgagaaggttgagaaagttcccttctattccttgttttccaggatcttttttttttttttaaatcacgaatggatgttggatttagttagcctctttatctgtatctactgagatgatcatatggttttttcctttttctcttaata

SEQ ID NO: 386420 - DNA, 201 bp, Homo sapiens
tttcgggatacccacaagtagaagacatgtattatctttgagcatgggacatgctgaattctcagcaacaggaaacatactgggaaagagagagctggggytggagtaagggttaggattaatgtgagatgacctggccgtagagactggcactcctagggccgtgggaatgtccaggattcctgctgctgaatccagggt

SEQ ID NO: 386421 - DNA, 201 bp, Homo sapiens
attgaacttaataggttcccaataattattggatggatgatttaggtgccaaatggagtttctttattgatgatttagcagaaactttaaaagaagttgaytcttgttccagaaaaatgaaatatcacagaaaatattctcatgctcacaaaaaaacaaacaatattggttggaaatgttggataatgaggagcatccaag

SEQ ID NO: 386422 - DNA, 201 bp, Homo sapiens
ttttagctgtctatgctcttataattaagtacagtttcttgtaaagttttctgacagtcagtgagcctctaattcaagtgcttagacaatttgaatataatttttttttttttttttgagacagtgtttcgctttcattgaccaagctggagtacagtggtgctatcttggctcactgtaacctctgccttctggtttcaa

SEQ ID NO: 386423 - DNA, 201 bp, Homo sapiens
caatttggatgtgaacatgtttgcaacacccatcctgccacctcctacccccagatcatgagatgctgacaaagcccagcctacaaatcgctgatttaacrcaaagcaaatgcttgtccctggaatgaaacagctgaaaagaattaattttctctctgcttttagagaaaaaataagccaatgtatttttacctgctgaag

SEQ ID NO: 386424 - DNA, 201 bp, Homo sapiens
tcaaactgttttactgtggccaattagaactcaaatgcagtattttcctccctcttttcagaataggcaaagttctttatcgagtactttgttttgttgcygttaccaaagtatgctgtggtttcaaaataaaaaatgttaaattgaattgatgcttcctggaacattaaaaagataaaaggttattttactgtaagttaa

SEQ ID NO: 386425 - DNA, 201 bp, Homo sapiens
agatcctatttgtcagtggcttggatcctgagcctgcctttccattgttaaacagggaaattagcaagtgttaaccaggaattaaagatgtacggggtggkgggggggctctgctgagacttttattatttcaaaaggatttacatgttaaggctattaaatgcccttgtcccttacactgaagtcatctttttggaatag

SEQ ID NO: 386426 - DNA, 201 bp, Homo sapiens
aacaaattctcctgatgatgtgtgtgcacattaaaatttgagaagccttcttaaaggtgacatcaaacttggcatctggggaactaacacttctctacccragattgcaaagatataaaattatttattagcattataaaacaaatattcctcttaaaagtatatttctctttaagattatccatcttttctggaataaaa

SEQ ID NO: 386427 - DNA, 201 bp, Homo sapiens
cttcctggaacattaaaaagataaaaggttattttactgtaagttaaaattccaaaccgccttttggttttactggtattaaaaatttggcgagcacatayaaacacatgtacttcaaaggagcttcattctcagggcaccagcaatatcacttatttccattacatggcacatgccacagtgagcacttatgactaggca

SEQ ID NO: 386428 - DNA, 201 bp, Homo sapiens
cctatttgtcagtggcttggatcctgagcctgcctttccattgttaaacagggaaattagcaagtgttaaccaggaattaaagatgtacggggtggggggkgggctctgctgagacttttattatttcaaaaggatttacatgttaaggctattaaatgcccttgtcccttacactgaagtcatctttttggaatagtatc

SEQ ID NO: 386429 - DNA, 201 bp, Homo sapiens
gtcagtgtcacagttacttttttcatgatggttagtgactatttgaagcagagagatccaattcatggagaatatcactgcacaccccaaagtggtgttgyttgatctgctctaagctgcttacattcctagactaggaaaaaggggaagggaagaataactagttttgtgctactctgcctagtgtgcaaggggctgtat

SEQ ID NO: 386430 - DNA, 201 bp, Homo sapiens
ggtgttgtttgatctgctctaagctgcttacattcctagactaggaaaaaggggaagggaagaataactagttttgtgctactctgcctagtgtgcaaggsgctgtatagggaatgattactcaacgtatgtacaatgctttaactcattgtaaaagcctttgtctggtcatggtatttttctacattataaagtcctgtg

SEQ ID NO: 386431 - DNA, 201 bp, Homo sapiens
ctattctaatcccacctccccatttaccatgccccttactttgaacaagttacttaacatctttcagctccactttccacctctgtaaaatggggataacyggctaccttacaaacttgtagaagattcaatgtcaaaatgtatttaaattacatattatagcccctagtaataacagctatagctactgttaattaagca

SEQ ID NO: 386432 - DNA, 201 bp, Homo sapiens
taatgaaggattgtacctcactatagaaatcagcttaaagctgaatcttagacatttgacagaagttctttggccattcccattgccaggtagtttttacwggcagtcattctcactcagggtccagcctcctgcatggtgtacacatttcctgacagttcatgacacacatgtactgtaacacaggacatcaacactata

SEQ ID NO: 386433 - DNA, 201 bp, Homo sapiens
caggtatcttctgccagcctttgtcctagactaaccagacaggaagaatatggagagatacctctaatagttgttttgtagatcctttgggattttctacrtagaaaattatatcatctgtgaatagagacagttttacttcttcctttctgttctttatgccttttttccccttgccttattacaatggctgaaatctcc

SEQ ID NO: 386434 - DNA, 201 bp, Homo sapiens
atgaccagtgatgataagcatttttgcatgtttgttggctgcataaatgtcttcttttgagaagtgttcttgcatatcctttgcccactttttgatggggytgtttgtttttttcttgtaaatttgtttgagttcattgtagattctggatattagccctttgtcagatgagtacattgcaaaaattttctcccattctat

SEQ ID NO: 386435 - DNA, 201 bp, Homo sapiens
gtttttcagattttggaataattgcagaatacataccagttgagcatccctaatctgaaaattggaaatctgaaatgccccaatgagcatttcctttgagyatcatgttggcactcaaaaaatttcaaattttggagcatttcagcttttagatttttgggttaggtatgctcaactagtatttagtttgcaaatattttt

SEQ ID NO: 386436 - DNA, 201 bp, Homo sapiens
tgcataaatgtcttcttttgagaagtgttcttgcatatcctttgcccactttttgatggggttgtttgtttttttcttgtaaatttgtttgagttcattgkagattctggatattagccctttgtcagatgagtacattgcaaaaattttctcccattctataggttgcctgttcactctgatggtagtttcttttgctgt

SEQ ID NO: 386437 - DNA, 201 bp, Homo sapiens
ttcctgagtagctgggattacaggtgagcaccaccatgcccagctaatttttgtatttttagtagagatgggttttcaccatgttggccaggctggtctcraatgcctgaccttgtaatcctcccgccttggcctcccaaagtgctgggattacaggtgtgagctgctgtgcctggtcaaaaatttttacagttgtgtttt

SEQ ID NO: 386438 - DNA, 201 bp, Homo sapiens
ttctttttttaatcatgaaagcatgttgaattttctcaagtgcttcttctgtctctcttgagatgatcatatggtttttgttcttcattctattaatgtgktgtgtcccatttataaatttgcatatgggagccatccttacattctggagacaaatctcacttggtcatggtgaatgaacattttaatgtgctattgaat

SEQ ID NO: 386439 - DNA, 201 bp, Homo sapiens
gtaaccaaaatggcatgggactggcataaaaacagacacatagaccaatggaacagagtatagaacccagaaacaaatccacacacctacaatgaactcaygttccacaaagttgtcaagaacatacgctctggaaaactctcttcaacaaatggtgctgggaaaactggatatccatatgcagaagaatgaaactagact

SEQ ID NO: 386440 - DNA, 201 bp, Homo sapiens
tattaaaaatttggcgagcacatataaacacatgtacttcaaaggagcttcattctcagggcaccagcaatatcacttatttccattacatggcacatgcyacagtgagcacttatgactaggcatttctgctgggctcacatgatcataaacataaccatcaaagagaacacaaattagcttttaggctggtagtgggaa

SEQ ID NO: 386441 - DNA, 201 bp, Homo sapiens
aatattttacatacaaatcctttgtaagatacatgtattatggatatcttctcccagtctatggtttgcctttgcaatctcttaatggtgttttttgatgmatagaagtttctgattttaatgaagtttaagttagcaaccttttcttttgtgattaactctttgtattttaagtttttgcctgttcaaagttatgaagat

SEQ ID NO: 386442 - DNA, 201 bp, Homo sapiens
tgttgaattttctcaagtgcttcttctgtctctcttgagatgatcatatggtttttgttcttcattctattaatgtggtgtgtcccatttataaatttgcwtatgggagccatccttacattctggagacaaatctcacttggtcatggtgaatgaacattttaatgtgctattgaattcagtttgctagtattttattga

SEQ ID NO: 386443 - DNA, 201 bp, Homo sapiens
tgcaagtgcaggcaaccaaagcaaaaatggacagaagagattatatcaagttaaaaagcttctccatagcaaagggaacaacaaagtgaagagacaacccraagaatgggagaagatatttgcaaactatccatctgacaagggattaataaccagaatatataaggagcccaaacaaccctataggaaaaaatctaataa

SEQ ID NO: 386444 - DNA, 201 bp, Homo sapiens
aaattgcgccaagcatagtactgaagtgctgtctggtgtttcagagtgcgagaagatggtagtgtctcatggggaaaaatgtgcattttggataagcttcmtttaggcagaaattatagtgctattagtggtgaattcattgttaatgaatcaaccatatgatacacccagataaaagaagaggaaactcactgatctgta

SEQ ID NO: 386445 - DNA, 201 bp, Homo sapiens
atatgggagccatccttacattctggagacaaatctcacttggtcatggtgaatgaacattttaatgtgctattgaattcagtttgctagtattttattgrgaatttttgcatctgtgtcatcaaggatattggacagtaattttcttttcttacaatgcctttgcttagctttggtatgaaggcaatgctgctcttgtaa

SEQ ID NO: 386446 - DNA, 201 bp, Homo sapiens
ttttcttggatgagagattcttgattactgattcaatttccttacttcttattggtctgttgagattttctttttcttcatgattcaatgttggtagattrtatatttctaggaatttatgcatttctactaggttatctaatttgttagcatataattgttcatggtagtgtcttgtaatcttttggatttctgtggtat

SEQ ID NO: 386447 - DNA, 201 bp, Homo sapiens
atcgaaaaagaatttccaagatatattcaagttgttttattgaaacaactgcaaaactgagtgggaaactagaagacatttctgacatcttttttgccaattttttttttttttttataggaatcaagaacccagtctcggttgccaacagactcttatgtgaagggcagaagggcaagctctcggctggcagaattcctc

SEQ ID NO: 386448 - DNA, 201 bp, Homo sapiens
ctgatgacactaagaaacttgcttttgctattttctgaaagttttaagattaatggaatatctgaaaacatagttttgatagtattaaaagcatcgtgtgsgtatgtcttatacaacatctggtattatcacctagttgttttacatcattattaaaccaggctttattagagggtatgatttctgttgaaaactaataat

SEQ ID NO: 386449 - DNA, 201 bp, Homo sapiens
tttgggaggctgaggcgggcagatcacgagatcaggagatcgagaccacggtgaaaccccgtctctactaaaagtacaaaaaattagccgggtatggtggygggcacctgtagtcccagctagaggttgaggcaggagaatggtgtgaacccaggaggcggagcttgcagtgagctgagatcgcgccacttcactctagcc

SEQ ID NO: 386450 - DNA, 201 bp, Homo sapiens
aggataaaataaagtaaaacacgtaaaagagagttaccatgagagagagcatgtaggtcaacagaaactttaaccagactaccaaagactttatttatttrtttgtttgtttatttatttatttgagatggagtttcactcctgttgcccaggctggagtacagtggcgtgatctcggcacactgcagtctccgcctcctg

SEQ ID NO: 386451 - DNA, 201 bp, Homo sapiens
taagattaatggaatatctgaaaacatagttttgatagtattaaaagcatcgtgtgcgtatgtcttatacaacatctggtattatcacctagttgttttayatcattattaaaccaggctttattagagggtatgatttctgttgaaaactaataattacatatgatatttctgaaatattatatctattttcttttttcc

SEQ ID NO: 386452 - DNA, 201 bp, Homo sapiens
ttccatgtattgtgacatttggccctttacatccctcctctgatccagcatttcagccattttagaaaataaccagtatttcaggtcaccaacacatgatwccacttaacaaatctagaaatggagatggtctaatttatgtaaaatttgcttgtccccagttcacttgcacatcttcttcactttgcccctttcccccgt

SEQ ID NO: 386453 - DNA, 201 bp, Homo sapiens
aggtgcgtgccatcacacccggcatatttttttatagttttggtaaagacagggtttcaccatgttggccaggctggtctcaaactcctgacctcaagtgwtccacttgcctcggcctcccaaagtgttgggattgcaggtgtgagccactgcgtccagctgagagttttaattacctcacctccgtggtggtttcagtag

SEQ ID NO: 386454 - DNA, 201 bp, Homo sapiens
gatctccagaatgggaatgttggtcacacttgagtagttcattgtgagcggaccccagcccaggcctcttgtgcagctgcaggaataggccatattctctyccctgggctctatacttctggctggaattgtctgtgtgcctcagggggatagaagaaacttctaaggcctgccagtccttgaaatgcctagtggtcatgg

SEQ ID NO: 386455 - DNA, 201 bp, Homo sapiens
cagggttcaagtgattctcctgcctcagcctcccaagtagctgagattacaagcatccgccaccatgcccagctaattttttatatttttggtagagatgrggtttcaccatgttggccaggctggtctcaaactcctgacctcaggtgatcccccaacctcggcctcccaaagtgctgggattacaggcatgagccacca

SEQ ID NO: 386456 - DNA, 201 bp, Homo sapiens
tttaatattggtggcacatgaaaaccttgatgcataatgtttacaaattaggctgtgaacataatttagtatggccccgtgtctatggaaaattgtagtayttgaacaaagcaaagactaattcatagttgcattttgattgtctcaaagaaatcacagttggaatcatgtattataagagttttctttgtggtcaatatg

SEQ ID NO: 386457 - DNA, 201 bp, Homo sapiens
agtgttgctttttgttttgtaaccatttagatctgctttaatgtaaacgaagatgggtataacacaaggaaaatgctgtcctttaatctagagaagtttgwcactctattattttgtttaatatcttgacaatttttatttaatgtttagtatgctttaggcactgttctaaatgcttgagatatgttgatgaagaaacga

SEQ ID NO: 386458 - DNA, 201 bp, Homo sapiens
cagcccaggcctcttgtgcagctgcaggaataggccatattctcttccctgggctctatacttctggctggaattgtctgtgtgcctcagggggatagaakaaacttctaaggcctgccagtccttgaaatgcctagtggtcatggagatggtgtggcttcctgatggcatatgggcatacctaggatggaaggggacatt

SEQ ID NO: 386459 - DNA, 201 bp, Homo sapiens
gcatgtccgaatatgagctcttgcctaaccctaaacgtgttctcttgaaatattttccccacagcaagtgtcaattccagtggctcaagtcaaaattttgrgttcatccttgaccctcttttctatctcacgcacatccaattcaccaacaaactttgtttactctcctctctgaatatatttaaaatctgaccacttctc

SEQ ID NO: 386460 - DNA, 201 bp, Homo sapiens
ttcaatgttcttaaatttgttaagagtttttttgtggcctagcacatcctggaaagtatcctgtgtgcacttgagaaaatcctgcagagttgagctggctmtctgtatatttggctgctgttgggtggaatgttctgtatgtctgttaggtccattagatctaacatatagttcaaatttaatgtttccttattttctatt

SEQ ID NO: 386461 - DNA, 201 bp, Homo sapiens
ggttgtaggtgtatggctttatttctgagttttctattctgttccactggtctatgtgtctgtttttttaccagtaccatactgttttggttattgtagcyttgtagtataatttaaagtcagatagtgtgatgcctccagctttcttctttttgcttaggattgccctgtctctttgggctcttttttgtttccatatgc

SEQ ID NO: 386462 - DNA, 201 bp, Homo sapiens
tcaactaatttcttgtcctcatctacagcatttattctttttccactgcttccttaggaatagaagagaccatggctctgttttctcataggaaaggcttrtcttttttggaattaggtttattgagatatttgtgcattttcgttaaaaaacccatgactgtagcttatctggcttgctattgttattacagtgggagtg

SEQ ID NO: 386463 - DNA, 201 bp, Homo sapiens
gattctcctgcctcagcctcccaagtagctgagattacaagcatccgccaccatgcccagctaattttttatatttttggtagagatggggtttcaccatrttggccaggctggtctcaaactcctgacctcaggtgatcccccaacctcggcctcccaaagtgctgggattacaggcatgagccaccatgcctggcctac

SEQ ID NO: 386464 - DNA, 201 bp, Homo sapiens
tacatatgtatacatgtgccatgttggtttgctgcacccattaactcgtcatttacatgaggtatttctcctaatgctatccctcccccatccccccaccycacaacaggccccggtgtgtgatgttccacttcctgtgtccatgtgttctcattgttcagttcccacctatgagtgagaacatgcggtgtttggtttttt

SEQ ID NO: 386465 - DNA, 201 bp, Homo sapiens
agtcactgtaggtctgggaaagaaggttaatgagtatctggagaatatactagaatggcaactatgaatgcaaaactgaataaaattaagtttctcttttyatcttagaataactttaattttcctaagtcatacttatatatcatgtttactatttcattctattttcccctagtgttgaatcctacttttaaggggttt

SEQ ID NO: 386466 - DNA, 201 bp, Homo sapiens
tgcatagtattccatggtgtatatgtgccacattttcttaatccagtctatcattgatggatgtttgggttggttccaaatctttgctattgtgaatagtkctgaaataaacgtatgtgtgcatgtgtctttatagtagcatgtttctataatcctttggtttatatacccagtaatgggatggctgggtcaaatggtctt

SEQ ID NO: 386467 - DNA, 201 bp, Homo sapiens
gtttattgaagccaatattctattttagagatttgtgttatgtttttgacaagtaactgtactgtaattatgtggctttcaattaaaaaatgtgaaaactrttgtgatgtcatttttctgcttaattatgttgtatgtgcccttgtaaattaggcagattagtaatagaaaggaggtgagtgcagatgtgcagtgcctttt

SEQ ID NO: 386468 - DNA, 201 bp, Homo sapiens
gtgtatatgtgccacattttcttaatccagtctatcattgatggatgtttgggttggttccaaatctttgctattgtgaatagttctgaaataaacgtatrtgtgcatgtgtctttatagtagcatgtttctataatcctttggtttatatacccagtaatgggatggctgggtcaaatggtctttctagttctagatcct

SEQ ID NO: 386469 - DNA, 201 bp, Homo sapiens
ccacatcctctccaacaactgttgtttcctgactttttaatgatcgctgttctaactggtgtgagatggtatctcattgtggttttgatttgtatttctckgatgagcagtgatgatgagcattttttcatgtgtctgctggctgcataaacgtcttcttttgaaaagtgtctgttcatattctttgcccactttttgatg

SEQ ID NO: 386470 - DNA, 201 bp, Homo sapiens
accccttgcgcttcctggatgaggcgatgccgcaccctgctttggctctccctccgtggtctgcacccactttctgagtagtcccaatgagatgaaccagkttcctcagttggaaatgcagaaatcatccgtctttgcatagatcacgctgggagctgcataccagagctgttcctgtttggccatcttggaacggagcta

SEQ ID NO: 386471 - DNA, 201 bp, Homo sapiens
caggttcctcagttggaaatgcagaaatcatccgtctttgcatagatcacgctgggagctgcataccagagctgttcctgtttggccatcttggaacggasctatactcagtaaatacagttttattctaagatgtgggatggattggaggaaggagaccttggagatgaggtactaatttgtaggcagtggcaattagag

SEQ ID NO: 386472 - DNA, 201 bp, Homo sapiens
catcttggaacggagctatactcagtaaatacagttttattctaagatgtgggatggattggaggaaggagaccttggagatgaggtactaatttgtaggsagtggcaattagagaaatagaactagattggatagaaaggagggtcatgtactaaagactctcaaagagaatctctggggctttatagctgataaaatgt

SEQ ID NO: 386473 - DNA, 201 bp, Homo sapiens
tatttcacttagaataatgtccttaaggttcatccaagttgtagcatgtgtcagaatttcattcctttttatttctaaatatcttattgcatgtatatacyacattttgtttatccattcatctgtcaatggacatttgggttgttccttatattagtgtgctggggctaccataacaaagtaccatagactgggtggctc

SEQ ID NO: 386474 - DNA, 201 bp, Homo sapiens
ccaaaacatatattttcttattattcaataaggattcgtgcatacactatgtttcaggccaggcactagaaatacaacagtgaataataaaacaaagtctrtattgttatggaagttacattttatcaagtcaggcagacaataaataaataggtaaaacttagtctatcatatggtaataaaagctacagagaaaaatga

SEQ ID NO: 386475 - DNA, 201 bp, Homo sapiens
ttgggaagcacagtcttaggtaattttgaataaaactgtaagttaacttgctggctaaaataaattaaataaataaatttaacaagtaatacaagttgatrtagttccttcttttcctgttattatttcttagtaatagtgtcaaatgaaaaccttgaagagtcccaaattgtatattgtctatttgtcttttgttaccta

SEQ ID NO: 386476 - DNA, 201 bp, Homo sapiens
cttgaagagtcccaaattgtatattgtctatttgtcttttgttacctaactcatttgaggtggccttcctgtattttgcccctttcttcttttatctgctwctttcatctgataatttttctagttggtggtaagacagcttttggacaatttctgtattgatattccttaaattctacccagatgtagagaataaaatat

SEQ ID NO: 386477 - DNA, 201 bp, Homo sapiens
caatttctgtattgatattccttaaattctacccagatgtagagaataaaatatgaatactattttctccttcctccttcagagcagtgtgtctttccctrccctcaaaacttcccttgatactgtattgaatagagaaagggataagcaatgactggtgagcagatttaagacttttttctatggtactttatttggcct

SEQ ID NO: 386478 - DNA, 201 bp, Homo sapiens
tactgaatgttgtttttaaactttgcgtacagctttaaagctgatgaaatgatttatattgcctctcctttgtacagaggaatttattgagaaataacatyggctcaaacttccttttcagcttttaaagagatcaaaatgaccccaataaattacttctaaattttaagtcattaagaaaattattaattaaatatttaa

SEQ ID NO: 386479 - DNA, 201 bp, Homo sapiens
aaaactattaaagctaagccatttagtttttcaaatgaggaagctgaagcatagatgtcataagtgactcatttcaggttctacagccagagctggttctyctcatatgtgatccttctctctgatggaacaggaatccagatagaagattgacaagagcatcaactgaacattacaaacagtgttgcttcttttatggct

SEQ ID NO: 386480 - DNA, 201 bp, Homo sapiens
caagctggggaagaaagaatccagtagtggctcagtctgagtccgaaagcctcaaaaccagggaagctgacagtgcacccttcagtctgtggccaaaggcycaagagcccccagcaaaccaatggtgtaagtgcaggaatccaaaggctgaagaacctgaagtatgatgtccaagggcaggaggagcaggaggaagcatcc

SEQ ID NO: 386481 - DNA, 201 bp, Homo sapiens
cagtctcctctggcagcaccctcacagacacacccagaagagcaaggaaaagagagtggctgaagctttgtcaattacacacttcctctgacatggtagaygggatgaagcgttttcactactcatgtttgttgaaggtttttttgtttgtttgtttttttggttttagtttttttcaaaaaggttttaatctgtgaaagt

SEQ ID NO: 386482 - DNA, 201 bp, Homo sapiens
tggggaaaataaaaggaataaataagaaaagtcaagcatgatccacagtctctagataatcaagttaaaatgtttcctgccaggctaagagaaatctttaycatactatttgttttgttttgataatgataggtttacctaggtggtcatttttaccctatgtaaaggcttagcttgatttgaagcagtagccttcattta

SEQ ID NO: 386483 - DNA, 201 bp, Homo sapiens
ggtcaactccatgctaaatgctttatgtgatttttctcattttgtcctcaaaacaaccctgtgaggtagttggtatcccattccccattttacagctatgraaactgagccctaaataacccaaagtcaccctgctggattcaaacatgagtctcactgcagaacagatactaacccttaccctataggccttaaggtagg

SEQ ID NO: 386484 - DNA, 201 bp, Homo sapiens
cttaagagtgacattgcagccttatcacagatgattaatgactatttaagaaactgtatacttcctgaatctaaaataaaagttgaaaaataaaataaaattaaaaagaaaaaaagcattaaaaagttgtgagtttatctatatgtgtatatacagaaaaacatctataaaatatttttcttcatgtaaatttaggttaat

SEQ ID NO: 386485 - DNA, 201 bp, Homo sapiens
ccttgtaaattaggcagattagtaatagaaaggaggtgagtgcagatgtgcagtgcctttttgtgaaaatattttaaataataaaaatatcttgagctcayagtgggcagtgcaagaaaaagtaaagtttccatttttggacagaatattttatgtcagattaacaaatgctctaatgaacaaatattaacattggttcaa

SEQ ID NO: 386486 - DNA, 201 bp, Homo sapiens
ctctgaaactcaggttcttcatctgtaaatgataataaaatgtctcatggcaggtggttctgaaaattaaacttctctcagtgtattatatttctccctctttttttttttttagcttatcagtatgagagtttatatttgtttactctagctattcacatcctaactacatagtatactgtgattccatttcatttcttg

SEQ ID NO: 386487 - DNA, 201 bp, Homo sapiens
gtctagcttctttctgaccttgctttctgtagtcccatgataataaataatgtgacttccaattagctgcagttatgaaaattctgctttttagatcaatmctataccaaaacttagaaggaattattaatcctcttgtggcttctatgttgcagatctctattattgtccatattctgtaattattttgtcatggaaaac

SEQ ID NO: 386488 - DNA, 201 bp, Homo sapiens
gtgattccatttcatttcttgtacaagtcttattatttttttggtaatagtcactctttcatctccaaactttcctcaaaatctgaaacattttctctcartaatttcaaaccaacatgtattcagtcagtttatttttccctccccttagaattacctttcctggcctcttctggcttcatgctccaatttggacagttt

SEQ ID NO: 386489 - DNA, 201 bp, Homo sapiens
tttctaaaactcctgttattcacatattggataattctggcctagctttatgattttcttatatttttgactcatttttcatctttttaatttttttgttsttgttttgttttacttttcttctgctcaggacacttgcccaaattttccctgtgttactcttttgtttcttttttcttttttaattatactttaagtttt

SEQ ID NO: 386490 - DNA, 201 bp, Homo sapiens
tttccctgtgttactcttttgtttcttttttcttttttaattatactttaagttttagggtacatgtgcacaacatgcaggttagttacatatgtatacaygtgccatgttggtgtgctacacccagtaactcgtcacttaacactaggtatatctccaaatgctatccctccccactcccccgaccccacaacaggcccc

SEQ ID NO: 386491 - DNA, 201 bp, Homo sapiens
caggttagttacatatgtatacatgtgccatgttggtgtgctacacccagtaactcgtcacttaacactaggtatatctccaaatgctatccctccccactcccccgaccccacaacaggccccggtgtgtgatgttccccttcctgtgtccatgtgttctcattgttcaattcccatctatgagtgagaacatgtggtgt

SEQ ID NO: 386492 - DNA, 201 bp, Homo sapiens
tgggtcaaatggtgtttctagttctagatccctgaggaatcgccacactgacttccacaatggttgaactagtttacagtcccaccaacagtgtaaaagtsttcctatttctccacatcccctccagcaccagtcgtttcctaactttttaatgatcgccattctaactgatgtgagatggtgtctcattgtggttttgat

SEQ ID NO: 386493 - DNA, 201 bp, Homo sapiens
tttacagtcccaccaacagtgtaaaagtcttcctatttctccacatcccctccagcaccagtcgtttcctaactttttaatgatcgccattctaactgatrtgagatggtgtctcattgtggttttgatatgcatttctctaatggccagtgatgatgagcattttttcatgtgtcttttggctgcataaatgtcttcttt

SEQ ID NO: 386494 - DNA, 201 bp, Homo sapiens
gataggttttcagatggagttcagttggggtagtattgtaatagcttgggtcaatggaaagatgtaagaagattggattctagtatttgctgtacttagaraaatataagtagcagtattgagtcctttcagaatactgaaaagtgctgagaaaaattctggagagctgtattaacaatgtgttatatttaatttgagaat

SEQ ID NO: 386495 - DNA, 201 bp, Homo sapiens
gagttgcatccagccaagtatccatgttcttcttgtgaagaggcagagaaaatcacctctcccaagaatttccaccttctgaacaagggaaatgtatcctkaagagctgtacgcagatgggaggcaacttgtttgcttgttctgctgctagagcattgatttaattagaagacaggctgtgggtggccatgtgcagacaaa

SEQ ID NO: 386496 - DNA, 201 bp, Homo sapiens
acaagggaaaagggtgtttcaaggagaagcaggtgatcaactttatcagatgctgctgctgggccttgtgaaattagatttgaggacaggctattggattyggcattggaagtcatttcttattttgataaagaggggttttggtggagaggtgaaagcaaaaagctgattatagagggcttaaagagaaaatggaaggaa

SEQ ID NO: 386497 - DNA, 201 bp, Homo sapiens
catgatttagaatattaattttacaatttgaaatacacactatattttttgttgtaaaaaatttcaggtaatataaataaaatttacctttgatcctccaraagatcttttctttctcatttcctttccccgtggggtttaaccagtaaaaatccagtgcttttatctatatttttatgtaacagaaacacagttttattt

SEQ ID NO: 386498 - DNA, 201 bp, Homo sapiens
gcctaaaatatttactatttggccttttacaaatttgttttcaactgctgtccaattattttcacttcttgaaataatttttttgttttttgctattgctyattcttccttttggttgtatgtatatgtgtgttgaagttgggggttggaattttttattggtagttcatcttcagtgtgggttttgaaagtttcgggata

SEQ ID NO: 386499 - DNA, 201 bp, Homo sapiens
actgtggccagagaatatactatgtatgataccaatcccttgaagcttttagagacttgctgtatggcccagattatggtgtgttttggtaaatttccacrtgaacttcaaaagaatatgtattctggagttgttgagtacagtgctctgtgtgtgtcacttaggtcaatttggttatttatttgttctgatcttttatat

SEQ ID NO: 386500 - DNA, 201 bp, Homo sapiens
gttgtttggttggcaagaaaaatagcataaaccatgtaaaaagtattttgaagttcacctacgaatctaccataatcccattgaccccactcctcatggcrtttaccaagcagattctcaaatttatatggaggaacaagtgtacaagaatagtcaagacagttgtaaaacagatgaaagagttggatgtacttaatggat

SEQ ID NO: 386501 - DNA, 201 bp, Homo sapiens
ataagttatgaatttattatgtgttttaatccattcatttgtcatacttattgatgctaaatttttctttttttagaacttggtattttttacttctaggmatcttgtcaggtcttttataatccatgttttctgctaagatgtgagaacatacacatactcttacttggaaaagtaaggacaaaaagagggtatagtgaa

SEQ ID NO: 386502 - DNA, 201 bp, Homo sapiens
gccacaaagttacacattgacttatgtatctagatcttccttgaagtgtaggtattcattcacaaagagatatttagatcctgaaggatgtttgcatttaygctttaccaaaaatacagggaagccatttctgggaaatatctggcaatttctaaaaaaaattcatccttttttttctcttttagaaggcctgtgtttatt

SEQ ID NO: 386503 - DNA, 201 bp, Homo sapiens
ttctttttctttcctctcattttccagtcttgctgaataattttcttaaaacatccatttccaacactggagaggaatgtaatcttatttctaattgactrtttataatatgacatatttctaatctgctatgactaatgtaatagtcaaaggcagtgttttacctattcagcatatttgtttctggttgaagagggcatt

SEQ ID NO: 386504 - DNA, 201 bp, Homo sapiens
tcttgctgaataattttcttaaaacatccatttccaacactggagaggaatgtaatcttatttctaattgactatttataatatgacatatttctaatctrctatgactaatgtaatagtcaaaggcagtgttttacctattcagcatatttgtttctggttgaagagggcatttttttccttgaaggtcctaatggctcc

SEQ ID NO: 386505 - DNA, 201 bp, Homo sapiens
tcatggaagtcatttcatccctcacggaattattttcccagctaactactctcttaaatgatgcataagggtgttctaatgctattgaaataagcagggtkttcggtgctgcttttcctcaactgttggtttctttggatttctaggatgtggagagcatcttgtgcgcaccatactggctagagaatgttcacatgcttt

SEQ ID NO: 386506 - DNA, 201 bp, Homo sapiens
ttttaaaaggagcactggctacttactggacatgattattaattacgcaaaatgagttacatcagaagatcagatgaccgcttaaaaagtttatgtatatkattttaaattatttaaatttattattatttttttttagagaaaggtctcactctgttgcccaggctggagcgcagtggtgcaatcatagcttactgcagc

SEQ ID NO: 386507 - DNA, 201 bp, Homo sapiens
aatgcaatccctatcaaaatacaaatgacattcttctgaaatagaaaaaacaaccctaaaatttatgtggactcgcaaaagacccagaatagccaaagctrtcctaagcaaaaagaacaaaaatggaggaatcacattatataacttcagattatattatagtaaccaaaatggcatgggactggcataaaaacagacaca

SEQ ID NO: 386508 - DNA, 201 bp, Homo sapiens
caagtgcctttcctgttaatgcaggtaaaactgcctgtttacaaatgaacttctagaccatgtcttccccacaccgccaagaaaaagaatggaccctcatcacaagaattcctatctattttgtagcacatgtttattttggatgtgtgattttccaggggggctaggggacttacagaatggaaatatgaattgccttgt

SEQ ID NO: 386509 - DNA, 201 bp, Homo sapiens
aggaagggatccagtttcagctttctacatatggctagccagttttcccagcaccatttattaaatagggaatcatttccccatttcttgtttttgtcagrtttgtcaaagatcagatggttgtagatatgtggcattatttctgagggctctgttctgttccattggtctatatctctgttttggtaccagtaccatgct

SEQ ID NO: 386510 - DNA, 201 bp, Homo sapiens
aagtgcctttcctgttaatgcaggtaaaactgcctgtttacaaatgaacttctagaccatgtcttccccacaccgccaagaaaaagaatggaccctcatcacaagaattcctatctattttgtagcacatgtttattttggatgtgtgattttccaggggggctaggggacttacagaatggaaatatgaattgccttgtg

SEQ ID NO: 386511 - DNA, 201 bp, Homo sapiens
tacatatggctagccagttttcccagcaccatttattaaatagggaatcatttccccatttcttgtttttgtcaggtttgtcaaagatcagatggttgtasatatgtggcattatttctgagggctctgttctgttccattggtctatatctctgttttggtaccagtaccatgctgttttgattactgtagccttgtagt

SEQ ID NO: 386512 - DNA, 201 bp, Homo sapiens
agtcattggtagcttgatggggatggcattgaatctataaattaccttgggcagtatggccattttcatgatattgattcttcctacccatgagcgtggartgttcttccatttgtttgtatcctcttttatgtcattgagcagtggtttgtagttctccttgaagaggtccttcacgtcccttgtaagttgtattcctag

SEQ ID NO: 386513 - DNA, 201 bp, Homo sapiens
aacagtgagaacacatcgacacagagaggggaacatcacacaccagagcttgtcagggggtgcggggctaggtgacggatagcattaggagaaatacttartgtagatgacaggttgatgggtgtagcaagccctccatggcacgtgtatacctatgtaacagacctgcacgttctgcacatgtatcccagaacttaaagt

SEQ ID NO: 386514 - DNA, 201 bp, Homo sapiens
ggcgttgatgcttatgaagcttatctactaaaacctggcgaacataggctaatgtcaacttatagatgctaccaattatgtgaactttctataaaagttaygaatgtgaagtatttggtaagaaaataaattcaaacagtatagaaggataggaaacaaagtaaattcaaacagtatagaaggacaggaatcaaagatgtg

SEQ ID NO: 386515 - DNA, 201 bp, Homo sapiens
tgttacaggtgctttgtccatagtttgttgaatgctcctcccttcaagaggtggaactcaatttccctgcccttgactgtgagccaaacactagagactcrcttccaaccaataaatttatggcagaagtgaaagtgtctgatttctgagactaggtcaaaaaggcattgtggcttcctccttgggctctctgttgaatca

SEQ ID NO: 386516 - DNA, 201 bp, Homo sapiens
gttctagtgattatcttgccaagaaatattattttttggctcacaaagttttccatctgaaatatagaatacaaaaatttatgaatagaattctaatgactatgtaattcttattacactcaggaaattttatagtcagtttcatctgctcaaaggataatagagtttaccatgaaataaatcctaaaaatgtgttggttg

SEQ ID NO: 386517 - DNA, 201 bp, Homo sapiens
ttctagtgattatcttgccaagaaatattattttttggctcacaaagttttccatctgaaatatagaatacaaaaatttatgaatagaattctaatgactatgtaattcttattacactcaggaaattttatagtcagtttcatctgctcaaaggataatagagtttaccatgaaataaatcctaaaaatgtgttggttga

SEQ ID NO: 386518 - DNA, 201 bp, Homo sapiens
atggtagtgtctcatggggaaaaatgtgcattttggataagcttcatttaggcagaaattatagtgctattagtggtgaattcattgttaatgaatcaacmatatgatacacccagataaaagaagaggaaactcactgatctgtatgtgaggctgctccagaaggtgctaaagtaacatctatatatgcagcaatggaaa

SEQ ID NO: 386519 - DNA, 201 bp, Homo sapiens
aatggcacacagtgatgatacccataagctgggctggaggtggattcttcaggaacaggtagtcctctgggtttatagacagagacctggaccagtggttkaatgcccagctcccacttcttccttgtgtttctgtaggctcatttacctccatatgcctaaggttctttctttgtttcctttggtttctcttctataaag

SEQ ID NO: 386520 - DNA, 201 bp, Homo sapiens
ccacacgacggagagcatgtgtgtcggatatatgtcagcccaggatgggaaagccaaggtaagtgggaaaaaacggtcataacctgaaaaccttgtagccrtcgcataaacctctaaccagctaagttgatgtggatgaattttttcagctttttttgggcagtagctttgtggtcttcataagcatccgaataagaacag

SEQ ID NO: 386521 - DNA, 201 bp, Homo sapiens
ttggtgaagcctctttggggacatgagctatttttagggcttttggcaggaaaagagcttttgaaaacggagataaggcatggtattaaaaaggcttacaytggagtaagaagtcataaaacgccatacagttagggcaatagttttgttttttactaggacagcatcagtttatatggagtatttatataacataagcaa

SEQ ID NO: 386522 - DNA, 201 bp, Homo sapiens
ttgttttttactaggacagcatcagtttatatggagtatttatataacataagcaaggtctcttgatattttaataattaactggattttattttctactwtaggtgcaggttatcattctgaatccaaagccaaggagtataaacatgtatgcaaacgagcttgtcagaaggtatgaacacaatgtgtatgatctgtgca

SEQ ID NO: 386523 - DNA, 201 bp, Homo sapiens
caggtctagagaggtagacaagtagaagagagtggggctgactggccatgtgtgttccattgtaagatattttaaaaaaaaatgtgtaacaccaaactacrctttgctggtcaaaccaaacgctggtttttgcagcttgtaattcctggtgggggaatgtcagttgataaagttaaactgtctgcagaatttagcaaagta

SEQ ID NO: 386524 - DNA, 201 bp, Homo sapiens
tgtgcatcaatttatgatcatgctgggtggagtggctcttgcctataatcccagcactttgggaggctgaggcgggaggatcacttgaggccagaagttcragaccagcctgggcaacatagtgaggccctgtctctgttaaaaaaaaaaaaaaaaagatcatatggctttttcccttcatcctgttaatgttggtgtata

SEQ ID NO: 386525 - DNA, 201 bp, Homo sapiens
atttttattagatatatttgatctgtatttatatttcataaaaatttactgtgaaatagtaaatttacataccaagttattacaggtatacttaaatcttyctaatagtttaatatattagaaaattaaaattttataaaattaaaaattcagctttccatttgtccttgactcattttaatttctgaatagctacatttg

SEQ ID NO: 386526 - DNA, 201 bp, Homo sapiens
tattaagaaaattagccttttgtttatgctatgaattgcaaatatttccccaaatttgtcattcatctcttgactttcatttttctccaaatggcaaaaacaaacactctaaacaggccaggtgcggtggcccattcctgtaatcccagcactttgaaaagctgaggtgggcggatcacctgaggtcaagagttcgaaacc

SEQ ID NO: 386527 - DNA, 201 bp, Homo sapiens
taaacaggccaggtgcggtggcccattcctgtaatcccagcactttgaaaagctgaggtgggcggatcacctgaggtcaagagttcgaaaccagcctggcygacatggtgaaaccctgtctctactaaaaatacaaaaattagccaggcaggagaatcgagaatcgcttgaacctgggaggtggagggtgtagtgagctga

SEQ ID NO: 386528 - DNA, 201 bp, Homo sapiens
aaactgatttgaattgtcattattaaaaaatgtgtcagtacaatgctttgccttttactgtgggatgggataaatgtttgtgaaaacagtgaagaatgaarttttagacattgagttattttctttaaaaactcctaaacactagatctagaaattttattgaaaaccattcatataaaaatagtcatttaatgaagttca

SEQ ID NO: 386529 - DNA, 201 bp, Homo sapiens
agagaatggtatttagaaattaagggctgggtgcggtggctcacacctgtaatctcagcactttgggaggccaaggcgggtggatcacctgaggtcaggarttcgagaccagcctggccaacatggtgaaaccccgtctctactaaaaatacaaaattagctgggtgtagtggtgcatgcctgtcatcccagctactcagg

SEQ ID NO: 386530 - DNA, 201 bp, Homo sapiens
gcttgttcctttttgcccattgtgaataagtagagaagaggaaactggggtttgggaagagaaaatgggagtgaagctgatgagctgacatagatggatgwttctgcaagaagtgttggaataaaggaaactgagtcaaacaagctttaaccctagaaagcatcctgcatgtttgatggcacaggtggctgacatgcttgc

SEQ ID NO: 386531 - DNA, 201 bp, Homo sapiens
tgtccatgtcccacatgcctgtggcactcgtcgctcagtgagttgcaataatcacataggcatccacatactatctccggagttgctttgcttccctggastcatgatggttgagcctgggaataagcaacatgatttgtggattttattttatattggcctcatgttcttcttgttcataaattttttagaaacagctgt

SEQ ID NO: 386532 - DNA, 201 bp, Homo sapiens
cttcaggacattggtttaggcaaagatttttgtggccaggacctcaaaagcacagacaaaaaatcccaaaagagacaaataggactcttattaaactaaaragctgcttcacaggaatggaaacaattgacagaatgagcagacaaccagttgaatgggagaaaatatttgcaaacttttcttctgacagaggactaataa

SEQ ID NO: 386533 - DNA, 201 bp, Homo sapiens
cagtgtgttctgtcatgccctgacctggtgtcttcatgggcagaattaaaggtctctgtccatgtcccacatgcctgtggcactcgtcgctcagtgagttrcaataatcacataggcatccacatactatctccggagttgctttgcttccctggactcatgatggttgagcctgggaataagcaacatgatttgtggatt

SEQ ID NO: 386534 - DNA, 201 bp, Homo sapiens
gtgaaaccctgtctctactaaaaatacaaaaaattagccaggcatggtggcgggcgcctgtagtcccagctactcgggaggctgaggcaggagaatggcgygaacctgggaggcagagcttgtagtgagcagagatcacaccactgcactccagcctgggtgacagagtgagactgtctcaaaaaaaaaaaaaaaaaagaa

SEQ ID NO: 386535 - DNA, 201 bp, Homo sapiens
taaccctagaaagcatcctgcatgtttgatggcacaggtggctgacatgcttgcaaatatgacctgtctcacctttcagtgtgttctgtcatgccctgacmtggtgtcttcatgggcagaattaaaggtctctgtccatgtcccacatgcctgtggcactcgtcgctcagtgagttgcaataatcacataggcatccacat

SEQ ID NO: 386536 - DNA, 201 bp, Homo sapiens
atttctgattggttggctgaactcgggaattgtatcttcaaattgctctggcctatttaatacttttaatttaagacaatgagaaaatagaagtaaatacttttttttgattcattaacaatgtatacacaagctaaatgaagtcagcatcagagattgtccaaactctgaaaggatgctctagagaccatctaacccagt

SEQ ID NO: 386537 - DNA, 201 bp, Homo sapiens
cctttattcctaatactttggtgagtatttcttaagaacaaggccattctactaaataatcacagtacagttatcaaagtcatggcttttagtattgatayaacactactgtctaacccagagtcccttttccaactttatcaattgtttccataatgtcctttataacatctctccccaccaccaagtccagggtacaat

SEQ ID NO: 386538 - DNA, 201 bp, Homo sapiens
agtggaaaattttagttagtctatactttaaaaaaaaaacaaagtttcttttttttttgagatagagtctcgctctgtcgcccaggctggaatgcagtggygcgatcttggcttactgcaagctccgcctccagggttcacaccattctccagcctcagcctcccgaatagctgggactacaggtgcctgccaccacgtcc

SEQ ID NO: 386539 - DNA, 201 bp, Homo sapiens
aatagtgcaagggacaaccatgattccttttcccagattcaaccagtgttttcctttccttccatttgctttcccatcctcatgccctcctccctctacaygcacacgagcatgcacatgcacacacacatacacacaaacaaataagtgcatttttttccctgaactatttgagagtgaattggagacatcaggctcctt

SEQ ID NO: 386540 - DNA, 201 bp, Homo sapiens
tggcacgaggttggctcactgcactggagtgcagtggagtgcagtgagaggttggctcactgcaacctctgcctcctgggttcaagcgattctcctgcctyagcctccggagtagctgggattacaggcatgcaccaccacacccagctaattttttttgtatttttagtagaggtggggtttcgccctgttggccaggct

SEQ ID NO: 386541 - DNA, 201 bp, Homo sapiens
gatctagaaattttattgaaaaccattcatataaaaatagtcatttaatgaagttcatcagtgtattctaatttatcctcttttgtaagtctaaatttttrtgtttattccattttttgaaagcagactacatttatagggagaataatacatttaaaaatcattaaaatgatatttaaaaaataaagggtaatgtcttta

SEQ ID NO: 386542 - DNA, 201 bp, Homo sapiens
  misc_feature (1)...(201): n = A,T,C or G
tgtgaaattttagttataaatagatgtgtgtagtaaatgacaatgtgtggggttttttttgttgttgtttgttttgatttggttttggattttactgtggnttgtgatcaaaaagtttgaaaaacagtgtagttggttccatatccatgtagagcttcctcatttgtttttaattgttacatagtatttcattgtatacag

SEQ ID NO: 386543 - DNA, 201 bp, Homo sapiens
tttcgtggtctgggcatttctagaagtcccacaaagccctgggctttggccttctaaagaacataagcatttttcaatcagtagttgaggttataaacagytactagtcactaccaaaggaaaatggtcattactgaaaggctagaagcttctctagatggaaataagcttgagcttgaccacaccgagactgttatagcc

SEQ ID NO: 386544 - DNA, 201 bp, Homo sapiens
tgattccttaatctgccttgttgggcaggctgacactggcttctcagaagtttcttgtccttatgaaagaataaaccttcataatttttgtcactctcaaygagattcttagaatgctgaggagctgccactggagctgaaataatttgagacataatatgtggggttaggaataatgccatgggaaatctttttgtgaat

SEQ ID NO: 386545 - DNA, 201 bp, Homo sapiens
agaaaaaagaaaaaaaaaaaaaaaagaaagctgagggtgactattatcatgtcaggcaagaattcacaatgcaaggatgtaaggtactacccagttcacartacagtctcacagtaccatataccatatttacattgcccaagtagtgataaatacagaagagaagcttaacttgttgttaaatggatttttattctataa

SEQ ID NO: 386546 - DNA, 201 bp, Homo sapiens
ccccaaaggaaacctcatactcatcaagcagttgctcttcattcttttatcctttcccccttgtggaccacccatctgctttctgtccatggatttacctmttctggatattttatattgatagaatcatgccatttatgtggcctttgctgtctggcttttttcgcttagaataatgtttttaaagtttgttcacagtgt

SEQ ID NO: 386547 - DNA, 201 bp, Homo sapiens
aacttttctccagtccatctaattttttttccagggttgaatcctagccccagagtggttagcttttgtagcctctcatggatcatttgtagcttttttaytcccaatatcctctgtgctgttgcaatagatgcctttacaagccccctccagatgtggttcatggagaatatgaagttaagcagctgacggagttcattt

SEQ ID NO: 386548 - DNA, 201 bp, Homo sapiens
tcatgttgtttctcctcctccatagatctagtggtctctacattattgtcccttggacttccagactttgttcctgtcccttctcttcttggctcctttcrttaatcattagttccttgatttgacaaaactattccatgtctaaacccagttggctcttttcccagcactgcctgttagggacatcatctttccacatgt

SEQ ID NO: 386549 - DNA, 201 bp, Homo sapiens
tattaaattgtgacatttcctccattaaaaagacactatagccttattattagagaaaagcaacaggataccttttgtttgggatttctcggtggaaaatacattttgacttaaataggatttaaatggcaacttgataatagataattttaggagattgctcaatgttccacttagggattagtttagattttgttctgt

SEQ ID NO: 386550 - DNA, 201 bp, Homo sapiens
acactgaagtcatctttttggaatagtatcccatgctttaggaaatgctgctgaaagattgtggcctctgagatctaagacagccaacttgagatcacctrttcttagagaaccatgaagagaggcctattaaatattggcacaggctctgtgaatgttcagagttctcttgagaaacaggtttaggatttgggtgtattg

SEQ ID NO: 386551 - DNA, 201 bp, Homo sapiens
tacttctttgcttcctgaaaattctaattcaactcttcctttatgagctagctccaatgccatgcagatcaaatttctttcttctagttggcacagatgayaggtacttaataagtgttaattgaattgaattatctgctttacacatttgccattttgaggttggtgtatgtggttattttgtttgtgtatgtccataga

SEQ ID NO: 386552 - DNA, 201 bp, Homo sapiens
gcttggaagatgccaataatgttgatttttctttttctgccttgaagtacactgagaatcacatttcacacttggaggaggcaaaactgccagagaggaaytggaagcaaagcgattgtttgacttggatatagtgaggacctccctctttactccccagttagaagatcttagaatggcagctcttcctaggttttcact

SEQ ID NO: 386553 - DNA, 201 bp, Homo sapiens
gaagctgaggcaggagaatcgctcaaacctgggaggtggaggttgctgtgagccaagatcatgccattgcactccagcctgggcaacaagagcgaaattcygtctcaaaaaaaaaaaaaaaaagactgatagatggtgtctcttggcagatttcagagagtgcagattagaagcttaattttctggtgggaagtgccttaa

SEQ ID NO: 386554 - DNA, 201 bp, Homo sapiens
tattgctgtagccaaattcgttgtcacaccaggaaatgagcttgacaaggtggttgttgagggcattgccagccccagcatggaagatggaagagtgggtrtcactgttggaggagacaatctggtgctcagtgtagtccaggatgcccttgagggggccctctgacacctgcttcaccaccttcttgatatcatcatatt

SEQ ID NO: 386555 - DNA, 201 bp, Homo sapiens
tttgatttaaaaaatgatgttcttgccactgagcttaaggaaacaatacataaacatattttaaaaacttgcccgttatattattacttaggcagatattraaattgatgtgaattccttaaatactaattgtggattgaaatgactgaaatgttctaatggtctttattgcctagaaagtgtatctggctgtatatttaa

SEQ ID NO: 386556 - DNA, 201 bp, Homo sapiens
tgtttttaaaaaattggaggactttctgggggaggttacagtacttccagagagcagaggcaggactagtggttggaggttataatacagcacatatttgctaccaatgggaagtgtccgtaaacagaatgtgttcccacatgaggcagtgaggttctcagtgtcagaagtgcctgggatgtttcatggagattcccgctc

SEQ ID NO: 386557 - DNA, 201 bp, Homo sapiens
ccactgagcttaaggaaacaatacataaacatattttaaaaacttgcccgttatattattacttaggcagatattgaaattgatgtgaattccttaaatastaattgtggattgaaatgactgaaatgttctaatggtctttattgcctagaaagtgtatctggctgtatatttaaaaaatgtgataatttgtattttccc

SEQ ID NO: 386558 - DNA, 201 bp, Homo sapiens
cagctaacttggcaactgcccagcccaagacggttctgattttggagttctgttttccttgcaagcaagtctgggatgtgaagctaagcagagaggttttmagtgggtgtgggagccagtgcagctgggggttgttaacaacaattggaggacaatatatgtatatatatttttaaagaggaggagagtgactgatgactt

SEQ ID NO: 386559 - DNA, 201 bp, Homo sapiens
ggctgttctatttacagtgcctcattcttcccatttaaaaaatgaatttctctttattcaataaggagtaacttaaatactgtgcaaaatgtcccagggcrtgccatttgacctaaggctcaagagtggcagctaacttggcaactgcccagcccaagacggttctgattttggagttctgttttccttgcaagcaagtct

SEQ ID NO: 386560 - DNA, 201 bp, Homo sapiens
gaatcggagaatctcaggtatgaaggaactttcaaagtccacttgtgtgaccttgttacaggtgctttgtccatagtttgttgaatgctcctcccttcaaraggtggaactcaatttccctgcccttgactgtgagccaaacactagagactcgcttccaaccaataaatttatggcagaagtgaaagtgtctgatttctg

SEQ ID NO: 386561 - DNA, 201 bp, Homo sapiens
tggtttctgccccaccacactaacaaagcacccagtccagtagccctcttgtcctgctttctgtctgctctttctgcgatctctgatgcaagtgacttttycttttgcatgtagcatagatcctggaaccctcttggtttgtctgcctctctgacctgttccatcttggccttcttcatagattcttactcctctgtcctc

SEQ ID NO: 386562 - DNA, 201 bp, Homo sapiens
taaattctaacctttttatattacccaattaaataattttatccgacttcaatgggaataagaaaaaataattttaataaatagctttgataccttttttrtattgctcaattaaataacttaaaaataggatttttgaacattatctttgcatgaatttgtgtaagtaacttatgtgttggtggaaagaaatgtatacca

SEQ ID NO: 386563 - DNA, 201 bp, Homo sapiens
caggtgtaagccactgcgctcgcccctaagcaggtactatcagtggacagagagatttaaattctaacctttttatattacccaattaaataattttatcygacttcaatgggaataagaaaaaataattttaataaatagctttgataccttttttgtattgctcaattaaataacttaaaaataggatttttgaacatt

SEQ ID NO: 386564 - DNA, 201 bp, Homo sapiens
actccacagctgtgagtacctcaggtatttgctgctttcataaccatttctcataacttcaaccttgtcaatcatttaatgattaaaagcaatatttgtgrgtaaacatagaacatgtgctatgacagtgtatggatgtgggaaagatcttcagtatttgcgaggttttaagggttgtttagtatcagtgtaaatactttg

SEQ ID NO: 386565 - DNA, 201 bp, Homo sapiens
tttgctaacattttctttttttttttttttttttttttttgagtcagagtctcactctgtccccatgctggagcagtggtgcgatcttggctcactgcaayttctgcctcccaggttcaagtgattctcatgcttcagccttccgagtagctgggattacaggcgtgcaccaccacacccggctgattttttgtattttta

SEQ ID NO: 386566 - DNA, 201 bp, Homo sapiens
acaatgaggagtttctatttcatccacggagaagcaaacacacatactccacacatacacatatgtgcgcacatacgcgcacacactcacacacagtcccrctcacccaccaaaggcccgcgtgtcactaagcgctaactacagcagcacttgtgtctcgagcagtgcacgaggttgcaataggaattataaaacaagaaa

SEQ ID NO: 386567 - DNA, 201 bp, Homo sapiens; identical to SEQ ID NO: 84990

SEQ ID NO: 386568 - DNA, 201 bp, Homo sapiens; identical to SEQ ID NO: 84991

SEQ ID NO: 386569 - DNA, 201 bp, Homo sapiens
caaaataccatgtcagacagaaagatgtatactatacctatttttttcagatgaaaaaaaaaatgagacagaatgataatgtggtttgcttatggtcagaraggaagtggaaaaattgagatgtgaatgaaagcctctgaactccaaatttagggctatcttgactccccctgaagacttaccatgaaggaggattctaaa

SEQ ID NO: 386570 - DNA, 201 bp, Homo sapiens
ggcaccaacctgtctatgagagcacagcaagacaaatgtaattgcctgtaccaggaatacaaatcagcaactctcaaattattcatatttacacccactayattttggttgtctttcctttataatttggccatacattgatgtcaagtgtataattttatctgggatttatcagttaccgcccagagccatgattacatg

SEQ ID NO: 386571 - DNA, 201 bp, Homo sapiens
  misc_feature (1)...(201): n = A,T,C or G
aggatagacatcttaatttttgtctttggctgaacaataacacacattggttcaaaaaatttttgaagtaaatataaatattcttgcttaacctggcacanaggctcttaataaacagttttttattatatttatttttctttttaaacagaaatcatgttgttgatgtcagtgttgcggtcagtactcctgcaggactca

SEQ ID NO: 386572 - DNA, 201 bp, Homo sapiens
tttaatgtttcttcttttccttttccaggttccattgccttctctttcccccacaatgcaggcaggcaccatagcccgttgggaaaaaaaagagggggacmaaatcaatgaaggtgacctaattgcagaggtaagtttttttttttttttttaattaatttatttattttttttattgatcattcttgggtgtttctcgca

SEQ ID NO: 386573 - DNA, 201 bp, Homo sapiens
ctaaaggtataggagactggaagagtagataggaagtattacctggttgggattatagggtaggagtgagcatttgggtggttactggctgaaatgcagtrttttctttcagaatatctaaaatgtctttatctttttctaggtttgatgtggctagcatgatgtctgttacactcagttgtgatcaccgggtggtggatg

SEQ ID NO: 386574 - DNA, 201 bp, Homo sapiens
ttataacaaaaataatgcgtagtcagatttgtcagttccatcctgtgctcactgaatcaaaggcaatcaatctgtcaattcacagattatttttaggcccmagtttgcttcttggccttattatgttactgagaagctatatcagaattgctgctgtctaaactaggcaaaggaagtcaagaagaaacaggagaaaatcac

SEQ ID NO: 386575 - DNA, 201 bp, Homo sapiens; identical to SEQ ID NO: 85000

SEQ ID NO: 386576 - DNA, 201 bp, Homo sapiens
tcctgtgggtaaaaaataggtagatgctaagtacagagcgcagtaaaattttaacagaatggtttggaccaaggtcattttgtgaaaatgaaaaacttctkggttaaaaaaaaatgaagtctgggcgcggtggctcacgcctgtaatcccagcactttgggaggccagggcgggcggattacttgtggatgggcgttcaga

SEQ ID NO: 386577 - DNA, 201 bp, Homo sapiens
ttcattttcagattgttcattgctactatataaaggtatgattgatttttttttttttttaagactagtcaggtatactagtgagaagggcggaagagtaraaaagaagttagatttataatggactctgagcaatcaattgagataacaattcatttttctatattgatcttttttttcatatacctgctgaaatgggat

SEQ ID NO: 386578 - DNA, 201 bp, Homo sapiens
tgtatatattgtggaatggctagattgagctaatttatatatgcattactttatagacttatcttttaggccacttaaaaatctactgtcaggaatttacmagaatacaatacattgttattaactattgtcaccaaataatgtttttttttttaatatggaatgcttcacgaatttgttgtccttgcgcaggggccatgc

SEQ ID NO: 386579 - DNA, 201 bp, Homo sapiens
tctgttgaatgaaagtccccagttggtgttcttttgacatgtggtgatctattttccaagagtgggtgaagtagtccaatagtattaataaatgagaaaaytgacaaaagttaagtgtaagatacacatatgtaatagtgttgcatcaaagttgaaggcagtgaatgtaatcactgttgattgtgctaactaaatcagttt

SEQ ID NO: 386580 - DNA, 201 bp, Homo sapiens
atgtaagaggtatagcttgcttaaaatacatatatatgtaaagttatattttcttagaaacatggatgtttacagccattgctttcaaagagattattacygtgtattctccctgttttacaatatgttttcatgaagactatgttacaccagaggcttctgattatcaaagtgataaccagttttaactgccggtatgta

SEQ ID NO: 386581 - DNA, 201 bp, Homo sapiens
cttgggcctccctattccatgagacacaataaaactgaaatcaggccaattagtaactctacaatggcctctgagtgtttcagtgaaaggaagactttcamgtctcttactttaaatcaaaagctagaaatgattaagctcaatgagtaaggcatgtcaaaagccaagatcggttgaaagctaggcctcttgtgccaaaca

SEQ ID NO: 386582 - DNA, 201 bp, Homo sapiens
tgggtgtggtggctcatgccagtaatcccagcactttgggaggctgaggcaggtggatcgcttgaggtcaggagttcaagaccagcctggccaacatggtraaaccccatctctactgaaaatacaaaaaattagctgggcgtggtggtgcgtgcctttaatcccagctacttgggaggctgaggcaggagaattgcttga

SEQ ID NO: 386583 - DNA, 201 bp, Homo sapiens
gtctgccagacttttattatgtagaagtcttcctggtattaagcaataatatgtgtttgtttctgcaggtacttcttcctgccctctctcccaccatgacyatgggcacagttcagagatgggaaaaaaaagtgggtgagaagctaagtgaaggagacttactggcagagatagaaactgacaaagccactataggtgaga

SEQ ID NO: 386584 - DNA, 201 bp, Homo sapiens
catcatctacattaggtatttctcctaatgctatccctccccttagccccccacccccctacaggtcctggtgtgtgatgtttccctccctgtgtccatgygttctcattgttcaactcccacttacaagtgagaacatgcggtgtttggttttctgttcctgtgttagtttgctgagaatgatggtttccagcttcatcc

SEQ ID NO: 386585 - DNA, 201 bp, Homo sapiens
ttggttttctgttcctgtgttagtttgctgagaatgatggtttccagcttcatccatgtccctgcaaaggacacaaactcatccttttttttatggctgcwtagtattccatggtgtgtatgtgccacattttctttatccagtctatcattgatgggcatttggcttggttccaagtctttgctattgggaacagtgctg

SEQ ID NO: 386586 - DNA, 201 bp, Homo sapiens
ggtctatatatctgttttggtaccagtaccatgctgttttggttactgtagccttatagtatagtttgaagtcaggtagcatgatgcctccagctttgttstttttgcttaggattgtcttggctatacgggcccttttttggttccatatgaaatttaaagtagtttttttctaattctgtgaagaaagtcaatggttgc

SEQ ID NO: 386587 - DNA, 201 bp, Homo sapiens
agatctgatattgtgtaaaaaaaaaaaaaagattgggaccccttacttttacgttcttctgaggtaccaccacccatgtatcctgagcactcctatttctkgctacaatgcagttctttcccttcactcttcctttcatctgctcaaactacttgcagagactcaactgcagccaatgtacgtccactcaaaatccaagga

SEQ ID NO: 386588 - DNA, 201 bp, Homo sapiens
tagtatagtttgaagtcaggtagcatgatgcctccagctttgttctttttgcttaggattgtcttggctatacgggcccttttttggttccatatgaaatktaaagtagtttttttctaattctgtgaagaaagtcaatggttgcttgatgaagatagcattgaatttataaattactttgggcagtatgtccattttcac

SEQ ID NO: 386589 - DNA, 201 bp, Homo sapiens
atgtgccaatttttgagactgagtctcactctgttgcccagactggggtgcagtggcgtgatcttggcttactgcaacctccaccttccaggttcaagcarttctcgtccctcagcctcccgagtagctgggattacaggtatgagccaccaggcatggctaatttttgtatttttagtagggacaggatttcaccatgtt

SEQ ID NO: 386590 - DNA, 201 bp, Homo sapiens
cctgtatgccttttatttcctttcttgcctaattgctctggctggcgcctctaggcaatgttgaataggtgtagcagaagtgaacatcttgtcttgttctygatctttgggagaataagtctttggtcattaaatagttgtgaggtttccgtagatcaggttgagcaagttccctcctgttcccagttagtaagagtgttt

SEQ ID NO: 386591 - DNA, 201 bp, Homo sapiens
ctaggcaatgttgaataggtgtagcagaagtgaacatcttgtcttgttcttgatctttgggagaataagtctttggtcattaaatagttgtgaggtttccrtagatcaggttgagcaagttccctcctgttcccagttagtaagagtgttttgatcatgaaaaggggtattgaattttatcaaatgctctttctgtgtctg

SEQ ID NO: 386592 - DNA, 201 bp, Homo sapiens
tcccagcactttgggaggccaaggcaggtggatcgcctgaggtcaagcgttcgagatcagcctggccaacatggtgaaaccctgtctctgctaaaaatacaaaaaaaaaaaaatagctaggtatggtggtgcgcgcctgtagtcccagctaatcaggaggctgaggcaggagaattgcttgaacctgggaggcggaggttg

SEQ ID NO: 386593 - DNA, 201 bp, Homo sapiens
tcaagcaagttgatggcaccatttttccaacagcatgtgctcacttcctgtctctgtgtcacattttggcaattcctagagtatttcaaactttattattrtatctgttatggtgacctgtgatcaaggatctttgatgttaccattgtaattgtttcaatgccccatgaaccatgcccatataagatggcaaacttcatt

SEQ ID NO: 386594 - DNA, 201 bp, Homo sapiens; identical to SEQ ID NO: 84992

SEQ ID NO: 386595 - DNA, 201 bp, Homo sapiens
cctctaggaaccccactctgtatcattgtagaaaaagaggcagatatatcagcatttgctgactataggccaaccgaagtaacagatttaaaaccacaagygccaccacctaccccacccccggtaggtatgcttctagaattcaggaaacacttaccttgttcatctctaaattaaggagttttgattagatgatatcct

SEQ ID NO: 386596 - DNA, 201 bp, Homo sapiens
aactcaagataattgattttttaaatctctttggtttcaggttattgcacagcgattaatgcaatcaaagcaaaccatacctcattattacctttctatcratgtaaatatgggagaagttttgttggtacggaaagaacttaataaggtaaaagttctgaaaattccaactttctaagttataaaaattttgtctttccc

SEQ ID NO: 386597 - DNA, 201 bp, Homo sapiens
aattacttaaaagcatttaggtcataattaaaattattttcactgtttccataaaataagcattatgattgcacactccttctactgtctgaatttatgtragaggtatagcttgcttaaaatacatatatatgtaaagttatattttcttagaaacatggatgtttacagccattgctttcaaagagattattactgtgt

SEQ ID NO: 386598 - DNA, 201 bp, Homo sapiens
ttatataaaatagtgtagtatttgtatataacttacccacatcctctcaaatactttaaatcatctctagattacttataatattaaatacaaggtaaatrctatgtaaatagttgttatattttattgcttaggaaataataataaggacaaaaagtctgtacttgtgcagttcagatgcaaccatctgtttttttctgg

SEQ ID NO: 386599 - DNA, 201 bp, Homo sapiens
gaaattgaattgaatgaaatcttaagccagactgagagttaggtagtccttaaaaattttaatgtttcttcttttccttttccaggttccattgccttctytttcccccacaatgcaggcaggcaccatagcccgttgggaaaaaaaagagggggacaaaatcaatgaaggtgacctaattgcagaggtaagttttttttt

SEQ ID NO: 386600 - DNA, 201 bp, Homo sapiens
tgaacagatttttatttggcatttactttgtaccaggttgtattatttctaagaacttgaaaaatattaatctgtttaaatgtataacatcccagtaccartccagtgagattggtactattattatccccgtattgtaggtaaagaaaccaagacacagaaggttaaataggttgcaaaaaaggctatatagctagcttg

SEQ ID NO: 386601 - DNA, 201 bp, Homo sapiens
atgaaattgaattgaatgaaatcttaagccagactgagagttaggtagtccttaaaaattttaatgtttcttcttttccttttccaggttccattgccttytctttcccccacaatgcaggcaggcaccatagcccgttgggaaaaaaaagagggggacaaaatcaatgaaggtgacctaattgcagaggtaagttttttt

SEQ ID NO: 386602 - DNA, 201 bp, Homo sapiens
gaggttcatgctttgtcagacccacaggactgtggaggagaaagcctgtcactggaaattactaacttctcatggacaggaactcccttggcatccctagytcccaatgtgcaatggaactgtatacactttgcatgaaattgaattgaatgaaatcttaagccagactgagagttaggtagtccttaaaaattttaatgt

SEQ ID NO: 386603 - DNA, 201 bp, Homo sapiens
agtctgccttgggggaagatgaatcagtttgaccaaatttttcctagaagtgggccagtgtaaaaggtattctataataataactaaattctgaatctccrtagaattaaaggtcaagattatctacttgggtccaaaattaaacctaagaggctgtaggtgggaggagggaggaaattgaatataagtaaaattaaacct

SEQ ID NO: 386604 - DNA, 201 bp, Homo sapiens
atgcaagactgattctgtttggaacagtttcctatttggctgcattctaggaggcctcctgacttattcatagtattgtcgcctggtggcattggtgtggsgtagcttgtcctgctacttgctaaagttctctttctttgagaaaactgaggaaccagaatgcttagagttcataaaataatctctaaaccatgttaggtt

SEQ ID NO: 386605 - DNA, 201 bp, Homo sapiens
ctaactcctaagtcaggaaattcttgtgggtggctgaagcttagcataaggcaggtggtactatggatttcctcctcttgagggactgtggtgtctagatyagccttggttgtaaggggaggttatggtttctgtcttttacaaaggagagaaatctaataggggtactaccacctctgttctagagctcctagtgaggat

SEQ ID NO: 386606 - DNA, 201 bp, Homo sapiens
tatatgtatatatgattagaatcagggacagcagtgtaagttggagtaacttttaaagggagaaaggactgggttaataattatatctaaagaatttagasaagcaaagaaggaccatttattagatattcagcaatactcgttaccttactaaagatataagtggaaaatcccttaggtatgagctgagaggagtgttaa

SEQ ID NO: 386607 - DNA, 201 bp, Homo sapiens
ttttatttatttatttgtttatttgcttatttttcagacagggtcttaatctgttgcccaggctggagtgcggtggcaagatcatagctcattgtagcctygaactcctgggcttatgcccaaatgatcctcctgctttagcctcacaagtaggtaggactacaggcctgaaccaccacacctagctgattttttaaattt

SEQ ID NO: 386608 - DNA, 201 bp, Homo sapiens
taacttggagtgtgtgttagagtgtgggcgagagtataagagtatgggtcagagtatgagatttgaaggatgatttacctggtgggaagctattgaggtgygaagcttttgctgtggtgagtatttggattatcatagtcaccatcattctatgaaaccacataagtctgccagacttttattatgtagaagtcttcctgg

SEQ ID NO: 386609 - DNA, 201 bp, Homo sapiens
catcagtgatttttccaaacattacatgcttcccatccagccaatcacacttagagcaggtgataaagaactgacagccatttgtactgggaccgctgttygccgtggaaagcaggcctggagctgagtgtctaagtttaaaattttcgtctgcgaatgtctcctggtaaatactggcgactccagtaccatctccattaa

SEQ ID NO: 386610 - DNA, 201 bp, Homo sapiens
ggccaacttcctgactgccattgctgacatcaaagaacaccatggggttagcagggcttgaagttgccaccaccatggctctgacccggaaacggaagtcagggggatcatatttcagcatgagatttggaggggacagacatccaagctgtatcataggtgtcaagtgctgtctgttgaatgaaagtccccagttggtgt

SEQ ID NO: 386611 - DNA, 201 bp, Homo sapiens
cctggtgggaagctattgaggtgtgaagcttttgctgtggtgagtatttggattatcatagtcaccatcattctatgaaaccacataagtctgccagactyttattatgtagaagtcttcctggtattaagcaataatatgtgtttgtttctgcaggtacttcttcctgccctctctcccaccatgaccatgggcacagtt

SEQ ID NO: 386612 - DNA, 201 bp, Homo sapiens
gtatttgtaggtagcaccttaaggggtagggttaaggctgtgaacctttcagaatgtttttggtagtaaacccttaggagcttgcagtttaggatcacagygttgatctccttggggaaccaatggtatgtcatcatgtatgtgatatttatgtctcttacagggacaggaccagatggtagaatcaccaagaaggatatc

SEQ ID NO: 386613 - DNA, 201 bp, Homo sapiens
taatcctctagtcattttgacccttccagtgactggcgccatcccgaggttacttagggatcccaccctaagtatccgtcatggagcttattatataaggrctcattataaataacaaaacatactcctatcactcaggaaattccggttctaggggctctatgacaggaactggcaacatggggacaaagaccaagtata

SEQ ID NO: 386614 - DNA, 201 bp, Homo sapiens
agttcccaatgtgcaatggaactgtatacactttgcatgaaattgaattgaatgaaatcttaagccagactgagagttaggtagtccttaaaaattttaawgtttcttcttttccttttccaggttccattgccttctctttcccccacaatgcaggcaggcaccatagcccgttgggaaaaaaaagagggggacaaaatc

SEQ ID NO: 386615 - DNA, 201 bp, Homo sapiens
tgcaggcaggcaccatagcccgttgggaaaaaaaagagggggacaaaatcaatgaaggtgacctaattgcagaggtaagtttttttttttttttttaattwatttatttattttttttattgatcattcttgggtgtttctcgcagagggggatttggcagggtcataggacaatagtggagggaaggtcagcagataaac

SEQ ID NO: 386616 - DNA, 201 bp, Homo sapiens
gggcggggcagctggccaggcgggggctgacccccccacttccctcccggacggggcggctggctgggcggggggctggccccaccacctccctcccagayggggcggctggcctggcgggggctgacccccacctccctcccggacggggtggctgccgggcggagacgctcctcacttcccagacggggtggctgccgg

SEQ ID NO: 386617 - DNA, 201 bp, Homo sapiens
attattactgtgtattctccctgttttacaatatgttttcatgaagactatgttacaccagaggcttctgattatcaaagtgataaccagttttaactgcyggtatgtaccagatttgtgaactaatttaaaaaaccacaaactatgaataaaatggggtttgcaaactaaatatcattaatgattttcacttgcgtttac

SEQ ID NO: 386618 - DNA, 201 bp, Homo sapiens
ttaagctggcgaaaagtacattatgatctttggaaaaatgaaagttattaatatttaattaaaatagttttaatttattaataagatgtaaacttttaatytttcagaccagtctttgaagtggtgaattaaaacaatttgtaattttttttcaaaaggtggccgctgttcctccaactccccagcctttagctcctacac

SEQ ID NO: 386619 - DNA, 201 bp, Homo sapiens; identical to SEQ ID NO: 84998

SEQ ID NO: 386620 - DNA, 201 bp, Homo sapiens; identical to SEQ ID NO: 85002

SEQ ID NO: 386621 - DNA, 201 bp, Homo sapiens
gtgttagccaggatggccttgatctcctgacctcgtgatccacctgtcttggcctcccaaagcgctgggattacaggcgtgagccatggcgatttgtagtrttatgaatttcttctctctgcacccccgctttttcttttttttttttgagacagagttttgctctgtcacccaggcttgagtacagtggtgcgatcttgg

SEQ ID NO: 386622 - DNA, 201 bp, Homo sapiens
gcagttctttcccttcactcttcctttcatctgctcaaactacttgcagagactcaactgcagccaatgtacgtccactcaaaatccaaggagttctgatkggtggggttttctttcagctgcattcacgtgtcggtcaaggcagacggcaggggatgttagacgatatgtgcgaaaccaacctactgctgctgacacatt

SEQ ID NO: 386623 - DNA, 201 bp, Homo sapiens
gttagacaagattggttggataagttgtcagcagctggccaaactgattttaaccaaggcgtttctaaagtaatttcttctttgaaatctgtcgtagtggscttatcttcacatgaactgtataattctagacacaaaggccaggctggccaacatggtgaaaccccgtctctgctaaaaatacaaaaatcagccgggcat

SEQ ID NO: 386624 - DNA, 201 bp, Homo sapiens
atttcctcaagtgatctccctggtagcatgtttactcactatgtggagtggagataagaattactttattgctacagatattttacaattagtatttctaygtaagcacataggctattatcaaggacaatttatttagcacttattttgaaattatatgtaaacatgcaaacaaataagaacccaagagtataaactcta

SEQ ID NO: 386625 - DNA, 201 bp, Homo sapiens; identical to SEQ ID NO: 84997

SEQ ID NO: 386626 - DNA, 201 bp, Homo sapiens
  misc_feature (1)...(201): n = A,T,C or G
ggcagatatatcagcatttgctgactataggccaaccgaagtaacagatttaaaaccacaagcgccaccacctaccccacccccggtaggtatgcttctanaattcaggaaacacttaccttgttcatctctaaattaaggagttttgattagatgatatcctaggttccttccacctccaagattctatgactgaggagg

SEQ ID NO: 386627 - DNA, 201 bp, Homo sapiens
actatcttatgatttaagtgctttcacttccatttctagataaagaaacagactccgtgagttaagtaacttgccctgagttaataaattagtgttaggastgtgattagaaccaagattctgactcctaagcctattcgtttcttgctgtgtagatgcttctatgttattcttattctgaaaggaaaaaaacaaactttt

SEQ ID NO: 386628 - DNA, 201 bp, Homo sapiens
agatttttacatctatattcataagatattagtgtgtacttttttttttttttcttctaatgtcgtctttggttttggtatcaggctaatcccggccttayagaatgtgtggggaagtgtttcttgctcttctttgatttttctttgaaagaatttgtgaggaattgatattaattcttctttaatatttggtagaatact

SEQ ID NO: 386629 - DNA, 201 bp, Homo sapiens
tctctactaaagatacaaaaattagccgggcatggtggcacatgcctgtagtcccaagtactcgggacgctgaggcaggagaattgcttgaacttgggaartggaggttgtggtgagccgagatcgcaccaccgcactccagcctgggcaacatagcgagactccatctcaaaaaaaaaaaaaaatctaggaggtgttata

SEQ ID NO: 386630 - DNA, 201 bp, Homo sapiens
ccaagattgttttcttctaatttcagtggtttaataatacagtcatccctcggtacccatgagaggttggttccaggagcccccttgtataccaaaattcrcaaatgcttaagtctcttatataaaatagtgtagtatttgtatataacttacccacatcctctcaaatactttaaatcatctctagattacttataatat

SEQ ID NO: 386631 - DNA, 201 bp, Homo sapiens
cttatttccccaattttctagttatgggtactcaatggtggttatcccgtatctgcaatttgctatcttgtagttagaagtcaagccaatcccaagacacmagagtagaatgttgtaaattttttggacctcagagattcttgtaatattggaagattcttttttttccatcttaatgccatttcagtagtatattgctat

SEQ ID NO: 386632 - DNA, 201 bp, Homo sapiens
ggcggaggggctcctcacttctcagacggggtggctgccgggcggaggggctcctcacttctcagacggggcggttgccaggcggagggtctcttcacttytcagacggggcggccgggaagagacgctcctcacctcccggacggggtcgcggccgggtagaggcgctcctcacatcccagacggggcggcggggcagag

SEQ ID NO: 386633 - DNA, 201 bp, Homo sapiens
cggggcggttgccaggcggagggtctcttcacttctcagacggggcggccgggaagagacgctcctcacctcccggacggggtcgcggccgggtagaggcrctcctcacatcccagacggggcggcggggcagaggcgctccccacatctcagacgatgggcggccgggcagaggcgctcctcacttcctagatgggatgg

SEQ ID NO: 386634 - DNA, 201 bp, Homo sapiens
catcccagacggggcggcggggcagaggcgctccccacatctcagacgatgggcggccgggcagaggcgctcctcacttcctagatgggatggcagccggrcagagacgctcctcactttccagactgggcagccaggcagtggggctcctcacgtcccagacgatgggcggccaggcagagacgctcctcacttcccaga

SEQ ID NO: 386635 - DNA, 201 bp, Homo sapiens
aggcaggataatcgcttgaacctgggagggggaggttgcaatgagccgagattgcaccactgcactccagccttggtgacagaatgagactctgtgtctcaaaaaaaaaaaaaaaaaaaaaaaaattctagacacaagctaataaattacataccaacagtacaaacctgagctactgctttttgtgttaaaaggttgaaa

SEQ ID NO: 386636 - DNA, 201 bp, Homo sapiens
ggcaggataatcgcttgaacctgggagggggaggttgcaatgagccgagattgcaccactgcactccagccttggtgacagaatgagactctgtgtctcaaaaaaaaaaaaaaaaaaaaaaaaattctagacacaagctaataaattacataccaacagtacaaacctgagctactgctttttgtgttaaaaggttgaaac

SEQ ID NO: 386637 - DNA, 201 bp, Homo sapiens
cttagctcactgtagccttgacctcctggctcaagccatcctcccacctcagcctcccaagacgctgtgactacaggcacgtgccaccatgcccagctaatttttttttttttttttttttaagagatgaggttacatcatgttgctcaggctggtcgtgaactcctgggctcaagtgatcctcctgcatcagcctaccaa

SEQ ID NO: 386638 - DNA, 201 bp, Homo sapiens
ttagctcactgtagccttgacctcctggctcaagccatcctcccacctcagcctcccaagacgctgtgactacaggcacgtgccaccatgcccagctaatttttttttttttttttttttaagagatgaggttacatcatgttgctcaggctggtcgtgaactcctgggctcaagtgatcctcctgcatcagcctaccaaa

SEQ ID NO: 386639 - DNA, 201 bp, Homo sapiens
tctttcctgtttttttttttttttttttttttttttgagacagtcttgctctgtcaccatggctggagtgtagtggcacgatcttggctcacggcaacctytgcgattctcatgcctcagcctcctgagtagctgggactacaggtgggtgtcaccatgcccagctaattttggtatttttagcagaggagggggtttcgc

SEQ ID NO: 386640 - DNA, 201 bp, Homo sapiens
atgcctcagcctcctgagtagctgggactacaggtgggtgtcaccatgcccagctaattttggtatttttagcagaggagggggtttcgccatgatggccmggctggtcttgaactcctggcctcaagtgatccgcccctcccaagtgatccttggcctcccaaagtgctgggattacagatgtgaacagctgtgcctggc

SEQ ID NO: 386641 - DNA, 201 bp, Homo sapiens
aaatatgcttatttccccaattttctagttatgggtactcaatggtggttatcccgtatctgcaatttgctatcttgtagttagaagtcaagccaatcccmagacacaagagtagaatgttgtaaattttttggacctcagagattcttgtaatattggaagattcttttttttccatcttaatgccatttcagtagtata

SEQ ID NO: 386642 - DNA, 201 bp, Homo sapiens
ctgactgccttggcctcccaaagtgctgggattacaggcgtgagccaccaccgcacccagccttttttttttttttttttgagatagagtcttgctttgtygcccaggctggagtgcaatggcatgatcttggctcactgcaatttccacctcccgggttcaagcaattctcctgcctcagctgcccaagtagctgggatt

SEQ ID NO: 386643 - DNA, 201 bp, Homo sapiens
aaagaaaaatatgcttatttccccaattttctagttatgggtactcaatggtggttatcccgtatctgcaatttgctatcttgtagttagaagtcaagccmatcccaagacacaagagtagaatgttgtaaattttttggacctcagagattcttgtaatattggaagattcttttttttccatcttaatgccatttcagt

SEQ ID NO: 386644 - DNA, 201 bp, Homo sapiens
atttctgaattttggcaatgtatgttaatggaatcttctgtatctgtagggtgtggaattctttgatgaaaagctgaattctttatgtatggcttggctcrtggaccatggtgagtagataaaaacagattattgaaagcccatatatccatgattttcatacatttccttttagaaaggaatctcagtctgaccagatat

SEQ ID NO: 386645 - DNA, 201 bp, Homo sapiens; identical to SEQ ID NO: 85016

SEQ ID NO: 386646 - DNA, 201 bp, Homo sapiens
ttgcttttggtccacatttgattttcatgtaagtaaactaggttatgcttaaaaaacaataagcgatatgagaacatgtttttgacctcttctgcagtatrcgccatccgagaagctgccaccaacaacctcatgaaactagttcagaagtttggtacagagtgggcccaaaatactattgttcccaaagtgttagtaatg

SEQ ID NO: 386647 - DNA, 201 bp, Homo sapiens
actggattgtagacttctttctctttttcttctctaaagttatcttattgtggcctatttatttctttttaaataaaattaaaatttggcaaatcataggraagaaataccacttttaaaaaaaatgtttatgttatatctgataaatatttgacgttactgggaatggtgcatcctagcaaatcattctgtgctttttta

SEQ ID NO: 386648 - DNA, 201 bp, Homo sapiens
ggtggatggtgtagagaaccatcagcctccttttcccacggtgacagaaggcagtgcaggcagaggtggcgagggggcagctggggacggtcagtgtcacygggaatgtgaaagtgggccccctcttcctgtcgggctaacatgctgtttgccttacagggaccagtgtatcagttgcgtggagatactagagacacactt

SEQ ID NO: 386649 - DNA, 201 bp, Homo sapiens
attatttcttcaagattatccatttttttttcacctgagtcttacctcaccttttatcttaccctgacaggagactgttgggcagagtacttgatttttawatgtggtcttttggggcttgtgtacttgcagtgtcctgacgttcgtttgaatatcatctccaatttggattgtgtaaatgaagtgattggaatccgtcag

SEQ ID NO: 386650 - DNA, 201 bp, Homo sapiens; identical to SEQ ID NO: 85019

SEQ ID NO: 386651 - DNA, 201 bp, Homo sapiens
cccagggttgctagctctatagagagcagtgtgaaagcaaggcagatggtgtctttggctgacttacacctgtctggcaggggtgacatgcctcagtcatraacattttgctttacaattttaacttcttgttagtatatatattctccttaatttctcttcatatctaaatatttttatatcagatagtcattttataaa

SEQ ID NO: 386652 - DNA, 201 bp, Homo sapiens; identical to SEQ ID NO: 85020

SEQ ID NO: 386653 - DNA, 201 bp, Homo sapiens
gttgaggtccagaatcgcagtcactcatcttagaacattcttgccttcctgaggggctgcacacttgtccgtgggcagctccagccgttcctgcagtggcygcacagtgagaggaagggctgggtgaccactgtccagttggattccaggggtggccagcccttggagtccatgtcgtcttcacagaactgggcctcaggg

SEQ ID NO: 386654 - DNA, 201 bp, Homo sapiens
cattttttaggcctaaaccacagacttctttgggaagaaaggggttacgtcttcctacaaattcagagccagctgctcatgccatgaatgcgtggtatgayccgatctgagtgtggatcattgaggcggccctcccatggctgacctgctcagctctgacagggcccgggctgcctctgctagccgaggagttactgagaa

SEQ ID NO: 386655 - DNA, 201 bp, Homo sapiens; identical to SEQ ID NO: 85022

SEQ ID NO: 386656 - DNA, 201 bp, Homo sapiens
gtccgaatggggtgagcgtgagcgcgctgctgttgagagccctgggaactgtcagttctcagccagcctcagggccctcagggagccattggacatccctrgggctgggcccgccacttgaagagaaaagggaaagggcgagagccagtctcccttggtgaagagcgcctccttggcacccttgaagtctgtggaggtgcc

SEQ ID NO: 386657 - DNA, 201 bp, Homo sapiens; identical to SEQ ID NO: 85021

SEQ ID NO: 386658 - DNA, 201 bp, Homo sapiens
ctcaagcaggaacaagaggtggttagctccattttatggggtgttagggggtggaaggtgggattgaggcactgggagaggtaggtcatgatgagtcagasacagagatgggaactgaagtccaaaattgatgactctcaaaccaggcaattttctggggcctattttctcagcttgtgattttatatttaatcatagtta

SEQ ID NO: 386659 - DNA, 201 bp, Homo sapiens
gggtgttagggggtggaaggtgggattgaggcactgggagaggtaggtcatgatgagtcagagacagagatgggaactgaagtccaaaattgatgactctsaaaccaggcaattttctggggcctattttctcagcttgtgattttatatttaatcatagttattccttgaatcgccagttcattgtacttgggtaagcaa

SEQ ID NO: 386660 - DNA, 201 bp, Homo sapiens; identical to SEQ ID NO: 85023

SEQ ID NO: 386661 - DNA, 201 bp, Homo sapiens; identical to SEQ ID NO: 85024

SEQ ID NO: 386662 - DNA, 201 bp, Homo sapiens
aacccaggaggcggaggttgcagtgagccgagatctcgccactgcactccagcctgagagacagagtgaggctctgtctcaaaaaaaaaaaaaaaaaaaaattagaggagaagacacaaatactctagctagctcctctttagtggggaggacagggaagggtttgggccaaagacaaagactatggatatgaagggaagg

SEQ ID NO: 386663 - DNA, 201 bp, Homo sapiens
actgaggccggggacccgaggcgagaccggctggtcgcgtggtagagaagggggaaggcctgcgtcgcggtgggggtggccgaggtactgaatgagtcggrctcgtagcagaaacttgaaggggaggcggggaatgctccgcgaggggctgtggtgacacgccccgaccctcccgggtacctctctagtaaccttgcttcg

SEQ ID NO: 386664 - DNA, 201 bp, Homo sapiens
catgagccttagtgctttgcatgtatttttacatgcaattctcacaacaatcctgtgaggtaggtcttattattatccctttttgtttgtttgtttgtttkttttgttttttgagacggagtcttgctctgtcgcccaggctggagtgcagtggcgcaatctctgctcactgcaagctccgcctcctgagttgatgccatt

SEQ ID NO: 386665 - DNA, 201 bp, Homo sapiens
aggggctgtggtgacacgccccgaccctcccgggtacctctctagtaaccttgcttcggaccccctgaggcgtccgcccggagccttgcccttcccgggcsgttgtcggggaacccgcttcccgcctgggcgccccatccgggccgtgaggtggccgcgtctcttgggcgagggagcaggagaagcgcggtgccaggccga

SEQ ID NO: 386666 - DNA, 201 bp, Homo sapiens
tatccatgttgatgagtcctgttgttgtcacttccagatacaatttatgatgaagatgaggtactattagctcttgctgagcagctgggaaatttcactgrcctagtgggaggtcctgactttgcccactgtctgctggtgagtatttataagctgcctaccctccttctacaacttttgcagtataaatgatacattgtt

SEQ ID NO: 386667 - DNA, 201 bp, Homo sapiens
ctcaactttctgttatagtaaggctttgaaggcatcattaaaatgttttttttttcttttttacttaattttaaaattttcatttcctttatagaaactctgcattctagccaaggtaattactttgctgtttactcatagtacaaagtcatttctatctttatgactttgacatgccattccaggcaaagggagcagctc

SEQ ID NO: 386668 - DNA, 201 bp, Homo sapiens
taatagataagtatgaatatatatatatagagagagagagagagagagagttttttttctgtctatgtatataggcctatgcttttttctacttgtatgtsaaacaggtatttcaaacttaacatacccaaaacaaaacttagctttatcccccaaatacacctctcatttagttgttccacttcagtaaatggtatcact

SEQ ID NO: 386669 - DNA, 201 bp, Homo sapiens
tcagacgtaggctggtgacagggcacacgggagcaggtccttaggctgacctcctgtcagtgccctctccactgtggggcctaggggccgagctgtccgcrcaaaaagactcccccaggccttccaagtcttttccacactggagcttgacctaacagttggagataaaaaagtcctcctacctgtgacatagattctcag

SEQ ID NO: 386670 - DNA, 201 bp, Homo sapiens
cctcaactttctgttatagtaaggctttgaaggcatcattaaaatgttttttttttcttttttacttaattttaaaattttcatttcctttatagaaactctgcattctagccaaggtaattactttgctgtttactcatagtacaaagtcatttctatctttatgactttgacatgccattccaggcaaagggagcagct

SEQ ID NO: 386671 - DNA, 201 bp, Homo sapiens
catctaatccattagtaattcctatagagtctacgtatatttcaaataagtccactttcttccatccctcctattaccagcctagtccagactgtcatctktcctctagattgctgtagtagcttcctagcaatgctttccactcttgcctctcacccgactcttacagttcacatcacccagcagatggctcactctctg

SEQ ID NO: 386672 - DNA, 201 bp, Homo sapiens
tgggattactggggacttgtagctgacaatttacatagtaccttgttaccaatgagtggctgatactaggatagtaggatttatgacatctttcttttttktttttaagagataaggtcttgctctgttgtctaggctggagtgcggtggcacaatcatagctcactgcaaccttgaactcttgtgcttaagtgatcctcc

SEQ ID NO: 386673 - DNA, 201 bp, Homo sapiens
ttgagacaaaggctgagttcatgaccgttcctggggtggaatctgctggcctgcagtggtggcctgatgccgtgcgatgcggccccttggcaattgaggargggggtgttctgtaggaaactgctgtattgtaacttggaaaaactagacatctttgaggtgagcctaaacttctgcagttaactggacgctgaaaggcag

SEQ ID NO: 386674 - DNA, 201 bp, Homo sapiens
gggagggtagtaagttcctggaatgctggtgtctctctgattagaaccctcttggcccaccattttctcataagtgagcaggctatttttcttagttacaygtaggactgggtaggaaatacgattctcactggtaagaatagtttttcgtttggaatttaaccagtttttaaagtttcacttctgattagcctggctgag

SEQ ID NO: 386675 - DNA, 201 bp, Homo sapiens
aacacattcagtgttctcaaggcttccagaaaaggaagcaacttctttggccaaagtccccttctcacctatgttcctgcagctgctgctcaaggctccgyggtggttctttgcaataaagctgacaggtgttctgggcctttgacagaaggctgggcttctggaagagcagaaaaacaacatgagcgtgacaatgtgctg

SEQ ID NO: 386676 - DNA, 201 bp, Homo sapiens
acccacattaaaatgagccaggtgttttttgtgcaaaagaaacagaacagagtatattgttagttgtggctagatatattcaaacatcaaccatttagctrttgaaagtaattgatacgggagtatgaatttctaattcgttgtgcaaagcagatacaggaagacggttgagaagaaagaaaatgctgttaggattttgac

SEQ ID NO: 386677 - DNA, 201 bp, Homo sapiens
gcgtgagccaccgcgcccggctgatactgctcttgtctttcatacattgctctgaagataagttctataaaaaaattccaggtcgggtgtggtggctcacrcctgtaatcccagtactttgggaggccaaggtgggtgggtcacctgaggtcaggagttcaagatcagcctggacaacatggtgaaaccccatctctacta

SEQ ID NO: 386678 - DNA, 201 bp, Homo sapiens
gtaccactaacctgattttgtttggaattttccagttcttgcattggcataatgaggagcaggagggaaaaggcctttactagattcttgtcacaaatttmtagtcaatgtgttcttaactgggtggagaaagaatggaaaaccttcaagatctcatccaagcaaatggcaacaacttagaagaaatcatttagtgactta

SEQ ID NO: 386679 - DNA, 201 bp, Homo sapiens
gggtgttctgtaggaaactgctgtattgtaacttggaaaaactagacatctttgaggtgagcctaaacttctgcagttaactggacgctgaaaggcaggcrggtctgcggggtttttgtctccctcagcctggttcagtgcacggccacctggacagctgcactgtcacctgaaggcggcctcttccccaaagccaggcgg

SEQ ID NO: 386680 - DNA, 201 bp, Homo sapiens; identical to SEQ ID NO: 85027

SEQ ID NO: 386681 - DNA, 201 bp, Homo sapiens; identical to SEQ ID NO: 85014

SEQ ID NO: 386682 - DNA, 201 bp, Homo sapiens
cacgtgtgacacctctggagtcctgagtatattctgacactcggcaacccagggcaccttctgaaggggtgtgtcacctgcttccgaatggagatgaaggyggtttctggggtcagtaccagctgttatttagtggcccctgaaacacagctcatgccccactgctttgtgatggccttgggggacaacttgcatcagcag

SEQ ID NO: 386683 - DNA, 201 bp, Homo sapiens
cagccgacctgaggagagagtgactcagttctccctttgagaagctcaatccctaatgcctcattttcctctgggcccacattttctgagcttttctgctyatccagcttttgggggctcggctccaggggaagtccgcttcccatgctgtggctccctcctgtctccaccctcccagacactgtgctggctcgggggctc

SEQ ID NO: 386684 - DNA, 201 bp, Homo sapiens; identical to SEQ ID NO: 85030

SEQ ID NO: 386685 - DNA, 201 bp, Homo sapiens
tgccagtgtgggccctgccgactgcaccttcccaccgctacccagagaccagcggctcaccccgcagggagggaactgtcaatgttctatagcatgggctyaattggaatggtttgagtgaaaccaaatttcagtcgagatcctgctgccagcaagctggatataacagtggcctttcactcagggcctggcactgaaaca

SEQ ID NO: 386686 - DNA, 201 bp, Homo sapiens
cacaagtctgataggagaactgtaagggggctggggcagctcctggctgtcgtggtggtggagggggtggtggcggtggcggctgctgctgctgtagctgygtgggcagaggaggagcagcccggggaccggaagtggagggcaggggctgaagctgcatctcttggtactggctgaggaaagggctgtattgcatctgct

SEQ ID NO: 386687 - DNA, 201 bp, Homo sapiens
gggttccattcgctttcttagcccacccgtcttcttgagttcagacctacaactcctgcagtgggggtcagaagggagccttaatcatcgggacagaaackcggctccccaacttcggctaaaccagcgtggcggccttcgtccctactgcctgggcgcggggcggggcctgggcgcggggcggggcctgggcgcggggcg

SEQ ID NO: 386688 - DNA, 201 bp, Homo sapiens
ttaaattactatttggtacagagattatttattacactgcattttaggcaattttctaacattaagtgacaagttatacttttgattttttttttcacatkggagctattatgatttgcactcataataccaaagctactgaactcaccaatttttttcttagtaattaaaaaaaagcacacagaaaatataactacaatt

SEQ ID NO: 386689 - DNA, 201 bp, Homo sapiens
attggagctattatgatttgcactcataataccaaagctactgaactcaccaatttttttcttagtaattaaaaaaaagcacacagaaaatataactacarttagattaactttatcaaaagtaactctttcagaccaaacatccagcaaaaccacccacctcccttcagatataagcaaataatcttgccctttctacaa

SEQ ID NO: 386690 - DNA, 201 bp, Homo sapiens
ccgggcggttgtcggggaacccgcttcccgcctgggcgccccatccgggccgtgaggtggccgcgtctcttgggcgagggagcaggagaagcgcggtgccmggccgagacggggctggagcggctgaggggcgcaggatgcccagaagccctttgaagtgcccctggatcccttcatctcggcttggaactggctcggctt

SEQ ID NO: 386691 - DNA, 201 bp, Homo sapiens
aacccgtgggcagaattctgtgagcgtttccctgcctttaggactgatgacactcggtgtgtgggtggaggtgggggagtcgtcagtcttatgatgagtcycttctgctggagactttggtccacgagagagggtagggggcaggggagaggccgatactcctacagggggggtccccccttgctccccatcaaaatgcag

SEQ ID NO: 386692 - DNA, 201 bp, Homo sapiens
ataggagacatcactttgacagccactatcccagaatccctccatggattccctttcaaacacaatctctctttcctcctccacttgccactccatttccktaagagtaacattatcctgacttttatggtaagcgcagcctttgttttctttgcactttttcttttcttttcttttctttttttaaaaggagtctcactc

SEQ ID NO: 386693 - DNA, 201 bp, Homo sapiens; identical to SEQ ID NO: 85033

SEQ ID NO: 386694 - DNA, 201 bp, Homo sapiens
aatgctgttaggattttgactgggtcaccttcctggtcgcatagtgaatctgttcctagttttgtgtcagtgtccagctgtgggagagctatccatgttgrtgagtcctgttgttgtcacttccagatacaatttatgatgaagatgaggtactattagctcttgctgagcagctgggaaatttcactggcctagtgggag

SEQ ID NO: 386695 - DNA, 201 bp, Homo sapiens
cagtaggcaggggacagatcatgaaatgcattggcaagtgagaaacagtatcttttcaatgagtttctgaaataccttctaggaaagctgaatactgtctrcctgtgtgtatcaaacaatttttaaaatatattattagacacacttcttttctttaactcattatgcttctgtttcactcttggttagttctatatgtgg

SEQ ID NO: 386696 - DNA, 201 bp, Homo sapiens
aaaatgctgttaggattttgactgggtcaccttcctggtcgcatagtgaatctgttcctagttttgtgtcagtgtccagctgtgggagagctatccatgttgatgagtcctgttgttgtcacttccagatacaatttatgatgaagatgaggtactattagctcttgctgagcagctgggaaatttcactggcctagtggg

SEQ ID NO: 386697 - DNA, 201 bp, Homo sapiens
cttgtctctactaaaaagaaaaaaattagctgggcatggtgggacccgcctgtatttctagctactcagaaggctgaggtgggagttcacttgagcccccsacaaacaacaacaaaaatatttttggcatatagatagggtcttgctatgttgcccagtctgctttcaattcctggcctcaagcagtcctcctacctgggc

SEQ ID NO: 386698 - DNA, 201 bp, Homo sapiens
ggtttggctccagaatttgtgcccttcacagctaggctgtcccgcttctctgtaatggtgcttaataggatcagctcccagagttcctggactctagaatmgtccttttgggcttttaatttgcatgttgcctgccctaagatcgcttcatgtgtacaggaccacaagccccaggacacatattaatgagtctcattttca

SEQ ID NO: 386699 - DNA, 201 bp, Homo sapiens
  misc_feature (1)...(201): n = A,T,C or G
cattttggtgcatttttttgttagtcaattttgcatgttttttgttctagaatatgtttttaaaatacatagggatgtttttagtgtgtggaaatgttacnttgtcacttaaagatagtctctttatatttaaaaccaagaaatcattttgtcttgtttttgtaaaaaaaaaaatgcctttcaggttggattggtgtgata

SEQ ID NO: 386700 - DNA, 201 bp, Homo sapiens
tgaaggtaaaccttaatctcattatttttgtttgtttgtttaccttaaagctctttgagtttaaaggttgacagggaatgaatggggaagatgtgttaatrtgcaacattgttattcatcacttattagcccattgtaattgtaaactgctctttggtgcataggtttatgttacctaacaagtagtctgaggaaacatta

SEQ ID NO: 386701 - DNA, 201 bp, Homo sapiens
gtttcgatgagtgtgagtgcccctatggggtcatgtgacattgtccttgagctttgtttccatgttttggtggatataatagataacctgagtcagttccrcagtatcttttatatacttgatatatgtatttagtgtatctctttgttcatctatgggtgcttatgcctggaaatttgggaggaatgaggatatttgtgt

SEQ ID NO: 386702 - DNA, 201 bp, Homo sapiens; identical to SEQ ID NO: 85036

SEQ ID NO: 386703 - DNA, 201 bp, Homo sapiens
gctcaagcagtccacccatgttggccctcccaaagcactgggattgcagttgtgaggcaccacacctggccctttgcttatttctatactgggttgcttgwcatttgttgttgaactgtaggtaattgtttatggattctgggcattaaacccttactaaatacgtatgaaatacaaatattttctcccattctacaggtt

SEQ ID NO: 386704 - DNA, 201 bp, Homo sapiens
aacaggatatgaaacttgaaacttcatggtgtgttcaagattgatgaagagagtgtatgaccagagctgagaacagattatgtgaaaagtggaaggaaaartcatggaatatcaggcttggaacaggaaacaagaatgtgcatgtatttccataatgacagatggaaactcaaaatggcaaaagagctgttttaatgtggg

SEQ ID NO: 386705 - DNA, 201 bp, Homo sapiens
agaaactcgtttccatttgtatttaaaggaaagagagaactttttggaattagttggaatttacatggcacctcctctggggctggtagaattgctatttrtccatgatcaagagcaccactcttaacacccatgtgctccaccctcacaatacaccatcattattgggccagatagcggggcttgcaggagttaactctg

SEQ ID NO: 386706 - DNA, 201 bp, Homo sapiens
cttttgatgctattgcaaatgtaactatttccttgattttattttcatattgctcattgctgatataaacagacacaactgatatctggaccaatcttacrtcctaaaattaagctgaaaacatttatcagctctagttgttttttgtgggttatatggacttttctttatatataattgtgttatcttaaaatagaaata

SEQ ID NO: 386707 - DNA, 201 bp, Homo sapiens
gtctttatttctttccttttgccagtaccatgctgttttgactactatagttttgttttgaagtctggaaatttggaaattgagtcctctccctgtagttrcatataaattcaggattggcttttccatttttgcacaaataaaaattttaaaaaggacattggaattgtgacagtgattacattcaatctttagattact

SEQ ID NO: 386708 - DNA, 201 bp, Homo sapiens
tgagataggggttcaacttcattcttttgtatgtggctacccagttgtcccagcactgtttgttgaagaaacgcttcctttatttatttatttttttttgmaactcttcctttagattaaatgatcttggtacatttgttgaaaatgaaccgggcatagatgattaggtttatgtttggatttcaattttattccactggt

SEQ ID NO: 386709 - DNA, 201 bp, Homo sapiens
tgaacaaacattttaatttggtgaggcccagtttatctctcttattttagttgttttggtgtcaaatctatgcatccacttccaattctgaaggcattaakatttaaccgatgttttattctaagaattgtatagttttagttcacatttaagtttttcgttcactttcagttatattttgcataagagtgagataggggt

SEQ ID NO: 386710 - DNA, 201 bp, Homo sapiens
atttcacatttttaattttgtcctttgatgaacaaacattttaatttggtgaggcccagtttatctctcttattttagttgttttggtgtcaaatctatgyatccacttccaattctgaaggcattaatatttaaccgatgttttattctaagaattgtatagttttagttcacatttaagtttttcgttcactttcagtt

SEQ ID NO: 386711 - DNA, 201 bp, Homo sapiens
tgtagtctggggttttttttgtacacatccttcttgttaggctttccagatattaaaaaggacttaacctattttcgatttgcccctagaatactgcaccrgcagtgaactgcactttttttaataaatgggaaatgagttaagtgttgtgatctaagctgtatctgctttaggggcactccaagcccaataatgcagtgg

SEQ ID NO: 386712 - DNA, 201 bp, Homo sapiens
aatctcaccccctgagcagtgctaccacaggcccatgcagaatacagaccctgtacaagagccaagtcctggttttggagagtccaggagtgcacttggtrctctaccctcctgtgatcaagctagtacctagttgcaagacaaagtcgactttatatttcactctgatttctcaagtagaaggagtctttcctgatagcc

SEQ ID NO: 386713 - DNA, 201 bp, Homo sapiens
gtatatagttgttcatggtagccaccaatgatcctttgaatacctgtgatatcagttgtaatgccttctttttcatctctgacttatttggatcatgtcayatttttccttagtctggctaaaggtttgtcagctttctttaatgcttctaaagaacaactttttgctttgttaatattttgtattgttttctttatttca

SEQ ID NO: 386714 - DNA, 201 bp, Homo sapiens
tagtttaattaggtcccattgtcaactgtttttgttgaaattgcttttaaacattgagtcataaatccttagcctacaccaatgctcagaagagttttttrtaggttttttctagaatttttatgatttcaagtctcatatttaagtctttagtccatcttgagttaatttttgtatgtggtgagatataagaatcatatt

SEQ ID NO: 386715 - DNA, 201 bp, Homo sapiens
ttgttgaaattgcttttaaacattgagtcataaatccttagcctacaccaatgctcagaagagttttttgtaggttttttctagaatttttatgatttcargtctcatatttaagtctttagtccatcttgagttaatttttgtatgtggtgagatataagaatcatatttcattcttctacatgttcccctgggtaatat

SEQ ID NO: 386716 - DNA, 201 bp, Homo sapiens
gtaatatcagccaagcacaaatcccgcagctaccagcgtaggtggctctttcctgcaagaaccacctcctagctggaagccaataggcacagcctattacaaacatctgctggcaaaataacatagcatttgggaaggagaaaacttttatcgtatctcagctaacaccatacccacatcaccccagctaatcggaaggtc

SEQ ID NO: 386717 - DNA, 201 bp, Homo sapiens
caaatagttggcttatatatctcaaatacaagaagtcttatagtgggctagactagaaataatatggtagccctgaagcatgagagagtcaagtgccttcttttttttttttttttttttaccatatttagtatagaagtcttcattactatgatcaaatgctcatgtcccaagatgatgtcaatcctacctcccccttca

SEQ ID NO: 386718 - DNA, 201 bp, Homo sapiens
aacatgactaggtcatcagtgttctgacctcataaatatactcatgttgttattgcaagagtggggtagttcttgatagcttgttataaatgtgagtgtgccccccccaattgctctcactcttaccctttcttgcccttctactttttgccatgcaatgaaataggatgaaggccattgccagaagccagtgccatgctc

SEQ ID NO: 386719 - DNA, 201 bp, Homo sapiens
gaaattattactaggagtttcaaacatgtgcaaatactctaacttgaagaatagaaaattgtgatttaactaaagaaccaaggaagaatgtgtatgtgtgyatatgtgtgtgtgtgtgtgtgtgtgtgtgcttctgtgagtatatttagaatgatgtaaacaatgaatagtgatataaccagaaattgtggtctaaatata

SEQ ID NO: 386720 - DNA, 201 bp, Homo sapiens
acaaagtgcttaaaaatgttgctcttacacgaagttacattagggagaaagtaaaagaacaccaagcatcactggatgttaacaatcctcgggactttatsgattgcttcctgatcaaaatggagcaggtaagatattagcaacagatcagtattttgatttcttgtccattttgtgattcatcgaatccttctgtaattt

SEQ ID NO: 386721 - DNA, 201 bp, Homo sapiens
ggagtttcaaacatgtgcaaatactctaacttgaagaatagaaaattgtgatttaactaaagaaccaaggaagaatgtgtatgtgtgtatatgtgtgtgtrtgtgtgtgtgtgtgtgcttctgtgagtatatttagaatgatgtaaacaatgaatagtgatataaccagaaattgtggtctaaatatattctggtaagtag

SEQ ID NO: 386722 - DNA, 201 bp, Homo sapiens
gagtaggacaaaagaacattttatttctatccatgggccaaagtccactcagaaaaaaagtataaattggatctaggtgattgtttactttacatgtcaamgagacacacactaaattagcagggagtgttataaaaactttggagtgcaagctcacagctgtcttaataagaagagaaggcttcaatggaaccttttgtg

SEQ ID NO: 386723 - DNA, 201 bp, Homo sapiens
ggcagtaataaacacacaatagtttttacttcttattgcacttgtggttgtcatcccagatgacatcatattaaaatagattacatgtttatttacaaaarttctatgaacagatactctggacatttcaagtgtcaacagagacttccattttaaaccataatctacataatcaaaatacaagatgtgtcaaatttgaag

SEQ ID NO: 386724 - DNA, 201 bp, Homo sapiens
acttctttataaatcagattatctgttttgttacttccagggcacaaccataatggcattactgacttccgtgctacatgatgacaaagaatttcctaatscaaatatctttgaccctggccactttctagataagaatggcaactttaagaaaagtgactacttcatgcctttctcagcaggtaatagaaactcgtttcc

SEQ ID NO: 386725 - DNA, 201 bp, Homo sapiens
tcctgtaatcaaggaaagttcctttcctggtttgtttcttttcaatcagttgacctttttgagaccagcagtcatttaaaatgttcctcaggctggttttstatgactgttttctagaggcagattccagctacaattttggcaagaaaactacataggtgctttaaatatcctgctgaatcacattgatgaggtgggagc

SEQ ID NO: 386726 - DNA, 201 bp, Homo sapiens
ggaatatagaaatactaccgatttttgtatattattttgtatcttgcaactttacggaatttgtttattatttctcatagttttttagtggagtctttatgtttttttaaatataagattatattctctgcaaatgagtataatttgacttcttccattctaattgggatcccctttgtatctttctctgattgctctagc

SEQ ID NO: 386727 - DNA, 201 bp, Homo sapiens
attcagaattgaatatgacatgaacacagtcaaaaattgactgtaggtatgagcttacctctctgaagttcttccgtcactggggccaattattgtctttrtaatctggaggccaattttggtctttgcagctttacaatgctgtctatcacatggtttctgtattcatccagatgttttagttgctatgctataaactac

SEQ ID NO: 386728 - DNA, 201 bp, Homo sapiens
tatctttattgcattattgtgctggctaggattttcaggttagcattgaacagaattggtgatagagggcatccttatttcatttctgatctgctgggggrtagagtataagaatattaatatttcactactgagaatgatgttttaagtattttttttaaataattgacttttatttaacttcatttataaaagaatttt

SEQ ID NO: 386729 - DNA, 201 bp, Homo sapiens
atgtatatgacgagttattgggtgcagtacaccaacctggcacatgtatacatatgtgacaaacctgcactttgtgcacatataccctagaacttaaagtrtaataaaaaatgtatatatgtataaaaatttcccttcaaaatggacatgatgtcttattcatatttatagttataatttcaatcagggcttggtgtaaga

SEQ ID NO: 386730 - DNA, 201 bp, Homo sapiens
tattattttgctatctgggttaatatgtattttatatcttattttccaatgattttgtcttcaatttatctttattgcattattgtgctggctaggatttycaggttagcattgaacagaattggtgatagagggcatccttatttcatttctgatctgctggggggtagagtataagaatattaatatttcactactgag

SEQ ID NO: 386731 - DNA, 201 bp, Homo sapiens
aacatttcaccagagaacacttggaaagtggacatggtgaaagtgacctcatcacacttcatgaaatatgaaccaagttatatgtgctttcatttaattcragttttttcatatggtcatactcacatgtctggaaattccttccaggtccatgcctacagctctggccagcaatgacactatgtatggttttacttgctt

SEQ ID NO: 386732 - DNA, 201 bp, Homo sapiens
ttctatgtatattattttgctatctgggttaatatgtattttatatcttattttccaatgattttgtcttcaatttatctttattgcattattgtgctggmtaggattttcaggttagcattgaacagaattggtgatagagggcatccttatttcatttctgatctgctggggggtagagtataagaatattaatatttc

SEQ ID NO: 386733 - DNA, 201 bp, Homo sapiens
tcttttattaggtttttcctagataattaatattttgttgtgttataattttttaattttttttatttctttgtaattggtataagtaattgtattcaatkatactattctgatgaccttatatctaacaactttcctaaatttactgatcattgctgataatttatctgtagatatacttggaatttctatgtatattat

SEQ ID NO: 386734 - DNA, 201 bp, Homo sapiens
taattgcatcactgcccctgctccaccaccgcacacacaaatatatttataaaaccattacaatttaacattataccccatatattattttgataatacakatttgattgtttttctgtttgcaagcactgtaatttattgacttattatgttctgtttattttttaaataatgtattacttaaatttgtattgtcatata

SEQ ID NO: 386735 - DNA, 201 bp, Homo sapiens
taagattgcattaaatctatagattaattcagaaaattatgacattttaaatattgagatgaaattcatataccatatatcacccaatttaaagtgtacamtttaatggtattttgtttaattacaatactgtgcaactgaggtaggaggtgggagtcaactccagaggtgggtcttggacatgggaccagattgatggct

SEQ ID NO: 386736 - DNA, 201 bp, Homo sapiens
tcctttatcagattagggaagttttttctcttctctcatttttatataaatttgtgtcatgaatgtgtgtgcaattttatcaaattgattctctgcatctrtttatatgattgtatatactggcctcacatccctcactaaatatacataagtatacacaaacagctggatttgttctgttacttattgttcaggacttct

SEQ ID NO: 386737 - DNA, 201 bp, Homo sapiens
aaaagtttaaagtgctgtttctcctctttgtttcacagtgttttgctatgatttttgactgaaggtgaagggaagtgtgtgtgattagaaatttcatccartaagttctctactatagtagtcatgtgttttattcagaatggtcatgaaaattgaacttctctgaagattcatttgatggctgatgtgaaataaatatct

SEQ ID NO: 386738 - DNA, 201 bp, Homo sapiens
tttagacaaaatatattcctggaagcacactattataatagatcattgtaaagcaaaatactccctctgaacttctttgatgtttcttttgtcttcctatttttttttttttgagacggagtctcgctctattgcccaggctggagtgcagtggcactatctccactcactgcaagctctgcctcccaggttcacaccatt

SEQ ID NO: 386739 - DNA, 201 bp, Homo sapiens
ctcctcacttctggacttctttataaatcagattatctgttttgttacttccagggcacaaccataatggcattactgacttccgtgctacatgatgacaragaatttcctaatccaaatatctttgaccctggccactttctagataagaatggcaactttaagaaaagtgactacttcatgcctttctcagcaggtaat

SEQ ID NO: 386740 - DNA, 201 bp, Homo sapiens
agccctaaaaagcttctcagcagagcttagcctatctgcatggctgccgagtgttgcagcactttcttccttggctgtgaattctcccagtttctgcccctttttttattaggaatcatttccagcaatggaaagagatggaaggagatccggcgtttctccctcacaaccttgcggaattttgggatggggaagaggagc

SEQ ID NO: 386741 - DNA, 201 bp, Homo sapiens
acacatggggaatttgtaagatattgtttaaaatttctaaatttcctttatgtcttaacaaatgcaaatcttttaaatatttattttttaataattttttwaaaaatttttaaatctttagcttcaccctgtgatcccactttcatcctgggctgtgctccctgcaatgtgatctgctccgttgttttccagaaacgattt

SEQ ID NO: 386742 - DNA, 201 bp, Homo sapiens
gaggaccgtgttcaagaggaagctcactgccttgtggaggagttgagaaaaaccaagggtgggtgactctactctgcgtcattgaccttaacagttacctstcttcactagtgacgtccttggaaacatttcaggggtggccaggtcttcattgcgcatcctggttgtcagccctcaggtggtggagggagatttgaagca

SEQ ID NO: 386743 - DNA, 201 bp, Homo sapiens
taggatgaaggccattgccagaagccagtgccatgctcttggacttcccagccttcagaatcatcagaaataaatttcttttctttataaattaccaagtstatagtattctgttttataacacaaattgaagtaagacagggcatcagtatacttctgcttttatttctggggaaagaaatattctgtgtgactaaccta

SEQ ID NO: 386744 - DNA, 201 bp, Homo sapiens
aactacgtgacacatgcacaagcttcagtagttgattcaatcaaatggaagaaagggtatcagtgattgaagatcaaacaaatgaaatgaagcgagaagasaagtttggagaaaaaagaataaaaagaaatgcacaaagcctccaagaaatatgggactatgtgaaaagaccaaatctacgtctgattggtgtatctgaaa

SEQ ID NO: 386745 - DNA, 201 bp, Homo sapiens
tcttaattactgtagttttgtgtcaagttttcaaatcaaaaagtatgagtcctcaaagcttttttcaagactatttgggcttttttgtgttcattcagtcrcaacaaaaatttaagaataaacttgtcaatttctgcaaacaagcccataggaattttaagattgcattaaatctatagattaattcagaaaattatgaca

SEQ ID NO: 386746 - DNA, 201 bp, Homo sapiens
tagtccatcttgagttaatttttgtatgtggtgagatataagaatcatatttcattcttctacatgttcccctgggtaatatcagccaagcacaaatcccrcagctaccagcgtaggtggctctttcctgcaagaaccacctcctagctggaagccaataggcacagcctattacaaacatctgctggcaaaataacatag

SEQ ID NO: 386747 - DNA, 201 bp, Homo sapiens
tctttaaatttctgtgtcatcagctgtaatctgtctaaatttgatgacacaatttaaaatgacatctttgtacaatggaggaggatgacagagatcagtaraaacagtatggcagtagcaaaataagtaaagcactgatgaagtgtctggatttcagcaaaggtaatttgtggtaaggagagccagcataaattgccctag

SEQ ID NO: 386748 - DNA, 201 bp, Homo sapiens
gtgggctctcaattctactccattggtctgtctgtccttatgtcagtagtacctcattttgaagtcttaattactgtagttttgtgtcaagttttcaaatmaaaaagtatgagtcctcaaagcttttttcaagactatttgggcttttttgtgttcattcagtcgcaacaaaaatttaagaataaacttgtcaatttctgc

SEQ ID NO: 386749 - DNA, 201 bp, Homo sapiens
tgacaaacctgcactttgtgcacatataccctagaacttaaagtataataaaaaatgtatatatgtataaaaatttcccttcaaaatggacatgatgtctyattcatatttatagttataatttcaatcagggcttggtgtaagatacatatatcttatgacatgtttatatttaatattcttttctcttttaggtctgca

SEQ ID NO: 386750 - DNA, 201 bp, Homo sapiens
aagcattcaattctgtcatcttgctccactctcccatttgtatatcttcttttgagaaatttctgttcatgttgtttgcccactttctaatgggattattyggatttttttcttgctgttttgagtttcttgtagactctggaaaatagtcctttgttgaaggtatattttgcaaatattttctcccattctgtaggttgt

SEQ ID NO: 386751 - DNA, 201 bp, Homo sapiens
catgctcatctgattttggttcttatgaaggtacattttgtgtagatagctgttaaactgatgtctttgcttggggaataatcaatgaagcattcaattcygtcatcttgctccactctcccatttgtatatcttcttttgagaaatttctgttcatgttgtttgcccactttctaatgggattattcggatttttttctt

SEQ ID NO: 386752 - DNA, 201 bp, Homo sapiens
gcccagttcagcaccaggactcacataaaagttacagtacttgtagccaacactgcctttcaggtttatttaccatcccagagccctatagtccacagtgwtgaggcttgtagaaactcggttccaaccactggtatcagagattcacctctggccagggctggtttaaatgctccctctgtgagtgggcatcagctgatt

SEQ ID NO: 386753 - DNA, 201 bp, Homo sapiens
agtgcaaggggtcagggaattccctttcctagccaagcaaagctgtgaacagatggcacctggaaaattgggtcactcccaccctaatactgtgcttttcyagtggtcttagtaaatggcacaccaggagattatatcctgcacctggcttggagggtcccatgcccacgaagcctcactcattgccagcacagcagtctg

SEQ ID NO: 386754 - DNA, 201 bp, Homo sapiens
ttggagaaaaaagaataaaaagaaatgcacaaagcctccaagaaatatgggactatgtgaaaagaccaaatctacgtctgattggtgtatctgaaagtgayggggagaatggaactgagttggaaaacactctgcagggtattatccaggagaacttccccaacctaggaaggcaggctaacattcaaattcaggaaatac

SEQ ID NO: 386755 - DNA, 201 bp, Homo sapiens
tagaggtactgccttgatggtcttggacaagatccaagagaattctctggattaccagaaactcttgttcccttcccttaatttctcccaaataaacaaaktctctctctctgttctgagtcaattgaaactggggatggaatgacacaagcactcatgtatccaccaccactgtgactgcactgggtgagacttaaaaca

SEQ ID NO: 386756 - DNA, 201 bp, Homo sapiens
ccatcagaagtgcaaggggtcagggaattccctttcctagccaagcaaagctgtgaacagatggcacctggaaaattgggtcactcccaccctaatactgygcttttctagtggtcttagtaaatggcacaccaggagattatatcctgcacctggcttggagggtcccatgcccacgaagcctcactcattgccagcaca

SEQ ID NO: 386757 - DNA, 201 bp, Homo sapiens
aacactctgcagggtattatccaggagaacttccccaacctaggaaggcaggctaacattcaaattcaggaaatacagagaacgccacaaagatactcctygagaagagcaactccaagacacataattgtcagattcaccaaagttgaaatgaaggaaaaaatgttaagggtagccattgagaaagggcgggttacccac

SEQ ID NO: 386758 - DNA, 201 bp, Homo sapiens
ggaagacttggtttaaaaatgagaaaattgatactaaaatgcttttatacaataaaaatgatgtatgagtgaagaaaataattaccacctttgatttcctrttcaaaattttcagcctccaatctttaggtacagaaaattgctatatgtgcacaataaaaatttccccatcagaagtgcaaggggtcagggaattccctt

SEQ ID NO: 386759 - DNA, 201 bp, Homo sapiens
aaagatactccttgagaagagcaactccaagacacataattgtcagattcaccaaagttgaaatgaaggaaaaaatgttaagggtagccattgagaaaggkcgggttacccacaaagggaagcccatcagactaacagcggatctctcggcagaaactctacaagccagaagagagtggtggccaatattcaacattctta

SEQ ID NO: 386760 - DNA, 201 bp, Homo sapiens
agcataacaatattaaccttaaatgtaaatgggttaaacgctccaattaaaagacacagactgggaaactggataaagagtcaagacccatcagtgtgctstattgaggaaacccatctcatgtgcagagacgcacataggctcaaaataaagggaaggaggaagatctatcaagcaaatggaaaacaaaaaaaggcaggg

SEQ ID NO: 386761 - DNA, 201 bp, Homo sapiens
caaaaaacgagaattttagaccaatatccctgatgaacatcaatgcaagaatcctcaataaattacggcaaactgaatccagcagcacataaaaagcttayccaccacgatcaagtgggcatcatccctgggatgcaaggctggttcaatatacgcaaatcagtaaatgtaatccagcatataaacagaaccaagacaaaa

SEQ ID NO: 386762 - DNA, 201 bp, Homo sapiens
aaaaaccacatgattatctcaatagatgcagaaaaggccttttaaaaaattcaacagcacttcagtctaaaaacactcaataaattaggtattgatgggaygtatctaaaaataataagagctatttatgacaaacccacagccaatatcatactgaatgggcaaaaactggaagcattccctttgaaaactggcacaaga

SEQ ID NO: 386763 - DNA, 201 bp, Homo sapiens
taataaagatgtatcttagccaaaatgaacaacaggatatgaaacttgaaacttcatggtgtgttcaagattgatgaagagagtgtatgaccagagctgaraacagattatgtgaaaagtggaaggaaaaatcatggaatatcaggcttggaacaggaaacaagaatgtgcatgtatttccataatgacagatggaaactc

SEQ ID NO: 386764 - DNA, 201 bp, Homo sapiens
aaaattcaacagcacttcagtctaaaaacactcaataaattaggtattgatgggacgtatctaaaaataataagagctatttatgacaaacccacagccartatcatactgaatgggcaaaaactggaagcattccctttgaaaactggcacaagacagggatgccctctctcaccactcctattcaacatagtgttggag

SEQ ID NO: 386765 - DNA, 201 bp, Homo sapiens
agaatattaatatttcactactgagaatgatgttttaagtattttttttaaataattgacttttatttaacttcatttataaaagaattttcacgaatatrgtttgaaatgatactctacatttgttatgaaacagatagttggtattttcataaaatcccagcccccagaaggctcatgtcattccaagtgatcagactc

SEQ ID NO: 386766 - DNA, 201 bp, Homo sapiens
gactacttcatgcctttctcagcaggtaatagaaactcgtttccatttgtatttaaaggaaagagagaactttttggaattagttggaatttacatggcamctcctctggggctggtagaattgctatttgtccatgatcaagagcaccactcttaacacccatgtgctccaccctcacaatacaccatcattattgggcc

SEQ ID NO: 386767 - DNA, 201 bp, Homo sapiens
gtgatagagggcatccttatttcatttctgatctgctggggggtagagtataagaatattaatatttcactactgagaatgatgttttaagtatttttttwaaataattgacttttatttaacttcatttataaaagaattttcacgaatatagtttgaaatgatactctacatttgttatgaaacagatagttggtattt

SEQ ID NO: 386768 - DNA, 201 bp, Homo sapiens
taatttatagattcaatgccatccccatcaagcaccaatgactttcttcacagaattggaaaaaactactttaaagttcatatggaaccaaaaaagagccygcattgtcaagtcaatcctaagccaaaagaacaaagctggaggcatcaggctacctgacttcaaactattctacaaggctgcattaaccaaaacagcttg

SEQ ID NO: 386769 - DNA, 201 bp, Homo sapiens
agaacaaagctggaggcatcaggctacctgacttcaaactattctacaaggctgcattaaccaaaacagcttggtactggtaccaaaacagagatatagaycaatggaacaaaacagagccctcagaaataataccacagatctacaactatctgatctttgacaaacctgagaaaaacaagaaatggggaaaggattccc

SEQ ID NO: 386770 - DNA, 201 bp, Homo sapiens
ccctcacaaccttgcggaattttgggatggggaagaggagcattgaggaccgtgttcaagaggaagctcactgccttgtggaggagttgagaaaaaccaarggtgggtgactctactctgcgtcattgaccttaacagttacctgtcttcactagtgacgtccttggaaacatttcaggggtggccaggtcttcattgcgc

SEQ ID NO: 386771 - DNA, 201 bp, Homo sapiens
gcattaaccaaaacagcttggtactggtaccaaaacagagatatagaccaatggaacaaaacagagccctcagaaataataccacagatctacaactatcygatctttgacaaacctgagaaaaacaagaaatggggaaaggattccctattcaacaaatgttgctgggaaaactggctagccatatgtagaaagctgaaa

SEQ ID NO: 386772 - DNA, 201 bp, Homo sapiens
cccctttttttattaggaatcatttccagcaatggaaagagatggaaggagatccggcgtttctccctcacaaccttgcggaattttgggatggggaagargagcattgaggaccgtgttcaagaggaagctcactgccttgtggaggagttgagaaaaaccaagggtgggtgactctactctgcgtcattgaccttaaca

SEQ ID NO: 386773 - DNA, 201 bp, Homo sapiens
gcattaaatctatagattaattcagaaaattatgacattttaaatattgagatgaaattcatataccatatatcacccaatttaaagtgtacactttaatsgtattttgtttaattacaatactgtgcaactgaggtaggaggtgggagtcaactccagaggtgggtcttggacatgggaccagattgatggctagctaaa

SEQ ID NO: 386774 - DNA, 201 bp, Homo sapiens
gaataaataaagaaatgactgttatggagctgataatcaatgaatatttgttgaatgaagggtgcctattgagattagatgttagacagatagcaaatatrtctctttttgtacatttgtttgtcccaccatccattaatcaatccatcatgtcatccatccattcatccacatgttcattcatctacccaatcattaatc

SEQ ID NO: 386775 - DNA, 201 bp, Homo sapiens
gccccatgcagtgaccactgatactaagttcagaaactacctcatccccaaggtaagcttgtttctcttacactatatttctgtacttctgaaatttccawagtgctggtttggttccaaccctctaacaacacaagatgagagaagtgcaaaactcatacatgtggcagcttgatggactttctgctattttgtttgggg

SEQ ID NO: 386776 - DNA, 201 bp, Homo sapiens
aaataatctacatgagtagaataatatagacactgcagtcaaatggaaacaattataaataagtagaaaatacaaaatatcctaccacaaactgaagatgratatcaatattgcacatagattatgtgacaatggaaaagaatggcttatcataaatgggcttcctgtatgccctgcacattgacatagcccttaatatat

SEQ ID NO: 386777 - DNA, 201 bp, Homo sapiens
tatacttgtagatattcatcgggggctgggcattctagagttaggtatttttgttgtctttgtagtctggggttttttttgtacacatccttcttgttagrctttccagatattaaaaaggacttaacctattttcgatttgcccctagaatactgcaccggcagtgaactgcactttttttaataaatgggaaatgagtt

SEQ ID NO: 386778 - DNA, 201 bp, Homo sapiens
acacttggggttaaaagagtttaaataaaggcagtggatgtgaataaccacatgcgaaatgacattgtttagctagcctgtaatgctcaactcatatttarggtaaaagtaatgtgtttatttcatccatgctgattttttttggacacatggggaatttgtaagatattgtttaaaatttctaaatttcctttatgtctt

SEQ ID NO: 386779 - DNA, 201 bp, Homo sapiens
ttttattttatttatttattttggagacaaggcctctctgtgttgctcaggttggagtacagtgctgtcatcttggctcactgcaacctctgactcttggkctcaagtgattctcctacctcagcctcccaagtagctaggagcacaggcacaaacccccacacccagctaatttttgtattttttttgtacaaacttggt

SEQ ID NO: 386780 - DNA, 201 bp, Homo sapiens
tccagaggctttgcaaacagacatgattctgctctaaaaacttgaattattaggatttcaaaaaagtcttctttttccttccaaaataaaagacacttggrgttaaaagagtttaaataaaggcagtggatgtgaataaccacatgcgaaatgacattgtttagctagcctgtaatgctcaactcatatttaaggtaaaag

SEQ ID NO: 386781 - DNA, 201 bp, Homo sapiens
agtacagtgctgtcatcttggctcactgcaacctctgactcttggtctcaagtgattctcctacctcagcctcccaagtagctaggagcacaggcacaaayccccacacccagctaatttttgtattttttttgtacaaacttggtttcaccatgtttcctaggctggtctcaaactcctgagctcaagcagtccacccat

SEQ ID NO: 386782 - DNA, 201 bp, Homo sapiens
tgataaacattatttccaaaggaaggaaattcattttttacaaattgaaaaaataaataaaaagattccatttatcaatttactttttggttagctttacwgggatttagatttgaaataaaaagttagcattttacttatttagataaacaaatctgttatacttaatgctcatttatattagtttttcttctcatatca

SEQ ID NO: 386783 - DNA, 201 bp, Homo sapiens
tcattaatttggtttgcagctattttcttgaggatttttgcatgaatattcctcagagacattggcctataacttttttttttaatgtgtctttggttttrttatcagagtaatactggccttatagaattaatttggaagtattccctccttcactattttgtggaatagtttgagtaggattggtattagttctttaaa

SEQ ID NO: 386784 - DNA, 201 bp, Homo sapiens
tattggttcttagctttgaaatttgtgctaatcatttttctcccactgccaatttactcacctatgaagtgcttgttataatcaatctgattatcagctgrgatataaaattacctttttaaattcactctcccaaatgcagtaaaaaaaaaaaaacctggatatcagattgtacctgagaaacacacacacacacacaca

SEQ ID NO: 386785 - DNA, 201 bp, Homo sapiens
ggtactggtaccaaaacagagatatagaccaatggaacaaaacagagccctcagaaataataccacagatctacaactatctgatctttgacaaacctgasaaaaacaagaaatggggaaaggattccctattcaacaaatgttgctgggaaaactggctagccatatgtagaaagctgaaactggatcccttccttacac

SEQ ID NO: 386786 - DNA, 201 bp, Homo sapiens
aacccccacacccagctaatttttgtattttttttgtacaaacttggtttcaccatgtttcctaggctggtctcaaactcctgagctcaagcagtccaccsatgttggccctcccaaagcactgggattgcagttgtgaggcaccacacctggccctttgcttatttctatactgggttgcttgtcatttgttgttgaact

SEQ ID NO: 386787 - DNA, 201 bp, Homo sapiens
ggcataagcttttagattttcacaatttgatataaaacatctttggaatttttataaatacattttattatgataaggaattttcccttctattcatattyttgagtgattttttatattatactttaggttctgggatacatgtgcagaatgtgcaggtttgttacataggtatacatgtgccatggtggtttgctgcac

SEQ ID NO: 386788 - DNA, 201 bp, Homo sapiens
cagatctacaactatctgatctttgacaaacctgagaaaaacaagaaatggggaaaggattccctattcaacaaatgttgctgggaaaactggctagccayatgtagaaagctgaaactggatcccttccttacaccttatacaaaaattaattcaagatggatcaaagacttaaatgttagacctaaaaccataaaaatt

SEQ ID NO: 386789 - DNA, 201 bp, Homo sapiens; identical to SEQ ID NO: 85037

SEQ ID NO: 386790 - DNA, 201 bp, Homo sapiens
ttgacaaatgggacctaataaaactaaagagcttctgcaaagcaaaagaaactaccatcagagtgaataggcatcctacagaatgggagaaaaattttgcwatctactcatctgacaaagggctaatatccagaatctacaatgaactcaaacaaatttacaagaaaaaaaccaaacaaccccatcaacaagtgggcaaag

SEQ ID NO: 386791 - DNA, 201 bp, Homo sapiens
aaactaaagagcttctgcaaagcaaaagaaactaccatcagagtgaataggcatcctacagaatgggagaaaaattttgcaatctactcatctgacaaagrgctaatatccagaatctacaatgaactcaaacaaatttacaagaaaaaaaccaaacaaccccatcaacaagtgggcaaaggatacgaacagacacttctc

SEQ ID NO: 386792 - DNA, 201 bp, Homo sapiens
tatccagaatctacaatgaactcaaacaaatttacaagaaaaaaaccaaacaaccccatcaacaagtgggcaaaggatacgaacagacacttctcaaaagaagacatttatgcagccaaaaaacacatgaaaaaatgctcatcatcactggccatcagagaaatgcaaatcaaaaccacaatgagataccatttcacacca

SEQ ID NO: 386793 - DNA, 201 bp, Homo sapiens
tgggaaggagaaaacttttatcgtatctcagctaacaccatacccacatcaccccagctaatcggaaggtcttgagtgtgttcacaaacccaatacattgmtagtacagctggcatttgagaaaattaccacactaaacctatttataaccaagtaaatcttacaaagtctatgtcactctcttgccacctcgatcagagg

SEQ ID NO: 386794 - DNA, 201 bp, Homo sapiens
atccagaatctacaatgaactcaaacaaatttacaagaaaaaaaccaaacaaccccatcaacaagtgggcaaaggatacgaacagacacttctcaaaagaagacatttatgcagccaaaaaacacatgaaaaaatgctcatcatcactggccatcagagaaatgcaaatcaaaaccacaatgagataccatttcacaccag

SEQ ID NO: 386795 - DNA, 201 bp, Homo sapiens
gtttcataaaaatgctatttgaccaaatagggatatttggaagggggtttaataattgcatctttcacatacaacttttctttagaatttacaatttaccyttagagtaaactctacatttccttagaatttacatttaaatagttcctgctttgcagcagataacatacctttttccctgtgtcaggatcccactgaaat

SEQ ID NO: 386796 - DNA, 201 bp, Homo sapiens
cccagccatcccattactgggtatataccctaaggattataagtcatgctgctttaaagacacatgcacacgtatgtttattgtggcactattcacaatarcaaagacttggaaccaagccaaatgtgcaacaatgatagactggattaagaaaatgtggcacatagacaccatggaatactatgcagccataaaaaagga

SEQ ID NO: 386797 - DNA, 201 bp, Homo sapiens
ctcttacaaaggtgtttctatttaagcagaggccatacctaaaggaattttattattctaggagtgtgtttcataaaaatgctatttgaccaaatagggayatttggaagggggtttaataattgcatctttcacatacaacttttctttagaatttacaatttacctttagagtaaactctacatttccttagaatttac

SEQ ID NO: 386798 - DNA, 201 bp, Homo sapiens
attgtggcactattcacaatagcaaagacttggaaccaagccaaatgtgcaacaatgatagactggattaagaaaatgtggcacatagacaccatggaatactatgcagccataaaaaaggatgagttcatgttctttgtagggacatggatgaagctagaaaccatcgttctcagcatactatcacaaggacaaaaaaac

SEQ ID NO: 386799 - DNA, 201 bp, Homo sapiens
tattacattgattgattttcttattgaagcactcttgcactcctcatatagatcccatttagttatggcacataatccttaattttttttaaaaaaatccrtaatatacaagttgctacattatttctctttcttgtctaattgttttggctgggaccttaagaacgatgctgaatagcagtagtaaaagtagatatactt

SEQ ID NO: 386800 - DNA, 201 bp, Homo sapiens
ttgtgatgagtgagctctttaatgtattcattaatttggtttgcagctattttcttgaggatttttgcatgaatattcctcagagacattggcctataacttttttttttaatgtgtctttggttttgttatcagagtaatactggccttatagaattaatttggaagtattccctccttcactattttgtggaatagttt

SEQ ID NO: 386801 - DNA, 201 bp, Homo sapiens
tgaagattcatttgatggctgatgtgaaataaatatctgtgggttcagggcaaacataagtgcatgaaagaaagaagtaatcagtcagggcccaataggtrgttaacagaattcttttggattctgaagaaagccactgtctgtggccaaggttgctggagaatggaagaaattgttcttccaggagatgctgaatgtcct

SEQ ID NO: 386802 - DNA, 201 bp, Homo sapiens
aaaggaaagagagaactttttggaattagttggaatttacatggcacctcctctggggctggtagaattgctatttgtccatgatcaagagcaccactctyaacacccatgtgctccaccctcacaatacaccatcattattgggccagatagcggggcttgcaggagttaactctgttgttcccaattgagaaaatgaac

SEQ ID NO: 386803 - DNA, 201 bp, Homo sapiens
atttactttcaaaaggttccatgtgaaacaattatttgcatgaacaagcagttcttctatataccagtgattgtttttttaaaaaataaagccaacagtgygcttatgtatgcaaaataaactaggctttcacaaatgaaggatcactgttgacaatgcaaacttgaattgctcagcatcattaagctttatggaaataca

SEQ ID NO: 386804 - DNA, 201 bp, Homo sapiens; identical to SEQ ID NO: 85065

SEQ ID NO: 386805 - DNA, 201 bp, Homo sapiens
aggaattgttttcagcaatggaaagaaatggaaggagatccggcgtttctccctcatgacgctgcggaattttgggatggggaagaggagcattgaggacygtgttcaagaggaagcccgctgccttgtggaggagttgagaaaaaccaagggtgggtgaccctactccatatcactgaccttactggactactatcttct

SEQ ID NO: 386806 - DNA, 201 bp, Homo sapiens
acttacagagctcctcgggcagagcttggcccatccacatggctgcccagtgtcagcttcctctttcttgcctgggatctccctcctagtttcgtttctcwtcctgttaggaattgttttcagcaatggaaagaaatggaaggagatccggcgtttctccctcatgacgctgcggaattttgggatggggaagaggagcat

SEQ ID NO: 386807 - DNA, 201 bp, Homo sapiens
agccaatggggattttgacacgattgcattaaatcagtagatcagggaattatgccatttttaaaattgaagtgaaattcacacaatatacaattaaccaytttaaagtgtagacttgagtggtatttagtgtattcacaatgttgtacaaccaccagctttctctggtttcaaaatgtttttattacttcacaaaaacat

SEQ ID NO: 386808 - DNA, 201 bp, Homo sapiens
atcttctttctgtttctatggatttgcctgttatggatatataaaggactcacagcatatgtaacctgttatgtctgagtcctttcacttataatgttttrgaggctcatctaagttgcaacatgtatcagtacttcattcttttttgtcgctgaaatatattttatttttccatgcacatatatcacaatttgttattca

SEQ ID NO: 386809 - DNA, 201 bp, Homo sapiens
aatttttctcctatcattgattacttcccgggaactcacaacaaattacttaaaaacgttgcttttatgaaaagttatattttggaaaaagtaaaagaacrccaagaatcaatggacatgaacaaccctcaggactttattgattgcttcctgatgaaaatggagaaggtaaaatgtaaacaaaagcttagttatgtgact

SEQ ID NO: 386810 - DNA, 201 bp, Homo sapiens
tgcttgtagggtattgctcgaaaaatttttgcctagaccaatgtcctggagattttccctagtgttttcctatagtagtttcacagtttgaggtcttagayttaagtctttaatccattttgagttgatttttgtatatggcaagggatatgagtccagtttcattcttctctgtaggatattaaattttcccagcacatt

SEQ ID NO: 386811 - DNA, 201 bp, Homo sapiens
catgaagatttacccctacattttattctaagagttttatcgttttagctcttatatttaagtttttccatccattttcagttatatttttcatttggagygaagtaagggagatctcagcttcattcttctgcatttcgctgtcctgttgtctcatcaccatttgttgaagagactctttcctcagattgaatggtctag

SEQ ID NO: 386812 - DNA, 201 bp, Homo sapiens
atagagtgttatctcattgtggttttatttatttattcatttatttagagacagagtcttactctgtcacccaggctggagtgcagtggcatgatctcagytccctgcaacttccacctcctgggtttacacaatcctcctgcctcagcccccagagtagctgggattacaggcatgtgtcaccatacctggttaattgtt

SEQ ID NO: 386813 - DNA, 201 bp, Homo sapiens
cgctgaaatatattttatttttccatgcacatatatcacaatttgttattcatctgtttatggacatttgcattgtttccaacctttggctcttatagatdatcttgctttgatcatttgtgtatgtttctttatgggcatattttcatcattcttgggtatattctcaggagttgaattgctgggtcaaatggtaatttt

SEQ ID NO: 386814 - DNA, 201 bp, Homo sapiens
aagtcaaattgtctctgtttgcaggtgacatgactgtatacttagaaaccccatcatctcagccccaaaactgtttaagctgataagcaatttcagcaagrcctcaggatacaaaatcaatgtgcaaaaataacaagcattcctataaaccaataatagacaagcagagagccaaatcatgagtggactcccattcacaat

SEQ ID NO: 386815 - DNA, 201 bp, Homo sapiens
ggtcccctaatggcaggcactagcaccagcactgagagacaactgatttttgcattgatcttgtaccctgaaattatgctgaaatcatttattagctctayttattttctatctgtattgcatgagatttttctatatagagagaatcatgtttcagtcaaatacacatgatttgaatttttcctttcctatttgaatgtg

SEQ ID NO: 386816 - DNA, 201 bp, Homo sapiens
tatctgtattgcatgagatttttctatatagagagaatcatgtttcagtcaaatacacatgatttgaatttttcctttcctatttgaatgtgttttatttyatttcttgcctaattgctctggctagaacttccaatactatgtttaatagtagtaaaaatggacatccttgttttttttcttttctttctgattttaagt

SEQ ID NO: 386817 - DNA, 201 bp, Homo sapiens
ctttggcaatggggggcacccctcacccagcctcgctgctgccttgctgtttgatctcagactgctgtgttaggaatgagtgagcctcagtgggcataagrccctctgagccaggcacgggatataatctcctggtttgccatttgctaagaccatcagaaaagcacagtattagggtggaagtgaccttattttccagat

SEQ ID NO: 386818 - DNA, 201 bp, Homo sapiens
catgattggttggttctatgtctttactattgtgaatagtgcaggaatggacatactagcacgtgtcgttttggtagaacaatttgttttcctctgggtamatactcagtagtggaattgctgcatcgaatggtagttctgcttttagttctttgagaaatctcaaaactggtttccatagtggctgaactaacttacatt

SEQ ID NO: 386819 - DNA, 201 bp, Homo sapiens
ttatccatttcttctagattttctagtttatttgcatagaggtgtttatagtattctctgatggtagtttgtattcctgtaggatcagtggtgatatcccctttatcatttttttgttctctctatttgattcttctttcttttcttctttattagtctggctagcagcctattttgttaatcttttcagaaaattagctc

SEQ ID NO: 386820 - DNA, 201 bp, Homo sapiens
agcaaatccttaaccaatgtaagtatgctccttcagtggcttgcaaaaggtaagtaaattcacctgtattttttaaataaagtgtatccctagaggtacaygttacaagaggtaatggtaaagtaaaatactttgaaaggcttttgttgccttttccagtctgtcagtgtcagaaatagtggaatgaaaccatgtattttg

SEQ ID NO: 386821 - DNA, 201 bp, Homo sapiens
ggatgaaaagttaatcagtgtcccttaaatcctcccaatattggtatttggaagtaccgagggtcaaagatggtggagaatgaggctgaaaaaggaggctytccctgcctacgtttcctccacaactcttttcatcaggtaactgatttccttccacaagaagaaggaggctcactctctagagaaactgagcttaagaag

SEQ ID NO: 386822 - DNA, 201 bp, Homo sapiens
gctggaattataggtgtgagccacgtcgcccggcctacatttattgatttgcatatgttgaaccaggcttgcatcccagggatgaagccaacttgatcgtrgtggataagctttttgatgtgctgctggattcagtttaccagtattttgttgaggattttcgcatggatgttcatcagggatattggcctgaaattttct

SEQ ID NO: 386823 - DNA, 201 bp, Homo sapiens
aatggcctcctgcttcatctataatgctgcaaaagacataacttttgttctttcttatggctgcataacattccattatgtatgtactagtctgttctcaygctgctaataaagacatacctgagacagggtaactcataaaggaaagaggtttaatggactgtcaattccacacggctggaaaggcctcacaataagtct

SEQ ID NO: 386824 - DNA, 201 bp, Homo sapiens
gttttattatgagaaggccattttaaatagcaagtatattcttcaagataacttttctcattctcaaaatttcaggttcgaatgctggagtagggaaactkgaaactctccttattgaaggataaatggtaatcctaaaaatgtagtgatctgcctgagaaaattcctagtccaataagtactctaaaaagttagattcat

SEQ ID NO: 386825 - DNA, 201 bp, Homo sapiens
gtccatgtgtttgtttttatgtcagtaccatgctgttttagttagtatagctctgtagtttaatttgaagtgagataatgtgattcctccagttttgttcyttttgcttaggatagttttgactattctgggtcttttgtgggtccatatacattttaggatttattttttctatttctgtgaagaatgccattgatattt

SEQ ID NO: 386826 - DNA, 201 bp, Homo sapiens
ctgcaatgtgatctgctccattattttccataaacgttttgattataaagatcagcaatttcttaacttaatggaaaagttgaatgaaaacatcaagattktgagcagcccctggatccaggtaaggccaagatttttgcttcctgagaaaccacttattctcttttttttctgacaaatccaaaattctacatggatcaa

SEQ ID NO: 386827 - DNA, 201 bp, Homo sapiens
ttgaacgtgtgattggcagaaaccggagcccctgcatgcaagacaggagccacatgccctacacagatgctgtggtgcacgaggtccagagatacattgascttctccccaccagcctgccccatgcagtgacctgtgacattaaattcagaaactatctcattcccaaggtaagtttgtttctcctacactgcaactcca

SEQ ID NO: 386828 - DNA, 201 bp, Homo sapiens
gagatttggggtggggacacagccaaaccatatcagcccctttgtcaaaaatgagttaactctagatacgtgaacttgtttctgaattctctattctgttycattggtccatgtgtttgtttttatgtcagtaccatgctgttttagttagtatagctctgtagtttaatttgaagtgagataatgtgattcctccagttt

SEQ ID NO: 386829 - DNA, 201 bp, Homo sapiens
ctggctgaaagagctaacagaggatttggtaggtgtgcatgtgcctgtttcagcatctgtcttggggatggggaggatggaaaacagagacttacagagcycctcgggcagagcttggcccatccacatggctgcccagtgtcagcttcctctttcttgcctgggatctccctcctagtttcgtttctcttcctgttagga

SEQ ID NO: 386830 - DNA, 201 bp, Homo sapiens
attcaattacactctttaagttattttaaaacgtacaattaagttattattgactatagtcacccttttgtgctatcatatagtagatcttattcatctccacctcccctccccccacactaccctttcgagtctctggtaaccatctttctacactttatgtccattagttcaattcttttatttttagatcccacaaat

SEQ ID NO: 386831 - DNA, 201 bp, Homo sapiens
ggattaatgtaaaagtgaagtgttgattttatgcatgccgaactcttttttgctgttaagggaatttgtaggtaagataatttctaaactactattatctsttaacaaatacagtgttttatatctaaagtttaatagtattttaaattgtttctaattatttagcctcaccctgtgatcccactttcatcctgggctgtg

SEQ ID NO: 386832 - DNA, 201 bp, Homo sapiens
aggctgggaatgtaaatttagcatttgaacaaccattatttaaccagctaggttgtaatggtcaactcaggattaatgtaaaagtgaagtgttgattttaygcatgccgaactcttttttgctgttaagggaatttgtaggtaagataatttctaaactactattatctgttaacaaatacagtgttttatatctaaagtt

SEQ ID NO: 386833 - DNA, 201 bp, Homo sapiens
ggagaatatttgggaccatagaagctgccaagaaacactgaatagggcaggggtgtttgatatctcagttgggatcctagctgatgagatagctgggttargaatgacaaaattattggttttatggtgtatgaaccataaacagacatcacacttataccctgtgctgagctggcatgttttattctctgcctaaataat

SEQ ID NO: 386834 - DNA, 201 bp, Homo sapiens
agtttatcgatcacttgattataacaacttcatttcagagatcctccaccaaacaagaaaacttttcctataatttaattcatttagctattaaatgatasgctgggcctaatcaatatcaaattaaataggttaaatttgcaggatgattagagatgagggcatttagttcctaaagaagaaaattcattttaaaaaagg

SEQ ID NO: 386835 - DNA, 201 bp, Homo sapiens
aactcaagatggattaaacacttaaacataaaaccaaaaaccataaaaaccccagaagaaaacctaggcaataccattcaggacataggcatgggccaagwgtttgtgactaaaacacaaaaagcaatggcaacaaaagccaaaattgacaaatgggatctaattaaactacagtgcttctgcacagccaaagaaactgca

SEQ ID NO: 386836 - DNA, 201 bp, Homo sapiens
ggaaggaatgtgtgaatagggtgtgagtcacagagatcacatgcttcacaaggtaataaaatatcacaaggcaaatggaggcagggtgagatcacaggacmggagtgaaattaaaattgctaatgaagtttcaggcactcattgtcattgataacatctcatcaggagacagggtttgagagaagacaaccagtctgacca

SEQ ID NO: 386837 - DNA, 201 bp, Homo sapiens; identical to SEQ ID NO: 129243

SEQ ID NO: 386838 - DNA, 201 bp, Homo sapiens
gttcaatgcctggccattcattcagagtacttttgattaaagtcactatttagggcctatagatatcaggggaaattcagcccctgatatttcaatgtgartccttttctattctccctaagtgttggctggtctgagaaataaagggaaagagtacaaaagagagaaattttaaagctgggtgtccaggggagacatcac

SEQ ID NO: 386839 - DNA, 201 bp, Homo sapiens
cattagctgtgagacactgaaaatgaatttgtcattctctgagctcagttttttttttttttttttttttttttgagacagagtcttactctgtagctcakgctggagtgcagtggtacaatcttggctcactgcaacctccatctcccaggtccccattcaagaaattctcctgcctcagtcccccaagtagctagcatt

SEQ ID NO: 386840 - DNA, 201 bp, Homo sapiens
aaagctacgataacaagtgccatgtggcttatggaaaagtaatgagtgattttagatcagtttggcacagacaaaaggagcttgttatgattatttctcawaaggatagtaagaaggaggaataagctataaactctgttagggggttaagaattaaggtgatttgtataatcctatagccatctaattttaggagtactg

SEQ ID NO: 386841 - DNA, 201 bp, Homo sapiens; identical to SEQ ID NO: 85055

SEQ ID NO: 386842 - DNA, 201 bp, Homo sapiens
gagtttgcaaggcagaataatagggatgaggttagtctgtgggcagttattagggaagttgcactggtaaaacttcagggggtttgaatgagaaaagctaygataacaagtgccatgtggcttatggaaaagtaatgagtgattttagatcagtttggcacagacaaaaggagcttgttatgattatttctcaaaaggata

SEQ ID NO: 386843 - DNA, 201 bp, Homo sapiens
tgcatgttcagattttggatttcttcctggttcaatcttgatgggtcatatttgtgtagggatttgtccatttcttctagattttccaatttattggcatrtagttgctcatagtaaccaataattattctttgaatttctgcagtatcagttctaatgcctcctttttaattttttatttatctgaatctactctttttt

SEQ ID NO: 386844 - DNA, 201 bp, Homo sapiens
cctactagattgatggtagggggcagggcaaggttggcaagactagctaggagtcatcacatggctatcagggagagaagtgtttgaaggccttgtgttastagtatggtttggctgtgaactcgtttgtagtttgagtttgcaaggcagaataatagggatgaggttagtctgtgggcagttattagggaagttgcactg

SEQ ID NO: 386845 - DNA, 201 bp, Homo sapiens
ctgcactactgcaccctagaacaagttgtctgttgcctcccatctagattataatagtgtgggcccatcttgtcattgtaaacccattctcttcctctatratttatcttaggttttgctgtcatattgcttttttaatatttgtttttacaaaatttcaactttataatgaatctgggggcaatattgagtccatgtacc

SEQ ID NO: 386846 - DNA, 201 bp, Homo sapiens
ttcctcagattgaatggtctaggcacccttgatgaaagtaaatttgccatagatctttaggtttatttcgtgatttcagttttattccatttgtcttgatrtctatctttatgctagtaccacactgttttgattattacagtttgtagtaagtttgaagttggaaactgagtactcactgatacagaaattaagtagaaa

SEQ ID NO: 386847 - DNA, 201 bp, Homo sapiens
ttctgtctcattgatctgtctaatattgacagtggggtgttaaagcctccatctattattgtgtgggagcctaagcctctttgtaggtctttaagaacttsctttatgaatctgggtgctcctgtattgggtgtgtatctatttaggatagttggctgttctcgttgcattgatccctttaacattatatgataccacccc

SEQ ID NO: 386848 - DNA, 201 bp, Homo sapiens
agagacagtgtttgtcactgtcacagttacgcatgaggagtaactgctctctgtgtttgctattttcaggaaaacggatttgtgtgggagaagccctggcyggcatggagctgtttttattcctgacctccattttacagaactttaacctgaaatctctggttgacccaaagaaccttgacaccactccagttgtcaatg

SEQ ID NO: 386849 - DNA, 201 bp, Homo sapiens
agagattgaacgtgtgattggcagaaaccggagcccctgcatgcaagacaggagccacatgccctacacagatgctgtggtgcacgaggtccagagatacmttgaccttctccccaccagcctgccccatgcagtgacctgtgacattaaattcagaaactatctcattcccaaggtaagtttgtttctcctacactgcaa

SEQ ID NO: 386850 - DNA, 201 bp, Homo sapiens
agtaccgagggtcaaagatggtggagaatgaggctgaaaaaggaggctctccctgcctacgtttcctccacaactcttttcatcaggtaactgatttcctyccacaagaagaaggaggctcactctctagagaaactgagcttaagaagccctgtactcagagacacacagcagtgccagaaaaggcatgaggtgtaggct

SEQ ID NO: 386851 - DNA, 201 bp, Homo sapiens
tcacaggtatgatcagagatgataagttaattaattttcagaaaagattttgggaaggtgttgctagtgtcctccttcctgtttctcttagagaagcttcrttatttaaacttttgtgcttccagctgtaatctgtttcaaactaatggtgattacaatgggatatcttggcctggcatggtggctcacacctgtaatccc

SEQ ID NO: 386852 - DNA, 201 bp, Homo sapiens
tctgggggcaatattgagtccatgtacctttctgacagaaaaatataattgcagactcttgattcaggctcacagtgtctaatgatatggccccaatttaygttttctattaatttagattgtggttgtctacaggtaataatggctttaacacataatgtctttatttatctcaaatacagggattctcttggtggggca

SEQ ID NO: 386853 - DNA, 201 bp, Homo sapiens
gaagagattgaacgtgtgattggcagaaaccggagcccctgcatgcaagacaggagccacatgccctacacagatgctgtggtgcacgaggtccagagatrcattgaccttctccccaccagcctgccccatgcagtgacctgtgacattaaattcagaaactatctcattcccaaggtaagtttgtttctcctacactgc

SEQ ID NO: 386854 - DNA, 201 bp, Homo sapiens
tagtcactattcgtaatttatttctggattcattgtaatttctgtgtatattatactgtatctgagttaatattgttttatttcttattttccatttctcrtgggcttaatgtctctttatcgcattcattattgcattagctagaatttctaggagagcattgaatagaattggtgacagtggggatccttgtttctcat

SEQ ID NO: 386855 - DNA, 201 bp, Homo sapiens
tctataatttatcttaggttttgctgtcatattgcttttttaatatttgtttttacaaaatttcaactttataatgaatctgggggcaatattgagtccaygtacctttctgacagaaaaatataattgcagactcttgattcaggctcacagtgtctaatgatatggccccaatttacgttttctattaatttagattgt

SEQ ID NO: 386856 - DNA, 201 bp, Homo sapiens
aaatttatttctcacagttctgaaggctgggagttccaagatcgatgtgtcagcaagttcagtgtctgatgtgggcctgttccttacagataatgcccccwctgtatccttatatggcagaagggcaaaaaggcaaaaggggagaaatggctcccttgcatctcttgatgttattattttagcaaggacagagccctcctg

SEQ ID NO: 386857 - DNA, 201 bp, Homo sapiens
tccagatttattatctttcttcaagattggtttggctactcttaggtgcttatatttccaaataatttttaaaggtattagtttgtcaatttcccaaaacyttgggctggaatttctggcagggtgacactaaatttataggctagtttggaaagaactgaatcttgacacgttgaggctttccattcctgaatataatta

SEQ ID NO: 386858 - DNA, 201 bp, Homo sapiens
agctcatgccaggtccctgagaggaccacccaagtggaaagggaacaatctgggtctctggcctgcctatcgcacaagcgttacagtcacttttgtttatygtgcaaacagaatattttatccattccagccaagcatttgcatcctgataccctgtttcaattgctatagtttgttttaaatagttaacctctacaacaa

SEQ ID NO: 386859 - DNA, 201 bp, Homo sapiens
tctggattcattgtaatttctgtgtatattatactgtatctgagttaatattgttttatttcttattttccatttctcatgggcttaatgtctctttatcrcattcattattgcattagctagaatttctaggagagcattgaatagaattggtgacagtggggatccttgtttctcatttctaatctgcaggaagcagtg

SEQ ID NO: 386860 - DNA, 201 bp, Homo sapiens
cctctctactggttcaacacatgactctttcagctattcattatatataaaaagctttgaaatctccaactattcttgccctttccatctcagtgccttgytgtctactgactttgcagactgatgtgattccctctgaaacatgaattattaggtttttagaaaatgcctttttgttctttccaaagtaaaagacaaata

SEQ ID NO: 386861 - DNA, 201 bp, Homo sapiens
tttcctcaactgtgcaaactaattcatattaataattccatgaaatgtgtccatagtaacacaagagcagaagatgggccttgtaaaggtggcccaccacrttatttgaggtctttgtcagtcttatctgccagatactgtgtggactaactgcagttaaaattcccattcccttatcacttgccctgaaatttatctgaa

SEQ ID NO: 386862 - DNA, 201 bp, Homo sapiens
ttaagattatgccagccttataaaactatgcaagaaatgtttcctaatgtgagactgtttttattgccgttccctctccccacttttcttcttgtgatcayttagttgtatctttgaaatgcctgataacttttggttaaataccagatggtatatgtaagaaattgcagaattgcagaggaggtttatattcttcaaaga

SEQ ID NO: 386863 - DNA, 201 bp, Homo sapiens
tatttatccagacactccatttgccatctcaaacctactcttttccaatcaaaaccaatatatattattagtaaaataaaaaataatataactgaaagttgtattttcaaggggaaaaagcaatgagacttggtaaggttgcaattactaatgtcatcttttgaagaagacagaattgataatttacttagagattatggg

SEQ ID NO: 386864 - DNA, 201 bp, Homo sapiens
ttgtttaatcttgggagagtgtatttgtcgaggaatttatccatttcttccagattttctagtttatttttgtacaggtgtttatagtattctctgatggyagtttgtatttctgtgggatcggtgatgatatccccttcatcattttttattgcgtgtgttggattcttctctcttttattctttattagtcttgctaac

SEQ ID NO: 386865 - DNA, 201 bp, Homo sapiens
ttcggctgtgaatccttcaggtcctgggctttttttttgcttggtgagctattccttgctgcctcaatttcagaacttgttattggtctcttcacggattsgacttcttcctggtttggtcttgggagggtgtgtctaggaatttatccatttcttctagattttctagtttatttgcatagaggtgtttatagtattctc

SEQ ID NO: 386866 - DNA, 201 bp, Homo sapiens
tctcaaacctactcttttccaatcaaaaccaatatatattattagtaaaataaaaaataatataactgaaagttgtattttcaaggggaaaaagcaatgasacttggtaaggttgcaattactaatgtcatcttttgaagaagacagaattgataatttacttagagattatggggcttaccctagtggtcactgagttag

SEQ ID NO: 386867 - DNA, 201 bp, Homo sapiens
ttggagtagtttcagaaggaatggtaccagctcctctttgtacctctggtagaattcggctgtgaatccttcaggtcctgggctttttttttgcttggtgrgctattccttgctgcctcaatttcagaacttgttattggtctcttcacggattcgacttcttcctggtttggtcttgggagggtgtgtctaggaatttat

SEQ ID NO: 386868 - DNA, 201 bp, Homo sapiens
tttttgatccattggaacttacatgtgcctcctctgcagtggtacaattactctttgtacatgatcaagagcactgttctgaatgcctgtgtacaccctgytcatgatacatcctaattattgggccagattagtggactttggggagttaatccaattcttccaaattgagaaagctgaaatataggttggttgaattct

SEQ ID NO: 386869 - DNA, 201 bp, Homo sapiens
caccctagaacaagttgtctgttgcctcccatctagattataatagtgtgggcccatcttgtcattgtaaacccattctcttcctctataatttatcttargttttgctgtcatattgcttttttaatatttgtttttacaaaatttcaactttataatgaatctgggggcaatattgagtccatgtacctttctgacaga

SEQ ID NO: 386870 - DNA, 201 bp, Homo sapiens
aagaaataaaactattgtgtttagatcgcatgattgtttatgtagaaaatctcaaagaatcaaaaaacctccaaaaataaaaaaaacaaaacaaaacaaaaagaaaacaacaataatgaaaaaactcctaaaagtaataagctattgtagtaaggttgcaggatacaaggaaatcaaattcttttctctatattaacaata

SEQ ID NO: 386871 - DNA, 201 bp, Homo sapiens
ctatacatccatccattcatccatttatccatccactcatccatccattcattcatgcatgcacccatccacccatctatctcttcatctcttctacgatwcactgaacagttattgcatattctgtttgtgccagttacagagacagtgtttgtcactgtcacagttacgcatgaggagtaactgctctctgtgtttgct

SEQ ID NO: 386872 - DNA, 201 bp, Homo sapiens
aaagaaataaaactattgtgtttagatcgcatgattgtttatgtagaaaatctcaaagaatcaaaaaacctccaaaaataaaaaaaacaaaacaaaacaaaaagaaaacaacaataatgaaaaaactcctaaaagtaataagctattgtagtaaggttgcaggatacaaggaaatcaaattcttttctctatattaacaat

SEQ ID NO: 386873 - DNA, 201 bp, Homo sapiens
gcatggaatgttcttccatttgtttgtatcctcttttatttcattgaacagtggtctctagttgtccttgaagaggtccttcacatcccttgtaagttggrttcctaggtattttattctctttgaagcaattatgaatgggagttcactcatgatttggctctctgtttgtctgttattggtgtataagaatgcttgtga

SEQ ID NO: 386874 - DNA, 201 bp, Homo sapiens
ggcctgtgcagtttgacatacatgtcagtagatggcacttatgagcaaaagccagctgtgactaggacaacttgatatagcacagcttgatccttgttttytgggggaacttctctgtttcctcagataatctgttcatctgtggaattcagagtagtctgggctccctgctgagccccagggggataaagatcggtgtca

SEQ ID NO: 386875 - DNA, 201 bp, Homo sapiens
attaagtttagtgagggcaggggtaggttagtgagggatttagggtcatttgattatgaggtgagatggtcacatggggatgaagtaattctttaacatarcatttgtatgtagaagtacagtacatttgtatgtagaagtacagtatacggagataagaatttacaatatagtgtgtgcgtcagtaatttctaacagagc

SEQ ID NO: 386876 - DNA, 201 bp, Homo sapiens
tcaaaactggtttccatagtggctgaactaacttacattcccaccagtagtatataagtgttctcttttctctgcagtctcaccaacatctgttatttttkggctttttaatcatatccattttgattggcatgagatgatatctcattgtggttttgatttgcatttctctgatgattagtgatgttgagtgttttctca

SEQ ID NO: 386877 - DNA, 201 bp, Homo sapiens
ggcaccgttcacaatagcaaagacttggaaccaacccaaatgcccatcaatgatgtactggataaagaaaatgtggcacatatacaccatggaatactacrcagccataaaaaaggatgagttcatgtcctttgcaggaacatggatgaagctggaaatcatcatcctcagcaactaacacaggaacagaaaaccaaactc

SEQ ID NO: 386878 - DNA, 201 bp, Homo sapiens; identical to SEQ ID NO: 85066

SEQ ID NO: 386879 - DNA, 201 bp, Homo sapiens
gtttgggcaagttggtctacagcctctgctatacaagcagtattttttttctagtactgtactttccagtttctatgttggtaactatataactatgtgartaattttgaattcactgtaatcaaatatgctggtaaataatttgtcagataattgcatcaaatcattcctaggaaaagcacaaccaaccatctgaattta

SEQ ID NO: 386880 - DNA, 201 bp, Homo sapiens
gaggattgatatgttccaatttttatagaaacaaatgtaaatttcctataaaatgtttgtttcaaaaatattgtttcttgtttgcatttgttcaatgtaartacttttagctcacatactatacaaaaacaggtggcagggtggacttgtgcagggagtattttttattgatgcctaatataagacatccctgtccagtag

SEQ ID NO: 386881 - DNA, 201 bp, Homo sapiens
taaaataatattggtagtttgataggaatagcattgaatctgtagatagctttgggcagtctagccattttaatgatattgattgtttcaatccataagcmtgaactgtttttccatttgtttgtgtcatctatgattttgttcatcagtattttgtagctctccttgtagagacctttttgccccctttgttagttgtat

SEQ ID NO: 386882 - DNA, 201 bp, Homo sapiens
taatcagcagtaacaattgcaacaaaagctggttacaaacaatccatggaaataggatgtgaagctagacaaccagttagaccagaaattctcagaagggmgtatgccttaaccctaaagaggcctagaagagccatggcaagatgagggcatttatagccctatcttatccatatggacaggtgccccccatgcgtccat

SEQ ID NO: 386883 - DNA, 201 bp, Homo sapiens
aagatttttgatattaagattatgccagccttataaaactatgcaagaaatgtttcctaatgtgagactgtttttattgccgttccctctccccacttttyttcttgtgatcacttagttgtatctttgaaatgcctgataacttttggttaaataccagatggtatatgtaagaaattgcagaattgcagaggaggttta

SEQ ID NO: 386884 - DNA, 201 bp, Homo sapiens
tcgctccatttcctggactgctttagtagtttgtttgcattaattttcaaccctgccttggatcactgagcttacttgcagtccatattttgaatagtttrtctgtcatttctgagttgccagtttggttagggttcattgctggggagttcatgtgatcctttggaggttttacgacattcagacatttcatggtgccag

SEQ ID NO: 386885 - DNA, 201 bp, Homo sapiens; identical to SEQ ID NO: 85068

SEQ ID NO: 386886 - DNA, 201 bp, Homo sapiens
cttttgaggagttattcataagttctttgctaaagcctgtatccagaatgttattttatagatatttttccatcagattcttatagtttgaggtcttaaayttagatcattaatccatttcgagttaattattgtatatggttcaaggaagtgtttcagtttcattctgcatatggctagtcagttatcctcattcaattt

SEQ ID NO: 386887 - DNA, 201 bp, Homo sapiens
gatattagccctttgtcagacaagagggttgcaaaaattttctcccattctgtaggttgcttgttcactctgatggtagtttcttttgctgtgcagaagcyctttagtttaactagatcccatttgtcattttggcttttgttgccattgcttttggtgtatgagacaagaagtccttgcccatgcctatgtcctgaatag

SEQ ID NO: 386888 - DNA, 201 bp, Homo sapiens
tgcactgcacccactgtcctgtacccactgtctcacaatccccagtgagatgaacccagtacctcagttggaaatgcaaaaatcattcatcttctgcatcrctcatgctgggagctgtagactggagctgttcctattcagccatcttggctccaaatgttctcaacttttattttgaagtgcacgttcatgtgtcttaca

SEQ ID NO: 386889 - DNA, 201 bp, Homo sapiens
ctgcagaattttctgctgccttttgtttggctataccctgaccccagaggtggagtctacagaggcaggcaggcctccttgagctgcggtgggctccaccyggttcgagcttcccagccgctttgtttacctactcaagctttggcaatggggggcacccctcacccagcctcgctgctgccttgctgtttgatctcagac

SEQ ID NO: 386890 - DNA, 201 bp, Homo sapiens
tttaagaatgttgaatattggcccccactctcttctggcttgtagagtttctgccgagagatcagctgttaatctgatcggcttccctttgtgggtaaccyggcctttctctctggctgcccttaacattttttccttcatttcaactttggtgaatctgacaattatgtgtcttggagctgctcttctcgaggagtatct

SEQ ID NO: 386891 - DNA, 201 bp, Homo sapiens
aatgaggtaccatctcatgccagttagaatggtgatcattaaaaagtcaggaaacaacagatgctggagaagatgtggagaaataggaatgcttttacachgttagtgggagtgtaaattagttcaaccattatggaagacagtgtgctgattcctcaaggatctggaacaagaaataccatttgacccagtaatcctgtt

SEQ ID NO: 386892 - DNA, 201 bp, Homo sapiens
gtgtcagcttcctctttcttgcctgggatctccctcctagtttcgtttctcttcctgttaggaattgttttcagcaatggaaagaaatggaaggagatccrgcgtttctccctcatgacgctgcggaattttgggatggggaagaggagcattgaggaccgtgttcaagaggaagcccgctgccttgtggaggagttgaga

SEQ ID NO: 386893 - DNA, 201 bp, Homo sapiens
gctgctggattcggtttgccagtattttattgaggatttttgcattgatgttcatcagggatattggtctaaaattctctttttttgttgtgtctctgccyggctttggtatcaggatgatgctggcctcataaaatgagttagggaggattccctttttctattgattggaatagtttcagaaggaatggtaccagctcc

SEQ ID NO: 386894 - DNA, 201 bp, Homo sapiens
aatagtgccacaataaacatatgtgtgcatgtgtctttacagcagcatggtttataatcctttgggtatatacccagtaatgggatggctgggtcaaatgrtatttctagttctagatccctgaggaatcaccacaccgacttccacaatggttgaactagtttacagtcccaccaacagtgtaaaagtgttcctatttct

SEQ ID NO: 386895 - DNA, 201 bp, Homo sapiens
tgatcgttcctctggaagttttgtctcagaagagtacccagccttgtgaggtgtcagtctgcccctaatggggggtgcctcccagttaggctacaaggggrtcagggacccacttgaggaggcagtctgtccattctcaggtctcaagctttgtgctgggagaaccactattctctccaaagctgtcagactgggacaatt

SEQ ID NO: 386896 - DNA, 201 bp, Homo sapiens
cttttgtttggctataccctgaccccagaggtggagtctacagaggcaggcaggcctccttgagctgcggtgggctccacccggttcgagcttcccagccrctttgtttacctactcaagctttggcaatggggggcacccctcacccagcctcgctgctgccttgctgtttgatctcagactgctgtgttaggaatgagt

SEQ ID NO: 386897 - DNA, 201 bp, Homo sapiens
gcggagtttcaaattttggtctgctgtacattagctgtgagacactgaaaatgaatttgtcattctctgagctcagttttttttttttttttttttttttttgagacagagtcttactctgtagctcaggctggagtgcagtggtacaatcttggctcactgcaacctccatctcccaggtccccattcaagaaattctcc

SEQ ID NO: 386898 - DNA, 201 bp, Homo sapiens
gctatgaacatctgcttttctgggataggaatcttggtgatgtgaaacctctctgactgcacgtccattcataggctctctgcagggggaagcacatcacrcgctgttggctcattctggcagtccagcctggcactgtccttacacaatcctgcatgcaattttgtatttacaataatcgggagcatttcatcttttatt

SEQ ID NO: 386899 - DNA, 201 bp, Homo sapiens
ttggtggtagctgtataaagggtgtcatgggtttgcaaaatatttgtattaacattgggtttttctggtgtttctgcgcaggatgtgatggtggcaggtgsgatggagagcatgtccaatgttccatatgtaatgaacagaggatcaacaccatatggtggggtaaagcttgaagatttgattgtaaaagacgggctaact

SEQ ID NO: 386900 - DNA, 201 bp, Homo sapiens
aaatatttttattttaggtcaaccagatgtagtggtgaaagaagatgaagaatataaacgtgttgattttagcaaagttccaaagctgaagacagttttcyagaaagaaaatggttagtgttaagaaatgaagcataagaaaaaattgagccagtataccatatctagttcttagaattgcctaaggattttgaaaaagta

SEQ ID NO: 386901 - DNA, 201 bp, Homo sapiens
tttttaaacagcatttgctgacgctgctgtagaacctattgattttccaattgctcctgtatatgctgcatctatggtgagaacaaagtgaggggcgataytccattatgctagcttctggtttgcttataccaaggttgcagtttttaagattttaaatgttatctgccaaagcagagagatagcttggtttcaaatctt

SEQ ID NO: 386902 - DNA, 201 bp, Homo sapiens
acagctgccaatgccagtacactgaatgatggagcagctgctctggttctcatgacggcagatgcagcgaagaggctcaatgttacaccactggcaagaayagtaggtaaggccaggcgaggtggctcacacctgtaatcccagcactttcggaggttgaggtgggaggattgcttgagccccggagttcgaaatcagcct

SEQ ID NO: 386903 - DNA, 201 bp, Homo sapiens
aaaaaaaagattttaacaacccccccccccctttttttaaacagcatttgctgacgctgctgtagaacctattgattttccaattgctcctgtatatgctscatctatggtgagaacaaagtgaggggcgatactccattatgctagcttctggtttgcttataccaaggttgcagtttttaagattttaaatgttatctg

SEQ ID NO: 386904 - DNA, 201 bp, Homo sapiens
tttatcccacatccctcttccattatactctactcttctatccattatactgttctgtacttttaaaagatctgtgacctggccaggcacggtggctcacrcctgtaatcctagcactttgggaggctgaggtgaacagatcacgaggtcaagagatagaggccatcctggccaacatggcgaaaccctgtctctactaaa

SEQ ID NO: 386905 - DNA, 201 bp, Homo sapiens
gagcaagatcttgtctctttttctttttttttaaattaagctttaaaaaacttcctgtcctgtatgataaatagcagaaaataaagtacatgcattttccyacagaggcagctatgtaggaaaaaaagaatatgggattaggagtccagaaatacaaaatttacatgtgtggtgttttagtatttattaactctgtggcct

SEQ ID NO: 386906 - DNA, 201 bp, Homo sapiens
ttaaaatatttcaactttttatcagggcagctgtgctgagaatacagcaaagaagctgaatattgcacgaaatgaacaggacgcttatgctattaattctyataccagaagtaaagcagcatgggaagctgggaaatttggaaatgaagttattcctgtcacagttacagtaaaaggtagagataatgttccaaaaaggat

SEQ ID NO: 386907 - DNA, 201 bp, Homo sapiens
gtaatcactgattattaaattgaattaaatgcctttttgactttttttttttttaataaagggattccaaaagaagaagtgaaagaagcatacatgggtartgttctacaaggaggtgaaggacaagctcctacaaggcaggcagtattgggtgcaggtacctggaagacttttttgcttttatacttaaaatgtgtaaaa

SEQ ID NO: 386908 - DNA, 201 bp, Homo sapiens
gattgctaattatttgaacatcatctgtcttttaaaaaatttaaggttcttaaagatgtgggattgaaaaaagaagatattgcaatgtgggaagtaaatgwagcctttagtctggttgtactagcaaacattaaaatgttggagattgatccccaaaaagtgaatatcaatggaggagctgtttctctgggacatccaatt

SEQ ID NO: 386909 - DNA, 201 bp, Homo sapiens
gtttatcccacatccctcttccattatactctactcttctatccattatactgttctgtacttttaaaagatctgtgacctggccaggcacggtggctcaygcctgtaatcctagcactttgggaggctgaggtgaacagatcacgaggtcaagagatagaggccatcctggccaacatggcgaaaccctgtctctactaa

SEQ ID NO: 386910 - DNA, 201 bp, Homo sapiens
aaagtcttatgtgtggacatcaggtaagaaacaccgtccttcccatttattaatcagagtaatacctagggctaaaagacacaaaaatctaggcatattcmtattttagaaatgagattctttctcataagttagtatgttttctcacatgctcaagagtgtctggatttgctaagtccatttgaagtatggtcaaaatga

SEQ ID NO: 386911 - DNA, 201 bp, Homo sapiens
aggaatgttttgacttcaacctcatttttgctttcaggcacagtaacagctgccaatgccagtacactgaatgatggagcagctgctctggttctcatgayggcagatgcagcgaagaggctcaatgttacaccactggcaagaatagtaggtaaggccaggcgaggtggctcacacctgtaatcccagcactttcggagg

SEQ ID NO: 386912 - DNA, 201 bp, Homo sapiens
attagctgggtatagcagcacacgcctgtagtcccagctactagggaatccaaggcaggaggatcaattgagcccaggagtccgaggctgcagtgagctargtttgtagcattgcactctattgggagactgtgcaagaccatttcaaacaaacaaaattagctggctgtggtggctcccacctgtagtcccagctacttg

SEQ ID NO: 386913 - DNA, 201 bp, Homo sapiens
ttacaggtgcccgctaccacgcctggctaatttttgtatttttagtagagacggggttttttcgccaagttggccaggctgatctctaactcctgacctcmagtgatatgcccaccgcagccttccaaagtgttgggattacaggcgtgagccacttgcccagcctactgttgacatttgttcctaagaagtgtggaaaga

SEQ ID NO: 386914 - DNA, 201 bp, Homo sapiens
ggctggagtgcagtggcgtgatcttggctcactgcaacctccgcctcctgggttcaagcaattcttctgcctcatcctcctgagtggctgggattacaggygcccgctaccacgcctggctaatttttgtatttttagtagagacggggttttttcgccaagttggccaggctgatctctaactcctgacctcaagtgata

SEQ ID NO: 386915 - DNA, 201 bp, Homo sapiens
tgagaggcgactattggaggaagcgggatgggcggtgcccgcgccgggccgctaggggtgcggggttggggaggaggccgctagtctacgcctgtggagcsgatactcagccctctgcgaccatggctgtgctggcggcacttctgcgcagcggcgcccgcagccgcagccccctgctccggaggctggtgcaggtgagcg

SEQ ID NO: 386916 - DNA, 201 bp, Homo sapiens
gtggagagaaccagggaagattccattaaactggaccagaagcttgaaagaagagaagtggcttagtaaacaaggaacaaactagctaagtagaaaggggrcttttaaaatttaatttttatttcaataggcttttgggaacaggtggtgttggattatatgaataagttctttattggtggtatctgatattttggtgca

SEQ ID NO: 386917 - DNA, 201 bp, Homo sapiens
attgtcttgcagttagctgtgtacatgtttcctgagggcaggaattgtctccacccatatttgtaatttctttaaacatttagcagcccaggcaataggtrtttgttgaattgaaccaaatacatttattgtgaaggaatgttttgacttcaacctcatttttgctttcaggcacagtaacagctgccaatgccagtacac

SEQ ID NO: 386918 - DNA, 201 bp, Homo sapiens
actggcaagaatagtaggtaaggccaggcgaggtggctcacacctgtaatcccagcactttcggaggttgaggtgggaggattgcttgagccccggagttygaaatcagcctgggcaatatagtgagacttcgtctctacaaaaagttaaaaaattagctgagcatggtggcatgtgcctgtactaccatctactcgggaa

SEQ ID NO: 386919 - DNA, 201 bp, Homo sapiens
aaatccacaatgaagactcattaacttgctttaggttacaattctattccaggaatgattactgtgctctaggtgacagaatactagagcttatctagtgyaggtcagacagctgcctctggggtcaggagagtggggtctgtgatcatagaagggagttgaggaagaaaaggggacatggaggtgtagaagatttaaatt

SEQ ID NO: 386920 - DNA, 201 bp, Homo sapiens
ttactctatgtactttacaaactgaactgaaagatgggctctataaatgttgattttagccgtgtacttttggagaatatttttgtatgcctattgcatcrgcatggctcagtcattaaagaaattttcccacatttaaatagggtaatttctgacgcttagctggcaactgcttggctaattcaagtatgtgaagataag

SEQ ID NO: 386921 - DNA, 201 bp, Homo sapiens
ataaatgcatgtagaatacttgtttggtggtagctgtataaagggtgtcatgggtttgcaaaatatttgtattaacattgggtttttctggtgtttctgcrcaggatgtgatggtggcaggtgggatggagagcatgtccaatgttccatatgtaatgaacagaggatcaacaccatatggtggggtaaagcttgaagatt

SEQ ID NO: 386922 - DNA, 201 bp, Homo sapiens
agcctgggcaacgaagtgagacttggcctccacacaaaaaaattaaaaattagctgggtatagcagcacacgcctgtagtcccagctactagggaatccarggcaggaggatcaattgagcccaggagtccgaggctgcagtgagctaggtttgtagcattgcactctattgggagactgtgcaagaccatttcaaacaaa

SEQ ID NO: 386923 - DNA, 201 bp, Homo sapiens
ttttgtgttgttggaacagtggaagctgtttgagctgtataggctagaaagctacccttagtccactagtagaagagaggaagatggaggaagagttccamgttaattttattatcgctcacaacaatcaaatttcttctgtaaagaaaaagggcactcactagtaatgttttagggcactcactagtaatgttttaaaaa

SEQ ID NO: 386924 - DNA, 201 bp, Homo sapiens
ccagtggagtgatgatctgctcagagctagcagatctcagaaaatgaaaggaacacgcagcttctgaaagtgagtaacatcacgttggaaagcaagggtartaaacaattctggattctgaaggtagaataacttctgagagctacagacatagctatatatgggtaccatattttgttttgtgttgttggaacagtggaa

SEQ ID NO: 386925 - DNA, 201 bp, Homo sapiens
acccagctaatttttgtatttttagtagagacggggtttcaccatgttggccaggcggatccagaactcctgacctcaagtgatccacctgcctcagcctyctaaagtgctgggattacaggtgtgagccactgcacccagccaacttatttctcattatattatttaacaccatttcttttcatcagggtgaagtggtaa

SEQ ID NO: 386926 - DNA, 201 bp, Homo sapiens
atcacatggtgaaaccccgtctctactaaaaatacaaaaattagctgggcgtggtggcaggtgcctgtaattccagctactcgggaagctgaggcacaagrgtcacttgcatctgggaggcagagattgcagtgagctgagattgtaccactgcactccaacctgggagatagagcaagactctcaaaaaaaaaaaattgt

SEQ ID NO: 386927 - DNA, 201 bp, Homo sapiens
aaatgagattctttctcataagttagtatgttttctcacatgctcaagagtgtctggatttgctaagtccatttgaagtatggtcaaaatgatagcgtagsctgggtatcatgtctgtaagcactttggaaggtcgaggcaggaggatcccaggagtttgagaccagcgtaggcaacatagcaagcgagactctgctcttt

SEQ ID NO: 386928 - DNA, 201 bp, Homo sapiens
cgactattggaggaagcgggatgggcggtgcccgcgccgggccgctaggggtgcggggttggggaggaggccgctagtctacgcctgtggagccgatactsagccctctgcgaccatggctgtgctggcggcacttctgcgcagcggcgcccgcagccgcagccccctgctccggaggctggtgcaggtgagcggggttcg

SEQ ID NO: 386929 - DNA, 201 bp, Homo sapiens
gctgggattacaggggtgagccactgcacctggccacaaacaggttttctagggttggaaattgagagctatgatttggacattcacctgcagctgtcagsttggcgcttgggtgtgagtctggtggtcagttgaaaggtcagggttggagatagaaatttggaaaatcatcagcacatagaagccttttttttttttttt

SEQ ID NO: 386930 - DNA, 201 bp, Homo sapiens
tctattaagttctgcagttgtgtttgagtatcggtttttcaaaagtgacttatattggttttaggcttacctatttctactccatgtaccaccataaacaragtttgtgcttcaggaatgaaagccatcatgatggcctctcaaagtcttatgtgtggacatcaggtaagaaacaccgtccttcccatttattaatcagag

SEQ ID NO: 386931 - DNA, 201 bp, Homo sapiens; identical to SEQ ID NO: 85088

SEQ ID NO: 386932 - DNA, 201 bp, Homo sapiens
tttaatttttatttcaataggcttttgggaacaggtggtgttggattatatgaataagttctttattggtggtatctgatattttggtgcacccatcaccygagcagtatacactgtaaaccaatgtgtagtcttttattcctcacccccaccccccgcctttcccctgagtccccaaagtccactgtatcattcttatgc

SEQ ID NO: 386933 - DNA, 201 bp, Homo sapiens
ttctgcagttgtgtttgagtatcggtttttcaaaagtgacttatattggttttaggcttacctatttctactccatgtaccaccataaacaaagtttgtgyttcaggaatgaaagccatcatgatggcctctcaaagtcttatgtgtggacatcaggtaagaaacaccgtccttcccatttattaatcagagtaataccta

SEQ ID NO: 386934 - DNA, 201 bp, Homo sapiens
gaatccgggaggcggagcttgcagtgagttgagatcacgtgcctgcactctagcctgggcaacagagcaaaactccatctcaaaaaaaaaaaaaaaaaaaraaaaaaaagaaaaaagaaattatggctctggctgggcacagtggttcatgcctgtgatcccagcactttgggaggccaaagtgcgtggatcacctgaggt

SEQ ID NO: 386935 - DNA, 201 bp, Homo sapiens
gcaggagcatcgcttgaacccaggaggcggaggttgcagtgagccaagattgcaccattgcactccaacctgggcgacagagtgagattctgtctgaaagaaaaaaaaaaaaaaaaaaaaaggctgggcatggtagctcacgcctgtaatcctagcactttgggaggccgaggcgggtggatcacgaggtcaggagattga

SEQ ID NO: 386936 - DNA, 201 bp, Homo sapiens
aggcttacctatttctactccatgtaccaccataaacaaagtttgtgcttcaggaatgaaagccatcatgatggcctctcaaagtcttatgtgtggacatsaggtaagaaacaccgtccttcccatttattaatcagagtaatacctagggctaaaagacacaaaaatctaggcatattcatattttagaaatgagattct

SEQ ID NO: 386937 - DNA, 201 bp, Homo sapiens
tgggtatcatgtctgtaagcactttggaaggtcgaggcaggaggatcccaggagtttgagaccagcgtaggcaacatagcaagcgagactctgctctttgaaaaaaaaaaaagcctaagtgtcttgtgttacaaagttgtttttaggcccaggcacagtggctcactcctataatcccagcactttgggaggctgaggctg

SEQ ID NO: 386938 - DNA, 201 bp, Homo sapiens
tgtaatcccagcactttgggaggccgaggcaggtggatcacctggggtcaggagtttgagaccggcttggccaatgtggtgagaccccgtctctattaaamatacaaaaaaattagccaggcgtggtggtggtgtctgtaatcccagctactcaggaggctgaggcaggagaattgcttgaacccgggaggtggaggttgc

SEQ ID NO: 386939 - DNA, 201 bp, Homo sapiens
tagaatcctagaaaaggaagacatatatttacatatattaaaggggctaggaaatgtgcatttaatgggctaaacttggcttgtgcatattctatacagtaaaaaaaaaaagattttaacaacccccccccccctttttttaaacagcatttgctgacgctgctgtagaacctattgattttccaattgctcctgtatatg

SEQ ID NO: 386940 - DNA, 201 bp, Homo sapiens
ctgctgccatcactgggatagaaaataaataaaatcagtctcttcttggaattcacagtctagtgaggagaaaagccacctgagggttacaaaattatatrttctggaacaattagaatgtgcacgggcgttgtggaagctgagataggagtgctgacctctgcctggcatggctgagccctccctgaaagataattgtgt

SEQ ID NO: 386941 - DNA, 201 bp, Homo sapiens
atatatttacatatattaaaggggctaggaaatgtgcatttaatgggctaaacttggcttgtgcatattctatacagtaaaaaaaaaaagattttaacaacccccccccccctttttttaaacagcatttgctgacgctgctgtagaacctattgattttccaattgctcctgtatatgctgcatctatggtgagaacaaa

SEQ ID NO: 386942 - DNA, 201 bp, Homo sapiens
gtgcccgcgccgggccgctaggggtgcggggttggggaggaggccgctagtctacgcctgtggagccgatactcagccctctgcgaccatggctgtgctgscggcacttctgcgcagcggcgcccgcagccgcagccccctgctccggaggctggtgcaggtgagcggggttcgtccccacagcactcagacccgggatgc

SEQ ID NO: 386943 - DNA, 201 bp, Homo sapiens
gattttaaatgttatctgccaaagcagagagatagcttggtttcaaatcttcccatgtcttctcctgaaaagagtaagagcaacaaggataacaaacaaamaaaaaaaaataaagaacagctcacaaactacatcttcagtagaacaggtaaaactacacatctgaattacttgtaagtatcatacagaactcacacacct

SEQ ID NO: 386944 - DNA, 201 bp, Homo sapiens
ttggaggaagcgggatgggcggtgcccgcgccgggccgctaggggtgcggggttggggaggaggccgctagtctacgcctgtggagccgatactcagcccwctgcgaccatggctgtgctggcggcacttctgcgcagcggcgcccgcagccgcagccccctgctccggaggctggtgcaggtgagcggggttcgtcccca

SEQ ID NO: 386945 - DNA, 201 bp, Homo sapiens
aaagggtgtcatgggtttgcaaaatatttgtattaacattgggtttttctggtgtttctgcgcaggatgtgatggtggcaggtgggatggagagcatgtcmaatgttccatatgtaatgaacagaggatcaacaccatatggtggggtaaagcttgaagatttgattgtaaaagacgggctaactgatgtctacaataaaa

SEQ ID NO: 386946 - DNA, 201 bp, Homo sapiens
cgggatgggcggtgcccgcgccgggccgctaggggtgcggggttggggaggaggccgctagtctacgcctgtggagccgatactcagccctctgcgaccawggctgtgctggcggcacttctgcgcagcggcgcccgcagccgcagccccctgctccggaggctggtgcaggtgagcggggttcgtccccacagcactcag

SEQ ID NO: 386947 - DNA, 201 bp, Homo sapiens
atgatgtagatttggccaaaactgtggaaggaggggacatgacccctcttggactcactctggaaaatgacccttcgggctcctagcagcatggtgtagcrataggggtgctgtgctgtccagggctgctgcgggtgggcgaccaagctggtgccctctgcttccccttgcgcaatgcccttggcccttgctgcctcccat

SEQ ID NO: 386948 - DNA, 201 bp, Homo sapiens; identical to SEQ ID NO: 85099

SEQ ID NO: 386949 - DNA, 201 bp, Homo sapiens
gcgcagcgcgcgaagattcccggggcgcctccagccgcttccattacatcccgttcggcggcggtgcgcgcagctgcctcggccaggagctggcgcaagcsgtgctccagctgctagctgtggagctagtgcgcaccgcgcgctgggaactggccacacccgccttccccgccatgcagacggtgcccatcgtgcacccag

SEQ ID NO: 386950 - DNA, 201 bp, Homo sapiens
gtgccagaactgttctctgaagttacggttttagataagacaaagccagtcactccagttatggacagctcttgactaaaatgagaccagaaatcattggygtgtcacctttacttagaagttgcatatggaaacagtattaggaaaggcgcatctctggttaagataagctgagcccaggttttctttattcaaaatgag

SEQ ID NO: 386951 - DNA, 201 bp, Homo sapiens; identical to SEQ ID NO: 85097

SEQ ID NO: 386952 - DNA, 201 bp, Homo sapiens
gactgggggtgtctggaaggggacggcggtagacgagaggggcggatggaggcttttaacgctgtcccctcctcgggactcaggtgattatgcgggccttyagccgcgaggcactcgaatgctacgtgccggtgatcaccgaggaagtgggcagcagcctggagcagtggctgagctgcggcgagcgcggcctcctggtct

SEQ ID NO: 386953 - DNA, 201 bp, Homo sapiens
gctgcgggcatccgaggcgggccagggctgcaaagacgcgctgcagctgttgatcgagcactcgtgggagaggggagagcggctggacatgcaggtgagtrgcagcttcagaccaggcactgcggagtttggtcccctggctttccaagcgctgttcctggggcccccaaagcgcgcgcctggggcccagctttctggagt

SEQ ID NO: 386954 - DNA, 201 bp, Homo sapiens
ctgcgggcatccgaggcgggccagggctgcaaagacgcgctgcagctgttgatcgagcactcgtgggagaggggagagcggctggacatgcaggtgagtarcagcttcagaccaggcactgcggagtttggtcccctggctttccaagcgctgttcctggggcccccaaagcgcgcgcctggggcccagctttctggagtg

SEQ ID NO: 386955 - DNA, 201 bp, Homo sapiens
ccacacagggcaattcatcacccattgtcagccaagggcctggtgccaggccctgagcttgggagacaccaggggcagcaaaggtggcaggacgtgggccygccctaagagtgctcttgcaaatgcagaggacagcctggcctgagaagcgtgggtttgggcgaggagaaggatgcaggcttcagggttgattgtgattta

SEQ ID NO: 386956 - DNA, 201 bp, Homo sapiens
taaggaatgtgtaatgggaatatcctgttttttagatgttggtggctaattacctttttaaaaactgtgcaggcaaaataaaacttgtttgtggccctgcyggtgtccagtttgcaacttcttgggtcttcgatctttggagaatttttagagtgcttgatcaaaagtggcttagctgagtgggtctgtttcagagtctct

SEQ ID NO: 386957 - DNA, 201 bp, Homo sapiens
tgatgctcaggtgtggccacaggcacacacgggtccatctcccactcaccctggctgggccagcaagtagcagattcttcagtgaaggaagaaaagaaggwtaagacagaaggccagggaggggacctgccactcctccatttgctcacactcctggtcatttacggcagtggtccccaacctttttggcaccagggaccg

SEQ ID NO: 386958 - DNA, 201 bp, Homo sapiens
atgtggaaaggccctgacatgttccttttaggtggctctattgcatttagtgaaattttaaataattcataggagaaaatatttttcttaacaaagttaargatgtccttcagaataaaagcaggagtttttgactccttgatatccattcacttatgtatttatcagatgtcttctctgtataaagcccggtgttaggca

SEQ ID NO: 386959 - DNA, 201 bp, Homo sapiens
ctctgaaatgtgaggccctttgctttctctcatgctccactgcagctactgctctgatgtgctctcatggcctgggcagagaggaggcctggggcctcccyggggccttggggagtccccagtgtgggataaacctccaggccacagggatttcccagttctctgggaaacatcattgtggtgcccatgaaaatgtgcttc

SEQ ID NO: 386960 - DNA, 201 bp, Homo sapiens
gtggttgatgatggaagggagatggatagaaaagcgtgcagattgttgcctccaaaccaatttttctttcactgaagagaattagaatcaccttttatccrtttcagactctcacacaatttcttggatggtctcttttaaatactgacacctacgataagatgaataagctagaaaacagaaaggacattgctcaggaaa

SEQ ID NO: 386961 - DNA, 201 bp, Homo sapiens
aattttatttaaggaattagctaaacaggtgttagaagatagaaaaagtgtaaagggaacagtgaggtaacatagtggtaagaagcacttcccatcactcrggcttgggaaagaaagggaaaaggttagaattgtcagaaaacagacacttggttctagttcactctattggatgtgctagagtacatataatggctgtat

SEQ ID NO: 386962 - DNA, 201 bp, Homo sapiens
gagaaaaacgcttctccctattccttggcccagtcaatgcctctttgccatgttggaaattccagggctggattctattccctcccaagcttccgccttcrcgataacgttgctctttctccctaggttcttgcgtccccctttcctttctgttttcatttccagatgtgcctctgccttcttcctataggccttcaggct

SEQ ID NO: 386963 - DNA, 201 bp, Homo sapiens
tacagatgaagtttcacccgagtacccactgctctcctcctgctgtacaacctgctggttcctaacaggccatgggccagtactggtttatagtccagggrttggggacccctgatctaagggctcaacagttcctgacacagcattcatgctcaataaacgttctctgcatgcatgaatggctggctacctcctacatcc

SEQ ID NO: 386964 - DNA, 201 bp, Homo sapiens
aaaacaaaatttattttagcctgtgcatgtagataaacagccaataatatttctggttttattataagtttgtagtcaggatataagtagtttgataattyatgttataatataatgtggttgggaaataaggttctatttgtaagagttttaaagtacaagttccccaatgaaaaatgatttctttgggaaataacatta

SEQ ID NO: 386965 - DNA, 201 bp, Homo sapiens
gatttggtagccaaagatcccccccaccccaaaagctgtttgggggcaattcaactttttaaaaacaaaatttattttagcctgtgcatgtagataaacarccaataatatttctggttttattataagtttgtagtcaggatataagtagtttgataatttatgttataatataatgtggttgggaaataaggttctatt

SEQ ID NO: 386966 - DNA, 201 bp, Homo sapiens
tggagtgcagtggcatgatcttggctcactgcaacctcagcctcccaggttcaagcgattctcatgcctcagtagctgggattataggcctgtaccaccaygtccactgattttcggtattttagtagagacaggatttcgccacgttggccagactggtctcgaactcctgtcctcaagtgatccgctcgccttggcctc

SEQ ID NO: 386967 - DNA, 201 bp, Homo sapiens
gtccaagttaactatatttgtaagggtctatttctgggttctctattttgtttcattgattcatttgtccattctttcactaataccacactgtcttgatyattgcagcttcatggcaaatcttaagtcaggtagtgtcagctttttgattttgttcttcttgtcagcaagtcttttaacctacctgattcttggcttctt

SEQ ID NO: 386968 - DNA, 201 bp, Homo sapiens
cttcatcacaccagctacatgtacaatattgaatcccgaagaagccaggtaaaaggaaggcagcattagtcattccatgctgacctattctgacaaagccrcccagagacaacaaattcagacccctcctattcctcctgggggtgtaagccacgtggaacagatccccaaacttcagtcccacgtgtcctctcatgatct

SEQ ID NO: 386969 - DNA, 201 bp, Homo sapiens
gtcattcttcttcccttgatcaattttattgaagggatatatgggcctgtggaaagttgtggatgttgtctaattatactttcttaagaacgttccaaacmaaaaatgattaaggtgagtcattagattgaggggagcactgttttgtcgcaggcagtgaacttgttcagaatcacatgcttcattaggatacatgagccc

SEQ ID NO: 386970 - DNA, 201 bp, Homo sapiens
aagtagctgagacaggtgaagagagccatggaaagtcacagaatctctgtgggtctgtagggaaagaagaaaaagcttatggtggatgcaaaagggctccrtgcaccccaagcatatgtaaatgtaaagaggaaaggaggctacatggtcactgatttgcttattcattcatggggcatatgctttagagcatggtctatg

SEQ ID NO: 386971 - DNA, 201 bp, Homo sapiens
cttattctgctttgtggatcaagagggctccactacacaatatttcagaccatttgtctcctcttgccttccagatctgtaacatgatgaatgcccctgcrgatgaatacttcacatttcaggtaactgcactctgggtcagacctcacctcttggggctggggtagaggagtggatgctctcgcctctcctccaccccca

SEQ ID NO: 386972 - DNA, 201 bp, Homo sapiens
tttatctcactgtcttgggggaggagagaaatgttaccttatagtgcttttcatcttggttctatgcagataacctatgggcctccacatgtttgctataygttttataagtcatagtccaccgccataagccccagggaacttaaagaatttagatacaaggagctgaactccttagtttaaacaattaaatcatttatg

SEQ ID NO: 386973 - DNA, 201 bp, Homo sapiens
atgagagtcttcacataatctctagacctttgacatcagcctcttttaccctgaaggcattgaagaaaaacagggtacaaaagactggggcccctacttayataaagctgtgatctaattgttaataaatgggaaggaacagggagatacatttatctcactgtcttgggggaggagagaaatgttaccttatagtgcttt

SEQ ID NO: 386974 - DNA, 201 bp, Homo sapiens
tggtggttatagaaactgggatttactcatttttttaaaaatctctaatgccaacacagagtagttgtttaaatatgtgttaaaattatgatcgattgtartattgatcagatatggcctaattattccccaactaaagtatttgctttccctgacctgccagtaacctggcaatgacctctcccagcctaaagttttgtt

SEQ ID NO: 386975 - DNA, 201 bp, Homo sapiens
taaccatcatcttctaacccaaatctcactttaggaagaagaagaagaagaaaaaaagcaatcctagctctgctgctcatactggctgtagcagagctagratttctcagctttctcctccccttggcctgagcagcctgttgctttgaatttgaaggggattccctggagtctgggggagtgggaaggggcagagacggt

SEQ ID NO: 386976 - DNA, 201 bp, Homo sapiens
tctatgaagcctcatcaaacccaagttcacctagatcttctatgtcatctcctagaatttttatacttttgtgttttacatttaggtgtataatccatttygagttattttttgtgaaaggtacaagttctgtttctagattcactttttttacatgtagatgttcagttgttccaacaaaatttgttgaaaagactatcc

SEQ ID NO: 386977 - DNA, 201 bp, Homo sapiens
tttcattctcttaacagtgtctgctgcagagcagaaggttttaattttaatgaagtccaatttttctatattttttctttcatggattgtgcttttggtgytgtatctatgaagcctcatcaaacccaagttcacctagatcttctatgtcatctcctagaatttttatacttttgtgttttacatttaggtgtataatcc

SEQ ID NO: 386978 - DNA, 201 bp, Homo sapiens; identical to SEQ ID NO: 85106

SEQ ID NO: 386979 - DNA, 201 bp, Homo sapiens
ccccagcacccattctggagctcacagttctagttccatcccatagatttaaacaaatcacttaacctctttaggcttccatttgttcatttttttttttwaagtatgaacttaattgctaagatcccttctggctttaaaatgctatgatagctgggtgtggtggctcacgcctgtaatcgtagcactttgggaggccaa

SEQ ID NO: 386980 - DNA, 201 bp, Homo sapiens
gcactttgggagagtgaggcgggcggatcaagtgaggtcagttcaagaccaacctggccaacatggtgaaaccctgtctctactaaaagtacaaaaattastcggatgtggcacacctgggattataggcacatgtctataggaggtagacgtgtgcctctgaggtaggagaaacacttgaacccaggaggcagaggttgt

SEQ ID NO: 386981 - DNA, 201 bp, Homo sapiens; identical to SEQ ID NO: 85107

SEQ ID NO: 386982 - DNA, 201 bp, Homo sapiens
tgttagattgttagttttttaggacttttgtgagcaagttgttaaactgttggcagcttgaaatctcccatggcaagagaattgggaccatggaaattggyaactgatacaagccaaggatttccccaattcccagccaggagagctgatttccccagcacccattctggagctcacagttctagttccatcccatagatt

SEQ ID NO: 386983 - DNA, 201 bp, Homo sapiens
attcaagttagatcatgaaattaatgcatggcatgaaagattccttaaattcttaggctatatatgcttataaaaactttgaaagattctcgcattttctrtgtaagagtactacaaaaatagtagacatggttcattcaattattctcagaaagcacttaccttggggccgagaggcaggcagagtttggtgaggtgggg

SEQ ID NO: 386984 - DNA, 201 bp, Homo sapiens
tgatacctactttcagatccttatgtggtcagccaataaagtatttgaagaactcacagatgttgagcgacagtttcacaaagcgctctacacggttagawcatatctgaactgtgaacgatactccattggactgctggacatgaccaaggagaaggttcttattattctacacattttgtctcatctcacatcgcctat

SEQ ID NO: 386985 - DNA, 201 bp, Homo sapiens
tcagactaaacatttttttggcaggaatactacatagatgatgctgtgtccttctcaatgcattgtgtcaagaagcccatgatatcaattttatttatggrcgatgtccagaagatctctttatgtaaaggaacattttctcctttgcaattaataagtaatacgtgaaacgttagtttgagatcagattaatatctagct

SEQ ID NO: 386986 - DNA, 201 bp, Homo sapiens
gcagtcgtttactgtttactgaatatttcttgaacagaaaaaaagttgagtatcaaaaatgagtaaggcttttgtaactaaacattttattttgcatcatwgaaagaaaagagctactggagttggatttagaatggtaacccatcacttagaaagtctttaatatggccaagtctcagtttcatcacctgtaaaatggag

SEQ ID NO: 386987 - DNA, 201 bp, Homo sapiens
ttctgccagctcagctgcatgcatgtccctccagcatctctcctcctttaatttccccacctgtccaaggacattcagtttctccctcggcatggagcacyggccatactctctgattattctaagtgcttacttttcactcgtatatattttatagccactttaataagttaagttccttaagggcaagatacatatttt

SEQ ID NO: 386988 - DNA, 201 bp, Homo sapiens
cactagtaaggacatactacacattcaaataaatacccattgaactgaatctctcctgcagatctgtctggtaggcccacatagttgttgctcatttctgyctcttagcactttctcacccacatggaatcgtctctccgcttccttctgccagctcagctgcatgcatgtccctccagcatctctcctcctttaatttcc

SEQ ID NO: 386989 - DNA, 201 bp, Homo sapiens
acctgagtctctctccaggcctgcactttcatgttacctccagggaaggctcagctgattttctgggtgtagcaacagttctgtgcaagagtgtgaggggycagcccaggctcaggggctgggggaaccagaaaccgtaattttgttttaaatagctatataccattcggtgttgaaatctgtgtaaatagagcatggctg

SEQ ID NO: 386990 - DNA, 201 bp, Homo sapiens
caaagatgcaggctttgcaagcactatgcactgcatcttttttctaaagctttgaccatcaggagacggatgttgaggtttggttcctctgcttttcattscatgtataatgactacatagagtagtaacaaattacttagattgagcacttattacatgctcagtctaaatgttaaattgtggttcaggctataagtgca

SEQ ID NO: 386991 - DNA, 201 bp, Homo sapiens
gaagcttatttgtgaccatgctgtgcccaggcctgacccctatatttatggcacgtggatgtcagaataggatgcatgtcagcaaaagggcgacaatgatwttctagagtctgaaccttaagcagtcattgtctaaacagggagtgggaatggagctggcccaggagaatgcaggctgctctgaaatgtgaggccctttgc

SEQ ID NO: 386992 - DNA, 201 bp, Homo sapiens
catgtcagcaaaagggcgacaatgatattctagagtctgaaccttaagcagtcattgtctaaacagggagtgggaatggagctggcccaggagaatgcagsctgctctgaaatgtgaggccctttgctttctctcatgctccactgcagctactgctctgatgtgctctcatggcctgggcagagaggaggcctggggcct

SEQ ID NO: 386993 - DNA, 201 bp, Homo sapiens
tagtccaggggttggggacccctgatctaagggctcaacagttcctgacacagcattcatgctcaataaacgttctctgcatgcatgaatggctggctacstcctacatcctgaatcctgctctcctggtggttttctcagcagcccttccctgcagcttattgcaactgttctcaggaaaatcaacaattctgactgagt

SEQ ID NO: 386994 - DNA, 201 bp, Homo sapiens
atgatgaatgcccctgcggatgaatacttcacatttcaggtaactgcactctgggtcagacctcacctcttggggctggggtagaggagtggatgctctcrcctctcctccacccccagagtccgcctgatgctcaggtgtggccacaggcacacacgggtccatctcccactcaccctggctgggccagcaagtagcaga

SEQ ID NO: 386995 - DNA, 201 bp, Homo sapiens
agtgacaatgctgtaggatttgcatgtcttcaatttcatgctacattacaaaactgcactcctgagaagttgtgccagttagcactcccacacacagtgtrcaagagttccagctgagtgaggtggctcatgcctgtaatctcagcactttgggaggccaaggcaggaggatcacttgaggccaggaatttgagaccagcc

SEQ ID NO: 386996 - DNA, 201 bp, Homo sapiens
ggctatgggagctatagcaagaaaaaaatatatatattttaggaagggaaatgtatcagtcagctattgtcatataatgctgcataacaacaaccctaacrcctcagtgtcatgcagtaatgaacctctatctctcactcacatttgtgggttgaccaggctttgattgacagtggctggacttggctccaagctatgaat

SEQ ID NO: 386997 - DNA, 201 bp, Homo sapiens
taaactacatctctagagtgcccaattccatgagttttgactattttatatacctgggaaaccagcaccacaatcaagatgcagaacacttctatcatccragtaattgttcatatcatgacccttcacagcacatcccactgtccactcccagccctaggcggcaacctttgaaatgttttcagttgctatggattagtt

SEQ ID NO: 386998 - DNA, 201 bp, Homo sapiens
gctaaccacagaaagcaggcattggggaggaagagtaagaaaatatgtacaaaggcttggagtaggaataagcttggtgcaattgaaaaatttttaagctgatatagctggagtctagagagtaaagagtgcgaagtacatatgaagctggtagtgcaggtagctgccagatactgtattgccttgaaggtgggctaaaaa

SEQ ID NO: 386999 - DNA, 201 bp, Homo sapiens
catctcacctagaggatctgagtagtttgttggatgtacacatgttcaaaatcagaattgcactttccaatgatatgcatttattttatttgatgcacctyatgttttcttgtggtgaatgctctatctctccatagcatactttattctaactgttttctttttgatacctactttcagatccttatgtggtcagccaat

SEQ ID NO: 387000 - DNA, 201 bp, Homo sapiens
aaagtgctgggattacaggcgtgaaccaccccgcccagcctcagaatgtgaacctttcatcaaagtaatctatgtaaagaaaaactgtatgttcctgtggmtccagcaaaagggatttccttttttgggaatctgtcacataaaaataaaagcaagaaggattagtgcagtattgttggtagtggggaaaactatacacag

SEQ ID NO: 387001 - DNA, 201 bp, Homo sapiens
caggttccactgtaggagattaggattcagtgcatctgctgcattaatctgcaggtgattctgaggcatatctcaggactgctaatctcatttgagctctrtgagttctattggccaaccagcccttgttccctggtggaaactctggcctggaaatgacacacccagaaaattctcacatttttttctacgggaaaccag

SEQ ID NO: 387002 - DNA, 201 bp, Homo sapiens
cccacgtgtcctctcatgatcttcccgccactctccccacacacactcccctgcaccccaagctctccaattgtgtacacaactggcttggctttcttcartctagatcccgagtggacttggcatttctgtctatgagatggtgatgacaataatggtacctacttcagatggttgttgtgactattagcgattagctct

SEQ ID NO: 387003 - DNA, 201 bp, Homo sapiens
cattaccattgtgtgaaactgggtgaagggtacctgaaatctctctgtacatttcttttgtaatatcctgtgaatctatgattatttcaaactaaaaaggsaaaaaaataacttgaggtcccttctcgtttgtagaaaggacctgtagacgaaactggttgggtcattaagaatgttttgtccctgcctattgtcaacaag

SEQ ID NO: 387004 - DNA, 201 bp, Homo sapiens
tagaaaatcttttccaatatgttatttttgaccacttcacagataattgagtgaggagggagaagagagacattaagaaaaatcctgaattgtatgaaccwgtgtaatttttaaacagctagaatcatggcatgttgttttccttctagatccacgtctccattagcaagacttcatggttcttctattttggagaggcac

SEQ ID NO: 387005 - DNA, 201 bp, Homo sapiens
ctaccaaagtataaaattttagcttaaccaaaatttgtaataatactcggaaaacaggaaagaggattttcttcttctttctcccactcctccttcctgtyccctctcattcttattcttattcttacgcccagccccctgcctaatttttaggtcctgcttgactatactggtgttggtaacacctctctcttctattca

SEQ ID NO: 387006 - DNA, 201 bp, Homo sapiens
aattcaaagtacctgtagaggtcagagggtatttaatttaaaatactgtgtgattctgtggctctgcttcactgatgttttctgtggttcaaaagatggastcagtttgaattttaaattattattaactttctaaatacatcagcttaacccctatctacaagaccaacacatctttttagataagattgccacagacct

SEQ ID NO: 387007 - DNA, 201 bp, Homo sapiens
aacaaagttaaggatgtccttcagaataaaagcaggagtttttgactccttgatatccattcacttatgtatttatcagatgtcttctctgtataaagccyggtgttaggcaggccctggggaaagatgggatcctttatcttgaacaatttaccatttggtgggggaactaaacattgtgaaccaatgcacaattaacga

SEQ ID NO: 387008 - DNA, 201 bp, Homo sapiens
tagaaacagcactagacaaggagtttgaggttctagtcccagctatgccccaagctagagctgattggcccctgccttaactccttgttgaacctctccgwttccttttctataaagccagggcttggtagaccagtggttctcaactggaagggatgcatcagagccacctgcacaacattttaaagaagtacctgggcc

SEQ ID NO: 387009 - DNA, 201 bp, Homo sapiens
  misc_feature (1)...(201): n = A,T,C or G
acttgaaaaagtgacattcagcaattttttgaaaggcttttaaagaagagatgggtaaaatgatttctgctgttatactttgattagcccagttctctgtngtgagaaggaaataagagcatggagctgcttggaggtggttttggtctgcggctgtccatggtgagcatcacggcatggacggagcacttcatctgggag

SEQ ID NO: 387010 - DNA, 201 bp, Homo sapiens
gaggtgcaccactatgcctggctaatttttgtatttttagtagaaacggggtttcaccatgttggccaggctggtactgaactcctgacctcaggtgatcmacctgtctcggactttcaaagtgctgggattacaggcgtgagccactgcgcccggcccaggcattggtatttttaaaaagctcccccagctacttctaat

SEQ ID NO: 387011 - DNA, 201 bp, Homo sapiens
cctgtctccacataatgtcttcaacacaatgctcgaaaacaaatggaatattacatatttatacatgtattcaatgttcattaatagttgcaaaagttacrtaagcccactataaaaattcaaacgataggaaaacatcaaagacaaatatttcttaaattgcttcaaatcctaccatccagaaactgatatttcattaac

SEQ ID NO: 387012 - DNA, 201 bp, Homo sapiens
tggtggttttctcagcagcccttccctgcagcttattgcaactgttctcaggaaaatcaacaattctgactgagtcttcagagcttctcctgctgttagaytcggttgtatccttccttctccactgtgcagagacccactgcctggggaatctgcctccactcaccgccagatgctcccaggaatcagcttctgtatgtg

SEQ ID NO: 387013 - DNA, 201 bp, Homo sapiens
gttgcaaaagttacataagcccactataaaaattcaaacgataggaaaacatcaaagacaaatatttcttaaattgcttcaaatcctaccatccagaaacygatatttcattaacgtctaatgaacctcattgcagtcaccctgtggatatacacaggaagcatggagagaaaggactccatgtgttcccactacccaagc

SEQ ID NO: 387014 - DNA, 201 bp, Homo sapiens
atccttccttctccactgtgcagagacccactgcctggggaatctgcctccactcaccgccagatgctcccaggaatcagcttctgtatgtgctactctasctgacccacttctccccatcagggcttcctgctggaacctggctgcagacccgagttgatccctccccgccccccgagttcatccagcccaccagaaggg

SEQ ID NO: 387015 - DNA, 201 bp, Homo sapiens
cccagttctctgggaaacatcattgtggtgcccatgaaaatgtgcttctcagatctccacctgtgggaagtgtagccgtgcaatggctgctggcctgaaayccatggtcacatctgtgctgaggccacacgctccacaggccactcccaattggtaactaagtgtggcagggacagtaaagcaggcctgctcctggaagac

SEQ ID NO: 387016 - DNA, 201 bp, Homo sapiens
acccttcccctggcagagccagcagcaccatcactctgaccttgcttttgtcatcatagctccttctcccattctgattctaacctctcttctacttttawggatccttgtaattacattgggtccacctggaacatccaggctaatttccccatcttaaggccagctaattagcaaccatcattctatctgcaaccttag

SEQ ID NO: 387017 - DNA, 201 bp, Homo sapiens
ttttaaggatccttgtaattacattgggtccacctggaacatccaggctaatttccccatcttaaggccagctaattagcaaccatcattctatctgcaascttagttcccctgtgttgtgtaagataacatattcacaggttccagagattaggatatagacatctttgggggccattgttctgcctgccatagggttcc

SEQ ID NO: 387018 - DNA, 201 bp, Homo sapiens
cttaaggccagctaattagcaaccatcattctatctgcaaccttagttcccctgtgttgtgtaagataacatattcacaggttccagagattaggatataracatctttgggggccattgttctgcctgccatagggttcctcgaagtggactaaggggtcttcctttaacgtcaattaaagtggtcctaattcacaggag

SEQ ID NO: 387019 - DNA, 201 bp, Homo sapiens
gactgcaagcttcatgaaggcagaaacccctgtgtccatagcacacaggaaagagaaggggatggattgtgtccaggcctcagattcatcatctgccccawgaaacagagagaataattctctagtccctttcagctttggcagtgaaacctcctgtttctgaggcacctgttcagataagtcactgatgaaaggagggta

SEQ ID NO: 387020 - DNA, 201 bp, Homo sapiens
gaaagagaaggggatggattgtgtccaggcctcagattcatcatctgccccatgaaacagagagaataattctctagtccctttcagctttggcagtgaarcctcctgtttctgaggcacctgttcagataagtcactgatgaaaggagggtacgggtcactatatataatgtaaaactgactacagttaagaaattacat

SEQ ID NO: 387021 - DNA, 201 bp, Homo sapiens
tcatactggctgtagcagagctaggatttctcagctttctcctccccttggcctgagcagcctgttgctttgaatttgaaggggattccctggagtctggsggagtgggaaggggcagagacggtaccacatatcctccagtgatttaattagcagcagggaagccatcttgaatgagttgttagcagctgtggcctagtt

SEQ ID NO: 387022 - DNA, 201 bp, Homo sapiens
aagcctttgccatgcttgctgctgctttctgccatgatattgaccacagaggcaccaataatttgtaccagatgaagtaagtgaacacatgtccaatgttsacacgtattggtggacattggaaagtacttagggtgagaaaaacgcttctccctattccttggcccagtcaatgcctctttgccatgttggaaattccag

SEQ ID NO: 387023 - DNA, 201 bp, Homo sapiens
aaacaaaaaagtgttgaaagacttttagattttcttcttgttaagcatagtttcatttgttcagaggcaaattattgatagcattttattgtgaattttcrtcttacagagtttaaacatcttccagaacctaaataagcggcagtttgaaacagttattcatttgttcgaggtcgcaataatagcaactgacctggcttt

SEQ ID NO: 387024 - DNA, 201 bp, Homo sapiens
cgcaataatagcaactgacctggctttatatttcaagtaagtacataactctgcacagtggaatgccctatactctgtgtggttttaccttccataaattrtctgttgcattaatgttaaaaggcatttattcacacacatacacacacacagacacacacacacacatacacacaaaatttgctctccttttggattacc

SEQ ID NO: 387025 - DNA, 201 bp, Homo sapiens
tggaaagttgtggatgttgtctaattatactttcttaagaacgttccaaaccaaaaatgattaaggtgagtcattagattgaggggagcactgttttgtcrcaggcagtgaacttgttcagaatcacatgcttcattaggatacatgagccctctggagagtgggcttttctcactttcaataataatcttttattaaaag

SEQ ID NO: 387026 - DNA, 201 bp, Homo sapiens
tacacaggaagcatggagagaaaggactccatgtgttcccactacccaagctatttttttaagccagagttggtttttaatcaacttcattgaagtatatrtacaataaactgcatctcttattttattttatttttgagacggagtctcatcttgttgcccaggctggagtacagtggcgtgatctcaactcactgcaac

SEQ ID NO: 387027 - DNA, 201 bp, Homo sapiens
ggaaagttgtggatgttgtctaattatactttcttaagaacgttccaaaccaaaaatgattaaggtgagtcattagattgaggggagcactgttttgtcgmaggcagtgaacttgttcagaatcacatgcttcattaggatacatgagccctctggagagtgggcttttctcactttcaataataatcttttattaaaagc

SEQ ID NO: 387028 - DNA, 201 bp, Homo sapiens
taacaaaatcttgttattattcagaacatctctttccaaagcgtatgataattttatttatgctttttcatatcaaccgcatcagcctgccccattttacrcatagaaatgtgaaggagaaatcaaataccttgtgtactggcactagcaaggcaagaacatgttggcaatattctcttgcgggcgtcataggcaccatgc

SEQ ID NO: 387029 - DNA, 201 bp, Homo sapiens
tctatgcctttaagaaagtcaagctttcatagtggagtgtattcacacattcttgcattgctataaagaaatacctgagactgggtaattataaagaaaakaggtttaattcactcccggttctgcaggctgtacaggaagcacggcagcatcaacctctgggcaggcctcaaggagcctacaatcatggtggaagctgaa

SEQ ID NO: 387030 - DNA, 201 bp, Homo sapiens
cgtgtatatatatatatatagtatatatatagtatgtatatagtactatatatatactatatatagtacatatatatagtgtatatatatagtacatatayagtatatttatatagtatatatagtatatatatacactatatcgatatagtatatatataatggaatattattcagccaccaaaataatgaaatcttgtc

SEQ ID NO: 387031 - DNA, 201 bp, Homo sapiens
ctttatgctgggaatattcaaattattctttactagctattttgaaataacaatggattgttgtttgctatagttactctgttaatttattgaacagtagrtcttatttcttctacctacctgtatatttgtacccattaatcaacctgtcttcatccttcccacctccctacccttcctggcctctgataaccaccaaac

SEQ ID NO: 387032 - DNA, 201 bp, Homo sapiens
tgtgtgaatgtctgtgtgtgtatataaataatatatatattttttggagacagggtcttaccctgtcacccagggactgcagtggcatgatcacggctcaytgcagccttgacctctggggcccaagcaatcctctcacctcagcctcccaagtagctgggactacaggtgtatgctaccatgcctggctaacttttaaat

SEQ ID NO: 387033 - DNA, 201 bp, Homo sapiens
tgctgaagactagaacggcctgtactttccctggcctcagctagctcgagagccacgatctgaatgaattaaagccatttctacctgtttggggtgtgctwtgcagaattcatagttctatcgccattttaatagtcagggaaaataaaaaagattctttccgtgagcaaatgaaagcagctgagcaagtcagggcccgtg

SEQ ID NO: 387034 - DNA, 201 bp, Homo sapiens
tcagtgtgtgtgaatgtctgtgtgtgtatataaataatatatatattttttggagacagggtcttaccctgtcacccagggactgcagtggcatgatcacrgctcactgcagccttgacctctggggcccaagcaatcctctcacctcagcctcccaagtagctgggactacaggtgtatgctaccatgcctggctaactt

SEQ ID NO: 387035 - DNA, 201 bp, Homo sapiens
aaagggcactattagtacctaagatacctaggtctggcccactctctggacctcagtttcctcaccagtacaatgcacgagtagaggttgagagggaggtyccttcccgtttgaactctccaggtaaggttacctctgactatctcaggatgcatggaaggaggtatgtggctctctccacatcagggccagcaggagcca

SEQ ID NO: 387036 - DNA, 201 bp, Homo sapiens
tgactgcaagcttcatgaaggcagaaacccctgtgtccatagcacacaggaaagagaaggggatggattgtgtccaggcctcagattcatcatctgccccwtgaaacagagagaataattctctagtccctttcagctttggcagtgaaacctcctgtttctgaggcacctgttcagataagtcactgatgaaaggagggt

SEQ ID NO: 387037 - DNA, 201 bp, Homo sapiens
ctttgtaatgagagagaagcgctctatgaactgtgtctgtattcctagctgtgctctccttccctgcatgtacttgctgtctattgtaaccttgtgccttyccctctcttcctcttagcacctcactttccacttggctgtctgatcacctcttttcttctggcccaacctcagcctaacctaaataggccatagctcagg

SEQ ID NO: 387038 - DNA, 201 bp, Homo sapiens
gtgaaagggagaacagagaaaatctaaaagaatgtagaattaagaaagagtttttcaattaggaggcttgtacatgtttttagataaaaatgaaaatgagygagaagaaaaaggtatgaatgaaatgcagatatgtagtgctatatgcaaaagaagcagtactgaaatggtgactataaaccctttttcttcattatatca

SEQ ID NO: 387039 - DNA, 201 bp, Homo sapiens
gtgcttgtctatctttgccttagctacatactgtgcaaatgctacatcatggttctcaaacttcagagggcatcagaattacctgggaagcttattgaagwtgcatgcccaggccaggcatagtgactcacgcctgtaatcccagcagtttgggaggctgaggcgggcggatcacttgaggtcaggagttcaagatcagcc

SEQ ID NO: 387040 - DNA, 201 bp, Homo sapiens
gttctcatgctgctgctaataaagacatacccgagactgggtaatttataaaggaaagaggtttaatgaactcacagttccacatggctggggaggcctcrcaatcatggtggaagatgaaggaagagcaaagggatgtcttatgtggtggcaggcaagagagagcgtgtgcaggggaactcccctttataaaaccatcag

SEQ ID NO: 387041 - DNA, 201 bp, Homo sapiens
catcaactcctcttttgctgttgttttgtgttgtcaaagtaggtcttgaaaggaattccttgcttctcctgtgcgctgggcacatcttgagacctcttgcyctaattaaagaatcactgagtctgtgtttacttactaaacaaacaaaaaacccaacttgtgtgcaagtgtgtgtgtgcatgtgtgtgtgtgtgtgtctgt

SEQ ID NO: 387042 - DNA, 201 bp, Homo sapiens
tctgaagtactcttgaactcagcaaattgaaattttattttgctaatataatgagtgtgagataatatcttattgttcaaatttgtagtttcttgattagyagtgagaccagctggacatccgtgtgttttgggttccaactttttgttggctatatgtgttgtgatatcttatcatagtttggggcctttatttttaggt

SEQ ID NO: 387043 - DNA, 201 bp, Homo sapiens
tgcttgtctatctttgccttagctacatactgtgcaaatgctacatcatggttctcaaacttcagagggcatcagaattacctgggaagcttattgaagawgcatgcccaggccaggcatagtgactcacgcctgtaatcccagcagtttgggaggctgaggcgggcggatcacttgaggtcaggagttcaagatcagcct

SEQ ID NO: 387044 - DNA, 201 bp, Homo sapiens
acttaaaaccatcaactcttgtgagaactccctcactatcatgagaacagcgtgggagaactgcccccatgattgaatcacctccttccaggttcctcccycaacacctggggattacaattcgagatgagatttgggtggggacacagagccatatcaacacctctttgattttgttttccggaagttggtaaagctcac

SEQ ID NO: 387045 - DNA, 201 bp, Homo sapiens
tgggaggctgaggtgggcagatcacgaggtcaaaagatcgagaccatcctgaccaacatggtgtaaccccgtttctactaaaaatacaaaaattagctggycatggtggtgcatgcctgtagtcccagccactcgggaggctgagacaggagaatcacttaaactcagaaggcgaaggctgcagtgagccgagatcgtggc

SEQ ID NO: 387046 - DNA, 201 bp, Homo sapiens
tgattgaaaaggtacatattctctattaatatcagcacttactgtgatttttcatctgtctctggtagtggacccttccaaagttcagattctgaagcackttcttcctcatcagagtttcctgttcatttaaaaaagatgatttttaaaaacctattatacttaaagcacattttgaattattcgccaatacaattaact

SEQ ID NO: 387047 - DNA, 201 bp, Homo sapiens
ggcgcggtggctcacacctgtaatcccagcactttgggaggctgaggtgggcagatcacgaggtcaaaagatcgagaccatcctgaccaacatggtgtaamcccgtttctactaaaaatacaaaaattagctggtcatggtggtgcatgcctgtagtcccagccactcgggaggctgagacaggagaatcacttaaactca

SEQ ID NO: 387048 - DNA, 201 bp, Homo sapiens
tctgaaaattactcatccctgagtggagccaactatctgcctagtaccgtggaagaagggcaggaatgagctggggaaatcctcagcttccaatttgttgwctcaaacattctctcaccaattctaaggagcacacctgtattagtctgttttcacactgctgtaaagctactacctgagactgggtaattataaagaaaa

SEQ ID NO: 387049 - DNA, 201 bp, Homo sapiens
ctgggttcaagtgattcttctgcctcagcctccagagtagctaggactacaggcacacgtcaccacgcctggctaatttttttttttttttttttttttttgtattttagtagagatggggtttcaccatgttggccaggatggtctctctatctcctgacctcgtgatccacccaccttggcctcccaaaatgctgggat

SEQ ID NO: 387050 - DNA, 201 bp, Homo sapiens
ctatcctagcagagatggattcactgctttgaggaatagaactgcctgtactctaaaccagacagaaatcaatgctttaacccaaatgaatgagtggaaamcttgttagccaaatttgcacaagtataaattttaatactagaatatactgtagaaatgacaaaacatattgctcagcataaataacaaaatcttgttatt

SEQ ID NO: 387051 - DNA, 201 bp, Homo sapiens
ccacaaagatatcaccgtctgacgttgatgtgtattcataatttccatccatgtttttatatggtattgttgtgtgttgttttttttgtttggtttcttgktttttttgcgacggagtctcactctgtcaccaggctggagtgcagtggcgcaatctcggctcactgtaatctctgcctcctgggttcaagtgattcttct

SEQ ID NO: 387052 - DNA, 201 bp, Homo sapiens
aaggaagagagatgcgggggaggtaccacacacttttaaataaccagatctcatgagaattcactcagtatcatgaccaaggaggatggggctaaaccattcataagaaacactgctcgcaaaatccaatcacctcccaccaggacccacttccaacattggggattacaactgaacatggggtttgggtggagacacaga

SEQ ID NO: 387053 - DNA, 201 bp, Homo sapiens
tgaactctccaggtaaggttacctctgactatctcaggatgcatggaaggaggtatgtggctctctccacatcagggccagcaggagccagtgggccaccratactggattctccgtccagggaccatccctgcatcccatttcagggcacttcccctttggagccaaaacatctagacacaggaaccaatcatagcttct

SEQ ID NO: 387054 - DNA, 201 bp, Homo sapiens
aatccctttatcttaaataaaaggtattgcatttgactttatttgaatttaacagaagaaatgtttttgaaatggaaagaattgcagaacttcacatgatrgtgtccttatcacaagaaatgttagctcttaaagagccctctaaaatgaataacaaatgactatgaaaaattatgaaaagttgtagctgagcatttagat

SEQ ID NO: 387055 - DNA, 201 bp, Homo sapiens
taagccccagggaacttaaagaatttagatacaaggagctgaactccttagtttaaacaattaaatcatttatgcattcaacaaattaaggttttttttttccaaaagagcatattctcatcttctaaatctagaaaatcttttccaatatgttatttttgaccacttcacagataattgagtgaggagggagaagagaga

SEQ ID NO: 387056 - DNA, 201 bp, Homo sapiens
acctggccaacatggtgaaaccctgtctctactaaaagtacaaaaattagtcggatgtggcacacctgggattataggcacatgtctataggaggtagacrtgtgcctctgaggtaggagaaacacttgaacccaggaggcagaggttgtagtgagccaagattgcactactgcactccagctggagcgacaaagagagac

SEQ ID NO: 387057 - DNA, 201 bp, Homo sapiens
atagtacatatatatagtgtatatatatagtacatatatagtatatttatatagtatatatagtatatatatacactatatcgatatagtatatatataahggaatattattcagccaccaaaataatgaaatcttgtcatttgcagcaatatggatggaactggagattattttgttaagtgaaataagccaggcacaga

SEQ ID NO: 387058 - DNA, 201 bp, Homo sapiens
ttcatttccagatgtgcctctgccttcttcctataggccttcaggctttcttctctcaactttgtttaatcagagtattgaattcctatattaaagtgcawgaatctggctgggcacagtggctcgcacctgaaatcccagcactttgggagagtgaggcgggcggatcaagtgaggtcagttcaagaccaacctggccaa

SEQ ID NO: 387059 - DNA, 201 bp, Homo sapiens
tatagtacatatatatagtgtatatatatagtacatatatagtatatttatatagtatatatagtatatatatacactatatcgatatagtatatatatamtggaatattattcagccaccaaaataatgaaatcttgtcatttgcagcaatatggatggaactggagattattttgttaagtgaaataagccaggcacag

SEQ ID NO: 387060 - DNA, 201 bp, Homo sapiens
tgagcccatccctgctagcacatcaaacttgaaaaagtgacattcagcaattttttgaaaggcttttaaagaagagatgggtaaaatgatttctgctgttrtactttgattagcccagttctctgtggtgagaaggaaataagagcatggagctgcttggaggtggttttggtctgcggctgtccatggtgagcatcacgg

SEQ ID NO: 387061 - DNA, 201 bp, Homo sapiens
ggagtgcagtggcacgatcttggctcactgcagcctctgcctcctgggttcaagcaattctcctgcctcagcctcccaagtagctgggattacaggtgccsaccatcacgcctggctaatttttgtatttttagtagagatggggtttcaccatgttgaccaggctggtctcgagctcctgacctcaggtgatctgcctcc

SEQ ID NO: 387062 - DNA, 201 bp, Homo sapiens
tgtatatagtactatatatatactatatatagtacatatatatagtgtatatatatagtacatatatagtatatttatatagtatatatagtatatatatwcactatatcgatatagtatatatataatggaatattattcagccaccaaaataatgaaatcttgtcatttgcagcaatatggatggaactggagattatt

SEQ ID NO: 387063 - DNA, 201 bp, Homo sapiens
ggagatagatactcctagaataagcctagaacactgaagtaggaagaaaaagctcccctttcgcatttcaatataatctgtaaatgacctctttttaaaasttaagagcatacggtttgatagcacctcaaacattgactgtaaactcgatccttaaatgtcacttgtactaataaaatgcaagttctctattcataagtg

SEQ ID NO: 387064 - DNA, 201 bp, Homo sapiens
tgggaggcagaggttgcagtgagccaagattgtgccgttgtactccagcctgggtgacacagtgagaccctgtctcaaaaaaaaaaaaaaataaaaaaaawtaaacaagctaaaacaaatctgttacacatggtccttggaccacactttgagaaacactcctaaacttttgtgcctgcatccctcgactagaccctaagc

SEQ ID NO: 387065 - DNA, 201 bp, Homo sapiens
acttgaacctgggaggcagaggttgcagtgagccaagattgtgccgttgtactccagcctgggtgacacagtgagaccctgtctcaaaaaaaaaaaaaaawaaaaaaaaataaacaagctaaaacaaatctgttacacatggtccttggaccacactttgagaaacactcctaaacttttgtgcctgcatccctcgactag

SEQ ID NO: 387066 - DNA, 201 bp, Homo sapiens
tttctgaagtataagtatgtcccatgtaaagtttggcattttatcaggtgatcctacctggccctggtgcattccacacaccctcccttacgcctcctccwgtgctctgggggactttccttctcagcaacaccagcaaaacaaactaccccactagggagatgggccaacgtgcccagatgccaagacttgtgaactgct

SEQ ID NO: 387067 - DNA, 201 bp, Homo sapiens
aggctgaggcaaaagaattgcttgaacccaggaggtggagattgcagtgagccaagatcgcgccattgcactccagcctgggcaacaaagtgaaactccayaaaaaaaaaaaaaaaaaaaaaaaagctagatgatcacttcctttggcataggacaaaggagagaagaatcttgacagtcaaatgtaggttaactggagac

SEQ ID NO: 387068 - DNA, 201 bp, Homo sapiens
gtataagtatgtcccatgtaaagtttggcattttatcaggtgatcctacctggccctggtgcattccacacaccctcccttacgcctcctccagtgctctkggggactttccttctcagcaacaccagcaaaacaaactaccccactagggagatgggccaacgtgcccagatgccaagacttgtgaactgctccccatgc

SEQ ID NO: 387069 - DNA, 201 bp, Homo sapiens
gatacaattgtgaaagcaagaatgcatccaataaaagctagatgggccgggcgcggtggctcatgcctgtaatcccagcactttgggaggctgaggcgggygaatcatctgaggtcaggagttcgagaccagcctgaccaacatggtgaaaccccgtctctactaaaaatacaaaattagctgggcgtggtggcacatgcc

SEQ ID NO: 387070 - DNA, 201 bp, Homo sapiens
aacaaattcaaattttaaataatattgcaagaaactcttattagctaagagatagatacaattgtgaaagcaagaatgcatccaataaaagctagatgggmcgggcgcggtggctcatgcctgtaatcccagcactttgggaggctgaggcgggcgaatcatctgaggtcaggagttcgagaccagcctgaccaacatggt

SEQ ID NO: 387071 - DNA, 201 bp, Homo sapiens
tcagacagactactttcagtgcctcaaagccctctgtgcttcacatattcaacctttcctcaccccttccaaactcctggtagccacaggtttttttttgkttttttttttgttgtttttttttttttgctgtttctatagtttttgccttttccagaatgccatatagttggaatcatacagtatgtagcttttcagact

SEQ ID NO: 387072 - DNA, 201 bp, Homo sapiens
tagcagagctaggatttctcagctttctcctccccttggcctgagcagcctgttgctttgaatttgaaggggattccctggagtctgggggagtgggaagsggcagagacggtaccacatatcctccagtgatttaattagcagcagggaagccatcttgaatgagttgttagcagctgtggcctagttgaggtccatttg

SEQ ID NO: 387073 - DNA, 201 bp, Homo sapiens
agcagagctaggatttctcagctttctcctccccttggcctgagcagcctgttgctttgaatttgaaggggattccctggagtctgggggagtgggaaggsgcagagacggtaccacatatcctccagtgatttaattagcagcagggaagccatcttgaatgagttgttagcagctgtggcctagttgaggtccatttgc

SEQ ID NO: 387074 - DNA, 201 bp, Homo sapiens
gcttgacaaatgtttactcaactcaacacaccacagaatgaaagactatcttcatggatcagtcagaaaaacaaaaaccacactagtattttaacgggagrattttatttaaggaattagctaaacaggtgttagaagatagaaaaagtgtaaagggaacagtgaggtaacatagtggtaagaagcacttcccatcactca

SEQ ID NO: 387075 - DNA, 201 bp, Homo sapiens
ttctttccgtgagcaaatgaaagcagctgagcaagtcagggcccgtggccagaggctgggaagtaggtctcctttcttgtctagtgcacctgtctccacawaatgtcttcaacacaatgctcgaaaacaaatggaatattacatatttatacatgtattcaatgttcattaatagttgcaaaagttacataagcccactat

SEQ ID NO: 387076 - DNA, 201 bp, Homo sapiens
aattcatagttctatcgccattttaatagtcagggaaaataaaaaagattctttccgtgagcaaatgaaagcagctgagcaagtcagggcccgtggccagrggctgggaagtaggtctcctttcttgtctagtgcacctgtctccacataatgtcttcaacacaatgctcgaaaacaaatggaatattacatatttataca

SEQ ID NO: 387077 - DNA, 201 bp, Homo sapiens
gcaaaagtaactgcatacaaatcttggtaaaatccaaatcagctctggatcgtacaatgtctgttttctggtttcgatattgtactatagttacacaagayggtagaaaatgtactgtagttgtctaaccatcattaccattgtgtgaaactgggtgaagggtacctgaaatctctctgtacatttcttttgtaatatcct

SEQ ID NO: 387078 - DNA, 201 bp, Homo sapiens
gccagataccctgccaggcagcttgggccctaggaatgcctaacagctctgcaaacagtttcagaacagcacggtggtctaaggggctcccctcaaccttscatccttccgtttctcctttgcaaagggtcgggactgcatctctgtctgatgtctctctcagcacccccagcctccctccccgccgctcttcaacggcat

SEQ ID NO: 387079 - DNA, 201 bp, Homo sapiens
gctacctcctacatcctgaatcctgctctcctggtggttttctcagcagcccttccctgcagcttattgcaactgttctcaggaaaatcaacaattctgaytgagtcttcagagcttctcctgctgttagactcggttgtatccttccttctccactgtgcagagacccactgcctggggaatctgcctccactcaccgcc

SEQ ID NO: 387080 - DNA, 201 bp, Homo sapiens
aattagcacaataatagaataatcatgcaatcaatcacactcttttgcattggtttctttcacgcaaaataataatttttagattactcatgttgtgtatrtccatgattcattcctttttttagagatggggtcttgctctgttgccaagactggagtgctgtggcactgttatagctgtctgcagcctcaacctcctgg

SEQ ID NO: 387081 - DNA, 201 bp, Homo sapiens
  misc_feature (1)...(201): n = A,T,C or G
tagatccacgtctccattagcaagacttcatggttcttctattttggagaggcaccacctggagtacagtaagactctgttgcaggatgaggtacgtaaanctctctttaggacagctaaacacaaattctggatcaaagcactaacccacagaaaatgcttggaaaaagggtggccttgagttacagcagttgatagtgt

SEQ ID NO: 387082 - DNA, 201 bp, Homo sapiens
tctctagagtgcccaattccatgagttttgactattttatatacctgggaaaccagcaccacaatcaagatgcagaacacttctatcatccgagtaattgytcatatcatgacccttcacagcacatcccactgtccactcccagccctaggcggcaacctttgaaatgttttcagttgctatggattagtttacattttc

SEQ ID NO: 387083 - DNA, 201 bp, Homo sapiens
gggggaggagagaaatgttaccttatagtgcttttcatcttggttctatgcagataacctatgggcctccacatgtttgctatatgttttataagtcatartccaccgccataagccccagggaacttaaagaatttagatacaaggagctgaactccttagtttaaacaattaaatcatttatgcattcaacaaattaag

SEQ ID NO: 387084 - DNA, 201 bp, Homo sapiens
catccttcccacctccctacccttcctggcctctgataaccaccaaactactctctatcttcaaataaagaaaatgtggtgcgtgtatatatatatatatwgtatatatatagtatgtatatagtactatatatatactatatatagtacatatatatagtgtatatatatagtacatatatagtatatttatatagtata

SEQ ID NO: 387085 - DNA, 201 bp, Homo sapiens; identical to SEQ ID NO: 85110

SEQ ID NO: 387086 - DNA, 201 bp, Homo sapiens
taatcaacctgtcttcatccttcccacctccctacccttcctggcctctgataaccaccaaactactctctatcttcaaataaagaaaatgtggtgcgtgkatatatatatatatagtatatatatagtatgtatatagtactatatatatactatatatagtacatatatatagtgtatatatatagtacatatatagta

SEQ ID NO: 387087 - DNA, 201 bp, Homo sapiens
tccttgattttactagctgctgaagattcaggaggtggtgatgacaaaaagtccaaaacatgtttaatgttgtaatattatctaactggtctaaacttcaratatcattttacctttgaagaaaaccagaaaacattcaaaagaacttcaacaaatcatcacgtaacaggatcttcagaaaaactaccctgtgactatgaa

SEQ ID NO: 387088 - DNA, 201 bp, Homo sapiens
atatatatagtgtatatatatagtacatatatagtatatttatatagtatatatagtatatatatacactatatcgatatagtatatatataatggaataytattcagccaccaaaataatgaaatcttgtcatttgcagcaatatggatggaactggagattattttgttaagtgaaataagccaggcacagagagtcaa

SEQ ID NO: 387089 - DNA, 201 bp, Homo sapiens
tcattcaccagtattgctcatggccagcccagttccttgataatgggttttaagatggtctatctgccttagccacacttcattctcatttctgacacattgaactacccctctccagaagtagtgaagtgttgtagacagactgaatgggctttggagtcttgggtttgtggggaccaactacttcttggttgggggatc

SEQ ID NO: 387090 - DNA, 201 bp, Homo sapiens
acagtttcacaaagcgctctacacggttagatcatatctgaactgtgaacgatactccattggactgctggacatgaccaaggagaaggttcttattattytacacattttgtctcatctcacatcgcctatataacacacaccacaggaaatgtgatccttaaaaaacagatacactatgtaaataattagtcatgattg

SEQ ID NO: 387091 - DNA, 201 bp, Homo sapiens
gttaacagtcaaaaattcctaaccagtattgctgggaattgtagatctttcagcactaaaattccagaattacgtagattaacataaaatatacaaacacmtaaaattcatataagatatggtaggtcatggaacagtgtgtttaatgatacttaaatctgattgcctccaggaattctacgatgaatggccaatcaagct

SEQ ID NO: 387092 - DNA, 201 bp, Homo sapiens
ctgttgctctaaacaatgttctccagctgccttcaagggcttctctgaagaaccatcaagggacacacgcaggatttatgcaaagaaacttcgctaaggawtttttgagctagtgaaaataaaacacaaaaacccctcccccatccccatcctgtaacttaatggctggtttatctagggctttcagatgcaataataagc

SEQ ID NO: 387093 - DNA, 201 bp, Homo sapiens
tccttactaactgctataacctgttttccaccatctctttccgatctgtgatgtgagcattctttctaaactaagacacatcgactatctcaccttctccctttccatcttttgtgggctctgtcctcccacccagggcctttgctctgctaccataagactgttggtctttgacccttttttggggcttacttcccaccc

SEQ ID NO: 387094 - DNA, 201 bp, Homo sapiens
tagagcactggcctgggaagacctggagtagtagaaacagcactagacaaggagtttgaggttctagtcccagctatgccccaagctagagctgattggcycctgccttaactccttgttgaacctctccgtttccttttctataaagccagggcttggtagaccagtggttctcaactggaagggatgcatcagagccac

SEQ ID NO: 387095 - DNA, 201 bp, Homo sapiens
atgggggagcaagtggatatttgctaaccatgttctaatcaccacaaaatgaagggaaaatatcatgtgcccaccatctctatttcttttatttccctggygtgtgtgtgtgtgtgtgtgtgtgtgtgtgtgtgtgtgtgtgtgtgtagttttgctggagtgggttggttttggtgagcatgttggtttttggttttgccg

SEQ ID NO: 387096 - DNA, 201 bp, Homo sapiens
tataaaatcattgattacattttacatggaaaagaagagatcaaagtgattccgtgagtattggcaggaagttgctgccgcagttgccgttgtatttttgyacatattgcatttctctatattgcaatgattttttttcttctcttccccaaggacgcctcctgcagaccactggacactcattagtgggttgccaacata

SEQ ID NO: 387097 - DNA, 201 bp, Homo sapiens
cttacgcccagccccctgcctaatttttaggtcctgcttgactatactggtgttggtaacacctctctcttctattcatggtgcatggtacactttaaaaagcaataattcagccagttttattgtctgaagctgattattagtatgtttttcttaaattaaaagaaggaatggggtggttgatgatggaagggagatgga

SEQ ID NO: 387098 - DNA, 201 bp, Homo sapiens
tatcagacagactactttcagtgcctcaaagccctctgtgcttcacatattcaacctttcctcaccccttccaaactcctggtagccacaggttttttttkgtttttttttttgttgtttttttttttttgctgtttctatagtttttgccttttccagaatgccatatagttggaatcatacagtatgtagcttttcaga

SEQ ID NO: 387099 - DNA, 201 bp, Homo sapiens
agaaaatgtggtgcgtgtatatatatatatatagtatatatatagtatgtatatagtactatatatatactatatatagtacatatatatagtgtatatayatagtacatatatagtatatttatatagtatatatagtatatatatacactatatcgatatagtatatatataatggaatattattcagccaccaaaata

SEQ ID NO: 387100 - DNA, 201 bp, Homo sapiens
aatcacttgaacctgggaggcagaggttgcagtgagccaagattgtgccgttgtactccagcctgggtgacacagtgagaccctgtctcaaaaaaaaaaawaaataaaaaaaaataaacaagctaaaacaaatctgttacacatggtccttggaccacactttgagaaacactcctaaacttttgtgcctgcatccctcga

SEQ ID NO: 387101 - DNA, 201 bp, Homo sapiens
agctacttgggaggctgaggcaggagaattgtttgaacccaggaggtggaggttgcagagagctgagatcgcgccattgcactccagcctgggaaacagarcaaaaactccatctcataaaatataaaaaataaaatcaaataaaatgctatgattttaattatctcttggaaagacatggtcttttattaagatccattt

SEQ ID NO: 387102 - DNA, 201 bp, Homo sapiens
agtagagacagggtttcatcatgttggccaggctggtctcgaactcctaacctcaggtgatccgcctgccttggcctcccaaagtgctgggattacaggcrtgaaccaccccgcccagcctcagaatgtgaacctttcatcaaagtaatctatgtaaagaaaaactgtatgttcctgtggatccagcaaaagggatttcct

SEQ ID NO: 387103 - DNA, 201 bp, Homo sapiens
tttaacctacctgattcttggcttcttcatctgtaaaatgaggacatctctcttatcaattgtgagaattagagattttatatatttttttatatatataracactatatgtacatagtgtctagaatttacacagtaggtggataatcaatattatctttaccaactttaggtttttgtattctaaaaaaatttaattaa

SEQ ID NO: 387104 - DNA, 201 bp, Homo sapiens
acacagggtcagtggaagttagaatgtgaacctttctttttctttttcttttttttgagatagagttttgctcttgttgcccaggctggagtacaatggcrcgatcttggcttactgcaacctctgtctcccgggttcaagcgactcccctgcctcagcctcctgagtagcggagattacaggggcgtgccaccacgcttg

SEQ ID NO: 387105 - DNA, 201 bp, Homo sapiens
cctgtccctactaaaaatacaaaaattagccaggtgtggtggcaggtgtctgtaatcccagctacttaggaggctgaggcaggagaatcacttgaacctgraaggtgaagcctgcagtgatcagagatcacgccattgcactctagcctgggcaacgagagcaaaactctgtctcaaaaaaaagaaagaaagaagtcctgg

SEQ ID NO: 387106 - DNA, 201 bp, Homo sapiens
gagtgcgatggcgctatcttggctcactgcaacctctgcctcccgggttcaagcaattatcctgcctcagcatcctgagtagctgggactacagaggtgcrccactatgcctggctaatttttgtatttttagtagaaacggggtttcaccatgttggccaggctggtactgaactcctgacctcaggtgatccacctgtc

SEQ ID NO: 387107 - DNA, 201 bp, Homo sapiens
caagctatgaatttggtttgctctatgtgtctctcatccttcttggaccaggagctacctgatagatgtccttctcacaaagatgacagaagtgcaagagwgcaaacctaactgtgcaggcatacttcaggtttttgctcacatcacattcaccaaaatgctcattggccaaagaaagccacatcacgaagaccaacctta

SEQ ID NO: 387108 - DNA, 201 bp, Homo sapiens
agagcaaagggatgtcttatgtggtggcaggcaagagagagcgtgtgcaggggaactcccctttataaaaccatcagatcttgtgagacttacttaatatyactagaacagcacgggaaagatttgtccccatgatccaattacctcccactgggtcactcccatgaattgggaattatgggaactacaattcaagatgag

SEQ ID NO: 387109 - DNA, 201 bp, Homo sapiens
cagttaagttttcttttctgtcacactgtcaggtactgcctaggtcccatgtaaatgtccacctaaagatctcaggcaacctcagaattctgaaaaattamaaatattagtgagacagtaggcaatttgattaggccctagaataaagcaaatagaaggaactttggaaggagaattctttcttgaaagaattctttaaca

SEQ ID NO: 387110 - DNA, 201 bp, Homo sapiens
tcctgctgtacaacctgctggttcctaacaggccatgggccagtactggtttatagtccaggggttggggacccctgatctaagggctcaacagttcctgrcacagcattcatgctcaataaacgttctctgcatgcatgaatggctggctacctcctacatcctgaatcctgctctcctggtggttttctcagcagccct

SEQ ID NO: 387111 - DNA, 201 bp, Homo sapiens
tgactgtaaatacagatgaagtttcacccgagtacccactgctctcctcctgctgtacaacctgctggttcctaacaggccatgggccagtactggtttayagtccaggggttggggacccctgatctaagggctcaacagttcctgacacagcattcatgctcaataaacgttctctgcatgcatgaatggctggctacc

SEQ ID NO: 387112 - DNA, 201 bp, Homo sapiens
gaggtaaaagtgtgtgtcttggagcaaaaaagatgtaggcttgaatcttggtttttccacttcctagtaatatgggttttcagcaagtctgttttttttttacattaattaatagactatttttagagtagtattgacagaaaaattgattataaagtacggagtttcctcttccctcccaatctcctctcccagtttccc

SEQ ID NO: 387113 - DNA, 201 bp, Homo sapiens
ctattccaaagtctgaatggtgtcatcttcttttaggttcttaccagatggatgtacactgtgaggaaagggtaccgagctgtcacttaccacaattggcrgcatgggttcaacgtggggcagaccatgtttactttgctgatggtaggtacagagggctgtaaatccttgtaaacctgcagatttcccatttgagcatga

SEQ ID NO: 387114 - DNA, 201 bp, Homo sapiens
agaacatgacagagttagcgtggagcatggatctttctaggcactggcaccgcctgccatttctagcttctcttctggagtctgaaggctccattctttcstgttgttgccagtaggccatccctattatttttctttgaaattaactttcccacttcactaattctgtcttttgttgtgcccgatcaactgttaaactcg

SEQ ID NO: 387115 - DNA, 201 bp, Homo sapiens
ccatataggaggtactagtatcccccactttaactgatgagctcaaaagatgaagttaaaccttccctaggttataggaagtagcaggattgaagttgccrtcttgcctccaggtttgcaggaaagatgcatgcagccacaccctgccctctgcattggcctggttttctttcatcattcctcctctgtaaactcaactgt

SEQ ID NO: 387116 - DNA, 201 bp, Homo sapiens
tggtgagcatgttggtttttggttttgccgagtggtttgagtgtaattcagtttgatagtttgagatgttaaagatgagaagatctgggggtaataaaagsaactgtgataagctaatacaaaaataaatgtaagccactcattttttctttcctacatgcaaacaacccacacctctttaaaaaaaccagctactgtaat

SEQ ID NO: 387117 - DNA, 201 bp, Homo sapiens
acctactgcctcatttaaccttcacagcacagtgaagggaggtgccatataggaggtactagtatcccccactttaactgatgagctcaaaagatgaagtyaaaccttccctaggttataggaagtagcaggattgaagttgccgtcttgcctccaggtttgcaggaaagatgcatgcagccacaccctgccctctgcatt

SEQ ID NO: 387118 - DNA, 201 bp, Homo sapiens
gcgtttaggagctggatatggttggccaaaaaatggtcaatgattattgcctgttttaaaacaagttgaaggcaggaagacttttttttttttttttttttgagacggagtctcgctctgtcacaaggctggagtgcaatggcttgatctcggctcactgcaacctctgcctcccaagttagagccattctcctgcctcag

SEQ ID NO: 387119 - DNA, 201 bp, Homo sapiens
taatggcaaagcacaagaatatgaactggtagcaaatgaatatttcctgaaacactgagaagcagtcagcaaagcttattttggaagctttaacaaatacrcatgaagttctttcacacgcatgtgatatattctctattactgattttgtccttggttcgtatgatggtgtaagtacataaatatttcttattgttttcc

SEQ ID NO: 387120 - DNA, 201 bp, Homo sapiens
ttaaaaattcagggcacaaacccctctccgctgcagatgagtcccagtatccttgagcaccggtgggatgatcattcagacattcacacacttaccttctyaaaggaaggttcagtcttcacccacagtactacaatactcacaacaaataaagtgaacttgctccagaaacctagtgggcctattctctattgcaggctg

SEQ ID NO: 387121 - DNA, 201 bp, Homo sapiens
ctaatggcaaagcacaagaatatgaactggtagcaaatgaatatttcctgaaacactgagaagcagtcagcaaagcttattttggaagctttaacaaatasgcatgaagttctttcacacgcatgtgatatattctctattactgattttgtccttggttcgtatgatggtgtaagtacataaatatttcttattgttttc

SEQ ID NO: 387122 - DNA, 201 bp, Homo sapiens
aggggctctgagtgatattatccttctgcaaagagcattagagtttcttctggcaggtgagagaattgttttagatttcatttggaatgatcttttttggytttattcctactattagggtggagcccttgtttctagaaagtggctcctctggaatccatgaaatcctgggatatttacgaagaccccaagaccttgaat

SEQ ID NO: 387123 - DNA, 201 bp, Homo sapiens
aatttcttggatggtctcttttaaatactgacacctacgataagatgaataagctagaaaacagaaaggacattgctcaggaaatgctcatgaaccaaacsaaagccactcctgaagaaattaagtccattttggtaagtgggaaattcagtcctgtggacataagatgttacctaaccacatattctagaagtcatctaa

SEQ ID NO: 387124 - DNA, 201 bp, Homo sapiens
agtgatttaattagcagcagggaagccatcttgaatgagttgttagcagctgtggcctagttgaggtccatttgcccgcaagcagtcaagagccgtgtagraaatcctcactcccaatgcgttctttcttattctgctttgtggatcaagagggctccactacacaatatttcagaccatttgtctcctcttgccttccag

SEQ ID NO: 387125 - DNA, 201 bp, Homo sapiens
tttcagaccatttgtctcctcttgccttccagatctgtaacatgatgaatgcccctgcggatgaatacttcacatttcaggtaactgcactctgggtcagrcctcacctcttggggctggggtagaggagtggatgctctcgcctctcctccacccccagagtccgcctgatgctcaggtgtggccacaggcacacacggg

SEQ ID NO: 387126 - DNA, 201 bp, Homo sapiens
aaatgtactgtagttgtctaaccatcattaccattgtgtgaaactgggtgaagggtacctgaaatctctctgtacatttcttttgtaatatcctgtgaatytatgattatttcaaactaaaaaggcaaaaaaataacttgaggtcccttctcgtttgtagaaaggacctgtagacgaaactggttgggtcattaagaatgt

SEQ ID NO: 387127 - DNA, 201 bp, Homo sapiens
tatatatatatagtatatatatagtatgtatatagtactatatatatactatatatagtacatatatatagtgtatatatatagtacatatatagtatatytatatagtatatatagtatatatatacactatatcgatatagtatatatataatggaatattattcagccaccaaaataatgaaatcttgtcatttgcag

SEQ ID NO: 387128 - DNA, 201 bp, Homo sapiens
atatatatatagtatatatatagtatgtatatagtactatatatatactatatatagtacatatatatagtgtatatatatagtacatatatagtatattkatatagtatatatagtatatatatacactatatcgatatagtatatatataatggaatattattcagccaccaaaataatgaaatcttgtcatttgcagc

SEQ ID NO: 387129 - DNA, 201 bp, Homo sapiens
accaatggaatactatgcagccatacaaaaaacaaaatcatgtcctatgcagcaacatggatgcagctggaggccattatcctaagtgaattaatgcaggwacagaaaaccaaataccacatgttcttacttataagtgagagctaaacattgagtatacatggacacaatgatgggaacaataggcactggggcctccac

SEQ ID NO: 387130 - DNA, 201 bp, Homo sapiens
cctgatgctcaggtgtggccacaggcacacacgggtccatctcccactcaccctggctgggccagcaagtagcagattcttcagtgaaggaagaaaagaargttaagacagaaggccagggaggggacctgccactcctccatttgctcacactcctggtcatttacggcagtggtccccaacctttttggcaccagggac

SEQ ID NO: 387131 - DNA, 201 bp, Homo sapiens
ttcatcagtaggatagtttaagatattaatttttatagaattatgaatttcacagggagtagcagcctatgatgatgctttgagctgcttcagatttaagstaacatgtttaaaaaagaatgcaaaccaaaataccaaactataaggcttcaattacagaattcatcgaatagctgttacacaggcaatgtttccattgat

SEQ ID NO: 387132 - DNA, 201 bp, Homo sapiens
aatcaaagacaattttgataataattttaataatagaagctctccataatcacgtgtaagtgttcaaccaatagactttggattatttcttctggtactaygttttcccttaggatgatatctattttctgttttgagggtcatattgtgctacctcttaacattcttagatttgtaacaacccttgaaaatacaaaattc

SEQ ID NO: 387133 - DNA, 201 bp, Homo sapiens
cttagaaagagaatagagtctaggaactcaagcaagtcatagaatcacaaacatgcccagatcacctgatattccaagttattcttgcttcaaaacagaakccccttctattatgcatatatgccttctgtaaaaatgaaattacaatcttaggaatcacaattatacagatggaggagcacttacaaaacattctgtctc

SEQ ID NO: 387134 - DNA, 201 bp, Homo sapiens
ccttcacagctctactatggactactgggcatttagaccactactaagctactctggtgctactccagcaaaatgcctagaagttgatattgtacatataytttctcttccttttatgttttaggcacctaatttcatgcctactttttagatttaaaaccctataatctgccgtatattaatgcactccaatttcaattt

SEQ ID NO: 387135 - DNA, 201 bp, Homo sapiens
ttaggttactaatctttagatatcacacataataaattttaagaagatatcattggtcacgttaaagttttatttaagtgccataagctatcagcattctrctctacaccaaccagaacactgccaacatctacacaccttatataattaactattaacagattcagtcaccatcataaggggctgaaaaatattcaactg

SEQ ID NO: 387136 - DNA, 201 bp, Homo sapiens
atactcatagtatatatgtttattattctatacaagttactttgttagacgttttgtatgtcaaacatagtgccaatatatattgattttcttgtaataawggtacattactgaatcttattcaactgtggtcacttaggattttcagaaatcagtttttccatgcttaatgtatagtaaatatccccccttttatatttc

SEQ ID NO: 387137 - DNA, 201 bp, Homo sapiens
caaaagtcatttttcattcaacattaccaaattctggaccaaatatcaaatggcactctagggtgtaaattaaactaaaaatgctcttcatcaaatattgkgggacaattttgccttttcatttgttgtgtttaagattttttttgacactaagatgtctttcccataactgctaggacttagaaatcctaaataaggtac

SEQ ID NO: 387138 - DNA, 201 bp, Homo sapiens
ccacgcccggctacttttttgtatttttagtagagacggggtttcaccgtgttagccaggatgatctcaatctcctgacctcgtgatccgcccgcctcggyctcccaaagtgctgggattacaggttttggtgagtttcgcctggtttctttattgcaaacggttttatcagcaaggtctttatgatctgtgtcttgtgtt

SEQ ID NO: 387139 - DNA, 201 bp, Homo sapiens
ctggagtgcagtggcgccatctcagctcagtgcaacctctgcctcccgggttcacaccattctcccccctcagccccccgagtagctgggactacaggcgsccgccaccacgcccggctacttttttgtatttttagtagagacggggtttcaccgtgttagccaggatgatctcaatctcctgacctcgtgatccgcccg

SEQ ID NO: 387140 - DNA, 201 bp, Homo sapiens
cttgaagtttgtttatgtacgatatgattttaactcaccctcttttttgaaaaagcaaattgttgaacctggcacttatttatgtgtgttcatgaacaaamtactaatttttatatttttgcactaaaaagtaataagaattcatagtaaaattaatgagctttgggtagggaaactacaacagaagtgctgaatggctag

SEQ ID NO: 387141 - DNA, 201 bp, Homo sapiens
ccgttattttataatggttactctatttacaaacttgaagtttgtttatgtacgatatgattttaactcaccctcttttttgaaaaagcaaattgttgaamctggcacttatttatgtgtgttcatgaacaaactactaatttttatatttttgcactaaaaagtaataagaattcatagtaaaattaatgagctttgggt

SEQ ID NO: 387142 - DNA, 201 bp, Homo sapiens
tgtttttctcagaaactcttgattttaataattcattaacttaacaagtatattcaggcttgttatgtgaaaatgttaagtatataagtgtttccagtttkttcacgtataaatttagaacttgcatatccccaaatacctgaaagccataactgaactacaggataaccttcagaccttcacacttgtcacttcttcatt

SEQ ID NO: 387143 - DNA, 201 bp, Homo sapiens
tgttggtttgtttcctaaattaatctgttctccataaatattcttattccattagcttctttttgctttcaaagtggaaagcatttatctttcagccttcrgctttaattgatgagcatcttaccaccttttgagaaattcatgaccagaaaatcaagagtgggtattggcaaatacggatagggggtgggatgtttaaag

SEQ ID NO: 387144 - DNA, 201 bp, Homo sapiens
gttgtattttatgaagtgtcttctgtcttgttatttcctgtacctcagttactatccttgacaaagtctgattgtgctctgctcagatcctcaagactctscatgtggatttgttactctttgatctccaattgctcctttagttagcaccatactcatttagcattcattaattaaatcaaatatgttggtttgtttcct

SEQ ID NO: 387145 - DNA, 201 bp, Homo sapiens
ctctattttccagggaaaatgtatatatattcttccccaggaaaatgaacaagctggactcctaaaaccacaaagcgttgtattttatgaagtgtcttctrtcttgttatttcctgtacctcagttactatccttgacaaagtctgattgtgctctgctcagatcctcaagactctgcatgtggatttgttactctttgat

SEQ ID NO: 387146 - DNA, 201 bp, Homo sapiens
cgtgcttttcacaccaatgtttgacagcagtgatggatttaaacattttgaaggactttattgcctataaagtacttatcagcattgaaatatattttatmtatctaacaaaatgttaaattgcataactggaaaactatcaattattctacaacttttttttattgttgttcttatgtgagtggaagtgaggcttctaat

SEQ ID NO: 387147 - DNA, 201 bp, Homo sapiens
aaaaaaaaaatggctggggtggtggggggcgcctgtaatcccagctacttaggaggctgaggcaggagaatcagttgaacccaggaggcggagataggagkgagccgatatcccgccactgcactccagccagggcgacagtgtgagactccatctcaaaataaataaagaaataaagaaataaatattttaaaaatttaa

SEQ ID NO: 387148 - DNA, 201 bp, Homo sapiens
gaatttgcttatggctatcttaattctattcatttgctgggatttgagaactctgatccttgactgatgtttagttagtgtactttgatagcaagaatatrttacattattcaatggaatatagatcacatttgttgttccttacttttcttgaaattgattttagcacaactatctgggaggttaatgtaacctgattta

SEQ ID NO: 387149 - DNA, 201 bp, Homo sapiens
gaatctttattaagttaaataaaagctagtaagcattagaaaaattgtccaattgatattattttttaaattttgcacttggattgtttgatgtgctaaayatcatgtaaacatagagatagatagatgataaacagagatgacagatagaagctgagcacagtggctcatacctgttatcccagcactttgtcaggccta

SEQ ID NO: 387150 - DNA, 201 bp, Homo sapiens
caggccacatcatagtttcttcaaagccttcaaagaagtttgactatgctccttgcatagaatcactgtctatgttttcttcattgtgtttatagtgtatragttatggttttgctcattcagttactttgagttatgagaaaattcctagatgttcttctctgaaaatttcttataaaatcgtctttactgagaacagat

SEQ ID NO: 387151 - DNA, 201 bp, Homo sapiens
taatttaagtaagaattttaaatacactgtgatcaatgtttttatatgtggaactctaaaaatgcctagtatttttacgagattccttaaatagcaaataycatgtttcaaagaaagaagattggctaagatagaaaaacaaaggaagccagtcattggctaggttaaagatatcttacttcttgtccggcagtaccctct

SEQ ID NO: 387152 - DNA, 201 bp, Homo sapiens
gtcccatgagtgaggaaatccagggcaaaatcaacttttggcctgagaggagccttttagcaaagacgtgattagaaatcttaaatccaacctatgtttcygtctaacagaaaagcttttgatccataatgagccactttgagggattttcaaagaggtattgctttttgaggtctcagagaaggaaaagtggagcttgga

SEQ ID NO: 387153 - DNA, 201 bp, Homo sapiens
gtatcaccctacaagtgtgcccaaataagtggtaacaaaaacttggggaggaaatttccttcctatgggatgtgtgtgtgtgtgtgtgtgtgtgtgtatayacacacacatatatctgaatagaaaactgaatatatatatttacatatgtgttatatacatttacagataggattcgatgtattaatgtattatatataa

SEQ ID NO: 387154 - DNA, 201 bp, Homo sapiens
ggtttgaaactatatggagtaaaattattaatatcacaataatgagagttacgtattcactaaatatgagacagttggcaaaatcaacataatataggtasatctagaatttcttaacattgtatccatacttgatgtgacaatgtgcatagacagataaaaagaagaggggtgaaattcagagctaacagcaaagcctta

SEQ ID NO: 387155 - DNA, 201 bp, Homo sapiens
gtaatcctagcactttgggatgcagaggcaggtggatcacgagatcaggagtttgagaccagcctggccaacatggtgaaacccagtctctaccaaaaatmcaaaaaaaaaaaaaaaaaaaaaaaaaattagctgggtgttgtagtgggcgcctgtaatcccagctacttgggaggcttaagcaggagaatagtttcaacc

SEQ ID NO: 387156 - DNA, 201 bp, Homo sapiens
cccgcccaggattcccagagttttgctagaacattgatattttattttggcatacctttctaaactacctgtgcccgtactttacaccacaatgatcaatwccataattcctagctaaatgtaagagggaaaaattacgtcttacggatatcaagtgacatatctagctaacttctcatctgggtagtattcactctgttg

SEQ ID NO: 387157 - DNA, 201 bp, Homo sapiens
aaaaaaaaaaaaaaaaaaaaaaaaaattagctgggtgttgtagtgggcgcctgtaatcccagctacttgggaggcttaagcaggagaatagtttcaacccsggaggcagagattgcagtgagccaagattgcgccattgcactccagcctgggtgacacagcgacagagcgagactctgtctcaaaaaaaaaaaaagaaaa

SEQ ID NO: 387158 - DNA, 201 bp, Homo sapiens
tatttccatatggtttctattttgacctatgagcaacacagctgtaatatttctttataaaacatgtgtcctagtttaatgtttttgagtagctagatgcygcgtattaggtattttaaaccaaaggagatttccatgaaaggatatttctttccttactggcagactctgatatgcacacttccggaacttcagtgtttc

SEQ ID NO: 387159 - DNA, 201 bp, Homo sapiens
tttattaattagaatgaaatgatatattacctaatgataccctgtaacaatttgtttcacttgtttttctcagaaactcttgattttaataattcattaayttaacaagtatattcaggcttgttatgtgaaaatgttaagtatataagtgtttccagttttttcacgtataaatttagaacttgcatatccccaaatacc

SEQ ID NO: 387160 - DNA, 201 bp, Homo sapiens
aagtcgaatgctagcatcttaagaactcagttacaaacactcagttcttacctgcttccacttttatcctccaaaccatcttccagtgaccatgttgatasctgaatggaatatgttgcagagggagattgtgctggcagttgctaccttatttctaactaagaataaactgattttgtttcagacaatataaacttttat

SEQ ID NO: 387161 - DNA, 201 bp, Homo sapiens
gactcatcgggtgattattatctgcttttattatgagataaaatctaaaatattacaggatttaaaatcaataagcatttattaggtaccttcttttcttygcaatgtgttacaacctgaaggaaggaaagggaacaaaatggtgaggaggaaggagacaaggaataagagtgtttcacacaatttcacagagagagaaga

SEQ ID NO: 387162 - DNA, 201 bp, Homo sapiens
tatatagtagaatacagataagagtaagtacttttacaccagagcagtggaaacaattttgcctgggaaattatgtaaagcattgaaatggatattaatcrttgatttttaagaacaaatatgactttttcaggtttagggctagggtgtctgaggaaaagaggcagtttcaggtagagacatcagcataaataaaggaat

SEQ ID NO: 387163 - DNA, 201 bp, Homo sapiens
acattacagtgcattgtgttaagaacatgtctgtttttgtttgggtatcatgttactctgaaaaacaccttaaaaagataatgtttccatcttaaacacayacacacacacaaacacattccagtgatagcagattaagttttagaaagaaataatctgaagtaagtcctccctgactatggaaaactaatgagaaaactt

SEQ ID NO: 387164 - DNA, 201 bp, Homo sapiens
gtgtactttgatagcaagaatatattacattattcaatggaatatagatcacatttgttgttccttacttttcttgaaattgattttagcacaactatctsggaggttaatgtaacctgatttattgatgtaaactgagcatatccatttgtaaagagtccagatcaagctaaaataagatcatcagaccattagaagagt

SEQ ID NO: 387165 - DNA, 201 bp, Homo sapiens
gttatatttaacatttcacgagtgaaaacttgttactaaacaatgtttagtaaattaattttctgggattctgcagttgctatttcaagtgataggtgacrttgaaagggaagttctagttgaaaattcagttaaaagtttctgggtagaactctacttgttgtcagttcaacagtccaaaccaacctttcagtttaaggc

SEQ ID NO: 387166 - DNA, 201 bp, Homo sapiens
aatcaaatcattatttgaggggtagtaaagacggaggagtaaaacagaatccaatgccaacccattttcccaaagacaaaagttaatttcagctcacaaayaccaatttgtaattgataggtggagagtgtgaccataatttaaatatagagtatatgaaacaaaaatcaaagacaattttgataataattttaataatag

SEQ ID NO: 387167 - DNA, 201 bp, Homo sapiens
gccagccttgtcgttttcacaggaaatgagaaatttctgttgaagtacaggtgtcagatattaattattcaccagacaaataagtggtactcaataaatawatacaaaaaattctgtatattgccacttttgatgctagttgttaacttttgtgaaaaatcattaagtgcttgacataaacacttttccagtttctataat

SEQ ID NO: 387168 - DNA, 201 bp, Homo sapiens
atatttgaatctaagatatgcaataggatgtataaaacaaaaattctgggtaggggagggaatagttatgaaagacccaattaggaatcttgactgaaacyactgaagatgtttggttaggttcataacatgattaaacgtacattttaaacaacaaaacaccatctctgaaacagagaattgataaagttgacagtccct

SEQ ID NO: 387169 - DNA, 201 bp, Homo sapiens
ttatttaaggctaatctttaaaaatgtagaaaggggccctgttgtccactacagaagcaaaaattgatcaatattttcatttctctctgcctagcagcaargggacagaaatgtggtcaaaactagtttaaccacattttcctaattatgactttggctagtgaaatatggggtaagaaaactgggtaaactggaagttca

SEQ ID NO: 387170 - DNA, 201 bp, Homo sapiens
gcctctgtgtctttgaagtttacccaggaggtggtgcaactttgtgttgctgacatagcttggaaggctttttctgaggatgtgaacctgattgtcaactstattcaaagtcctgtttcggaaatcctccctgttccggtttggaggcgtcctctatcagaaactacacaccagcagagatgcctgcccagtttatatttt

SEQ ID NO: 387171 - DNA, 201 bp, Homo sapiens
atgatttttttagtgatttctgtggtccagccagctttccaataaatcactttttctaagttaagccagagtcggtttctgggagttaggtatggacaagwtaagaacagaaacaaaggaaatagacttcactgaaatttaagaaacactatgcaaatgtcacaagtagtcaaattaaataataaacattataataattgg

SEQ ID NO: 387172 - DNA, 201 bp, Homo sapiens
gcaggtggatcacgagatcaggagtttgagaccagcctggccaacatggtgaaacccagtctctaccaaaaatacaaaaaaaaaaaaaaaaaaaaaaaaaattagctgggtgttgtagtgggcgcctgtaatcccagctacttgggaggcttaagcaggagaatagtttcaacccgggaggcagagattgcagtgagccaa

SEQ ID NO: 387173 - DNA, 201 bp, Homo sapiens
agaatttgcttatggctatcttaattctattcatttgctgggatttgagaactctgatccttgactgatgtttagttagtgtactttgatagcaagaatatattacattattcaatggaatatagatcacatttgttgttccttacttttcttgaaattgattttagcacaactatctgggaggttaatgtaacctgattt

SEQ ID NO: 387174 - DNA, 201 bp, Homo sapiens
aatcatttctatcacactggcacctcaatcagaaatgtctatctcatgtattagaatattttctttaaattttagctgtcatcatagtttagattggccartgcaattgcactggcaacagtgatatctgtaaacacaaagtcaatagcttttacagacttcatcacttctggtttattacaccaatcaaatatcaacatg

SEQ ID NO: 387175 - DNA, 201 bp, Homo sapiens
ggaacttcagtgtttcctgatattttaatctggttacccttcagtcacaatgttatttcctagcagatcccgttattcatattgcattgtgtaatgtggargtataaatagtttatgtctgagaagatattcccaagtgtgtggctcaaactggaacctatggaaaacagctttcattctgcccctgaccaatatgcttcc

SEQ ID NO: 387176 - DNA, 201 bp, Homo sapiens
gttaagttaacccaacatcatctaaatgtttacttgacagcagaagaaatatatataagaaatatatatatttgaaatatataagaaatatatatacacayatagacacacatagttacacattcatatatataagcatgtatatatacctaggtaaatattatataaaaagaatagacagacatgtttgttgctgaattt

SEQ ID NO: 387177 - DNA, 201 bp, Homo sapiens
agcataaaattggtgtgggattgccacttttttactggtatttcttcagaagccccacatgggctgcatttttcaaattaacattttgtatttttttttttaataaagaatggagcaattttgggcccagtgcagtggctcatgcctgtgatcccaacactttgggaggccaaggtgcgtggattacctgaggtcaggagt

SEQ ID NO: 387178 - DNA, 201 bp, Homo sapiens
tgttgttatgaggcttaaatgttaagtttatgtatatgtgtgtgtaaacatatatataatatgtatttgtgtgtgtgtgtgtgtgtgtgtgtgtgtgtgtkaaatttagaagaggtcctggcattcttgaagtcctttacaagtgttaaaataaacaaagatgtctttgtaacatttcattgaagtaaatttttcacatag

SEQ ID NO: 387179 - DNA, 201 bp, Homo sapiens
agccttgtcgttttcacaggaaatgagaaatttctgttgaagtacaggtgtcagatattaattattcaccagacaaataagtggtactcaataaatatatacaaaaaattctgtatattgccacttttgatgctagttgttaacttttgtgaaaaatcattaagtgcttgacataaacacttttccagtttctataatgca

SEQ ID NO: 387180 - DNA, 201 bp, Homo sapiens
ttttctctcttgggtgaagggtcagagattaatgtgaaatcaatttagctttttaaaacttgaactgttaaactaattagactataagagaaaccttgtgwacaagtagatacaaacaaagacaattgtatagaaagaagatgtaaaaaatttgatgagggaatggcaatggaagtggaaatcaggagcttcaaatgtcga

SEQ ID NO: 387181 - DNA, 201 bp, Homo sapiens
aaacaaattgtatggaataaatgtttgtcttaggcagtgcctctaaatttaagtgaatttcatgattgctatattgagttgaattgtatagtccacattcyagattgacaccacatgatcagttttcactgctttctaaaatgtatcaagtccaaaaaaagtaactattggagttttttgtttcttcatttgttttgtttt

SEQ ID NO: 387182 - DNA, 201 bp, Homo sapiens
cagccttgtcgttttcacaggaaatgagaaatttctgttgaagtacaggtgtcagatattaattattcaccagacaaataagtggtactcaataaatatatacaaaaaattctgtatattgccacttttgatgctagttgttaacttttgtgaaaaatcattaagtgcttgacataaacacttttccagtttctataatgc

SEQ ID NO: 387183 - DNA, 201 bp, Homo sapiens
atttttaaataaagtcttaaaagcataaataggtaactacttttaaaaaaaaagtcatgagaaatcacactcaagcattatcaagtgaagaaaattcatartagcaaataaaactgcaaacattttaccttattatctttccttttctctcttgggtgaagggtcagagattaatgtgaaatcaatttagctttttaaaac

SEQ ID NO: 387184 - DNA, 201 bp, Homo sapiens
ttgaatcttcttgtagatgatcctatgcaataaatgttttcagtgcagctgttcaaaagtcatgtctgatctggaatgagagacaagtaggggggtggcaacatccttcaagcttcgcattcatgggaaggaagagccttttctgagacagaatgctaccaaggtcatgagtgaaacatcccatgggacccatttaacttt

SEQ ID NO: 387185 - DNA, 201 bp, Homo sapiens; identical to SEQ ID NO: 85127

SEQ ID NO: 387186 - DNA, 201 bp, Homo sapiens
aagtggtttgaaactatatggagtaaaattattaatatcacaataatgagagttacgtattcactaaatatgagacagttggcaaaatcaacataatatakgtagatctagaatttcttaacattgtatccatacttgatgtgacaatgtgcatagacagataaaaagaagaggggtgaaattcagagctaacagcaaagc

SEQ ID NO: 387187 - DNA, 201 bp, Homo sapiens; identical to SEQ ID NO: 85124

SEQ ID NO: 387188 - DNA, 201 bp, Homo sapiens
ctttttttcagcattaagactaacaaaaatatcatttctcaaatgttagttgctgcactcatctttcagatgtaaaaattcattttaaatgaaagtaaagsttaaagtctatataaaatgaagatgaccttctgcaggataacttcatgtgaatgtcatgggtttgcagaaggatttgaatcagaccaggctcccaatagt

SEQ ID NO: 387189 - DNA, 201 bp, Homo sapiens
cattggcaaatttgggctttccttcttggtatggatttttctctcttcttcacatagatcattttttattccttcaagtctcaatttaaaggttaagtttyaattgggcatcatttctcactctttttccttttggtgagattgacctgggtttctgctctctgtattctcttctcaagggatgtatttcccttttggaac

SEQ ID NO: 387190 - DNA, 201 bp, Homo sapiens; identical to SEQ ID NO: 85120

SEQ ID NO: 387191 - DNA, 201 bp, Homo sapiens
atgatcctatgcaataaatgttttcagtgcagctgttcaaaagtcatgtctgatctggaatgagagacaagtaggggggtggcaacatccttcaagcttcrcattcatgggaaggaagagccttttctgagacagaatgctaccaaggtcatgagtgaaacatcccatgggacccatttaactttatacagagaaatttac

SEQ ID NO: 387192 - DNA, 201 bp, Homo sapiens
atttcaaactaatgaggagatgacaagcagctcacaaaattccaaaaaaagaaaaaattcactgtggctctgtggatcagtaagggccagctctagcacaycagaataaacatatggttcaaggagattcttgtgtaaattgggtgaagaaaactgcagctattaacattcaggcttaataaatgaaatcatttctatcac

SEQ ID NO: 387193 - DNA, 201 bp, Homo sapiens
ggacagttatattatttctatatcttagctattgtgaataatggtacaatgaacttgggactgcaagcatctctttgacatcctgatttcaattcctttgkgtatatgcccagaggagagattgctgaattatgtaattctgtctttatatttggtgattttttttctttaagtaccatagagatctttttttattcagaa

SEQ ID NO: 387194 - DNA, 201 bp, Homo sapiens
tgaaacataaataataaataaagacttatctctttatgttgtttaattatgctttggaaagatcatttttccttacagaagaatatgttgctagatagaartgttgtagtaattcttttttttttttttttgagacggagtctcgctctgtcgcccaggttggagtgcagtggcgcgatctcggctcactgcaagctccgc

SEQ ID NO: 387195 - DNA, 201 bp, Homo sapiens
ttaagccaaatttggataaatatgaggtatatatttaacatttttatttaaattaaacaatatatttttccttggcacgcttcccctttttctcccctccmaaatctaagctattctctagaatttgtgcagttatagcaaatttgaccgatgattccatttttcttttcacagaagtatcggaatgacacagtctaacat

SEQ ID NO: 387196 - DNA, 201 bp, Homo sapiens
ttcatagcttaccaatttggtaatctaagattaatagtttgccaatttgtattttgtcttaagttactttgtaaatgacaccatcagttcttggatatgcygatggtaatgtaaaactttgcttgtatttcaaatacaggaagaacatacttcgtttcttagatgcagaacgagatgtgtcagtggtcaagagcagtttta

SEQ ID NO: 387197 - DNA, 201 bp, Homo sapiens
ccagccttgtcgttttcacaggaaatgagaaatttctgttgaagtacaggtgtcagatattaattattcaccagacaaataagtggtactcaataaatatwtacaaaaaattctgtatattgccacttttgatgctagttgttaacttttgtgaaaaatcattaagtgcttgacataaacacttttccagtttctataatg

SEQ ID NO: 387198 - DNA, 201 bp, Homo sapiens
ccagaatatacttttccccatagtatccaaattcatgtgataactagcttcattaggagtttagattacttttaatatttgtgtagagcacatcttaggamtttaaaatgatcaagtccttgatcttccttgagttccacaagaaggtgttcactttgacaagtattcgcatgcagcaaatctttttctgggtagtcctgt

SEQ ID NO: 387199 - DNA, 201 bp, Homo sapiens
actagcttcattaggagtttagattacttttaatatttgtgtagagcacatcttaggactttaaaatgatcaagtccttgatcttccttgagttccacaaraaggtgttcactttgacaagtattcgcatgcagcaaatctttttctgggtagtcctgtttgtaatattcttaccataatgagaatgaataatatctaata

SEQ ID NO: 387200 - DNA, 201 bp, Homo sapiens
tagaatttgcttatggctatcttaattctattcatttgctgggatttgagaactctgatccttgactgatgtttagttagtgtactttgatagcaagaatrtattacattattcaatggaatatagatcacatttgttgttccttacttttcttgaaattgattttagcacaactatctgggaggttaatgtaacctgatt

SEQ ID NO: 387201 - DNA, 201 bp, Homo sapiens
accccaaactcctgggctcaagttatcctcccacctctgcctctccaataactaagactacaggtgtatgccactactgctggctatttttttttttttttgtcaagacagggtcttgctatgttgcccaggctggtctcacacctttggcctccaggaccctcccacctcaacctcccaaagtgatgggattgcaggcat

SEQ ID NO: 387202 - DNA, 201 bp, Homo sapiens
aagggaaaaaatagatcaaataatatataggtgcttgtatttgaaaaaggtttgagtttaaatttctaatccatgagagaccaaaagacaaagaatctttwgtgatcaaaccgatagataactatttggaggggagagagagacagtgctggggaagactgcatagctcacaccgctttgtaggggctcactgggtactgt

SEQ ID NO: 387203 - DNA, 201 bp, Homo sapiens
ctccgctaggcggtgccctagtagggattgtgggaggggtggggggctccaacctcacatttcccttccacactgcccttgcagaggttatccgtgagcaycccgcccctgcagcgaacttctgcctaggcatccaggcatttccatacatcttcagaagtctaggcagaggttcccaaaccccatttcttgagttctgtg

SEQ ID NO: 387204 - DNA, 201 bp, Homo sapiens
gggtcatttttcttctttcttccttgcttccttcttccctccctcctttagtgtgtgtgcatctactattaattacctaactttttcccacacttccatcrtaggaaatctcagaatcaaccttttattttccttcacattctttcctatgtctgttttctttggtggcttttcagaggagcacaaccttctgtatattcc

SEQ ID NO: 387205 - DNA, 201 bp, Homo sapiens
aggtttccattggttacttggtgtatgccctatgtaaatggagaggatatttcttgtcatagctgaagtgtttccatttgatttagttctaagaagtcagmgtgaattggccttatgttccctgcctccagaccctatcctcctgcctcagcaatatactgcataattgacctctttttaaagaaataagcataatgactc

SEQ ID NO: 387206 - DNA, 201 bp, Homo sapiens
gatgtatgtaagatagcgttttgacctaatgtgtgtacttgctgctggaactgtaaatgaaaataaggaagtgtgagcgctgatgaaacaaaaatgatttwtgtgatatgaaagcaaaggcaaactccccaaagaactattctttaagtaactgttttacatctcctttgacttacctctctgaaaccctgtggttaatac

SEQ ID NO: 387207 - DNA, 201 bp, Homo sapiens; identical to SEQ ID NO: 85119

SEQ ID NO: 387208 - DNA, 201 bp, Homo sapiens
agcgtttatctcctagcaagagggaagggccagtgacgcccccgaacccagctgcagaagctgccgccacctccaatgcacaaggtgtctcatctgaaaagaaacctgagccccagggaggcggcgcggagcgaccctggcagagctggcgcaaacagggcgagaggtcgctgggcagcgttcgaggaccagagggagctc

SEQ ID NO: 387209 - DNA, 201 bp, Homo sapiens
gtttatctcctagcaagagggaagggccagtgacgcccccgaacccagctgcagaagctgccgccacctccaatgcacaaggtgtctcatctgaaaagaaacctgagccccagggaggcggcgcggagcgaccctggcagagctggcgcaaacagggcgagaggtcgctgggcagcgttcgaggaccagagggagctcggc

SEQ ID NO: 387210 - DNA, 201 bp, Homo sapiens
cgtttatctcctagcaagagggaagggccagtgacgcccccgaacccagctgcagaagctgccgccacctccaatgcacaaggtgtctcatctgaaaagaaacctgagccccagggaggcggcgcggagcgaccctggcagagctggcgcaaacagggcgagaggtcgctgggcagcgttcgaggaccagagggagctcgg

SEQ ID NO: 387211 - DNA, 201 bp, Homo sapiens
aaatattttagctggggaaataaattaattgtcattattttataaattctaagactaaaatttcataatcagaacaaagcgctatactgctatattaacgractacagggaaagctcaataatttgttctattaccttttactttcaaggctcaatcttttaatgagtgatagaaggtgcacaggtaacctcggaaattcc

SEQ ID NO: 387212 - DNA, 201 bp, Homo sapiens
atttcataatcagaacaaagcgctatactgctatattaacgaactacagggaaagctcaataatttgttctattaccttttactttcaaggctcaatcttytaatgagtgatagaaggtgcacaggtaacctcggaaattcccttgtttatttgacttttcaggagaaaagaacattgatcaatatgcaaaatatatactg

SEQ ID NO: 387213 - DNA, 201 bp, Homo sapiens
attgtgtatattataatattttatgaggatcatgtgaaagtggtttgaaactatatggagtaaaattattaatatcacaataatgagagttacgtattcaytaaatatgagacagttggcaaaatcaacataatataggtagatctagaatttcttaacattgtatccatacttgatgtgacaatgtgcatagacagataa

SEQ ID NO: 387214 - DNA, 201 bp, Homo sapiens
cttgcagctaaagttctgattctgcattttattcaaattatgatcatattcctctcaatagaattcagtgagctttttgcaaaaaccattttataggcacrtataaaatctacaatatggcaagctaaccttataccaaaatatatgtttctcaatactgcttgaaagaattgtacagtcattataaatgttaatagcccc

SEQ ID NO: 387215 - DNA, 201 bp, Homo sapiens
ggaataaacaactaatacctggaaatgtttctaagtaattttttaaattgattttcttgatcaaaactcatgaagctacaggccaggaggaatattttctstctcttctgcgtctgaagaatactggagcttgcttgtactggctggcaagatctcattgcaccatctcttcccaattcagtgttcactgatgtcaggttg

SEQ ID NO: 387216 - DNA, 201 bp, Homo sapiens
tatttgtacatttatgcacacacatagacaaatataatgcaaccatttgaaataatatctttgtctaagttatacaataatcagttgccataccattcttkatggtgtgtccttgactgcttgcctgaactcatgaagttattacaatatattaccatccagaaatattataacacataaaataagtctgttgacggttta

SEQ ID NO: 387217 - DNA, 201 bp, Homo sapiens
ttagttgtacttacacacatatatttcttgcatatttgtacatttatgcacacacatagacaaatataatgcaaccatttgaaataatatctttgtctaasttatacaataatcagttgccataccattcttgatggtgtgtccttgactgcttgcctgaactcatgaagttattacaatatattaccatccagaaatatt

SEQ ID NO: 387218 - DNA, 201 bp, Homo sapiens
gtgattgaaaattttgtgtacaaacagaaaaagaacaaattaatatattttctggaatataaaaatgctacatctataataacaagaatgtaaattggaaracatctcagccctagttccttgtttgtttttcatttcacccatgttttacattttgaaaaaaacaataatccaagaaggccggatgtgttaggccatttt

SEQ ID NO: 387219 - DNA, 201 bp, Homo sapiens
gagaatttcttaagaatccttccaaaaaacctatagatagacagatagatagagaagcatattttaaaattatgttttatatgcacaaacctaaatatgtwtttattgtagtagctctacaactcgaatcatatgtactcttttgcactttattttttaaattaacatgacattttctcaacaacacataaatacagcttg

SEQ ID NO: 387220 - DNA, 201 bp, Homo sapiens
gcactaatgagaaaattccctagacttcctttagagttcctatgtgtaaagtcaatagcgataagtgacgtgggagtattttaacctggaaattggaaagkaagtctccaaagtattacattttaacgtcagtacggaacagtagcaattttctctgatggattttatttttttccaagtttcagtcagtgttttctacca

SEQ ID NO: 387221 - DNA, 201 bp, Homo sapiens
ttttcttttcactggtgaatcttaattaaagtaaaatcattacttgcagctaaagttctgattctgcattttattcaaattatgatcatattcctctcaayagaattcagtgagctttttgcaaaaaccattttataggcacatataaaatctacaatatggcaagctaaccttataccaaaatatatgtttctcaatact

SEQ ID NO: 387222 - DNA, 201 bp, Homo sapiens
gcttggttccatcatctgtaagtttcctacttcctctcaattccatactgccttttacaataaaaatgcacagaagatttaatttattatgctaggtattmattttgcagcccaatcaattgagtaaaataatttgagaaaccaacttacaaacgtttaaataatacaaaaaccctgtgtgtcatcaatcatgaatttcaa

SEQ ID NO: 387223 - DNA, 201 bp, Homo sapiens
ttcattttgcagcccaatcaattgagtaaaataatttgagaaaccaacttacaaacgtttaaataatacaaaaaccctgtgtgtcatcaatcatgaatttyaactcagcaagaaggctaggaatttacttcactttaacaaagatttattgtcttcctctacatgcaagactctgtgctaggtaccagggatgtaaagatc

SEQ ID NO: 387224 - DNA, 201 bp, Homo sapiens
  misc_feature (1)...(201): n = A,T,C or G
tatatcactgtcaatatcctattgtttcaatctttattactctaaaatagaattcaggcaaaggaaaaaagttcaagtaaatgaaaagatttatcaaagcntttaggtaatagttgggaggagtgaagggaaaaaatagatcaaataatatataggtgcttgtatttgaaaaaggtttgagtttaaatttctaatccatga

SEQ ID NO: 387225 - DNA, 201 bp, Homo sapiens
catttattaaggtgtatctttctgtgacactttttagaaatcaataggataagtggcatttattttgtgttgtttcttcaaaaatgtcctgaaatattgayggtatatttttctttgaaattattcaaactgttgcaaatcaaatatcacaaaatttatttttctgttagcatttctaaagctaaattaattcagtatttt

SEQ ID NO: 387226 - DNA, 201 bp, Homo sapiens
gtggtgtctcataagatgtcctgtatcaaaaaatttggagtgatttcacgtctctgacaccattttaaagccaataattttgctttcagcatttctaacgytgtagttacttatttgtattgcatgtagaaattgctttggtatttgtcaatgagcaaccatagttacatgaacctcgaggaaacctctccagaattagga

SEQ ID NO: 387227 - DNA, 201 bp, Homo sapiens
aaattttgttctttgctcagctcacaattatttcctctttctgttttctctggaacagatgcatacaccagaattgctgtcagtttcaaaattaataagcyaattattttatgagaaataacacagaatatataaatacaaatattttagtaatgtacaaattgcaaattcctatcagactgaataaaagtgaaatacaga

SEQ ID NO: 387228 - DNA, 201 bp, Homo sapiens
agtgagaagagggtcgccagatactgccgaggtgtccatctccgagcctccctaaaccgtggccaggaaaaggagcgcacctcgagtccctgcggggaagyggagccgggacactccgcattgcacgggtgtcatttctcctgtggccctttcctggacgttgccggctggtgggcgcagccctaggcgttaaggaagagg

SEQ ID NO: 387229 - DNA, 201 bp, Homo sapiens
taagtgcgattataaggtatttatctctatgttttacacttattcacttaccttaaggtcctctaggttcattcatgttagcacaaatggcaggattttgytctttttaagggctgaatagtactccattggtatatataccacattttcgttatctattcctctgttaatggacagttatattatttctatatcttagct

SEQ ID NO: 387230 - DNA, 201 bp, Homo sapiens
ccttttaataaaaaccgtttctttgtgtaggcaaaagcacaagtgtttcaaatgtaaatagcaggaaaaaaaaagagtttacagagatagcattgctgcasagaataattgctactgagtatttcttatagaatttgtggaactgaaagatgaggtttattctgtcaagttcaagttcattctgttcaacactgttttctt

SEQ ID NO: 387231 - DNA, 201 bp, Homo sapiens
cttcttttcttcgcaatgtgttacaacctgaaggaaggaaagggaacaaaatggtgaggaggaaggagacaaggaataagagtgtttcacacaatttcacrgagagagaagatttgaaactgcaattgaattttatagaggaaaccccaaagccatagaattaaatgtttgtttcagaattaaggaaacatgtccattgag

SEQ ID NO: 387232 - DNA, 201 bp, Homo sapiens
gattacatagggaagtgacaaggtagttttggaatgctagatcaagggatttggcaaatgcatgtaatacctctggtggatgggacatgtaatttgtcacygattagagattcacagaagagattccaaacagtattaaagatcagctaaaagtataggctaagaatttacagtaatgcctatccacaaattgtgtcagaa

SEQ ID NO: 387233 - DNA, 201 bp, Homo sapiens
ttcttatcattgcagtttctgtggtccaaagcatgtttgaaaatgaaacatctgtgatactgaaatatcttcaataacaaaacatctgcgatacgaaaatrtcttcatttttttttagaaattgagaaggcttcccttaggcatatgtcccagatatacagtatcacatcttagttataattgaaaacactgtggtgcccc

SEQ ID NO: 387234 - DNA, 201 bp, Homo sapiens
agaaaaactaacccatatggatttaactaaaataaatataaataattaattaaataaaacctaaagtgtgaactgatttgtatcaaagcttctgctttaartgtcaatgagcagaacacacttaatccatccaaatatggagtgtttgttattgatatttagtatctatgtagagaaagattaaaatagcatttaaactaa

SEQ ID NO: 387235 - DNA, 201 bp, Homo sapiens
atctctctacaagctacaggttaggtaaataatgacaaaaatatctacctaagacagaccttaattatatggctagaaaaggtacatttatttatatatcsatagcctattcataaataatatatattttccttacaatagccagtggccagacctaaaacgccacttaatgtccagagttcagttatggtcctgcacttt

SEQ ID NO: 387236 - DNA, 201 bp, Homo sapiens
agcataaattcccagtatatgttacggtggaggttgaggcacatgtgcaaaggggtggggaataaaaatgggcaaagttgtgctgaagttagacattgcartttggttcagttagttctctagagcaattcaaacaagcagggaaccaagcagaattgaggaagaggtttttttcatcgatctgggtagcactagaaatta

SEQ ID NO: 387237 - DNA, 201 bp, Homo sapiens
gagcaattaaagcacccaagacacagaatttagggtgtgtataatcataatgttaaaatgtgaaggctcttccaagtactgcaattaaaataaaaagtttmagtgatttgtaaaacaagattcctgaacacagtgaggatcatttagatagttttcatatggtcagacatcattacttaaacattttgccctccaaaaact

SEQ ID NO: 387238 - DNA, 201 bp, Homo sapiens
ggaagttagtcccttgcggtgatccgtcctttcatcctggcgtttgcctgcagcaagatggcggcggtgtcaatgtcagtggtactgaggcagacgttgtrgcggagaagggcagtggctgtagctgccctttccgtttccagggttccgaccaggtaatagaattttcacacttttcttcaagcttcttgggtccctcca

SEQ ID NO: 387239 - DNA, 201 bp, Homo sapiens
ttttttaaaaaaccagttttacaggcagtggcagtctgatagattttcctggtttgcagtctgaatgtcacaaaggttgtctacacatgagttgtgatttmtctgaagtttctatcaatttatccagccacagtttgtaagacttcaggaaaagggaagttttaattttagtaattccaagtcaaggaaacttgggagaaa

SEQ ID NO: 387240 - DNA, 201 bp, Homo sapiens
attttttctactctccttgatgtaattttaaaacctgttatatttaactatgatgatcattaaaacaagtcagttattatttttcaaatgtaattatttcwaaattctttagataaataaaattctgcagaactttgttgtttaaaatatatgcttattgaaatgctatttttatgtagtatcaagctgtgtaaaacttac

SEQ ID NO: 387241 - DNA, 201 bp, Homo sapiens
agtctcattgtagacaaagactgtgcagatttctgaaactccttttttgcttaactcctcttcagaactctgcctcagaaatgtcatttgactcagcatgyctgaatgccaatccctaccttttctgctctgtgagattgctttgttctgcttgggatttacctttctgtaccatagtctgatatgtgcccccatgcatga

SEQ ID NO: 387242 - DNA, 201 bp, Homo sapiens
tcagtttactcacctgtacaaggggaataatattacttcatataaaggttttaggaaaagttctttctcatagaactcaataaatgattgttaagtcaggktgctttctaagcactttacatgaattatcacatccttatgaagtacaagacatgtactttaatcctcatgacaaccttatgaaagacaaagttttcttat

SEQ ID NO: 387243 - DNA, 201 bp, Homo sapiens
ccatcttctgcatcagtcttgctgggagctgcagaccagagcagttcctatttggccatcttgccagaaaatacagttaatgattattaagtgtgtaattkatgttctgattgctttgttactgggagcctggattttactgtcttcctttatacagcatttagatttgtttcagcagtctactactgctgatcagcttaa

SEQ ID NO: 387244 - DNA, 201 bp, Homo sapiens
tttagtactgtcatgtgtgtatgtaggagagattgattttgaaaaataccagactcaagtaatggaaaatgttaagacttcttgaagctagaaggaaagcycttctttttgtactttttgtgtaagttaatcagtaaataatcatataaaaagtgattgctttacatgtttggaagattattacattgtatttcatatttt

SEQ ID NO: 387245 - DNA, 201 bp, Homo sapiens
actttgtaagtccacattctcttaaagtaagctatagctttgtaactttaatggataagaaagttctcaaaacatattttctactctgtgaaagtaaggtwatgttgaacaagtaaattaatattttctctcctggattctgatgtttcatttgctttcctgcttccccatttccttatagttattggactttctttggag

SEQ ID NO: 387246 - DNA, 201 bp, Homo sapiens
aaatgcagaaatcacccatcttctgcatcagtcttgctgggagctgcagaccagagcagttcctatttggccatcttgccagaaaatacagttaatgattwttaagtgtgtaatttatgttctgattgctttgttactgggagcctggattttactgtcttcctttatacagcatttagatttgtttcagcagtctactac

SEQ ID NO: 387247 - DNA, 201 bp, Homo sapiens
ttatatgctaagttattttgtttaaaaactattaagcaccacctgttttaacttttacaaaggtagtatagttagttagatatgcatcctcaatttaaatrtatgtgaaaaaggaaactttttatttagcaatctgtaaaacttaaatcttttgggagtgtgtggagtgaggaaggacatctattatttcaaaactttttt

SEQ ID NO: 387248 - DNA, 201 bp, Homo sapiens
ctagccatgagaatttcaagccaatggatcttagctttcatgggcttcatgggcacgggacctgccaagccaggcaccgatgggaatctcctggactgccrattgcgaagaccatgggaaaaagcacagtatctgggcagaagtgtaccattcctccaggtacagtctgtcacagcttcccttggctaggaaagggaaatt

SEQ ID NO: 387249 - DNA, 201 bp, Homo sapiens
atccttaaatttgaaaaaacaaaaacataaaaaaacaaaaaaaaagaagcaccattaatctgtgaagcacagtaaagcaaagttcataaaatgaggtatgyctgtatcttttataaacaaaaccttggagtcccagtagtttttaacagtataaaggaatctcaacatcaaaaagcttgcgaatcattctcctaagtcttc

SEQ ID NO: 387250 - DNA, 201 bp, Homo sapiens
ccagctaatttttgtatttttagtagaggtggggttttgtcatgttggccagactggtctcgaactcctgacctcaggtgatccacccacctcagcttccygaagtgctgggattacaggcgtgagccactgcgcccagcccggtaggtataatttattaaatgctgtgttcataattgactgtggaccttcgttgctacc

SEQ ID NO: 387251 - DNA, 201 bp, Homo sapiens
ttacactgtaaggataaaactgcctactcaagcctcagcaatggcggactccactcccaccaccaagctccagcatcccaggtcgatctcagactgctgcrctagccatgagaatttcaagccaatggatcttagctttcatgggcttcatgggcacgggacctgccaagccaggcaccgatgggaatctcctggactgcc

SEQ ID NO: 387252 - DNA, 201 bp, Homo sapiens
atttaggcaaatttttctgaaataattattgttttacataaaaattaaaatcactctttgcaatctaacctatcttaaatttttttacaaaaaatttttaytgtaactttatggtaggattgttttacttaacatttttgtcctttttattgtattatcttttacatacagcttgatataaatttttatcagtgcgtttgt

SEQ ID NO: 387253 - DNA, 201 bp, Homo sapiens
ttcttcattttaatttattatgtgatagatatttatggatatacaggcatactttgaagatattgctggtttggttccagaccaccacagttaagcaaatrccacaataaagtgagtcatgaaattttgttttggcttcccagtgcatataaaagttatgtttctaccacactgaggtctgctaagtgtgcattagcatta

SEQ ID NO: 387254 - DNA, 201 bp, Homo sapiens
accaaactaattattgtagctttgtagtaagttttaaaatcgggatttatgagtcctccagctttgttcttcattttcaagattgttttgaaacaaagatwtcacgtgaattttaggatggatttttctatttctacccccaaaatgtcactttttatagggattgcattgaatctgtagattgattgctttgggtagtat

SEQ ID NO: 387255 - DNA, 201 bp, Homo sapiens
ccaaaatgcaaatgagtgccactcttctcacttttcagttttcaaaaatagagttttttaaattaaaatctttatattattacataactggcttattttamattaaatttatattgttttcttcattttaatttattatgtgatagatatttatggatatacaggcatactttgaagatattgctggtttggttccagacc

SEQ ID NO: 387256 - DNA, 201 bp, Homo sapiens
ttgagagagaagagttaacgtctcaaactataattggtatctttcctgtgtgtgttggatcacatttttgcttcacttattttgaaactactgttggttgrtgcattaacattgaaaattgttgtgtgttcttgataagttgttgctttattcttatgtgatgtccctctttatcctggtgctgtttctttttctgaagtc

SEQ ID NO: 387257 - DNA, 201 bp, Homo sapiens
gagaataatgacaagaaaaaaggaggtatacgttcagtacaaatacaaccatactttttcttttttcaaatattttttacctgcagttgatttaatccacratacagaaggcacagatatggaggcctgactgtagatcagaccagaatgtcactatggttttccagctgaaatcaattggttattatctttggtacatgg

SEQ ID NO: 387258 - DNA, 201 bp, Homo sapiens
tttccaaaacaatgcaaggtaaacatcatcctctgaaatatctacagtacttcatcatttatttggcgaactacattattactgatttcaaatttaattcygtagtcagcaacatactctatgatttcaattttcagatttcttgagacttttttatcacctagtgtatggtctgtcttgattaatgtttcatacacattt

SEQ ID NO: 387259 - DNA, 201 bp, Homo sapiens
cacttttaaataaccagatcccataagaactgactatcactaagacagcactaagctctgcatgagagatctgcctccataacctaatcacctcacatccrtccccactttcaacattgaggattacatttcaacatgagagttgggcagggacaaatatgcaaactgtatcaagtcttatatcaaatggcatagtatttg

SEQ ID NO: 387260 - DNA, 201 bp, Homo sapiens
ttcaagtgacagatcttcactataggtagaaattctttcatttgttgccaaagcctcagctgcactgctagatgtcatgataattttataagatgataagrtattaagtttttcaaataaattagcagtgaaaaatgagatgtgataaaaaaattagtttgtagccaataaagtgatggtggaattttgtcatgtctatag

SEQ ID NO: 387261 - DNA, 201 bp, Homo sapiens
acctagtacaccaggaatgctcttgtcgcagggcctttgcagttactgttctctgcctacttctcagggagggaggtctcccctgtataccccatctaaartgttttctcctaggttagattatagctagctatacccgaaacaacacaaattcaaatttaatgggctctaatgtaatggaaatttatatagagacatgtt

SEQ ID NO: 387262 - DNA, 201 bp, Homo sapiens
ttaaacatttaatatctacattttatttcttgcaaaatacatcctttttagcaacaagtttcaaataggaagtagaaaagatgagtataattcgtctaacktacccattcttaagcatacatgcttaatgtcctttcaagtgttgttattcttagagttttatctttttagctcagcttccctgtttgctcaagtaacctt

SEQ ID NO: 387263 - DNA, 201 bp, Homo sapiens
gtcagagtggccttccttctctgtttcttcaaatgccaaggtgccattattttagggtagcatgtcctgaaccctatcattatcaatggattagtattctrtcttacttagaagagatctagggttcacaactaattgatcacaaccggttacagatatcattattccttttccactcccacagcttgactccactagcct

SEQ ID NO: 387264 - DNA, 201 bp, Homo sapiens
cagtaattgagcaaggtgaaattgaatcatagtttacatctttaacaacttgagatatggtaaataatctgcaggcaatcttttggacccttttctcacaraggattataagggaacaaatagtaagtatatctcagatgtgttgacatatactcttgatgataaatgaacattaagttaagttataaaagctagcctctg

SEQ ID NO: 387265 - DNA, 201 bp, Homo sapiens
cctatgttaaaccacatagagtaatggaaatttttatgtaatacatagatatcagtaattgagcaaggtgaaattgaatcatagtttacatctttaacaayttgagatatggtaaataatctgcaggcaatcttttggacccttttctcacaaaggattataagggaacaaatagtaagtatatctcagatgtgttgacat

SEQ ID NO: 387266 - DNA, 201 bp, Homo sapiens
aataaacctatccttaaagtaaattatatatggttttataaattaagaactttactttggattacaactaatatatactaagattttcttaaacaattagkacataatcgttttaagttaaatcccctttgtagtaaaaaattgcacaaaatgggtacagagttttaatctacctaataatttgcactgttttcatctaac

SEQ ID NO: 387267 - DNA, 201 bp, Homo sapiens
attattcttaatgatgtgatcatcagccttttaaaaaacaatatgtcagtccatttgcaaatacaccactcttaggcactttatttttgaattgaagtatrcaacttgtaccaactagctttccctttgatgtaatattgccaaacaatggaatatcatgtcttatattatcaccatattttatttttgaattcacttttt

SEQ ID NO: 387268 - DNA, 201 bp, Homo sapiens
aatttgagttggaatccagtggtttcattgtatctaatccagtggtttcagactttaactacatcagaacacccacctccaaaaaaaaaaaaaaaaaaaaaacctaaattggaatgctcatacaacatgtaaaagacagactgctctaatttgaagtaccaacagggaatgaaactacttaacgcctaccttgtgtatgaa

SEQ ID NO: 387269 - DNA, 201 bp, Homo sapiens
cgagaattgcttgaacctgggaggcagaggttgcagtgagcccagatcacgccactgtactccagcctgggcgacagagtgagagtccatctcaaaaaaamaaaaaaaagaataaaagtgacatttcttgaagttggatttcctaaagagcctatgtagatttgtaaacattaacactgtcctacattgaagaattcaatt

SEQ ID NO: 387270 - DNA, 201 bp, Homo sapiens
ctctcagtaatatttccttatggcttagcatggaaatactttatgatataaggtgagtctgggttaatttaatttgtaataaattgacaacaaacataattagttctaatcaaaaggctaaagattgactccataatggtttttataagattaggagttttattttgtctaaaagtccaacacattatttctggtcctttg

SEQ ID NO: 387271 - DNA, 201 bp, Homo sapiens
gtagagatggggtttcactgtgttagccaggatggtctcgatctcttgacctcgtgatccgcctgcctaggcctcccaaagtgctgggattacaggcgtgrgccaccgtgcccggccaactttattcatttcttctgatagatactgtctaggtctatcatattgatggaatggcttggagggtttaacagacatctaacc

SEQ ID NO: 387272 - DNA, 201 bp, Homo sapiens
caagcaactagcaaacaactagcaagaccagcaacaaatgagtaataatgttttgtgaatcagtaacaaacagaattttggcagccatcacttataaaatwttttagagtgtggtctgttactttacatgcaactttatatttatgcttcaatagcatacattttgtaatgtttccaaaacttctgatagaaatgagtaat

SEQ ID NO: 387273 - DNA, 201 bp, Homo sapiens
gccattcttctgcctcagcctcccaagtacctgggactacaggcacctgcaccacgcccggctaattttttttgtatttttagtagagatggggtttcacygtgttagccaggatggtctcgatctcttgacctcgtgatccgcctgcctaggcctcccaaagtgctgggattacaggcgtgagccaccgtgcccggccaa

SEQ ID NO: 387274 - DNA, 201 bp, Homo sapiens
caatacatattagaaaatctcccaaatttaacacagaaaaaggtattccaactaacagttttaaagaaattattacaaataaaatattccatcaataatakacttatttgattttatagtagctgtttattttaaatattgattttgtttctcagctaaagcttaatgttaaatcttggaaaaaaatttgtttcttacagg

SEQ ID NO: 387275 - DNA, 201 bp, Homo sapiens
gatcataggataattctgtttactttttgagaaactgccataccattttccatagtggtagtaccattttacattcccataagggtaccaatttctatacrtttctgttaatacttattttctgtttttatatactaaaatgttgtaaaagggtgtaaaatgctacctcattgtgttttgatttgcattgctctaattagt

SEQ ID NO: 387276 - DNA, 201 bp, Homo sapiens
tgggcttaactttattcttttttttttttttttgagatggagtctcactctgtcgctcaggctggagtgcagtgggcgatctcggctcactgcaagctccrcctcccgggttcatgccattcttctgcctcagcctcccaagtacctgggactacaggcacctgcaccacgcccggctaattttttttgtatttttagtag

SEQ ID NO: 387277 - DNA, 201 bp, Homo sapiens
tatagattagcaacagacaaacacatatattgatctaagccatctgaaactcaattataaatatcatggtattccatccctaaatacttttttttttttttgagacagcgtctcgctctgtctcacaggctggagcatgtggtgctatcatggctcactgcatcctccgccctctggtctcatgtgatactccacacctca

SEQ ID NO: 387278 - DNA, 201 bp, Homo sapiens
gctgagaattaagaatgatactttacaaacctggaaatgtgagcaggccaattaacaaaacaaatagatggacaaaaataaaggcaaacccatgaggcaawgaatgtttttaagtttgtcaaaaatgaatattaaacagcagagtgagtaaaattaccatttattttctaatgattacacattagtcattgtttctacatg

SEQ ID NO: 387279 - DNA, 201 bp, Homo sapiens
agcaggcagtttttcaactcttgcccccttctccctctcccctctattggagttcccagtgtttattgtttccatctttacgtccatgtgtacccattgtycagctttcacaaatgagaacatgcagtctttgattttctgtttctgcattaattcacttaggatgatggcctccaccttcatccatgttgccacagagga

SEQ ID NO: 387280 - DNA, 201 bp, Homo sapiens
aaaagacaacacaataaaaaagacaaaaatctcaccaaactgttttacttaaccagagttagaaataaggtttattgataaaaaccaggattagaaataargtttattgattttcattttcaggatatctctttttctttcaggaaacttatacagaaaaacagaataaatggcttgtacgcttataattaccttgaccag

SEQ ID NO: 387281 - DNA, 201 bp, Homo sapiens
accccaatgtgatttactttgatcagataaagtattttaccattactaaatggagatttaacccatttatgtctgaggttgcagtttttagaatttttgcwatcagaccttggcaatggccttgagcagtaggatataaataactcccacatgcttagcattccaataatggaacactaggaataaataagttttaaactc

SEQ ID NO: 387282 - DNA, 201 bp, Homo sapiens
aaagaaagaaaatgtgtatatgtatggttttgaaagatttttttaaagaaaaacagattattatgtgagttgggtgattcttgcataggatttccacgggwttattaaaacaaagtagaactatcgtcagttccacttactagaatcaaatagactgtcatcactagaagaaactttagagcaacaagttcctcattttat

SEQ ID NO: 387283 - DNA, 201 bp, Homo sapiens
ttatggttctgtaggctgtgcaagaagcatggtgccatcatatgcttctgatgaggccttcaggctgattctactcatggcagaaggtgaaggtgaaccgrcttgtgcagagattacatggtgatagaggaggcaagagagagagaatgtgtcaggctcttttaaacaaccagctcttggaggaactcttgcagaaactaa

SEQ ID NO: 387284 - DNA, 201 bp, Homo sapiens
gagcaagaagtctcatttattgttggtgacaatgcaaaatggtacagcactttggaagagagtctggcagtttcctacaaagctaaaacatagtcttaacrtatgatcagcagttgtgctcctgggtatttacccaaacaagtggcaaatttaatgtccacacaaaaacctgcacatgaatgtttttagcaaaataacccc

SEQ ID NO: 387285 - DNA, 201 bp, Homo sapiens
acaaatatgtggagctaaataatgagaacaaatggacacaaagaggggaacaacagacactggggcctacttgaggtaggagggtgggagaaggtagaggrttagaaaaaaataactatcaggtactatgcttagtacctgggtgatgaaataattgtccaccagactcccatgatatgagtttacctatataacaaactt

SEQ ID NO: 387286 - DNA, 201 bp, Homo sapiens
gttaggcttcattaagattaaaagcttctgctctgtgaaagacactctaaagagaatgaaaggacaagccacagactaggaagatatatttgcaaaacacrtatctcataaagaactatatctacagttaacaaataattcttaaaattcaacaataagaaaacaagcaacccaattaaaaagtgggcaaaagatctaagc

SEQ ID NO: 387287 - DNA, 201 bp, Homo sapiens
gggaaaaagcacagtatctgggcagaagtgtaccattcctccaggtacagtctgtcacagcttcccttggctaggaaagggaaattccccgaccccttgcrcttccctggtaaggcagtgctgtgttctgcttcggctcgccctccgtggtctgcacccactgtccagccagtcccagtgagatgaaccaggtacctcagt

SEQ ID NO: 387288 - DNA, 201 bp, Homo sapiens
ttacaaatgtacaatttgggcaggttttgccagggaagtttgtctgctccatgtggtgtctgctgggatagctcaacttccactagaggtttcatgtccawcatacctcacccacatggctggcaaagtgctattggctgtcaattcctcttcacaaggacctctctgtgggacagcttggtcttttttacaacttggtgg

SEQ ID NO: 387289 - DNA, 201 bp, Homo sapiens
ccatttgcaaatacaccactcttaggcactttatttttgaattgaagtatgcaacttgtaccaactagctttccctttgatgtaatattgccaaacaatgraatatcatgtcttatattatcaccatattttatttttgaattcactttttattttatttttaatatattttttatacaaatgtaatctcagtggttttag

SEQ ID NO: 387290 - DNA, 201 bp, Homo sapiens
cccaaagtgttaggattacaggcatgagccaccgtatccagccggaaaattaaatattttaatatgtaatgtcggcatatagtaagccttccctagataartggtaattttattattggtttgaatggcctgaatgtttttcatttctttaatcttggttgtaagtattgtgatagattgtgttattgtttaaagtattca

SEQ ID NO: 387291 - DNA, 201 bp, Homo sapiens
gacacttcttttgtattcaaatttaaaaatgcaagaggaaatgaatgtttgggaaagggtacccttggaacatgagaacttttttggagtaagagtaactmtgcgaagttttaaaaagtcagtaatacggccgggtgcggtggctcacgcctgtaatcccagcattttgggaggccaaggcgggtggatcatgaggtcagg

SEQ ID NO: 387292 - DNA, 201 bp, Homo sapiens
ctgaaatgcagtggcgtgatctcggctcactgtgaactctgcctcccaggttcaagcaattctcctgcctcagcctcccgagtagctgggattacaggcgygcaccaccacgcctggataatttctttgtattttaattagagacggggtttcaccatgttggtcaggctggtctcaaactcctgacctcgtgatccacct

SEQ ID NO: 387293 - DNA, 201 bp, Homo sapiens
ggcaacatcgcaagaccccatctcaaaaaatgtaaaaaaaaaaaagtatcaacattttaaatattttttgatacctagagataattgatacagaatacttktagagaagattttaccaatgtaactttagagatatggctttatttttaatatacatggcctagttctgtggatacttttcagactctgacacagggggca

SEQ ID NO: 387294 - DNA, 201 bp, Homo sapiens
ccttgggagagagttcagggagatttccagaaacaaaaattcttccatttttgcatatttttctattctaaattaagttttatgcttttcacccatgcacrtaagaggtattttcttggggaaagtttccttagagggaaaaaaggcattttgataattttggagaaagcaggccatattactctctctctagagactctt

SEQ ID NO: 387295 - DNA, 201 bp, Homo sapiens
cacagtatctgggcagaagtgtaccattcctccaggtacagtctgtcacagcttcccttggctaggaaagggaaattccccgaccccttgcgcttccctgstaaggcagtgctgtgttctgcttcggctcgccctccgtggtctgcacccactgtccagccagtcccagtgagatgaaccaggtacctcagttggaaatgc

SEQ ID NO: 387296 - DNA, 201 bp, Homo sapiens
tgcaatatattttctgtattcttaaacaaagctatatgaagagtttatttctttgtgttttctaggactcaaaaatatgttttttcctttattcagccacytcacacataagtaaatggtccttgaatagggcttactggacaaaagattctgttctagatgactgttcagcaagccatatgcttctcctaaaaatgtcag

SEQ ID NO: 387297 - DNA, 201 bp, Homo sapiens
ttaattagagacggggtttcaccatgttggtcaggctggtctcaaactcctgacctcgtgatccacctgcctcgacctcccaaagtgctggaattacaggygtgagccactgagcccagcaccccttaatattttaaatctgaggttggttgaattatgatgtggaacccacagatgcagagggttgactgtagtctgata

SEQ ID NO: 387298 - DNA, 201 bp, Homo sapiens
tctcttatttataatgtaaaatattattatcctttccttcattcattcaattttttttttttagcatattctaggccctggggatgtagctatgaacaaarcacaacaaccatgtccttagagcttatattctcatgcttaagcatatgccagctttattcataaataattatggtatttttcatagattatgaatattat

SEQ ID NO: 387299 - DNA, 201 bp, Homo sapiens
tattttctgtattcttaaacaaagctatatgaagagtttatttctttgtgttttctaggactcaaaaatatgttttttcctttattcagccacttcacacwtaagtaaatggtccttgaatagggcttactggacaaaagattctgttctagatgactgttcagcaagccatatgcttctcctaaaaatgtcagtctgtct

SEQ ID NO: 387300 - DNA, 201 bp, Homo sapiens
aaaatcctggagaaatacttgatttgagtcagattaaacacactaagggtttacaaaaaatactcaatgtttgtaattcttcttatactgctgtatcgtaygaatatagatcataggaaccttgagagtgagatgtaataaaagctgggacctcctagtcaaaaatttagaacaggaatattttgtgtagtgttatcttcg

SEQ ID NO: 387301 - DNA, 201 bp, Homo sapiens
aaagtcattcatgagggttggattcaacttctttcttttttgtttttgttttcccatattgaatcaatatttatttcaggacatgccatgtcaaaaaaagrcaaagattcaactcttgcctttaacaattgtattgtattataaaagcactttacaactccatcccatgtttaagtataagttactggcatgtgggctaat

SEQ ID NO: 387302 - DNA, 201 bp, Homo sapiens
caaagtcattcatgagggttggattcaacttctttcttttttgtttttgttttcccatattgaatcaatatttatttcaggacatgccatgtcaaaaaaargcaaagattcaactcttgcctttaacaattgtattgtattataaaagcactttacaactccatcccatgtttaagtataagttactggcatgtgggctaa

SEQ ID NO: 387303 - DNA, 201 bp, Homo sapiens
cttcaaagtcattcatgagggttggattcaacttctttcttttttgtttttgttttcccatattgaatcaatatttatttcaggacatgccatgtcaaaawaaggcaaagattcaactcttgcctttaacaattgtattgtattataaaagcactttacaactccatcccatgtttaagtataagttactggcatgtgggc

SEQ ID NO: 387304 - DNA, 201 bp, Homo sapiens
agtaatcaagtatgaaaatattaaggctatgaatattttgctcctttttctaactacatatctgtatgataatgagttttcttcatatattgcaataaaarcaatccaccaaaacagtttgaatgcaagaacagatgttagaattcagctgtcctccattaagctagatagtagattttcaaacgagtgccaaaatgcaaa

SEQ ID NO: 387305 - DNA, 201 bp, Homo sapiens
gtatgtattagaaaaaacagtgtatgtagggttcagttctattaacaattttaggcatccactgggcgtcttaaaatgtatcgtacaaggatgagggggarctacttactgcatttagaaaatgtgataacattttctgatatttcagattctcatgagttcacttatcattacccaatgtttttcttgtaatatgtggat

SEQ ID NO: 387306 - DNA, 201 bp, Homo sapiens
tttgtcatgtctatagtgattgtatgtgaaacttctgatagaaatgtctggttttaatttatttttttctggatgctttactaaagacccatgtgcaaggrgaaaaattaaaaacagacaactttggatccactgtaactttcacatgccatcagaaagtctaagataaatgtttcatttggcaatcatggatgaagtgca

SEQ ID NO: 387307 - DNA, 201 bp, Homo sapiens
gtcaaaaaataatcctttgccagatcacgtatccagatttttcgtttggaaaatacgaacattactactacagaatatcaaactgaatacagccctgtccwgagggcttgcaaagtgaatctggcaatactttggaaaagtactactgcaggttctcaaggacccaaagagctctccagcttttccagtgggttcagcccc

SEQ ID NO: 387308 - DNA, 201 bp, Homo sapiens
gaacagcaaatattactacctgatccttcctctggaagcttcgtcccatagaggcgcctgccagatgccagccagagttctcctctatgaggtgtctgtcrgcccctactgggaggcgtctcctggtcaggctacacggcagtcagggacccacttgaggaggcagtctgtacattatcagagcttgaatgctgtgctggg

SEQ ID NO: 387309 - DNA, 201 bp, Homo sapiens
ccactccagaccctgtctgcttgggtatcaccagcgaatgctgcagaacagcaaatattactacctgatccttcctctggaagcttcgtcccatagaggcrcctgccagatgccagccagagttctcctctatgaggtgtctgtcagcccctactgggaggcgtctcctggtcaggctacacggcagtcagggacccactt

SEQ ID NO: 387310 - DNA, 201 bp, Homo sapiens
gaagttctcctggataatatcctgaagagtgttttccaacttgtttccattctccctatcactttcaggtacaccaatcaaacgtatatttggtcttttcrcataatcatatatttcttggaggctttgttcatttcttttcattcttttttctctaatcttgtcttcttgctttatttcattaatttcatcttcaatcac

SEQ ID NO: 387311 - DNA, 201 bp, Homo sapiens
cccaggctggtcttgaactcttgggctcaagggatccaccggcctcagtctcccaaagaactgggattacaggtgtgacaccatgcctggcaatacttcasttttttaaggtaaattaccactcagtcaatgaaggatttcaaccaaaagagtcacatgattgggtataataattacttgtttaggttgaaggtgcctttg

SEQ ID NO: 387312 - DNA, 201 bp, Homo sapiens
tgtagttttgagtgagtttcttaatcctgagttctaatttgattgtactatggtctgagagacagtttcttgtgatttctgttcttttacatttgctgagragtgttttacttctaattatgtggtcaattttagaataagtgcgatgtggtgctgagaagaatgtatattctattgatttggggtggggagttctgtaga

SEQ ID NO: 387313 - DNA, 201 bp, Homo sapiens
tagtcatttcttgccttctgctagcctttgaatttgtttgcttttgcttctctagttctttaaattgtgatgttagggtgtcagttttagctctttcctgmtttctcttgtgggcatttagtgctataaatttccctctacacactgctttaaatgtgtcccagagattctggtacgttgtgtctttgttctcactggttt

SEQ ID NO: 387314 - DNA, 201 bp, Homo sapiens
attgtgcgtaagacataatagatatttcatagtagatgtttggtgaattgagaataggaattagaatcttggtatacattcttaaatatatatggttgacrgagttcaactgagcttcttttttttttgagatggagtttcggccttatcacccaggctggagtgcaatggcgcgatctcagctcactgaaacctctgcct

SEQ ID NO: 387315 - DNA, 201 bp, Homo sapiens
cttgtcactggtggcctttctgtgacagagagcctgaagactgacgtaaagcgcagcctgttgtgaactgtcaagtgagtctgccaaaaactcagcagacrgaactaattgcagagaaaaaggacttttgtgccctcttctctttctttcctttccttttttttttttttttttaataagacagatattgttaaagtagct

SEQ ID NO: 387316 - DNA, 201 bp, Homo sapiens
tttttgatgtgctgctggatttggtttgctagcattttattgaggatttttgcatcgatgttcatcatgggtattggcataacattttctttttttgttgygtctctgccagtttttggtatcaggatgatactggcctcataaagtgagttaaggaggagtccctcattttctattgattggaatagtttcagaaggaat

SEQ ID NO: 387317 - DNA, 201 bp, Homo sapiens
gtaatatgttaaatgtttaattcccttttcaatcttggggtgttggatgatcaatgaaaacagaagtatctggcaggtacaggcaacattgttaagaaagsttttccttacagtcctgctgcatctcacttacacctcccactccccaatgcacagttatttctccatgcatagaaaagtacttcatatgtacctttttca

SEQ ID NO: 387318 - DNA, 201 bp, Homo sapiens
gagataatcatgtggtttttgtcattggttctgtttatgtgatggattacatttattggtttgcatatgttgaaccagccttgcatcccagggatgaagcygacttgattgtggtggataagctttttgatgtgctgctggatttggtttgctagcattttattgaggatttttgcatcgatgttcatcatgggtattggc

SEQ ID NO: 387319 - DNA, 201 bp, Homo sapiens
caaccgtggttgccaagactgtactgcacataataagtacaaaatgtgtgaaagaattcaagtaatatgttaaatgtttaattcccttttcaatcttgggrtgttggatgatcaatgaaaacagaagtatctggcaggtacaggcaacattgttaagaaaggttttccttacagtcctgctgcatctcacttacacctccc

SEQ ID NO: 387320 - DNA, 201 bp, Homo sapiens
ctgtattctttaggaaataatgaaaagaaaaaagactgtacatgataagtacagatgcagtttttcctcccccaccgccaagtatttttttttttttttttgaggtggagtcttgctttgttgcccaggctgaaatgcagtggcgtgatctcggctcactgtgaactctgcctcccaggttcaagcaattctcctgcctca

SEQ ID NO: 387321 - DNA, 201 bp, Homo sapiens
attatgatattattagtactaatatagccagccatatgaagctcttttgcttacaaagggtaggggtgggttatgataagaatatatataattataggaayctcagagtagcaaccatggtctgtgaccagaacattggcagcagtaattagtgggtcttcccgtcagtgagaggtactccccatttattctcttctttct

SEQ ID NO: 387322 - DNA, 201 bp, Homo sapiens
tgatacacaataatgtcatctgcaagcagagacaatttgacttcctcttttcctaattgaataccctttatttctttctcttgcccgattgccctgaccasagcttccagtactatgttgaataggagtggtgagagagggcatccttgtcttgtgccggtttttaaagggaatgcttccagtttttgcccattcagtatg

SEQ ID NO: 387323 - DNA, 201 bp, Homo sapiens
agccagccctgatagctcagagcacaggacaggaaccagccctggacaggatgccatcacattgcagggcacactcaaacatacccacactcactcagacsgtggccatgtatacatgccagttcagctcacatgtacatccttcggatgtgggaggaaactggagtacacagagaaaacccatgtgaacatgaggagaat

SEQ ID NO: 387324 - DNA, 201 bp, Homo sapiens
aataatagattggttctgttctgttctgttctttctttgcttccctttcttttccttcccttccccctccttcctctccctcttccctttttccttccctrtgggtcttgctttattgcccaggctggtctcagatttcctgtgctcaaacagttcatttgcctcagccttctaagtagctgggattacaggcatatgcca

SEQ ID NO: 387325 - DNA, 201 bp, Homo sapiens
caagaaacaaattgtcccctggagcctccagaagagtccattcctgctgacacattgatattagccctgtgagactgatttccaacttctgacttctagawctataagagaataaatgtaataaatgtgtgttgtttcaatccacaaatttcgtagtaatttgttactgcaactataggaaactaatatactctccctgtg

SEQ ID NO: 387326 - DNA, 201 bp, Homo sapiens
tcaaattcttattgtggccaactcccttaatagactcttaccagtgtccttgaccctagctttgggaaagactactttctagaaattttctgttggctcaygatattagccatgctgtcaggctgtattcttacccttctcatacttgagctactctattggacccgtcatgtcagtctagcagactagttaagaacacac

SEQ ID NO: 387327 - DNA, 201 bp, Homo sapiens
aaatgtcacagcacagtcagggatatgtatgacattcagtagtataaacaacaaagtgtacatgaaacgtccgttaacgttaagtaattggagtgagagtrggaaaatgctaatataaaggggctagattctctgcccattttacgtctaacttaatattttcattttaactaattttatttctcccattttgtgaatggg

SEQ ID NO: 387328 - DNA, 201 bp, Homo sapiens
cttggaggaactcttgcagaaactaatagagcaagaactcacccattaccacaagggcagcaccagaccatttgtgagggatctgctccaatgacccaaamacctcccgttaggccccacttccaacattggggatcaaattttaacatgaaatttggaggagatagccctttccaaagataggcaaaaagaaagaaaaga

SEQ ID NO: 387329 - DNA, 201 bp, Homo sapiens
taagtaattggagtgagagtaggaaaatgctaatataaaggggctagattctctgcccattttacgtctaacttaatattttcattttaactaattttatktctcccattttgtgaatgggctacaggactaaactaataacattagttatacaaatcattcctatgtaaaatacttttggtgtgaaattagagtgaataa

SEQ ID NO: 387330 - DNA, 201 bp, Homo sapiens
ttagagtgtggtctgttactttacatgcaactttatatttatgcttcaatagcatacattttgtaatgtttccaaaacttctgatagaaatgagtaattgkatatgtgtgcttttcattttatatctggtttaccattatcagtgtttcttaactaccccctttattattgtacagtattttatcactcaactttgagcct

SEQ ID NO: 387331 - DNA, 201 bp, Homo sapiens
atctaagcagataactcaccaaagaagatatacagatgactaataatcatatgaaaatatgttcaacgtcatatgtcattcgggaattacaaattaaaacracaatgaaatagtactacacacctgttagaacgactgcaatccaaaatactgaccacaccaaatgctggcaaggatgaagagagcaagaagtctcattta

SEQ ID NO: 387332 - DNA, 201 bp, Homo sapiens
tacattgaatagaattagtaaaagtgggcatcattgtctttttcctcatattagaggaaaagctttcagtcttttctgggtttgtgttgttgtttggtgtrttttgtttgtttgtttgtttttgttttttgagatagggtctctgtgcagtggcataatcttgtctcactgcagccttgaactcctgagctcaagagatcc

SEQ ID NO: 387333 - DNA, 201 bp, Homo sapiens
caacattgcgattgcactggcttgagaacgaaggaagttagtcccttgcggtgatccgtcctttcatcctggcgtttgcctgcagcaagatggcggcggtstcaatgtcagtggtactgaggcagacgttgtggcggagaagggcagtggctgtagctgccctttccgtttccagggttccgaccaggtaatagaattttc

SEQ ID NO: 387334 - DNA, 201 bp, Homo sapiens
ttcatcatgggtattggcataacattttctttttttgttgcgtctctgccagtttttggtatcaggatgatactggcctcataaagtgagttaaggaggastccctcattttctattgattggaatagtttcagaaggaatggtatgagctcctctttgtacctctggtagaattcggctatgaatctgtctggttctgga

SEQ ID NO: 387335 - DNA, 201 bp, Homo sapiens
acaaggactgcatgactacagttgccatgtgaattgccagtgtgagctcaccactgttcctattaaaatcaagtgcctttctatctgacttctacctcccygggaaagaaaattgaggaacactatcaaagtctatagaaagtgtaactttaaaaagccttgtggttagtgacataaagttgtaggctaacagtgaatcag

SEQ ID NO: 387336 - DNA, 201 bp, Homo sapiens
cctaatagttttgacatttttagcactctaataatatctttatttaaaaatcaggtgtgcctgtaaaacaaatgttgtcagtattctgaatgttgccaatkggttgtattttgctacttgaaaatttcttccaaatagcaattaaacagcacttaagctttggtacttgctgaggcttgcaataaataaatcgctgtttga

SEQ ID NO: 387337 - DNA, 201 bp, Homo sapiens
ttttgtctcatgacatgtatctataaacatgaactaatattaaaagttttttatgtttataaataaaacatgctcttaaatagttgaaagtttatcaaaayagttaatcgtttaaaatgaattttttctactctccttgatgtaattttaaaacctgttatatttaactatgatgatcattaaaacaagtcagttattatt

SEQ ID NO: 387338 - DNA, 201 bp, Homo sapiens
aacatgcagtctggagtaaacaacacaaagaaatggaagatggagtttgataccagggagcgatgggaaaatcctttgatgggttgggcatcaacgtgagyactttattttaatgtgaatattgtcagctatctttttctatgtagatctttcttctaaatatgattttcaaactcttttatgtacaatatgcttatgaca

SEQ ID NO: 387339 - DNA, 201 bp, Homo sapiens
taccttatgggaaacaccgtataaagttggatctaaatccaactttagattggttccttttttttaaagattgaattctctagaagtttatttttttttttctattagtcactctctggtctctgaaaattatttttctgttttgtccagagtttatagttaggcagataaatctgatataatattctgccattacccaaa

SEQ ID NO: 387340 - DNA, 201 bp, Homo sapiens
agtatttatcattttagatactatatttttcagctctagaatttctatttagttctttaatatagtttccattattctgcagaaatttttgaactgttcaactcattttgtccatcttttttcttgaaatcttttaacatatttatagtcattatttataaacctacatcatttcagggcctatttctattgattattttg

SEQ ID NO: 387341 - DNA, 201 bp, Homo sapiens
atgacatgtatctataaacatgaactaatattaaaagttttttatgtttataaataaaacatgctcttaaatagttgaaagtttatcaaaatagttaatcrtttaaaatgaattttttctactctccttgatgtaattttaaaacctgttatatttaactatgatgatcattaaaacaagtcagttattatttttcaaatg

SEQ ID NO: 387342 - DNA, 201 bp, Homo sapiens
agaaaaaggtattccaactaacagttttaaagaaattattacaaataaaatattccatcaataatatacttatttgattttatagtagctgtttattttamatattgattttgtttctcagctaaagcttaatgttaaatcttggaaaaaaatttgtttcttacagggctgatcccttatccaacatggttctaaccttca

SEQ ID NO: 387343 - DNA, 201 bp, Homo sapiens
tgttcctaagtattacattcttttctatgccattgtaaatgggattgtttttgtaatttactttttagattgttcattgtgagtgtatagaacataactgrtttttgtatattgattttatatttgcaaccttggtgaatttgtttattatctctaacaggtttttttggtggaatctttagggattttcacatatgtcat

SEQ ID NO: 387344 - DNA, 201 bp, Homo sapiens
agctttattcataaataattatggtatttttcatagattatgaatattatggaaaaaacaaagctaggtgatgagacagagaatagctggggtttgggtgraataggggtcatttaagtagggcagtcaacgaaacccactttgagatgttgtgctgtgtgaattaagatctgaattgatgagaaagaagcagctgtgtga

SEQ ID NO: 387345 - DNA, 201 bp, Homo sapiens
aacatccttattccctttttcttctttagcagaaatgtttctgatataataaaatggacaaagttcttttctaatcttgatctaccaataattaaaaaaaatcaggaatgggtattaagtattaatgtttttgtaacatctgttgaagggcattttctgtagtgaatttcagttacctattttctgatccaattatatgtt

SEQ ID NO: 387346 - DNA, 201 bp, Homo sapiens
gccattctcctgcctcagcctcccgtgtagctgggactacaggcgtgcgccaccatgcccggctaatttttgtatttttagtagagacggggtttcaccgygttagccaggatggtctcgatctcctgacctcatgatctgcccgtctcggcctcccaaagtgctgggattacaggcgtgagccaccgcgcccggccgtaa

SEQ ID NO: 387347 - DNA, 201 bp, Homo sapiens
ttatttggcgaactacattattactgatttcaaatttaattctgtagtcagcaacatactctatgatttcaattttcagatttcttgagacttttttatcrcctagtgtatggtctgtcttgattaatgtttcatacacattttgaaagaatatgcattctccagtttttgggttgggtgttccaaaaatttcaattaagt

SEQ ID NO: 387348 - DNA, 201 bp, Homo sapiens
ccagaaggcggaggttgcagtgagccaagatggcgccactgcactccagcctgggtgacacagcaagactctgtctcaaaaaaaaaaaaaaaaaaaaaaamcacattatacatcataaatatatcaaattttactaccaataaaaaagatacatattttttaaaaacatagtaatatgtacatgttgtggaaacattaatt

SEQ ID NO: 387349 - DNA, 201 bp, Homo sapiens
cacacctgtaatcccagcactttgggaggccgaggcaggtggatcaggagttcaagaccagcttggccaacatagtgaaaccccttttctgctaaaaattaaaaaaaaaaaaaaaaattagccgggtgtggtggcgggtgcttgtggtggcgggtgcttgtagtcccagctacttgggaggctgaggcagaatcgcttgaa

SEQ ID NO: 387350 - DNA, 201 bp, Homo sapiens
aaatattaattagtcctacataggtataccttcaatttgctttctgatcatttttttagcccattttttacacactgattcctataactatttagtacagytaaaatattactaagaaaatagaaaaataccctcagaaaatatagtagtttcaatttattagtaaaaatgacacaaaataagctttaatagtttagacat

SEQ ID NO: 387351 - DNA, 201 bp, Homo sapiens
aatttagtttgctatctaatatggacgcagtttgtggcaccccaaaacaattacaatagtaacatcaaagatcacggatcacagagcaccataacacatayaatgcaaaagtttgaaatattgggagaattgtcaaaatgtgacacaaagacttgaaatgagcacacaccagtagacctcaacagagggttgccagaatcc

SEQ ID NO: 387352 - DNA, 201 bp, Homo sapiens
gggacagggtggtgccatacactttctgtcacccaggctggagtgcagcggcgcgatctcggctcactgctacctccgcctcccagttcaagtgattcttrtgcctcagcctcccgagtacctaggattacaggtgcccgccaccacgcctggctagtttttgtacttttagtagagacggtttcaccctgttggccaggc

SEQ ID NO: 387353 - DNA, 201 bp, Homo sapiens
tggaaggtgaagtgggagcaggcacatcatatgacaaaagcaggtgcaagggacagggtggtgccatacactttctgtcacccaggctggagtgcagcggsgcgatctcggctcactgctacctccgcctcccagttcaagtgattcttgtgcctcagcctcccgagtacctaggattacaggtgcccgccaccacgcctg

SEQ ID NO: 387354 - DNA, 201 bp, Homo sapiens
ccaggggattgaaccaagtaacctctcatggtccacttcaactatagtacacacatgcacccatacacacgtacatatatatacgtttacatatttttctrtatccctttggaagagttccaaactcttgtaaagaaaccaacttttagaataatagtgagttggttataatgttcatcgctcttcattgcaactatttta

SEQ ID NO: 387355 - DNA, 201 bp, Homo sapiens
aagaggagagagaacttaggtttcttacctatcatttggcaagaaaagaatatggaggtcttgggttaattttccagctatcattataaccacatacagartctacactagaaaccatttccttcctcacaattgtgggagagcacatggggaacatatatttattttacaggattcttaaaagtcttttcaacatatttt

SEQ ID NO: 387356 - DNA, 201 bp, Homo sapiens
aggggaccttttactcatggtggaaggtgaagtgggagcaggcacatcatatgacaaaagcaggtgcaagggacagggtggtgccatacactttctgtcayccaggctggagtgcagcggcgcgatctcggctcactgctacctccgcctcccagttcaagtgattcttgtgcctcagcctcccgagtacctaggattaca

SEQ ID NO: 387357 - DNA, 201 bp, Homo sapiens
aaagacttgctttgccagtgtatccgaaacctctgttatttctccatagtattttctatagaagatctaggatacttttacattattctgaaccatttacyccctactgtaccccacccccatattatgtacctaattggtaatttcaaagtaaagagacttttaaagtgaaattcctaaaaagctatttttcttttctcc

SEQ ID NO: 387358 - DNA, 201 bp, Homo sapiens
cgggactcaaattttttgacattctccacatgtcacaaatgaccacagaagcaccatgggcattgatttaggagtcacaaataaactttatgtgaattcaygaaagattttttttttcatagatagctttttcctcccaatgtttaatcctggatcctgtctgtagctagggaagtactgctaaggcgcgagcacgagaga

SEQ ID NO: 387359 - DNA, 201 bp, Homo sapiens
gttctttaaagtcactatgaaacactaaattagcaagaattcttatccctcgggatatacatggttaggttcctgcaggcctctggtcacatagtttgtcrtctgaccagtacataaccttgttttatatgtgtttttgtttaaagacaccttatttaatacagttaattcatcaacattgaactcacagccaacagcact

SEQ ID NO: 387360 - DNA, 201 bp, Homo sapiens
tataatctaatcagtgccacctgaaggtagaaaagccttatctacacgcacaataaggcttttctctatacagacattgatagacatacagtcacacagartttataacttcagttctaaactttcagccatgaattaataatacaaaatgatgaaataccaaagagctgttcttttctgaggacaaattattaattgatt

SEQ ID NO: 387361 - DNA, 201 bp, Homo sapiens
ggggtcatttaagtagggcagtcaacgaaacccactttgagatgttgtgctgtgtgaattaagatctgaattgatgagaaagaagcagctgtgtgagtatstaaggtaagagcattttgagtaaagggaaaagctaatgaccaaaagtgtagctggtagtagtcaaataacagacggaaagatatgacataataagaaagg

SEQ ID NO: 387362 - DNA, 201 bp, Homo sapiens
gaattcactttttattttatttttaatatattttttatacaaatgtaatctcagtggttttagggctgatacagagaagttttagaccaaaagattcctawaccgaagcaaaaagtgacaagttggaacacttgaaagtgaagagaaaatgcatagccatcttaaaaaaaaaaattaggaggtgatctgtccaagatgaca

SEQ ID NO: 387363 - DNA, 201 bp, Homo sapiens
gtcttatggtgcaaacttttcttggaacaaaagaacaagagtatccacaaaataggttggcactgactatatctctgcttgactgtgaataaagtcagctrtgcagtatttatagtccatgtataataaatacatctcttaatctcctaataaattggacctttaaactacagatacattttgtggtgtctattttaaatg

SEQ ID NO: 387364 - DNA, 201 bp, Homo sapiens
ctatacccgaaacaacacaaattcaaatttaatgggctctaatgtaatggaaatttatatagagacatgttgctatgaagttgtgaatcaaatttgaggascaaataatacttaacatttattgagtgcctactataaaccacaagagacaatgtagcataataggtaagttgtagcctccagaatctggccgtctgtgtt

SEQ ID NO: 387365 - DNA, 201 bp, Homo sapiens
aaaaaaaaaaaaaaaaaaaattagccgggcatgatggtgggcgcctgtagtcccagctactcaggaggctgaggcaggagaatggtgtgaacctgggaggmggagcttgcagtgagtggagatggcgccactgcactccagcctaggtgacagagcgagactctgtctcaaaaaacaaaacaaaacaaaacctgagattgg

SEQ ID NO: 387366 - DNA, 201 bp, Homo sapiens
ctcttaccaaaaaatacatcctttattgcattttttttgtataaaagttgtttctcttcacccttcttaatttcttgtagcttaaactatatatatatattagaattttaatacttagcaattgtgaattgtcatgtaataatattctgtagattaatactattatgatttctagaaacatgcttccttatagtacaattt

SEQ ID NO: 387367 - DNA, 201 bp, Homo sapiens
acctgtattatctcatgtgtttcccacagtaatcctatcaactcaggtgttgttatcctcatttttcagatgaggaaacaggtacagaagtgaaattactkaagtttacattgccaggaaatgtaattgtctcttggtatccatgaaagattggttccaggactcctcaaggacaccaaaatccacggatgctcaagtcct

SEQ ID NO: 387368 - DNA, 201 bp, Homo sapiens
gaacctgggaggcagagcttgcagtgagccaagattgcgccactgcactccggcctgggcgatagagcgagactccgtctcaaaaaaaaaaaaaaaaaaaattagccgggcatgatggtgggcgcctgtagtcccagctactcaggaggctgaggcaggagaatggtgtgaacctgggaggcggagcttgcagtgagtgga

SEQ ID NO: 387369 - DNA, 201 bp, Homo sapiens
ttctcttaccaaaaaatacatcctttattgcattttttttgtataaaagttgtttctcttcacccttcttaatttcttgtagcttaaactatatatatatattagaattttaatacttagcaattgtgaattgtcatgtaataatattctgtagattaatactattatgatttctagaaacatgcttccttatagtacaat

SEQ ID NO: 387370 - DNA, 201 bp, Homo sapiens
ggaggctgaggcaggagaatggcgtgaacctgggaggcagagcttgcagtgagccaagattgcgccactgcactccggcctgggcgatagagcgagactcygtctcaaaaaaaaaaaaaaaaaaaattagccgggcatgatggtgggcgcctgtagtcccagctactcaggaggctgaggcaggagaatggtgtgaacctg

SEQ ID NO: 387371 - DNA, 201 bp, Homo sapiens
taacatttttgtcctttttattgtattatcttttacatacagcttgatataaatttttatcagtgcgtttgtttataataaatttttttttttttttttttgagacggagtcttgctctgtcgcccaggctggagtgcagtggcgcgatctcagctcactgcaagctccgcctcccaggttcacgccattctcctgcctca

SEQ ID NO: 387372 - DNA, 201 bp, Homo sapiens
ttaacatttttgtcctttttattgtattatcttttacatacagcttgatataaatttttatcagtgcgtttgtttataataaatttttttttttttttttttgagacggagtcttgctctgtcgcccaggctggagtgcagtggcgcgatctcagctcactgcaagctccgcctcccaggttcacgccattctcctgcctc

SEQ ID NO: 387373 - DNA, 201 bp, Homo sapiens
atagaaggtagaagcacggaaggaaacaggtctggccctggatccaggaaaataaagaaagaaataattggagatgtagcttagtacttagaattatcccrgaagtgaacaacatcagtaaggtctgggcttccacctaacgtaacctcttatgagggtctcaacctcacatccatatatcttttaaaaaaacaaaacaaa

SEQ ID NO: 387374 - DNA, 201 bp, Homo sapiens
acttatcaaattgtattttatattaatgcagcctaaaagtatattagcttttgacagttatttgatttgtatatcaattatcaaatacaatttgttatcarttgtatttgagatacagttgattatttgtatatcaattcagggactattctgaagataaaagcctacctgttatctccttagttttttcatttccctttt

SEQ ID NO: 387375 - DNA, 201 bp, Homo sapiens
tcccagtgctttgggaggccgaggcaggaggattgcttgagcccaagagttcaagaccagcctaggcaacatggtgaaaccatatccctataaaaaaaaaacaaaaaattagccgagtgggatggtgtgtgcctctagttccagctactcaggaggctgaggtgggaggatcgcttgagccaaggaggtcgtggttgcagt

SEQ ID NO: 387376 - DNA, 201 bp, Homo sapiens
tgactacagttgccatgtgaattgccagtgtgagctcaccactgttcctattaaaatcaagtgcctttctatctgacttctacctccccgggaaagaaaaytgaggaacactatcaaagtctatagaaagtgtaactttaaaaagccttgtggttagtgacataaagttgtaggctaacagtgaatcaggaattttaacct

SEQ ID NO: 387377 - DNA, 201 bp, Homo sapiens
tttactgatttgaccagctgaacattttaagataatattcagtactgtagatgaagattagaaattactgcaaaaactttaagtgagaataaaagaatttrtggtgttctaaagagattttaaacaaattatcttcactattgttttctctaatttaaacaaagcatttgtgggttcttttcttttacttttactcagtct

SEQ ID NO: 387378 - DNA, 201 bp, Homo sapiens
aactccttgagttcttaagaatgtgattatttgtacctcttgttttccaaaaataatttcaagtgacagatcttcactataggtagaaattctttcatttkttgccaaagcctcagctgcactgctagatgtcatgataattttataagatgataaggtattaagtttttcaaataaattagcagtgaaaaatgagatgtg

SEQ ID NO: 387379 - DNA, 201 bp, Homo sapiens
atcctgttattctagtttctcaaattgaatttgtctctttaagtgcattgttactgtaaggcagtatataaaaataagaaattagtgttctctaacattayctgaaatacaaatgtgaaagcactataaaggttataatctaacatatttgcttttctttttcacctagtattgtatagcttatgattaaaagtctgaagt

SEQ ID NO: 387380 - DNA, 201 bp, Homo sapiens
gagcttaaactggtggtgacagcatacctaaaaaagaactacaaaatacaggaaatgaaggagaatgagaagggtagaaactgaatggctggaagaatagyggcttcttccagtggatgaatgttgttactattggatatattggatataagttgttactatttgatttctatatgtatgtattcataaataaagtgagga

SEQ ID NO: 387381 - DNA, 201 bp, Homo sapiens
gcatgaatagttctcttaggtaaatcaagagtcagttataatgctaatttttacattgtattgatacttagatctgttttgaataatattaaataggcttkgctcataagcagaaaatgatcattgaaattcacaaatggtaagtatcttcacaaagtctgttttatggtgtagaacaaaaagcaatctgccaaccaatgt

SEQ ID NO: 387382 - DNA, 201 bp, Homo sapiens
ggcatttcttacctcagaaatattttaaaataacaaaagtgtttattaaaatattggttttaatattacatattttttctctacggtcttcattatgtatrtctcctatttgcagaaagatgaccacctgatatttctgaatggtgctaatcaaactaacagcatttagagccacttataactgctactgatacttaaact

SEQ ID NO: 387383 - DNA, 201 bp, Homo sapiens
agtaatcatcaccactatttccggagctttttcatcatcccgaatagaaactctgtacccattaaatattaactgtcctttatgctctcccctgttcctcrtaacctctattatactttctgtgttatagcatgtgtcagaatttcattccttttaaaggctctacataatagttccattttatgtgtatatcacactttg

SEQ ID NO: 387384 - DNA, 201 bp, Homo sapiens
gtaccctaaaacttagtataataataataaaaaaatacatttcaagcactcagcatggggactagaacatactacctagtacaccaggaatgctcttgtckcagggcctttgcagttactgttctctgcctacttctcagggagggaggtctcccctgtataccccatctaaaatgttttctcctaggttagattatagct

SEQ ID NO: 387385 - DNA, 201 bp, Homo sapiens
ttctgagactccctatgagtagcttgcaaatctctggaagtggtttttggctatttgtgtagtttttttctccagaaaaatgtgttctaaatttctaatgrctgattttcagatatacttttggaacacaaaagctggagtaatggattactaccttggtttgttttgtggcaaatgctgaatagttccaactactgcttt

SEQ ID NO: 387386 - DNA, 201 bp, Homo sapiens
atgtatgttacgggactcaaattttttgacattctccacatgtcacaaatgaccacagaagcaccatgggcattgatttaggagtcacaaataaactttaygtgaattcacgaaagattttttttttcatagatagctttttcctcccaatgtttaatcctggatcctgtctgtagctagggaagtactgctaaggcgcga

SEQ ID NO: 387387 - DNA, 201 bp, Homo sapiens
actaagcttgactaattttcttattttatttttttgtagagacaggttgctatattgcccatgcttgtctcaaactcctgacctcaggtgatcctccttcytcggcctcccagaatgctaggattatagacatgagttattgcatccagcctaaattttattttgaaattgtatattgctgtatatagaagtgtgattgat

SEQ ID NO: 387388 - DNA, 201 bp, Homo sapiens
aaccagttcaaaggacaagtcaaacagcacagatttatgtagggtaaagaaatgttgagatgagttgctaattgagacaaaactgatttttccaggactgrgttgagaggggagtcaaatctatgagagaggacagactttatgtatctctcaattatagttgttctccttattcacagttatgttctttaaagtcactat

SEQ ID NO: 387389 - DNA, 201 bp, Homo sapiens
aaacaagtaattttggcttatttgatcagtaaacatgtataattaaaaaaatacgcaagtggaataaaagtctgtttatatatttgacattgataaaccaragaaaaccttgctgttttattaaaccaaaattattagtcttgtttgtcaagatttacctacacgatatgaacttgaagtctcaaaatgtttgttagttgc

SEQ ID NO: 387390 - DNA, 201 bp, Homo sapiens
ataaacctaccacctagatttaacatggttagtggttagtattttgctggttttgcttattttgcatatatatgtatataaatgagcaaaaggcatatatytgagtatgtatagattagcaacagacaaacacatatattgatctaagccatctgaaactcaattataaatatcatggtattccatccctaaatacttttt

SEQ ID NO: 387391 - DNA, 201 bp, Homo sapiens
tggcaatatacagggtatacattatatatatatatatattctatgtaaatagttcattaaataattcctatagtaaatatgagaaacaggaaactcatatycaacttggaaaagttcaaatataatacttattaagaaatacagttctattcttcaggtactcttacctagaatgaattaaggatatgtagaaactcttat

SEQ ID NO: 387392 - DNA, 201 bp, Homo sapiens
gaacacaccctattgtatgtcagcgctgtatggctaggctctggggataaataaggcatagttcttacactcaaactgtaatattttatcctgcctattgrattataagaatttaccagggaagacaagtcctatttatcttttaatgtgctcagtaaatattggtgaatttagcagcaaatttagtaacgttgtaaatga

SEQ ID NO: 387393 - DNA, 201 bp, Homo sapiens
aacattgtattttcattttcatttagttcaaaatattttaaaatttttcttgagacttttttgacccatgagttatttagaagtgtattgtttgatctccragtaattggagattttctagttttctgttactgatttctagtttaattccattgctgactgagagcttgcattgtgtggtttctattcttttaaattagt

SEQ ID NO: 387394 - DNA, 201 bp, Homo sapiens
aacttactaccaaagcactaacaagttttgtctgtgttccaactcttactttctgcccttacattccaaacctactacaccttcctccctctacaacctcrttaatactgttctcattcttatccctgcctatgaaactctaacctagtcttcatttcatatgctgtctcatttcttcatcccttttcttattcccctcct

SEQ ID NO: 387395 - DNA, 201 bp, Homo sapiens
ttgtagtttcatcagtgtttgcatagcatattttgacattttcttgttaggtacatacacactaacgattgttacatcttgttggagaactgacccctttrtcactatcaccttcttcatccctgataatttttcttgttctggagtcccgtttgtctgagattaatttagctgtggaagcaagatttgactagtgttaac

SEQ ID NO: 387396 - DNA, 201 bp, Homo sapiens
cagtactaaagaagatgcagtttcctttgcagaaaaaaatggtatgtttggtctgtttttgacaaagtcaagataatgattttatgttcttaaccttaatkaaaaccaattaagtatacagaatttgagttggaatccagtggtttcattgtatctaatccagtggtttcagactttaactacatcagaacacccacctcc

SEQ ID NO: 387397 - DNA, 201 bp, Homo sapiens
taaaactctcagtaatatttccttatggcttagcatggaaatactttatgatataaggtgagtctgggttaatttaatttgtaataaattgacaacaaacrtaattagttctaatcaaaaggctaaagattgactccataatggtttttataagattaggagttttattttgtctaaaagtccaacacattatttctggtc

SEQ ID NO: 387398 - DNA, 201 bp, Homo sapiens
tataaaatcatattcagttatttatagggatgtttttaaatctatagctggacacagaccatcccaatagttgcttaaaacaacagtagtcttctgttttrcttacaaatgtacaatttgggcaggttttgccagggaagtttgtctgctccatgtggtgtctgctgggatagctcaacttccactagaggtttcatgtcc

SEQ ID NO: 387399 - DNA, 201 bp, Homo sapiens
cccttacagtatttatcattttagatactatatttttcagctctagaatttctatttagttctttaatatagtttccattattctgcagaaatttttgaamtgttcaactcattttgtccatcttttttcttgaaatcttttaacatatttatagtcattatttataaacctacatcatttcagggcctatttctattgat

SEQ ID NO: 387400 - DNA, 201 bp, Homo sapiens
ggcaacatggtgaaaccccatctctacaaaaaaaaaaaaaatgcaaaaaattagccaggcagggaggcatgtgcctgtagtcttagctactcaggaggctraggtggtatgatcacctgagcccagaaactcaaggttgcagtaagccatgatcatgccactgcaccctaacctgggtgatggagtgagatcctttctcaa

SEQ ID NO: 387401 - DNA, 201 bp, Homo sapiens
tttactccagttatatttatttaacttgttctcaacaattaaactgctcatgacaacttcttgagacattaaacaaagctaagcatcattttatttttctkgtttaaaaatcaggcagttataaaaaatatcacagaagcaaagaaactaaaaagttaaactttgtttaaacttgtttcttcctctctctttttttctttt

SEQ ID NO: 387402 - DNA, 201 bp, Homo sapiens
gctaacttgagggaaacttataagttcctgagatattgtgattaataataaataataataaattacttttaatttttatttattattttctttagagatgkggtcttgcccccttgcccaggctggagtgcagtgatgtgatcctagctcactgcagccctgaactctgggatgatcaagcggtcctcccaccttaatccc

SEQ ID NO: 387403 - DNA, 201 bp, Homo sapiens
tattctcacttcacatttacaaaactgaaactataaattgtagatggtgtattttcttgatggtttatggaaaaaacaccacttgggattttgataaatgracctatactcaaaaggtattgcccaaatcagattattaaaagaatacacgtgtacattcttgcattataatataatgtttaaggtttgtgtatattgctt

SEQ ID NO: 387404 - DNA, 201 bp, Homo sapiens
gctggagtgcagtggcgcaatcttggctcactgcaagctccgcctcccaggttcatgccattctcctgtctcagcctcttgagtagctgggactacttgcrtccaccaccatgcctggctaattttttgtattttttagtagagacggggtttcaccgtgttagccaggatggtcttgatctcctgacctcgtgatccgcc

SEQ ID NO: 387405 - DNA, 201 bp, Homo sapiens
ggcaggagaattacttgaacctgggaggcggaggttgcggtgagccgagatcgcgccattgcactccagtgtgggcaacaagagcgtaactccgtctcaaraaaaaaaaaaagaaaatttttgtgtgtatgtgtgtgtatacacctgtgcctgtgtgtattgtaatttatttttatgtgtccttttgtgcttttatgcata

SEQ ID NO: 387406 - DNA, 201 bp, Homo sapiens
atatggttgacagagttcaactgagcttcttttttttttgagatggagtttcggccttatcacccaggctggagtgcaatggcgcgatctcagctcactgmaacctctgcctcctgggttcaagtgattcttctgcctcagcctcccgagtaggtgccaccatgcccggctaatttttgtatttttagtagagacggggtt

SEQ ID NO: 387407 - DNA, 201 bp, Homo sapiens
gcggagcttgcagtgagccgagatcgcgccactgcactccagcctgagcaacagagtgagactctgtctcaaaataaaataaaataaaataaaataaaatwaaattaaattaaaataaaaataaatagctatatacacatttaagaaagatgaataaaaacaagtaagatacttatccatttatttcagttcagggtcaag

SEQ ID NO: 387408 - DNA, 201 bp, Homo sapiens
ctcctgggttcaagcgattctcctgccccagcctcccaagtagctgggattacaggcatgtgccaccgtgcccggctaattttgtagttttaatagagatrgggtttctccatgttggtctggctggtcttgagctcccaacctcaggtgatctgcttgccttggcctcccaaagtgctaggattacaggcgtgagctact

SEQ ID NO: 387409 - DNA, 201 bp, Homo sapiens
ccacaacttcgcttatttattttctttctttctttctctctctttctttctttctctttcgtccttcctttcctttcctttcctttccttttccttttccctttcctttcctttccttcctttctctttctttctttctttctctctctctttctttctctttctctctttctttccctttcttttcttttcttctttctt

SEQ ID NO: 387410 - DNA, 201 bp, Homo sapiens
tcttgctcctgtcccactttcatctctgactgattatcattgtgatagtcttgtcttccattttattaatgtctcagcataccattttagttcatagttcktactagaatggatacaacatgcatctgagtttatttaacaaattttagattcttctttccttagttgagactttaaacattgttattctgttgctgatga

SEQ ID NO: 387411 - DNA, 201 bp, Homo sapiens
accttttcttcttgtctgtactcactagacttaatttttcttttatgggctcattctccagttcactggtttttaaacccttgtgcatcaaaattatctgytgggtgcctaaaaaattcagatgccttgccccccagtctatattggttcagtaagtttaggttgaggcttagctctatggtgattctaatgggaagctag

SEQ ID NO: 387412 - DNA, 201 bp, Homo sapiens
aaatcagttcattcacggggatttgtaatattcactgtttttttttttttttttaaatataagtagatagatatatgcttttattgttaatcaatcaatcatttaggtcatacattatgagttaaacaaacacatgctttgtttttggctattcaaagaaaagaacactttgtatactaaccctcataataaccctattag

SEQ ID NO: 387413 - DNA, 201 bp, Homo sapiens
aaaatcagttcattcacggggatttgtaatattcactgtttttttttttttttttaaatataagtagatagatatatgcttttattgttaatcaatcaatcatttaggtcatacattatgagttaaacaaacacatgctttgtttttggctattcaaagaaaagaacactttgtatactaaccctcataataaccctatta

SEQ ID NO: 387414 - DNA, 201 bp, Homo sapiens
aaaaatcagttcattcacggggatttgtaatattcactgtttttttttttttttttaaatataagtagatagatatatgcttttattgttaatcaatcaatcatttaggtcatacattatgagttaaacaaacacatgctttgtttttggctattcaaagaaaagaacactttgtatactaaccctcataataaccctatt

SEQ ID NO: 387415 - DNA, 201 bp, Homo sapiens
aaactgtaacctattgtgcataaatatggaaatgctgtttttattacatattgattgaaaatgagatatactatatgtttgggaggtaaagttctttttcmaaacgtagttttgccgaagtaaaaagttttttgaagcaatagaccttgtctgcaattggtttatctgagacattgttttgaatcttgaataattttaaaa

SEQ ID NO: 387416 - DNA, 201 bp, Homo sapiens
acaatacatattagaaaatctcccaaatttaacacagaaaaaggtattccaactaacagttttaaagaaattattacaaataaaatattccatcaataatrtacttatttgattttatagtagctgtttattttaaatattgattttgtttctcagctaaagcttaatgttaaatcttggaaaaaaatttgtttcttacag

SEQ ID NO: 387417 - DNA, 201 bp, Homo sapiens
tcatcgcaagaattgagaactggagagattcgaggagagaaaacaaggtgtgaaagatccacataataaagtgagaaaattaatgtgataagaatgcaaakaagtttaatataattgctaagtagcaatatggccaacttgaagtttatggtcaaatgagacaaatcagtatggtttgatacttttctccagtcctgttcg

SEQ ID NO: 387418 - DNA, 201 bp, Homo sapiens
tacttcaggggagagtgtcagagagaccttcctgcttctgctgttttctcaaatgccaagctgccatattttggggatagtgtgtcctggaagcgcattartggattgtttaaataaatacagttttactttgctgtgcttgcacaaaggttcacacaatcattattatagtattgcttagtctggaaatagcatattaaa

SEQ ID NO: 387419 - DNA, 201 bp, Homo sapiens
tgttgatacttctgttctcagtatatatagtttaactatcaactggaaaatcgtgtgcgctttgaaaaggaggaaccaatataaaattatgatattattartactaatatagccagccatatgaagctcttttgcttacaaagggtaggggtgggttatgataagaatatatataattataggaacctcagagtagcaacc

SEQ ID NO: 387420 - DNA, 201 bp, Homo sapiens
acaattgattatggcaaaggtgaggggatgctctctggcaattacttttccttatatcagaaacaataggaatctatattttctttctatcttgtgtttgytttcataataaagtgatctagagtatccccctgttcatggaaattttgccctttagtctaaggcccttcatacataattgaatattgttcttttttaaat

SEQ ID NO: 387421 - DNA, 201 bp, Homo sapiens
ctgtcttgtttcttattctcaactaagccaatgtgcctgtcaacacttatcagattactgcatcatatttatgttgatacttctgttctcagtatatatastttaactatcaactggaaaatcgtgtgcgctttgaaaaggaggaaccaatataaaattatgatattattagtactaatatagccagccatatgaagctct

SEQ ID NO: 387422 - DNA, 201 bp, Homo sapiens
tttaataattgttttctgcttagagggtagtttcttatcacatgatataacttacacaagcacacgttttaatttaggcaaatttttctgaaataattatygttttacataaaaattaaaatcactctttgcaatctaacctatcttaaatttttttacaaaaaatttttattgtaactttatggtaggattgttttactt

SEQ ID NO: 387423 - DNA, 201 bp, Homo sapiens
tttttattgtaactttatggtaggattgttttacttaacatttttgtcctttttattgtattatcttttacatacagcttgatataaatttttatcagtgygtttgtttataataaatttttttttttttttttttgagacggagtcttgctctgtcgcccaggctggagtgcagtggcgcgatctcagctcactgcaagc

SEQ ID NO: 387424 - DNA, 201 bp, Homo sapiens
gaagatgctgaggattaaaagccccagtatcaaggagaatactttgagaccatttttttttccttacaaaaacacaatatccccaccaatgtgagatgttrgatcacatttttgtacaagggtggttgtggtaggtagaattctaagatgccccaggatatctgcttctttgttacaactctaatcatcctcttccataag

SEQ ID NO: 387425 - DNA, 201 bp, Homo sapiens
catcattggagtggatctgtttcagttttagccttagtcttggaacctagtgttaaaaaataaaaaggcacggcctttctgaagttttgatggaaagcacraggtgtttacccacattctcccttcagactcagtctcccctgtaacaggcagctgctgaaatctttgctcaattctttcagccttcccagcttcattttg

SEQ ID NO: 387426 - DNA, 201 bp, Homo sapiens
taccactgtgctcaaagatacacattatatatttagatattcagataagtgtggcttagcacagtaaactatgacatagtctttttcagagtactacttaytagataaaaatgactgaatttcagagcactgttatggaactcaaagctatgtatacagcagtcccccccttatctgcagttttgctttctacggtttcag

SEQ ID NO: 387427 - DNA, 201 bp, Homo sapiens
ggagtgcagtggcgcgatctcagctcactgcaagctccgcctcccaggttcacgccattctcctgcctcagcctccgagtagctgcgactacaggggcccrctgctacgcccggctaattttttgtatttttagtagagacggggtttcaccgtgttagccaggatggtatccatctcctgaccttgtgatccgcccgcct

SEQ ID NO: 387428 - DNA, 201 bp, Homo sapiens
atataaaaactagaaaagtcaggatctttgttcctgctcgcaataacatgcagtctggagtaaacaacacaaagaaatggaagatggagtttgataccagrgagcgatgggaaaatcctttgatgggttgggcatcaacgtgagtactttattttaatgtgaatattgtcagctatctttttctatgtagatctttcttct

SEQ ID NO: 387429 - DNA, 201 bp, Homo sapiens
tgaatataggaaacaacaaaagtacattagtgtgtatgtaggctgtttgaaacgtgtttttttttcttgtttttctgtaggatatcactactttaactggmgttccagaagagcatataaaaactagaaaagtcaggatctttgttcctgctcgcaataacatgcagtctggagtaaacaacacaaagaaatggaagatgg

SEQ ID NO: 387430 - DNA, 201 bp, Homo sapiens
gttggacaaaagggcgtaaattttttttacgatccttttccactgtctccactacgtccccctaaataaaccatttacaggtatctaaatagtaatttacrttgtaaagtatcagaatggtagtgaaataagccagaaaatttatctcaatttatgaacaaatctgaatagagttgcatgaatataggaaacaacaaaagt

SEQ ID NO: 387431 - DNA, 201 bp, Homo sapiens
tgttgatgagtaaaatactttatataagaatatacatttgagtggtatagaggagaaaaagtaatatcttcctcacatctattgcaaggtttgtggctgaracatctataacaaaagatagtttaacaagagactagcatacaatttcattttgtgtaagttttatgtgatacaggagacttcagaaatgaagacccaaag

SEQ ID NO: 387432 - DNA, 201 bp, Homo sapiens
ggctagagtgcagtggcgcaatctcggctcactacaacctctgcctcccgggatcaagcgattcttctgcctcagcctcctgagtagctgggactacaggmgtgcaccaccatgccctcctaatttttgtattcttagtagagatggggtttcaccatattggccaggctactcttgaattcctgacctcatgatctgcct

SEQ ID NO: 387433 - DNA, 201 bp, Homo sapiens
acttttgcagaatgtgtttgattgtatcattctctctttagtaggtttcaccaaaggggggagatacatcacaatgctaattaaagttgttaaatttacarctttacaaaaaggttcaggtttccctctcaaggtaatgccttgtgggtaagcaatttgacacagaaattataagtaacagattgtcttctatttaagatt

SEQ ID NO: 387434 - DNA, 201 bp, Homo sapiens
ctgtttttcaatcacatgagatttttacatgttcatctattccccagactcaccgtagtaatacattcccagcaacattcagtaataaatgattatttgartacttgtgccttgtatacgctaaattgttgatgagtaaaatactttatataagaatatacatttgagtggtatagaggagaaaaagtaatatcttcctca

SEQ ID NO: 387435 - DNA, 201 bp, Homo sapiens
tgtaatataattactgtcatcaccatgacatctttatttcttattcttctctcatgtatatttattttgataacctgttgctataaatgtagatacatttmtttctcctttacattttccgtcacaccctccggtttctttgttagcatcctccagtatcttgcccacattctcctacttattactcttcaattccatttc

SEQ ID NO: 387436 - DNA, 201 bp, Homo sapiens
aagtcttaaagtcgggtaataacagttttctgacttcattcttcagtattgcattggctattttgagtcttttgtctttccatatgaattttagaatcatrcctggaataaatcctgcttggtcatggtatataaatcttttcatgcattgttgaatttagtgctaatatctgttaagaatttttgcatctatatttataa

SEQ ID NO: 387437 - DNA, 201 bp, Homo sapiens
gatctcatctaaccctaattacctcccaaaggccccatttctaaataccatcacatttaggattagggactcactatacaaattttgggagaatacaaacrttcagttcataacagaccttttcattggatatagaattctaggttgaagattggaatgacttaaaaatgtcattccagtttccttttttgaaaaattatg

SEQ ID NO: 387438 - DNA, 201 bp, Homo sapiens
taaaaatcagttcattcacggggatttgtaatattcactgtttttttttttttttttaaatataagtagatagatatatgcttttattgttaatcaatcaatcatttaggtcatacattatgagttaaacaaacacatgctttgtttttggctattcaaagaaaagaacactttgtatactaaccctcataataaccctat

SEQ ID NO: 387439 - DNA, 201 bp, Homo sapiens
accacatgttctcactcataggtgggaattgaacaatgagaacacatggacacaggaaggggaacatcacattctggggactgttgtggggtggggggagyggggagggatagctttaggagatatacctaatactaaatgatgagttaatgggcgcagcacaccagcatggcacatgtatacatatgtaactaacctgca

SEQ ID NO: 387440 - DNA, 201 bp, Homo sapiens
gcactgctagatgtcatgataattttataagatgataaggtattaagtttttcaaataaattagcagtgaaaaatgagatgtgataaaaaaattagtttgyagccaataaagtgatggtggaattttgtcatgtctatagtgattgtatgtgaaacttctgatagaaatgtctggttttaatttatttttttctggatgct

SEQ ID NO: 387441 - DNA, 201 bp, Homo sapiens
  misc_feature (1)...(201): n = A,T,C or G
caagcttcttgggtccctccatttttgcggagtctctgctggctgagttccggaggaggcctcggggaaggcgtcctctgttgacccttttctcgggagangtcgggcggactagggactgtctgctatcaatgggcgttggccaggcgagtgagggcgtgagtgcgaggccggggaggagtacctgtggttttctggaag

SEQ ID NO: 387442 - DNA, 201 bp, Homo sapiens
atagtataaatcaagaaatactatttcaatttttttcaaaacttgaaaaagtttaaaatcttaagttttttaatcactttggcatatatgcatcacagtayagaagtaggtaaagtaaaagtgtttcctctaatcttcctgaggtaaccagtgttaagagtttaatgtgtttcctttcatatagttttaaaaatagacata

SEQ ID NO: 387443 - DNA, 201 bp, Homo sapiens
gaatggtgtttataatatagtgacactttaacttgttttaaaattacaataaacttctttgtaatatatattatatatatatcttttttctttgtaagggrggtaggaactaggtcaatttagaaattagctaacttgagggaaacttataagttcctgagatattgtgattaataataaataataataaattacttttaa

SEQ ID NO: 387444 - DNA, 201 bp, Homo sapiens
  misc_feature (1)...(201): n = A,T,C or G
tgacccttttctcgggagaggtcgggcggactagggactgtctgctatcaatgggcgttggccaggcgagtgagggcgtgagtgcgaggccggggaggagnacctgtggttttctggaagctttcgtattcggcttgtcgctgagggagagggtccgtggaggttttgcctccggagctgcaagctgaaccttagccctca

SEQ ID NO: 387445 - DNA, 201 bp, Homo sapiens
aatttagattagttttagctgtaaataactaatagtctgcggtagaacaagtttctataaacagtatttttaatgtttcaatatgtgctctactaaaactkttcagcattgatccatactaacatgcaatttagtgaacttactaggaaaagcatgataaaagttttggcttttctgggcgtactgagagatctagcaaaa

SEQ ID NO: 387446 - DNA, 201 bp, Homo sapiens
aaagtaagagcattgttgactacaggctcttctgcgagcaaacagtctcttcagaaaataccaatgctttgttggacaaaagggcgtaaattttttttacratccttttccactgtctccactacgtccccctaaataaaccatttacaggtatctaaatagtaatttacgttgtaaagtatcagaatggtagtgaaataa

SEQ ID NO: 387447 - DNA, 201 bp, Homo sapiens
ctaatagtctgcggtagaacaagtttctataaacagtatttttaatgtttcaatatgtgctctactaaaactgttcagcattgatccatactaacatgcawtttagtgaacttactaggaaaagcatgataaaagttttggcttttctgggcgtactgagagatctagcaaaaatgcatcccaaagtgcaaaaaccttaca

SEQ ID NO: 387448 - DNA, 201 bp, Homo sapiens
gtgtcaggctcttttaaacaaccagctcttggaggaactcttgcagaaactaatagagcaagaactcacccattaccacaagggcagcaccagaccatttstgagggatctgctccaatgacccaaacacctcccgttaggccccacttccaacattggggatcaaattttaacatgaaatttggaggagatagccctttc

SEQ ID NO: 387449 - DNA, 201 bp, Homo sapiens
ctgtagttgtgaagatcattcaagatatttttttacttgtctcttatttataatgtaaaatattattatcctttccttcattcattcaattttttttttttagcatattctaggccctggggatgtagctatgaacaaagcacaacaaccatgtccttagagcttatattctcatgcttaagcatatgccagctttattca

SEQ ID NO: 387450 - DNA, 201 bp, Homo sapiens
tatagtgtataaaagcaatattccaaaagtatataaattcaaatttatgttcagcaattaatgtttcagcattttattttactaagaaatgacctagacakttaatgaatatctgttacttaatcttacttaagtataactttaaggttgcaagttaccaaaaagattttggaacctctttttaagttgacatcttgtata

SEQ ID NO: 387451 - DNA, 201 bp, Homo sapiens
ttaaaaatcaggcagttataaaaaatatcacagaagcaaagaaactaaaaagttaaactttgtttaaacttgtttcttcctctctctttttttcttttgakaacagttacctccctgaagtttgtatttctaaaagataactattgagttcaagagaagacaggtaggaaatttacatctcaaaggcacagaaaaagaatg

SEQ ID NO: 387452 - DNA, 201 bp, Homo sapiens
tcgagactagaaggccaagccaaggactcttcataagactttgcattcgtagagatgaggtgaattcctgtttgaggtccccaagtatcctgaggttcctrggccttccaagaagtagcattccttactcacctagctgtaaggcaaccatacaaccatgtattcaagttaccaggccagtttttttacccctaaggggct

SEQ ID NO: 387453 - DNA, 201 bp, Homo sapiens
atccagtttgccagtctgtatcttttaattggagcatttagcccatttacctttaaggttaatattgttatgtgtgaatttgaccctctcattatgatgtyagctggttattttgctcattagttgatgcagtttcttcttagcctcgatggtctttacaatttatcatgtgtttgcagtggctggtacttgttgttcctt

SEQ ID NO: 387454 - DNA, 201 bp, Homo sapiens
ctgtattaatgtacattggtcattgaaactcagtgatcattggactcagtactttttgtgttaatcacattctgaaaatgtgacttctgtgttaaattttwaaaatgttttttttgttagaaaattatgaatctgtcattcagcttctggaaacaaggatttgttccatgtcattgtggacatagaaggtcaaatagttta

SEQ ID NO: 387455 - DNA, 201 bp, Homo sapiens
agtaatagttgtccctcagtacctgtaaggggattggttctaggactcccctcaagtaccaaaatccgtggatgcttaagacctgtgttagactgttctcrtattgttataaagaaatacctgaggtgggacgcagtggctcgtgcctgtaatcccagcactttgggaggctgaggcgggcagatcacaaggtcaggagat

SEQ ID NO: 387456 - DNA, 201 bp, Homo sapiens
caccatgacatctttatttcttattcttctctcatgtatatttattttgataacctgttgctataaatgtagatacatttctttctcctttacattttccrtcacaccctccggtttctttgttagcatcctccagtatcttgcccacattctcctacttattactcttcaattccatttcagagtctgttacgtgaacat

SEQ ID NO: 387457 - DNA, 201 bp, Homo sapiens
gtaaactctcaagctgtaacactcccaacctcagtcaatgtaaaacagacatcatacaatttaaattctcgtatggtagtccctagagaagcacttgaatrgagaattgcttatcaaactgtgtcagtcaggatcctaaaccccaaaatacctgtagcttaaaataacagagatttatttcttgttcatgttgcatttccc

SEQ ID NO: 387458 - DNA, 201 bp, Homo sapiens
cctgggcaacatcgcaagaccccatctcaaaaaatgtaaaaaaaaaaaagtatcaacattttaaatattttttgatacctagagataattgatacagaatrcttttagagaagattttaccaatgtaactttagagatatggctttatttttaatatacatggcctagttctgtggatacttttcagactctgacacaggg

SEQ ID NO: 387459 - DNA, 201 bp, Homo sapiens
cttcattttcaagattgttttgaaacaaagatatcacgtgaattttaggatggatttttctatttctacccccaaaatgtcactttttatagggattgcaytgaatctgtagattgattgctttgggtagtattgtcatcttaacaatactgatgtttccagttgatgaacacaggatgtcttcccacttacttatgtctt

SEQ ID NO: 387460 - DNA, 201 bp, Homo sapiens
tttttagtcttgaaacaaatatccaactgctttctcttcctgcttttttctcttattctggcaaaccagttattttactttagcacagaattaatttactstcttttttcccataatggaaaatataccctcatgctttagaacttctcttaccaaaaaatacatcctttattgcattttttttgtataaaagttgtttct

SEQ ID NO: 387461 - DNA, 201 bp, Homo sapiens
agtggctcacaactgtaaccccagcactttaggaggcctagttgtgaggatcacttgagcctaggagtttgagaccagcccaggcaaatggggaaacctcrtctcttccaaaaaaaaattagccgagggtagtggcgcgtgcctgtggtcctagctacctgggagactgaggcaggagctgaactattaatactcaggaga

SEQ ID NO: 387462 - DNA, 201 bp, Homo sapiens
tgaaattgctttttgagaaaggcagtattgggaccaggaataataaactcatctctctaattctccatagcccttctttctctgccctgcccccttctccmccaagggaaaacatgttaaagatttgtcatagtggtaaaggaagataagaataaattggctgaggtgctgtccaccagtttggtgctgatagcttcaaat

SEQ ID NO: 387463 - DNA, 201 bp, Homo sapiens
catgagttgtgatttctctgaagtttctatcaatttatccagccacagtttgtaagacttcaggaaaagggaagttttaattttagtaattccaagtcaargaaacttgggagaaaattggaaacattagtttggagagctgtagctagatattagaagaaaccggaagaattcaggattcatttcagtttgtaggtaaat

SEQ ID NO: 387464 - DNA, 201 bp, Homo sapiens
ttgactgtcacatcaaagcagtaatttggggtttgagaggtggcaatactctacagcaggtgtagagtattactaatctaacaaatatttcaggtgcctcrtgttttcaccttatttgcttgtttaaatcactttatataaatttcatggaaagacttgctttgccagtgtatccgaaacctctgttatttctccatagta

SEQ ID NO: 387465 - DNA, 201 bp, Homo sapiens
tatttgaatttggttttgggttttttgttttgttttgttttggtctttttggtagtaaatagtactttgtttttaaagttatagctcttgaattagccagsttgccagataagtttataactcaagaattaatccaaatacttaaacttgttaaagccttatatctgccattttgtagtaagttctcaatgaaggtagggt

SEQ ID NO: 387466 - DNA, 201 bp, Homo sapiens
cctaggatggagctatgacattgaagagaggaaggttccaaaacccaagtccaagtcttatggtgcaaacttttcttggaacaaaagaacaagagtatccmcaaaataggttggcactgactatatctctgcttgactgtgaataaagtcagctgtgcagtatttatagtccatgtataataaatacatctcttaatctcc

SEQ ID NO: 387467 - DNA, 201 bp, Homo sapiens
ttacataaaaattaaaatcactctttgcaatctaacctatcttaaatttttttacaaaaaatttttattgtaactttatggtaggattgttttacttaacmtttttgtcctttttattgtattatcttttacatacagcttgatataaatttttatcagtgcgtttgtttataataaatttttttttttttttttttgaga

SEQ ID NO: 387468 - DNA, 201 bp, Homo sapiens
tccttatagttattggactttctttggagatggagttccagcagttgggaatgtaatattctcttatggataaagtagattaaaagtttaaattaaaataygctgttaaatgttgttactttcctttgtgtacagtagtagtagtatactttgatgagttgagttccataggcttaacttttgtggtaaaactgaatacta

SEQ ID NO: 387469 - DNA, 201 bp, Homo sapiens
gtatttttagtagagacggggtttcaccttgttagccaggatggtctcgatttcctgacctcgtgatccgcccgccttggcctcccaaagtgctgggattrcaggcgtgagccaccacgccaggcccagagttccctaaaaagactttataatctaatcagtgccacctgaaggtagaaaagccttatctacacgcacaat

SEQ ID NO: 387470 - DNA, 201 bp, Homo sapiens
agtgctatgaagcatacaagagaggtagacagactggattggtttggtatttttaattatatgtcataaaatcggttgcatactgttgaattttcttgccstacctagattttccccagctttgttatacctttcttgaagtaatagttgtccctcagtacctgtaaggggattggttctaggactcccctcaagtaccaa

SEQ ID NO: 387471 - DNA, 201 bp, Homo sapiens
cagcctcccgaggagctgggactacaggcgcccgccaccacgcccagctaattttttgtatttttagtagagacggggtttcaccttgttagccaggatgktctcgatttcctgacctcgtgatccgcccgccttggcctcccaaagtgctgggattgcaggcgtgagccaccacgccaggcccagagttccctaaaaaga

SEQ ID NO: 387472 - DNA, 201 bp, Homo sapiens
tcaggaggttgccttttctataaagttttcaaattttagagttcactaataactcttctaagttctcttctttctagtttgaagaatgagtgagtcagccwgtaatacattgccctaaacagagtgctatgaagcatacaagagaggtagacagactggattggtttggtatttttaattatatgtcataaaatcggttgc

SEQ ID NO: 387473 - DNA, 201 bp, Homo sapiens
aatcctgtttcttcagctacagtggaaggaagatctaaataaacaccattgaagcattacagaagtggaggtggggaggccaggcgcggtggctcacgcckgtaatcccagcactttgggaggctgaggtgggcggatcacctgaggtcaggagtttgagatcagcctgaccaacatggagaaccctcgtctctactaaaa

SEQ ID NO: 387474 - DNA, 201 bp, Homo sapiens
ctcttctggcttgtagagcttttgccaagagatcagctgttagtctgatgggcttccctttgtgggtaacccgacctttctctcttgctgccgttaacatyttttccttcatttcaactttggtgaatctgacaattatgtgtcttggagttgctcttcttgaggagtatctttgtggcgttctctgtatttcctgcattt

SEQ ID NO: 387475 - DNA, 201 bp, Homo sapiens
gatgggtcctgactctgtatccagtttgccagtctgtatcttttaattggagcatttagcccatttacctttaaggttaatattgttatgtgtgaatttgwccctctcattatgatgttagctggttattttgctcattagttgatgcagtttcttcttagcctcgatggtctttacaatttatcatgtgtttgcagtggc

SEQ ID NO: 387476 - DNA, 201 bp, Homo sapiens
cccagtagtcattcaggagcaggttgttcagtttccatgtagttgagcggttttggtgagtttcttaatcctgagttctagtttgattgcactgtggtctkagagacagtttgttataatttgttataatttctgttcttttacatttgctgaggtgtgctttacttccaactgtgtggtcaattttggaacaggtgtggt

SEQ ID NO: 387477 - DNA, 201 bp, Homo sapiens
tggattcctaggtattttattctctttgaagcaattgtgaatgggagttcactcatgatttggctgtctgtctgttagtggtgtataagaatgcttgtggkttttgcacatggattttatatcctgagactttgctgaagttgcctatgagcttaaggcgattttgggctgagacgatggggttttctagatatacaacca

SEQ ID NO: 387478 - DNA, 201 bp, Homo sapiens
tgagatagtatctcattgtggttttaatttgcatttctctgatggccagtgatgatgggcattttttcatgtgtcttttggctgcataaatgtcttctttkgagaagtgtctgttcatatccttcgcccacttgttgatgaggttctttgtttttttcttgtaaatttgtttgagttcattgtagattctggatattagcc

SEQ ID NO: 387479 - DNA, 201 bp, Homo sapiens
gttgacccgggattgtgtataacatcccagctaacaaagatcaacctacagttttctttgaatttggtatcctagatgatctaattctccagatgagcatrtattttctcttcagtgatactgcctaaaagacttagggtagttaagagaattttcttcaacagctgccttttagtcttgctcctgtcccactttcatctc

SEQ ID NO: 387480 - DNA, 201 bp, Homo sapiens
tttgcagtcccaccgacagtgtaaaagtgttcctttttctccacatcctctccagcacctgttgtttcctgactttttaatgatcgccgttctaactggtrtgagatagtatctcattgtggttttaatttgcatttctctgatggccagtgatgatgggcattttttcatgtgtcttttggctgcataaatgtcttcttt

SEQ ID NO: 387481 - DNA, 201 bp, Homo sapiens
aataatttcaagtgacagatcttcactataggtagaaattctttcatttgttgccaaagcctcagctgcactgctagatgtcatgataattttataagatkataaggtattaagtttttcaaataaattagcagtgaaaaatgagatgtgataaaaaaattagtttgtagccaataaagtgatggtggaattttgtcatgt

SEQ ID NO: 387482 - DNA, 201 bp, Homo sapiens
ttcatccatgtccctacaaaggacatgaactcatccttttttatggctgcatagtattccatggtgtatatgtgccacatttgcttaatccagtctatcaytgttggacatttggcttgattccaagtctttgctattgtgaatagtgccgcagtaaacatatgtgtgcatgtgtctttacagcagcatgatttataatcc

SEQ ID NO: 387483 - DNA, 201 bp, Homo sapiens
ggaaacacacataacctcagtttaactttctcatattgatcaaggaatcacagagctccgattttaggagaacaggatacagacttcagctcttaatgggwgggaggagcgtcaaagaaatttggagtcacagtttcaaactgctacaaggaatatgggaattttactaaattattcttagttgataggtagtttcaaaag

SEQ ID NO: 387484 - DNA, 201 bp, Homo sapiens
gtttagatttggtatcagggtaatgctggactcataaaatgagctgggaaatttttcatcatcttttcttttgaattgctttagtttcatgctacaaattwagatatgttgtattttcatttggttcaaaatattttatttcccttgagacttcctttttgatctgtaaattatttagaggtgttttgtttaatttccatg

SEQ ID NO: 387485 - DNA, 201 bp, Homo sapiens
tcttaggcactttatttttgaattgaagtatgcaacttgtaccaactagctttccctttgatgtaatattgccaaacaatggaatatcatgtcttatattrtcaccatattttatttttgaattcactttttattttatttttaatatattttttatacaaatgtaatctcagtggttttagggctgatacagagaagttt

SEQ ID NO: 387486 - DNA, 201 bp, Homo sapiens
aacacaataattgagaagaggaactcataagcaaagctaaagaactcatccttagagaatacaagttcaaactgagaaaggttttacttttaagacaaaamaaatagcattaacacacatccaaatgccagtgcaggagttcactgggtttataaaagagaaaactaaactcaagtgtcaaataaaaactggagccgtcaa

SEQ ID NO: 387487 - DNA, 201 bp, Homo sapiens
gctagagcttctcatacaatgttgaataagaatgggaacgatatgattcatgctaatggtgttcagtgttggatgagcttctcttaaccagcaggctggaygctggggaccctcataagagaatatcttcctttagaatagcatttcttaagaggtcgtgtggtgtgtgtattcctatgtgtgttcacatggccaggtcac

SEQ ID NO: 387488 - DNA, 201 bp, Homo sapiens
ggcccagtcctgcagaggaggccaagcatgaggcatgaggtgatgggaaataggggaatcctcttttataatccaaggcttaggcccccatttcaggattycaaagaaagttctaagaaacattacttggcattccttggatagccaaactctactgaggtgtttggggaagggcagtttgcctggcattgtctgcccatg

SEQ ID NO: 387489 - DNA, 201 bp, Homo sapiens; identical to SEQ ID NO: 85142

SEQ ID NO: 387490 - DNA, 201 bp, Homo sapiens
gccattgacctgtcaaagcaggaatgattattttgtctttctttgcttttccaggatctgtacccagctctgaaaggtgtaaacacagttttccactgtgygtcacccccaccatccagtaacaacaaggagctcttttatagagtgaattacattggcaccaagaatgtcattgaaacttgcaaagaggctggggttcag

SEQ ID NO: 387491 - DNA, 201 bp, Homo sapiens
tcaagcccctctgatagagcatgtggtgtcactgcagcgtcacatcacttgggcagccaaatttggagagctgacgagctgggattgaacagacattcagstcacggtcatctatggtcccctgacctggctgcccacctgttggcatggctccttgtggcaggagcccacgtagattgggcagggtgcttgctcctcacc

SEQ ID NO: 387492 - DNA, 201 bp, Homo sapiens
agcaattaggcagtgagaatgcgatctgcacgggcttaatagatgcttcaactttgggcaggtgggggtggtgtttctaacttcttgttcttgttctcccrccaggcatttcacatcaccaatgatgagcccatccctttctggacattcctgtctcgcatcctgacaggcctcaattatgaggcccccaagtaccacatc

SEQ ID NO: 387493 - DNA, 201 bp, Homo sapiens
tctgtcccccacgagtggtgcttctcacccagcgaggcactctcttggcttgggcctaggaatttgcaatggacgtgccccttctcccactctcctccagscagttctgggcgccaacgatcctgagaagaatttcttaaccacagccatccgccctcatggcattttcggcccaagggacccgcagttggtacccatcct

SEQ ID NO: 387494 - DNA, 201 bp, Homo sapiens
ctgccttaggaccccctgtgccaagatcaagcccctctgatagagcatgtggtgtcactgcagcgtcacatcacttgggcagccaaatttggagagctgaygagctgggattgaacagacattcaggtcacggtcatctatggtcccctgacctggctgcccacctgttggcatggctccttgtggcaggagcccacgtag

SEQ ID NO: 387495 - DNA, 201 bp, Homo sapiens
acaatatcagaacacagtggtttaaaagaacaaccatttctttgcttatgactgtggtttcggctgagcccagctggggtgttcttggatggtctcccctsggctcttgcatgtagttgcaatcacatggggaccccttgaagcatatgctcccaggtggccttgctcacacctctggtagtaactggtggctgtcaactg

SEQ ID NO: 387496 - DNA, 201 bp, Homo sapiens
tggacgtgccccttctcccactctcctccaggcagttctgggcgccaacgatcctgagaagaatttcttaaccacagccatccgccctcatggcattttcrgcccaagggacccgcagttggtacccatcctcatcgaggcagccaggaacggcaagatgaagttcgtgattgggtgagtcagcccacagcggctcttccc

SEQ ID NO: 387497 - DNA, 201 bp, Homo sapiens
tcccactctcctccaggcagttctgggcgccaacgatcctgagaagaatttcttaaccacagccatccgccctcatggcattttcggcccaagggacccgyagttggtacccatcctcatcgaggcagccaggaacggcaagatgaagttcgtgattgggtgagtcagcccacagcggctcttccctagtccttcctggtc

SEQ ID NO: 387498 - DNA, 201 bp, Homo sapiens
gcccaggattttcaggctgcagtgagctgtgatcccaacactacaccccagcctaggcaacagagcaagaccttgtctcttaaaaaaaaaattaaaaaaayaacaagatttgagaataaaacagcacctctccactcaccacagcatttaagaaacaacattactggcatgtgtaatgtgtgcccatcctcgatgccattg

SEQ ID NO: 387499 - DNA, 201 bp, Homo sapiens
acattaatgtctgtctctaactatgtctttaagaaaagaaaagttgattacaaacgggaccatattttgcttcgaaatggaaccagcagttagcgagccartgagagaccaagtcgcacggactcatttgacagaggacactcccaaagtgaatgctgacatagaaaaggttaaccagaatcaggtaaggagaaagttgac

SEQ ID NO: 387500 - DNA, 201 bp, Homo sapiens
agtgaacagattcctgacttttgggtcatcatcatccccccaagtagtacgagccagagttctcactgtgatctccaaagcttggcacgacgtgtcccctyccatcgctccacaactcttctctcgtctggctcactccagccccagaacactggctttgtggttgaacctcatgtgccagccacactcctgcctctcatc

SEQ ID NO: 387501 - DNA, 201 bp, Homo sapiens
tcctttttccctctgccttgccttcctgtttctcactcagcctcactgctaccctgacttgtcaccttgaaggattacagggagactggtcaataaacggrggaccagagcaaggcgttggccccgtgtctcctgggaaggggctgaaaagctgctacccaaatcgggacaggagagacagcaccagtgttggccatgctg

SEQ ID NO: 387502 - DNA, 201 bp, Homo sapiens
atgtttctgtttatctcgctctttaatgtcatcaatagagttttatactttacttcgtaaagattttgcatatctcgttaaatttatttgtatgtacttcrttttttgttatttaataactttctattacattttcagttattgctaatatataagacgagttaatttttgtatattgatttttaattcagcaactttgcc

SEQ ID NO: 387503 - DNA, 201 bp, Homo sapiens
aatctaatcttgaggaaacagactaatccaaactgaaggacagtctataaaataacccaaacccttgaaaaatggcagcattaaaataagacagaaaagaygggaatttgtctcagattaaaagagatggaagagacctgaggactaaatactacatgtcatgcgcaattggatcctggaccccaaaacaaaaggctataa

SEQ ID NO: 387504 - DNA, 201 bp, Homo sapiens
ttctactggactaaagacttgatcggactctggttcagtttttccctctggggtattattacttctgatactccaatagtaataagcatgcctagtgctcrgatttgggtttctatataccatttcccataaaaagaactagggcttcttgggaaaattgctcattctaggaccctagggcaagggcagtacaaaatgcgt

SEQ ID NO: 387505 - DNA, 201 bp, Homo sapiens
ttgaagtcaatcctagacatcatatcattttatctgcaaatatttcagtatttgtctctaaaagataaggattatttttaaaaacattgacagtagttccytagtatctagccagcgttcagatatccctgaatgtcttataaatgtttttgtattattgtttttccaaataaggaaccaagcaagatcaagactatggat

SEQ ID NO: 387506 - DNA, 201 bp, Homo sapiens
gccacacccggctaatttttgtatttttagtagagatagggtttcaccatgttggccaggctggtcttgaactccttgtatcaggtgatccgcccgcctckgcctcccaaagtgctgggattacaggtgtgagccactgcgcccagccgagaaggacttttaaaatgtactttcacctgggtgtggtggtatgcacttgta

SEQ ID NO: 387507 - DNA, 201 bp, Homo sapiens
ttgatgaaatattaaggccattgcttccgctgcaaagttacggttgttttctctcccgtgctgcccacacctccaggcctggagatggggtagacatcttycatgctcatcattgctgcctccgaaccgttctccctcatgctgctctaagcctctccagctttgaagaggataccctcagactgtacaaaccccgacacc

SEQ ID NO: 387508 - DNA, 201 bp, Homo sapiens
gcccaagatgctaagttcctccacgcatcgtcagggcggctttaacttagccaagcaggagagctccgtctcctattgcactccactcatcccccgtcccmgcatcccatgtcctgagctcctagacatgagcccttgtgcccatttcattgatgggaaaactgagctgcagcaaagggaagtgactggagcaattccgta

SEQ ID NO: 387509 - DNA, 201 bp, Homo sapiens
gtttcaaagaacatctttatttctgccttcatttcgatatttacccagtagtcattcaggagcaggtttttcagttttcatgtagttgtgcagtttttagygagtttcttaatcctgagttctaatttgattgccctgtgtctgagagacggtttgttgtgctttctgttcttttacatttgctgaggagtgctttacttc

SEQ ID NO: 387510 - DNA, 201 bp, Homo sapiens
aatctccttacttaaagtcagctggttgtagatgtcaaccacagctacaaaatacctctacagcaacacctacactcgtgtttaatggagtcaccggggaytagagcctggcccaggtggcaaataaatgtggccaccacagtgtacttcacattgtaacccccaccctggttaaatcttgccttgtgcatggccatggcc

SEQ ID NO: 387511 - DNA, 201 bp, Homo sapiens
gtgggactaacctggcaaagccccggcccagcgcggggaggggcacgctggcgacagagccccgtctttattgggcaagatcacgccgtgagcgccaattrgctgagtcgtcgccgagctgggccaatcctcttggtggaggaagctcggctgattctcggctcacgcgggaggggagtaaagggtggcggtccgggcctg

SEQ ID NO: 387512 - DNA, 201 bp, Homo sapiens
tgaaccgtaaagggctccttagcctggcctgtgatccctctgcccagttttgcccctggtaacccttctagcttaatgtccctccataccttgcttcccastccgtcaacctgcagatcggaagcctgacagagtacaagggaaaaacacaagttctgcgcaggctgtgtgcaggctgtgtgaccttgggcaagtcgctta

SEQ ID NO: 387513 - DNA, 201 bp, Homo sapiens
tcgggaacaagaaggtatcactgttttttggggtattttttagattgtccagttttggtcataggtggtttgatttcctttcactgaatacaaagcatggrtcttgtcatcaaacccaaccaaagtcaatctcagtgtcattcgctatctctcttccctccttactgatcccaggagagaaggttagggttgcactagtga

SEQ ID NO: 387514 - DNA, 201 bp, Homo sapiens
ctcccaccctagatggcgggctccttgaaggttggcagtgtgtctttgtcagcttctgcctggtagtggctggcatttgataacttgtgaatgaggaaatyaatgcatgaggtgacacctgggggttcttttacaagttacagctcccgctttaaccctgggggtttgtttgagcctcacagtagctctgaggtagggaag

SEQ ID NO: 387515 - DNA, 201 bp, Homo sapiens
ttcacaggaaggaatatgcctgtgtattggctatttactgtctttaatggtgtggaactttttcatgtgattcataatttctatctgagttcaccttcctrgggagttttacctcctaggtgcctgctctgaaccacccaaaaggatgttgcctctgtgtggatcccacaggcttctcatgccccaaaccccttttgactg

SEQ ID NO: 387516 - DNA, 201 bp, Homo sapiens
aatggaaccagcagttagcgagccaatgagagaccaagtcgcacggactcatttgacagaggacactcccaaagtgaatgctgacatagaaaaggttaacsagaatcaggtaaggagaaagttgacacgtacataccaacaggctgatactatttacctgtgggtgaaaaattgtatttgtacatgtattaatcaatgttg

SEQ ID NO: 387517 - DNA, 201 bp, Homo sapiens
cgctgactgaagcgtgggagagccatggaaaaagctacaatgccaaagacgttttttatgttgtcactgataagtgagctgatttaactggcctcctgtgygcctctaatctaacagtgtggtgagtcataggcccagtcgttggccccgttagccgggcatggtggcagacacctgtaatcccagctactcaggagccta

SEQ ID NO: 387518 - DNA, 201 bp, Homo sapiens
aataaatatttgattctttccctttatttacctgaatttttattcttgcttgtggtcaagctgtcccttctttgcccagtgggaacctcttcaggttggcmcttgagtgcttttaacgtgaccccggtagtcttagctagctagcatcctcactctctggtacaaggtgtgcctggttcctcttgtgtgtttcctgtccca

SEQ ID NO: 387519 - DNA, 201 bp, Homo sapiens
atgatatgtaagtctggactctgtagcttccagtcctcactaccctggtcttccccaccgttcctctctttccacaggccaagagatgcacagtgatcggkggctctggattcctggggcagcacatggtggagcagttgctggcaagaggatatgctgtcaatgtatttgatatccagcaagggtttgataatccccagg

SEQ ID NO: 387520 - DNA, 201 bp, Homo sapiens
tgctcgaacttggcccaaggagtactaaagcctccctgcgccttgcaggcagttcagtcaccatggagaccctgtgtattctcaacccaatatgcctgatwctgattgccaccagagctgagcccatctaggctcaggagcttcaaatgatggccttggcccagaccatcagtgtctcgcttatatcaacttttgggttct

SEQ ID NO: 387521 - DNA, 201 bp, Homo sapiens
tcagatttgggtttctatataccatttcccataaaaagaactagggcttcttgggaaaattgctcattctaggaccctagggcaagggcagtacaaaatgmgtctgggacattttcttagcacaaaatgaatggggacctgccaagaagatacaagagccaacttgaagggcttcccctggccaaatttgggacattttga

SEQ ID NO: 387522 - DNA, 201 bp, Homo sapiens
ctgggaagggctcagccgctgggcgtggggcgcgacagagcggcagcactcaccatagccaaaggagtccgctgccggttgttaggcaaccgacgtgtacmctgactcggcgccgttcccaccgccccgcgcgcgcagccccgctccccattggccgtccgctcgtcgccgcctctccctattggtgcagggccgaagagg

SEQ ID NO: 387523 - DNA, 201 bp, Homo sapiens
agccggtcgttgttcgtttgtaggttgtctggctttccctcttatggtttttaggattttattttttatcatttatagtctatagagaatatatctgggcmtgagttttagttttgattttaaatcttaacacctggtaggcctgtgcaatctgaagatgaatgtctttcctcatttctggaaaattcttcaaagattaac

SEQ ID NO: 387524 - DNA, 201 bp, Homo sapiens
gcaactgaagcacagagcagaggaaggaatcttgccagaggggcctggggaatagggacagctcctttccagcttaagagtggctgagagagagtccaagkggtagaccacagtgacagggccaggctgcggaggctgggcagacccccacaaagactggccagcctggtggtggctgaggaggacgcacagaaggcccag

SEQ ID NO: 387525 - DNA, 201 bp, Homo sapiens
ttctctctctatggatttgtcagttctggaagtttcctatgaatggaatcagacagtacgtggccttgtgtgtctggcttctgtgaggctgatttttaacsaacaactcagaggagctgagaaggaaggtccagttcagagtttctgcctcctcctgcccctgaggtgcaggagacaaggagagcagccctcactctgttg

SEQ ID NO: 387526 - DNA, 201 bp, Homo sapiens
aataggagcatggtcagtggagctgggccccactccgaggctggagtcagtaggtgcctggcacccaggggcgctgggggccatgcactgctctgtcatcrcgcccccggccttgtggtcctctcgcaaggagcagcccgtgcaactgggggaaccaaccagggtggctgggtcttcaaggggttggaggacaagggtggc

SEQ ID NO: 387527 - DNA, 201 bp, Homo sapiens
gtgccctggtcttcacccaccctgtcaaggaagctcagctcctgcttctggggagggtgagccagaggagacccccagcacaggttctccccggtggcctkcgtgtcgtcacctgcaggaggcgggaggtggcgggggtgggggaggtgggggaacacggggcagggcagagtggtttcagacacagcaggcccccgaaga

SEQ ID NO: 387528 - DNA, 201 bp, Homo sapiens
tgggcccagctcaggctccaccttctaccaggtgagaaggtggcagtggcggagagaccgtcgacatttgggatctgatccacccaggaccgatggactgraggtggtgctgaagcctgaggggacacaggtttggggcacagggtgggcgtttattggttgagggtttggctggggctactctatggtcaggacgtcctg

SEQ ID NO: 387529 - DNA, 201 bp, Homo sapiens
  misc_feature (1)...(201): n = A,T,C or G
aggagcggctggacaaggtgtggcccaagctgagggtgctggcccggtcgtctcccaccgacaagcacacactggtcaaaggtagccgagcccccacaccnctttcctggggtggccagcccgaggttgtctgcttcctgacaccaaaagccaggttcccaaacaggtccccagggcctgcctaggaagctgggtccattt

SEQ ID NO: 387530 - DNA, 201 bp, Homo sapiens
cctggcacttccaccccaagagggtagaggcaagctggccagcagcagccgagagccggccgtctgcacccgacacccacagggaaaccctttggtcttgytgccaaggtcacaaaagcagctgccagtgtcccctttgccattccgggctgtgcccgctgatggctgtggcactgagatcgcctctccctgacagctcct

SEQ ID NO: 387531 - DNA, 201 bp, Homo sapiens
agaggcagcaaggacttgagtgcgtgaggcaaggtggagaagccagaggagggaagggctcgctcctggagcagtgccctgccggagggtcagggggcttmagggctgccgtgcgctcagctgggggcagagggccactgtgccgggggagtctggggcacagcgggagctctttcatgcgggaagttccgctgatctgag

SEQ ID NO: 387532 - DNA, 201 bp, Homo sapiens
acttcaccagcatcgtcaaggcagtcatgtggggccgtaacgtctatgacagcatctccaagttcctgcagtttcaactgacggtcaatgtggtggctgtsatcgtggccttcacaggtgcctgcattactcaggtgggtactgggggctgccatgccccagctaggacacctgggctcaggcctgagggccagattgtga

SEQ ID NO: 387533 - DNA, 201 bp, Homo sapiens
gcctcttgctgtcaccatctccttagcttactctgtcaaggtaatcataaaacttacagttgatactgtttacagactcggaaactggggtaagaagtcaytgggcgccttggtggcagtataaactggggacgtttgggatagctcaagggaggagaggaggtgccgagcagggacccagggggcagctttgctgatctg

SEQ ID NO: 387534 - DNA, 201 bp, Homo sapiens
ccaccagccagctcaagtgcctgaaggaagccgggcacgggcccgggaaggacgagatgaccgacgaggagctggccgaaggcgaggaagagatcgaccaygccgagcgggagctccgcaggggccagatcctctggttccggggcctgaaccggattcagacgcaggtaagccccgactcgctctcgccctggcacttcc

SEQ ID NO: 387535 - DNA, 201 bp, Homo sapiens
catggtcagtggagctgggccccactccgaggctggagtcagtaggtgcctggcacccaggggcgctgggggccatgcactgctctgtcatcgcgcccccrgccttgtggtcctctcgcaaggagcagcccgtgcaactgggggaaccaaccagggtggctgggtcttcaaggggttggaggacaagggtggctcaggagc

SEQ ID NO: 387536 - DNA, 201 bp, Homo sapiens
aactgggggaaccaaccagggtggctgggtcttcaaggggttggaggacaagggtggctcaggagccgcggctggacctgcctctctcccacttgcccttygcagattgtcatcgtccagtttggcgggaagcccttcagctgctccccactatccacagaacagtggctctggtgcctgtttgttggtgttggggagctg

SEQ ID NO: 387537 - DNA, 201 bp, Homo sapiens
taggctcacacggtcctgggcatgagtgtgcacacaaggtgggaggcaattttcatgaaacttgccagctgcaagcagttctggcttgccaacacacacasagccatgtcttgtcttttccgttctttggttcaattccttggggaaagagccagctgtggagtttgcattttcattgttcctaattcaagcatgtgacat

SEQ ID NO: 387538 - DNA, 201 bp, Homo sapiens
agaaaaacgaaaagaagggaatctctgtgaaccagtcctcaagtcccctcctggccatgttcgacaaatacactggcatagacacacaagacagacgagaygtcttgctctagaactccagatgcccatcatccctttctgtggcttcccctgcgtccttctagactgttccccccacttcccagtggcctacaatatgcg

SEQ ID NO: 387539 - DNA, 201 bp, Homo sapiens
gccagctgcaagcagttctggcttgccaacacacacacagccatgtcttgtcttttccgttctttggttcaattccttggggaaagagccagctgtggagyttgcattttcattgttcctaattcaagcatgtgacatccccatggggtagaaaggggccttccccttgctcttcccccacatagagaagtgaggccgaag

SEQ ID NO: 387540 - DNA, 201 bp, Homo sapiens
tcccatgcctcagtttccctggtggcatggagatcacagaatacttatctctggggaggggtgtgagggttccgtgggtgaatccacatccataggaggcyctccgtccacacagcttctgttatgatcatttccttcgtcaccagcctcccatgcagtggcagcacctggcactcacagccccactggcttcttccacca

SEQ ID NO: 387541 - DNA, 201 bp, Homo sapiens
gttctggcttgccaacacacacacagccatgtcttgtcttttccgttctttggttcaattccttggggaaagagccagctgtggagtttgcattttcattkttcctaattcaagcatgtgacatccccatggggtagaaaggggccttccccttgctcttcccccacatagagaagtgaggccgaagccatcttctcctca

SEQ ID NO: 387542 - DNA, 201 bp, Homo sapiens
aggaccgatggactggaggtggtgctgaagcctgaggggacacaggtttggggcacagggtgggcgtttattggttgagggtttggctggggctactctayggtcaggacgtcctgtggcgagctcacagcaaaggtcctggcgggaaagggagcccagaagcatatccccatatggacgatgccaccaggggagtccaga

SEQ ID NO: 387543 - DNA, 201 bp, Homo sapiens
ataggaacggggagtatcactctgttgcccaggttggtctcgaacacctgagctcaagcgatcagcccgcctcggcctcccaaagtgctggaattacagcygtggaccaccaaacctggccctggctcactttttgcactggagaggtgatgaggttggcatcatttcagctgattccgaagcactgtgctttgcctagct

SEQ ID NO: 387544 - DNA, 201 bp, Homo sapiens
aggctgctggtgggcagagttcagctggagcactgataagagtcctcctcgggcctcctgcaatttgagaggtcccttaggcatccgagggggaacacccrggaggcagccagggcagaagtctggcagtccaggaaaaggtggacatggtgcagctggtatctgcagtatttacggtggcctgatggtctatagacagca

SEQ ID NO: 387545 - DNA, 201 bp, Homo sapiens
ctcccggccagtctcctggcttcccgctctcaaccccttgcaggctgttcgctttccactcagcactggggaacctctttctctttctccagaatctaatrtgatgcaggtggtccccaacttttaacaattttgtaacttggtgcaaaggtgatgcacattcagcagaaactttacttcgagtcccatgcttttcccttt

SEQ ID NO: 387546 - DNA, 201 bp, Homo sapiens
tgccatccgggaggggcacgctggagtagccggtgagaccggaggagcagtagcagcagaagcccagcctggaaggaagggctggctccgtggcctggctstcctttatggaggtctttggagttgagccaggtgcagtgagacctgtgcataggtttgagcaggggcctggcctgatcacatgcccccaggtctgaatga

SEQ ID NO: 387547 - DNA, 201 bp, Homo sapiens
ttggaactttctggtggatgagagatgctctgaaggctgtgacggagctcccctagacaagagggctgccccaactaggcctgcaggggcgtcgagtcacrtggtttcctaaggcaagcccacagtttcccatcctctttgcctgctccaggccaggctgcctttcagcccaccaggagtctggggcctttctgggcactg

SEQ ID NO: 387548 - DNA, 201 bp, Homo sapiens
agcccctcatctcccgcaccatgatgaagaacattctgggccacgccgtgtaccagctcgccatcatcttcaccctgctgtttgtcggtaggctggccagkggcacccgggaggacttcgggacactgttgccaccacctcgggctcagattctgtctggtgtgtctccacctgtgtctccgcacccagtacggggtggga

SEQ ID NO: 387549 - DNA, 201 bp, Homo sapiens
tgccatcatcacagtgcagcggattggtttagaactcagaacccaacccccactccacgcttcaaggaccccaagcaatcaccaagcccagcactctcatmctagagatcaggggaaggaggttgtccccaagggccaggacctgcactgggtcccataagcagccaggcctggcagagtggggactagcaccagcgccca

SEQ ID NO: 387550 - DNA, 201 bp, Homo sapiens
gcctcttgctcctctcttccttggctcctagcacttccttcctgccttcattccgtggccatctgtccccctcctccccacctccggagcctggcagtgcrgggtaagtagagtgggagagacgccacccctcctgctgttcacaagctattccatgggggccctaagtggcggatagccagaaggagggcagctgtccct

SEQ ID NO: 387551 - DNA, 201 bp, Homo sapiens
ccctctccacctccggcctcagtggccttgtctgcaccctgcagagagcagctgatgagcagcccagggtgggcagtgtctccccgacccctgcgaggccwtgcagcccagaaaaggcttgaagacttcccagtcccctccctcagcaccgtgactccggtttggcttctccccgcctgttccccaccaggaacccactcc

SEQ ID NO: 387552 - DNA, 201 bp, Homo sapiens
ctctcccaggggagttgcgcaaacagcgcctgtgtctcccagcaacggtgtggagcgacatgcagggagtattgtcaaccagggcagctcacccaggcccyggtgtccagggcttttcttgcggtggttcacagagccatgctgtggtcacgtggctggcctccatctccagccctctggaggtccagctgttagtgtagc

SEQ ID NO: 387553 - DNA, 201 bp, Homo sapiens
ggtttcagacacagcaggcccccgaagaatcaactgtccccacagcctccacggcgggctttcccccctacaaaggatgcaaatgtcctcgttccccagarggaggagggctcctgagtccctttcccaggcggcccatggcacctgacgggacctcccctggggcagccgggaggaggcggtggggagaaaggcctctgc

SEQ ID NO: 387554 - DNA, 201 bp, Homo sapiens
gccatcactccctgcccctccaggccctgtccaggatccccagttgcaatgcccctgacatggagcgactgaccctcctccctgaggtcctgccagagtarggacaccactgcacacttggctgcggagccagggcccgcctgagccaccagccccagctcaagcgggaataggcggggcctgaggccacaccccttccca

SEQ ID NO: 387555 - DNA, 201 bp, Homo sapiens
gtttcttgatctctgtgccggccacaggggctgctgcagctgctgcagatgccagccttcttgctggccccagcattagtgtcctcggggacagcccaccsagttcctgtttcattttcagaattctcctttccctctgctactgcacctcacctccgaatcacacttgaacctggttgctccatggagtcccttcacttc

SEQ ID NO: 387556 - DNA, 201 bp, Homo sapiens
  misc_feature (1)...(201): n = A,T,C or G
actggtaggggcggccttccttcacacacagctgctgcggtccctccgtagtacacttgagccccgtcctgggtgctctcaccctgacacccgcacaaagnctctgtcctgcctgctggaaagcccttcccgcttgacctatgggcccagctcaggctccaccttctaccaggtgagaaggtggcagtggcggagagaccg

SEQ ID NO: 387557 - DNA, 201 bp, Homo sapiens
gagctgggccggccgggggcactggcaacttctccagacacctggctggctgctgtgctgtggggccttggggagaaggcagggagcagggctgagcaggygaggaaggacagcctggcctggccctttggggccatggggaaggaactgggctacacacactgggcctgaggagggaggaggcctgggttcgcagctgct

SEQ ID NO: 387558 - DNA, 201 bp, Homo sapiens
tccacccgcttgccctatgaagtctgtggtggagctgccatgagccacatgctcctgcctccctcccggtctctcagcctgcagcagtgcatgagcgtccyggtgccctcaagcaacagaaatggattctcccccagttctggaggccggaagtccaaaagcagggcgtgggcagggccgaagcgcctccaaagcatctca

SEQ ID NO: 387559 - DNA, 201 bp, Homo sapiens
cctggcctcacaggtggctctggctgggaaactgcctgtagctaaggccgaccttcctctgctccctgccgcccacaccctaacaatgtggtgaccacgasggggcagagctggggctccaggggcagcatggagggtggtctcaggcccccagtgcctgctagccctcgtcatcttgcagcctcctgagaaggaaggcgc

SEQ ID NO: 387560 - DNA, 201 bp, Homo sapiens
cagcataaccttcaggttgggaatctgaagactccgcccgtcttgaggcctgatggtggcagctccagccacagggcgaggaagctggccctccaggcccrggagagtgctttgtgtcctgaatgggaagccccaagcggagaggcttgcaggggccagcacagcgctgtgcttctctcaatccagaccctcgacaatatc

SEQ ID NO: 387561 - DNA, 201 bp, Homo sapiens
gggtggtctcaggcccccagtgcctgctagccctcgtcatcttgcagcctcctgagaaggaaggcgccctcccacgccaggtgggcaataagacggagtgygccctgctgggcttcgtcttggacctgaagcgggacttccagcccgtgcgcgagcagatcccggaagacaagctttacaaagtgtacaccttcaactcgg

SEQ ID NO: 387562 - DNA, 201 bp, Homo sapiens
acaggcgcagggctggctggtgggaggagagtgcatggggcttctgggcctccctaagggaggtaggaggtggctcggacaccagtaagcagatgagtcasctcagggttctggaagattcctcgggccacaggcctctgctctcaggtattatttggggcattccaggaccagtcaccctgtctgtgtgcccaaaagcct

SEQ ID NO: 387563 - DNA, 201 bp, Homo sapiens
agatcgggaaagcaggtagggacagcaggaggtggtgggcccaggccattgactgggcgtggaggatgctgggctcctggagatgagcccaggctgtgtaragcaggtgggaagggatgtggcaggtgatgtgtgggccaggcaggcaagggcacaggccaggccggcagtggccatcagggcctggcgcagcccttccct

SEQ ID NO: 387564 - DNA, 201 bp, Homo sapiens
tagggtgtttccaagggtgcagtgaaagaaacatgtctgtcaagagctggcatgcagatgtgggctcaaaactcagtgtgtgccatggggtcctgagaggrgccccatgggagcgggggtgccccctacttagaaagtgccgagccttctggagcatgctgggctgcccagggcctggaggaagtccatgggggactaagc

SEQ ID NO: 387565 - DNA, 201 bp, Homo sapiens
cccaaagaaaacgccccactagcgtaaaggcgatgtagggatggagatgtctgttttcatgggcatgaaatcctggtgatgtggaccccatgaggagcccycaggagctactgggtttccacccccaaccttcccgggcaggcggcccatggaaaggtgactgcctcctctccataggactctcctctcaaagccgtgcag

SEQ ID NO: 387566 - DNA, 201 bp, Homo sapiens
gtccaggagcctcctggcctgttttgtcatctgtgtgtcaggaggaggatggctagggactccccatgacagcagccagagagccgcatgctcactcccaygtgcacacccccagcagtctgcagaaaggctcctgtctagagggagagccaggcgctggccagacggccccagagggctgctgccaccccaggagcagtc

SEQ ID NO: 387567 - DNA, 201 bp, Homo sapiens
aaggggagagcagggagccagcccaggcgggccaggtgatcaaggggggctggggaaggggcccccacaaacactctgtgtgagtgtgtgtgtcacccccycagggcatcgcagggaccgacgtggccaaggaggcctccgacatcatcctgaccgatgacaacttcaccagcatcgtcaaggcagtcatgtggggccgta

SEQ ID NO: 387568 - DNA, 201 bp, Homo sapiens
tacatgtgcatgctaccacgcccagcgaattttcaaattttttgtagagctggggtctcctcatgttgcccagggtggtcttgaagtcttgggctcaagcratccacccacccggcctccctaagtgctaggattacaggaatgagccactgccaccagcccgaacttccattctttctaaggctgagtaatatccattgt

SEQ ID NO: 387569 - DNA, 201 bp, Homo sapiens
agctcctccaggtccccgtggctgcgctggtggtgggggacattgcccaggtcaagtacggtgagtgccctggtcttcacccaccctgtcaaggaagctcrgctcctgcttctggggagggtgagccagaggagacccccagcacaggttctccccggtggcctgcgtgtcgtcacctgcaggaggcgggaggtggcgggg

SEQ ID NO: 387570 - DNA, 201 bp, Homo sapiens
gcccggggaggacttcctgtgcctagaagggaaggagttcaaccggcggatccgcaatgagaaaggcgaggtagcacccggctgtctgccaccccagacchcccttctcctcaccccagccccctgcgtgcccgccttagctctgcagcgtccttgtgcttcccctccccagatagaacaggagcggctggacaaggtgtg

SEQ ID NO: 387571 - DNA, 201 bp, Homo sapiens
cctttctttttttgttttgttttgttttttccctcaagccatcctcctacgtcagtgtcccccgtagctgggattacatgtgcatgctaccacgcccagcraattttcaaattttttgtagagctggggtctcctcatgttgcccagggtggtcttgaagtcttgggctcaagcgatccacccacccggcctccctaagtg

SEQ ID NO: 387572 - DNA, 201 bp, Homo sapiens
ctccagagaaattaggaaatattttgacctgatggaaaggacagagagtcccacatcgagctctgtgggctgcagctgaagccgcacactggcaggtttcyaggaccccacaattagatcaggaagaaacagcctgggtatttaggatccgcttatctctgtcttcatcagctccgactgccatagcaaaataccatagac

SEQ ID NO: 387573 - DNA, 201 bp, Homo sapiens
agatagaacaggagcggctggacaaggtgtggcccaagctgagggtgctggcccggtcgtctcccaccgacaagcacacactggtcaaaggtagccgagcycccacacccctttcctggggtggccagcccgaggttgtctgcttcctgacaccaaaagccaggttcccaaacaggtccccagggcctgcctaggaagctg

SEQ ID NO: 387574 - DNA, 201 bp, Homo sapiens
tgctttggctgcctgagggctttctcccctttcttcagggctctgggccactcgtttccaacggatgcttctgagccaggagcttccccagagacgggggktcagggccctgctgagctgccaggagggctcttggctgatgtcaaggccaggccatgtgcactgaggccatttcagttccatgaggatgtgacaggctta

SEQ ID NO: 387575 - DNA, 201 bp, Homo sapiens
acctcaagatcgacgagagctccctgacgggcgagtctgaccacgtgcgcaagtcagctgacaaagatcccatgctgctctcaggtgagggccaccctccsggccagcctggcaccaaggggcgtcagcagccgtgtggcccagcatcctgtccaggctgcctgctgggctcagcctccacctccaccagggccttccagc

SEQ ID NO: 387576 - DNA, 201 bp, Homo sapiens
cccaggaccgatggactggaggtggtgctgaagcctgaggggacacaggtttggggcacagggtgggcgtttattggttgagggtttggctggggctactstatggtcaggacgtcctgtggcgagctcacagcaaaggtcctggcgggaaagggagcccagaagcatatccccatatggacgatgccaccaggggagtcc

SEQ ID NO: 387577 - DNA, 201 bp, Homo sapiens
cagtaaggtgccgaggatcccaggccagcgtgggaggcagccagggaggtgggggtcagaggtcagaggaggctgggacaggtgagggccgggcagcccamctgtgggtggtggccctgccctggggcttacaaagctaggcaagcccgagccaggagggcccattcctcgtcctgtggctggagctgccaccatcaggcc

SEQ ID NO: 387578 - DNA, 201 bp, Homo sapiens
ggcgactgtggtattgtcactgatgtggctctcccactgggacaccatctgtagccaggccagaccaatgcaaatctgaggcaggaaaggcatctttcctrtccctcatcacttttgccgcagcgagagtcctctcctgaatctagacaggagaccccccaccccgcaagccaccgcgacgccatcacatcaaccatcctc

SEQ ID NO: 387579 - DNA, 201 bp, Homo sapiens
caagcctctctggagtgctaagaacagaccacgctgcttggtggccacgtggtggcagctgggctttatgtgtaaagctgtgttgatgccatgtcatcagyaccctctgtgtttatgagcaaagcccccccccccaccgtgacatgtgacaacttactgtttgtagtacaagaatgtgttgcattaaaaaaaagcaacaaa

SEQ ID NO: 387580 - DNA, 201 bp, Homo sapiens
gttttcaggctcacacacaccgtagcatagggcaggactttctgccttttcatggcctcataacactccacggcacagactgccacattatgtatgtctgycctgatggacacatggctcgttcccactttttggctcttgtgaatggtgctgccaggagcatctgtgtatgagtttctgcgtgggctatgcgtcccatgg

SEQ ID NO: 387581 - DNA, 201 bp, Homo sapiens
cacacgcccttctccctgtgtgtctgtgttctcacacggggcactcctctctgataaggaccccagtccttgactaagcccccaatccagtgtgaccagcrctgttccttgttgttctctccccacctccacctcatctctgcccaccccctgcctaggtgcaccaacatcttgaacagcaatggcgaactccggggcttt

SEQ ID NO: 387582 - DNA, 201 bp, Homo sapiens
gggggactgctctagctttactccctttgcttagtcacaaaaacaaatgacatcctttggaagaaggaggccggcgtctccctctggagagggaccttacrccaggcagatgctgctcagcctggctctcacggccacttccgtgtggctcccccaggtcattgccaccatccccaccagccagctcaagtgcctgaagga

SEQ ID NO: 387583 - DNA, 201 bp, Homo sapiens
ccaaacctgggctgtttatcctgaaacgcaaggcaaatctacaaggccttcacaaatgcctccgagaccgtgtccatacctcttcttccctcttcctgtcyccctccttccctcacccgtggcaacccctttcgtctcctccccgctctgtggcagggctggtgatgtctgccatcaccgtcatcatcctggtcctctact

SEQ ID NO: 387584 - DNA, 201 bp, Homo sapiens
gccgtgctcatgccccaatccctcgggccctgcccaccctctttgcaggctgtccctgcccccacaggttgggctgtgtgacactgccagtctttgggacyggctggccccatcttacagagctggggaggggggtgttggtgacaagcctgctcagggaattcataggctgggagctagagaggtgtttcctgacaggca

SEQ ID NO: 387585 - DNA, 201 bp, Homo sapiens
aaggccggacatggctggcagagtgcacgccggtctatgtacaatacttcgtgaagttcttcatcattggtgtcactgtgctggtcgtggctgtcccagarggcctgcctcttgctgtcaccatctccttagcttactctgtcaaggtaatcataaaacttacagttgatactgtttacagactcggaaactggggtaaga

SEQ ID NO: 387586 - DNA, 201 bp, Homo sapiens
gaagaaagccaacgcacccaaaaaggagaagtctgtccttcaggggaagctcacaaagctagccgtgcagatcgggaaagcaggtagggacagcaggaggkggtgggcccaggccattgactgggcgtggaggatgctgggctcctggagatgagcccaggctgtgtagagcaggtgggaagggatgtggcaggtgatgtg

SEQ ID NO: 387587 - DNA, 201 bp, Homo sapiens
agaccaaaggtaacgggcgccgctgcttgggcacaacaagcttggagccctgggggtggggctggtggagggcacagtgttgggggaggttcacctgcctyggtggcaggagcaacacttggagaccaggtgagtgggctggctgcacagtcccgtcccagtgcagagggaggagagagcacacccctggggctgctcagg

SEQ ID NO: 387588 - DNA, 201 bp, Homo sapiens; identical to SEQ ID NO: 85160

SEQ ID NO: 387589 - DNA, 201 bp, Homo sapiens
atggatttgcctgtctggacatttcctatcaagggactcatacactgtgtggccttttgtgtctggcttctttccttagtgtaaagtttttccgtttcccycagatattagaccttcctttctttttttgttttgttttgttttttccctcaagccatcctcctacgtcagtgtcccccgtagctgggattacatgtgcat

SEQ ID NO: 387590 - DNA, 201 bp, Homo sapiens
gatattagaccttcctttctttttttgttttgttttgttttttccctcaagccatcctcctacgtcagtgtcccccgtagctgggattacatgtgcatgcyaccacgcccagcgaattttcaaattttttgtagagctggggtctcctcatgttgcccagggtggtcttgaagtcttgggctcaagcgatccacccacccg

SEQ ID NO: 387591 - DNA, 201 bp, Homo sapiens
ctggtcatcccgtccctgcagcagatggcaggcgtgagcctagctgcccagggctgggagctgcaagctgctgtctgtccaccaggtgtcagtgtgggtcyggtcacggccgcgacagcactgggcgccgggtgagcgcccgggagggctcctcgggatcagccggggctgagaatcctggggccaagggtggggccagag

SEQ ID NO: 387592 - DNA, 201 bp, Homo sapiens
cgtcctgtggctggagctgccaccatcaggccctgcagcgggcggagtcctcagaccttctaacctgagtactattcagggaggccctgatggacaagatygaatggctgccacagccccttctggctgggcagccttgctctggcctggacttgccttctggcctctcctgcagccaaaacatggtagggagccacaccc

SEQ ID NO: 387593 - DNA, 201 bp, Homo sapiens
tttcgggtgaccggggcctctcctgggaagagagaggatggcctggggatggcacaagccatttgggtctggcaggaaggggtgaccgaagctgggtcacrggaggcccagagtgctgatcagaggtggcactgactggccacaggctgtcccaaagaggcacaagcccagggtagtgtcggtctcactgctgagggaggc

SEQ ID NO: 387594 - DNA, 201 bp, Homo sapiens
gacagcacacaggggaaggagcagatgggccaggctagcaaccctgcagccaggcctgctggtggcctacagctctttcgcaagcctctcctcccaggccsctgagcagctgagaaacagttcatgtcttgacatcctgcccacggctgtgtagctgtgtagagtaggcagcttctacccagccccagagtggccacggta

SEQ ID NO: 387595 - DNA, 201 bp, Homo sapiens
ctgtgcctagaagggaaggagttcaaccggcggatccgcaatgagaaaggcgaggtagcacccggctgtctgccaccccagaccccccttctcctcacccyagccccctgcgtgcccgccttagctctgcagcgtccttgtgcttcccctccccagatagaacaggagcggctggacaaggtgtggcccaagctgagggtg

SEQ ID NO: 387596 - DNA, 201 bp, Homo sapiens
tctgtgtggtgctggtcacggccttcaatgactggagcaaggagaagcagttccgaggcctgcagagccgaattgagcaggagcagaagttcacggtcatscggaacgggcagctcctccaggtccccgtggctgcgctggtggtgggggacattgcccaggtcaagtacggtgagtgccctggtcttcacccaccctgtc

SEQ ID NO: 387597 - DNA, 201 bp, Homo sapiens
tcttccttcctgccctcaggctcagggtctggcccctggcccagaggggtctcaggactctggttggttgagcctggggtgggtgtggctgccttgggccwtggccgtgagctggaagtggccatcccctgggacaagggacccatctcgggagctacacaccgaagtctcgctcctgagtaatgcgtcatgcgctgagat

SEQ ID NO: 387598 - DNA, 201 bp, Homo sapiens
gcctagaagggaaggagttcaaccggcggatccgcaatgagaaaggcgaggtagcacccggctgtctgccaccccagaccccccttctcctcaccccagcyccctgcgtgcccgccttagctctgcagcgtccttgtgcttcccctccccagatagaacaggagcggctggacaaggtgtggcccaagctgagggtgctgg

SEQ ID NO: 387599 - DNA, 201 bp, Homo sapiens
ggcttacttttttttattattattttaaataggaacggggagtatcactctgttgcccaggttggtctcgaacacctgagctcaagcgatcagcccgcctyggcctcccaaagtgctggaattacagctgtggaccaccaaacctggccctggctcactttttgcactggagaggtgatgaggttggcatcatttcagctg

SEQ ID NO: 387600 - DNA, 201 bp, Homo sapiens
catgatgaagaacattctgggccacgccgtgtaccagctcgccatcatcttcaccctgctgtttgtcggtaggctggccagtggcacccgggaggacttcrggacactgttgccaccacctcgggctcagattctgtctggtgtgtctccacctgtgtctccgcacccagtacggggtgggacgctgcacttcctgactgg

SEQ ID NO: 387601 - DNA, 201 bp, Homo sapiens
taatgggcctggacttgggccatcccctccagcagcccctggaggcagcagccagggacccccctggctgtctcccaccacgaggccggccagtctgtgcrgggatggtgcaaatgccggaaggtgcgaggccccctctgtggaggttctcatttcaatgaagccaattaaggtcagaaagatgaaagagcacagaaatgg

SEQ ID NO: 387602 - DNA, 201 bp, Homo sapiens
tgacgggacctcccctggggcagccgggaggaggcggtggggagaaaggcctctgcttcccggtgctctaggcgacctgctgccagccgacggcgtgctcmtccaggccaatgacctcaagatcgacgagagctccctgacgggcgagtctgaccacgtgcgcaagtcagctgacaaagatcccatgctgctctcaggtga

SEQ ID NO: 387603 - DNA, 201 bp, Homo sapiens
atgccacaccataggggcccacatgggagagcgccaggcaggaggtggggtgtgagagctgtggacaagagcctttgctgtggttccctcggggaggagcrggtgaggcagtgctggtaggctcaggactggctaggttgcgtcattgcagcggttccagggcatacgggtgctccctggctgtctggtacctggtcctgg

SEQ ID NO: 387604 - DNA, 201 bp, Homo sapiens
taggggcccacatgggagagcgccaggcaggaggtggggtgtgagagctgtggacaagagcctttgctgtggttccctcggggaggagcgggtgaggcagkgctggtaggctcaggactggctaggttgcgtcattgcagcggttccagggcatacgggtgctccctggctgtctggtacctggtcctgggtaatgagtgc

SEQ ID NO: 387605 - DNA, 201 bp, Homo sapiens
gggctttcccccctacaaaggatgcaaatgtcctcgttccccagagggaggagggctcctgagtccctttcccaggcggcccatggcacctgacgggaccycccctggggcagccgggaggaggcggtggggagaaaggcctctgcttcccggtgctctaggcgacctgctgccagccgacggcgtgctcatccaggccaa

SEQ ID NO: 387606 - DNA, 201 bp, Homo sapiens
acctggagaagcgcaggcagatctacgggcagaacttcatccccccaaagcaacccaagaccttcctgcagctggtgtgggaggccctgcaggacgtgacmctcatcatcctggaggtggctgccatcgtctctctgggcctctcgttctatgcgccgccaggagaggagagtgaaggtaaggcccgggggcctgggctgg

SEQ ID NO: 387607 - DNA, 201 bp, Homo sapiens
tgaccctcatcatcctggaggtggctgccatcgtctctctgggcctctcgttctatgcgccgccaggagaggagagtgaaggtaaggcccgggggcctggrctggaaggaggaagaggaatggggcttgagatgagggacggtcacaggatggtgatgtctcctccactgcttcccttctgtcctccgcacagcctgtggg

SEQ ID NO: 387608 - DNA, 201 bp, Homo sapiens
cccgggggcctgggctggaaggaggaagaggaatggggcttgagatgagggacggtcacaggatggtgatgtctcctccactgcttcccttctgtcctccrcacagcctgtgggaatgtgtcgggaggcgcagaagatgagggcgaggccgaagctggctggatcgagggggctgccatcctgctgtccgtcatctgtgtg

SEQ ID NO: 387609 - DNA, 201 bp, Homo sapiens
ttgcttagagatgatgaaaattttcttagagatgatgaaaattttctggaattggagactggtgatggtcgtgcagctctgtgactatactaaaaaccatygaattatctactttaaatgggtggactgtgtggtgcgtgaattatatcccaataaagctattagaacaaagtaagggagagtgcacagcgtcacctccaa

SEQ ID NO: 387610 - DNA, 201 bp, Homo sapiens
gacgcaggtaagccccgactcgctctcgccctggcacttccaccccaagagggtagaggcaagctggccagcagcagccgagagccggccgtctgcacccracacccacagggaaaccctttggtcttgctgccaaggtcacaaaagcagctgccagtgtcccctttgccattccgggctgtgcccgctgatggctgtggc

SEQ ID NO: 387611 - DNA, 201 bp, Homo sapiens
tgcctgccccggtagaaggtggctgagtgggtgtccaggcccggatgccagtcacgcacgtaagcttccagtaccttcaggccaaggaagactgagaagtragcgtcctcaaggatgacaagtgacagaattggatagggacaggtggctctgattgtgaaggcaaagccaatttgggggcttctgagtggctttgggtgt

SEQ ID NO: 387612 - DNA, 201 bp, Homo sapiens
cgccccacccacagcgctctcccagaactctgccaggtgcagcgctcactgccagggccaggaccacctcctccctggagccatccctgctggtgtggggractcagccctctttctgtgcttcttttttggtgggcactgagggacactgaggcactgcggacaaaaggcccagcccagcttcactcccccttactccca

SEQ ID NO: 387613 - DNA, 201 bp, Homo sapiens
gccccacccacagcgctctcccagaactctgccaggtgcagcgctcactgccagggccaggaccacctcctccctggagccatccctgctggtgtggggamctcagccctctttctgtgcttcttttttggtgggcactgagggacactgaggcactgcggacaaaaggcccagcccagcttcactcccccttactcccat

SEQ ID NO: 387614 - DNA, 201 bp, Homo sapiens
tctgattctattgtcgtggtaaaagaggccgaacgtaaaattcaccatttcaaccactttacagtgtacagttgaatggcattaagcacgttcacaatatyatgcaaccgtcaccactacccagttccaaaacacctccatcaacccggaaagaaaccccaggcccatgagcagccctccccacgcccctccccagcctca

SEQ ID NO: 387615 - DNA, 201 bp, Homo sapiens
tgaggcctgcccagccctggttgctgcggtctgccatgaagcggggacccccaggagccaggcccagccccagattccaggagccacagcattctctggcrctgcgtgcctggcagggctgctggggctatcccagcctagtgccaggcctgttccccagccagtgcgggctgatttgatctgctgcccatctgggcaacg

SEQ ID NO: 387616 - DNA, 201 bp, Homo sapiens
caggggaagctcacaaagctagccgtgcagatcgggaaagcaggtagggacagcaggaggtggtgggcccaggccattgactgggcgtggaggatgctggsctcctggagatgagcccaggctgtgtagagcaggtgggaagggatgtggcaggtgatgtgtgggccaggcaggcaagggcacaggccaggccggcagtgg

SEQ ID NO: 387617 - DNA, 201 bp, Homo sapiens
agggtcttgtgtgccttcccagacccactgtgagtgccccatgggctggggctgggctctctggtcatcccgtccctgcagcagatggcaggcgtgagccyagctgcccagggctgggagctgcaagctgctgtctgtccaccaggtgtcagtgtgggtctggtcacggccgcgacagcactgggcgccgggtgagcgccc

SEQ ID NO: 387618 - DNA, 201 bp, Homo sapiens
tgtgacaagcaagcgagtgggatgtgctgggcggaaggggactgggcaggctgagaagaaggaggagtcctttccacagcgcgtcaaaggctgaagtggcrtacatcctcattttggccggtgcagggggagtctgaacactcaagctgccttcttccacgaagccctggcccgtttcaagacacccaggtgaacctggtg

SEQ ID NO: 387619 - DNA, 201 bp, Homo sapiens
atctgattacaaaaagacaatcaaaattcttggtagaatcatatatatgtgtgtgtgtgtgtgtgtgtgtatatatatatatatatatatatatatatatwttttttttttttttttaagtaatcctttctttcccacccactggcagctgccaaacatacacacgtgactttccagtatgtgtgtgaggaggtttctctc

SEQ ID NO: 387620 - DNA, 201 bp, Homo sapiens
tgatatgggtgtaaagtcttaatgaaggagggaaaagtgactgaagaggtagacagttgagaaatagttggtaaaaggtgatagtgttgatttgagctcargtgaacaagcatttttataaggggctagaggaagaatggtccagaaatggctttgaggaatgatgaaaacaccaacatcaatactggactcttaaggtgt

SEQ ID NO: 387621 - DNA, 201 bp, Homo sapiens
ccaggctgtttttgaactcctgtgttcaagcgatcctcttgcctcggccttccaaagtcaaagtgctgggattataaacatgagccaccatgcccaatcarctttttcttttctttttttttgagacagagcctcactctgtcgccgaagctagagtgctgtggcacaatctcggctcactgcaacctcatgcctcagcgt

SEQ ID NO: 387622 - DNA, 201 bp, Homo sapiens
tcagagaggctttttctgtaaagacaacagcatcaactatccgtaccatgacagtaccgtcacatccactgtcctcatcctagtgggggttggcttgcccrtttcctctgtaagtaaattaataagtaggtagtgatgggtttgttgtgctggaggttggatgaagcatggagttggggcgggggtaaatccacagtactg

SEQ ID NO: 387623 - DNA, 201 bp, Homo sapiens
cttttctttcgaacattcagaattttttgtacctcagtttattctctgctataattatgtactgtgccttattcaatttgtattcctggtagcacctagcrgaattccttgcacagtgggtttacttagtatttgcccacatgaatatttttattttttaaaatgggctattatcctttgtatggggttttattttgttcc

SEQ ID NO: 387624 - DNA, 201 bp, Homo sapiens
gttttggactcgaatcctattatatgtgaattttctttctttctttctttctttttttttttttaagacagagtgtcactctgtcacccaggctggagtgscatggcacaatctcggctcactgcaacctctacctcctgggttcaagtgattctcctgcctcagcctcctaagtagccgggactacaggtgcatgccacc

SEQ ID NO: 387625 - DNA, 201 bp, Homo sapiens
tgcaacctctacctcctgggttcaagtgattctcctgcctcagcctcctaagtagccgggactacaggtgcatgccaccacacctgtgaatttaatttctwtactaaatatactattccaaaagaaagaaatgtttattggaaaatgcaaccaattcagaaatatgctttgtagacagtgaaagtttcaattattttgtat

SEQ ID NO: 387626 - DNA, 201 bp, Homo sapiens
gagtgagaccctctctcaaacacacagacacacacacacagatttttttttttaattaaaaaatatatatagttgtatccaggagataggccaaagatgayagcatgtatatcatgtctgtttttggagtttattttaaaaaaagaaaagcttcttaatttagaaatgtcttaagaatgatcgtaataccttattagcatt

SEQ ID NO: 387627 - DNA, 201 bp, Homo sapiens
tcccgcctcagtttcccaagtagctggggattataggtgcctaccaccactcctggctaattttttgtatttttagtagagatggggtttcaccatattgkccaggctggtctcgaactcctgacctcaagagattcacctgcctcggcctcccaaagtgctgggattacaggagtgagccacggtgcccggccttaactg

SEQ ID NO: 387628 - DNA, 201 bp, Homo sapiens
ttcaggcccttaacatctctcatatacactggtatttcttgcctctggccttgccgtctattctgtcttcacactgcttttttctttacacagctcttttyacagccccctcagttagagtacagattggattgtgtgtctccctgctacccacagaataaaacttcaaatgtgatgattttggtcttttgttttattata

SEQ ID NO: 387629 - DNA, 201 bp, Homo sapiens
ggaatttacagaattctctttcttaggcatgtatctgattacaaaaagacaatcaaaattcttggtagaatcatatatatgtgtgtgtgtgtgtgtgtgtrtatatatatatatatatatatatatatatatattttttttttttttttaagtaatcctttctttcccacccactggcagctgccaaacatacacacgtga

SEQ ID NO: 387630 - DNA, 201 bp, Homo sapiens
cataattaataaaagaaaacctttgtatatagatatttgttttataagactgtgagctccttgaaggcagagatgatatcttgttcatctttgtgtccacygcctggcatggagcccagcatgtcctaggtgcctgaatgaaactgtatgaaggaaactatagagtaattacgcagtaatgttggtgactctcccaaagta

SEQ ID NO: 387631 - DNA, 201 bp, Homo sapiens
aatttgtggtgcataattaataaaagaaaacctttgtatatagatatttgttttataagactgtgagctccttgaaggcagagatgatatcttgttcatcyttgtgtccaccgcctggcatggagcccagcatgtcctaggtgcctgaatgaaactgtatgaaggaaactatagagtaattacgcagtaatgttggtgact

SEQ ID NO: 387632 - DNA, 201 bp, Homo sapiens
cgcttgaacccgggaggcggaggttgcagtgagccaagattgcaccactgcactccagtctgggcaatacagtgagactctgtctcaaaaaaaaaaaaaaagcatttgggctactccttgggatttattaaaccacccatacagatatttagtctatttgtgaattctggtcataataagatatccttaagagctgtatct

SEQ ID NO: 387633 - DNA, 201 bp, Homo sapiens
gaacccaggaggcggaggttgcagtgagctcagattgggccactgaactccagcctgggtgacagagtgagactctgtctcaaaaaaaaaaaaaaaaaaaagagtgaatgcaaaataaagatatttcaaatgaaaacagctaaagatgtatctgttttgtgctttttaactttggagagtagggaggaggaaaggaagaaa

SEQ ID NO: 387634 - DNA, 201 bp, Homo sapiens
tgaacccaggaggcggaggttgcagtgagctcagattgggccactgaactccagcctgggtgacagagtgagactctgtctcaaaaaaaaaaaaaaaaaaaagagtgaatgcaaaataaagatatttcaaatgaaaacagctaaagatgtatctgttttgtgctttttaactttggagagtagggaggaggaaaggaagaa

SEQ ID NO: 387635 - DNA, 201 bp, Homo sapiens
tttcctgttccccccgttatttctttgtttcaggcccttaacatctctcatatacactggtatttcttgcctctggccttgccgtctattctgtcttcacrctgcttttttctttacacagctcttttcacagccccctcagttagagtacagattggattgtgtgtctccctgctacccacagaataaaacttcaaatgt

SEQ ID NO: 387636 - DNA, 201 bp, Homo sapiens
ggctatatacttgcaatattagaacatccagttatctaggactgccattattaatgccaatgagaataccattcctctaagattttctggggaaaaaaaaagctaatgagcccaggtagttcacatctgtagctcccttcccaggccaagattctctttagatccatggcccttaaattttaatggttcattagagttatc

SEQ ID NO: 387637 - DNA, 201 bp, Homo sapiens
taatcttttctctcagccagcaaatttaagaaagtcattgtggtgatgagtgtacctaaagtctagaaaatgtcattgtaaatgattttttttttttttttgagacagagtctcgctgtgtcacccaggctggagtgcagtggcgtgatcttggctcactgcaacctctgcctcccgggttcaagcgattctcctgcctca

SEQ ID NO: 387638 - DNA, 201 bp, Homo sapiens
tttgctgagaatgatggtttccagcttcatgcgtgtccctgcaaaagacatgaactcattcttttttatggctgctttctttttctttttcttttttttttgagatggagtctcgctgtatcccccaggctggagtgcagtggcacgatcttggctctctgcaagcttcgcctcccgggttcacgccattctcctgcctga

SEQ ID NO: 387639 - DNA, 201 bp, Homo sapiens
tctgttttcatgctgccgataaagacatacccaaggctgggcagtttacacaagaaagaggtttaattggactcccagttccccgtggcttaggaggcctyacaagcatggcggaaggcaagaaggagcaagttacatcttacgtggatggcggcaggcagagagagcttgtgcagggaaactccaccttataaagccatc

SEQ ID NO: 387640 - DNA, 201 bp, Homo sapiens
agaattgcttgaacctgggaggcggaagttgcagtgagccaagatcgtgtcactgcactccagcctgggtgacacagtgagactcggtcaaaaaaaaaaaatgctagagatttttgtatgttgattttatatcctttaactttactgagtggccgggcgcggtggctcaggcctgtaatcccagcactttgggaggccgag

SEQ ID NO: 387641 - DNA, 201 bp, Homo sapiens
ggctataggatcagttgagctcaggagttcaagatcagcctgggcaacatagctagacctcgtctctactaaaaaacaaacaaacaaaaaacaaaaaaaamcccccaaaaaaaccaacaaaccagcttggcatggtggtgcgtgcctgtggtcccagctgctcaagaagctgaagcgggaggatagcttgagcccaggaga

SEQ ID NO: 387642 - DNA, 201 bp, Homo sapiens
aaaaatcctgtcccaccccttgggaccccagcagaggtcacctggaaggctaaatccctgccctctgtatcctctagcaatcctccctgaaatgattttaytctttttaatatgatggatgtctttgattcaaaggaatatttgagaaaaatgaagcctctgtcagataaaagtacttatacacaggagtttctgattggg

SEQ ID NO: 387643 - DNA, 201 bp, Homo sapiens
ttaccatgttggccaggctggtctcgaactcctgaccttgggtgatccacctccctcgggctcccaaagtgctgggattacaggcatgagccaccacaccyggctggaagtttgttttttggacaagccatagtttttgtcctccaggatatatcactgtctactttttaaagctctgtttatttgaatacaagaaaaaaa

SEQ ID NO: 387644 - DNA, 201 bp, Homo sapiens
atatataatttttttttttttacatttttatattattattttgtagagactaagtctcactatgttgcttaggctggtgtcaaactcctgggctcaagtgrtccttccactttggcctcccaaagtgctggggtaacaggcatgagccaccacacccagccaatagtaaatattttaggctctctgggccatatagtctct

SEQ ID NO: 387645 - DNA, 201 bp, Homo sapiens
ttttggtttcagattagctttgcccagtgggagggacatcagaaaggatctccctaaaagctagttccctcttgctggatttagtgttgccaaagctgttctgtgagtagttcacaacttgtattcaataatggccctctctgccagccatctatagttacacatctttctgggttctaataacccttccctagccccttt

SEQ ID NO: 387646 - DNA, 201 bp, Homo sapiens
ggagcaagttacatcttacgtggatggcggcaggcagagagagcttgtgcagggaaactccaccttataaagccatcagatctcgtgagacttactatcayaagaacagcatgggaaagacctgcccccatgattcagttacctcccactgggtccctcccacaacatgtgggaattcaagatgagatttgggtggggaca

SEQ ID NO: 387647 - DNA, 201 bp, Homo sapiens
gctctttggcctcagaattttcagtagccagtatttctgattaactaagttgaaactcttattagaaactttcagttggtattactgtattctagaagatrtaaatgagaggtttggcttcatctcagtttagaaatttattcaaagctaaagatgtatatgtatatatatatacttttgtgtgtatatatacacgtatgt

SEQ ID NO: 387648 - DNA, 201 bp, Homo sapiens
tattgtatatttttattggaaacacaacatgcggtatttataaatacatatatatgttaaaacattttaactgcaagatgtgagaacagggcccgattcaytgctgggttctgggcatgagtttgtaggtagggagctgtgtttatactcggagtagtggcacttttagccaagaaactcttggggaaactattaggaaga

SEQ ID NO: 387649 - DNA, 201 bp, Homo sapiens
acaataaagttagtattaaatctcaaatccatatgttgcaatgaataatatactttgtctaaatttaaaaatttgtagtttcaggatagaaaacttacctrtgtttaataggctattttaaatcgacttgagtactgactgtaagtagttgcttttcttaagtgatgattactgtatggcataaccttttagcaaaaatac

SEQ ID NO: 387650 - DNA, 201 bp, Homo sapiens
ggaatagcaacatatgaaatgaagaaggggatgatttaaaaagatccttcactttgtgagaggatattattattgtatttaacaggaatgtgacttaaagrtcagtacctctttccagcttccctgttcttaatgtcagtacctgacaatttaggcttgtaggcaaaaagcagtgctacttagtctccagggaatatgtga

SEQ ID NO: 387651 - DNA, 201 bp, Homo sapiens
taatctatcttgaattactcacttttaggtttcagctccctactgagaccccaactggctttaccttctgttccctcctggttctgcttatcttccattgmccctgtggacctgctttctgtcattgccttccctgccctcagtctcaggagcctgagactggcttctagatgggtttggacaatggatagcactggcagg

SEQ ID NO: 387652 - DNA, 201 bp, Homo sapiens
tccgcccgccttggcctcctgaagtgctgggattacaggactgagccactgcgctgggccaaaatactaaaatattaatatggatggaaaaaagcaatcarcttctgagtgttcccaaggaggtatgacattattcagggactaatcctgcaagtggaaaataaaacttaaatcatggtcacataagtgtgtatgtaataa

SEQ ID NO: 387653 - DNA, 201 bp, Homo sapiens
gccttagaccttgaaaatataatgaggaagttttctggtagctgcagatgctgtgcaaaacagattaaattctatcgcatgagacttcattgcaaatcttstaagaagtatcaggatgaatatgatgtttcttctatcattccaaactttcagatctctgaagattcagtagggaacagcaataggagtgaaacatccaca

SEQ ID NO: 387654 - DNA, 201 bp, Homo sapiens
aaactatttggtgaatcagaggatagtctgaattgggatatgaaggccagtataagtgtcagttagcaaagtcagctctagtttagtttttttttttttttcttttaaggcgtagcattactagaagtatagctttgggaaccttgtagcatcttaaagacttttaaagggttgacagctattggcaaattgactaataca

SEQ ID NO: 387655 - DNA, 201 bp, Homo sapiens
atgttttctctgagaataaggacacacagcctagtgagttttggactcgaatcctattatatgtgaattttctttctttctttctttctttttttttttttaagacagagtgtcactctgtcacccaggctggagtgccatggcacaatctcggctcactgcaacctctacctcctgggttcaagtgattctcctgcctca

SEQ ID NO: 387656 - DNA, 201 bp, Homo sapiens
catttgaaaagtttgggatttgataatgttttggaagatgagggagattatttactatatatatgtggattttctgaagttctttgtttttggtacattgwttgaaaaaataatatttttttagagaagctgcccacaaagcaggtaactgaggtataatttttattattttgaatagcttacttaaatggtaataagaaa

SEQ ID NO: 387657 - DNA, 201 bp, Homo sapiens
ttataaagtagaaagagaaaataaatagcccttagttctactacctgaagacaactactggtagcattttgatgtttcctttagtttgacacatttttttkttgttgttgttgtttgtttgttttttatttttatttttttgagatggagtctcactctgttgcctgggctggagtgcagtggcacagtctcgacttagtg

SEQ ID NO: 387658 - DNA, 201 bp, Homo sapiens
ctgcctcagccttccaagtagttgggactacagccactacgcccagctaattttttgtatttttagtatagatggggtttcactgtgttagccaggatggkcttgatctcctgaccttgtgatccacccgcctcggcttcccaaagtgctgggattagaaacatgagccacctcacccagccacccagctaatttttaaaa

SEQ ID NO: 387659 - DNA, 201 bp, Homo sapiens
ctcgaattcttgggctcaagtgatccttctgcctgagcttcccaaatgtctggactataggtgtgtgccactatgaccagctattttttttttttttttttgagatggagtctcgctctgtcgcccaggctggagtacagtggcgcgatctcagctcactgcaatctctgcctcccaggttcaagtgattctcctgcctca

SEQ ID NO: 387660 - DNA, 201 bp, Homo sapiens
aggtggtaattagggaaagggaaaaatggaaattatattttgcagatacaacaaaggctgaagaggtgtgtgtgtgtgtgtgtgttttagatacacacacatctatatgtacacagagacacgatccacagttgtgtaggaataacttcctaaacatctttaggatctacctctttttcctgttcccactgttatttcttt

SEQ ID NO: 387661 - DNA, 201 bp, Homo sapiens
taggtggtaattagggaaagggaaaaatggaaattatattttgcagatacaacaaaggctgaagaggtgtgtgtgtgtgtgtgtgttttagatacacacacatctatatgtacacagagacacgatccacagttgtgtaggaataacttcctaaacatctttaggatctacctctttttcctgttcccactgttatttctt

SEQ ID NO: 387662 - DNA, 201 bp, Homo sapiens
ttaggtggtaattagggaaagggaaaaatggaaattatattttgcagatacaacaaaggctgaagaggtgtgtgtgtgtgtgtgtgttttagatacacacacatctatatgtacacagagacacgatccacagttgtgtaggaataacttcctaaacatctttaggatctacctctttttcctgttcccactgttatttct

SEQ ID NO: 387663 - DNA, 201 bp, Homo sapiens
attaggtggtaattagggaaagggaaaaatggaaattatattttgcagatacaacaaaggctgaagaggtgtgtgtgtgtgtgtgtgttttagatacacacacatctatatgtacacagagacacgatccacagttgtgtaggaataacttcctaaacatctttaggatctacctctttttcctgttcccactgttatttc

SEQ ID NO: 387664 - DNA, 201 bp, Homo sapiens
gagaaaaatttatttctttcatgggcatttggtaatttcagtctttgactgatttgtaagcctagaatatactaagctgaatagcagctctttggcctcagaattttcagtagccagtatttctgattaactaagttgaaactcttattagaaactttcagttggtattactgtattctagaagatataaatgagaggttt

SEQ ID NO: 387665 - DNA, 201 bp, Homo sapiens
gttacctggaattactcgtagctgctgctgcttttttttttcttttccaacttgatatagggcagtaggaacccaagtaagtaccaatgtttatgacttayttgcgggcagtcccacaatatctagaagatttagctggaactgacaaaactttgattccttatacctgtgttttgctgtttttgacaatcatttagaata

SEQ ID NO: 387666 - DNA, 201 bp, Homo sapiens
tgtgacatatgttaaactcaaattgtttttaaaattgtgtgagcacaatgttgttttaaagtatttgacattgcatcattttttatttatttattaagcasacattatttgctgtaatacaatgctaggagctgcaaataccagtgcaaaaaagatcagctctccataccagtgtatataagacaattacagatgtttgta

SEQ ID NO: 387667 - DNA, 201 bp, Homo sapiens
ttagtgctctctaggcttggtacagccagtgcagtctctcgacaactctcttaggagcttggtcatctgcattctgtagatgacggaagtgagggctgggraagttgggaaactcacccaaggcaacctggctaacaatggtatagtcaggaattgggaagtgcatttttgaggattataacttttgaatgcagattaact

SEQ ID NO: 387668 - DNA, 201 bp, Homo sapiens
gaatttttcattatgttgcttttgaaatttggtacattcctcccatttactttattattgtacacattaaacacacagtagcaaattttgaacgatgtgadataatctaacaaatctgagccagttattagagttgcagaatagaaacttgaagtgctaaatggaaaaatccaaaggaaattttttaaatgcagattctag

SEQ ID NO: 387669 - DNA, 201 bp, Homo sapiens
tcatataaatggaatgtcatataatgtcatataaatggaatcataaaggctatatagtatgtagccatttgagtctagtctctttcacatagcataatgcrtttttgattatgccaagtactgtgatgtaaatgttactgtacagttttgctgtaggtttttgtccctttctaaatgtgcttatatcacttctaaccctag

SEQ ID NO: 387670 - DNA, 201 bp, Homo sapiens
ttgcctctggccttgccgtctattctgtcttcacactgcttttttctttacacagctcttttcacagccccctcagttagagtacagattggattgtgtgtctccctgctacccacagaataaaacttcaaatgtgatgattttggtcttttgttttattataaaatattcaaacatggaagtatatacagtagaaaataa

SEQ ID NO: 387671 - DNA, 201 bp, Homo sapiens
cttgcctctggccttgccgtctattctgtcttcacactgcttttttctttacacagctcttttcacagccccctcagttagagtacagattggattgtgtgtctccctgctacccacagaataaaacttcaaatgtgatgattttggtcttttgttttattataaaatattcaaacatggaagtatatacagtagaaaata

SEQ ID NO: 387672 - DNA, 201 bp, Homo sapiens
ttcaggtaagttataggcataatttcaagaaacaaaaaatgtttttattgtgatagagcatctcaaacacctttagaatctacctctttttcctgttcccyccgttatttctttgtttcaggcccttaacatctctcatatacactggtatttcttgcctctggccttgccgtctattctgtcttcacactgcttttttct

SEQ ID NO: 387673 - DNA, 201 bp, Homo sapiens; identical to SEQ ID NO: 85181

SEQ ID NO: 387674 - DNA, 201 bp, Homo sapiens
gtacgcgccgccgggtccgaggggcgtgtgcggctgtcccgggagggctttagcgcagagccgcgacgggcagcgggggtgtgttgcctgacgcgtgcgcmgctgtggggcgacacacgggggcggcttctgcagccgagggaccccgctttgcagcctgcaccccggctcccgcgtgcccgccgctgtctgtcgcccgcc

SEQ ID NO: 387675 - DNA, 201 bp, Homo sapiens
tgggaaactgacatggaaagattgcttgagcccaggagtttgaggctgcagtgagtatgactacaccaccactgcactccagtctgggcaacagagcaacrccccatttctttaaggaaaacaataaaaaaaccaatggcagcactggtcttgactatgagaattataacccaaattgcaaggggaggaactgtccctgaa

SEQ ID NO: 387676 - DNA, 201 bp, Homo sapiens
catggaattaatgtgctcagcatcagtgtcctcacctgtcctaataaattagccagtagcaaaaggtgaaacagatgatctgcaaatctgtaagtttcatrctgagaagtagttgatgtgtgcccttactttgggacgtttcctgaagtggttttctggaacacagcttctgtgtaatcacagcaggtaactaatctgaag

SEQ ID NO: 387677 - DNA, 201 bp, Homo sapiens
gtgcccagagagctgggaatggatttgtgtcatctattttaaataggcagtgtccatggggagagctatgtatattgttttctaaggactgcatttaattwagtctacgagtcatatattattgaacagaattttaaagggaatgttataaattatattgttattggatagaaattaggtagttttctttttctttttttt

SEQ ID NO: 387678 - DNA, 201 bp, Homo sapiens
tcaatatgagtttgcaggctatctacagtgaaagtcagggttctttagaatggaaatattgctacagggattttagaatcttaaaagaggaaagaccttgragtcctagctctgagtttccttcaggttggaagtagcatgggactagcttaagtccattctagagttgctatttttgatttgactacttacttttttcac

SEQ ID NO: 387679 - DNA, 201 bp, Homo sapiens
agtaaatgttaattcttttcactggcatgttggggaagaaatctggagaaaataatattcaatatgagtttgcaggctatctacagtgaaagtcagggttstttagaatggaaatattgctacagggattttagaatcttaaaagaggaaagaccttgaagtcctagctctgagtttccttcaggttggaagtagcatggg

SEQ ID NO: 387680 - DNA, 201 bp, Homo sapiens
catgtcctaattgtccccctgccgtacccttctaatttctcaaagtagagggaggcagttgtgtacactctgaaactaaggagcagatttatgaaatcaasaatacttttggctcctaagagagaaaagtaacatttgtcttctttttcttccaggttgtccttctattcaggccactcttcgttttccatgtactgcatg

SEQ ID NO: 387681 - DNA, 201 bp, Homo sapiens
gccgggcagcccgggcagagaccatgtttgacaagacgcggctgccgtacgtggccctcgatgtgctctgcgtgttgctgggtacgtacgcgccgccgggyccgaggggcgtgtgcggctgtcccgggagggctttagcgcagagccgcgacgggcagcgggggtgtgttgcctgacgcgtgcgccgctgtggggcgacac

SEQ ID NO: 387682 - DNA, 201 bp, Homo sapiens
ctagccagattaccagaaatttcgttagtcatctaaatcagagacatcagtttgattatggagaatttgtgaatcttcagctagatgaagaaactcaatgycaaactgctgttgaagaatcatttcaagtaaacatctgaaggctgtagacatctctgcatctttgtacctgcaagtgccatctttaagggggaaactaca

SEQ ID NO: 387683 - DNA, 201 bp, Homo sapiens
cctagccagattaccagaaatttcgttagtcatctaaatcagagacatcagtttgattatggagaatttgtgaatcttcagctagatgaagaaactcaatrtcaaactgctgttgaagaatcatttcaagtaaacatctgaaggctgtagacatctctgcatctttgtacctgcaagtgccatctttaagggggaaactac

SEQ ID NO: 387684 - DNA, 201 bp, Homo sapiens
gagatcctagccagattaccagaaatttcgttagtcatctaaatcagagacatcagtttgattatggagaatttgtgaatcttcagctagatgaagaaacycaatgtcaaactgctgttgaagaatcatttcaagtaaacatctgaaggctgtagacatctctgcatctttgtacctgcaagtgccatctttaagggggaa

SEQ ID NO: 387685 - DNA, 201 bp, Homo sapiens
agatagttcctgtgacatgtcctatttgtgtatctcttccttggggagatcctagccagattaccagaaatttcgttagtcatctaaatcagagacatcartttgattatggagaatttgtgaatcttcagctagatgaagaaactcaatgtcaaactgctgttgaagaatcatttcaagtaaacatctgaaggctgtaga

SEQ ID NO: 387686 - DNA, 201 bp, Homo sapiens
aaatccatatgttgcaatgaataatatactttgtctaaatttaaaaatttgtagtttcaggatagaaaacttacctatgtttaataggctattttaaatcracttgagtactgactgtaagtagttgcttttcttaagtgatgattactgtatggcataaccttttagcaaaaatacttagcctaaaataacagtatagcc

SEQ ID NO: 387687 - DNA, 201 bp, Homo sapiens
tggcaaatggcatgtatggggaggagagaagagtggaatctgcaaaggaaggaacctatacagcctttttactattagccttggcgctgaagcatgagctrtgtcccctgtatctagttctaatagaacagtattgagaagcttcagacattcaacttttcagtggcatttagggaaagctaaagtaatagactttctttt

SEQ ID NO: 387688 - DNA, 201 bp, Homo sapiens
agcttttgcttcctcctaactttagtttgcaaataacctattatgtacccattaggcatccttcctactacttttgaaattagagaacgccttcatacttytggtataaattccagagacaaaatacagcccagcagatctctgggtgatgcctggtgtaagtcatctagtcagtgcagggagatgtgggtatgcaaggag

SEQ ID NO: 387689 - DNA, 201 bp, Homo sapiens
tcaacagcctacatcttgatattgctaaacatttagataagtaaatagaaaaaaaaaaatccaaaaaatccccagctgaggagaagactatgcagtgggcragaatctcaatgttattaaaagtcacttcaggatacacaccaggttaaaaactaggttgctctttctaaaacttagtatttttgtaaaatcttagtattt

SEQ ID NO: 387690 - DNA, 201 bp, Homo sapiens
ggtatgagtctgtattttctttcaatacagtgaggagtgttaaaatacttttcctgagacccttctattgaggctgtaaccccagattgtttatatcaccrcctgttatgaaattcctgtatctatgcttcagccagactctcctcctgccacaaaatgcctcttatctgggccttgcccctgccctgtgtttagacagtg

SEQ ID NO: 387691 - DNA, 201 bp, Homo sapiens
ccacctagaaggggaattaaaagtaataatgttgctgccgagcctgtctggtaccacacactgtattggacatacagctctgttaagttcctactcttaaragagaagtaactaactgaatgccttacctagaatgggtttaatagataaggttggcaaatggcatgtatggggaggagagaagagtggaatctgcaaagg

SEQ ID NO: 387692 - DNA, 201 bp, Homo sapiens
ctattatgtacccattaggcatccttcctactacttttgaaattagagaacgccttcatacttctggtataaattccagagacaaaatacagcccagcagrtctctgggtgatgcctggtgtaagtcatctagtcagtgcagggagatgtgggtatgcaaggagaaggcagggctatgtggtccaaataggactgactgtg

SEQ ID NO: 387693 - DNA, 201 bp, Homo sapiens
gggcgacacacgggggcggcttctgcagccgagggaccccgctttgcagcctgcaccccggctcccgcgtgcccgccgctgtctgtcgcccgccggtgcgmtgagcccagccctgcttggacgctgttcacgcctctgcgctccatgccttgctcctgtcctctgtttgcagttccactctagcagagcagggtgggctcc

SEQ ID NO: 387694 - DNA, 201 bp, Homo sapiens
agtagggcaatagttttgtttctttaaaggattaacatttaggtaataatgcgtacgtgaatgtttgcctagaagtcctgttccctatataataatacttkgataatcatttcaaatgccaacccttccttaatataaaagttttgcgttatgttaaataaactatttttttctttattcttttcttttagctttatcttc

SEQ ID NO: 387695 - DNA, 201 bp, Homo sapiens
gagatgtggatatgcaggggctgttgggcctcagggaatgatgcagtctgctgggggtggggctctcaaaatggtgccctgctgtagctgcttaggactcrgggggatgagctccctctctggagcagtgccatcatgcagtccccaagttccctgtttgtgtgggttgagggtttcttccatggctgggattgcaggact

SEQ ID NO: 387696 - DNA, 201 bp, Homo sapiens
cagcctgcaccccggctcccgcgtgcccgccgctgtctgtcgcccgccggtgcgatgagcccagccctgcttggacgctgttcacgcctctgcgctccatrccttgctcctgtcctctgtttgcagttccactctagcagagcagggtgggctcctcccctctgtacggtagaggagcctggtcactggcccatctcagta

SEQ ID NO: 387697 - DNA, 201 bp, Homo sapiens
caaccctctgattcccaagtggtttgcgctggtggtggtggtgaccgtgatgggctgggtggctagtccccaggcccataggtggtgcatgtgggtggtgrtagcagcaggttggatggtcccttcctgaggcccctgggaggagtgctcaggtgttaatgataggtgcaccctccaacgcccgatggtgtgcttgggcat

SEQ ID NO: 387698 - DNA, 201 bp, Homo sapiens
ggagaagactatgcagtgggcaagaatctcaatgttattaaaagtcacttcaggatacacaccaggttaaaaactaggttgctctttctaaaacttagtakttttgtaaaatcttagtatttttattgtgaaaggctctggctagaaatagtttttttaggggattatgacttgaaaaaactaattcacatgtagaaataa

SEQ ID NO: 387699 - DNA, 201 bp, Homo sapiens
  misc_feature (1)...(201): n = A,T,C or G
gagcgatgtgttgactggactcattcagggagctctggttgcaatattagttgtaagtatacaggtcaacagcctacatcttgatattgctaaacatttanataagtaaatagaaaaaaaaaaatccaaaaaatccccagctgaggagaagactatgcagtgggcaagaatctcaatgttattaaaagtcacttcaggata

SEQ ID NO: 387700 - DNA, 201 bp, Homo sapiens
ttctactatcttgagttgcattgttagattatttacttgaaatctttctagatttttgatgtgggcgtttattggtattaatttacctcctagcattgttkttgggtttcggtatgtcctgcctctattttcatttgtttcaagaaatttttttattcctttcttaatttattccctgacccagtggtcattcaggagcat

SEQ ID NO: 387701 - DNA, 201 bp, Homo sapiens
tgattggagatagatgttcttttgtatttctgtgttatcagttgtaatgtctttttcatttctgaatttatttgggttttctttttctcttgtcgatttcrtttatcctttcataaaagcaactttttttgttgatcctttgtacttttaagagttcattttgttaagttctgctctgctctttagtatttttcttccacc

SEQ ID NO: 387702 - DNA, 201 bp, Homo sapiens
tgcaataccaggttgaatgaagtggtgagagcagattgcttgtcttcttcctgaccttaggaaagaagcactcagcctttcacaaatatgtcaactgtgtrtggtttttttttttgtagatgctttttgttagatttttatcatgaatgggtattggattttgtgacatgctttttctgtgtttgttaagatggctatatt

SEQ ID NO: 387703 - DNA, 201 bp, Homo sapiens
ctgcaataccaggttgaatgaagtggtgagagcagattgcttgtcttcttcctgaccttaggaaagaagcactcagcctttcacaaatatgtcaactgtgygtggtttttttttttgtagatgctttttgttagatttttatcatgaatgggtattggattttgtgacatgctttttctgtgtttgttaagatggctatat

SEQ ID NO: 387704 - DNA, 201 bp, Homo sapiens
tttgttaatctctttctcatttagtcatttttggctgagctctaccaaactttccaatgtgttactcagtttggggaattattctgattcttttggttaaraaatttaaggttaaaattgtcaatgtttgcctatttttttttttaaaaaaagaagttggcagcaaaagtcactaaactcccagattttgagtgaactgat

SEQ ID NO: 387705 - DNA, 201 bp, Homo sapiens
ccaggctggagtgcagtaggacactgtctgctcactgcaacctccgcctcctgggttcaagcaattctctgcctcagcctaagttgctgggattacaggcrcctggtaccacacccggctaatttttgtattattagtagagacggggtttcaccatcttggccagcctggtcttaaactcctgacctcctgatccaccca

SEQ ID NO: 387706 - DNA, 201 bp, Homo sapiens
cccggtgtgtgatgtttccctccctctgtccatgtgttctcattgttcaactcccacttaggaatgagaacatgtgcgtttggttttctgttcctgtgttrgtttgctgagaatgatggtttccagcttcatgcgtgtccctgcaaaagacatgaactcattcttttttatggctgctttctttttctttttctttttttt

SEQ ID NO: 387707 - DNA, 201 bp, Homo sapiens
gctggggttacaggggtgagccaccatgcctggcctgctttgtgttttaacagagtaagaaaatagacttttcctttgctctagtttcaatcttcttaatmtaggtaggactttttcagataaatttatgattaattacaaggaaaaggatagtatggatgatttcaggtaagttataggcataatttcaagaaacaaaaa

SEQ ID NO: 387708 - DNA, 201 bp, Homo sapiens
tgtgggcctttctcgagtttctgattataaacaccactggagcgatgtgttgactggactcattcagggagctctggttgcaatattagttgtaagtatayaggtcaacagcctacatcttgatattgctaaacatttagataagtaaatagaaaaaaaaaaatccaaaaaatccccagctgaggagaagactatgcagtg

SEQ ID NO: 387709 - DNA, 201 bp, Homo sapiens
gttcacatttaggcaaaaatttggcgttttaggaggtgagtataagacatgatctttatagaaaacgctgatgataaaaacagcgctctctgttaggtgcytttatgcttgactccattgtcatcttttcttaagaaactaagctcaggactgggtgcaatggctcatgtctgtaatcccagcactttgggaggctgaggc

SEQ ID NO: 387710 - DNA, 201 bp, Homo sapiens
ggggtgatagaaaatctatattttaaagcagtgatttatttttacaatgcgaggttcataatctttttaagaaatatattatttactgtttcttctttagytatccaaaaaggtgccatattcagaaaactatagatttctgcattatttggcttttacattttttttttttgtttttgggttttaatgatccatattaga

SEQ ID NO: 387711 - DNA, 201 bp, Homo sapiens
actttcttaagatgccagataacatatataatatatataatttttttttttttacatttttatattattattttgtagagactaagtctcactatgttgcytaggctggtgtcaaactcctgggctcaagtgatccttccactttggcctcccaaagtgctggggtaacaggcatgagccaccacacccagccaatagtaa

SEQ ID NO: 387712 - DNA, 201 bp, Homo sapiens
ctaagaaagtgccaaaagaaaaaaaaagatcaaaataactatgttttgagatttcacagtaaatcaaacttcactccttgtcctgtggctcagcagtctaygtagctgactaggctttttagaagtgattggttgtccgttaacctgagtggatctacacatacccatgtaactccttgaatgtggaaagtttgtcttttg

SEQ ID NO: 387713 - DNA, 201 bp, Homo sapiens
cacattgggaggctgaggcaggaggattgcttgaggtcagaagttgcaggttgcagtgagctgtgattgtgccactgcacttccagcctgggcaacagagygagactctgtatctataaaaacaaacaaaaagaagaggcactttaatatttcatatctcagactcccaataactattaagcattagcaatgaggttatat

SEQ ID NO: 387714 - DNA, 201 bp, Homo sapiens
tttttttttttacatttttatattattattttgtagagactaagtctcactatgttgcttaggctggtgtcaaactcctgggctcaagtgatccttccacyttggcctcccaaagtgctggggtaacaggcatgagccaccacacccagccaatagtaaatattttaggctctctgggccatatagtctctttcacaacta

SEQ ID NO: 387715 - DNA, 201 bp, Homo sapiens
cagaaaggtaacttgttaaatagatgactaaatgtaattaaaattcatacttttatacttttttctttttctttttttttttttgagacagaattttgctyttgtccaggctggagtgcaatggcgcgatcttggctcactgcaaccgccagctccctggttcaagtgattctcttgcctcggcctcctgagtagctggga

SEQ ID NO: 387716 - DNA, 201 bp, Homo sapiens
aagagctgttctttttgagccttaggtgggtcagtgaacaacctgtggtttggtctttttcttcatccccttccaggggtctgtatttaggtttagatagytagtgaaaatgaaatggcactgggtaatgacattgattcaatacatcttggctaggcacactggctcacgcctataatcccagcactttgggagactaag

SEQ ID NO: 387717 - DNA, 201 bp, Homo sapiens
ctgcagggagtttgttttgggtggatcagtaaagaggatgcaattggggcctcaacttcttttctcattgaggaaagagtgaggggtgctgctgagagctmagtgcttctacagtagccatatttgaaggtttgcttagaggtaatgctggagcgtacacaaattgccttcaagattccagtagtttgtgatttaaaaatt

SEQ ID NO: 387718 - DNA, 201 bp, Homo sapiens
tcggctgctctcctcctccggctgggaggggccgtagctcggggccgtcgccagccccggcccgggctcgagaatcaagggcctcggccgccgtcccgcasctcagtccatcgcccttgccgggcagcccgggcagagaccatgtttgacaagacgcggctgccgtacgtggccctcgatgtgctctgcgtgttgctgggt

SEQ ID NO: 387719 - DNA, 201 bp, Homo sapiens
agttagtgaaaatgaaatggcactgggtaatgacattgattcaatacatcttggctaggcacactggctcacgcctataatcccagcactttgggagactraggcaggtggatcacctgaggtcaggggtttgagactagcctggccaacatggtgaaaccccatctctactaataatacaaaaaaactagctgggcatgg

SEQ ID NO: 387720 - DNA, 201 bp, Homo sapiens; identical to SEQ ID NO: 85179

SEQ ID NO: 387721 - DNA, 201 bp, Homo sapiens
gagataactaattgtataccaaaatgactgaaatgaagtcagtctgatttccgtaagtttgattgctaaagcagtctccttaaaggtgttaaaatgtgctytcaatccccaccctacacaacatctgtctcccaggctgaagtgcagtggcacaaacatggctcactgtagccttgacctcctatgtttaagcattcctca

SEQ ID NO: 387722 - DNA, 201 bp, Homo sapiens
atatattttgtaattttcaatataattgtctgaaattttaatggttatatggtatttcactgtatgtatttggtagaagtcactttgcccccatttttggrtatttaggttatttgcaattgtgctattatgctgtgtacaacgtccttgtggaaactttggcaaaccttgggttgtccatctcaaactctctcactgtac

SEQ ID NO: 387723 - DNA, 201 bp, Homo sapiens; identical to SEQ ID NO: 85180

SEQ ID NO: 387724 - DNA, 201 bp, Homo sapiens
ttaaaagctcattaaatatatacacaaatttattttaagtgtcttaatgaactaagctactccaaggttgaggatattgtaggcaattactgacgtaaaastacaaatgtaaaaaccatctttggtaagtgtcacttatatcctatatcccaactgctttttctcccttttatcctaattttaaaataaaaaagaaaagat

SEQ ID NO: 387725 - DNA, 201 bp, Homo sapiens
agtttcgacttgtggtattttccttgttcacttttaactattttgtcatttaccttttgacttttcttgacctgtgactcattgactcttaagttttcaawcatagatattttggggagacctttttttttctccgttacagaattgttaagattagagataatatgtgggcaaatatcaggcaaatagtagatactcaat

SEQ ID NO: 387726 - DNA, 201 bp, Homo sapiens
gccatgctagcagaactacaggaatttgctctagcctggagggctgcagtagagcaggacactgattgctgggcactgtgttgatgtgcacggcctacacrgggcctgacaaaatgcttagttagcaaaaactcatgaattatatttcattaacttgaaattcttttctatttcttttcttcttcttcttcttcctcttcc

SEQ ID NO: 387727 - DNA, 201 bp, Homo sapiens
ctcctttttagctcttataatagattgaacagatttgatatttgtggtaaatccactcaggcagagtgacagaggcttggttgtcatttagcctttagggycttagtggagttaatgagaactgcaaatggtcatcaagtcttggtgcttcatggagaagcaacacttttacagtgagtgtgttagcttagtggttatggt

SEQ ID NO: 387728 - DNA, 201 bp, Homo sapiens
aaatgggaagataaaagagctaagaatgaaatgtgatttcatgtgcttctcctttttagctcttataatagattgaacagatttgatatttgtggtaaatmcactcaggcagagtgacagaggcttggttgtcatttagcctttagggtcttagtggagttaatgagaactgcaaatggtcatcaagtcttggtgcttcat

SEQ ID NO: 387729 - DNA, 201 bp, Homo sapiens
atgggctcaagggaatttggggggtaatgaaaatattctaaaactagattgtggtgatgttgcatagctatataaatttaccaaaaccattgaattatatrtatacttagaatggatgaatgttatggtatgtaaattatacctcaatttaaaaaaagggagcatgaaaatgaattttgccagctcaagtaataagaaaca

SEQ ID NO: 387730 - DNA, 201 bp, Homo sapiens
gtaattttcgctaatattagaagagttcccttcacatgtaaaagagtttttaaccagtttcccagatttgctggataccccagcaccaatatttctaactraaactgttagtatttgtattatggttccaagatcctgagcatttgtgcaagaggaagttaaagaagatgtggtgtgaccatgttcttatgttgtcctttc

SEQ ID NO: 387731 - DNA, 201 bp, Homo sapiens
ctggagtgcagtggcaccacctcggctcactgcaacctccgtctcccgagttcaagtgattctcctgcctcagcttcccaagtagctgggattacaggcgygtgccaccacatccgctaatttttgtatttttggtagagatggggtttcaccatcttggcccgcctcggcctcccaaagtattgggattacaggcgttga

SEQ ID NO: 387732 - DNA, 201 bp, Homo sapiens
ttaacttatacttgatgtcattggaactttgttaaactttgtttatattttagtgaaaggagaggaaaatgttcgatcagaaaaaaatatatttctaatayattgaatattatcctatcattgccacatattgtgcactatcagaattacatatcatctttgtcttttcctactgtgggagttcgatcaatttgtaaaaca

SEQ ID NO: 387733 - DNA, 201 bp, Homo sapiens
gaaaaagaatgagaattttgagagataatgtatatttgattcctttctgaaatggaacatagtcttgccatctgtctttggctctttttatgactggttcygtgactatagaacaggccatatacattatctgagcgcatgagaaaagctctacagagaatggtggtaggctggtatgaaaggcgcgatgttgttgtaggg

SEQ ID NO: 387734 - DNA, 201 bp, Homo sapiens
ttcagggagctctggttgcaatattagttgtaagtatacaggtcaacagcctacatcttgatattgctaaacatttagataagtaaatagaaaaaaaaaaatccaaaaaatccccagctgaggagaagactatgcagtgggcaagaatctcaatgttattaaaagtcacttcaggatacacaccaggttaaaaactaggtt

SEQ ID NO: 387735 - DNA, 201 bp, Homo sapiens
gggtcaggcatggtggcgcatgtctgtaatcccagcactttgggaggccaatgcaggcgggttacttgagacgaggagtttgagaccagcctgggcaacayagtgagacccccatctctataaaaaaaaaaaaccaattagctgggctcagtgacatgtacctatagtcccagctacttgggaaactgacatggaaagatt

SEQ ID NO: 387736 - DNA, 201 bp, Homo sapiens
aagtctacgagtcatatattattgaacagaattttaaagggaatgttataaattatattgttattggatagaaattaggtagttttctttttcttttttttaatgagagcagactccctaaaaagaatcatttctacataaaaccttcagagatgcacccaaagtcaaaggcagactgacatgagaaaggggaatttctta

SEQ ID NO: 387737 - DNA, 201 bp, Homo sapiens
taattaagtctacgagtcatatattattgaacagaattttaaagggaatgttataaattatattgttattggatagaaattaggtagttttctttttcttytttttaatgagagcagactccctaaaaagaatcatttctacataaaaccttcagagatgcacccaaagtcaaaggcagactgacatgagaaaggggaatt

SEQ ID NO: 387738 - DNA, 201 bp, Homo sapiens
gaggcggaggttgcagtgagccgagatcgcaccactgcactccagcctgggcaacaagaggaaaactgttccctgcttccccctcccacatccccccccccaaaaaagtgttggagcttagttgattattgataatgttaagtaaatgttaattcttttcactggcatgttggggaagaaatctggagaaaataatattca

SEQ ID NO: 387739 - DNA, 201 bp, Homo sapiens
accttagcctcccaaagtgctgggattataggcgtgagccactgcaccaggcctgtttatagcttttaagataagctcccttagtaagctttggggttctraagcaaggagcaaggaaaatcaaatatagaaaaagttttagaaagactttgtatcttcctagaaaaatgtaatttccatctgtctttccagaatgagtca

SEQ ID NO: 387740 - DNA, 201 bp, Homo sapiens
ggggaaagacttcacttagaagtgttggagcgagctgggtgtggtggctcatgcctgtaatcccagcactttgggaggctgaggtgggtggatcacctgakgtcaggagtttgagaccagcctggccaacacagtgaaacatcgtccctactaaaaatacagacaattacctgggagtggtggtgagtgcctgtaatccca

SEQ ID NO: 387741 - DNA, 201 bp, Homo sapiens
gattcaactaactgtggattgaaaatacttgtgaaaaaaattgcatctgtactgaacgtatacagacttttttcttgccattattccctaagcaatacagkaggacaactatttacatagcatttacattgtattaggtattggaggtaatctagagatgatttaaagtatatgggataatgtgtgtaggttatatgcaaa

SEQ ID NO: 387742 - DNA, 201 bp, Homo sapiens
attttggtggtaaattccagcattctctcttaggtgatctattcaaagtgtgatttatctactactgttttggtggttcttcaagcagaaagcaagtacccaggggcactttagtcagccatcttgaaaccactccattgttttctactaaatggcttgctgtcctcgaccatagcttttgcttcctcctaactttagttt

SEQ ID NO: 387743 - DNA, 201 bp, Homo sapiens
ctttcatcacatttgaatgtgatgtgtcacatttattgatttgcctatgttgaaacctccttgcatccctgggataaatcacacttgatcgtggcataatatctttttgatgtgttgttgaattaggctggctagcattttgttgaggatttttgcatctgtgttcatcagagatattggcttatgggtttcttatgttgc

SEQ ID NO: 387744 - DNA, 201 bp, Homo sapiens
gttctaagtgttcttttaaaaaagcctgcttctatttctggtaacatggaggattagaagtgcctactgataatagttcagctaaacgtgctacatgataygttacacacacacttgtgtatactgtatcttaaattatatatacacatcttgaaacacatttaagtgtttttagtaaatagtttagctggtgggagagta

SEQ ID NO: 387745 - DNA, 201 bp, Homo sapiens
ctttgttgaaaagggtaaaaggtgctctaataaccccaaacagcaagatcactgaggccttttggcagtggggagccagagctactttcccatttcacccgttcagggaccaggctagtcactgcttcttcctctgtagacctgctttgttctcagcttcttcttcagccagtcttccttgtacatggctcagtgttgttt

SEQ ID NO: 387746 - DNA, 201 bp, Homo sapiens
cctgacctcgtgatccgcccgccttggcctcctgaagtgctgggattacaggactgagccactgcgctgggccaaaatactaaaatattaatatggatggraaaaagcaatcagcttctgagtgttcccaaggaggtatgacattattcagggactaatcctgcaagtggaaaataaaacttaaatcatggtcacataagt

SEQ ID NO: 387747 - DNA, 201 bp, Homo sapiens
atttaattaagtctacgagtcatatattattgaacagaattttaaagggaatgttataaattatattgttattggatagaaattaggtagttttctttttyttttttttaatgagagcagactccctaaaaagaatcatttctacataaaaccttcagagatgcacccaaagtcaaaggcagactgacatgagaaagggga

SEQ ID NO: 387748 - DNA, 201 bp, Homo sapiens
gcagcagcatagcaatttgcatttgcatcatacaaagctggcagtgaggccttacgaagatttgcacccacattttgcattatcaaactagagatgaataygtagttttttgagagtaactaatgcaagaccaggcttcaggacacattcaagggatttttaaaggtcaattttacttgatttttatttttttataatgtt

SEQ ID NO: 387749 - DNA, 201 bp, Homo sapiens
agatttaaaattttttttatggtggggggatatgaactttcaaaaccagctgaggtgtcaggtctggattttatttggttgtttaatttttttttttttttgagaccaggtcttcctcactctgttgttcagggtggagtgcagtggtgtgatcacagctaactgcagccttgacctccagggctcaatttgatcctccca

SEQ ID NO: 387750 - DNA, 201 bp, Homo sapiens
gtgaagcatttgctgcctgcaggtggaatggccagctttctgcaaccctcctttctgggcttgaacacctggttattttgagcaatgtgatgcttggtgtycttattgctctaagaaataggaaattgcttgtatgaatctctagtaatatcctggctaagaagtttttttttttttttttctctgagacagagtctcact

SEQ ID NO: 387751 - DNA, 201 bp, Homo sapiens
tgttacccaggctggagtgcagtggcatgatcttggctcactgcagcctctgcctcccgggttcaagcgattctcctgcctcagcctcccgagtagctggsactacaggcacgtgccaccatgccctactaatttttgtatttttagtagagacggggttttaccatgttttccaggctggtctcaaactcctgacctcag

SEQ ID NO: 387752 - DNA, 201 bp, Homo sapiens
ccttagtataactttattttagtttctgggccattgccatttggcataacttcaaactagatgtgatggacccacataaatacttttaagatttaaaattytttttatggtggggggatatgaactttcaaaaccagctgaggtgtcaggtctggattttatttggttgtttaatttttttttttttttgagaccaggtct

SEQ ID NO: 387753 - DNA, 201 bp, Homo sapiens; identical to SEQ ID NO: 85183

SEQ ID NO: 387754 - DNA, 201 bp, Homo sapiens
ggagattcttccgcatccattctccctgttccaggtgatctcttgtattaataccttttaaaaagcccagttaccactgcacatctccctcagcatacttscccggattaggcccccttttctgcatttctctggtggctggactaatttatattccgagcagcagtgtagaagagttccttttctctgcatcctcaccag

SEQ ID NO: 387755 - DNA, 201 bp, Homo sapiens
agagataatatgtgggcaaatatcaggcaaatagtagatactcaataaatgttttcatttttccttaaagaaataaacctctgctatttgtttttttttttgcgtgtgtatagatgtgtagagatgggagtctccctatgttgttcaggctggtcttgaactcctggcctcaagtgatcctcctgccttggccttccaaag

SEQ ID NO: 387756 - DNA, 201 bp, Homo sapiens
ggagtgcagtggcgtgatcttggctcactgcaacctctgcctcccgggttcaagcgattctcctgcctcagcctcctgagtagctgggactacaggcgccygccaccacgtccagctaatttgtgtatttttagtagagatggggtttcaccatattggccaggctggtctcgaactgctgaccttgtgatctgcccacct

SEQ ID NO: 387757 - DNA, 201 bp, Homo sapiens
tgctgtgtttattttcctggtttcctcctgcaagatcatgtcatgttggctctcccagagggcatggctcatatcatggggccctctttgtctttccaagyctgtagatgatagcagcttcaggaggttgcactatcttttgactgtgcccacacccttcacaccttgtaaatagtccctttcttaaactctccttaaatt

SEQ ID NO: 387758 - DNA, 201 bp, Homo sapiens
aaaaaggcatttggttttgttgatagtcttttcctttatttttcatttccttaatttctgttctatattgcttttagtttcttgagcttttaaaaataagrtttttgttttgttttgttttgttttgttttgagacagagtcttgctctgttgcctacgctggagtgcagtggcgtgatctcagctccctgcaacctctgc

SEQ ID NO: 387759 - DNA, 201 bp, Homo sapiens
ttttgttcagatctgtgtgcctggtacaaaggatacaaaaatggtaaaggtagcctttgccctcagagttgctgacacacacataaaaagttaaagtacakcgtgatagacatatgtacatggtgccatgggacagataagaagggagtacctggcttggacttgaaggagaaatgagagagcaactatccgcagtagaag

SEQ ID NO: 387760 - DNA, 201 bp, Homo sapiens
ttgtaattttcgctaatattagaagagttcccttcacatgtaaaagagtttttaaccagtttcccagatttgctggataccccagcaccaatatttctaamtgaaactgttagtatttgtattatggttccaagatcctgagcatttgtgcaagaggaagttaaagaagatgtggtgtgaccatgttcttatgttgtcctt

SEQ ID NO: 387761 - DNA, 201 bp, Homo sapiens
ttttagattcgtacaatggaatactgttcagcaacaaaaaggaacaatatatccatggtgctatataggtgatccttaaaacattattttgtgaaggcagwtttgtaattttcgctaatattagaagagttcccttcacatgtaaaagagtttttaaccagtttcccagatttgctggataccccagcaccaatatttcta

SEQ ID NO: 387762 - DNA, 201 bp, Homo sapiens
ctttattactcaatagtttagattctactttagcaaaaaaggaaaaaaccacattgaatacctactctatgttcgataatgctgcagggtgttaagagtaygacatgaattaagatgtgatctcaatcagggaggatgggagtttgccagtaatttttcttttgttttggtgtaccttctgatttttaaaaataattaaca

SEQ ID NO: 387763 - DNA, 201 bp, Homo sapiens
ggtgcagtagtgtgaacatggcttactgaagcctttacctcttgggctcaagggatcctcctgcctcaccctcctgagtagctgggactacaggcacatgscaccatgcccagccaattaaaaaatttcttttgtagagacgaggtctcaatatgttgcccaggctagtcttgaactcctgaacttaaggggtccttctgc

SEQ ID NO: 387764 - DNA, 201 bp, Homo sapiens
tgtatttcctgaaatatttcacaagtggacacagttctttctattccgtgggtcttttggtctgcctatggggtctttttttcttccaaactattgaggtrgtacttgatctcacagtaaatcccaaggcacctgccatctgtgtgtcaggatttctcagactgttgccagctgctgtcatccccaaggcagtgtatccct

SEQ ID NO: 387765 - DNA, 201 bp, Homo sapiens
tgtctcagtaaactcagtagccttgttctgctgtaggactggctggcttttctctctctattttgcctccaaattggctaagaataataacctagttgttkgttttttcagcttatgtatctgagttcattttgcctttttgtctggtagatttttttctaatgggctgcagctcagtattttgaaggtgaaggggtccag

SEQ ID NO: 387766 - DNA, 201 bp, Homo sapiens
ccctgtgtcaagaatcaaattttaccagagagcgtttactggatcactctaacagtaatcacttatttcagatagttcctgtgacatgtcctatttgtgtrtctcttccttggggagatcctagccagattaccagaaatttcgttagtcatctaaatcagagacatcagtttgattatggagaatttgtgaatcttcagc

SEQ ID NO: 387767 - DNA, 201 bp, Homo sapiens
ttagtgtctcagtaaactcagtagccttgttctgctgtaggactggctggcttttctctctctattttgcctccaaattggctaagaataataacctagtkgtttgttttttcagcttatgtatctgagttcattttgcctttttgtctggtagatttttttctaatgggctgcagctcagtattttgaaggtgaaggggt

SEQ ID NO: 387768 - DNA, 201 bp, Homo sapiens
cttgcctttcctagatatatgacttacaaaactttagtgtctcagtaaactcagtagccttgttctgctgtaggactggctggcttttctctctctatttkgcctccaaattggctaagaataataacctagttgtttgttttttcagcttatgtatctgagttcattttgcctttttgtctggtagatttttttctaatg

SEQ ID NO: 387769 - DNA, 201 bp, Homo sapiens
gaagagagagcatgccctgaacgggccttagaccttgaaaatataatgaggaagttttctggtagctgcagatgctgtgcaaaacagattaaattctatckcatgagacttcattgcaaatcttgtaagaagtatcaggatgaatatgatgtttcttctatcattccaaactttcagatctctgaagattcagtagggaac

SEQ ID NO: 387770 - DNA, 201 bp, Homo sapiens
ttaagttttcttgaatacttcatttgagtatgctgcttttcttggcaggaccctactgataatacccatctatgtctaaaacagatttgaggtagcttccrtttctgcattaaacaccaattacagtgtccttaatggcaaatgcaaacaggagcccatgggctgccatcttggctttcttgggagggagggggttatggt

SEQ ID NO: 387771 - DNA, 201 bp, Homo sapiens
ttgtgttttacatatttaaagagaaaatataccaatcattaacatctgtagacggtttaactctagataaagccactatcatataatcttttctgggtttyacttcttcctccagactggaacactgggcagcttaaagctgtaaaagctttaagcaatttacacctgagaaagatgggccattgtttatcatgtggcttt

SEQ ID NO: 387772 - DNA, 201 bp, Homo sapiens
ttttttttttttttttttgagatggaatctcgctctgtcgcccaggctggagtacagtggcccgatcttggctcactgcaagctccgcctcccaggttcaygccattctcctgcctcagcctcccaagtagctgggactacatatgtgcgccaccacgcccagctaattttttgtatttttagtagagacagggtttcacc

SEQ ID NO: 387773 - DNA, 201 bp, Homo sapiens
ttgtttttctgtttgttgttgttgttgttgtttttctctattctagtcacagagagagggaaggaatctcaaaaaacgaacaaaaatttgtcaaactggcrtattcttgggtcagtctagaatcctattgcaaggctttttctttctttaaatgggtagtttggaacaaaagcagaggcttggaggaaattgctgctattt

SEQ ID NO: 387774 - DNA, 201 bp, Homo sapiens
ttaggcttaaacatattattattatttttttctcacataagaagaaatctggaggcaaccagttgctggttatttttagtagagctcaacattataaagaycagtgacactgcatttcttggtctgtccctcataatcaaaagatggctgctgtagctctagatatcaggtccatgttcaaagaaggtagaaaggaaggga

SEQ ID NO: 387775 - DNA, 201 bp, Homo sapiens
agtgccttgcacttaatatgcatgatgtatgtttgtcaagtaaaataattctctaatcctactacctgtaacataataattatattagtagaaataacatyaactagttttgtattagggacaaaaacacaaactttaaaatgtttctcatgagtactcatggaatgcttttgaaacttagtgttttattagtcatgtgtg

SEQ ID NO: 387776 - DNA, 201 bp, Homo sapiens
gcatgatgtatgtttgtcaagtaaaataattctctaatcctactacctgtaacataataattatattagtagaaataacatcaactagttttgtattaggracaaaaacacaaactttaaaatgtttctcatgagtactcatggaatgcttttgaaacttagtgttttattagtcatgtgtgaaagccacatacatgattt

SEQ ID NO: 387777 - DNA, 201 bp, Homo sapiens
tgtttgtcaagtaaaataattctctaatcctactacctgtaacataataattatattagtagaaataacatcaactagttttgtattagggacaaaaacamaaactttaaaatgtttctcatgagtactcatggaatgcttttgaaacttagtgttttattagtcatgtgtgaaagccacatacatgatttctaagtagtg

SEQ ID NO: 387778 - DNA, 201 bp, Homo sapiens
actttcatcacatttgaatgtgatgtgtcacatttattgatttgcctatgttgaaacctccttgcatccctgggataaatcacacttgatcgtggcataatatctttttgatgtgttgttgaattaggctggctagcattttgttgaggatttttgcatctgtgttcatcagagatattggcttatgggtttcttatgttg

SEQ ID NO: 387779 - DNA, 201 bp, Homo sapiens
gagttagctacactctagtcacctttttattgctgaggtcttgggaatgattactccacttataaaaaagtagagttaatattcctaaaacttttttttgkggggggacgtagtttcactcttgtcgcccaggctggaatgcaacggcatgatcttggctcactgcaacctctgccttctaggtacaagcgattctcctgc

SEQ ID NO: 387780 - DNA, 201 bp, Homo sapiens
gactttcatcacatttgaatgtgatgtgtcacatttattgatttgcctatgttgaaacctccttgcatccctgggataaatcacacttgatcgtggcataatatctttttgatgtgttgttgaattaggctggctagcattttgttgaggatttttgcatctgtgttcatcagagatattggcttatgggtttcttatgtt

SEQ ID NO: 387781 - DNA, 201 bp, Homo sapiens
ttctattgttgaaaaaaattattctgatacttgttaaaatggtaaggaaaactttactcaagactattgcacctagtgcaatagcggagggctcaactctractacaacaaggagaagggggtggatttatgggtgaggggaatcagtggatggaaaatcacgaagaggagacatcaaaggtaggagattcttgttaaggc

SEQ ID NO: 387782 - DNA, 201 bp, Homo sapiens
attttcccagcaccatttagtgacgagactgtctctattgtatgttcttggtacctctgtcaaaagtcagttggctgtaaatacgtggacttatttctggwatctattctgtttcattggttgctgacgagtctgtttttataccaatactgtgctgttttggttattatagccttgtaatatgaagtcaggtagtgtgat

SEQ ID NO: 387783 - DNA, 201 bp, Homo sapiens; identical to SEQ ID NO: 85185

SEQ ID NO: 387784 - DNA, 201 bp, Homo sapiens
tgggaggctgaggcaggaggattgcttgaggccaggagtttgagaccagcatagccaacatggcgaaaccctgtctctaataaaaatataaaaattagccrggcatggtggcacatgcctgaaatctcaggtctccaggaggctgaggcatgagaattgcttgaacctgggaggtggaggttgcagtgagttgagattgtg

SEQ ID NO: 387785 - DNA, 201 bp, Homo sapiens
actttgggaggctgaggcaggaggattgcttgaggccaggagtttgagaccagcatagccaacatggcgaaaccctgtctctaataaaaatataaaaattrgccaggcatggtggcacatgcctgaaatctcaggtctccaggaggctgaggcatgagaattgcttgaacctgggaggtggaggttgcagtgagttgagat

SEQ ID NO: 387786 - DNA, 201 bp, Homo sapiens
cctccatctcctgggttcaagcgcttctcctcctgcctcagcctcccaagtagctgggacaacaggcgtgcaccaccatccctggctttttttttttttttgatacagagtctctgtcgcccaggctggagtgcagtaggacactgtctgctcactgcaacctccgcctcctgggttcaagcaattctctgcctcagccta

SEQ ID NO: 387787 - DNA, 201 bp, Homo sapiens
tgaggcgtcggggttgccatatgttgtgttcctgtggtatttgtatatccagcccattttaatagatgaaaatgggggagggaggagtgtgaaggtcaggygaagaatatgatgtatctttgtttttcctattaatcttcatttaaaatttgtgtgtcctggaaacccatgtctcttcctttccagttctagagttgtgtt

SEQ ID NO: 387788 - DNA, 201 bp, Homo sapiens; identical to SEQ ID NO: 85188

SEQ ID NO: 387789 - DNA, 201 bp, Homo sapiens
cttccccggattaggcccccttttctgcatttctctggtggctggactaatttatattccgagcagcagtgtagaagagttccttttctctgcatcctcamcagcatctcttaatgtttttttggtctttttaataatggccattctaactgaggtaagattgtggttttgacttgcattttcctggttagtgatattgag

SEQ ID NO: 387790 - DNA, 201 bp, Homo sapiens
acctccatctcctgggttcaagcgcttctcctcctgcctcagcctcccaagtagctgggacaacaggcgtgcaccaccatccctggctttttttttttttttgatacagagtctctgtcgcccaggctggagtgcagtaggacactgtctgctcactgcaacctccgcctcctgggttcaagcaattctctgcctcagcct

SEQ ID NO: 387791 - DNA, 201 bp, Homo sapiens
tcaaccctggaggcggagcttgcagtgagcagagatcgcgccactgcactccagcctgggcgacacagctagactccatctcaaaaaaaaaaaaaaaaaawaaaaaaaaaaactcaacacgtgttaaatcgctaaagtctgaagagcccagaaaagaaaataaatatcattagtaatattctcaccatcatccaaagatta

SEQ ID NO: 387792 - DNA, 201 bp, Homo sapiens
ctgtagacaaaacatctttatcttaaaactgtaatctttctaacttccgttgcatgcattgctgcatttccttttttacatgtgctctcatttattttcayggcaaatgcatttttagacagagtctgtgggataattattgccattaattagttttgatatttcttttttaatgatattttcatttattcccttttgcta

SEQ ID NO: 387793 - DNA, 201 bp, Homo sapiens
gttttggtggttcttcaagcagaaagcaagtacccaggggcactttagtcagccatcttgaaaccactccattgttttctactaaatggcttgctgtcctcgaccatagcttttgcttcctcctaactttagtttgcaaataacctattatgtacccattaggcatccttcctactacttttgaaattagagaacgccttc

SEQ ID NO: 387794 - DNA, 201 bp, Homo sapiens
tttgggaggccaaggcgggcggatcacctggggttaggagttcgagaccagcctggacaacatggtgaaaccctgtctctactaaaaaaagaaaaaaaatmcaaaaattagccaggtgtggtggtacctgcctgtagtcccagataccctggaagctgaggcaggagaatcgcttgaaccctggaggcagaggttgcagtt

SEQ ID NO: 387795 - DNA, 201 bp, Homo sapiens
aagtgcagtggcacaaacatggctcactgtagccttgacctcctatgtttaagcattcctcacacttcagcctcctgagtagctggaaccacagatgtgcrctgccatgcttggctaatttttaaaatttttgtcgagtcctggtctcactgtgttgtccaggctgggctcaggagatcctctcacctctgcctcccaaag

SEQ ID NO: 387796 - DNA, 201 bp, Homo sapiens
ctgttttacaagtgagggaataggcaccttgggagggggctgctgagttctgtgagctctgtggggtttcttgataatcaggatcccatgctgtattgatkgattgattacttggtctgaaccctagtccatttattttgaaggtcagctcatgcagatctctggaagtaaaatggcattctggaagtgactgacacataa

SEQ ID NO: 387797 - DNA, 201 bp, Homo sapiens
tactgctttgctattttcttgtgttaggtcgcacagttgattatttagtcctaaagagcttcaatttcttcatttgtataatggagcgaatactgtctacktcacggatttgttaggattaaatgacaatctgtgtatataaagtagcaggtatttagtaggcactcaataagctgatgtctacctgttttcttgcttctc

SEQ ID NO: 387798 - DNA, 201 bp, Homo sapiens
cttgccgtctattctgtcttcacactgcttttttctttacacagctcttttcacagccccctcagttagagtacagattggattgtgtgtctccctgctamccacagaataaaacttcaaatgtgatgattttggtcttttgttttattataaaatattcaaacatggaagtatatacagtagaaaataagttttctccct

SEQ ID NO: 387799 - DNA, 201 bp, Homo sapiens
gggaaatacacaattgccaataagtgtaaataatactaaaagtgactttagttctgcatgatagccaattgagtagatgaagtatagaaaatatagggggwtgataagaagagggtaaaattgggaggaggtaagggagagaaggaaatttagcccttccaaattctttctctagaatttagagaggatggctcacacctg

SEQ ID NO: 387800 - DNA, 201 bp, Homo sapiens; identical to SEQ ID NO: 85196

SEQ ID NO: 387801 - DNA, 201 bp, Homo sapiens; identical to SEQ ID NO: 85198

SEQ ID NO: 387802 - DNA, 201 bp, Homo sapiens
aagagccgtttggagaacagaatgtgatccatgtctgaataactaatgaatatgtttttcttaatgattgagaagtagaatatatatgttatataaatgtrtatttataatttccagatatttccaaaaggaaccaaaaatgatcattttataagataaactaaaatttggcacacaagtaattacattttataattgtaa

SEQ ID NO: 387803 - DNA, 201 bp, Homo sapiens
  misc_feature (1)...(201): n = A,T,C or G
aaccagagaatctgtcctatatgaccatagtttcaagatagaaaaaactgtcacttaccctctatttttatttcacagctaaacacactcaattgattacngaattaccattgtttattcagaggatattcctctttcttccctccatagagcagaatcggagatcagaggaggctcatagagctgaacagttgcaggatg

SEQ ID NO: 387804 - DNA, 201 bp, Homo sapiens
cattgtgttttccttctgctaccctctttgttgataataacaacatttagtaagcatttacttcagcctgtgattgtgctatacacttacatgcattttascttcataacaaccctgtgaagaacaaactgtttatctctgtcttactcagaaaactgaggctaggataggtttagtaacatgacaaagataacatgctaa

SEQ ID NO: 387805 - DNA, 201 bp, Homo sapiens; identical to SEQ ID NO: 85203

SEQ ID NO: 387806 - DNA, 201 bp, Homo sapiens
tctaagcttttaatttttctttcttttgctgcatgtgtttaagataaggtttctgatacagtgttaaaatctgtcctgcattctctgtttgtgcctacttyatgttgtgtcacagtcttcattttaaagtggaagttacccttaaagtaaaaaaggcatgtagaaattttggaaggctttgtggcctaactttatcctttt

SEQ ID NO: 387807 - DNA, 201 bp, Homo sapiens
gattttaataatgtgattatgaaagtaagctcaagaatgctttttttggaggacttaagtgtaacttttgttctgtttatgcttcttgtaggtttgagtgrccgcttctttgtcaccactctcccagcattttttcagtaagtttaaataatcttctaatcttgcaaatattagaaatcaatagatgtgtaccaggaattc

SEQ ID NO: 387808 - DNA, 201 bp, Homo sapiens
aatttttgtactattattactttatggactaattttacagcattgcttaacttatttaatatttccatactggttttaccatcttcgttaggaaaaccatygtataactataccctattattacagagtttgtaatctgaataccatctccttatctttcattgattatcctcttaatatcaagtcctgacctacttttat

SEQ ID NO: 387809 - DNA, 201 bp, Homo sapiens
aggaagaaagaagtggtattcagcagtgaatgaacaatgccagtaacaggtgaaggaaacagaaatggatacggcacttaggggtcattggagacccccartatgagtggtttcaagggagtcctgggagcagaacccccagttgcaccaagtagtgaatgagacataaagaggagaaaacagcaagcctagactcttccc

SEQ ID NO: 387810 - DNA, 201 bp, Homo sapiens
gaatggctaatgccagtgagacaagattgtttatgcctatccatagtctctttatcttactgaaatatctggatacatgtacagatagaaatcagtctttcctcagcaacagtcttccctggatgggtagctggttagatgtaagtatatctgcagggaagatgacaaaacagtataatggatgtttatatggcgtttttg

SEQ ID NO: 387811 - DNA, 201 bp, Homo sapiens
gcttttagtcacactttgtacggtgataacatagaatgttaacgcttttaggtttgaatttctcacttatagtaaagcttattaactctttctgatttatstctatgtatatttttcaattgagtcaatttaaagttcagatggcgttcagatgtatcaccagtagctattttaatttttattatctgtaacatcgttatt

SEQ ID NO: 387812 - DNA, 201 bp, Homo sapiens; identical to SEQ ID NO: 85195

SEQ ID NO: 387813 - DNA, 201 bp, Homo sapiens
tgaattttggctctttagcaagttctttttaaaaatgttaacaattgacttatagtaagtcacaaccccaagaggccaaggaggctcgatttgacttttcyatgaacatgcttaatacatatcatggcttatctttgaaacttggctcctgatgttaacttcagggataagaatgggacttacttagatatctgtatatgt

SEQ ID NO: 387814 - DNA, 201 bp, Homo sapiens
aattatctagaagatatctagaagatcagagatatatctagaagatcagcgcctactgaattagtgattccttaaggggcttgggtttctttctgccttaraagtgaagccaacttgctaggttgcacattctggagataaaagctggtcctcaagattctaggatcacctggtgatgagacactcacatggccgaattcc

SEQ ID NO: 387815 - DNA, 201 bp, Homo sapiens
tgtaatcatagctgccctgcagtgccaccatcactctgggggaaaaagccttttctcctagtaccaggtaccaatcttcttaaacctgtaaatccacgttwtaaacataaacatggatcacacactgacctagcatagcattacagcataacaaattgccccaaatcttagtggcttgatattatgtaacaacattgatta

SEQ ID NO: 387816 - DNA, 201 bp, Homo sapiens
ttaatggcttagagcttattgttctccaacccaccaagccttcctgcaactcattgccccacctcctgggtctcctcagtttgacattcagggctttctcyggatccaagacccccatggagatccaacttagtttagcttagagcagccaggcggtgctgctgttctctcctgactgcccagggcattaaatgcctcctc

SEQ ID NO: 387817 - DNA, 201 bp, Homo sapiens
ctgtcttccttaagtctgtctgaccactgattagaatgctcttctcatttattctgttgtaatgatgttttaatttcatcttctcactcaaatatgtatgtagccaaaagttagctctaacttaatcatgtactatgatagtataaggtgtcacacccatcagatgacattttagtgcattttcagtgaacagactaagat

SEQ ID NO: 387818 - DNA, 201 bp, Homo sapiens
tataactcttccatcagtagatctattaagatattcttttaagtattttaagcaaggtaagatttcagatttatcaatgaaacgagaaaagttcccttctyccctcacagggtgtgcgttgggggtgtggcttgcttctttgtgcccgctgctcaaacctctagggggacatgcagacgggcaggctgtggggctccgatc

SEQ ID NO: 387819 - DNA, 201 bp, Homo sapiens
ctcttcattaatcagtgtcatattttcctttattctaactagaactagaagggaagaagggaaactcaatatatattgcttctgctgtgtgctagtaactyttctaagtcctttaaaagcagtcttcccaaatccttgcactgctccacacttcttctggggccaggtgcctctggatttgcatgtctttattccagacta

SEQ ID NO: 387820 - DNA, 201 bp, Homo sapiens
atttatcaatgaaacgagaaaagttcccttcttccctcacagggtgtgcgttgggggtgtggcttgcttctttgtgcccgctgctcaaacctctagggggacatgcagacgggcaggctgtggggctccgatcccacggcagcataaaggggtgaatgtttacagctgaagccccagtgggcgtgtgttaccgtgtgctct

SEQ ID NO: 387821 - DNA, 201 bp, Homo sapiens
agatgttcatgagactttctaattgttgaattttatgtgggagtttaaataagctcatgtttctttttagttcttgaagtttttgaggctttgagacttcyattgataatttgaaaatatgattcttagatttcttaaaagtaatagaaacccaatatcaaggattttaggaaaacaaatgaaaatttattagctcacata

SEQ ID NO: 387822 - DNA, 201 bp, Homo sapiens
agagactataatcatgttgcatttttatggctgagatgtagaagccgaggaaagggcagcccttagattaggttacattacattgcctgtttaatactgcrtagatcaggtgatgtgtcagttgagttgactttgggaaattaaatttaatgagtatatacttgaaccttctgttccatgcagatgagcttagttgtcaag

SEQ ID NO: 387823 - DNA, 201 bp, Homo sapiens
atttgattttgtttccatcttctgtaatcttccaaagaattatatctttgtaaatctctcaatactcaatctactgtaagtacccagggaggctaatttcyttaaaaaaaaaaaatctatccatctacttctctcttacctgatttatgtgttagaataaattcatgaaattcgattccaagcatacgaaagatgcctaaa

SEQ ID NO: 387824 - DNA, 201 bp, Homo sapiens
ttgttctgtttatgcttcttgtaggtttgagtggccgcttctttgtcaccactctcccagcattttttcagtaagtttaaataatcttctaatcttgcaawtattagaaatcaatagatgtgtaccaggaattctaagttgtcttccatgactgccactcattcagcttaacatgtgagggaaacaaggctggtgtgctct

SEQ ID NO: 387825 - DNA, 201 bp, Homo sapiens
ttctcttaaaaattaatgttttattttttttcttctgattccagcatcttcacaactatttcacagtgactcttggaattcctgcttggtgttcttatgtstttttcgtcatagccaccttggtttttggcctttttatgggtctggtaagagataataccaaactttttctatctttaaggcaaaatgaatttcatgtac

SEQ ID NO: 387826 - DNA, 201 bp, Homo sapiens
ctcagagaaagaagattataaagatggaagaaggaaagacgtagaatggctaatgccagtgagacaagattgtttatgcctatccatagtctctttatctyactgaaatatctggatacatgtacagatagaaatcagtctttcctcagcaacagtcttccctggatgggtagctggttagatgtaagtatatctgcaggg

SEQ ID NO: 387827 - DNA, 201 bp, Homo sapiens
cggtgaaggcaggccatttgtgtcgtagtcttccgtttgaagacctggagatgtcattgtgagaataaaacataaatatggatgccttttaaattttacartatgatttcaaataaatgttgatacttattataacttgtaaaggtaggactttctgagtaatattaataattgtgccataaagaaaagaagatacgcatt

SEQ ID NO: 387828 - DNA, 201 bp, Homo sapiens
gcattgatttttttttttaatgatacttaccagcatgcttttgcacagttcagaattttgaagggatttgtaaatgatgacctgacaggcaactttgagcytaaatcttgttacaggatttgatcagttttgtacttttccccttactttgtttcccttcctaaggcattttgtgtgtgtgagtgttatattctattggca

SEQ ID NO: 387829 - DNA, 201 bp, Homo sapiens
agtaggaatgcattaagccaacaaggtagagaaagtctttccagttaaaggagatagcataaaaaagcccaagagagaatgagctaccttttgagaacttygaactagttctttatggctggaccacaggtatagctggatcatgctgagtgatgaggccagagagactcaggtacaggcaggggaaagataaagaaagta

SEQ ID NO: 387830 - DNA, 201 bp, Homo sapiens
gatgagacagaggaataactgtttattgaattatagtttatgaaggaattgctattatatattatgtggaaaacaaaacctgtggagtctttggctgcctygcaaaataccacaggggatagctttggccttgacggcaaactgtataatacttggtgaggtagattaggccaaaccataacagctttttccacagttggt

SEQ ID NO: 387831 - DNA, 201 bp, Homo sapiens
ggcttctctaacgtaactcaattttttaagacaaggtgttactaataaaacaggaggttttaagttaatagcctgtgggtctcaaaaaagcctatgttttwcttcacatttacttccaattacccagattactcatggccatgcttagcccatgcagtatttctgattttgtgacctacatatgtttcagctggtttttag

SEQ ID NO: 387832 - DNA, 201 bp, Homo sapiens
acttggcatattaaacactgccaagaactctgcttttagtcacactttgtacggtgataacatagaatgttaacgcttttaggtttgaatttctcacttayagtaaagcttattaactctttctgatttatgtctatgtatatttttcaattgagtcaatttaaagttcagatggcgttcagatgtatcaccagtagctat

SEQ ID NO: 387833 - DNA, 201 bp, Homo sapiens
tatcttaaagtctgtccttatattttataatgaattttggctctttagcaagttctttttaaaaatgttaacaattgacttatagtaagtcacaaccccargaggccaaggaggctcgatttgacttttccatgaacatgcttaatacatatcatggcttatctttgaaacttggctcctgatgttaacttcagggataag

SEQ ID NO: 387834 - DNA, 201 bp, Homo sapiens
ggacttacttagatatctgtatatgtccttcattaggtcctgggtatgttctgttctgttgcattaatctttttgctaattaacatgtccccattgctccygtctaaagggatttgacaccggatataaatagaatgtgattgtctgtgcttctcccatctgttgtctggtgcgagatttttctagcagtgtattttgggg

SEQ ID NO: 387835 - DNA, 201 bp, Homo sapiens
tagtttagcttagagcagccaggcggtgctgctgttctctcctgactgcccagggcattaaatgcctcctccttcaaagtcatcctcaatccttccccacmcacagctggctgtaacatttgtgaaatgttcttccattcaatcaggggttacccgttggtgaggggcagcctatatacagagtggtttggttgtccagaa

SEQ ID NO: 387836 - DNA, 201 bp, Homo sapiens
tcccattccctgtgcatacttccaaatgcttctaattgaaaaccactgctctagatactgttatgggtatttaaaaacatgcgaatgtttgattttagatrgtttccacaaagggtttaaagcctcattaaaacttgtcatccttaccacttccatccacctcctccacttcctcatcatcacaatcacagttcatagtta

SEQ ID NO: 387837 - DNA, 201 bp, Homo sapiens
aacggcaagtggaggcgggagggggcgtggcctcgacgggcaagcggcgataagaggtggcgtcctccgcggcattgcgagcaccgccagtctgcgccgcyaggcgtaggcggggtggcccttgcgtctcccgcttccttgaaaaacccggcgggcgagcgaggctgcgggccggccgctgcccttccccacactccccgc

SEQ ID NO: 387838 - DNA, 201 bp, Homo sapiens
aggcctaattttgaggtcctttggtaataaatgtcctatctattcactgtaaaatcacttttttccttccaggtcttggtggtaatatcagaatgtttctrtgtgccacttccaaggcatttatctgagcgttctggtaagtacgataagctcctgtgatctagagtgtttttggaattctgtgatgtgcctttttgtgct

SEQ ID NO: 387839 - DNA, 201 bp, Homo sapiens
ctgcggcgccggtgccgggccgcttgcgatcctgcactgccgctgggctcgacctggggtccgcggacccgccttaccaacgacctgcggctgtggggccsggccgctcgcgccgcgcatgcgcgccgagccctcgcggtgacagccgagggtgcagcgcgtccccttgctttgggggacagtgttttcggggtggagtgg

SEQ ID NO: 387840 - DNA, 201 bp, Homo sapiens
tccgccgttatcgtggcccaggaatcttcgaagacctgcagaattatatcttagagaagaaatggcaatcagtcgagcctctgactggctggaaatccccrgcttctctaacgtaactcaattttttaagacaaggtgttactaataaaacaggaggttttaagttaatagcctgtgggtctcaaaaaagcctatgtttta

SEQ ID NO: 387841 - DNA, 201 bp, Homo sapiens
cccatagggaggagaagggaaggaagaaaatctgcaagcaaaccgtgtgcttttagatacagatatgtattggaagagaaaggacattcagtgacatccaygtgcagtatgaatacgtagcacaggctaagcaagttacctgttgaagaaattgcagcacggtgaaggcaggccatttgtgtcgtagtcttccgtttgaag

SEQ ID NO: 387842 - DNA, 201 bp, Homo sapiens
tatttgcagtaattcaccgtttctattctgatgattttagaaatctgaaaagttctcccattgctacatacattttctttaatgctatgggcttattgttrttattattattttttagatggagtctcactttgtcgcccaggctggagcgcagtggtgcgatttcagctcagtgtaccctctgcctcccgggctcaagca

SEQ ID NO: 387843 - DNA, 201 bp, Homo sapiens
cattaaaacttgtcatccttaccacttccatccacctcctccacttcctcatcatcacaatcacagttcatagttacatggcttacatcacatgttccaamtaactgttttatttgatcattccagcaatctagtgcggtattattcccattcttactgactagtggagataaaaaaaaaaaaaagaaaaaaagaagctgg

SEQ ID NO: 387844 - DNA, 201 bp, Homo sapiens; identical to SEQ ID NO: 85197

SEQ ID NO: 387845 - DNA, 201 bp, Homo sapiens
tggagctaattgctcttggaggctcttaaggattatgtgtaagagacaaagttatggcaggtcatatcttttatagttcttaggagaagattgccagtgtsaactagtttgaaataaatttaatgaagatcatgttcaattatttctgatgtgtttaatttatgcatatatacataaattatatatatatgtatctatgtg

SEQ ID NO: 387846 - DNA, 201 bp, Homo sapiens
gacacgaaggtttaaaaaaatctacattcaaagatgtcagcagattattttgttgttcctgtcttctggatctcaggatttggacagtgagctgtaatggraagattaatgatgttttagcatgatcttggaattagctatatagtagtcttttctagagatggtgaacaactgtgcttgctaagtcttgctgcttctggg

SEQ ID NO: 387847 - DNA, 201 bp, Homo sapiens
tagtagtcttttctagagatggtgaacaactgtgcttgctaagtcttgctgcttctggggcctgtctggagaaagtaatgaatgctttggctttgggtagyccattctcttctgggttctgcctaattttcagtactttttgtgaaataaatgcattccttcccctagtcttcgctttttaacccctgactcatcttttat

SEQ ID NO: 387848 - DNA, 201 bp, Homo sapiens
aatccaagtgatgcaagttgtatgtcagttactagaaagtgttaggtaataaaaataggtagaaatgaaatttctgtaagtcaaaaaaaatagtaaatgtragtcaacaattgcagtgattttaataatgtgattatgaaagtaagctcaagaatgctttttttggaggacttaagtgtaacttttgttctgtttatgctt

SEQ ID NO: 387849 - DNA, 201 bp, Homo sapiens
ctgcctgctcagttagctcatttagctgactcttcctttagtcagagttcctcaaatccatgttgaatgtataattgtggcaaacgtatttgttttttaamtcatgtctagatcatatgaaactacaatgcaaatatattaataatgaacagaagaaacaactgtacatggtgagacagaaatagactagggatggaaggt

SEQ ID NO: 387850 - DNA, 201 bp, Homo sapiens
gagttgactttgggaaattaaatttaatgagtatatacttgaaccttctgttccatgcagatgagcttagttgtcaaggtcaggaaaacagcagctgctcdtcacccttgagtgatggctatttcactagattagaggtaagccagtctcctgccacagccaagtgtaagcattgtctttaaaactactgattaatgcaga

SEQ ID NO: 387851 - DNA, 201 bp, Homo sapiens
tgggaaaggcagctgtgatggaaaatgttaaaatgatgcctctgtcatttttccatgttggccaggaggatccttaagctttcattctctttacttattcytggtgcccatgcaaatattatttatttgtaacatttaaagggcaaggatctgttctttactcctagtctcattcagcatttttttgcatacctacccttt

SEQ ID NO: 387852 - DNA, 201 bp, Homo sapiens
cctcgcggtgacagccgagggtgcagcgcgtccccttgctttgggggacagtgttttcggggtggagtgggcagcttcccatagggaggagaagggaaggragaaaatctgcaagcaaaccgtgtgcttttagatacagatatgtattggaagagaaaggacattcagtgacatccacgtgcagtatgaatacgtagcaca

SEQ ID NO: 387853 - DNA, 201 bp, Homo sapiens
agtatgaatacgtagcacaggctaagcaagttacctgttgaagaaattgcagcacggtgaaggcaggccatttgtgtcgtagtcttccgtttgaagacctkgagatgtcattgtgagaataaaacataaatatggatgccttttaaattttacagtatgatttcaaataaatgttgatacttattataacttgtaaaggta

SEQ ID NO: 387854 - DNA, 201 bp, Homo sapiens
gactattgctaaaaacacaaacgtctttaataaatgttgcataaactcagaaagtgatacttcaaagtcttgtgaaaaatgatgatcaccagcatttatasagcaattagtatgtgccacgcaatttgactttattatttattcatctatctttaccaccatcttaaaatatgtgagtgcaaaaccctgagaaactttctc

SEQ ID NO: 387855 - DNA, 201 bp, Homo sapiens
tgggaaatcattcgctttttgcaaaatttgggagcataaacaatgggtcatgaattacaatcaaacaaaagataaaattctaagaagtcttttaaagtggaaaaaaataactgaaaaatactgaatggagggcagtttttcatgcactgtgttacgaataaaaaatttgattcaatggattacttaatcaacattttaata

SEQ ID NO: 387856 - DNA, 201 bp, Homo sapiens
ggatgcaattagaggctaccacactggatttgatgggccataaaaccattaaatctaaacactttctttttgagcctaaaaggccagaacattccaaagtkaagttttgggactcagctatgacttgaccacctattaagatgcaggtggaacagattgcagagtaacacaaagagccacacagaccccagatgactgcat

SEQ ID NO: 387857 - DNA, 201 bp, Homo sapiens
ggtgctgtgctgcaagacatgtatttgctggtttcttaaaacttttaaatatcacattatgtcatctgttaattctacgccttatgactacactttgagarctgatccttaaattgttaatggaacaacgatgttcacacccctccctctttgagaagctaaaccccaggcatgagttggctacttaaactaggtacactt

SEQ ID NO: 387858 - DNA, 201 bp, Homo sapiens
atttgggagcataaacaatgggtcatgaattacaatcaaacaaaagataaaattctaagaagtcttttaaagtggaaaaaaataactgaaaaatactgaawggagggcagtttttcatgcactgtgttacgaataaaaaatttgattcaatggattacttaatcaacattttaatagttgtaaatcttataatatttaagc

SEQ ID NO: 387859 - DNA, 201 bp, Homo sapiens
ataatggcacatccgtttgaaactctagcagatcatttttatttatttttttgaatttttttctttatattctttaaagaaggatacaaaattatttctaygaatatttaacatatggaaggaaatagcaataataaacataaatgctaacacatataaaataggtggtatcattaggctaaattttagtcttccaggata

SEQ ID NO: 387860 - DNA, 201 bp, Homo sapiens
acattcataaaacaatgttgactgcgtctatgtgatggtagatcctctgtgaagacctttatgatggtagttcccctgtgaagataggatgacacactcartggacattatggtgcacagttatacaaacacttcactatgacaggccctgagtttagaaccacacaactgcttggtacttggtcatcgcatattttcccc

SEQ ID NO: 387861 - DNA, 201 bp, Homo sapiens
agaaaagaaggattaaatattcatttatccttttgcttctgacttgttatgtgggcaagtgccacatgagggagtgctgggacctcatatcaagaaaaatkaaaacctacctaatgcgttccaggaatgttcagcatattagcaaattcttattaaactgtcaaaaaaaaaaaaagttttaaaagaaattccagcccctgg

SEQ ID NO: 387862 - DNA, 201 bp, Homo sapiens
aagacctttatgatggtagttcccctgtgaagataggatgacacactcaatggacattatggtgcacagttatacaaacacttcactatgacaggccctgrgtttagaaccacacaactgcttggtacttggtcatcgcatattttccccattacgtaatgacttcctgtgcagatgacaaaatgcgttttctcaacaaaa

SEQ ID NO: 387863 - DNA, 201 bp, Homo sapiens
tgttttccaaagctgtttacctgtcctagctcatttaaatcactgtactttggagttcaggattagcatccccagaggtagctgcattcatacttgatgasttcttttaaatctcagccattgattgtaggttccatagtataggaaatttagccaaccctctattgaatggcagtttagaaaggtcgagctacacttacc

SEQ ID NO: 387864 - DNA, 201 bp, Homo sapiens
tttcatatgaatgtataatgtacctcaggcctataagtattttaaaagggatcaaaatcttagttttaatggaggacatttttatgatggactcctacagmatccatcagaatatgtaagatgatgaggaatgtcttcctgtgttcccagatctcatgccacagaggcccttgcttactctatgtttgaattgtatttgga

SEQ ID NO: 387865 - DNA, 201 bp, Homo sapiens
ctccacattctctttaaactcttctgctcccatgtgcgaaagcctgggctagccaggtgggagatgacagagaacatggagtagagatcagctgtcccagytgaagccttcctagtctagccagactggcaatgtggcctccagatgtttggacagctcaacagaaacatggaccagatcagaagggctacctaggtgacc

SEQ ID NO: 387866 - DNA, 201 bp, Homo sapiens
gaagaaatattgtttgaagagcgtctcactggttgagacagcaaggcaaaaggggtgatggttagggggttgaaaggcagacttttcattctacctagagmgaatagaataccaaaagcctcaagggtataaaaaagcaaggcattctgcacagatcaacaaaactccagggcactatgaagggtcatggctgagaggtga

SEQ ID NO: 387867 - DNA, 201 bp, Homo sapiens
ggggcagaattacgtttgtttctggagaaggggcttttccttcctttttgcctcatttctttgccgttactcttccccgctctgccctcctttcatttgtsacttcctttttccatcctttcactcatttctccctccctcctttctctctctttgtgaccccatttccactaagtttagtggcctaggaagcacctgttg

SEQ ID NO: 387868 - DNA, 201 bp, Homo sapiens
ctgctagagagagctgcatattccaaagtacagagcaatgaaggaacatacctatatgagagcttcaaatctataactgaggctcagaaaagggcaattaytcaccaaaggtaattaaactagagattgagcgagcagggtccatctttagattgtagtccagggtgttaccacacctggcaaaagtagaatcagttctta

SEQ ID NO: 387869 - DNA, 201 bp, Homo sapiens
cacctctgattcaccctgtttatagacatgaggttttgagatctattcatttcacatcaataatccctcacattcatcctattggtaccagccagtataarcctctattacctctcaaatatctagtgtaataaactaaatatctacctatttcctctggccccacaaatccagcctgcatttgaattttgtgtggctctt

SEQ ID NO: 387870 - DNA, 201 bp, Homo sapiens
gtgtaataaactaaatatctacctatttcctctggccccacaaatccagcctgcatttgaattttgtgtggctctttccaaagctcacttcagccaggcaygattgggttcaatcctctgtctcccactgcctctctaagtacaaatttctgaaagtcactccagaaatttttatcactttacctggagacagacctccca

SEQ ID NO: 387871 - DNA, 201 bp, Homo sapiens
tatctacctatttcctctggccccacaaatccagcctgcatttgaattttgtgtggctctttccaaagctcacttcagccaggcatgattgggttcaatcytctgtctcccactgcctctctaagtacaaatttctgaaagtcactccagaaatttttatcactttacctggagacagacctcccaacttcaggtttgtct

SEQ ID NO: 387872 - DNA, 201 bp, Homo sapiens
agcaaaaagcagagctcacttggtaaggcaccctggagccagcaaattatttttaccacatgtattagttccttctcacactgatttaaagatactcttcragactgggtaatttactaaggaaagaggtttaactgactcacagttctacatggctggggaggcctcaggaaacttacaatcatggtggaaggcaaaggg

SEQ ID NO: 387873 - DNA, 201 bp, Homo sapiens
aaagtcactccagaaatttttatcactttacctggagacagacctcccaacttcaggtttgtctgggagagtcccagatggaggctcttgtcctggtgccmagtcaggtttagcatttgttctcacccctgtcactctcaaaacttaaccagctgggatgcaaaattacatgacacttttaactatttctttttttatagg

SEQ ID NO: 387874 - DNA, 201 bp, Homo sapiens; identical to SEQ ID NO: 85233

SEQ ID NO: 387875 - DNA, 201 bp, Homo sapiens
gggatcttacagaacttaggtgtgatactgagcatgagctacttgtgttgcattttggtgttcaaaagaaaagttctttaaatagttctgctggaaagacaaaaaaaaaaaaagaaaaaactttcacaacaaaaatctccaaaaacaaaaacccagaaaactggcatagaagtggatgatctttgcaatttttttcagtat

SEQ ID NO: 387876 - DNA, 201 bp, Homo sapiens
ctagaagaaaggcagatttatcagcaaggcatggcgggccattggcaaaccatgggacaaccactaccaacttcactgccattgctccatatttccctccygttttcaatgagccccaactttgctcaggacatcacacatattctactaatttggatgagtccttttgaaagaaaatatctacctcatggttctcaaagt

SEQ ID NO: 387877 - DNA, 201 bp, Homo sapiens
tagagctaattaggagtctccatgagctacactgtgtactacatgctgaggacaaagcagtgagccagacaaagttcctgtccctaggaacttacattccmctggatgcatatcagcctccataatgctgttgggttgaattgatgcaaaatgggcccaaaatagttggccaagtggaggtctcagagaggatgcaaaggg

SEQ ID NO: 387878 - DNA, 201 bp, Homo sapiens
ggttgcctgtttactcctttgattgtttctcttgctgtcctttgcctattttttaattgggttatttgttttctggctattgagttgtttgagttccttattttttttttttggatattagcactcattagatatacactttacaaatattttctcccaatacctgtgttgtctcttgattctgttaattgttttctttgc

SEQ ID NO: 387879 - DNA, 201 bp, Homo sapiens
cttatgtgaattacatggtattcaagtgagtattcccatcctatgtgtgtaccgagtaacttagggataggacacagataatgaaaatgaatttgcagtgycaccttttccatgaaccttgatcattctcttttgttcagctttaaattaaaaaaaaaaatcaatcaactttctttggaggacagctgatgctattttatt

SEQ ID NO: 387880 - DNA, 201 bp, Homo sapiens
gttgatcaggctggtcttgaactcctgacctcaagggatctgcctaccttggcctcccaaagtgctgggattacagatgagagccaccaaccctggccagsacataatttatttcaggtgaattgattgttggaggattttgatccaagcaatcaatgtcccttggtgttcctttcaaacagcagtaagtgacctgaattt

SEQ ID NO: 387881 - DNA, 201 bp, Homo sapiens
tgttccttttaaccagagaagtaaaaggtcttcttgaatccccatttcaaaagatttctgattatgtgtcattgggctaagccatgctatatgcctggaasgtgtctgggaaggaggaagttgtatctgccgcaagaaatcaacagacagatgattggtaggctacgtttccagaggatgatttttcagagaaagtctcac

SEQ ID NO: 387882 - DNA, 201 bp, Homo sapiens
aataatttactctcattgataactaatattttctatttccctctattgttttgtggtggtggtggtggctgtggatgaacatcattctcaaatatattatrattcccttcctcatcaagcccagcatgataaacttcagttttgcctgatggttcatcatcttatttctgtgtgtaagattgttggatttgacattaaaca

SEQ ID NO: 387883 - DNA, 201 bp, Homo sapiens
ccaggggattgtcctgctaaagtttgagaatcatggaagctttttaacctctcattatagctttataagcagcaactcactggattcctatcaacatcctrtgagtgtcatttggacaagtatatttatacccatttgatgcatggtaggcacgcagatgagtcaaatgacttgaaggaatagagttttacataatatact

SEQ ID NO: 387884 - DNA, 201 bp, Homo sapiens
attatagctttataagcagcaactcactggattcctatcaacatcctatgagtgtcatttggacaagtatatttatacccatttgatgcatggtaggcacrcagatgagtcaaatgacttgaaggaatagagttttacataatatacttttatatatttatacttctaatatatttatactttataacagatttgactgtt

SEQ ID NO: 387885 - DNA, 201 bp, Homo sapiens
ctccagaaatacagccctattgatatcttgagtttagtccagtgagacttattttagacttctgacatttggaactgtaatataataccttcatgttattyttattgctgttgtaacaaataaccacaaacacagttctactaatttctttctcaaggtagcttctcaattttgccaacgctggttaccatacatacttaa

SEQ ID NO: 387886 - DNA, 201 bp, Homo sapiens
tcaacctcttcctcctaggttcaagcgattctcctgcctcagcctcctgagtagctgggactacaggcgcccatgaccacgcccggttaattttgtgtttktttagtagagatggggtttcaccacgttggtcaggctggtctcgaactcctgacctcaggtgatccacccgcctcagcctcccaaagtgctgggattaca

SEQ ID NO: 387887 - DNA, 201 bp, Homo sapiens
tagacaaagatggtctaggtcccaaaggcagtctacctttgcagaggaggtgcactttccacctgcgaataagctggaggcagttgcaattattaccatargacgaatttgaaaaatgaccaggaagagtcagaatcatacctggtgtactggaagtcatcctagattagaaaattaagtttgaatatgaatttagtgctt

SEQ ID NO: 387888 - DNA, 201 bp, Homo sapiens
ccagcatccccatgtattcagatcccacagggagataccaatgactataataattttggagtgtaaatgtgtttacccacaaaggcaagaaaacctttgtrgtatataacctttggttatatagataactgccaaaaacttttttttaactgaaatgtttgagtaagtgactttaagatgagagtctgtccattaatgtat

SEQ ID NO: 387889 - DNA, 201 bp, Homo sapiens
tggtttctagatcttcattctgttatcactttagctaggaccactgccaccaccaccaccaccaccaccaccaccaccaccaccaccaccgctaccacaayctccattaccaggacaaccaccagcactgctgccacccaccaccactgctatcaccatcaccactcccatcaccattatcaccactcccattaccaccat

SEQ ID NO: 387890 - DNA, 201 bp, Homo sapiens; identical to SEQ ID NO: 85231

SEQ ID NO: 387891 - DNA, 201 bp, Homo sapiens
cagatgaggaatgcatttcattctgtacgtcaagttcttagtcctagtgggacttaaggactatgatatgtaggttcaggactagtcaagatttccaagcagatttatagagggcattagcactgaattaagttggctacgaatctgtaagtgtgaaattcacagagtggacttgaacaaaatctctgtagttatcaagtg

SEQ ID NO: 387892 - DNA, 201 bp, Homo sapiens
cttggattatttgttccaggctctccaaagtaatgtgtaccttgggaatgcagaaattatctccttagatattctctccctatatatgtcctcacagggarttcttggaattggagaagattccactctcctttaggagctttctccataaaggtattgagcattggacactatatttgcaagggaaaagaggaatgggtc

SEQ ID NO: 387893 - DNA, 201 bp, Homo sapiens
ttcccttttctccacaagggttcccttttctttgcatcttcaccaacacttgttatcattggtgtttttgataataaccattctaacagttggaggtgatwcttcattatgattttaatttaaatttccctgataattagtgatactgagcttctttcatatatctattggccatttatatctcttcttttgagaaatgtc

SEQ ID NO: 387894 - DNA, 201 bp, Homo sapiens
cacacctataatcccagcactttgggagtctgaggcaggctgatcacctgaagtcaggagttggagaccaggctggccaatctggtgagacccttgccccmccatctctactaaaaacacaaaaaattttccgggcgtggtggtgcactcttgtaatcccagctattcgggaggctgaggcagaagaatcgcttgaacctg

SEQ ID NO: 387895 - DNA, 201 bp, Homo sapiens
tgttttctttgctgtgcagaaacattttagtttcatacaattccttaaaaaactaaaaatagaattgccatatgatccagaaattctacttctggatattwattgagaggaattgaaatcagcatgttgaagagatatctgcacttctatgttcgttatagcattattcataatagtcatgatatgccatcaacctaagta

SEQ ID NO: 387896 - DNA, 201 bp, Homo sapiens
atatctgcacttctatgttcgttatagcattattcataatagtcatgatatgccatcaacctaagtatccattgacagatgaatggataaagaatgaggtktatgtacacaaaggaatactattcagcctttaaaaagtgggaaattctgtaacaacatggatagacagatactatatgatcttacttatatgtggaatct

SEQ ID NO: 387897 - DNA, 201 bp, Homo sapiens
agaaatacatacaaagctatccagaacttatttttccaaatgcattaggcatcctctcaccttaccctttacaattgcatggcttcagagattacacagaraacgttcagaaacattgccccagtagatgatcttgcaatgctatgaagtaggcagaacagctgtggctatagcaattgtgcagatagaacgtacttcatg

SEQ ID NO: 387898 - DNA, 201 bp, Homo sapiens
tttattgtaggagtgctttcttctgcccaaagcaatacattatccacatgaaaggatatctcacacagccccatgctgcattactgcagaggagaaacgagacctgaagaaattgtttctagctaaatagctgtagaagaattgcccaaacagtaaacatagtacccagtaggtagtatttcaattcttttctcccctttt

SEQ ID NO: 387899 - DNA, 201 bp, Homo sapiens
caacacatatcattggaatcttccgttacagtctaatacatagccacacattgggagcaagaatgaaatccaacccctgtcctttgcaaaatgcaatgagwcagtgtctgctttgggagcagggagtcagaatttcattgtggacaatggataaggtgagtaaaagggcttaaaacatttgtgctttcaagccataggcta

SEQ ID NO: 387900 - DNA, 201 bp, Homo sapiens
ctgtctacttcttctttcagcaatattcctttcactgtggttcatccatgggtcaagattcattgattcattcactcaaatcattcatcttagcaaaaacmatatatcacataatctgatgttgaactataaaggtttcatcaggtcattcattcaccctgtccacaagctgtgaattattatctctttcctggttgtatt

SEQ ID NO: 387901 - DNA, 201 bp, Homo sapiens
tcatcttgagtcaaagctggaaactgagtggaagtctctgggaaagactcaaacctccttaagctatacacctcttttccccatcagattttccttccttyagtttccaccaaaatgtgctcttggatttttcatatgaatgtataatgtacctcaggcctataagtattttaaaagggatcaaaatcttagttttaatgg

SEQ ID NO: 387902 - DNA, 201 bp, Homo sapiens
cacatgagggagtgctgggacctcatatcaagaaaaattaaaacctacctaatgcgttccaggaatgttcagcatattagcaaattcttattaaactgtcaaaaaaaaaaaaagttttaaaagaaattccagcccctggatgcaattagaggctaccacactggatttgatgggccataaaaccattaaatctaaacactt

SEQ ID NO: 387903 - DNA, 201 bp, Homo sapiens
catctgcagttttccatatctggagagaatctgctagaacatctatctgtctcaagtcatggggcatgagatgaagggcatccaaggacaagagtgtcacrgactctgagttgttagaaccctgagtatttctccccaaggatgtcctttgctactcgtggtacctggagtcttaataaccctcaccaatttcctcagcaa

SEQ ID NO: 387904 - DNA, 201 bp, Homo sapiens
tctagacaaagatggtctaggtcccaaaggcagtctacctttgcagaggaggtgcactttccacctgcgaataagctggaggcagttgcaattattaccayaggacgaatttgaaaaatgaccaggaagagtcagaatcatacctggtgtactggaagtcatcctagattagaaaattaagtttgaatatgaatttagtgc

SEQ ID NO: 387905 - DNA, 201 bp, Homo sapiens
ataaatagtggcttcagtgttaaaatcactttgcaatgaaacaagattgttgattaaaacacctattaaaaaattagaatctagccatattaaagacagtcatcgaatggagtgatttctacgattttgcaccaaaatttaagctattgggtggctttcttgagagcatgagattgcttcttctcagaattattaatgtgc

SEQ ID NO: 387906 - DNA, 201 bp, Homo sapiens
tctaaaatattaaaaaatgaaaagatccaaaatcaaattaatattcccctggaatttcatatctatttcagtgactgtggagtgaatctcaccacgaaagytgctgcagtcttgtataagtttcacatagttttactgtgtttgtgcctatgtgagaataaactactgtgcataaaatcttgctgttgagccatgtgtgaa

SEQ ID NO: 387907 - DNA, 201 bp, Homo sapiens
aagctggaaaagaaagagacagcactcagaactgtatattcacttatttgtattaggtgagctaccagaaaaaaattttagaggcatttcatatggaaaawaattcatgttaaaagcatcttcaaagattgcaacaaatgtatgcccaatccactgtccatattttttgagacaggatcttgctctgtcagatagcctaca

SEQ ID NO: 387908 - DNA, 201 bp, Homo sapiens
cagagaaaaccagaaataaataagttgttgcttgctatctgctaagaaatcattgtttttttcctgcttctggcctcttttctttttctgattcatttatwtttttgaaagggaaataactcagtacatccagaaaacagatacacaggaaaggggatttaccaaaggtaacagatgtttttgtacttttgaagaggtgta

SEQ ID NO: 387909 - DNA, 201 bp, Homo sapiens
atggctcctgggtccatatcctgtctttgtgaatggaggctgaagctgtggtccgtgggtttggaaaagtgagagctgtatcgtaaatgcttcccttgagytagctgacctagttacctggtcagtcatttcaatggatcatcggttgagtgtgactaatgggccattagatttgaaacgtttttgcttaatgccgtctgt

SEQ ID NO: 387910 - DNA, 201 bp, Homo sapiens
tggacctgtgagatgtagtatagctggatgtctgggggtgaggaggttagaagatggtcaaatctcatagtgtagaaagttggggaaactttctggacagrgtgaaagggcacttgcaagatagccatctccatttgctcagaaacaaagcacgtatctacactgtatgtgtttgaatctgaatctgctatctttcacttt

SEQ ID NO: 387911 - DNA, 201 bp, Homo sapiens
acaacctccatcaacaccaccattaccaggaacaaccaccaccactgccaccaccaccactgctatcatcaccaccaccatcaccactcccatcaccactrtgaccaccaccaccaccagcgccataaccacaaccaccatcaacaccaccattaccaagacaaccaccaccacctccaccaccaccaccagtatcaccac

SEQ ID NO: 387912 - DNA, 201 bp, Homo sapiens
catgattgcagcaatttagtcacagcttcaggctccacatctaattcggttatcttactgtttctgccacagcagcagtgactttctccaccatagtcttsaactcctcaaagtcatccatgagggttggaatcaacatcttccaaattcctgttaatgctgatattttgacctcctcctgtaaatcacaaatgttcttaa

SEQ ID NO: 387913 - DNA, 201 bp, Homo sapiens
agtcactaggtgcactgtcaatgagcagtgatattttgaaagaaatctttttttttctgagcagcaggtctcgacagtgggcttaacatatttagtaaacygtgttgtaaacagatgtgctgccattcggactgttgttttatttatagagcacaggcagagtagatttggtataattcctagggttatatttgcagccat

SEQ ID NO: 387914 - DNA, 201 bp, Homo sapiens
tgatattttgaaagaaatctttttttttctgagcagcaggtctcgacagtgggcttaacatatttagtaaactgtgttgtaaacagatgtgctgccattcrgactgttgttttatttatagagcacaggcagagtagatttggtataattcctagggttatatttgcagccatgaatagacttctcctctctagctatgaa

SEQ ID NO: 387915 - DNA, 201 bp, Homo sapiens
tgctaatgattatctgagtcttcagcgagttgtagtcttcttgctggtggagggtctttcctagatgttgatggctgctaacagatcaaggtggtgatttscaatttctaaaaaactcagtagctgcaaattgctataaagcaaagtgcaataaaacaaggtatgcctgtatacattgttcaagatactctaaaaaaatat

SEQ ID NO: 387916 - DNA, 201 bp, Homo sapiens
tactactctcctctgagtcagaacagattcctaggccaaaagctccaagggcttgagctcaaatcttgagtacttacgttttgagtacttgagtacttatwtttcacttttataccttgttttaaattaaatatggaaataaaatattaataagatagcaaacaatgccactgcccattgacgactgtgtctatcaatcaa

SEQ ID NO: 387917 - DNA, 201 bp, Homo sapiens
tacatggtggcagacacaggaatataaactggagagctatacgtatgctcaattacgaggtttgaaaaaataccattgtctatgtttaagtggttttttgtttttttttttttacatttgacttgaagttcaggatcctgtacataactagataaccaggcaaaccacaccaattcagaatattattttatactgtttaat

SEQ ID NO: 387918 - DNA, 201 bp, Homo sapiens
tattttttgactttttgataatagccattctgattgttttgaggtggtatcccatagtggttttgattttcatccttccgatgattagtgatggtgaacatttttttcatgtttcttgaccacttgcatgtcttcttttgagaagtgtctattcgtggcattaactcactttttaatgggattcttttttcttgttgatgt

SEQ ID NO: 387919 - DNA, 201 bp, Homo sapiens
catagaactggctgcggcttcctagcttgtcacatctccggtctgaagatgatcaaataatgagcaacacatccaggttatagggaacacgggaaacaccmcgcagctgggtgtaccccagcccctcagagtgcacattggtgttgtttgtcctagtggacttcggagtaggccagtgccttctggtcagttcctcagtgg

SEQ ID NO: 387920 - DNA, 201 bp, Homo sapiens
ttcagactgaagtactggcagaataaagcaattatgcataacaatttataaaacacataagccatttagagaatttagactttaaagtggctgagaaccamtgaagtgtcttgatcagagaagcaacctcatcatataagcattttacagaaatcatgctttgcacaacggacctaatggatggaggtggcaaaattgtgg

SEQ ID NO: 387921 - DNA, 201 bp, Homo sapiens
ttcagtagactgattcctgaggctttggggcaggaactttttctttctccatatccccatggagatggttcatttaccctgaattaagatttggcccttcrgtgcagtgccaaggcagtttaaagagaagaaaagtaatttctgatcattgactaagatcaaggtaaatcatgacacttatcctttctatgatttgccagt

SEQ ID NO: 387922 - DNA, 201 bp, Homo sapiens
tcattttgagtctctgaaaactcacatctctcttaatctgctctacttttttcttggctttgtatagtgcttatgttctgctacactttgtaatttattgmttatgcttaccatgggcagggattcttaactgttttatttatttatatatcttaaacattgaaaacactggcatgtagtagatgcttaataagtaattgt

SEQ ID NO: 387923 - DNA, 201 bp, Homo sapiens
ctgggctaagctgggtcaacaaaaatagtcatacgggaaggaagcaactcagtggtactttgtctcaggttgggttctcctagaagcaggctgtgagcctrtgatttcagtgcaagtagttaatagggaaggtgaagggaatactgctagaggagtaggaaagtgaggcaaaggagggaaggcattgaacaaagggcataa

SEQ ID NO: 387924 - DNA, 201 bp, Homo sapiens
gaacttaggcagaatttatctcagagttagtctacctagcggtgagggagctggggtatttacacttcaacatccctaatgcctccagtctgctgtgtggrttgtgactcaggcccaggagcaagaaaaaaccactggcagagaaatgaaggtattgataattgaaaagctcttgtcgttgtcaaacttgtctggaagatt

SEQ ID NO: 387925 - DNA, 201 bp, Homo sapiens
ctcatctgctgggaaacagttcccacttctcccatgcccaccaccaccatcactactgcaatagcaggcaagaaggagtctacaggggcaacagacagtcrtgttaacacctgttactgcggttccaacctcttctagaattttctacaagggcattggaaggtttcctgaggtcaggtgcaataaccaggaggaaactga

SEQ ID NO: 387926 - DNA, 201 bp, Homo sapiens
tggcaccaggattagaccaatgacagaaaaagaaagtgctctccctgccaaactggccaataaaactgttccacatatcccagactcagggttacctaaayaacctgtgtttaaagagaacaaaaacaaaagcctctgacatagtcttactccttgccaaattcgtcagaaagctgatggattcaaattcccccaatatga

SEQ ID NO: 387927 - DNA, 201 bp, Homo sapiens
cgctgatttattttccattacagtcaacatcctgagtctgtttctaacagtggaatcttcatattgatagagtctttcatggtaagattctttacatggtrtgttcgagctttcttactaaacttaatgaagatcaagactaacctgctcaaaagcactgagttagaatcctgaagatctgaatgattagctgggtgaact

SEQ ID NO: 387928 - DNA, 201 bp, Homo sapiens
actggcctgacatcttccagatagcagatgaggagcaaatgaaacaggacctcactttaacatgccttaaaccaagagtcagctaattttttccgtaaagratagtacatatctcaggctctgagagccacccaatctctgttaaaaactacacagttctgctgatatagtgtgaaaggagccttagacaatatgtaaatg

SEQ ID NO: 387929 - DNA, 201 bp, Homo sapiens
aatccatcagaatatgtaagatgatgaggaatgtcttcctgtgttcccagatctcatgccacagaggcccttgcttactctatgtttgaattgtatttggaaaaaaaaaaaaaaacaaaaaactagggctagcaaaattgaaaaaagataaaagacgaaagaagccacatgtaaacatactgtgtttactcttctaaaata

SEQ ID NO: 387930 - DNA, 201 bp, Homo sapiens
taaagaagagaaagaaatgccaaacatacgaataaagtctgaatatatctgtaacattaaaagtgtaggtgtctatctttgaagatatgtcttaaggacartgaaagagtcagtgagtaagagaagagagtcctgggatttcatacaagatcagtgttacttgatggtgtaggctcctaggtatttcatctttaggatata

SEQ ID NO: 387931 - DNA, 201 bp, Homo sapiens
tcatctgtagtttagggaactgaccagaaagattatgacttactcaaggccagtcaactaatggtcacagagctggagataattaatacagttttaataayaaaattcatcaaggtttaatggtaagaaaagtaaaagtgtgtttatgcaaattcctgttagaattatcttaatcagtttaaatagactgtagactttagt

SEQ ID NO: 387932 - DNA, 201 bp, Homo sapiens
attttttgtacagatggggtcttgctatgtttcccaggctggtctcgaactcttgggctcaaatcctcctgcctcagcctctcaaagtgctggggttacargtgtgagccaccacagttggcccagagtttttttaaaaacataaattttcctcacttttgcgtaaatacctagaagtaggattgctgtgtcatatagtaa

SEQ ID NO: 387933 - DNA, 201 bp, Homo sapiens
ccccccgacaggccccagtgtgtgatgtttcccgccctgtgttcatgagttctcattgttcaacccctacttatgagtgagaacatgaagtgtttggtttyctgttcttgtgttagtttgctgagaatgatggtttccgtgcccggctaaggttctatagtttttacttgggtttataatacatattgaatttttatacaa

SEQ ID NO: 387934 - DNA, 201 bp, Homo sapiens
gcaggcaagggaggcaggaaatccagaggagaatgagcctgtaaagcatggctccttccagcccttgttacttcctctgcccaagtgtgggggagggtccygtctcttggcatctgggcccagcaagagttcagaggtttggtagtctctgcttggtccatatgcaaaacacatgtatgtgtatacattattaatggcaag

SEQ ID NO: 387935 - DNA, 201 bp, Homo sapiens
cagcctgcatttgaattttgtgtggctctttccaaagctcacttcagccaggcatgattgggttcaatcctctgtctcccactgcctctctaagtacaaatttctgaaagtcactccagaaatttttatcactttacctggagacagacctcccaacttcaggtttgtctgggagagtcccagatggaggctcttgtcctg

SEQ ID NO: 387936 - DNA, 201 bp, Homo sapiens
gctgggtgtaccccagcccctcagagtgcacattggtgttgtttgtcctagtggacttcggagtaggccagtgccttctggtcagttcctcagtggcccayattcagctcttaaaggcagagcatgctaacgggaggtccaggcttccgcctgaggccaaatacaccccaaaagctcatctgttatagcctgatatgaaat

SEQ ID NO: 387937 - DNA, 201 bp, Homo sapiens
agattagaaaattaagtttgaatatgaatttagtgctttcctcagcagagaaaaccagaaataaataagttgttgcttgctatctgctaagaaatcattgtttttttcctgcttctggcctcttttctttttctgattcatttatatttttgaaagggaaataactcagtacatccagaaaacagatacacaggaaagggg

SEQ ID NO: 387938 - DNA, 201 bp, Homo sapiens
atttcccaaagggtaaaacaacaatgagaacaataagataaatagaaagaaaaaattattacatgaatgtacatgaagacaactttaaaatgtccaatatycaactgataggagtttcaggtagaaaagtaaaagaaagaggcctggaggaaattattaaagaccaacaatttccgaatgctgataatgtaagtcattaga

SEQ ID NO: 387939 - DNA, 201 bp, Homo sapiens
agcaataacctgtgaaaatgctcccccggctaatttgtatcaatgattatgaacaacatgctaaatcagtacttccaaagtctatatatgactattacagrtctggggcaaatgatgaagaaactttggctgataatattgcagcattttccaggtaagaaaatttattttttaaaatcatgttttaaaattacacaaaga

SEQ ID NO: 387940 - DNA, 201 bp, Homo sapiens
ttctcatgaagtggcaggtctcctagagagtgagtggaagcatgcaaggcctcctgagatctaggcttagaatgggcatcctgtcacttctctcaattccrctgatgaaagcaaatcataagttcaattcatatctaaggtggcagaacagaaccctccttcctttccctttctcccataatgttgcaaggaaatgaagat

SEQ ID NO: 387941 - DNA, 201 bp, Homo sapiens
gagacattgtggattcagttctggaccaccacaataaagcaagtcacataatttttttgtcttcccagtgcatatgaaagttatgtttttgctatactgtrgtctattttgtgcaacagcattatgcctaaaaaacaatgtatataccttaattaaaaaatacgttactcctaaaaaatgctaatgatcacctgagtcttc

SEQ ID NO: 387942 - DNA, 201 bp, Homo sapiens
gtactagctaggtggctggtatccaattgtcagctccagctgggcttggctgtgctagctctgcttcctgaatatttatcctggggccaaagatgaggggkaaacaatacctggtggatggtcttctcatggcaaatgacaaggtgcaaaaaagtaagtgggaatacatgaggttgcttaaggcctatgctcagaaatggc

SEQ ID NO: 387943 - DNA, 201 bp, Homo sapiens
ttatgtttttgctatactgtggtctattttgtgcaacagcattatgcctaaaaaacaatgtatataccttaattaaaaaatacgttactcctaaaaaatgytaatgatcacctgagtcttcagcgagttgtagtctttttgctggtggagggtctttcctaggtgttgatggttgctgactgatcagggtagtggttgctg

SEQ ID NO: 387944 - DNA, 201 bp, Homo sapiens
agtacaactttttcaacattggagtcagtcctctcaaactgccactgctttatctgtgaagtttgtgtaatattctaaatcctttgttgttatttcagcartgttcacagcatcttcaccaggagttgattccatcccaagaaaccactttctttgctcatcataagaagaaactcttcattcatttaagttttatctcat

SEQ ID NO: 387945 - DNA, 201 bp, Homo sapiens
gaaaaaaataagaatagttgaaaaatagccttgtataaaacaaagtttggaaaatgatagcatataatttataaaataattatcttgtcttttaaaattaytcttagtcaagtctgcccattatctccattgcttaattttacagattaccaatgacctatacccatttgcttaaatttccaaggcctgatttttgctacg

SEQ ID NO: 387946 - DNA, 201 bp, Homo sapiens
tgttattaggacatgctaaaaataatagtttagaatataaaatatgtttttaaatgttgcaagtagatttaagagaacagtaatctatttttaaactgaamtttcagaaattaatatattttaaaacatgattagagatgtagcatagaattttaatttttttttttttgagacggagtttcactctgtcacccaggctgg

SEQ ID NO: 387947 - DNA, 201 bp, Homo sapiens
aaatcttaatgaaaatcagacaatggtctatatgttcatttgtgttcttacttaataaaatgtgggttttagacaatattttgccagtcatgaattcctakagaaggaactctttgggagaacagactagtgatctatagacatgatgacctccaactcagatcttctgtagctaaccactgaccgggagaacatgtatga

SEQ ID NO: 387948 - DNA, 201 bp, Homo sapiens
gaacagtaatctatttttaaactgaactttcagaaattaatatattttaaaacatgattagagatgtagcatagaattttaatttttttttttttgagacrgagtttcactctgtcacccaggctggagtgcagtggtgcaatcttggctcactgcaacttctgcctcccaggttcaaacgattctcctgcctcagcctcc

SEQ ID NO: 387949 - DNA, 201 bp, Homo sapiens
cctccaactcagatcttctgtagctaaccactgaccgggagaacatgtatgaaaaacatcttcaaaggcattgaaaaattaacatttatcaaaaacaaaayacattttattacatttgaacttagacctttactatctaatggctatggtactatttaaatgtcaaagtgtgatctagcatcagcctaatctggttagaaa

SEQ ID NO: 387950 - DNA, 201 bp, Homo sapiens
agtagtggtctgttgtttcactgaactagcaggttgatttagtgacattcatagaccaattgtgtggctgtgatggcggagtaaatgatggcagggaataytgggtgtgcatattgcgttgagtttttcctaaagcactaatggtaggaaccaagtaagtctttgtatattgtaggattatacagtcaagtggtggctcac

SEQ ID NO: 387951 - DNA, 201 bp, Homo sapiens
tctaaagtgtaaaaaatcatagttttctattaaaggaagtcatgattgttaaaaataatttttaaatagtgtgcctagattcttctagtataatatataattttttttttttttttattttgagacagagtcttgctctgtcacccaggctggagtgcagtggctggagttgctcactgcaacctcgcctcccgggttcaa

SEQ ID NO: 387952 - DNA, 201 bp, Homo sapiens
taaatatttttgtgacattttacacatagtagatagcccaaatatttatttactgaacttcttgatgaaaactataagtctatctaattagagaaagctcaaaaaaaaaaaaaagataaggagagatgggacatttgacatttaaagggaaataacttatttatacatgtacagtttacatcgtctacttttctgtaacta

SEQ ID NO: 387953 - DNA, 201 bp, Homo sapiens
gttactcagcaatagctaactgatagtgtgtcaattatgtatgcttttagttttaagaaaagacttgctcacaggggttggaaagcagggacttatttgtmtttataataggaagaataaaattaggtacagggctggttcagtgcttcaacatgacataaatgagtctactgatcatatcttccacaacttagtttgctg

SEQ ID NO: 387954 - DNA, 201 bp, Homo sapiens
taaagctgggtgaggcatgggtgtcttccttcaacagggcagctactttgtgaggagtgtatatatcatttgatttttttataagttaaatttgaggcccytgttagatgtgagggtgggccaaaattcctgtgaacagattctccccgttaccccgcttcctttactctggcatctcattttctatcctttgaaaacggt

SEQ ID NO: 387955 - DNA, 201 bp, Homo sapiens
tcatggtctaaattatagattctgactcagtaggtctgggagtccatatttatgtattcctcaagaaattttaaatcttaaccagatctgggggcccgttygtctagagaacagtttacctttaactcaacaaatatttattggatatattctatattccagaaattatgccaggaaatggccctgcactgaagtctggta

SEQ ID NO: 387956 - DNA, 201 bp, Homo sapiens
gtaactgttggttatattatgggtattaatagtactgtctcaggaaatggatctctgacaggtagacttgcccaaagtcacagctaggtagttacagaatyggaattcagccctgtggctaccttatctcaaaaccctcctgcttcccccaaaccaaagtggttctcacagccaaattgcaaatggagcaacgtggttggt

SEQ ID NO: 387957 - DNA, 201 bp, Homo sapiens
aaaaaaaaagaaaaaactttcacaacaaaaatctccaaaaacaaaaacccagaaaactggcatagaagtggatgatctttgcaatttttttcagtatatarataaatgattttgatcccatttaaaattttatcaaatgcaaaaagaaacaattcaaagtatagagctaccttttcttactctactgaaatctacacttta

SEQ ID NO: 387958 - DNA, 201 bp, Homo sapiens
gagcataaacaatgggtcatgaattacaatcaaacaaaagataaaattctaagaagtcttttaaagtggaaaaaaataactgaaaaatactgaatggaggrcagtttttcatgcactgtgttacgaataaaaaatttgattcaatggattacttaatcaacattttaatagttgtaaatcttataatatttaagctgtttt

SEQ ID NO: 387959 - DNA, 201 bp, Homo sapiens
cttatttgtattaggtgagctaccagaaaaaaattttagaggcatttcatatggaaaataattcatgttaaaagcatcttcaaagattgcaacaaatgtaygcccaatccactgtccatattttttgagacaggatcttgctctgtcagatagcctacagtgcagtagaatggtcatagcttcctacagccttgaactact

SEQ ID NO: 387960 - DNA, 201 bp, Homo sapiens
cgtctctactaaaaatgcaaaaattagctgggcatggtggtgcactcctgtaatcccagctacttgggaggctgaggcaggagaattgcttgaaccagggrgttggaggttgcagtgagccgagatccatgcccctgcactcaagtctgggcaacagagtgagactctgtctcaaaaaacaaaacaaacaaacaaaagatg

SEQ ID NO: 387961 - DNA, 201 bp, Homo sapiens
actattttgatttgaacaaaggtttccatacctaaaatgtcaaaaatcaagagtataacaaccgatgcaataggaagatggaaaggtgagagctccttgcyagcagaagttgtgtttgggggaggggttgggggagcaagttgtgcagggagcattctggaagagtgtgacttgaacacaaatgagaaagaggattctctt

SEQ ID NO: 387962 - DNA, 201 bp, Homo sapiens
ttttgggaagaatatatctagtccttttgtaacaatatgaaattttaattttattttctgaaccttaattacctcctcgtttcctttctgcataccttatyggttatcctatacctcctacttctctttctttactcttttgattctttaccattgataaccatgtgcaagggtagctacataatgtgtgaggactatgcc

SEQ ID NO: 387963 - DNA, 201 bp, Homo sapiens
aacattttgaacactgagcaggtcatgttaaacatggatgtggcccacaagccacaagtctgaaccctaaaacattttatcctcacagatgttttcctcayggctgaaatcactcttatgccctgatacagaataatgcctgagacctgtagcagtgatgggtgcctgccaacagaaattgccagaatctcctttgtttaa

SEQ ID NO: 387964 - DNA, 201 bp, Homo sapiens
gatacagaataatgcctgagacctgtagcagtgatgggtgcctgccaacagaaattgccagaatctcctttgtttaagcttatttatattcagctacctgraagaatgtgggtgtgaaacaaaccttcttctctttacgaggcttggggagcccaggttcccaggcctgtaggaatgaattgaatagtattgatgcctctt

SEQ ID NO: 387965 - DNA, 201 bp, Homo sapiens
taccaaaaatttagtttatgcagttattataaattcatcattatgggcagggcagtgtataagaaagccagaatccacaacttgaaaaggtaatcactgaygcaactgttttgtctacataactgcataaacagtttgcctactttccactgagttaacccaatactttgttgtcatgtaaacacaatctaaatgaaatcc

SEQ ID NO: 387966 - DNA, 201 bp, Homo sapiens
tctaatttggcaaatttctcattttatgcatttcttattttaggatgaaaaattttgaaaccagtactttatcattttctcctgaggaaaattttggagaygacagtggacttgctgcatatgtggctaaagcaatagacccatctatcagctgggaagatatcaaatggctgagaagactgacatcattgccaattgttg

SEQ ID NO: 387967 - DNA, 201 bp, Homo sapiens
caataccttgcataaaaactataggtattcagtaaatatttgttaaattaactaataaacatgttaactaatgtcatggatattactgactttttaaaaawctctaacattctatgcttagaatcaaatatagcaaagacttaaaagtatgccactgagaaaatgtaaaatcacaacatttaatggaaaattttaagaaca

SEQ ID NO: 387968 - DNA, 201 bp, Homo sapiens
aactaataaacatgttaactaatgtcatggatattactgactttttaaaaaactctaacattctatgcttagaatcaaatatagcaaagacttaaaagtakgccactgagaaaatgtaaaatcacaacatttaatggaaaattttaagaacattgattttataagaatttttcatgatcataaactgctattgtaaaaata

SEQ ID NO: 387969 - DNA, 201 bp, Homo sapiens
atacatgaggggagatacttgcttgagttttgcctcacactttagagcaaatttaaggctcatgatgatgagagaaatgtgagaaagcatttggtgtaccrcaaagtacaaagttccctcagtgtgtgggtttttctgtgagcggtaaaggtcttgggggaggctgtggtgtccaggtctcagtacttgcacagaagaact

SEQ ID NO: 387970 - DNA, 201 bp, Homo sapiens
gctcaaatgttttcttcctgctggcttttcgtgttatcattcattttgattactgttgtctaaactttcactttagatttcaatttgtctatgcagcattwatctttcaactttgctgtttcatctctccttcaaagcacttcatctctcttcccaaattagttttcctttgactttcatatttcaaagcacaagatggtg

SEQ ID NO: 387971 - DNA, 201 bp, Homo sapiens
aaaggcaatcggtattgtgggtactcattgatggtgataaagacaaaaaggcagaaaatatgcagggggagagaattagccttcctccctgatttcttctwtagtctacaacaaaatcactcaaaatcagttttccatatttaaattaggagaaataaaattatcctggccaaggtggtctctggtaggcagcactgattc

SEQ ID NO: 387972 - DNA, 201 bp, Homo sapiens
tgaggcaggagaatcacttgaactctggagatggaggttgcagtgagccgagatcacaaaactgcactccagcctgggggacagagcaagaccctctctcaaaaaaaaacaaaaaagttatgaaagatcaagtgttttatgtttataattttttgatgacaatctttgaatataagaaacagaaaaaaagacaaccttgca

SEQ ID NO: 387973 - DNA, 201 bp, Homo sapiens
taaaaaagaggtctagaggtgtagtggcagtgtgatcactcaagattatatagctccggattcgttcaatgggccatgatgaaagcacggcaacgattaartctggtttcttggtctttcttggcagtgtttaaattggttcagttccataaattgtaaattaagatctgtttgacaacttttaagtatttcaagcataat

SEQ ID NO: 387974 - DNA, 201 bp, Homo sapiens
tcattagatatacactttacaaatattttctcccaatacctgtgttgtctcttgattctgttaattgttttctttgctgtgcagaaacattttagtttcayacaattccttaaaaaactaaaaatagaattgccatatgatccagaaattctacttctggatattaattgagaggaattgaaatcagcatgttgaagagat

SEQ ID NO: 387975 - DNA, 201 bp, Homo sapiens
ttcatatctatttcagtgactgtggagtgaatctcaccacgaaagctgctgcagtcttgtataagtttcacatagttttactgtgtttgtgcctatgtgaraataaactactgtgcataaaatcttgctgttgagccatgtgtgaattagctgtgtgatgttacctccctgttactaccaggctggtttaggatatcattt

SEQ ID NO: 387976 - DNA, 201 bp, Homo sapiens
tacaggcatacctaagagacattgtggattcagttctggaccaccacaataaagcaagtcacataatttttttgtcttcccagtgcatatgaaagttatgyttttgctatactgtggtctattttgtgcaacagcattatgcctaaaaaacaatgtatataccttaattaaaaaatacgttactcctaaaaaatgctaatg

SEQ ID NO: 387977 - DNA, 201 bp, Homo sapiens
catataggcagaacacacagttgtctatgtgatatgctatgtgatatgcttttgaaaccactaaaatcattgaggagaagacagaaggaagataatatttyccagacaatctcaggaagatgcaggctaagtgaagcatattgatgataacttggtatagctgtgatcaacagccaaataaggtgttaataaatctcctca

SEQ ID NO: 387978 - DNA, 201 bp, Homo sapiens
agataagcaagctaaacaaacaaacaacaacaacaacaacaacaacaacaacaacacaacccaaactaaaccaaaccaaaatcatgggataatggttaagkgtactgaggggccattatgcgaacacagtttaattccttggctttaaaactaataagagaagaatacataaacaaatgtggcaaatgtacctgtgaccct

SEQ ID NO: 387979 - DNA, 201 bp, Homo sapiens
gaagtctggtaggagagacagatgtgtaaaattacacttgccatgtagtataataagtgctttcctaaggcatttattaattgcaggggttgtgaaagacraaagaagaaattatctgaaatggatctgaagagttctcagaggaagtgactcatgttgaagaggaagtgacaaagcaggtaaggaatatagggcactgta

SEQ ID NO: 387980 - DNA, 201 bp, Homo sapiens
tagaagaaaggcagatttatcagcaaggcatggcgggccattggcaaaccatgggacaaccactaccaacttcactgccattgctccatatttccctcccrttttcaatgagccccaactttgctcaggacatcacacatattctactaatttggatgagtccttttgaaagaaaatatctacctcatggttctcaaagta

SEQ ID NO: 387981 - DNA, 201 bp, Homo sapiens
gagagacagatgtgtaaaattacacttgccatgtagtataataagtgctttcctaaggcatttattaattgcaggggttgtgaaagacaaaagaagaaatyatctgaaatggatctgaagagttctcagaggaagtgactcatgttgaagaggaagtgacaaagcaggtaaggaatatagggcactgtagttaggaaaaca

SEQ ID NO: 387982 - DNA, 201 bp, Homo sapiens
tttgaaagaaaatatctacctcatggttctcaaagtatggtccttggaacatcagcgtcagcaggactctggagcttgttagaaatgcagatcttaggtcscactacagacctactgagtcagaatctgaattttgttaacatacccatgtgattcctcaaagattgagaagccctgatcagagcctgggatgaaagttcc

SEQ ID NO: 387983 - DNA, 201 bp, Homo sapiens
tgggcaacagagtgagactctgaaaaaaaaaatcacctatttttctagaattcatgtgtacttggcaccctgtatattctttgaccttagtcttataatamctaatggatacagcatcacgttgcaactgggaagttacatgctttggaagaaatggtctggagacccactatgagtagtgtcttattttgtttgcttaac

SEQ ID NO: 387984 - DNA, 201 bp, Homo sapiens
gaaaagtaaaagtgtgtttatgcaaattcctgttagaattatcttaatcagtttaaatagactgtagactttagtcaattattacttctaaaaattatcamctttgaagtggtacaattttgttttccacattacaatgcagaaggaactatatgagacaaaaaaggtacagttggacacttcaagatcaacagacagtaa

SEQ ID NO: 387985 - DNA, 201 bp, Homo sapiens
tccaaacccaatgtgttaaagtggctgttctacaaaggtgcccttctctaacaggtgtaaacactgaccccatggaagtggtctgagacccttttgtaccwtgctaatcatcttgattctaagcatacttcagtatagagagccaatactgttccttgaatccactgagtagtctctccgcagcaatggaaatgaacaatc

SEQ ID NO: 387986 - DNA, 201 bp, Homo sapiens
tttattatgcttttcagggactggatgtttttactttattatgtgaggaagggttagattacagacccttagctattccacaaagcaatagaaggcagaawttcttcttccgctacaggaagcacgcttcgattaagggctttttctttttcttctttttttttctttaagttactgcattactatatcatacttcactat

SEQ ID NO: 387987 - DNA, 201 bp, Homo sapiens
tggtctgagacccttttgtaccttgctaatcatcttgattctaagcatacttcagtatagagagccaatactgttccttgaatccactgagtagtctctcygcagcaatggaaatgaacaatctacttttattgagttagtgtcagctctacatataggcagaacacacagttgtctatgtgatatgctatgtgatatgct

SEQ ID NO: 387988 - DNA, 201 bp, Homo sapiens
tttaagctggaaaagaaagagacagcactcagaactgtatattcacttatttgtattaggtgagctaccagaaaaaaattttagaggcatttcatatggawaataattcatgttaaaagcatcttcaaagattgcaacaaatgtatgcccaatccactgtccatattttttgagacaggatcttgctctgtcagatagcct

SEQ ID NO: 387989 - DNA, 201 bp, Homo sapiens
aaatgttgcatagaaatctatgggcatggcttaaaaaagaatatgggcaataatgtaagagtgggttagaaaacacttttcagaatgaaagatgatgcttsagttttgccatgatatcaagccaatagactctacttcagactgaagtactggcagaataaagcaattatgcataacaatttataaaacacataagccatt

SEQ ID NO: 387990 - DNA, 201 bp, Homo sapiens
aaatgaacaatctacttttattgagttagtgtcagctctacatataggcagaacacacagttgtctatgtgatatgctatgtgatatgcttttgaaaccaytaaaatcattgaggagaagacagaaggaagataatatttcccagacaatctcaggaagatgcaggctaagtgaagcatattgatgataacttggtatagc

SEQ ID NO: 387991 - DNA, 201 bp, Homo sapiens
ctctacatataggcagaacacacagttgtctatgtgatatgctatgtgatatgcttttgaaaccactaaaatcattgaggagaagacagaaggaagataayatttcccagacaatctcaggaagatgcaggctaagtgaagcatattgatgataacttggtatagctgtgatcaacagccaaataaggtgttaataaatct

SEQ ID NO: 387992 - DNA, 201 bp, Homo sapiens
gtcatatgttacagtgtgttcataacaatcttggttttatactcattctcccagtgtaattaataatgccctgtttactgtcaaaaatctctcaatttagkttataaattacataggccacattgatgagctacacttgtgatatgcatcaagtgatctgattctgggtatccaatgttctcttgtcttgttgaaaattct

SEQ ID NO: 387993 - DNA, 201 bp, Homo sapiens
ctgtgtatttgaacaggggaggtattcatgggggaaaatgcagcatttccagagaaggcagagggatgaaaaaaatatataactcaaatagtggtctttawcatgtaaatatccctttcaagacaaagaaaaattgccaaatgagagattttgtttacttctgtccaagctcaaaacatagaatctcttgtaaacaagatt

SEQ ID NO: 387994 - DNA, 201 bp, Homo sapiens
aatattatttaaaagtcattttctattagaatcacaaacctttttcttgtatcaaaagttgtgccacaatcctggttacttttggattcaccaaacagtcyagcagtcatctgtagaaatgaatgcttgagagggggctgtagtactatttgaatcaatttgttccacaattgcattatcactgttactcatcacttgttg

SEQ ID NO: 387995 - DNA, 201 bp, Homo sapiens
tgaaggttgataggaatgtaaattttaagctggaaaagaaagagacagcactcagaactgtatattcacttatttgtattaggtgagctaccagaaaaaawttttagaggcatttcatatggaaaataattcatgttaaaagcatcttcaaagattgcaacaaatgtatgcccaatccactgtccatattttttgagacag

SEQ ID NO: 387996 - DNA, 201 bp, Homo sapiens
aaggcaatcggtattgtgggtactcattgatggtgataaagacaaaaaggcagaaaatatgcagggggagagaattagccttcctccctgatttcttcttwagtctacaacaaaatcactcaaaatcagttttccatatttaaattaggagaaataaaattatcctggccaaggtggtctctggtaggcagcactgattca

SEQ ID NO: 387997 - DNA, 201 bp, Homo sapiens
aatccatgtagaagactgaaaatggcaatggggtgaaggatacggcctctccccaaccctttcaagccttgactttgtctcaggttttgcctggaacccaratgagctcaacaaatgccagggaagtcatgggaagggaagttgactgagagtagaggggcttaaaattctgcatcattatttactattttggactcattt

SEQ ID NO: 387998 - DNA, 201 bp, Homo sapiens
aagttgactgagagtagaggggcttaaaattctgcatcattatttactattttggactcatttaaaagtttctgctcttggaagatgccccttcttgggckgatattaactttgtccaccaaaatttgcctatgagtggtctcttgaaaacactttaacccaaataggttattacaaccaaggaaatttcagacccttgac

SEQ ID NO: 387999 - DNA, 201 bp, Homo sapiens
gctttccaggtaactggacaaagaaatgaatatataaaatagacaacttgacagtaaaacaaatgaataaaacaagtcagactgatttagttctgaatcastctgtatcttttcacttggttagggggagaaaggtgttcaagatgtcctcgagatactaaaggaagaattccggttggccatggctctgagtggtaagac

SEQ ID NO: 388000 - DNA, 201 bp, Homo sapiens
cttttccattagctttatgaagtcatttgcttgtttggaaaaaatccaattatattttttcttttaactaaaatgtaatgtcaaagttttggttatgattytgaaactctaaagccttttattttattttattttttaattctagatggaagctgtatccaaggatgctccggaatgttgctgaaacagatctgtcgactt

SEQ ID NO: 388001 - DNA, 201 bp, Homo sapiens
ctacaaggccatatttgtgacagtggacacaccttacctgggcaaccgtctggatgatgtgcgtaacagattcaaactgccgccacaactcaggtaaccaygatcatgtgggccccgagctgaggcgaaagggatcttgactgggaatgttagggtctgggttctactgatagcaacgttgctaaacatctagttaatctt

SEQ ID NO: 388002 - DNA, 201 bp, Homo sapiens
tccttgggaaaacgattacctgcctgattattattgcattcagttcatattaaatgtatgcattattttttcagggtgccagaatgtgaaagtcatcgacragacattggtgaggaaaaatcctttggccgtttccaagatctgacagtgcacaatattttcccatctgtattattttttttcagcatgtattacttgaca

SEQ ID NO: 388003 - DNA, 201 bp, Homo sapiens
tgctatctggtgaatgtgctgtgatgatgaaaatgttacccgcacttccaatatagtagccatcagccacatgtggctattgggtgcttgaaatgtgtctrgtttcaatgcttcattttatttaattttaattaatttaaatttaagtagtcatatgtgcctagtgggtgtgtattgaatagcacagatctagatgttatg

SEQ ID NO: 388004 - DNA, 201 bp, Homo sapiens
ttttatttaattttaattaatttaaatttaagtagtcatatgtgcctagtgggtgtgtattgaatagcacagatctagatgttatgaataaaattgagcaytggggaaacgtaatctaatagactcaagactagtttaagttgaccaaccctgctatgtgattatcctggcgaagtcatataaagtctttttgatgtagct

SEQ ID NO: 388005 - DNA, 201 bp, Homo sapiens
ggaagtgggagatggattgcaagtatggactctggtttctttaaaaaggaaacccatgggtttttacatattctcaattgaacttgtagttcctttagttscgcataatgcttttacttcccgggagagaagaggtgggtgtgcatggttagttgtttcttcatgtccccttaggttacagtttaatgatgggtgtttcat

SEQ ID NO: 388006 - DNA, 201 bp, Homo sapiens
agtaacatcaaagatcactaatcacagatcaccgtaacagatgtaacaatgaaaaagtttgaaatagagtgagaatgaccaaactgtgacacagggatacmaattgagcacgtgctgttagaaaaatagtgctgatacacttgcttgatgcggggttgccacaatgccacttgagcattgtacataccttaattaaaaata

SEQ ID NO: 388007 - DNA, 201 bp, Homo sapiens
aagtgggagatggattgcaagtatggactctggtttctttaaaaaggaaacccatgggtttttacatattctcaattgaacttgtagttcctttagttgcrcataatgcttttacttcccgggagagaagaggtgggtgtgcatggttagttgtttcttcatgtccccttaggttacagtttaatgatgggtgtttcattt

SEQ ID NO: 388008 - DNA, 201 bp, Homo sapiens
aacttgtagttcctttagttgcgcataatgcttttacttcccgggagagaagaggtgggtgtgcatggttagttgtttcttcatgtccccttaggttacartttaatgatgggtgtttcattttccaaaagtttagcaaactgtgaaggtttccataaagggcactatatttgcttgcaaaaatccagtctttattcctct

SEQ ID NO: 388009 - DNA, 201 bp, Homo sapiens
acttcacttggaaatatgacaacaattaatttaactacatgtaaaaatagcgataaattcggatgacttttctttttcttagtatgacagtaaatgcttaygttcatggtgtaggaaacagcattaaatgccagataaccatcttatccggatgaaccagactggattgttggctcaaatgttttcttcctgctggctttt

SEQ ID NO: 388010 - DNA, 201 bp, Homo sapiens
tgaattaggacaaaagttttctaatagattcccctgcatcagcccctgtccacactttaatttaggcacagcagcaatagaaatgctgttaataggtaaaytggaccttgtcaagtcttggcccagaaccctttaaaggcttttcgtctcacattgaggaagtgcaaagacattacagtggcctacgcagtcctgtgtgat

SEQ ID NO: 388011 - DNA, 201 bp, Homo sapiens
attgcatttcccagccagagggagaacactgccagtttttgctgttttccaaagctgtttacctgtcctagctcatttaaatcactgtactttggagttcmggattagcatccccagaggtagctgcattcatacttgatgagttcttttaaatctcagccattgattgtaggttccatagtataggaaatttagccaacc

SEQ ID NO: 388012 - DNA, 201 bp, Homo sapiens
ttaaaggcttttcgtctcacattgaggaagtgcaaagacattacagtggcctacgcagtcctgtgtgatgtgacctcttctatactttgggatcctatttyctatcactgaccctctcttactcactcctgttctcctgactccttctcagatgttccaggggtgctcctctcttaggatctatttacttgttctttatct

SEQ ID NO: 388013 - DNA, 201 bp, Homo sapiens
tttggaggacagctgatgctattttattatcaactagttgagtttttattgcaatacattttgcaatgtgtcctcttttgctgtatgactcgctaggtgamccttgattcctcacactgcatcatgtagctggtcacgtgaaactaagaatagaaattctgccagggttgtggagactttgggttgatggcatgaaggaaa

SEQ ID NO: 388014 - DNA, 201 bp, Homo sapiens
ttctcgctgatttactatcactcctggcatcataaattcaagtcaataaatgttctgcatatatggggcaacatttgaactctttggagcagagatgtcaygtaggttgtaggaacaaatgtatggctccatgaaggttgataggaatgtaaattttaagctggaaaagaaagagacagcactcagaactgtatattcact

SEQ ID NO: 388015 - DNA, 201 bp, Homo sapiens
cagtcctgtgtgatgtgacctcttctatactttgggatcctatttcctatcactgaccctctcttactcactcctgttctcctgactccttctcagatgtyccaggggtgctcctctcttaggatctatttacttgttctttatctttgaatgctcctcccccaaatatgattctcactctcatatccttcagatcttgaa

SEQ ID NO: 388016 - DNA, 201 bp, Homo sapiens
ttctctgtactcagctctgataatcacattttggagttctggggacatggaccactcatgtgacccagcagttgcttggagatatttttgggtaagacttsagactaatattactgtggcagtagaaaaaaatgtttaaaaggacaagtaaatggaaccacccagaacaaaatttcttacggtggttataacaaaacaggg

SEQ ID NO: 388017 - DNA, 201 bp, Homo sapiens
cccagccagagggagaacactgccagtttttgctgttttccaaagctgtttacctgtcctagctcatttaaatcactgtactttggagttcaggattagcrtccccagaggtagctgcattcatacttgatgagttcttttaaatctcagccattgattgtaggttccatagtataggaaatttagccaaccctctattga

SEQ ID NO: 388018 - DNA, 201 bp, Homo sapiens
tctttgaatgctcctcccccaaatatgattctcactctcatatccttcagatcttgaatcaatgtcaccttcttactgtggccttccctggctgcttaacytaaaattggaccctctctcacattttctgatcctttcctagcttaattttttcttcagcacttattacaaacataatctgcacttaatttgtcttgctta

SEQ ID NO: 388019 - DNA, 201 bp, Homo sapiens
cctcttttatgcctttgtttgagaagtatctgcaaatgtcctttgcccactttttaatggggttatctgttttgtcatgttgatttgtttaagtttcttawagattctggatattagacctttgttggatgcatagtatgcaaatattttctccaattttgtaggttgcctgtttactcctttgattgtttctcttgctgt

SEQ ID NO: 388020 - DNA, 201 bp, Homo sapiens
gaatgctcctcccccaaatatgattctcactctcatatccttcagatcttgaatcaatgtcaccttcttactgtggccttccctggctgcttaacttaaawttggaccctctctcacattttctgatcctttcctagcttaattttttcttcagcacttattacaaacataatctgcacttaatttgtcttgcttaacttt

SEQ ID NO: 388021 - DNA, 201 bp, Homo sapiens
gtcattctttcactttaatatttgagaagtgatatgaagttaccagtgacattgtgttctcataggcataaatgtcacaaaataatttatctagtatccayaataggtgaataaggtgtttttgctttatatattttaactgtttagagtaaaaaattaatgtggagaaaattggaatgcagtattataggattacacaac

SEQ ID NO: 388022 - DNA, 201 bp, Homo sapiens
acatgaatccactatgtccagttagtgtgattcagaaacagcatgcagttataaagctgggtgaggcatgggtgtcttccttcaacagggcagctactttstgaggagtgtatatatcatttgatttttttataagttaaatttgaggcccttgttagatgtgagggtgggccaaaattcctgtgaacagattctccccgt

SEQ ID NO: 388023 - DNA, 201 bp, Homo sapiens
attggcagagctgctgcttgactacatgatgtctttgtattaactacaaaaacatgccctatcatctgagtgattttctctgccagacccctttgtgcatycacactctgcacctccagtgtacggaggaccttcccactggattctaagattccatgccttcccaatgcatggcagtgtctctcatgcacatggcaaacc

SEQ ID NO: 388024 - DNA, 201 bp, Homo sapiens
gagagggggctgtagtactatttgaatcaatttgttccacaattgcattatcactgttactcatcacttgttgcctcttggcacaatgcaattttcagaastgttgttgacaaagtctttaccaccactttcaaagatgcctcctgtttctgaaggtgactcttcagacctctgtgttacggggaccagatccaggaagct

SEQ ID NO: 388025 - DNA, 201 bp, Homo sapiens
aggttgacctgaggctatggaaacaacacaaaaacaattaacaagatgagggatttttctacttgccaatatttccattatcagttttgtttcaggagagraggctcaaaaatttggctgaagtgaaatttgtgactgccttatggatttcagtggtagatacatcatgcaattttctaacattcatagagaggcaggtgt

SEQ ID NO: 388026 - DNA, 201 bp, Homo sapiens
acaacctataattttctagaggttgtccagatgccattagatatttctctgagcactgaggtcattccctgatgagtattggggtaagagctgccatccargtctttggactcctgacaaagagctctttctgtcagggcacattgctttctgctctgcactttggtaacagaaatacagtgcctggaacaatagaaagac

SEQ ID NO: 388027 - DNA, 201 bp, Homo sapiens
gttcccatttgagggtaagggctgtccatttttggagtttggtgtggggggtgcactgggtgaccagctgtcctggtttgcctggcaccatcctgctttcrcactaaattatcttgagaaatcttttagtcttaagcaaactggaattgttggtcatccttgaagcctgtaaattcccaggtacttctgactccctgggca

SEQ ID NO: 388028 - DNA, 201 bp, Homo sapiens
acttctgactccctgggcagcaaagtggctccagttgcccaagatcagtcttctgaatggagtcacaggtgcaagccatgtgaaacaaagtccactaaagmttgtggatgggcatacagacatgacaagagcctctgaatggagctcagccatcttccctgtagcaggtactatcctctacccagttttctaagaaacaac

SEQ ID NO: 388029 - DNA, 201 bp, Homo sapiens
agaatggaacaggaaggcagagggctccaggggttatcttcaggtggggaataaggtgacctaataggttagatcaaataattgaaaagtttgaagaactkgataatattctgaagtttcacagtaaatggaaaaaagaaaagaaaagaaaggcagttagaaatctaatctaatcctaatcacctcccaaagaccccatct

SEQ ID NO: 388030 - DNA, 201 bp, Homo sapiens
gtggatgggcatacagacatgacaagagcctctgaatggagctcagccatcttccctgtagcaggtactatcctctacccagttttctaagaaacaacatrgggtcgatggagactattgtagatgtgggattgagggcaggagttgcagatgaggaatgcatttcattctgtacgtcaagttcttagtcctagtgggact

SEQ ID NO: 388031 - DNA, 201 bp, Homo sapiens
ttgtaatttattgattatgcttaccatgggcagggattcttaactgttttatttatttatatatcttaaacattgaaaacactggcatgtagtagatgctyaataagtaattgttgactcaatcgataaaatatactagaacatacaagattttcccaatgtaacataactagtaagaggctgaaccgggatttgaactca

SEQ ID NO: 388032 - DNA, 201 bp, Homo sapiens
aatctctgtagttatcaagtgggtaggaggtaatgaagcaattgcccatcagtgagtctctctcaacatgctgcttctctggccactatgaggttcagttytggaagtgcatgacatatatgtaatgaaaattgaggacatggcgaatgtagcttcaaagaggatataatgaaaatgagagtgaacattccctagccctgc

SEQ ID NO: 388033 - DNA, 201 bp, Homo sapiens
gtaatgaaaattgaggacatggcgaatgtagcttcaaagaggatataatgaaaatgagagtgaacattccctagccctgcccaagacaggtggaatcccayatttcttttgatttaacttctaagagttaacaataactacccaaaataaatagcgaatattagtcaaaatttacctttttcttgtcctctgttcttgcct

SEQ ID NO: 388034 - DNA, 201 bp, Homo sapiens
acacattttctttgtccaatccaccactgatgggcatctcgggtgattccatgtctttgctatggtgaatagagatgtgatgaacatacaagtgtaggtgyctttttggtagaagaatttattttcttttgagtgtgtacccagtaatgagattgctaggtcaagtagcaattctatttttcattctttcagaaatctcca

SEQ ID NO: 388035 - DNA, 201 bp, Homo sapiens
tgggtgtgtattgaatagcacagatctagatgttatgaataaaattgagcactggggaaacgtaatctaatagactcaagactagtttaagttgaccaacmctgctatgtgattatcctggcgaagtcatataaagtctttttgatgtagctttccagtttaaaaaaatacaattttatagtagctcttacccttatggta

SEQ ID NO: 388036 - DNA, 201 bp, Homo sapiens
aatcaatcaactttctttggaggacagctgatgctattttattatcaactagttgagtttttattgcaatacattttgcaatgtgtcctcttttgctgtaygactcgctaggtgaaccttgattcctcacactgcatcatgtagctggtcacgtgaaactaagaatagaaattctgccagggttgtggagactttgggttg

SEQ ID NO: 388037 - DNA, 201 bp, Homo sapiens
aaactgcaatgataaatgtaatacaatttataagttattctatatagcatgtaaattaattgcaataacaaatataataaaattttaaaattatttgggtaatgctatattgatctaaagctgctttatggaattatttttggtttgtttttcttattaatctttccattcagtttactgttacctttttggtaaggataa

SEQ ID NO: 388038 - DNA, 201 bp, Homo sapiens
taatgaaaagtgcaaaacaatcaaacctcagataacccattgtgatacaaagccagagtatttcaaacacatttatgaaatttatacacctccccatctckcaagtacaacaaaaggtcattcaccgtgacagcttttatttctctgtactcagctctgataatcacattttggagttctggggacatggaccactcatgt

SEQ ID NO: 388039 - DNA, 201 bp, Homo sapiens
taccgagtaacttagggataggacacagataatgaaaatgaatttgcagtgtcaccttttccatgaaccttgatcattctcttttgttcagctttaaattaaaaaaaaaaatcaatcaactttctttggaggacagctgatgctattttattatcaactagttgagtttttattgcaatacattttgcaatgtgtcctctt

SEQ ID NO: 388040 - DNA, 201 bp, Homo sapiens
aagaaaggaagcagagaaagcaaaaagcagagctcacttggtaaggcaccctggagccagcaaattatttttaccacatgtattagttccttctcacactsatttaaagatactcttcgagactgggtaatttactaaggaaagaggtttaactgactcacagttctacatggctggggaggcctcaggaaacttacaatc

SEQ ID NO: 388041 - DNA, 201 bp, Homo sapiens
ggaattgattgggattaattcaacgaagaacagtaatttgtttctcttacacatttattcaaagtagccttctcaactatggtcttcacgttgttgtagcttttttttctgaaattatcaatgatggaagatgattaaacaatttcgacacttagaagccctcatgatttcagaaaaggaaactcttttctgctgcgttac

SEQ ID NO: 388042 - DNA, 201 bp, Homo sapiens
aagaaaaaatgcatcagtggttgtcaggggattgaactggggagagtttctctgcaaaagaaaatggggacttttttgggaatgattgaactttttctagwtcttgattgtcatggcagttacaccactgtatgcatttgtcaaaattcacaaaactgcagactaaaatgagtgaatactattatgtattagttatacttt

SEQ ID NO: 388043 - DNA, 201 bp, Homo sapiens
ttgaactttttctagatcttgattgtcatggcagttacaccactgtatgcatttgtcaaaattcacaaaactgcagactaaaatgagtgaatactattatrtattagttatactttaataaataattgcttgggaaattcattatcctctaattgttaactttctaaccaaacaaacagtaaaattgcctcttttccatta

SEQ ID NO: 388044 - DNA, 201 bp, Homo sapiens
tatgattttctcaaatatagattgcagcatttaaatacttatttgattctattctcatagcaaataactatcaaattgagattaataaataattgaaataycacaaagtcatagaattttaacattacttaaaatatgtcagattatgtggctagaagttactcatgtgtagtctgtgaagcagtcttacaatccagtctt

SEQ ID NO: 388045 - DNA, 201 bp, Homo sapiens
tccagttctctagcaactgtgaacatttgaaaggctgtgcagagtaaaaaatctccccaaattgtgctccagaaactaatataaaagttggaaatgaattmttttgatgctaagcagagcagaaaaagaacacgactatataatattttaaaacattttagttttaagaattaaggatcttgtgaattcacttcccttctt

SEQ ID NO: 388046 - DNA, 201 bp, Homo sapiens
ccaaggaaataattatgatttttgaggaaaaaaatcatttctgcaaggattttcatgcttcttatttttagcaggaaaataatttgaaaaaaatacccaamcatcttataattggagatagtttgcaaaaaatatgatgcataaaaatgacatcaaatttaaaaattatactataggaagagtgcaataatgtagaatgat

SEQ ID NO: 388047 - DNA, 201 bp, Homo sapiens
aatacatttagtttcaaagatcacaatttacaaatgtttatttataagtgatgagattactcctgactttatactcttctgatttttggctcaaccttatmaactcttctttgaattattttgtaaggaggaaatgataacaattagatttaaaagagtagagataaagggacaagggaccatgaagagaatggaaataaa

SEQ ID NO: 388048 - DNA, 201 bp, Homo sapiens
cacttggtaaggcaccctggagccagcaaattatttttaccacatgtattagttccttctcacactgatttaaagatactcttcgagactgggtaatttaytaaggaaagaggtttaactgactcacagttctacatggctggggaggcctcaggaaacttacaatcatggtggaaggcaaaggggaaggaacgaccttct

SEQ ID NO: 388049 - DNA, 201 bp, Homo sapiens
gttttcttccgtggttttgggtcatgattcttttttatggatgagttatattcccaatagagcagttccagctgtcttaggagggagtgatgagaaaatcaaatatgatgtaaagaaatctcttattagggctaatttattaactttccagttctctagcaactgtgaacatttgaaaggctgtgcagagtaaaaaatctc

SEQ ID NO: 388050 - DNA, 201 bp, Homo sapiens
ccactatcatgagaacagcatgggggaaaccacccccatgatccaatcacctcccactaggtctttccctcaacacctgggattataattcaagatgagayttggatggagaaacaaagcctaaccataccaacacatattgctttatttgatatttgacaggtgtttctgtccctgttttgtgggcaagtagctaaagtt

SEQ ID NO: 388051 - DNA, 201 bp, Homo sapiens
cccttagatttatttaacacttataaagcaattatcatgttccagacactattttaagtatattacgagtattatagcattgaaggctcagagcggcccawataaatcgatcatattattaaacctattttacacaggagaaactgaggtacacgccaggtgaataaccttgcctagggatgcacaattcataagtgatag

SEQ ID NO: 388052 - DNA, 201 bp, Homo sapiens
atgcttatgccctcataattgttttttcttactgaccatgctctatacccctccctttggtgaccctgccttcctctcttgtgctcctgaagcttcccatyatcattctgatactattgtgccataatttctgactttatgtatctatatatcctccctaggatggtgagctgttttaggatagttcctttgtctttcgat

SEQ ID NO: 388053 - DNA, 201 bp, Homo sapiens
ctagtggacttcggagtaggccagtgccttctggtcagttcctcagtggcccacattcagctcttaaaggcagagcatgctaacgggaggtccaggcttcygcctgaggccaaatacaccccaaaagctcatctgttatagcctgatatgaaatcggtttctttctgcaactgacctgactcatagaaagtgaagcctggc

SEQ ID NO: 388054 - DNA, 201 bp, Homo sapiens
gataaacttatgagtatacatgggagactggtatatatacatgctggtaaacatgagaaggtgcttgttccttaggagctcaatatttacaaagagagagrgattcactgagacaaccacagtttatttgatatatgccaatagaatcttaatgaatcattctcttatgaagaggcatgcgtggctctacagaagaaatat

SEQ ID NO: 388055 - DNA, 201 bp, Homo sapiens
gtctgatgctgtaactgcccaaccgtttctccttgtccactgtatagacagagccaatttatcaagacggggaattgcaatagaggaagagtttaattcaygcagagccagctgtactgggagattggagttttattattactaaaatcagtctctctgaaaaactgggttttagggtttttaaggataatttggtgggga

SEQ ID NO: 388056 - DNA, 201 bp, Homo sapiens
ttctgatcctttcctagcttaattttttcttcagcacttattacaaacataatctgcacttaatttgtcttgcttaactttctggaatataaatttcatgwgggcagggattcttgtctattttattcattactctacttccaaagcccagaggagtgcttgacacaaaaggaacactcaataactatgactaaatacata

SEQ ID NO: 388057 - DNA, 201 bp, Homo sapiens
gcttaactttctggaatataaatttcatgtgggcagggattcttgtctattttattcattactctacttccaaagcccagaggagtgcttgacacaaaagraacactcaataactatgactaaatacataaatgaatgtattctccaccttgttttcatggtatgtgtgaggctttgcaagtaccaaccaccaaagaaaaa

SEQ ID NO: 388058 - DNA, 201 bp, Homo sapiens
tacctaatccaggcaaagcactggacttgctttaaggaacatttttactctttctgaagtggagtgcctgtcatgtatcaggtgcaatgcttggactttaygttcttgtgattaatccttacaataggcctgtgaagtaattctcattctgtttgacagtagagaagaaggaagcccttgaccaaggtctagtgccagtaa

SEQ ID NO: 388059 - DNA, 201 bp, Homo sapiens
aactttctggaatataaatttcatgtgggcagggattcttgtctattttattcattactctacttccaaagcccagaggagtgcttgacacaaaaggaacrctcaataactatgactaaatacataaatgaatgtattctccaccttgttttcatggtatgtgtgaggctttgcaagtaccaaccaccaaagaaaaagact

SEQ ID NO: 388060 - DNA, 201 bp, Homo sapiens
tccttacaataggcctgtgaagtaattctcattctgtttgacagtagagaagaaggaagcccttgaccaaggtctagtgccagtaatggtggtgatggggkttgaacctaagtctgtttcactctaaagtgtaaccaaattttatgttttagacttgcttttctaacaataaaaagtcagtgacatgctctttctgtgtgt

SEQ ID NO: 388061 - DNA, 201 bp, Homo sapiens
tatgactaaatacataaatgaatgtattctccaccttgttttcatggtatgtgtgaggctttgcaagtaccaaccaccaaagaaaaagactaatgcttgaytagattcttggagagtaaaactcaatgctccaccatcactttgtgaaaagtaacagtttcatggtctaaattatagattctgactcagtaggtctgggag

SEQ ID NO: 388062 - DNA, 201 bp, Homo sapiens
tctctagcgctctaacagggtggatgccccccgctctgccggcactgatgtttaagttgctggattatgaggaagtctggggattccttggggagaaaagraagtgatgacatattgaagcacaacgacatattgaagagactcgggggctggggtgataaacttcagagccgtggctatttaccaattggagtgtaagta

SEQ ID NO: 388063 - DNA, 201 bp, Homo sapiens
ccttttccccattgtttatttttgtcgaatttgttgaagaccagatcattgtaggtgtgaagaatctatttctgaattacttattataaatattttggaarggcaaatactgatggttgaagacatacaaattcactaaaattgagaacgataaaattatgactaggctattaaagttatagagaggtgaatttatggcat

SEQ ID NO: 388064 - DNA, 201 bp, Homo sapiens
tagagaggtgaatttatggcatggtaaaagaataatatttattgaaacaccatcttaaaaatggcacagatcaaaaatatggctagctttgcaacattttrgttctcatttcattacagcttttgaggtctgagggagagcttacctaagcaattaagctactggttaagaaattttgtgtacatcttaagactttatatg

SEQ ID NO: 388065 - DNA, 201 bp, Homo sapiens
tatgtccccacccagatgcagaatgtcaggggaatgtactttggctgtgtgccaagaaactggtgagaatttagccagtctctgatgcatcatatattagrggtaggatgttcattgattatttcccagttggtggacgcactgttctctacttccaacttgttcaaggtcaaaaattttcctttagaagacatgatctca

SEQ ID NO: 388066 - DNA, 201 bp, Homo sapiens
cttatataaacaaatagtgtatgagggtagaatatacttttaattccatgcttttgaaaaatgtattccggactacagaccattttaaacattttttttgwtatcatctacatacagcaaaatttactctttctgttgtacagctctgagaattttttctgtgatcacacctaaaggaattataaatgctcatacacaatt

SEQ ID NO: 388067 - DNA, 201 bp, Homo sapiens
ggtggacgcactgttctctacttccaacttgttcaaggtcaaaaattttcctttagaagacatgatctcacaagttttctaagcttctttatcctttattytggggaacaatgaggatggtttgctgaaagtggtcgtgaaagatcctatgtagaccaggtgggagagtttgctcccaggaaaaaaataagtattacctca

SEQ ID NO: 388068 - DNA, 201 bp, Homo sapiens
atctacatacagcaaaatttactctttctgttgtacagctctgagaattttttctgtgatcacacctaaaggaattataaatgctcatacacaattttatwttgttctgttttgtttcttgagacagggtttctctctgttgctcaggctgaagtgcagtggtacgattacagctcactgcagccttggccttctgggctc

SEQ ID NO: 388069 - DNA, 201 bp, Homo sapiens
ggtcaaaaattttcctttagaagacatgatctcacaagttttctaagcttctttatcctttattctggggaacaatgaggatggtttgctgaaagtggtcrtgaaagatcctatgtagaccaggtgggagagtttgctcccaggaaaaaaataagtattacctcaagtaggtgattgaagtacaacatgctatccactggt

SEQ ID NO: 388070 - DNA, 201 bp, Homo sapiens
cagtgccccaagtagctgggactactggtgcacaccaccactgtctatttcttaattttttgtacagatggggtcttgctatgtttcccaggctggtctcraactcttgggctcaaatcctcctgcctcagcctctcaaagtgctggggttacaggtgtgagccaccacagttggcccagagtttttttaaaaacataaat

SEQ ID NO: 388071 - DNA, 201 bp, Homo sapiens
gatgaaaactttgctctgcaagtatgcattcaaaaatctaattataccagcagtaattgagtatgtggtaatctgattccttgcatctctaaaggcctccyacttgatctactgtgaactcagaaataaagggttctaacaatagccctgtaaattaagcagagcaaacatttggctaaaaataaggtgagggaaggctta

SEQ ID NO: 388072 - DNA, 201 bp, Homo sapiens
ttggaaaaaaaaaaaaaaacaaaaaactagggctagcaaaattgaaaaaagataaaagacgaaagaagccacatgtaaacatactgtgtttactcttctamaatattaaaaaatgaaaagatccaaaatcaaattaatattcccctggaatttcatatctatttcagtgactgtggagtgaatctcaccacgaaagctgct

SEQ ID NO: 388073 - DNA, 201 bp, Homo sapiens
ggtatttctcttaatgctctccctcccctaacccgccaccccccgacaggccccagtgtgtgatgtttcccgccctgtgttcatgagttctcattgttcarcccctacttatgagtgagaacatgaagtgtttggttttctgttcttgtgttagtttgctgagaatgatggtttccgtgcccggctaaggttctatagttt

SEQ ID NO: 388074 - DNA, 201 bp, Homo sapiens
aaggcttactatataggagttacaaatatctcacaatccttgttctcaaactctcacactttacaattgtttgacagattgagtgcaagcagtcatgcctycaatactccatggctccccttgcatctggctggcctagttacttgttttggccaataacatggtagatgtgatggtggaggcttgcatgctccacattct

SEQ ID NO: 388075 - DNA, 201 bp, Homo sapiens
tatggaaaatatgtgtgcaattgacttatagataaatgagcagtgaacagccaattgatttgaaaagggtaacatttttcattgaatgaatcattggaaasgtatttctaatttggcaaatttctcattttatgcatttcttattttaggatgaaaaattttgaaaccagtactttatcattttctcctgaggaaaatttt

SEQ ID NO: 388076 - DNA, 201 bp, Homo sapiens
gatcttctgtagctaaccactgaccgggagaacatgtatgaaaaacatcttcaaaggcattgaaaaattaacatttatcaaaaacaaaatacattttattwcatttgaacttagacctttactatctaatggctatggtactatttaaatgtcaaagtgtgatctagcatcagcctaatctggttagaaatgcaaactctt

SEQ ID NO: 388077 - DNA, 201 bp, Homo sapiens
caaatatattataattcccttcctcatcaagcccagcatgataaacttcagttttgcctgatggttcatcatcttatttctgtgtgtaagattgttggatytgacattaaacatttggaaactattttataattgataacttgtgctttctcagctttgagtaagcgctctcttcttcatcttataccattttatttttat

SEQ ID NO: 388078 - DNA, 201 bp, Homo sapiens
aaaatagttactaaagctattacaacttgttattaaagattgttttttgaaataggtttgtccactgcctgttacatttacagtgcttgacatttttatgytttttttttttttggctatccaaattgttgaggaataattttgctaaatgataaaatggtataatcttattaattgaaaatatttagcaagagtataccc

SEQ ID NO: 388079 - DNA, 201 bp, Homo sapiens
caaagctctaaaaatgtaaattccatgtgatgttaaaaattctcttctaggaattccaaggaaataattatgatttttgaggaaaaaaatcatttctgcarggattttcatgcttcttatttttagcaggaaaataatttgaaaaaaatacccaaacatcttataattggagatagtttgcaaaaaatatgatgcataaaa

SEQ ID NO: 388080 - DNA, 201 bp, Homo sapiens
cagggacttatttgtctttataataggaagaataaaattaggtacagggctggttcagtgcttcaacatgacataaatgagtctactgatcatatcttccrcaacttagtttgctggatttcattctgtcattggtagcaacatggttgccagatggctgatttatctccaaaattataatggtgttcaaggtggtttgaa

SEQ ID NO: 388081 - DNA, 201 bp, Homo sapiens
gctcatagcaggtgttctttggctggtgtgtttatgttgtgggacagtgggttacttgcaaggaaaggatgaatggctggagtagatggtgcttgtgctcygcatgtattcccttcttacttcccatttccatcagacctaccactttttgcctgacattatctgttgcaacatgagcccatggataggtgtgtttgaagt

SEQ ID NO: 388082 - DNA, 201 bp, Homo sapiens
aaaaccataatttggaaatttgattctgccttcccataaaagagaattattttcaaagaaattatttgggtctaaattaacatgttacttaattgttctgyttgaatctaggtatatgattagtcccatatgaattgatgttccaaataatttactctcattgataactaatattttctatttccctctattgttttgtgg

SEQ ID NO: 388083 - DNA, 201 bp, Homo sapiens
agggacttatttgtctttataataggaagaataaaattaggtacagggctggttcagtgcttcaacatgacataaatgagtctactgatcatatcttccayaacttagtttgctggatttcattctgtcattggtagcaacatggttgccagatggctgatttatctccaaaattataatggtgttcaaggtggtttgaag

SEQ ID NO: 388084 - DNA, 201 bp, Homo sapiens
ataagagctctcacctgaggatttcttgtgaggattcatgaaataaatgctagaaatgcttacacactatctttatttgcccctcagagcccaaagtctcygaaatctttatctttcacacacaaaaactcactttcagaaaagtatattccatttacatctagtggaaataaaaattgttctttttctttgtgaaaaata

SEQ ID NO: 388085 - DNA, 201 bp, Homo sapiens
tttcattctgtcattggtagcaacatggttgccagatggctgatttatctccaaaattataatggtgttcaaggtggtttgaagaaacaaggaaaaatggsaaaagaatgtgatggctgttccttttaaccagagaagtaaaaggtcttcttgaatccccatttcaaaagatttctgattatgtgtcattgggctaagcca

SEQ ID NO: 388086 - DNA, 201 bp, Homo sapiens
attacattccaattaatttaaatttaaataagtagccacatgtggctaacagctgcgtatggacactgccagtctagacggatatgatgcttgtttaatgktcttaagaggtctttagagtctattctaatcctgacatctggttttctttgcttgtttgtatttatttgttcctttatttttaccacgactgctctgagt

SEQ ID NO: 388087 - DNA, 201 bp, Homo sapiens
gggggagcttcaaggatgtggtgcctcacctccaggagcgagcctcctaggtgaaactgtcactaggcgccccacacttcagccaggaggaaggtccatttccgagggctggtagcataatctggcctccaggtgagctctgaggtcgtgttctggcgtgcccaggactagatggagcctaccggggcattcctatgtgtg

SEQ ID NO: 388088 - DNA, 201 bp, Homo sapiens
tttaggaggaaattaaggctaactgagtcataagagtgggatcctactctgctaggattgatggccttggcagagaaagagaggatcttttttcttagaagagaaagagaggatctctccctcccataccgtgtgaggacacagcgaggaggaggctgtgtgcaagccaggaaaggagccctcactggaaacggaatcagc

SEQ ID NO: 388089 - DNA, 201 bp, Homo sapiens
ttttcagttttgtctctttgctgctcaaaatgaaaaatcttctcactcttcccctactccataatatggtcatggagttttgacctaattaaaagcatcaraattaagttgctaagtttgaatgggaatgtagtggtgtttaaggggacttaggagaccctgtcctcatgtcctttctgtcactataggttttgttactgt

SEQ ID NO: 388090 - DNA, 201 bp, Homo sapiens
acagctgatccttggcacagatgagatttgaacctgggtccttctgactccagaatgcaagctcataggaaggggtaaatttactgggaagatctctgctrgccaggtccttgatggcacagggccacgtgcaggtggagtccaggcgagacttgtccttgggaacacgagctggttttgaagctactgtagtcctgggtt

SEQ ID NO: 388091 - DNA, 201 bp, Homo sapiens
ttccaggccccgctgccctggctgggtttccttctctgagcaggaacaagtgcccgatgctgttgctggtgcagattggagggctgccagggctgggtgaytccctgccgcattttgccaagcttgtgtagctgcttctgcctcttggaggggctgtgttagaaagcatgcatcacctccagttacctcaggcagcaggaa

SEQ ID NO: 388092 - DNA, 201 bp, Homo sapiens
agactctgtcttaaagaattaattaaaattttgtgcacaaagatgtttaatatagtgttttgagaagtcaaaacacagggaagacttcttgtgtcttacaytgagaaattcttagccagcctcttagtttcctgaattcaggactgtgttgtgtaattttgaagccccaatagtgatatggtcatttttttcatatcttca

SEQ ID NO: 388093 - DNA, 201 bp, Homo sapiens
aacagctgatccttggcacagatgagatttgaacctgggtccttctgactccagaatgcaagctcataggaaggggtaaatttactgggaagatctctgcyggccaggtccttgatggcacagggccacgtgcaggtggagtccaggcgagacttgtccttgggaacacgagctggttttgaagctactgtagtcctgggt

SEQ ID NO: 388094 - DNA, 201 bp, Homo sapiens
tacttttaccatcttgctatctgtcttctatttgtcccatctttatttgttcctgtatttctaatttattttgctttctttatgattaatagtttttaaawccatttttctcccctttctggttatacagatttgtatgtttcatttagtgattagcctagagattataatatacaccctggacttactatagttcaccta

SEQ ID NO: 388095 - DNA, 201 bp, Homo sapiens
ttaaagaataggaatgtgtgtgtgtatgtatggtatatacactatattatcattaccaaaaatgatgcctcctatagacttttggtagaaaggaaatttcyttctcttctggttgtctgaattttgttttcctttttttttgcttccctccggaagggaatcaaaaaattgtatatatatatgtacacacactatatatga

SEQ ID NO: 388096 - DNA, 201 bp, Homo sapiens
gcctaacactggagcgccggctgctacctgtctgtctcctgtgctggacaggaagcaccatgcaggcggcgttgtcgtccgatggtctccacctgtggccrtagcaccgggtgcgctgtggactgggacacttccatgtcactccacacgtgtgccccgctgtggcactgtaaatattcatttgagctggtaaggaaaatg

SEQ ID NO: 388097 - DNA, 201 bp, Homo sapiens
cactgtaagttatttatcttgaaccctaaactgcatgtaaaaaatgtaaccaaaccctcagtgcctggggcgaaatccactccctaatgttttaatgacayaggatccactatgctacgtgtgcaccgggtgtagacttggtccagtgcatgtggtgctaagccataagggactgttaggaagagccgggcatggtggctc

SEQ ID NO: 388098 - DNA, 201 bp, Homo sapiens
gcaagttgatagtttcgttattatgaaatatttactttggacaaaggagtattcaaaactgacttacgaggtataaataataaaggacaaagtcatatatrtgccacccaggtgatgtaataatttgttttcttcccttctgtcagtagacatttgggttctgaagtttttgcctttaaaactaatgatgttacagatatt

SEQ ID NO: 388099 - DNA, 201 bp, Homo sapiens
cagccagacacagacatgtgcttcctgtaatgggaacccgtataccagatgcagcctggtgcttcccatgatgagaaccccatataccagacgcagccacrtgcttcatgtgatgggaaccccgtataccagacgcagccacgtgcttcttgtaatgggaaacatctttgaatatgccaggaattaagcagtgagcttctt

SEQ ID NO: 388100 - DNA, 201 bp, Homo sapiens
gtgaacctcactagaactagaaaatatgtggacaagtatgaaaattttcttctattattttatttaaaagatgattaactgttcatgataaagttaataargatgtattttgtagtttataatacacgtagaaggaaaacatatgacaacaatagcatagaagatgagactggggaaatggaaatacattgttctaagttt

SEQ ID NO: 388101 - DNA, 201 bp, Homo sapiens
taccagatgcagcctggtgcttcccatgatgagaaccccatataccagacgcagccacatgcttcatgtgatgggaaccccgtataccagacgcagccacrtgcttcttgtaatgggaaacatctttgaatatgccaggaattaagcagtgagcttcttgatggtcagaacactgatggcacccaaagtagttgcgttaag

SEQ ID NO: 388102 - DNA, 201 bp, Homo sapiens
atggtggcttacgcctgtaaccccagcactttgtgaggccatggcaggcggatcacttgaggccaggagttcaagaccagccttgcaaacatagcaagacyctgtctctactaaaaacacaaaaaacagccaagcatggtggtgcacacctgtaatcccagctactcgggaggctaaggcatatgaatcacttgaacccag

SEQ ID NO: 388103 - DNA, 201 bp, Homo sapiens
gagttcaagaccagccttgcaaacatagcaagaccctgtctctactaaaaacacaaaaaacagccaagcatggtggtgcacacctgtaatcccagctactygggaggctaaggcatatgaatcacttgaacccaggagacagaggttgcagtgagctgagatcatgccactgcattccagtttgggtgacagaggaagact

SEQ ID NO: 388104 - DNA, 201 bp, Homo sapiens
tggttatttacatagacatccaaatagaaacctatagagtatctgttaagtcaggctctcccgtcatctcccccatccctgggcaggtgtctaggagatggttttgttattttcagggccctctcaatggctaaaacactctgggagatgaacaagattttaaaaacccaaagcttagcgcacctggtgggtgggggtgtg

SEQ ID NO: 388105 - DNA, 201 bp, Homo sapiens
actggttatttacatagacatccaaatagaaacctatagagtatctgttaagtcaggctctcccgtcatctcccccatccctgggcaggtgtctaggagatggttttgttattttcagggccctctcaatggctaaaacactctgggagatgaacaagattttaaaaacccaaagcttagcgcacctggtgggtgggggtg

SEQ ID NO: 388106 - DNA, 201 bp, Homo sapiens
tagcagccctggcaggcaaccccaaagccgcgcgagcagtgggaggagcaatgagaggcaatcctgtgagttctcatggcgcaagcatggctgtgggtggygggtgcgtgcaggtggcagggtgtcatctgatcccacgtgtttcctcggaaggcaggctgtgctgctggggtgggcagaggggcgatatctgtgatgggg

SEQ ID NO: 388107 - DNA, 201 bp, Homo sapiens
ccttgcagtttgatctcagactgctgtgctagcaatcagcgagactccgtgggcataggaccctccgagccaggtgcgggatataatctcctggtgcgccrttttttaagcccgtcggaaaagggcagtattcaggtgggagtgacccgattttccaggtgccgtctgtcaccaatttctttgactaggaaagggaactcc

SEQ ID NO: 388108 - DNA, 201 bp, Homo sapiens
caaagaacatctttatttctgccttcatttcattatgtacccagtagtcattcaggagcaggttgttcagtttccatgtagttgagcggttttgagtgagwttcttaatcctgagttctagtttgattgcactgtggtctgagagatagtttgttataatttctgttcttttacatttgctgaggagagctttacttccaa

SEQ ID NO: 388109 - DNA, 201 bp, Homo sapiens
tccctctacacactgctttgaatgcgtcccagagattctggtatgttgtgtctttgttctcgttggtttcaaagaacatctttatttctgccttcatttcrttatgtacccagtagtcattcaggagcaggttgttcagtttccatgtagttgagcggttttgagtgagattcttaatcctgagttctagtttgattgcac

SEQ ID NO: 388110 - DNA, 201 bp, Homo sapiens
tctgatggtagtttcttttgctgtgcagaagctctttagtttaattagatcccatttgtcaattttgtcttttgttgccattgcttttggtgtcttagacrtgaagtccttgcccatgcctatgtcctgaatggtaatgcctaggttttcttctaggttttttatggttttaggtctaacgtttaagtctttaatccatct

SEQ ID NO: 388111 - DNA, 201 bp, Homo sapiens
tttttttcttgtaaatttgtttgagttcattgtagattctggatattagccctttgtcagatgagtaggttgcgaaaattttctcccattttgtaggttgsctgttcactctgatggtagtttcttttgctgtgcagaagctctttagtttaattagatcccatttgtcaattttgtcttttgttgccattgcttttggtg

SEQ ID NO: 388112 - DNA, 201 bp, Homo sapiens
accacacgtccaatatttattcagaatgatttttttcaaatatttaataagaatgaataattgaatgtactatagccttcttactttgccctgcgatcccrtaagacctttaaagctaaaactagtttgggcccttgaggggtttatagaaattaggtatgtctgagtatggaaatggctggcatggtgaaagaattgagt

SEQ ID NO: 388113 - DNA, 201 bp, Homo sapiens
tgctggccagggtgctattcttacctttgggcttccagaaagagccagctcctggtggagtgaaggtcctacctccagatgcctccgaaggtgccggtacrtgattggaataggaatgcgcatgaacggagaaaaccctcaccattgcgtccttttgttctttttgcgaggaagagatccatgggttggctcttactgaac

SEQ ID NO: 388114 - DNA, 201 bp, Homo sapiens
actagaaatgtattctgttgatgtctgtcatttcagcattttcatgttgtcaaaaatgagaccagacagaagaagagtgtattctttcctgctagaactcrcacaacactgtcattaatgcctctggcagtcaggactttaatcagttaaatgtaatagtggtgataacgttaaagccttgtatggcagtctacccgggca

SEQ ID NO: 388115 - DNA, 201 bp, Homo sapiens
tccagccaatagcccaggccctttctgtctttgatgtctgtatggtgggcaagatctcatcacgacccacatcagctttgctgttagaaacgtgttgccayagaggagcacattcataattgaaatcaccaaatagggaattctttctagaggcagtggctgcctcagtgaaacgtgcatggctgagcagagcaaggaaga

SEQ ID NO: 388116 - DNA, 201 bp, Homo sapiens
ccaacaacccagtaaataactggacaaaatatctcacattttcatcgcaaagacacataatacacagattggcccctgagctcatgagaaagtgctcggcrtcatcagtcattagggaagtacaggttaaaaccacagtgaaagacatctgcatatatcccagggcagctcagatcagacaccaccaagtgtcgcagagac

SEQ ID NO: 388117 - DNA, 201 bp, Homo sapiens
gcagcctcgcctctcgtatacattggtgggtgttaaaatgttgtaacctctttgcaaaaggtctagcagctgcttataaaactaagtgttctcctaccccrctacccaacaattccactctagggcatttatccaggagaaattaaaacctacgtccacaaaaacgtattcaagagtgttcacagcagctttgcttgcttt

SEQ ID NO: 388118 - DNA, 201 bp, Homo sapiens
tagtatggcctcagcgagatactgagtgcactctcagtttgcacctggagggcagggtgagtctgggaggtctgtgaattgtcagtggacctcccggtccyctccagagccctgcaggatcgggtggatacactgacctgatggacaggaagaggaagcctctgggccagacctttggacactgttgccttactcttcttc

SEQ ID NO: 388119 - DNA, 201 bp, Homo sapiens
ctgcccagcccctcgctgccatcccctctgctagaccaggcatgtgggtcagcgctgccctgtctggcccgaagttccatgtcagtagccgtggatcaaaygatgaaggcagagttatctaattacggagtgttttctctaatatttccacagcctgctgctgtcatggaacatggagattcattacttagaatgtcaaat

SEQ ID NO: 388120 - DNA, 201 bp, Homo sapiens
tgtgcacatggcatgcctattgccccagcacggccacagctttccaaagtgccgcccagggctggggtctgcccacttcctcggaggtctgtccatgctcygggcaggctacagcctgcaggatgcagatgcccagattggagcagcaccctgtgccctcaagaggagcacagctcacacatccacgtaactcttgtcctt

SEQ ID NO: 388121 - DNA, 201 bp, Homo sapiens
agggctggggtctgcccacttcctcggaggtctgtccatgctccgggcaggctacagcctgcaggatgcagatgcccagattggagcagcaccctgtgccytcaagaggagcacagctcacacatccacgtaactcttgtccttagcagtagtgaggggcttctgcaggcagaggagtcggctccacggtcctccatgtaa

SEQ ID NO: 388122 - DNA, 201 bp, Homo sapiens
tgccctgaggggtcttaggttccaccccaggtcacattcagtgttttgtctgattcttcaccagaagggagcagcctcacgcagactgagcaggaacagtrgcattggtgttttccacagatcttttggaagaatttgaacttctgatcatgtatatatgacactttttaaagttttaagtgatgcatggaaacttgatat

SEQ ID NO: 388123 - DNA, 201 bp, Homo sapiens
aaacttgatattgtaaatttaaatatcagtcattttcagttttgtctctttgctgctcaaaatgaaaaatcttctcactcttcccctactccataatatgktcatggagttttgacctaattaaaagcatcagaattaagttgctaagtttgaatgggaatgtagtggtgtttaaggggacttaggagaccctgtcctcat

SEQ ID NO: 388124 - DNA, 201 bp, Homo sapiens
gtcctcagtcacctgctgtgagggcagccagtaccatgtcagaggacatacaggcagccccaggagaggcccatgtggtgaggagccagggaagtcagccytgttggaaatagatcctccagccccagtcgagccttcggatgagtgcagctatgcagaagaccccaagtgacaactgctgagcccgacccttctgaattc

SEQ ID NO: 388125 - DNA, 201 bp, Homo sapiens
aaggcagcggcctgcaggatccccaggtggcgtgtgctgggaattggatgcacttggctgtgtgtgtcacttaggaaatgcgctagggggtcagcagcttycccatcgaagcgttggttagtttgtgaaaagtaaaattccaaatatttgaaataataaggggccagatacgtttggagcttgagaagaactatttcacca

SEQ ID NO: 388126 - DNA, 201 bp, Homo sapiens
tgtgcacctgtggtcccagctgctcaggaggctgaggtaggaaaatctcttgagcctgggagttggaggctgcaatgagctgagatcacagcactgtaccscagcctggatgacagagtgagaccctgtctcaatttaataaataaataaaataaaaaatgtatatttctattgcataattaactattatttatgttttat

SEQ ID NO: 388127 - DNA, 201 bp, Homo sapiens
gagcgtataagcattccgttttctctacagcctcaccggcatctgttattttttgactttttaataaaaaccattctgactagtgtgagatggtgtctcaytgtggttttgatttgcatttctctaatgattagtgatgttgagcatttttttcatatgcttgttggccatatgtatgtcttcttttgaaaagtgtttgtt

SEQ ID NO: 388128 - DNA, 201 bp, Homo sapiens
ggaggaagccttcaggtagcaggcttcagagagaataacttgtaaaatgtttcttatcagacttcaagtctgtgtggatgttagtgccggagaggtatagygaagcatatccaacccccacttcccgtcatgcctgaaacagtctctcaggttacattttgaaagagccctggctgcggaggaagtccatttgatggttgg

SEQ ID NO: 388129 - DNA, 201 bp, Homo sapiens
aaatcaataaatgtaatccagcatgtaaacagaaccaaagacaaaaaccacatgattatctcaatagatgcagaaaagacctttgacaaaattcaacaacscttcatgctaaaaactctcaataagttaggtattgatgggacgtatctcaaaataataagtgctatctatgacaaacccacagccaatatcatactgaat

SEQ ID NO: 388130 - DNA, 201 bp, Homo sapiens
tgacgtctgagcatggttgtgagtgagatgacagtggccactgtgcaggctgggaaggagacagagcggtagagcggaggctgtgaagcgagagtgaggcyggagtgtgaggggcagtggcagggggagcgggggcgtgggtgcgatggggtcatgggggactgaggccagagaaggaagtgtggccctgccgaatttggg

SEQ ID NO: 388131 - DNA, 201 bp, Homo sapiens
agaaagtgacgtctgagcatggttgtgagtgagatgacagtggccactgtgcaggctgggaaggagacagagcggtagagcggaggctgtgaagcgagagygaggccggagtgtgaggggcagtggcagggggagcgggggcgtgggtgcgatggggtcatgggggactgaggccagagaaggaagtgtggccctgccgaa

SEQ ID NO: 388132 - DNA, 201 bp, Homo sapiens
tttctttctttttttttttttgttttttgtttgtttttttatttcttttgagatggagttttgctcttgttgcccaggctggagtgcagtggtgcgatctyggctcactgcaacctctgcctcccgggttcaagtgattctcctgcctcagcctcccaagtggctgggattataggcgcctgccacatgcccggctgactt

SEQ ID NO: 388133 - DNA, 201 bp, Homo sapiens
cagcagctctcacttgccagcctccagaaccgtgagaagataaatgtctgttggttaagcccccagtctggtattttgttacggcagcccaggcaaaccartatataggtgaattacagactaaagttgtttcaaaggcacaaaactcatcaagggattgtgtatgaagttggaatttggggctgaggataactttgtcat

SEQ ID NO: 388134 - DNA, 201 bp, Homo sapiens
ctttatatgttgtttcatgtgtcagaatggaaaaagcaaatatttacgtagagggaactcctccctcctgttggaggtacgcggcggtcagtgtagcttcygaggccgcgtggagatgggaacatcctcaagacagagcagacttcctggaggctcagccggaacgtctccagctctgtagcacgttttaattccatacaa

SEQ ID NO: 388135 - DNA, 201 bp, Homo sapiens
ccagcctccctccaggccaagaaggccatcaggtctcactgggggacagtgaggagctactcaaggcatgatgggagccaggctggacttgaacaggactyattggactgtccaggtgctgggtgagagagggaggaggggacatggagccagcaccaggggacaagggggacctgaagcagctgtgaccgtggatggcag

SEQ ID NO: 388136 - DNA, 201 bp, Homo sapiens
agtgggtcacgcctgtaatctcagcactttgggaggccgaggtgggtggatcacctgaagtcaggagtttgagaccagcctggccaacatggtgaaacccmgtttctactaaaaacacaaaaattatccaggcgtggtggtgcatgctggtaatcccagttacttgggagactgaggcaggagaattgcttgaacctggga

SEQ ID NO: 388137 - DNA, 201 bp, Homo sapiens
gatctctaggatgggcagataggaagctagagtgggtgggcctttacatggaaccacaaacgtccaagaaacctctcatcatctctgcccaccaatgggcygctgccaggacaaaggcactaccaaagcctcctgggctgccgccagctgggggccacctctccccagtgccacaagccagtgagccaattagacggtgtg

SEQ ID NO: 388138 - DNA, 201 bp, Homo sapiens
gtggatggcagggaaaagaagaagaagggattcattttggcatagagttgggaattgcagcagtcacttgagaatgacagagatgggaaggttagggattrgggtcagtggcatggacgtgagcgatgaacccatacaagtgggtgagaaaaaggctgaagaaggtgaggcagcatagggagtgggtgacgccagtgatgg

SEQ ID NO: 388139 - DNA, 201 bp, Homo sapiens
tctgatttgtgtctgttcaatttaaatagcggcaacagaaatacaagtgtctttgggtgattttgttctgctcttaccaacagatgacaatcacgtcttayggtttttgatttgacagaacggttcatttcatcagctttctagcagcccatttgattcaatttccctctgcagtgttttactgaaaatgacaaaaatgtt

SEQ ID NO: 388140 - DNA, 201 bp, Homo sapiens
catggacgtgagcgatgaacccatacaagtgggtgagaaaaaggctgaagaaggtgaggcagcatagggagtgggtgacgccagtgatggctgatgtggtrtgaccagaggaaggggccaagggggcggaccccgcagggtccataatggtggtgattgccttgggggagttcaggggtcgcagaagaggacctgattatg

SEQ ID NO: 388141 - DNA, 201 bp, Homo sapiens
cgtggtagtacatttcacatcataggctgtctgtggctacttttaaaccttagacatttgaattttccctcaagctttattctggtgaagcgtgggatggrgtcttagctcactttggaaggatggaacagttaagcagcgtacctggtgactggcactgtgtgtgagtgatgccacctcggcaccttcgcgttgatcatc

SEQ ID NO: 388142 - DNA, 201 bp, Homo sapiens
tgttgtgtgccccaccaccccctgttctctgtccccctggtattggttcgtctgcttgtggtaactgctgaatgccagccccaatgcccccgcctcccatygccatcagcgtcaccagcatcacaaaggtcagcacgaggtagctgctcacagaatatttattaagaataagaaattaataaagggactaattggtaaatc

SEQ ID NO: 388143 - DNA, 201 bp, Homo sapiens
ttccccatgtcacgtgagcctgaacttggaacatccatatttccagaagacatcaggctctttctctagtgaccttagaaatccccgcattgaagggagayggccctggcatggggcccctgccactgggtggggaggggtggggaccagactgtgccagggaccccaaggagttggagggtgcagagcttcttgacctga

SEQ ID NO: 388144 - DNA, 201 bp, Homo sapiens
gctagcctggcccctctgccctcaatgactttgcaagcaccttggcctccctgtcccactcccctgccggcacctgcgtgtccctgtcctgccgagctgcmagcctcacctgcgtgcctctcgtcctcatttgaataggtgagcaaccaaagtcagctgtgccgttggagccggattccatcactcaaaatccaggcacag

SEQ ID NO: 388145 - DNA, 201 bp, Homo sapiens
gcttccttaagtttgtgcttaaagtcttaggcataattcttttgttaaataagtttaggaggctctaagtattgggaaagtgagtataaatacgcctctgkgggagcttcaaggatgtggtgcctcacctccaggagcgagcctcctaggtgaaactgtcactaggcgccccacacttcagccaggaggaaggtccatttc

SEQ ID NO: 388146 - DNA, 201 bp, Homo sapiens
tctgtatggtgggcaagatctcatcacgacccacatcagctttgctgttagaaacgtgttgccacagaggagcacattcataattgaaatcaccaaatagrgaattctttctagaggcagtggctgcctcagtgaaacgtgcatggctgagcagagcaaggaagagttagtggggccgggggcgtgctgatatcacagtgg

SEQ ID NO: 388147 - DNA, 201 bp, Homo sapiens
aagtattgggaaagtgagtataaatacgcctctgggggagcttcaaggatgtggtgcctcacctccaggagcgagcctcctaggtgaaactgtcactaggygccccacacttcagccaggaggaaggtccatttccgagggctggtagcataatctggcctccaggtgagctctgaggtcgtgttctggcgtgcccaggac

SEQ ID NO: 388148 - DNA, 201 bp, Homo sapiens
gaacccgtataccagatgcagcctggtgcttcccatgatgagaaccccatataccagacgcagccacatgcttcatgtgatgggaaccccgtataccagaygcagccacgtgcttcttgtaatgggaaacatctttgaatatgccaggaattaagcagtgagcttcttgatggtcagaacactgatggcacccaaagtagt

SEQ ID NO: 388149 - DNA, 201 bp, Homo sapiens
ctaggtgaaactgtcactaggcgccccacacttcagccaggaggaaggtccatttccgagggctggtagcataatctggcctccaggtgagctctgaggtygtgttctggcgtgcccaggactagatggagcctaccggggcattcctatgtgtgacacagagccctgccaggcccggtcgggctcagagtgggcttaacc

SEQ ID NO: 388150 - DNA, 201 bp, Homo sapiens
tggggtgctcactagctgggtttggaaaatgttgctcatcacctgagcatctgaagtgctgtgtgtggcgaggccactaaaagcttttcagatccccaccrgtttccgtgcaacctccttcacagcctcatggaagccttgcgtccaagctcggcaccttgccagattccagaggaactcagaggagcacctgtctttgga

SEQ ID NO: 388151 - DNA, 201 bp, Homo sapiens
caggaggaaggtccatttccgagggctggtagcataatctggcctccaggtgagctctgaggtcgtgttctggcgtgcccaggactagatggagcctaccrgggcattcctatgtgtgacacagagccctgccaggcccggtcgggctcagagtgggcttaacccttcagaccctcgattcctctggacccctctttaaga

SEQ ID NO: 388152 - DNA, 201 bp, Homo sapiens
taccatctgcagccagacacagacatgtgcttcctgtaatgggaacccgtataccagatgcagcctggtgcttcccatgatgagaaccccatataccagaygcagccacatgcttcatgtgatgggaaccccgtataccagacgcagccacgtgcttcttgtaatgggaaacatctttgaatatgccaggaattaagcagt

SEQ ID NO: 388153 - DNA, 201 bp, Homo sapiens
caggacaaatccatcaaacacaagacactctgctagagatctctaaatgggacataattgtgcatttaccagtgatatttagcaagagtctccatgcagcrtggataatctttggctgaaggcatgttccttcctacatgagccccggagtctgctgctctgcccttcagtcccgaagcctctcctggccctccacaccag

SEQ ID NO: 388154 - DNA, 201 bp, Homo sapiens
ttgtaattttttggtatacaaatcttttaaatatattccacataaatttatccataagtttttcatgtgtttttgttttgtcctttaaaaatgctatattyttagtttcaattcccagtatttctttgctaatgatgagaattacaggagctttctgtaaatttgtctagtatgctgtgagtttgctgaacaaatttattc

SEQ ID NO: 388155 - DNA, 201 bp, Homo sapiens
tgtaattttttggtatacaaatcttttaaatatattccacataaatttatccataagtttttcatgtgtttttgttttgtcctttaaaaatgctatatttwtagtttcaattcccagtatttctttgctaatgatgagaattacaggagctttctgtaaatttgtctagtatgctgtgagtttgctgaacaaatttattct

SEQ ID NO: 388156 - DNA, 201 bp, Homo sapiens
cccaagcttgagtgcagtgacacgatctcggcttactgcaacatctgcctcctgggttcaagagattcttctgcctcagcttcatacaccctgcatatgcmggctgcctcctcaagcagtacagctgggattacaggcacccgccaccacacccggctgattttagtgtttttagtagagttgcggtttcaccattttggc

SEQ ID NO: 388157 - DNA, 201 bp, Homo sapiens
gcccctacgccctggtcagatcagaaccaggtcagaactcccctacaccacagtcagatcagaaccaggtcagaacccctataccaagcttgtccaatcckcagcctgcgagccacctgcagcccaggatagctttgaatgtggcccaacataaattcataaactttcttaacacattatgagtttttttatgattttttt

SEQ ID NO: 388158 - DNA, 201 bp, Homo sapiens
ctgaggctaacatgcatcaggtgctccaagtgggctctcattgaccccaggatgccatcagcccccttgccctgcctggagtatatcacatgggccctggstgcctgggcctgtggagccacagctgctgaggtccggtgtttttaaagcctgagagaggccatctgggggtagcactacaggagatgggaagaggccccc

SEQ ID NO: 388159 - DNA, 201 bp, Homo sapiens
aagaggcccccaggaaaccagggagagcaagaaggtcttctaaggactcatgtcctcttaccaactaccatgtagttaagaatgccttacgaagggggacrggagagtcaagggatagaaaatcagtccttaaaatctgcactgtcctttccacatacaaagcacctttcacacaggtgagctcatttaccctcagatggc

SEQ ID NO: 388160 - DNA, 201 bp, Homo sapiens
gcgaccttggataggctgccgtctgggcctgggagacttctcacctgcagagtggatgatgggggaccttgaggactgaacaggagaaagcacactgaacmgagcctggtacctagtaagcactcagtaagtcttggcacttactgtgataattgcattttaagcccagctaccaaaatttccagacctacgttaccatct

SEQ ID NO: 388161 - DNA, 201 bp, Homo sapiens
acgtacagctttccacgcttattggctggccactgggtaccaaggaccatggcgggcactctggaatgctctgttttggcaaactttcttccccaagaacrgatttgacttttgaaaagtggtctgaaagtcagcctccccagccctggtcacagcagaaatagttttggacccaggtgagttgagtccacaaaataacag

SEQ ID NO: 388162 - DNA, 201 bp, Homo sapiens
gcaagctgaacctgcagttgagtggccacgcgtgtggtgcgaggcgtgcagcccatccctgagggctcccctgcatgggaaaggaggctgggaggttcgcyaggactgcatgtggccctcgcaccaagaacctgacccatggtggaggtggtgagtgctgtgtggtcggccttgatgtttatacgagagtctctgaggtgt

SEQ ID NO: 388163 - DNA, 201 bp, Homo sapiens
atgggacataattgtgcatttaccagtgatatttagcaagagtctccatgcagcgtggataatctttggctgaaggcatgttccttcctacatgagccccrgagtctgctgctctgcccttcagtcccgaagcctctcctggccctccacaccaggttctggaagccagaggaggtggggtgctcactagctgggtttgga

SEQ ID NO: 388164 - DNA, 201 bp, Homo sapiens
caaggctgctttccaccactcagctttctcatgcatcccgtttcccagaggtggccagtgcctgggccctgagtcggttgagactcatccagagcagagcygcagaagctgggctggctccagacagagatgacccaaagcctgtgtcagcatttgggtgcctgggcccaccgttcaggcctgagagagcatcagtgaggc

SEQ ID NO: 388165 - DNA, 201 bp, Homo sapiens
gctgctttccaccactcagctttctcatgcatcccgtttcccagaggtggccagtgcctgggccctgagtcggttgagactcatccagagcagagctgcaraagctgggctggctccagacagagatgacccaaagcctgtgtcagcatttgggtgcctgggcccaccgttcaggcctgagagagcatcagtgaggctcgg

SEQ ID NO: 388166 - DNA, 201 bp, Homo sapiens
cggttgagactcatccagagcagagctgcagaagctgggctggctccagacagagatgacccaaagcctgtgtcagcatttgggtgcctgggcccaccgtycaggcctgagagagcatcagtgaggctcggagcccccatcagccaggtcaggccgtggctctgagcctagtgctcctttctaaatgggagttgcaacgcc

SEQ ID NO: 388167 - DNA, 201 bp, Homo sapiens
ctgcaaagtaagaatataaaggaaattctcttacatgacagcgtgtatacgagtgtgcacacgtgtgtgtgcgtgtgcatgcatgtatgtgtgtgtacacrtgtgcacctgtggttttctctccatgtttcttccagtactgatcagggttgcttgttttcaggagttttcaagtgctctaccttcaagttttccccagct

SEQ ID NO: 388168 - DNA, 201 bp, Homo sapiens
atctctacatccccaatccatgaaaacaaaacagaaatggagggccaagaaacctacacagggaagacacgaaatagcaaacatacctgatttatccaagrgaaggcagaggagggaaacgaaaggatgaataacaggtgaggcaagcaggacataactcgtaggatggtcagcatgcccagcgcggcggcgaggacttcg

SEQ ID NO: 388169 - DNA, 201 bp, Homo sapiens
tctcaagcagtcttcctgccttggcctccaaaggagttaggattacaggcataagccactgtgcccagcctaatctatataacctttcaaacaggtatctscatttgtatactaggggagaatgtagaccccacaccctcttcctcaagaaacaacttgaacgcatgccattctgccatctcagccaaggcgattgcctgt

SEQ ID NO: 388170 - DNA, 201 bp, Homo sapiens
gaagacacaaaacacccagtcacatcactgtgaacagacaagtttgccaggagtctgttcagacctggtgctccctgagccgcgctgagcagcagttcagyggggataccaagttggggaagatgccaagtggtaggaaggaggctggggctctggtctgcacatgccagctgatggagtttggagttggggggatatggc

SEQ ID NO: 388171 - DNA, 201 bp, Homo sapiens
gacttatgtctctgaattctgttcctaatctctgctgctcaatctgtggccacctgcagaggagccagccggatggcatcgtccttaccgagctctctggktgtcagatccttcactactccttagtggctgattactctgcgtagtgtagggtgctgtagggtgcataactgattagtgccttgcagatataagcaaagt

SEQ ID NO: 388172 - DNA, 201 bp, Homo sapiens
ttgaaatctggagtgtttgtcttgaaattaaattgtggtattgtaagctgtcagtggaatgatctgtgctggaacctgatgcggtctagtttacacggtaytgaatcatgtaagtatctcatctttcctctttgaattcagtatgacttcacataggtgaggttagcttttaagtgtacacagaggtatggttaactatca

SEQ ID NO: 388173 - DNA, 201 bp, Homo sapiens
aagatctcagctcactgcaacctcagcctcctgggtagctgagactacaggtgtgcaccaccacgcccagctaatttttgtattttttgtagagatggggwttagccactttgcccaggtttgtctcaaattcctggactcaagttgtccacctgccccagcctccaaagtgctgggattacaggtgtgtgccactgcgcc

SEQ ID NO: 388174 - DNA, 201 bp, Homo sapiens
agctctggaagtaattctcagatcacatatattcatctcaaatttgaaatctggagtgtttgtcttgaaattaaattgtggtattgtaagctgtcagtggmatgatctgtgctggaacctgatgcggtctagtttacacggtattgaatcatgtaagtatctcatctttcctctttgaattcagtatgacttcacataggt

SEQ ID NO: 388175 - DNA, 201 bp, Homo sapiens
agcagtatgttgcccttactctgatctccccacagtgtgagagattttcttaccttcgcatcagtttttagccatgttttggtgtttaagcagagatacgrttccactttgaaagctctggaagtaattctcagatcacatatattcatctcaaatttgaaatctggagtgtttgtcttgaaattaaattgtggtattgta

SEQ ID NO: 388176 - DNA, 201 bp, Homo sapiens
tgatctcaaggataagatgctgattggtatgacctgaatcgaatgattagcagtatgttgcccttactctgatctccccacagtgtgagagattttcttaycttcgcatcagtttttagccatgttttggtgtttaagcagagatacgattccactttgaaagctctggaagtaattctcagatcacatatattcatctca

SEQ ID NO: 388177 - DNA, 201 bp, Homo sapiens
tgactgaccacgagcctgtcctcaggatgcagcctccatccttggtgggcacagctgagagaggaagttctgagctgctttggggtagggctctgttgcamtcaccctcccatctccttagtcgctgcaaccctgtgtcgcaaatagtaggttctcagcaagtgtgctgaaccaaggggtaagaacaacgtttttattttt

SEQ ID NO: 388178 - DNA, 201 bp, Homo sapiens
cataggtgacatcatgcgaacaagtgatggttcagaatacagaagtcatgagtttgaaggttgtgatagaggaaggccgggagagaagtgagaacagaacrtgcttgccctgggcctgcagctgttgccagcatcttctgtcagctgatctgggcagggcgtgggggttcttctcaggcctacctcctaagaacaaaaaca

SEQ ID NO: 388179 - DNA, 201 bp, Homo sapiens
ggaggtcacctgtcctggacggtatttcctaaatgcctggcataggtgacatcatgcgaacaagtgatggttcagaatacagaagtcatgagtttgaaggytgtgatagaggaaggccgggagagaagtgagaacagaacgtgcttgccctgggcctgcagctgttgccagcatcttctgtcagctgatctgggcagggcg

SEQ ID NO: 388180 - DNA, 201 bp, Homo sapiens
atcagccaggtcaggccgtggctctgagcctagtgctcctttctaaatgggagttgcaacgccagctttgcaaagtggttgtcagggctcactgaggggcyctggggagactttgggggaaggataatgattggggaagtagaaattggctcccaaaatgctagagcaggacttaagggactgatggccaggcacctgccc

SEQ ID NO: 388181 - DNA, 201 bp, Homo sapiens
ggtgcagcagctgtcagtggacagaggtgcatcagtgcgttggttggtggcatcgtggcctcaccggcccacagttctgacagaggtgtctgtgtttcacyaactcagtctgtccctgcccattgtccgcacactcattccctccatgccccagtctggcaccctcaagtgcaagtgcgtgcatttaattcacgtagtgtg

SEQ ID NO: 388182 - DNA, 201 bp, Homo sapiens
cgggaggtaggtgcctggtcctccgtgagtctggtggaggagccctccgtggtgacagccttctgtgagagcatggcaggtggtggggcctcgtagagggwaagattttgcagaaaatgtgacctagattcccttttaaataggaaatactggtccctagtgtcttgaactttggggagaaaactccctttgattaaagag

SEQ ID NO: 388183 - DNA, 201 bp, Homo sapiens
ctcactagctgggtttggaaaatgttgctcatcacctgagcatctgaagtgctgtgtgtggcgaggccactaaaagcttttcagatccccaccagtttccstgcaacctccttcacagcctcatggaagccttgcgtccaagctcggcaccttgccagattccagaggaactcagaggagcacctgtctttggaacgaact

SEQ ID NO: 388184 - DNA, 201 bp, Homo sapiens
ccgtggtgacagccttctgtgagagcatggcaggtggtggggcctcgtagagggaaagattttgcagaaaatgtgacctagattcccttttaaataggaartactggtccctagtgtcttgaactttggggagaaaactccctttgattaaagagaaggtaacttggaaatgtgttttccctcatctttttgttaatttat

SEQ ID NO: 388185 - DNA, 201 bp, Homo sapiens
taagagaggaagacagaaggtaatatagagatgactatttatgagtcattttatttattcattatccatctaaagagtagcaattgattgtatcacagaayggtgtttgttttacatcttttgattaggagcagtggtttatggcatagacttgcttaatttcctcctgtttcttcctctggagtggataactgtttcaca

SEQ ID NO: 388186 - DNA, 201 bp, Homo sapiens
taccttgtggacagtaattggaaaggatggggaacagggacgcacgagtgggtagatgaatgcgaggctgttgaaatggttccatggtgagcagtgcatgrttgcttggaacaggaaggagcggaggtgttaagaagtggttgaatttgggatctctttggaagtatgatgctccagctgttatcagcagagctgtaagtg

SEQ ID NO: 388187 - DNA, 201 bp, Homo sapiens
tgctagctttcttgtgatttgcctatgcatgtgttatactcttttccatccttttgcttttgatctatttctttatatttatagtgtgtttcttggaaccrggatatagtgatccagtatgcaagtctgtactttttatttgaaatgttttagttaatgtactcatcaataggtatgggtttagtctgccgttttgctgat

SEQ ID NO: 388188 - DNA, 201 bp, Homo sapiens
tctgtcttttattctgatcatatggagaaatgcagtaattgattttctaatgctcaacaaaccttgcttgtctttgataagtgccacttgctttgagaaaygcatgcatacatctctctgtatatatatgtgtataattccagcattatttctatatacatagaaataataaatatacaaataatgctggttatatttgct

SEQ ID NO: 388189 - DNA, 201 bp, Homo sapiens
ttgttgttaaagttttctacttcattagccacgtcgttgactccagagtcattgtctaagagttaggaacacttgtaatgagctgtataatatggaccctygaacgaaatttaaaaagagaccaagccttctaggaacagcttagcatgcagataaaaggctaggaaaatgtgtgaacagcgccaggctgtaggctgaggc

SEQ ID NO: 388190 - DNA, 201 bp, Homo sapiens
ttttaatgtcaattataaagaaaattactcctttggcttcagaagtttatttaaatctcttctgagaaaattggcagctcttcggagttaatgtccagagyagcagaaacagaaactggagggcacagactggtggatatgtgaacagaagcactttttttaaacaaagttaaaaaaaaaatgttatgctattgctaataa

SEQ ID NO: 388191 - DNA, 201 bp, Homo sapiens
cttaggggtgaagcactcagtattttaatgttaaatataaatacacattcttgtaaattcccattgaagttctattcttgtaggctgagagttttattacrgaagggtgtgtcattttgtcaggtgcctttttgcatctgttgtaatgtttatgtggtttctgtcttttattctgatcatatggagaaatgcagtaattga

SEQ ID NO: 388192 - DNA, 201 bp, Homo sapiens
tgtgaggacatggtatccaccctcaagcatgtaattatgcatggagagggctcagttcagttttaccgagacacagtttattggagtctacaaatagcatraactgctatgtctgcagtgttaccattctctttccttattgtcataatttttgtttaatggctgtttgtgctacattgaccaggtccatgggttgcttaa

SEQ ID NO: 388193 - DNA, 201 bp, Homo sapiens
tttattgtactggctagggtctccatactgcattcaacaggagttggggaagtaaacatcctctgttcctaatcttaggggtgaagcactcagtattttamtgttaaatataaatacacattcttgtaaattcccattgaagttctattcttgtaggctgagagttttattacggaagggtgtgtcattttgtcaggtgcc

SEQ ID NO: 388194 - DNA, 201 bp, Homo sapiens
  misc_feature (1)...(201): n = A,T,C or G
acttgctggaggaaccagattctttctaagcgatttgcatcttgatgtgatgctacagttctatgacaggcccgagtagctgatgaaattctacgtggganaagcttttgagtgcctgtcctggtaaacctgtgacagtggcatcacataaaggtttccagaatgttctgtgaggagattgagccaatgtcgttggtcagc

SEQ ID NO: 388195 - DNA, 201 bp, Homo sapiens
gttattaaatcgtcacttggaaggatgaatgtgggttatagagtatgttgtgccatatatcatcttagtcatcaggaatgtttcagaaaactgaataagartaaagttttttaaatttatgattgaaattagcaattttattaggtccttttaaaaaaacctacaaacttttaaagtttttctcaaaatatacatctttgt

SEQ ID NO: 388196 - DNA, 201 bp, Homo sapiens
ggatttgtaaaaattgcagttcatggcgagagacatccgggagatccaaatgccatcctcctagaacttgctggaggaaccagattctttctaagcgattkgcatcttgatgtgatgctacagttctatgacaggcccgagtagctgatgaaattctacgtgggaaaagcttttgagtgcctgtcctggtaaacctgtgac

SEQ ID NO: 388197 - DNA, 201 bp, Homo sapiens
cgaagactctgggttcagactggctgatgggaagtttgaaatacgaattagttccacattaattggggatagagggagatgcaggggggccatcccagcaygtggtagtcagggagggtctctggctatgggaaaatttgtcagccttgtatgtgcgtgagaccaactttctttttccacaaatacaaatcctctccaaat

SEQ ID NO: 388198 - DNA, 201 bp, Homo sapiens
ggcatggaaaggcagactcaggaaggttcaggaattctaccgactttggagcatgctctcccccggatctgaaacactggcccccgtcttatccacccacmactccttaagacatccaggcgtggaagggaagattcaggaaggttcaggaattctaccgactttggagcatgctctcccctggatctgaaacactggccc

SEQ ID NO: 388199 - DNA, 201 bp, Homo sapiens
gcatataccagacaacacatcatttttatagttatagagagaactcctatgtacttcatgggaatacaaaaatgtcacaaaattaaaaggaatttttccaraattactgtgactgaacagatcattccacgctccgttataccattctgatcctaatcccatagtttaagtgtagaggctggaaaatgtcttcgatttaga

SEQ ID NO: 388200 - DNA, 201 bp, Homo sapiens
tcaaccttgggcctgctcttgttgaggtccagggaaccagtgggtcggatccgtgagcatgcaggcatggagctcagagaagcagcatgtgtcagagatayggcctgagagccacacacccactgctgctgctgtgatctccttgggtgagagcatcagggagaagagagaaagacccagtaggtggtgtcgccaagggag

SEQ ID NO: 388201 - DNA, 201 bp, Homo sapiens; identical to SEQ ID NO: 85245

SEQ ID NO: 388202 - DNA, 201 bp, Homo sapiens
atgtgtggaggcagggcccagaggtttactaagcccctgttctcacttttgcagtgccgtggaggtcccagcccccgctgcggttctcggaggtccggagyccctgatgcagtgcacagcctggctgaatgcctatttccaccagcccgaggctatcgaagagttccccgtgccggctcttcaccatcccgttttccagca

SEQ ID NO: 388203 - DNA, 201 bp, Homo sapiens
gccctggcaggcaaccccaaagccgcgcgagcagtgggaggagcaatgagaggcaatcctgtgagttctcatggcgcaagcatggctgtgggtggcgggtkcgtgcaggtggcagggtgtcatctgatcccacgtgtttcctcggaaggcaggctgtgctgctggggtgggcagaggggcgatatctgtgatggggaccat

SEQ ID NO: 388204 - DNA, 201 bp, Homo sapiens
actcctgtcagtcagggccttggccttgaccccaaagacctcgttgtccagatccctgactgacagtggctgcccccctgtcttccaggtccccatcctcrtcccgtgccacagagtggtctgcagcagcggagccgtgggcaactactccggaggactggccgtgaaggaatggcttctggcccatgaaggccaccggtt

SEQ ID NO: 388205 - DNA, 201 bp, Homo sapiens
aggagaactacagagtaaatcagaggttgagatcttcagcacaagcataaaaaatcaatttaagatgaattttactactataaaaattcttcaaatatccytttaagagtgggaactgctaggaaagccagctcacatttcaattccctcagcagcatgagagaaggacgcccgcgtgggcagaggcttggtgtgcacccc

SEQ ID NO: 388206 - DNA, 201 bp, Homo sapiens
actgagtgtttcttttcagaaacgggaactttcagacattttctctccagctgaattcagtaaagagcagtgtgtgtgtgtgtgtgtgtgtgtgtgtgtgygtgtgtgtgtgttcctttcccagccagcagtgttatatctgaagggaagggtggggatgagctgtggtgccgcccttcacgccattgagacgggctggga

SEQ ID NO: 388207 - DNA, 201 bp, Homo sapiens
gtacacagaatctagacatttcacattgaattatctgagtatttatgtgccctgacaattcagcgttaaagttcaatacaaatatataaattattaagcakttaaccagtgacacattcatcagctgaacgtcttttattgtggcctgtagacagattattttcattcagccattaaagcacaatattgtcgggtgaaatt

SEQ ID NO: 388208 - DNA, 201 bp, Homo sapiens
cacagagcctcaggcggaagctgggaaggcgccgcccggcttgtaccggccgaagggccatccgggtcaggcgcacagggcagcggcgctgccggaggacmagggccggcgtgccggcgtccagcgaggatgcgcagactgcctcaggcccggcgccgccgcactgggcatgcgccgacccggtcgggcgggaacaccccg

SEQ ID NO: 388209 - DNA, 201 bp, Homo sapiens
cctggggcagtttctctttagctgaaacttcccttcatcttccaccaataccatgttgcgttacagtttccctcttctcacagaacgagccttgggagagragtgtgttctgtcacacagcctggccatggctcaggtccacaaggtcagctccagactctcagtgcaatgagggaccatgagtagcttctgcttgctgag

SEQ ID NO: 388210 - DNA, 201 bp, Homo sapiens
gaattagactggttatttacatagacatccaaatagaaacctatagagtatctgttaagtcaggctctcccgtcatctcccccatccctgggcaggtgtcwaggagatggttttgttattttcagggccctctcaatggctaaaacactctgggagatgaacaagattttaaaaacccaaagcttagcgcacctggtgggt

SEQ ID NO: 388211 - DNA, 201 bp, Homo sapiens
ttgtgactttgttgatctttgaagtattagagtggctttggcaggtgtggatcacccggaaaggaatcaaacactgagtcctgccaaggtgctcggtcccrgcagcaaagccagtcctcagcagcctgcgctcccgaagctcctccagctaagtgactgaataggccgccctgggagctgcccatgcggatgctctgaatg

SEQ ID NO: 388212 - DNA, 201 bp, Homo sapiens
atccctgactgacagtggctgcccccctgtcttccaggtccccatcctcatcccgtgccacagagtggtctgcagcagcggagccgtgggcaactactccrgaggactggccgtgaaggaatggcttctggcccatgaaggccaccggttggggaagccaggcttgggagggagctcaggtctggcaggggcctggctcaa

SEQ ID NO: 388213 - DNA, 201 bp, Homo sapiens
cccggaaaggaatcaaacactgagtcctgccaaggtgctcggtcccagcagcaaagccagtcctcagcagcctgcgctcccgaagctcctccagctaagtractgaataggccgccctgggagctgcccatgcggatgctctgaatggtgaaacttggttttgacaccacaagttgttttcagttaaatcagtggctcagc

SEQ ID NO: 388214 - DNA, 201 bp, Homo sapiens
tgggctttcccagcctgcgctggttttgctgccacaacctgaggtccgcggacgtccctgtgctcgctatgacttctttgtgtgagactgtcagagtgtgytcctggccctgacacgtgctcggcggctggtttttctccttcagatcagcggccttggacagctttcgcttctttggcagccgtttcaagctgctccgtc

SEQ ID NO: 388215 - DNA, 201 bp, Homo sapiens
tattttcttagagcaaaacccgtttcccccacacctgatcgtcacatgccgtctaagacacgtggtctagggtttgctagtgatcgtctgtgggctttccsagcctgcgctggttttgctgccacaacctgaggtccgcggacgtccctgtgctcgctatgacttctttgtgtgagactgtcagagtgtgttcctggccct

SEQ ID NO: 388216 - DNA, 201 bp, Homo sapiens
gcttatttcatggagtatcatgtcctcaaggtccatccgtgttgtagcacgtgtcaaaaggtccttccttcctcaggctggatatgggctctttaaaagcstattttcttagagcaaaacccgtttcccccacacctgatcgtcacatgccgtctaagacacgtggtctagggtttgctagtgatcgtctgtgggctttcc

SEQ ID NO: 388217 - DNA, 201 bp, Homo sapiens
gataaggcaggcgtgggcccgtgttgctggcatgtgtgactagcaggaggggagtccccatcagaaggggaaacagagcaggaagccaggagtggcgggarcaacgcttcaaccttgggcctgctcttgttgaggtccagggaaccagtgggtcggatccgtgagcatgcaggcatggagctcagagaagcagcatgtgtc

SEQ ID NO: 388218 - DNA, 201 bp, Homo sapiens
tctgacttgccctgtaggaccctagtctgtcgggaggtctctgtccccacccctccctggagtctggggtgtagttgggctgaccctcaaaatatgctgtktcatcaaaggttcatcatctatctggtctgttttttaacgcaacttgataaaataccagtgttttaataaaaaggtctaaaacatttaccatttaaatga

SEQ ID NO: 388219 - DNA, 201 bp, Homo sapiens
taactgttacattttgaatagctccagaaatttagcccctcttccagtggttaaaagtatcatctcattcaacaaagaaatcgctcatgtcattgccgaasacgtgaagttctgacataacatcttcatcacctctgtctcgtcactttgcagcattcatgtagaactgtgtgttcaccagttgcaaccacagattggcta

SEQ ID NO: 388220 - DNA, 201 bp, Homo sapiens
actgtgaaggaatccaagagatgcaagtgctctttgctgtccagtgattaaaatgaaagcaaagacgggaagcgtccttgatccacattttgcctgtgatytgaatatcacatgcttggtccgggcacttaggtgggcttcagtgatttgggccggaaggaaatggtgcccctttcctcgagtttctagattgttttgtca

SEQ ID NO: 388221 - DNA, 201 bp, Homo sapiens
tatatttactatctggccctttgagaaaatgtttgccaaccaaaatctagatttcaaaatgtgatggagaagatgttagtaaggtgcattcattttcagaygtcttgtgtgtaactgttacattttgaatagctccagaaatttagcccctcttccagtggttaaaagtatcatctcattcaacaaagaaatcgctcatgt

SEQ ID NO: 388222 - DNA, 201 bp, Homo sapiens
gaggcctgctatgcagaataaaaccaagagagtcactgtgaaggaatccaagagatgcaagtgctctttgctgtccagtgattaaaatgaaagcaaagacrggaagcgtccttgatccacattttgcctgtgatttgaatatcacatgcttggtccgggcacttaggtgggcttcagtgatttgggccggaaggaaatggt

SEQ ID NO: 388223 - DNA, 201 bp, Homo sapiens
gtccttcctgagcagtgagactctgtccccatgtgcttctggtcacagctgcggtgacatcctgtaacattgtttggtccttgcttaaatcagttactcascatgttatagccgagttcagacccactacacagacctcctaaggtgctggcctgtctaaaacattatttccattattcattcctgttcactctgggatag

SEQ ID NO: 388224 - DNA, 201 bp, Homo sapiens
ggctgcggaggaagtccatttgatggttggggttagaattttatatttggtttacaaagtcttgaattaaaatattttatcattacctagttttatacccrggaatgttagttgttgcacgtgaggacatgaagtgagttaatgcagggcttgggccgtccagtgtcttctttccccacagccttgctggcagtgacccca

SEQ ID NO: 388225 - DNA, 201 bp, Homo sapiens
agtttttcagtttagccaactaatccttttttgcttcacacaatttcacaaccaccacttataacacatcttagcagattccacttcaggttgtaccgaaktagtactttctcatttttctgaaaatcttttctttggatttaaaaattttttctttgaaaatattcttgccatggccatagtttgccagctgttaatcta

SEQ ID NO: 388226 - DNA, 201 bp, Homo sapiens
ggacagcaaatcagtggtagcgagggatgggattgagggggaaagaggtttcctatgaaggaccacaggaagtgcttaggatgatggaactctggcttgakcttagtgatggtcatgtgactgtaggtgtttgtcaaaacttacagaactaaacaccaacaagggtgagttttacttcatgtaaaaaatgttaatgtcatg

SEQ ID NO: 388227 - DNA, 201 bp, Homo sapiens
cagaggaggaggagcagtgcggagatttcacctggggggacaccaccacgggaggcaggcggcaatggtggaggcgttggctgagcagggcctttagaaamaggcccgggagcttggcagcagaaaggagggtggaagtgcagaagcatcgagatgcccagtgacgtctgtgcagtttggattttgctgttgaaaagcaaa

SEQ ID NO: 388228 - DNA, 201 bp, Homo sapiens
cattactccacttacaggactgactgtgggaggcaaaaccactgggacagcaaatcagtggtagcgagggatgggattgagggggaaagaggtttcctatraaggaccacaggaagtgcttaggatgatggaactctggcttgagcttagtgatggtcatgtgactgtaggtgtttgtcaaaacttacagaactaaacacc

SEQ ID NO: 388229 - DNA, 201 bp, Homo sapiens
tctaactcagaaaagtggctttactcagagtctccccaagccttaaacagccattccctcacttggagaactgagtaagtagataagctgtagttcatccstaccatgcagttcagatcagccctgagaaaggagcagacaattgatacatacaacatcatgaatgactctcaaggcattatgcatttgatagtggaagaa

SEQ ID NO: 388230 - DNA, 201 bp, Homo sapiens
tcagagatgttaacacactattctcagtacaagacaggtcaagtggccacaagtaaggaatgatacaggagacccaaacaacctatcccgtcacagatacrtattgaaatgcattcgctgagtagaaaatacgtctgtttctcaacatacatggaatatttacaaaagcttatcaaaaattaggttatgaagaaaagtttc

SEQ ID NO: 388231 - DNA, 201 bp, Homo sapiens
gtggcgggtgcgtgcaggtggcagggtgtcatctgatcccacgtgtttcctcggaaggcaggctgtgctgctggggtgggcagaggggcgatatctgtgayggggaccattatgccagatgcctccagaagaggcaaggaggctaccccagcactacactcctggaagctcccccctaccgggagcacatctccactgcat

SEQ ID NO: 388232 - DNA, 201 bp, Homo sapiens
ttattttcattcagccattaaagcacaatattgtcgggtgaaattctgtttctggattttctttgtctctgttgctgctatggaatttcattgaaagcatygaaatatgagactaacacagaatactgagtgtttcttttcagaaacgggaactttcagacattttctctccagctgaattcagtaaagagcagtgtgtgt

SEQ ID NO: 388233 - DNA, 201 bp, Homo sapiens
acagtggctgcccccctgtcttccaggtccccatcctcatcccgtgccacagagtggtctgcagcagcggagccgtgggcaactactccggaggactggcygtgaaggaatggcttctggcccatgaaggccaccggttggggaagccaggcttgggagggagctcaggtctggcaggggcctggctcaagggagcgggag

SEQ ID NO: 388234 - DNA, 201 bp, Homo sapiens
gcccccctgtcttccaggtccccatcctcatcccgtgccacagagtggtctgcagcagcggagccgtgggcaactactccggaggactggccgtgaaggawtggcttctggcccatgaaggccaccggttggggaagccaggcttgggagggagctcaggtctggcaggggcctggctcaagggagcgggagctacctcgg

SEQ ID NO: 388235 - DNA, 201 bp, Homo sapiens
gcatcattttcttcttcctgacagtttccttcaccctttctcattgcactggtctactgcaggtgacttcttacagttttttagtgcccaaaatgtctttwttgcttcttgattgttgaaaggtattttcactgggtgtagaattctagattgacagggtttttttcctcccaatactttacagattttgctacactgccc

SEQ ID NO: 388236 - DNA, 201 bp, Homo sapiens
gtaattttttggtatacaaatcttttaaatatattccacataaatttatccataagtttttcatgtgtttttgttttgtcctttaaaaatgctatattttwagtttcaattcccagtatttctttgctaatgatgagaattacaggagctttctgtaaatttgtctagtatgctgtgagtttgctgaacaaatttattcta

SEQ ID NO: 388237 - DNA, 201 bp, Homo sapiens
gtaatggagaagaattgggtaagggtgagtgggagataaagaagccatcagaatgctgctgagtctggtgggggttggaggtcaccggaaatagctcctcscaagttttactcagatcttcttggcagggtgcatcttagcatttgtagaatgcaccaaggaatgcctgggaagggcatgggggccctgcaggggtcacag

SEQ ID NO: 388238 - DNA, 201 bp, Homo sapiens
ccggcggtggcatggagacaaagccttctctcctctcttactgctgctgggcctctcctgggcaggtccgggctcagtggcttgaacaggtgatgcagggmggggcagtgcctgtggccacagtgatggcacaggtggacatgatcctgagagtccagtgggggctgtagcacaggaaaggaggttgtctacagcctttct

SEQ ID NO: 388239 - DNA, 201 bp, Homo sapiens
tacatgtttataatagaaaaaaaacggggttgccacgttgacttgcaatatggagcaaaaaatgacttgtcataattcgttctcagatgttaaagaggctrttgaatttactagtatatacacagaagaatgcgtagcccggagcagagtgtggaaatagtccctacacagaggggtctgctgaagttagtcatcgagtta

SEQ ID NO: 388240 - DNA, 201 bp, Homo sapiens
tagtaggtagagctagaggcaacaggttaaaatcacatctttataggagaatgtttggggaatgcattcagcagtcacccattctcattaatagacccagmaaacaattaaaaaatacacattgtgatttggactgggcagacatgccgactgtggagccatttcttaagagagggaggttggcaggtagctggtgagcct

SEQ ID NO: 388241 - DNA, 201 bp, Homo sapiens
tactgtttgtcatgaaaactcagaccattcccattttaccatcctttcttcaccagggagatagagtgacagagcgacttaattgttgcccatctgatgcrgatcaagtgtcatattaactgtgcatatccctgcaacgtttgcacactaatgtacattggtctttctagatgcctgttgttacctataggtaagtaggta

SEQ ID NO: 388242 - DNA, 201 bp, Homo sapiens
tttctctttgaataggttgtttctatactgtttgtcatgaaaactcagaccattcccattttaccatcctttcttcaccagggagatagagtgacagagcracttaattgttgcccatctgatgcagatcaagtgtcatattaactgtgcatatccctgcaacgtttgcacactaatgtacattggtctttctagatgcct

SEQ ID NO: 388243 - DNA, 201 bp, Homo sapiens
aaggacccacaaggactgcggcctcttagcgtgtgtggagtcatcacactgacccttagcagtgtggcctgacttcatgaggcccccgttgtcatggagaygctgggaatgggaggatttgccaccctccagtgaggagcccccatcccatgagtgcaaagcctgaaccggcccttccctaattggcacctctatcctatt

SEQ ID NO: 388244 - DNA, 201 bp, Homo sapiens
actgcagtcagtgcagacatatgcttgtacatgctttcacacacgattcactgaggccggcaagtctgtgggagggagttctataactgaatgtttacacrgggtgtgcatatctttctctttgaataggttgtttctatactgtttgtcatgaaaactcagaccattcccattttaccatcctttcttcaccagggagat

SEQ ID NO: 388245 - DNA, 201 bp, Homo sapiens
cctctcatcttgctgcttcttgtcttgcgcatttatcatcccttcgaggcagtggtttcagatcttaatcctttttcctagtcacctaatattctaagatrtggctatacaaagcatttccaaccattgtccttcccccctcaaaaattatggtaataagcgtccttcccaccccacagataatactgcagtcagtgcaga

SEQ ID NO: 388246 - DNA, 201 bp, Homo sapiens
gcagaagacagcgaaaatagtgcacttcattttctaagacatctaaagctgccacaatgactgtgagttaggtgagctctatgaattaggctagggatttrcaaccacttagcaagttctaagtaactgtaaaagatcccatagactgcaaattgtgtttcatttggggacagataccctgtcttggggatttaagtgtgt

SEQ ID NO: 388247 - DNA, 201 bp, Homo sapiens
tgtctccttgtgacccttgcaggagagctctcgtggcttctgtgcatgttcgtgtgtgactcgcccggctgagggactggcataaacaaacagggatgagyttgtaaaacactttgtaatcccttgaaaaggagaaaaatataaatgaaaatcactgtttaacagtgaaggcaggaagggagctgttcctcagtatagctg

SEQ ID NO: 388248 - DNA, 201 bp, Homo sapiens
ccaggagtgaagacctgagcagcctcactggcctggtgtggaggggccgcctccgagcatgcggagaagtggtttgcatggctggaagtcaatgtttatcygtctttagactcagttgaagacacatttctttcacacattaccatttttaaaacccattaaggtctgattttccaaggcgctgaccctgacgcttctaga

SEQ ID NO: 388249 - DNA, 201 bp, Homo sapiens
cccatatatcggatgcagccacgtgcttcctgtgatgggaaccccgtataccagacacaggcacattcttcctgtgatgggaacctggtataccagatgcygccacgtgctttccgtgatgagaaccctgtataccgtccgcagccagacacagacacgtgcttcctgtaatgggaacccgtataccagatgcagcctggt

SEQ ID NO: 388250 - DNA, 201 bp, Homo sapiens
agcgggggctgagatagggcattccccattcccactggctgcttggagggctgtgagggacctgctgcctggagcacagggcctgtatgggtgggtaagtycctggagagacaggaggaggcaggggtgtgcaagcctcttgaggtatgaggaaggtggccggggtctcgggaagcttgtctggccctggcaggcaggaca

SEQ ID NO: 388251 - DNA, 201 bp, Homo sapiens
gcggcctgtgctgggcacagctggcccagagcgagggccacaccctactactgcaccctccacgcctgtctgtccttgcccacctcggtggctgcctcgcygacccccgccttgcagctggagtagctgtgctgataaagatgcaggtgggaagctggatggtgaggtagcccatctgtggtttgggatccgagaagacgg

SEQ ID NO: 388252 - DNA, 201 bp, Homo sapiens
agtcaaggggccaggtggagccacctttggggatgcggggagaacttggtggccctcagagacccctgcttggagaccccacctcccccttgacaagactkcggcctgtgctgggcacagctggcccagagcgagggccacaccctactactgcaccctccacgcctgtctgtccttgcccacctcggtggctgcctcgcc

SEQ ID NO: 388253 - DNA, 201 bp, Homo sapiens
aatacaagatagcaaaagttacccaggaaagatgttaagtgacatgctgtcttcatttttaaacaggacaaattatttaattgggaattttgccgacactrttgaagcaattatcatatttaaactgtttatcttctccacattctgcctgtattttttttcttctttgcattaatctttttcctctttagcatctagaga

SEQ ID NO: 388254 - DNA, 201 bp, Homo sapiens
tatattagtctctgtctcagttattctgccgttttgtgacagcaatcatagacaaaatgtaaatgaattaatgcagccgtgttccaataaagttttattgstcttcattctgtttagatccatttccacctggcatcattttcttcttcctgacagtttccttcaccctttctcattgcactggtctactgcaggtgactt

SEQ ID NO: 388255 - DNA, 201 bp, Homo sapiens
gataagtagtgctgatacttggtgagcctccttgtaaaagtcactctttgcttgcataaacatgtggttatatgcataaaagacagtaacataaacacagrtaaaacgacaaatattttcaaatgacaatagttttgtttaatacaaggttcttaaatattgtctgtaaagaaccagatagtaaatatattagtctctgtc

SEQ ID NO: 388256 - DNA, 201 bp, Homo sapiens
gagtcagcatctaatgcctatgagactgcgtagtcagggataaatgcttccgttaagtgaaaaagcagagtgctaaagagcaggcacattagagttacaaytgtgccatgtgagaaaaagcttgaagtgaatactctcaaatgatgataatggctgttttagggatgaagatcaaggaatttcctgttttttcttgtctgt

SEQ ID NO: 388257 - DNA, 201 bp, Homo sapiens
atctttattctgggagtgactgggtgtctttaaaagtcaagttcggaagattctcatttaatgatatttgattccatgtctcatgcagaggaatacttagrtacgacggaatgagttaagtaaagggtaaagtattacttaaatatatcatctgaaaataactgcttcatatctcttgtatcttaaaatattttctggaca

SEQ ID NO: 388258 - DNA, 201 bp, Homo sapiens
tgcatgtgttgtagtgggatatgcctttttatgcaccagcgtatgcattgtgccacatccttagacatgacttttattggatatgcagtagcctggcttayggatgtttcataatttatttaacaccctgtgattggttatttagcttactttcatttttaactgtaccaaattgtgctgtcatgccatcctggaagtgga

SEQ ID NO: 388259 - DNA, 201 bp, Homo sapiens
gttttcatagctgtgttaaagagccaaatagtaatttgttgaccgaatgtattatctgtcctgccatatgttgttcaaatgatgagacagaagaatgaagkactcttacaatgtaaacttctggaaatcatactgtttcagggttgtttacattaataacaatgatggcttacatgtatgtatggttttataattttttga

SEQ ID NO: 388260 - DNA, 201 bp, Homo sapiens
atgtttccaggttatgtattttgtttctcaacttttatttatgttaatgaaaccagtctgctttttttttttgttatttttgatgactaagatcccatttmttaggaatttgtaactcagctgtgacaacgtagcctgagatttacacagtccccgttaagggtagaaaatagagggagggcttagctctctgttttcata

SEQ ID NO: 388261 - DNA, 201 bp, Homo sapiens
gcagcggcttcactgcaaatatatgacaaacatgtgacatgtggatatagagcaagagaggcactgcagagccctagagaaatgaggagagacacagtaartggtgctggagctgctgactattccaagtggacgcatgcctttttctaggctctcctgttccattgatctttttgtctttctgtactaacgccacaatgc

SEQ ID NO: 388262 - DNA, 201 bp, Homo sapiens
tggtgaactggcaaaggctgctaaataccaattactgagtaaagtgccatgagaaggtaaagccactttttgtgaattatttcattgcactaacgtgctcstactgaaaaacatggccaggctgcttccgatacagttcacttaaagaaaaatggctcacgttaaaaatagttgctttattttgtaaatgttttagaaaag

SEQ ID NO: 388263 - DNA, 201 bp, Homo sapiens
tggagctgtctggttgtgagcagggtctgcacgaaataaagctcctgggcaaggggacgtctgcagctgagtaagtatgagcccacgtgatcctgtatacygcacatgctgaagcaaccgaggagtatatgtgataacggcatgttttccattgatggcagggtaacgcatagccttacccccacaaccgcaaccacgagt

SEQ ID NO: 388264 - DNA, 201 bp, Homo sapiens
ctgaatgcctatttccaccagcccgaggctatcgaagagttccccgtgccggctcttcaccatcccgttttccagcaaggtcggtaactaagccatctgcrgtgtttcctttggggagcttgacttattaacgatcgctgacatcacagttcattttattgagtataccaacttggtatttttacatcagctaaacagagg

SEQ ID NO: 388265 - DNA, 201 bp, Homo sapiens
tccttggtggggaggggtgtaatcccatgtcgatgtctggacgaggagaaagaggaacttcccctcagccagtggacgagactgtccaggctgctccacartggccacagagagcccccggcacctgctcggggcaggaattggtggctttggccaccttgcttaattgagaaagttgatgtttccgtcagatcttcttgt

SEQ ID NO: 388266 - DNA, 201 bp, Homo sapiens
tcgatgtctggacgaggagaaagaggaacttcccctcagccagtggacgagactgtccaggctgctccacaatggccacagagagcccccggcacctgctyggggcaggaattggtggctttggccaccttgcttaattgagaaagttgatgtttccgtcagatcttcttgtgttcgcacatgttacctattctctaagaa

SEQ ID NO: 388267 - DNA, 201 bp, Homo sapiens
aacaagctttctgcccccttaactatgtcgagtggatggctttagctggaccactttttgtgattgatgtacattctgtgtcgctgtatcttcccgcgacrtggtaatgcaaacttagaaaaaaaaataagatggaaatggtgctgcaagtttttaaaatcaagggttgggcagtgcagggggagctattgtttaaaaaat

SEQ ID NO: 388268 - DNA, 201 bp, Homo sapiens
tgactgttagaagcttaataacaaatatgcaaggaagaaattaaatgatttttctcttcagtagttcagtttaacattgatttctaaaagaaatgattctsactttgccgctaagtttctttctttcactttttttcttttcttttttcttcttgcagtgttccaggggataaaactgtccttgtatctgtattttgaatg

SEQ ID NO: 388269 - DNA, 201 bp, Homo sapiens
gccggtggatttgtgcgtgtcggtggttttccactgggtctccaatccggactcagcattgtgggaccaccagtggctccccctgccacttcttgtggacrcgttctttctccttagagcatctgttccaggccagcggcggtgttactttccagcctggggatgactttatggcgtgatgtctaatctccagtgggcaag

SEQ ID NO: 388270 - DNA, 201 bp, Homo sapiens
caatttaaaaagtgacaatggcagtacactgcggcatgtgctggaaaatgaagtccagggtgctgggtggcctcatggcagggaggctcccctaggctggsgtcggggccaggcagcctgaggatgtgaaattcaagaggacacagcaagaggctggaaggaaactagttggggacaggggtgagaggactcgattgaagg

SEQ ID NO: 388271 - DNA, 201 bp, Homo sapiens
gtaactctctagcaaatcctagatgcttggtgagtgagtgagtacattgaagtacattgagtacagtgaggccacacaatttaaaaagtgacaatggcagwacactgcggcatgtgctggaaaatgaagtccagggtgctgggtggcctcatggcagggaggctcccctaggctggcgtcggggccaggcagcctgaggat

SEQ ID NO: 388272 - DNA, 201 bp, Homo sapiens
tcccaccaaggcattccagcctgggctgcagaataagaacctgtctcttaagaaaaaaaaaagaaaaaaaggtaataaaagagcaccaggaagcataggtratgcacctcccatgtagagaaggctgggcgagcgaatgtgtagtggtttctgcggctccattgttagtgatgacttacggatggaaaagggagttttgta

SEQ ID NO: 388273 - DNA, 201 bp, Homo sapiens
gaacccttgttggacagcaacagaacttgctcacagtgagacccgacatcccctccgctcagtgggcatttcctacagtgcagagttgtgcgttgaaaagygcctcttcactccctacatgaggttcctcacacaaccccgcacctgggcgggcgggcgggcgtagggggcataaatggcttatccctatgaacttcatca

SEQ ID NO: 388274 - DNA, 201 bp, Homo sapiens
accaaataaagggattagaagaaaattacagaccaatattcctaatgtacataaaatgcaaaagtcctcaggaatattaccaacttgaaaccaggaaatayataaaggatgatggaacatgaccaacttgagtttatcttatgaatgtaagactgttcagtatttcacaattaatcagtttaccatatcaataggaaaaat

SEQ ID NO: 388275 - DNA, 201 bp, Homo sapiens
agaagtagctttctgtatactaacccacggacagataaatattgtaaacatttctgtatgcaattatctgtgtctatattaagctaaacattagttcctaytgatatctgcaactctaatccattaccacatggattcttctagcctcctctccttacttatctgtaaaatcccactcacaatgagaaacctggctcacac

SEQ ID NO: 388276 - DNA, 201 bp, Homo sapiens
cactcgccctgaacatagttgtctcagcccattttctgctgctataacaacactgccatctaggtaattgataaagaataggaatttattgggctcacagytctggaggctgagaagtccaagagcatgacgccggcatctgctgagggccaccccgtggtggaaggcattccatggcgaggaagcatgccagacaggaga

SEQ ID NO: 388277 - DNA, 201 bp, Homo sapiens
gctgttttaatggttgcccctttgggccacctgaagtgattgttccagctgctgaggactgatgtggtcacctcaacctcaagaacttctattttccacawgagttaatgtctatgagtggatttcactccattatagaatatgatgcttaacagcaaggattgcccttcttcaagaacgggtgtcattcagccatgtgat

SEQ ID NO: 388278 - DNA, 201 bp, Homo sapiens
ggcccattgggagaacccacacaacctcaagaatgcccctggaatattcacccagtgatggtgtgtggtcacgttggcagtgtcttctcccgaaagctctrtgaaagtttctagcatgatggaagcataccatctgatcagggagcacaaatatgatcactccatcatgggatgggaaattactaaatcagatagacctca

SEQ ID NO: 388279 - DNA, 201 bp, Homo sapiens
cttcctgacacctctcctgcagcacacagcacacgtcagccttgccctgcatgcagccttcccagctggagcaggtcccaccagcgccctgccaggcggcratggtctacaccgccattttaccttccccaggtctgtggcattaggtcttcccttgtgagtggctcgtattcttttcaagatactgtaaataatttggca

SEQ ID NO: 388280 - DNA, 201 bp, Homo sapiens
actgctcgctcccttgtgtgtgcagctccccttttgctgtaaggacaagctccactaactgacatgtgcagcgtggcagcaccctcccccaccagcctttsgtgatgccagcagtttctcactctgcagtggagatgccgtcgctggttagcaatcctgcttgtggcgatattcggagacatttattgttctgcaaaccag

SEQ ID NO: 388281 - DNA, 201 bp, Homo sapiens
aaccaataatattaacccagtgaagtcaaaactgaattgttttataaactgactatggagctggtgtaaggagatgcagggaaggcttctcatctgagtcrgtagcagagtacatagtgcaagaagcgtgggcaggctcccagcgcacccagagatcaaggagagtgatgggtgctgcccgcctctgaggggacggaggca

SEQ ID NO: 388282 - DNA, 201 bp, Homo sapiens
ctccacaaagcacccttcctcttcatcctcagacagaatttgctaaatgcagttcaaaggcaatcgatacattgcacagagagtctccccacctttttctraacaaatgcattcctgaggagttagtttattcacggattgccatgagcgttaatgaccccccgaggcttgttctgcccgtcacccggatggctgctgata

SEQ ID NO: 388283 - DNA, 201 bp, Homo sapiens
agcttccggcagcacgtgtgagtttcgggggtgattggaatgtttctccctggagggaggcctgatgccctggagctggctccagcccgagccccgcggcrtgttctgcctgctgccgcctacctgcagggagacgcctgagctgggaaggttctgagggttggcagggtgctctgctgtgctctttgggaggatcccctt

SEQ ID NO: 388284 - DNA, 201 bp, Homo sapiens
tgtcccttcagctcgtgatggcgcagaatatgtttgcttgccagttaggggaacctgaggctgccttcctgggcagagtggcgatttgtactgggccgacrgggcagccactgttacttatggacaggtggactaggctctttttcatcctgaggaactgctccgcgcttgggaagagccactggagtttatcagcctgcg

SEQ ID NO: 388285 - DNA, 201 bp, Homo sapiens
acatgtcccttcagctcgtgatggcgcagaatatgtttgcttgccagttaggggaacctgaggctgccttcctgggcagagtggcgatttgtactgggccracagggcagccactgttacttatggacaggtggactaggctctttttcatcctgaggaactgctccgcgcttgggaagagccactggagtttatcagcct

SEQ ID NO: 388286 - DNA, 201 bp, Homo sapiens
ttgcttgttttcaggagttttcaagtgctctaccttcaagttttccccagctaaatctttcccatttctttctctaaatccctttttgatatttgcagttmttttcaacttaccaccaatattttagtcttgattagaatcttcccagaaaagacaagttttccttctgattcccacatgtcccttcagctcgtgatggcg

SEQ ID NO: 388287 - DNA, 201 bp, Homo sapiens
cagtaaaaataagatcagatatcagcaaagcagaaaatggtattacagagatgttaacaaaggcagaaattatgtccttggaaagagtcgtaaaaattttyaaaattcccagccaaacctgatgaagaaaaatgaaatgacaaataatataaatgaaaaggaaagatcactacagaatctacaaatattcaaagataatga

SEQ ID NO: 388288 - DNA, 201 bp, Homo sapiens
catagcctaagagatgcaccgtgcagggcaggcacccacatgaagcggctatgtaaacgtgacaaagtagatattaagaaaagtaggaaggaacagtaaarataagatcagatatcagcaaagcagaaaatggtattacagagatgttaacaaaggcagaaattatgtccttggaaagagtcgtaaaaattttcaaaattc

SEQ ID NO: 388289 - DNA, 201 bp, Homo sapiens
ggtctcactgtgggaacatggtgtgcaaccatagactaaggcggcacaccttaaacatagcctaagagatgcaccgtgcagggcaggcacccacatgaagyggctatgtaaacgtgacaaagtagatattaagaaaagtaggaaggaacagtaaaaataagatcagatatcagcaaagcagaaaatggtattacagagatg

SEQ ID NO: 388290 - DNA, 201 bp, Homo sapiens
atacctgatttatccaagggaaggcagaggagggaaacgaaaggatgaataacaggtgaggcaagcaggacataactcgtaggatggtcagcatgcccagygcggcggcgaggacttcggaagtcagtggacccagtggagactcagatgaaaatcagagatggtctcactgtgggaacatggtgtgcaaccatagactaa

SEQ ID NO: 388291 - DNA, 201 bp, Homo sapiens
ctagtaggattttttccagaaataataaatggaattgagaaaattgaagtgaaacaagattctgtggtagataaatatctcttttagtcccccaaccccacttttattttctagtctattgataaactgtatattattatgatagcctactttgactcttggtttgtaaaaatgaaagtataatacaggctttatgattag

SEQ ID NO: 388292 - DNA, 201 bp, Homo sapiens
tcaaaagttacaccttaacaattataataaatgtaaatgaactaaactcaccagtaagaaaaagactgaaaaatggaataaaatataaaatccaaatataygccactcaaaggttatccaaagtataaggactttcaaactttgagggtaaatggatggaaagaagcatgtcaggaaaatacccaaagaaaactggcatag

SEQ ID NO: 388293 - DNA, 201 bp, Homo sapiens
gaggtgggctacttatcttgtatgagtcccatgagaactaaagaacaatggttcaaaaaacagatggatgtctcccatcttacattccctccaggaagaartagttgaagaaataatggatataaatttccttgaattaagaacacatgaaagacttaagaataagaagtccaagagaggaccaaagaggcaaaaaaaaaa

SEQ ID NO: 388294 - DNA, 201 bp, Homo sapiens
aagcaactgtcattgaaagaaggccttaatgctgatagtcattgtttcagttttactttttatttctttgtcttggctctctggctaggcctttaatacarttttgaatagaagtcgtgataatgggcattcttgtcttgttactaaatttagaggaaaagctttcagcattccactgttgatttcctgtgaactctatag

SEQ ID NO: 388295 - DNA, 201 bp, Homo sapiens
ggggagagagggagggttgtggacccagtcacataccacagtgggttcaaagtctcatctttattctgggagtgactgggtgtctttaaaagtcaagttcrgaagattctcatttaatgatatttgattccatgtctcatgcagaggaatacttaggtacgacggaatgagttaagtaaagggtaaagtattacttaaata

SEQ ID NO: 388296 - DNA, 201 bp, Homo sapiens
ccttcatttatcccacaaatatttaaatgctgcgtacgtgtcaggcactgtccttggttctggtgaatagagcagaccctgcctgctgctccgggggatgycggcccgattctttggtaactctggaaggcttgtgcacctgctggagtttgggggagagagggagggttgtggacccagtcacataccacagtgggttca

SEQ ID NO: 388297 - DNA, 201 bp, Homo sapiens
gatagagcactttcttaaactgtatctcagtcattagcacaagtgctccatgaggcagtgaggccactgagtagtgatccgggtcacaagggaagaactgrggcccagcgagactgaagcgggtattttcacgtgagacttcgccagtacgggcaaaagcacacggtagaggattttgaaatcaccctgattgaagaccaa

SEQ ID NO: 388298 - DNA, 201 bp, Homo sapiens
gggaaccccgtataccagacacaggcacattcttcctgtgatgggaacctggtataccagatgcagccacgtgctttccgtgatgagaaccctgtataccrtccgcagccagacacagacacgtgcttcctgtaatgggaacccgtataccagatgcagcctggtgcttcccatgatgggaaccccatataccagactcag

SEQ ID NO: 388299 - DNA, 201 bp, Homo sapiens
gccccggagtctgctgctctgcccttcagtcccgaagcctctcctggccctccacaccaggttctggaagccagaggaggtggggtgctcactagctgggyttggaaaatgttgctcatcacctgagcatctgaagtgctgtgtgtggcgaggccactaaaagcttttcagatccccaccagtttccgtgcaacctccttc

SEQ ID NO: 388300 - DNA, 201 bp, Homo sapiens
tagtgtgtgtgagactgaaggcctgtggatgggtgagatgcttcgaactgatagaaaaagaaaacagaaggaagatttttgtgggcagagccgagacgccrtctctcaaggtgttgtgatcagtaaaagaatccatttttaatggtgaactggcaaaggctgctaaataccaattactgagtaaagtgccatgagaaggta

SEQ ID NO: 388301 - DNA, 201 bp, Homo sapiens
cgccaaggccctcacacacacggatctgcccgtggagtgatgaacttgtaaaagaacgtcaggtggaagcggtgagagggcctggacagttgttctgcagstgtgttctttgtctggttaatcgcgtgcgtctccagtctgtggctggccagccgcgtccacctgcgtgctccgggcacccaaggtgcttggttaatatgc

SEQ ID NO: 388302 - DNA, 201 bp, Homo sapiens
gtttactaagcccctgttctcacttttgcagtgccgtggaggtcccagcccccgctgcggttctcggaggtccggagcccctgatgcagtgcacagcctgsctgaatgcctatttccaccagcccgaggctatcgaagagttccccgtgccggctcttcaccatcccgttttccagcaaggtcggtaactaagccatctgc

SEQ ID NO: 388303 - DNA, 201 bp, Homo sapiens
tggagggacgggggttcgccgcctccacccactccaacacttgtgttagttttggcacagggttgcataattcttggcaaaggcaataaaaatgaagcatrcagatcgactcttgactctcgctggctgaaaggtttaaataggaacacatctgaatggcagtaaatttttcaataagcttattgtgaacttcaactatct

SEQ ID NO: 388304 - DNA, 201 bp, Homo sapiens
gacacactggggatgtgctgtgtgtattgtatgagtgtatcatagaatatttcattgtccgtggtagtacatttcacatcataggctgtctgtggctactyttaaaccttagacatttgaattttccctcaagctttattctggtgaagcgtgggatggggtcttagctcactttggaaggatggaacagttaagcagcgt

SEQ ID NO: 388305 - DNA, 201 bp, Homo sapiens
gccccgttttatgcagctgtgaaccttgtgcttgggtgtagtaggtggtcggctcttttcttttctcctgttcacagcacgcttatagccagagcagactmtatggtttgcctggagagagcttgcacacacatcgtcaccctgtctctggtggttgtggctgcagcctcccagacgcctctccctgtccccacccttgac

SEQ ID NO: 388306 - DNA, 201 bp, Homo sapiens; identical to SEQ ID NO: 85249

SEQ ID NO: 388307 - DNA, 201 bp, Homo sapiens
tcacacaaggagaagcctagccagccatggagagctgcagtggtatagtggccatggagagctgcagtgtagtggctgtggagagctgcggtggtgtagtkgtgcttctctgagaaagtgacgtctgagcatggttgtgagtgggatgacagtggccactgtgcaggctgggaaggagacagcagtagcacggaggctgtg

SEQ ID NO: 388308 - DNA, 201 bp, Homo sapiens
tgatgagaaccccatataccagacgcagccacatgcttcatgtgatgggaaccccgtataccagacgcagccacgtgcttcttgtaatgggaaacatcttkgaatatgccaggaattaagcagtgagcttcttgatggtcagaacactgatggcacccaaagtagttgcgttaagccagcaccaaggttctgggttgtgtg

SEQ ID NO: 388309 - DNA, 201 bp, Homo sapiens
gccctgtcagaacaggcttgatagatgcccggaggttccctctgacagccgcagcagcagggctcaaaccggcggggccgtgtaccgctccaaggacaagytctgccgaggccgacatgaaaagccagcacgcgggtcgcctagagccgctctgcctccaagctgcagcgccgttcgtgaaaatacagagggagagggaag

SEQ ID NO: 388310 - DNA, 201 bp, Homo sapiens
ggggtcatgggggactgaggccagagaaggaagtgtggccctgccgaatttgggaccatttgggctagggggcccccaaagagacctgccgtgtggagacyagccatggagaaccgtggtggcggagtggccgtggagagctgcggtggtggagtagctcacagtgttgggccctgatctgtcaaggcttttggccttttc

SEQ ID NO: 388311 - DNA, 201 bp, Homo sapiens
gcagaaacagcttactgaacacccctcgggtggctggatgatgtgctagcaactgaaaccatctctgcgacttaagcttctctggtgcgtcgcgccccacrtgcttctccagaatcccgtttggaggggccaagcaagtccaatatagataggtttatactgaagccatcagttttgtttcttacatcgtttgtaaacagc

SEQ ID NO: 388312 - DNA, 201 bp, Homo sapiens
ccatcacatctgccatgtcaaggaaggaagggtaggggatggtgccatctgactttagaaaaagtatatgaaaacaagaactctctgcaggcttctcctcrctctttggctacagttgtgacacatttgctgcctgtattggagcttacattctagtgaaggtgacacaacaagtaagcaaatcacgtcactgtgattcca

SEQ ID NO: 388313 - DNA, 201 bp, Homo sapiens
gtggttgaatttgggatctctttggaagtatgatgctccagctgttatcagcagagctgtaagtgaaatgtactttgattgtttgttgaacatccttgccrcctttcctatcgaatttgcttttcaaaaatagtgtggacattaaaaagccatccccatgtgcctaatttcaattagaaaatgttgaatcactgtgaattt

SEQ ID NO: 388314 - DNA, 201 bp, Homo sapiens
ttgaaattgaaagtgagaaagtactcttttcacgtacgcattttgatgttctaaatatgttgaaagggcgcaggggggtttaatgcccttcatcagatctrtgctaccttgtggacagtaattggaaaggatggggaacagggacgcacgagtgggtagatgaatgcgaggctgttgaaatggttccatggtgagcagtgc

SEQ ID NO: 388315 - DNA, 201 bp, Homo sapiens
gactctcaaatacatggttgtgactttttcctttaaacagtcatttgtcgagaaataatcatttagaattgaaattgaaagtgagaaagtactcttttcaygtacgcattttgatgttctaaatatgttgaaagggcgcaggggggtttaatgcccttcatcagatctatgctaccttgtggacagtaattggaaaggatg

SEQ ID NO: 388316 - DNA, 201 bp, Homo sapiens
agggcacagacgtgttctctgaaaggcagggtgtgggcaccacagggtcagccctgcaaacaagagcactgagcagagggagcggcgattggattggagarcggaggctcccacctggctcacatactcctacatacatgccacacgcatgccacggtgcttaggaatcttgaaagctgcaggctcaggggagctgcgatg

SEQ ID NO: 388317 - DNA, 201 bp, Homo sapiens
cgtgcctggggtgcttctggaaccttgccaccagggctcattctttgaccatccctaattccccagggctcttgttgttagagtattctttacaaccaaarcatcattaatcagaaaggtgctgtgcggtgcggggccggctccgaagacagtaataaaaaccggcacacctcctgttccaggacccagaccctggaagtc

SEQ ID NO: 388318 - DNA, 201 bp, Homo sapiens
gcaacatgaagggcagactgtggtggagttctttggcagttaggaaagcaagccagggcacagacgtgttctctgaaaggcagggtgtgggcaccacaggrtcagccctgcaaacaagagcactgagcagagggagcggcgattggattggagaacggaggctcccacctggctcacatactcctacatacatgccacacg

SEQ ID NO: 388319 - DNA, 201 bp, Homo sapiens
gaccatccctaattccccagggctcttgttgttagagtattctttacaaccaaagcatcattaatcagaaaggtgctgtgcggtgcggggccggctccgawgacagtaataaaaaccggcacacctcctgttccaggacccagaccctggaagtctgtgcctaagccaagacatgagcagcgtttgtggaatgcggcttca

SEQ ID NO: 388320 - DNA, 201 bp, Homo sapiens
gagggaggcctcaaccataaagggactgaggggagagacaggaagggtccaggtataagaagagctgcccacggcagggggtgtggcagtgggaccaggawgaatgggtctcagtaatgtggctccttccccaagctggggagcaagggaggcttctgctgttgggtgttgaagaggaatctttggtttgcagatgggggt

SEQ ID NO: 388321 - DNA, 201 bp, Homo sapiens
ggtgaggtgtgggctgcgctggacagcacccaggaccacggcctcgttcttttccttctcactgtgttttcctcttgggtaggggtgagggtggttatttyactcagatctctgagccttaaagtggatcttctgcagatcatctccagagtcatctgacggcgccgggcagaagtctgtatgttgggagctgtccccagc

SEQ ID NO: 388322 - DNA, 201 bp, Homo sapiens
ccaagacatgagcagcgtttgtggaatgcggcttcagatagaaaccttctttcaatttgcaggcctggttatgtaattctaatgcagaatctcccccttcgtgtttgcatgcgtgtagccgggttcacagaactttagccacaaacaggagtgtttccctttttccagggctcccgtgttaggcccccaccaggaggcttt

SEQ ID NO: 388323 - DNA, 201 bp, Homo sapiens
ctggtgttcaatgcatttaaattgacaccagacttcagtatgttgttcatttcaggcccagcactgtaggctcccatctttaaaatgtgtgggtgccgagmgctccctcgtcagcttttgcaaagcattttgcatattcccagtactgtatttacattcctggctcacattggtttttgttttttgtttttcctatcttaa

SEQ ID NO: 388324 - DNA, 201 bp, Homo sapiens
cacgtgtcaaaaggtccttccttcctcaggctggatatgggctctttaaaagcctattttcttagagcaaaacccgtttcccccacacctgatcgtcacawgccgtctaagacacgtggtctagggtttgctagtgatcgtctgtgggctttcccagcctgcgctggttttgctgccacaacctgaggtccgcggacgtcc

SEQ ID NO: 388325 - DNA, 201 bp, Homo sapiens
ggtgacagtggctggtgggcgcaattggcccttccttttgcacctgttgcacattaattgcaatgtcttcagctacattgtcataaaacatctgcaccackcagtagggatctgatttttacggcgcgttgggggatatttccgaatcaaatttctgaggatggtttttgacatttcccaataaaacttaacctacatgcc

SEQ ID NO: 388326 - DNA, 201 bp, Homo sapiens
agagagaatgacctgtagagtcatcccaaattgaggccgggggcctaagtcttggctcccgggtgcgctctgggggggccataaccttggatgagatgctyctccctcgagagcagcggtgaagtatgcacctgcctctgagctcctagagctggggtgtgatgcactggtcctgaaacaaggcctgggcaagtacccaga

SEQ ID NO: 388327 - DNA, 201 bp, Homo sapiens
acagagggccacacccaccaggtgaaatctgtggcaggtacatgtgtggcagtgacacaagctgcctgcaccaaaagcctcaggggatgcaaaagtagcartcacctccccaggaagcagaggtgcccaagaaatagagcttggagatgctgggcacacgcccccagctgcttcctctaaaagctcacctgaccagtagct

SEQ ID NO: 388328 - DNA, 201 bp, Homo sapiens
cgccccaaccttgggatcctgcagaaacagctgtttgttctcatcagggcaggatgctgggagcagggcagccatgtgtgagggcccagggagaggccccrggtctgcagcatccgtgtctgggccatctaggttgcggggatgaatgtgctgccctccagctcaggaggaagggaggaaggggggccaggcagtaagcga

SEQ ID NO: 388329 - DNA, 201 bp, Homo sapiens
tgtgccccgctgtggcactgtaaatattcatttgagctggtaaggaaaatgacattttaaatgccatgatgatatatagtgtatttctcatgtgaatcacrttttccttagtatggctcagcagcacgccatgtttccgtcccatagagaccatgcttcctgtggggacgcccatggtcctggctacctctgctgaaagac

SEQ ID NO: 388330 - DNA, 201 bp, Homo sapiens
gtgccaggatgcacagtgtccatctggggtcctggagcggcctgggttcttcccgcagggtgctgtcctctgcctgacaagtcctgttccctgtctcctcsggagaacaccagtaccaggacgccaggagttgccaggtgggggcatctaaggaaaggaaatgttcatgggatgcgccacagagatgatccctcggagaat

SEQ ID NO: 388331 - DNA, 201 bp, Homo sapiens
  misc_feature (1)...(201): n = A,T,C or G
cagtacaaaaaccagtgggttttacatggggaaagaactcaatgagtccacagttcgtgtcgatgaaggaggcactgcgtgttgggctcaaacgcatctgnaactgtgggtgccaagagacaagtagagctcagactgctgggagcgttggctggaataaagctggccctcacggggctgttaaaatacttgaacttgaat

SEQ ID NO: 388332 - DNA, 201 bp, Homo sapiens
cccgctgcccacatatttcataggcctccttagatgtccctgtctttgagccgggagccctcgcactcccaggcttgcttcagatcccttgcctgagcctstccagcactttgagcccgctctgcccgagcgctgttctccttccgtgccgtgctgtctgctgtgagtcctggagaacagggaccatgtctatcttgctgg

SEQ ID NO: 388333 - DNA, 201 bp, Homo sapiens
aagaattttaacatccatgcagatgagcggcatcctaaaagcagcttcagatgctttggggtgttttctaccgaagatgcttttgtagaaataccgccttscttttcattttttacactggtctgttcatcaaaaaccataacttcatggaacttgcttctgtggaatgaactaaatgtaaattatttttccaaaagcttt

SEQ ID NO: 388334 - DNA, 201 bp, Homo sapiens
ggaaggctagcttcctctcccattggctttttctggagattggaaatggtattacagtctttgttgtgttattgtggaaatctccggcgtctctcctgatsttgccgccctgcacggccgttggagagtacttgcaggcagccccgctccacaccacttttatcatcttcattttcattcttttgtgaaaatgtagttgct

SEQ ID NO: 388335 - DNA, 201 bp, Homo sapiens
aacaccctcatgttagcctttttccaccatgcttcatatttggctcttgtataaatatctgccacgtttccactgggaattattgctgttatatattttayagacactcgactgtcatctaagtggcttattttattcccatagctagaagaaaaatacaaaaataattttgtaatgtgagtgtgattgtgggccaggagt

SEQ ID NO: 388336 - DNA, 201 bp, Homo sapiens
cagagacgcagtgcttggtcttctgagatgttttgtgcagcagctaggtgatgtcccagttctcctggaatatttgcatcgaccaggatgctgtttctgcktcggaacgtggtgtctttgtttacccttaggcattatcttgcttgtttacctaaatctttaactctccttaggtgagtgacttcactgatactaagagtg

SEQ ID NO: 388337 - DNA, 201 bp, Homo sapiens
agaagctcaacttgaaagtgagatatcaaaggaagccttcagttgctgaagatgggtgtgctgggggatgagggcgtgggttgaaaagtatccagttactstttttctcacgtggatcagtctaacatatgtgactctggtaattgaagatggtgacaggctaaactaagctgggattccccagggagagactaggatttc

SEQ ID NO: 388338 - DNA, 201 bp, Homo sapiens
aattagaagctcaacttgaaagtgagatatcaaaggaagccttcagttgctgaagatgggtgtgctgggggatgagggcgtgggttgaaaagtatccagtkactgtttttctcacgtggatcagtctaacatatgtgactctggtaattgaagatggtgacaggctaaactaagctgggattccccagggagagactagga

SEQ ID NO: 388339 - DNA, 201 bp, Homo sapiens
agggccgtgctctccgtggaaatctatgttggagacgacaggctccggttccagctacaccagcctgacttccactggacagtgccattttctgcctctgwtaacaccgtggtgaagcgccttacgtaaagcaacagattttttgttttaagatgcactataattactcttttcagaaccaataatattaacccagtgaag

SEQ ID NO: 388340 - DNA, 201 bp, Homo sapiens
catgggtgaataaagtcttttatgatggagcaagacttgttgtaaaaaattatataccattcatgaccaaaatccttcaaaacactccgtcaccattcccytctgaaccctatagcttaagttctaagcatcttgtgagtctcttgatagagcgttgaaaactccatgcaatggtctttgggacgccattcgaacctggcc

SEQ ID NO: 388341 - DNA, 201 bp, Homo sapiens
ggatccccttggctgttctgcatgcccagggccgtgctctccgtggaaatctatgttggagacgacaggctccggttccagctacaccagcctgacttccrctggacagtgccattttctgcctctgataacaccgtggtgaagcgccttacgtaaagcaacagattttttgttttaagatgcactataattactcttttc

SEQ ID NO: 388342 - DNA, 201 bp, Homo sapiens
tggtttctctggagagtgtggctctccctggtcagtattgtgacctcagttaccactttctgtcccctacattcatatactcccattcatgtatttaacamttctttactgctgtaagataaatggttttcaattatgagttttgtcatgaaaatttaattttttaaaaaaaatcaaaagacctggatgtggtgtgagcat

SEQ ID NO: 388343 - DNA, 201 bp, Homo sapiens
gctctgctgtgctctttgggaggatccccttggctgttctgcatgcccagggccgtgctctccgtggaaatctatgttggagacgacaggctccggttccrgctacaccagcctgacttccactggacagtgccattttctgcctctgataacaccgtggtgaagcgccttacgtaaagcaacagattttttgttttaaga

SEQ ID NO: 388344 - DNA, 201 bp, Homo sapiens
cctacattcatatactcccattcatgtatttaacaattctttactgctgtaagataaatggttttcaattatgagttttgtcatgaaaatttaattttttwaaaaaaatcaaaagacctggatgtggtgtgagcatgcggagctcccctttctgcccaggcctttaccttcctgctaggaggcaaggtcagcccagggaca

SEQ ID NO: 388345 - DNA, 201 bp, Homo sapiens
tgcctgtgctgtggccctgctttgtgtcctgtggcctaacactggagcgccggctgctacctgtctgtctcctgtgctggacaggaagcaccatgcaggcrgcgttgtcgtccgatggtctccacctgtggccgtagcaccgggtgcgctgtggactgggacacttccatgtcactccacacgtgtgccccgctgtggcac

SEQ ID NO: 388346 - DNA, 201 bp, Homo sapiens
tccatcccacccgcattttgggtcattgggggattaatttattcgtgtctcgtaagcactggcagaacaccacccgtgtgaacagcattggtgaagcctgkggagttctttttgagacttccttgagcttccggcagcacgtgtgagtttcgggggtgattggaatgtttctccctggagggaggcctgatgccctggagc

SEQ ID NO: 388347 - DNA, 201 bp, Homo sapiens
tttatcagcctgcgtgtaagcatgtgggaagggggatcaggaacatttagtagaatagtccgtgctccaggtgatcagtccccacccacccgcatgcctcwccttctccatcccacccgcattttgggtcattgggggattaatttattcgtgtctcgtaagcactggcagaacaccacccgtgtgaacagcattggtgaa

SEQ ID NO: 388348 - DNA, 201 bp, Homo sapiens
ggtacttggaaaaatggacaaggattgtgaaatgaaacgcaccacactggacagccctttggggaagctggagctgtctggttgtgagcagggtctgcacraaataaagctcctgggcaaggggacgtctgcagctgagtaagtatgagcccacgtgatcctgtataccgcacatgctgaagcaaccgaggagtatatgtg

SEQ ID NO: 388349 - DNA, 201 bp, Homo sapiens
gcatcatgtaagtgtatgatactgttactgagcaaaagccccagtgctcccaggtgtggcaacgagacacctgcactcaccgggcaccacccagccggggygggcgctccccgggactggcaggttctctaggtgtggcagtgagacatcactcaccgggcaccacccagccggagtgggtgctctccgggactggcaggt

SEQ ID NO: 388350 - DNA, 201 bp, Homo sapiens
ttagagacaatggtttctgtacccattgcctggggctgccataataaagtgccacacactgagtggcttaaaacaacagaaacctattgtctcacacttcygggggccagaagtttgaaacccaggtgtgttaggatcctgctccctctgaaggctccagggaagagtgtcctctgctccctccgaaggctccagggaagg

SEQ ID NO: 388351 - DNA, 201 bp, Homo sapiens
agaaggagaggtgggttgccgagtggtctgctttggcctggcttcaccagggatggaagatacttgcaaggtccagagccgtggctgaccctggaactggsagggaggggagctgttttgcagttgtcaaacccagtatctgccatgtgacgctccctgccccacactttgcaattcaaacctcatctgggcaggcatccc

SEQ ID NO: 388352 - DNA, 201 bp, Homo sapiens
cagcctttatgtatgttctattttgcagtttttatggtgcacaggatgaaagaacacatcaactcctagggagtagaggaggcctggaaatagactcagawgcagaattgtgtgcaggtggctgttggggagtgtattcattcattctcacactgctattagcatctgagactgggtaatttatgaaagaaagaggtttaa

SEQ ID NO: 388353 - DNA, 201 bp, Homo sapiens
ttttgacagtttaatttactgttgccagtggacaagagcaagaggaggacgtggggttagccacctgccccctcgtaccgtgtttcacatgcgaggttgcmaaatcatgactccctcaacctgtcgggctcaaatgagaaggttttcagctgggaaaatggaatatatcagtgcatgtaatattgcctgacctcataaaac

SEQ ID NO: 388354 - DNA, 201 bp, Homo sapiens
aataaaggaatattgagtcactttgactgtattaagctgtgaaatgattcctcatctcaatttaactttctgtcttgagcataatgtttgataagcaatgmatttttgtaggaataatctataacagtatttgactgcaatatttaataacaactagacttgtgactttatgttgtttttaaatgggctgggaaagcccgt

SEQ ID NO: 388355 - DNA, 201 bp, Homo sapiens
ttgtggagccccggtaattaaagtgggtttgtttatttggctccttataaataaaaagggcttaatacagactaattacacagaatctttcgtctacggtrggataataatggcagcaatttaaagtgatattaaatgagaattaataaaggaatattgagtcactttgactgtattaagctgtgaaatgattcctcatct

SEQ ID NO: 388356 - DNA, 201 bp, Homo sapiens
gtccgtgaccaacaaaaatccccctagactaacaattaatcaggctctgctgagcctttgactggcgacagttgcagatgtcacatcatgcgaaaagttaratctcagctttccccaagaaggaaaaaaagtttatttttacagtttatggaactagttttccttttgatcaaatgacctggtctttaggggagaaatatt

SEQ ID NO: 388357 - DNA, 201 bp, Homo sapiens
aaccaaagtccttggggagaccgtcagggaagtatcttcccacatcacacttggtctttgcaagaagtgctggtgggcgtgcagggcttcttgacacttcrcagcaacgtaaggatgtggtagtagagtgcttggtgttccagtggccactgcaatacaaatagagtgagttttgtcgccgtggtacattacagccatgga

SEQ ID NO: 388358 - DNA, 201 bp, Homo sapiens
gcagtgagaatatgcgaatgctttagcagatgttgtgtggctcgggcctgcctgccttatttggagatatttcgcacctctgtgggctcccagtggcaggyatctctggggagggagcgctgtctccatcgtcctttgggaggatgtgggatggctgcaccgggcaccactctcacatggtctccacatcaggaagcgtat

SEQ ID NO: 388359 - DNA, 201 bp, Homo sapiens
gtggcaggcatctctggggagggagcgctgtctccatcgtcctttgggaggatgtgggatggctgcaccgggcaccactctcacatggtctccacatcagraagcgtatctcaccgtgtccagcattggtgtcctggccagatgctctgtttataatgatagaaaaaaaatttttcatctctgaaatttgccaccttcttt

SEQ ID NO: 388360 - DNA, 201 bp, Homo sapiens
aggcatctctggggagggagcgctgtctccatcgtcctttgggaggatgtgggatggctgcaccgggcaccactctcacatggtctccacatcaggaagcstatctcaccgtgtccagcattggtgtcctggccagatgctctgtttataatgatagaaaaaaaatttttcatctctgaaatttgccaccttctttcagca

SEQ ID NO: 388361 - DNA, 201 bp, Homo sapiens
tacttaaccttaaaattacccagaatgtgattgaatctgtgattcacaggccccttctggttctcccgtgcctcggtgtgatcattaggaggatggatcawcctggtgctatcgggaacgcactgcgttaatggcctcagtgcccagcaatggagaactttccactgagtatccgcatgcagcgtgcccggcggaaggtga

SEQ ID NO: 388362 - DNA, 201 bp, Homo sapiens
ttaaccttaaaattacccagaatgtgattgaatctgtgattcacaggccccttctggttctcccgtgcctcggtgtgatcattaggaggatggatcaaccyggtgctatcgggaacgcactgcgttaatggcctcagtgcccagcaatggagaactttccactgagtatccgcatgcagcgtgcccggcggaaggtgaaag

SEQ ID NO: 388363 - DNA, 201 bp, Homo sapiens
taccctctgaactgatctacaaggctatgaaagcatcactttgaataatatgcagtagatatgttagaaaaatgtaatattggtgtgtggacccctcagcytctttgacgagtgttgtaatatatcttgttgaatgatgaatatgctaccgtatgtttcaactattcctttcttgtggctgaaagaaaaatatattgaaaa

SEQ ID NO: 388364 - DNA, 201 bp, Homo sapiens
gcggagattcaggtgccatagggagggtctgggacttttctctcggaggccccatgaagttggtattcctcagctctgccccagggtccctctgattccayggaggagctgcggaaagtccacatttttgaagagctgcaggctggggagcccccgtggcgaacagaggctctaagagaggggtctttgttttggggcagt

SEQ ID NO: 388365 - DNA, 201 bp, Homo sapiens
ctgcagccaccagtgcccgccatttcttcctgcgctgcaacagctctggccagtcctctccttattctgtaggttgaagtacattcctggaatccaggttktcaaagcattctatgcagtttcttgcatgaaatacaggagcagcctttcctgggctgcctcacacattgggcttctgtattcctttatgacagtgtgagg

SEQ ID NO: 388366 - DNA, 201 bp, Homo sapiens
agtgctgtctcggcagtgccacttcagacaagtgagtgtccctttgtgggacgtgttctcaacaggcacaggtgaccttataggtattgggatgatggggrtgtgcctgcaggttgtgaattactttttgccttcagagccaccaacacattcacacaaacatttgttttccttttgattttatcaggagaattttgtttc

SEQ ID NO: 388367 - DNA, 201 bp, Homo sapiens
taaaccactttaaaactttttgtattttggaaaatgtggggactacacacagactgtcttctactgcagaggctctttttctgtcttcatggtagggatcyatttacagggtttgtgggtctgcttttggcatctggcccagccagcccttggattgaggctgggtggggcatgcaggttggccctgaccctcttctgagc

SEQ ID NO: 388368 - DNA, 201 bp, Homo sapiens
gaagtagaatttaaaatttagtgctttgaaaattgtcctcattttaattttttggattttaattaggtaaggttgaacatttttccttattttcattgatygtttggggttccttggtaaaatgcttgcttttgtttcctgttgggttattttgtctttttcttattgatatgtgagaactttttgcatattaaagaaaga

SEQ ID NO: 388369 - DNA, 201 bp, Homo sapiens
aagttctttgagttgtggagtagcctttcagtaaacggcatttgtgcttaaattagcccgtgtcagtttctgacacctgctgttaagagtgctacctgatrcaggtgctcggggctggccaggatccccacctgagtctggagccctgagcccaggcctcctgactccgacagcctgcagccctgcccgaactgggatgat

SEQ ID NO: 388370 - DNA, 201 bp, Homo sapiens
aagttaaattaacatcaaatggaaattcaaatagctaaacatttaaccaatctaacagtaaacaattattctaaaatcaacataaaaataaagacccattrtcatcagaagacctaattcattgtttttagaggtaatctcttggggttctgtggaaatttataaaggaatgagtgaggctaattatttactcatcagatt

SEQ ID NO: 388371 - DNA, 201 bp, Homo sapiens
tcggcctggagggcaggtgggcctctgggcacttcttcgtcaggacatggagccatttcgggtagggccctgggtctaccctgtcccagccccgttccctrtcagaaacccgaggcccagaggtgcagggcagctgcagcaccagggtggacagatgttgatgatcagtgggaaggaattcaaagaaatagaacattctac

SEQ ID NO: 388372 - DNA, 201 bp, Homo sapiens
gactgtggggtgagagtggtctttatatagacactcatgatgcacaagccagcccttcgccccactcttgttttgaagtgaaaggatttatatgggagggmggaggtttgagctgtgcaggagggtccttggttggcatgaggattttgtgaacctatgctgttagctctgcaggcctgtcttgggcataggtaagtagaa

SEQ ID NO: 388373 - DNA, 201 bp, Homo sapiens
gcagcctaggggttgtggttttggtcctgttctgcccttttcccaaattcttcttcattgcatctgatacatcccccttgcctgcagggcagggccctgtytctgtggcacacatagcaggaccgtttacatttcctctgctcacaggtgccgcccacaccttgcttcctatttcatgtcctcctcgtctctgtagttgag

SEQ ID NO: 388374 - DNA, 201 bp, Homo sapiens
tttcctgagatacattttacatactctaaaatttacccatttaaattgtacagcatgctgggttttcatgcatttatacagttgtgtgtccatcatcacartgtaattttagaagatttaaatctccctcttccccactgcccctgccaaaaaagggaccccagacctaccagcagtcatttcccatccccctccctctgg

SEQ ID NO: 388375 - DNA, 201 bp, Homo sapiens
gcagcaaagccagtcctcagcagcctgcgctcccgaagctcctccagctaagtgactgaataggccgccctgggagctgcccatgcggatgctctgaatgrtgaaacttggttttgacaccacaagttgttttcagttaaatcagtggctcagcagcagagcagggttctccaaggaggcctcgtgtccccttcaccccac

SEQ ID NO: 388376 - DNA, 201 bp, Homo sapiens
atactgagtgtttcttttcagaaacgggaactttcagacattttctctccagctgaattcagtaaagagcagtgtgtgtgtgtgtgtgtgtgtgtgtgtgygtgtgtgtgtgtgttcctttcccagccagcagtgttatatctgaagggaagggtggggatgagctgtggtgccgcccttcacgccattgagacgggctgg

SEQ ID NO: 388377 - DNA, 201 bp, Homo sapiens
cgctagttatttatcatttgtttttaaacttttagctacattgtacttcccagtcaagaggactccggtgggcagccggggatatcatgttcaggtgtctytcctgcttgtgtggggtaagagccactactggaatgcgattccagcaaggcctgacgagtcacagccccttgaacctgttgctctccgtaaagtgggatc

SEQ ID NO: 388378 - DNA, 201 bp, Homo sapiens
tgagtgtttcttttcagaaacgggaactttcagacattttctctccagctgaattcagtaaagagcagtgtgtgtgtgtgtgtgtgtgtgtgtgtgtgtgygtgtgtgtgttcctttcccagccagcagtgttatatctgaagggaagggtggggatgagctgtggtgccgcccttcacgccattgagacgggctgggaag

SEQ ID NO: 388379 - DNA, 201 bp, Homo sapiens
tcatgttcaggtgtctctcctgcttgtgtggggtaagagccactactggaatgcgattccagcaaggcctgacgagtcacagccccttgaacctgttgctytccgtaaagtgggatcttcacaggcaacagtggaggagcgtttgagggtgacctgggccctctgcatcagaattactgtgggtgctggctagagaggtct

SEQ ID NO: 388380 - DNA, 201 bp, Homo sapiens
aatggcgggtgcccctccccaagcctcgctgccaccttgcagtttgatctcagactgctgtgctagcaatcagcgagactccgtgggcataggaccctccragccaggtgcgggatataatctcctggtgcgccgttttttaagcccgtcggaaaagggcagtattcaggtgggagtgacccgattttccaggtgccgtct

SEQ ID NO: 388381 - DNA, 201 bp, Homo sapiens
tatttattaagaataagaaattaataaagggactaattggtaaatcttaacatgcccacactgggtcttttccccatgtcacgtgagcctgaacttggaayatccatatttccagaagacatcaggctctttctctagtgaccttagaaatccccgcattgaagggagacggccctggcatggggcccctgccactgggtg

SEQ ID NO: 388382 - DNA, 201 bp, Homo sapiens
gaggaaagatgggaggatgcagagggccagccatgtcccgggactgtgcacacgcttcaccatgtccctgcaggccagggacccatgcctgattccctctraaacatttgcgggactgtggctaccggtcaggtttctccaagtggcccaaggggtgggcattttgagcagagcagtgggactatggatgcgggtacattt

SEQ ID NO: 388383 - DNA, 201 bp, Homo sapiens
gccagccatgtcccgggactgtgcacacgcttcaccatgtccctgcaggccagggacccatgcctgattccctctgaaacatttgcgggactgtggctacyggtcaggtttctccaagtggcccaaggggtgggcattttgagcagagcagtgggactatggatgcgggtacatttggggacctggccatagttgaatttg

SEQ ID NO: 388384 - DNA, 201 bp, Homo sapiens
ttggaatttggggctgaggataactttgtcatcagacagtgctccaaaaaggcactgttctcaggtttagctcttggcatcccaaaagatatgagtgtatygcagtaaaaaacaagtaacaaacagaaacccagatttcatgaccagaaacatcagtggttgtgggaataggggacagcaggcaagacaggagactccaga

SEQ ID NO: 388385 - DNA, 201 bp, Homo sapiens
gagtgtttcttttcagaaacgggaactttcagacattttctctccagctgaattcagtaaagagcagtgtgtgtgtgtgtgtgtgtgtgtgtgtgtgtgtrtgtgtgtgttcctttcccagccagcagtgttatatctgaagggaagggtggggatgagctgtggtgccgcccttcacgccattgagacgggctgggaagg

SEQ ID NO: 388386 - DNA, 201 bp, Homo sapiens
caagtgccaagccttacgatagatgttgtaccttttgacaaatgaccatgtatgcacagctctgtttctggactctgttctatccatttttctgcttgtcytcatgccaacatggccccgacttcattgctgtggctctgtagtaagtcttggtgtcttgtagaagttctccaaatttcgttgttttttccacaattgttt

SEQ ID NO: 388387 - DNA, 201 bp, Homo sapiens
ccgctgccctggctgggtttccttctctgagcaggaacaagtgcccgatgctgttgctggtgcagattggagggctgccagggctgggtgactccctgccrcattttgccaagcttgtgtagctgcttctgcctcttggaggggctgtgttagaaagcatgcatcacctccagttacctcaggcagcaggaaagactttta

SEQ ID NO: 388388 - DNA, 201 bp, Homo sapiens
ggcttcccaaagtgctgggattacaggtgtgagccaccgtacccgacctatatttttctactcacctttttgacatgtgaaatacagttataacgactatkttaatatccttgtctgttaattctaacatctttgtcagttttgggttggttttgatttttttctcctcctagcagttgtatttttattcttttatgcttt

SEQ ID NO: 388389 - DNA, 201 bp, Homo sapiens
aataagcgatgagttggccaaacgcagtgtgttttctgtaggcaagcacctgtggcagctggcagggatgggcaggcctgcagagatggcttcctgggggsgcagcgtggtcaggcttgagggtggtgacagtgcccccaggagaaggcgagactggccagaactgggacgggcatgatgagtggccgtgtttcaaatatt

SEQ ID NO: 388390 - DNA, 201 bp, Homo sapiens
ggatcgctcggtcgctgggcagtgctggtcactgcctttctttggttgagctggtcttgagtcctggtacctgtgtctgccctggcattgaccccgtggtrctttctgtgcatctccgtgctcacctttctggaacacagcccctgaacagaatcatttggcaaaacatcccagtacaaaaaccagtgggttttacatggg

SEQ ID NO: 388391 - DNA, 201 bp, Homo sapiens
caggcttgagggtggtgacagtgcccccaggagaaggcgagactggccagaactgggacgggcatgatgagtggccgtgtttcaaatattgtccatttttracttttgaaaatgccaaaagcaagtatgctgccttgtggaatctgtgcaagcagttctttccaggctgaccttgaatagcctgacagcagagcgaggagt

SEQ ID NO: 388392 - DNA, 201 bp, Homo sapiens
tggctgggcacactggctcatgactgtgattccagcactttgggaggctgaggtgggaggatcacttgaggccaggagttggagaccagcctgggcaatayagcaagatcccgtctctacaaaaacattttttaaaaagaaagttccccttttatcatcagcagcagatactgtcagttgtgttcattacaggtacagact

SEQ ID NO: 388393 - DNA, 201 bp, Homo sapiens
atacaagagagaggtggagcctgcctgtgtcacgatggggaaggcccttgggattcgctctgtgggtgcgggcagcgacaggggtgggtcagggtgcaggyggtgagacggcgagcgaggaggtcgggaaggagcctccacaccccagcagggcccattccacacgagaccccagacgaggggagcagaagctgctggtgc

SEQ ID NO: 388394 - DNA, 201 bp, Homo sapiens
tctgtctgctttgttaggagggcaatcttgcactcataaaatgaggcctcttctatattttggattagtttgtgtaccgttagcattgtctcttctttaartgcttcataagatttaccagtgaagccatttgtgtttgaagttttctttgtgaaaataacattaactatgaattcagttttttttagtagctatagggcc

SEQ ID NO: 388395 - DNA, 201 bp, Homo sapiens
cctccacaccaggttctggaagccagaggaggtggggtgctcactagctgggtttggaaaatgttgctcatcacctgagcatctgaagtgctgtgtgtggygaggccactaaaagcttttcagatccccaccagtttccgtgcaacctccttcacagcctcatggaagccttgcgtccaagctcggcaccttgccagattc

SEQ ID NO: 388396 - DNA, 201 bp, Homo sapiens
ttgctaggaagtaaaggagaaaatgggttcacttgcacagttttggattacatgtaagttttaaagaataggaatgtgtgtgtgtatgtatggtatatacrctatattatcattaccaaaaatgatgcctcctatagacttttggtagaaaggaaatttccttctcttctggttgtctgaattttgttttccttttttttt

SEQ ID NO: 388397 - DNA, 201 bp, Homo sapiens
tcccctaccttagcctcccaagtagctaggattacaggcgcccaccaccacatccgactaatttttgtatttttggtagaaatggggttttcgtcatgttggctgctctcaaactcctgacctcaagtgatccacccacctgggcctcccaaagtgctgggattatagacatgtgccaccgtgcccggcctgccagggctg

SEQ ID NO: 388398 - DNA, 201 bp, Homo sapiens
gtttgagaccagtctagccaacatagtgaaaccccatctttactaaaaatagaaaaaattagctgggtgtggtggtgtgtgcctgtaatcccagttactcrggaggctgagacaggggaattgcatgaacccgggaagcggaggttgcagtgagctgagatagcgccattgcactccagcctgggtgacagtgcaggactc

SEQ ID NO: 388399 - DNA, 201 bp, Homo sapiens
attttgattgacgtccttgggtctgtagactaatgtggggagaataagatctttaggatatgaatctgcctcttcaggaatatgcgctcttgcactctctktctctcttggatttccttaatgtctctcacattttaataagttttttcataaacagcttgtgcaccttttgaaatactccccgtgtccttattttttgtt

SEQ ID NO: 388400 - DNA, 201 bp, Homo sapiens
cctgatctcaaggataagatgctgattggtatgacctgaatcgaatgattagcagtatgttgcccttactctgatctccccacagtgtgagagattttctyaccttcgcatcagtttttagccatgttttggtgtttaagcagagatacgattccactttgaaagctctggaagtaattctcagatcacatatattcatct

SEQ ID NO: 388401 - DNA, 201 bp, Homo sapiens
agcctgtaggtcctagcccgtaggtagacagatgctgtggggcagggccagcccttttgtggagtaaaaagcccttttgcgggtggttctgatggccacascactccagcccgcctggaagccgccatagagatagctttcacatacctggtgatacgtggcaggtcctagaaggtatgggtgaaggtggtgtgtaccagg

SEQ ID NO: 388402 - DNA, 201 bp, Homo sapiens
gttggcattatcgcggatgttagcgtaggaagttctagcgggactagttaaaaatgagggaaaacatggtgttttctcattgtctttttcctagtaaactraaggaatcatgcttgatgaaggctcaagtgtagtatgattcaatcgggcatgagactgtgctgaggtctcggatgtctcgggcctggggtcagcttgaag

SEQ ID NO: 388403 - DNA, 201 bp, Homo sapiens
ctagttaaaaatgagggaaaacatggtgttttctcattgtctttttcctagtaaactaaaggaatcatgcttgatgaaggctcaagtgtagtatgattcawtcgggcatgagactgtgctgaggtctcggatgtctcgggcctggggtcagcttgaagagattcataggcgggtctcgaagcccatgctgctgggagggcc

SEQ ID NO: 388404 - DNA, 201 bp, Homo sapiens
gatgaaggctcaagtgtagtatgattcaatcgggcatgagactgtgctgaggtctcggatgtctcgggcctggggtcagcttgaagagattcataggcggrtctcgaagcccatgctgctgggagggccgggctgccgacgtggacgggtacagctccctggctcacacaagacttggggttccctccaccgtggaatccg

SEQ ID NO: 388405 - DNA, 201 bp, Homo sapiens
ctcgggcctggggtcagcttgaagagattcataggcgggtctcgaagcccatgctgctgggagggccgggctgccgacgtggacgggtacagctccctggytcacacaagacttggggttccctccaccgtggaatccgtcttgctttcacgggatttggggactgtgaaatctcttctcttctaatgcattcccgttgtc

SEQ ID NO: 388406 - DNA, 201 bp, Homo sapiens
gttataagattattcttttttaaaaactggttaggttaattatatgaagctatatttttgcacagtctatctttttctaccctttagctttcagcctttgktcttatatttaaaatatgtgtaaagtaatatagttttaaaaatatccagtttggtagtctttattttttaattatttagtccagtcacattaaaataatt

SEQ ID NO: 388407 - DNA, 201 bp, Homo sapiens
ttgattttaaaggaacagccacagtcctgccagctccatagagagagcagaggtggcctcatgttctgagcagagggtgccatggtatttctgaccaggcrggaccctggctggactcacgagattgtgtgagtccacaatgtgcttgtcagaagccaggtgtcctggagttagggtcagattcccatggtgggtttcatt

SEQ ID NO: 388408 - DNA, 201 bp, Homo sapiens
ttttactctggctgcttttaagattttttctttggtttgaagctaattgtgttatggttctttgaggttttcttcatatttattctgcttagggtttgctraacttcttgaatttctggattgctctctgtcatctattggcaaattcttgaccctgatcccttcaaatattgctctgcctcatccaatctgtcctttcct

SEQ ID NO: 388409 - DNA, 201 bp, Homo sapiens
ctaggactttctaaggcttctcactcaatcagggccctcgggttgtcagggaggccccagtggagcgtctggaggtcatgaggtgtgcaccttctctgctsatgctgcccactttccctctgcttcctccagccctggcttactctcctttttccaagtgccccgattctctttggattgcccctgcttactagagaggcc

SEQ ID NO: 388410 - DNA, 201 bp, Homo sapiens
aggtgccagtttatatctcaaaatgggtgatttaaagaccagtgaacagatttccttagatgtccgtctgcttctgggatctgatgtgtaggcatcttcaygttggttttataatgtgccacgcgtcaggtgttatttcgatgactatgctgagccctttaataagacgcacgtgcctggggtgcttctggaaccttgcca

SEQ ID NO: 388411 - DNA, 201 bp, Homo sapiens
ggtcatgaggtgtgcaccttctctgctgatgctgcccactttccctctgcttcctccagccctggcttactctcctttttccaagtgccccgattctcttyggattgcccctgcttactagagaggccattcaggaaactttgaaacattgccatttattcaatatctagtgcatcgtagtcccttaatccaaaacaactg

SEQ ID NO: 388412 - DNA, 201 bp, Homo sapiens
tgttggttttataatgtgccacgcgtcaggtgttatttcgatgactatgctgagccctttaataagacgcacgtgcctggggtgcttctggaaccttgccrccagggctcattctttgaccatccctaattccccagggctcttgttgttagagtattctttacaaccaaagcatcattaatcagaaaggtgctgtgcggt

SEQ ID NO: 388413 - DNA, 201 bp, Homo sapiens
gtatagttatcctagcggtgcttgcaacctctggcttccatataaaaatgtctaaataaaatactggcagccgtctctagccattatttccatctgctctrggtggcctgacccggaacccactcagggtggtgcactctgggccggggtctctgggatttctgtcgcatcagcttgtgcagccgtggaatggggatgggg

SEQ ID NO: 388414 - DNA, 201 bp, Homo sapiens
gatgactatgctgagccctttaataagacgcacgtgcctggggtgcttctggaaccttgccaccagggctcattctttgaccatccctaattccccagggytcttgttgttagagtattctttacaaccaaagcatcattaatcagaaaggtgctgtgcggtgcggggccggctccgaagacagtaataaaaaccggcaca

SEQ ID NO: 388415 - DNA, 201 bp, Homo sapiens
atgcctctgttcccagcatctcctcggcatgctccctgcagcccttggcctgtgtccagtgggccccgacccggaggctcctgccccgtagctcaggtccsgtcttggcctcagccttcccttaggtgctcgtttctccagtacctgcagcaccggcgcttttagattgcattctttatgcattaattagtaatgtggtgg

SEQ ID NO: 388416 - DNA, 201 bp, Homo sapiens
tttttggggggactttttattttgagataaattttagacttgctgaaaagttgcacaaatagcacaaagtttctgtatgcagccaccatctggtttctgcyagcactaacacctcacacttaccacaaccagggcgctaacacgggtgcactactgtaaaccttgccatctctcctttgtctcctctagtgcaatggtctg

SEQ ID NO: 388417 - DNA, 201 bp, Homo sapiens
tgagataaattttagacttgctgaaaagttgcacaaatagcacaaagtttctgtatgcagccaccatctggtttctgctagcactaacacctcacacttascacaaccagggcgctaacacgggtgcactactgtaaaccttgccatctctcctttgtctcctctagtgcaatggtctgaatttatgcttcctccaaattc

SEQ ID NO: 388418 - DNA, 201 bp, Homo sapiens
gcggcgagaaggtgctctctgtgaaccaggaagagggcccttatcagacacgggctctggcggcaccttgatcttggacttcacagcctccagaatgtgcragatgaatttctgttgtttacaaagcacccagtctaaggtattttattccagcaaccagaaggaactaagacgtctaacttgtgacagttcctcttgcct

SEQ ID NO: 388419 - DNA, 201 bp, Homo sapiens
cctgcgggggtgggggaggatgcctttattatctctaggccaaaggttggacctccacatatgtccatgatgagggacagcagtcatccctttcaagaccragaaagtatttaactccttggaaaattgagggtttattttgcagtggtttggaaaatgtgctgagggtggctgtagagttaactaaatagaatgtttcag

SEQ ID NO: 388420 - DNA, 201 bp, Homo sapiens
gtgatcgtctgtgggctttcccagcctgcgctggttttgctgccacaacctgaggtccgcggacgtccctgtgctcgctatgacttctttgtgtgagactrtcagagtgtgttcctggccctgacacgtgctcggcggctggtttttctccttcagatcagcggccttggacagctttcgcttctttggcagccgtttcaa

SEQ ID NO: 388421 - DNA, 201 bp, Homo sapiens
cgtcttcagcgacagatgatccccgacttaccgtggttcagcgtttgagttttcgagctttatgatggtgcagaagcagcctacgtgcagtagaaactgtrccacaagtgcccgtgccaccattctgcgtctcagtacagtattgaataaaggacatgacacagtcaccactttattataaaataggctcgtgttcactga

SEQ ID NO: 388422 - DNA, 201 bp, Homo sapiens
tgtctaactcaccaattcatgctgtggattgtagatctgcaaaatatatcaagttcacagggattttatgattgttgcaaaggaaactcaaattgtcagcsttttcctgaaggatcttgccattcctaagctctggctatgcccctacttctggctggctgtggccttgcagtgcaggctggcactgtgcccctggcatct

SEQ ID NO: 388423 - DNA, 201 bp, Homo sapiens
ataaacggctttgatgttacctccagttgaatttttagttgggatttgttaagatcaagttatcttaggagtagttaattctaaggtgaatatacaatctyggtgaaacttgtcctggaaaacctgtaattctgtgattagtctgtgtgtaccccaacactttttcttcaaatcttagattaacactgaatacattaaggt

SEQ ID NO: 388424 - DNA, 201 bp, Homo sapiens
tcttgccattcctaagctctggctatgcccctacttctggctggctgtggccttgcagtgcaggctggcactgtgcccctggcatctggctttggggggcycagctgtgcagggagcagatgctgtggtgaatacaggtgaagccagagtcctggcttggggaatgtgttctgcttcctgtagtgctctatttgaagtgtg

SEQ ID NO: 388425 - DNA, 201 bp, Homo sapiens
gcaggtggcagggtgtcatctgatcccacgtgtttcctcggaaggcaggctgtgctgctggggtgggcagaggggcgatatctgtgatggggaccattatrccagatgcctccagaagaggcaaggaggctaccccagcactacactcctggaagctcccccctaccgggagcacatctccactgcatgagctcctggttg

SEQ ID NO: 388426 - DNA, 201 bp, Homo sapiens
cagataaaacatgtaccaagccactggattctgggtgggatactaagtcctttgcagggaggtgacgccctttgttctgtgacatttttgtttttgaggartctcccatttccttctctcaccaagttagttttctgtcttgggtggggctccctaattcttagggacctctggtacagcccagtagcagttctcagcctg

SEQ ID NO: 388427 - DNA, 201 bp, Homo sapiens
tttttcttaaaagttattgggccagaggtcatgaattcacccttagcctatgatctccagtaactctaccatccgcaggaaaatgacttcacaccatgcgyagggctggaaggagcactgggatggagtcccacctcggtgcgcgacccggggcgttcagcagtgccccaggaccgcagcagcccatgctcagagccaggt

SEQ ID NO: 388428 - DNA, 201 bp, Homo sapiens
aattggcccttccttttgcacctgttgcacattaattgcaatgtcttcagctacattgtcataaaacatctgcaccacgcagtagggatctgatttttacrgcgcgttgggggatatttccgaatcaaatttctgaggatggtttttgacatttcccaataaaacttaacctacatgcccctctggaaggctgctgtcttc

SEQ ID NO: 388429 - DNA, 201 bp, Homo sapiens
ctgagctgcacctctgtgtcaggacttgctctcagtgttctgtctggggaggtcatgtgcctactgggtggggcaggtccttgtgtgggaggagccagaarctcccttttttcttaaaagttattgggccagaggtcatgaattcacccttagcctatgatctccagtaactctaccatccgcaggaaaatgacttcacac

SEQ ID NO: 388430 - DNA, 201 bp, Homo sapiens
tgagtctggtgggggttggaggtcaccggaaatagctcctcccaagttttactcagatcttcttggcagggtgcatcttagcatttgtagaatgcaccaargaatgcctgggaagggcatgggggccctgcaggggtcacaggctgggagaggaggggcttactgccttgggcccctggacacaggtaatgcctttgcctc

SEQ ID NO: 388431 - DNA, 201 bp, Homo sapiens
gctctcattgaccccaggatgccatcagcccccttgccctgcctggagtatatcacatgggccctgggtgcctgggcctgtggagccacagctgctgaggwccggtgtttttaaagcctgagagaggccatctgggggtagcactacaggagatgggaagaggcccccaggaaaccagggagagcaagaaggtcttctaag

SEQ ID NO: 388432 - DNA, 201 bp, Homo sapiens
gcccttttcagaaaggtttgctgcaatactctctaggggacaaagctgagtgaaactctagaggcttgtcttatacgcatagacatcacgtgcacacttayaccccagtcatttccgcatgtgggatcatcacagttgtgtgtttgactttttcacctgaccttgtaagtgcttagccatatattgaactctttaatatca

SEQ ID NO: 388433 - DNA, 201 bp, Homo sapiens
gtttgctgcaatactctctaggggacaaagctgagtgaaactctagaggcttgtcttatacgcatagacatcacgtgcacacttacaccccagtcatttcygcatgtgggatcatcacagttgtgtgtttgactttttcacctgaccttgtaagtgcttagccatatattgaactctttaatatcatttttggagatggca

SEQ ID NO: 388434 - DNA, 201 bp, Homo sapiens
catcacgtgcacacttacaccccagtcatttccgcatgtgggatcatcacagttgtgtgtttgactttttcacctgaccttgtaagtgcttagccatataytgaactctttaatatcatttttggagatggcatagtgtcctactgtaaagatataaccttcttccattgttaggaatttagggcaatttcatatctgaga

SEQ ID NO: 388435 - DNA, 201 bp, Homo sapiens
ttcagttcttttttaatatgaataatcagtggctccagccccatgtatagagtaaccccacctttctccagggctctgcagcggcttcactgcaaatatakgacaaacatgtgacatgtggatatagagcaagagaggcactgcagagccctagagaaatgaggagagacacagtaaatggtgctggagctgctgactatt

SEQ ID NO: 388436 - DNA, 201 bp, Homo sapiens
ggcatcatatggaccacttgatgcttctatatgaaacatgccttataaacccttagtactgcatgatttcagattacggaaatatctgcatgagtattggytgcgatatctctgtactagaaatttcagtgctacctctacacaaacagacacactggggatgtgctgtgtgtattgtatgagtgtatcatagaatatttc

SEQ ID NO: 388437 - DNA, 201 bp, Homo sapiens
gcgtttgggaacgccgtttggatcccttctcagtttgacatcctaggtggcagctccagttttgtttggtgaaacgatttcaatgtaacagaacccctttyggttgtgagagcagaatgaactgagccgcacttgactgtcttgtgctggatgtgacccagccgaatccacggggagacccctggttacagcggggaccac

SEQ ID NO: 388438 - DNA, 201 bp, Homo sapiens
catatgtccatgatgagggacagcagtcatccctttcaagaccgagaaagtatttaactccttggaaaattgagggtttattttgcagtggtttggaaaaygtgctgagggtggctgtagagttaactaaatagaatgtttcagagtcacagagatttgtaattggtgggcttggtttgtttttatagtgcttactccttt

SEQ ID NO: 388439 - DNA, 201 bp, Homo sapiens
gaaacgatttcaatgtaacagaacccctttcggttgtgagagcagaatgaactgagccgcacttgactgtcttgtgctggatgtgacccagccgaatccayggggagacccctggttacagcggggaccacgggtggggtctcagccgtggccctttatacttggtgagcatcagccacaccacgtggccaggtttatgat

SEQ ID NO: 388440 - DNA, 201 bp, Homo sapiens
tttgataagtcagtcatttacctccccattctttggttttcatgtttctgtttatcatcaagataagcaactgtgggttttcttccatcgaagcacctgcygcaggtgatgattttaatggtatgactgccatggtcaccacgaccattccgaggactctaaacatgtttcttgtccaacactactttaatttgaaacaaa

SEQ ID NO: 388441 - DNA, 201 bp, Homo sapiens
aggtgtgatatgtgagtcgtctctccctgaggaaggctgcagctgaggttgggggtgaattttttcccctgcatgaagaggggtgactggggatggggccrcctcccttcctaaatttccgtgctccctgttggtgtaattaacttaggggaaaccacacgtggggattcaggggcttctccctttattcttttccttaaa

SEQ ID NO: 388442 - DNA, 201 bp, Homo sapiens
ggcgattctcccacctccgcctctggataggtcggaccgcaggtgcacgtcaccacacccggctagtctgtttctgtgtgttttcattgcacaggataccrgcagtggaaatggttaagagggaaagacacagagctgcaaagatggtcctggaaggacggtttttagacctgacagtttttagtgcagcaggcctggaaa

SEQ ID NO: 388443 - DNA, 201 bp, Homo sapiens
tctgatattgtgcaatgcacttgggggtcagctacacttgactgatgcatgatttatccaatgtccctgccacttcccgagataaagctgctgctttatcraaaatgccagcaactgtgatttagaatttataaacctccgttttcaaataattgttctgattactttctgccttggcaataaaatgataaaggtaattgc

SEQ ID NO: 388444 - DNA, 201 bp, Homo sapiens
tttagtgcagcaggcctggaaaacgactaccagtaggggaaaaagaagagtttctgtttctgggtctcttccttttaatatggcaggaactggcctctggygccaactgcttaattcagaacattgttatttaaacgccattcatgttaaaagggagatgaaacgaaattcatttttccagaggtctccaaatagccatga

SEQ ID NO: 388445 - DNA, 201 bp, Homo sapiens
gaggcaaggaggctaccccagcactacactcctggaagctcccccctaccgggagcacatctccactgcatgagctcctggttgtcacagtgagcaggagrggagggagcctggaggagtggcaagcgggcagagggtgccccacctgctcactcaggaggtggacgtgttgggtgcctgttttatggcccacactcttct

SEQ ID NO: 388446 - DNA, 201 bp, Homo sapiens
gtaggatatctaacaaagatgaagttttggaaactaaggccaactttggaaagtgttatagacttaaaattgcagcgtgtgtttccccctgttgactttgkgagtacagcactggtatgctgtttttccaaggagaatgaagtattgggaaagaattgctcaggaaaaatataactagtaggattttttccagaaataata

SEQ ID NO: 388447 - DNA, 201 bp, Homo sapiens
tttgttctcatcagggcaggatgctgggagcagggcagccatgtgtgagggcccagggagaggccccgggtctgcagcatccgtgtctgggccatctaggktgcggggatgaatgtgctgccctccagctcaggaggaagggaggaaggggggccaggcagtaagcgatcgttaggcatctcccatgtgccttctacgtgt

SEQ ID NO: 388448 - DNA, 201 bp, Homo sapiens
caaagatgaagttttggaaactaaggccaactttggaaagtgttatagacttaaaattgcagcgtgtgtttccccctgttgactttgggagtacagcactrgtatgctgtttttccaaggagaatgaagtattgggaaagaattgctcaggaaaaatataactagtaggattttttccagaaataataaatggaattgaga

SEQ ID NO: 388449 - DNA, 201 bp, Homo sapiens
aacgaaattcatttttccagaggtctccaaatagccatgaaaaataaatttttttctgccaccaagtaccatcagccactcatgtggtttaggtggatgcygtggtggtgccgggagcactaccagcctgtggggccgtgggcttgtgcttcgccggagtgggaagtggggacattaggaagcccgactgttgaatcgcct

SEQ ID NO: 388450 - DNA, 201 bp, Homo sapiens
aagtgttatagacttaaaattgcagcgtgtgtttccccctgttgactttgggagtacagcactggtatgctgtttttccaaggagaatgaagtattgggaragaattgctcaggaaaaatataactagtaggattttttccagaaataataaatggaattgagaaaattgaagtgaaacaagattctgtggtagataaata

SEQ ID NO: 388451 - DNA, 201 bp, Homo sapiens
actagtaggattttttccagaaataataaatggaattgagaaaattgaagtgaaacaagattctgtggtagataaatatctcttttagtcccccaaccccrcttttattttctagtctattgataaactgtatattattatgatagcctactttgactcttggtttgtaaaaatgaaagtataatacaggctttatgatta

SEQ ID NO: 388452 - DNA, 201 bp, Homo sapiens
attattaatattagtgatattacattatgttgaagtgaagtgagatagatgtatcattttcacaaagtcagatttctgcgtgacttttattcattgtggtrcaaaggaaaccctggctgctgaagtagacttaggagcaggcagaattcctggacgcaggtgccttggagtgaggtgaccctctctggcccccagcacctt

SEQ ID NO: 388453 - DNA, 201 bp, Homo sapiens
accagacaggtgttatggaagctgctgaaggttgtgaaattcggagaagtgatttcttaccagcaattagcagccctggcaggcaaccccaaagccgcgcragcagtgggaggagcaatgagaggcaatcctgtgagttctcatggcgcaagcatggctgtgggtggcgggtgcgtgcaggtggcagggtgtcatctgatc

SEQ ID NO: 388454 - DNA, 201 bp, Homo sapiens
aaacctctcatcatctctgcccaccaatgggccgctgccaggacaaaggcactaccaaagcctcctgggctgccgccagctgggggccacctctccccagygccacaagccagtgagccaattagacggtgtgggggaccttgctcactgtgcacctgatgggccgggcacagggcaggatgttgctgaatggcccaagga

SEQ ID NO: 388455 - DNA, 201 bp, Homo sapiens
ctcctgtttattattgctttcttgtgcttactttcagtttagtttgctttcttttttgtagtttcttagggtagaggcttagatcatttggttttcctttyttcttttctcatataaacatttaatgctaaaaattctctctaagcactgctttaggtgtgctcacagatagacatgctgtgttttcattttgattcagag

SEQ ID NO: 388456 - DNA, 201 bp, Homo sapiens
gcctcattgtgaggttgggacaggtgggatttcccagtgggagggcgctgaggctctggaaggaagcctcattgttctgctgaagggattaagaggaaagstgagctgtccagtgaagcatattctaatttctcgttcaagtgttgttttagtcaggtcatttcctaaaataaaattagtcaaagttttcttggtttgggg

SEQ ID NO: 388457 - DNA, 201 bp, Homo sapiens
ctgggcatgggcagaaatcatttctctgttgagctggggatacgctcagctggagagaaaaagaagagtggagtcggagtgatacccgggggtacccggaktgatacccggaggtagcctggacacgccccaaccttgggatcctgcagaaacagctgtttgttctcatcagggcaggatgctgggagcagggcagccatg

SEQ ID NO: 388458 - DNA, 201 bp, Homo sapiens
ctgtttattattgctttcttgtgcttactttcagtttagtttgctttcttttttgtagtttcttagggtagaggcttagatcatttggttttcctttcttyttttctcatataaacatttaatgctaaaaattctctctaagcactgctttaggtgtgctcacagatagacatgctgtgttttcattttgattcagagtgg

SEQ ID NO: 388459 - DNA, 201 bp, Homo sapiens
ggcttggcaaagcagccacagccagtatggagaaaaaggcatggctgcgttccagtaaagcttcatttgcaaaagcaggtggtgggctgcgtgcgcccacrgccacagttggccggccatgggctggagaggcccgtgcaggtacggtcttctctgatgcgtcctgtgatgcctgcgtggtacctggggagtgtttgagag

SEQ ID NO: 388460 - DNA, 201 bp, Homo sapiens
gtgaggggaggcaaatgtcggcagagaaggtgggagcagaggaggagttccttatgcagaggtctctgggcaggcagaggaaatgagcctcgactttgctstgccctgggaagggaagcttgtgatccacattatatcagtgtggggttttatgagctggactgagatggttgatctaaagtcacagttggcaagtccctg

SEQ ID NO: 388461 - DNA, 201 bp, Homo sapiens
cctagcccgtaggtagacagatgctgtggggcagggccagcccttttgtggagtaaaaagcccttttgcgggtggttctgatggccacaccactccagccygcctggaagccgccatagagatagctttcacatacctggtgatacgtggcaggtcctagaaggtatgggtgaaggtggtgtgtaccaggggttggcaggg

SEQ ID NO: 388462 - DNA, 201 bp, Homo sapiens
gcatgcctcgccaaccaatcccacatcccagtcttacccggggaccgtacaactcacccaccactgaaacggcagcccctgtgctccactccatcctcgcygggggggcacctttgcttcggagcccaaatcctgcagccccaggtgccaccacggacgccagctcatgacaccagcagaggtagtgcaggagacaagacc

SEQ ID NO: 388463 - DNA, 201 bp, Homo sapiens
tttttccagaggtctccaaatagccatgaaaaataaatttttttctgccaccaagtaccatcagccactcatgtggtttaggtggatgccgtggtggtgcygggagcactaccagcctgtggggccgtgggcttgtgcttcgccggagtgggaagtggggacattaggaagcccgactgttgaatcgcctgggcgtcctaa

SEQ ID NO: 388464 - DNA, 201 bp, Homo sapiens
tgtggactgtgcccagggtttgtgcacctcactcacggcagatttcctggcagccctggggatggtcctgctcccccggggacagtttccatctcatggtrtagctttgggagtggggcccactgaagaaaagcagatagcaggcactgaagttcctgcagcctgttggaccccgggccgtgtgtctttggaggacagaga

SEQ ID NO: 388465 - DNA, 201 bp, Homo sapiens
agtggtggttgacagcagccagctctgcatcactcaggagggagccggggctaaccctcactgcacagggcttccacccctctgttcggccgccttccccrgagatcaggacagcaaagtacattacatatttctccatcgttcttcttagatagcatcagtacactgtttattcgcttagcaaagagcagagcaagaatt

SEQ ID NO: 388466 - DNA, 201 bp, Homo sapiens
aaaataaatttttttctgccaccaagtaccatcagccactcatgtggtttaggtggatgccgtggtggtgccgggagcactaccagcctgtggggccgtgrgcttgtgcttcgccggagtgggaagtggggacattaggaagcccgactgttgaatcgcctgggcgtcctaaatgtgggctgtgttgtcgtccctgtgcaa

SEQ ID NO: 388467 - DNA, 201 bp, Homo sapiens
gccgaatttgggaccatttgggctagggggtccccaatttttttggcaccagggaccagttttgtggaagactaacttttccacagatgggagtggggggwtggtttggggatgaaactgttccacctcagatcaccaggcactagattctcataagaagcgtccagcctagatccctcccatgcacagttcacaataggc

SEQ ID NO: 388468 - DNA, 201 bp, Homo sapiens
tgtcctcccatctctcattcctataatccgctctatccgaaagagtcgacttgccatttgtacaactccatacttcacatttttcttttctctgcctttgyacactgtttattcaacgtacatagtacaaataccttcttaatctaccccctttaaactcctaaccattgttcaaaactcctcctcctatgaaacttttct

SEQ ID NO: 388469 - DNA, 201 bp, Homo sapiens
cccctctgttcggccgccttccccggagatcaggacagcaaagtacattacatatttctccatcgttcttcttagatagcatcagtacactgtttattcgsttagcaaagagcagagcaagaattgaatgactgaaggtgtgtctctgaaattgaataatgtttaagccaagcagaagttctcctttccgtggccagacct

SEQ ID NO: 388470 - DNA, 201 bp, Homo sapiens
atttttttggcaccagggaccagttttgtggaagactaacttttccacagatgggagtggggggatggtttggggatgaaactgttccacctcagatcacyaggcactagattctcataagaagcgtccagcctagatccctcccatgcacagttcacaataggcttcacactcctatgagaatttaatgctgccgctgac

SEQ ID NO: 388471 - DNA, 201 bp, Homo sapiens
atcaccaggcactagattctcataagaagcgtccagcctagatccctcccatgcacagttcacaataggcttcacactcctatgagaatttaatgctgccrctgacctgacagtaacgctggctcacccgctgcttacctcctcctctgtggcccgtttcctaacaggccacggactggacccctggtttaagccatatcc

SEQ ID NO: 388472 - DNA, 201 bp, Homo sapiens
attattttacacctcagtttttattcagaaaagcattaaccatcatttgttttgcatataagacatggtgagatcacaataagtggagaatgtttgccatygtttttctacttgacatcaacagtgtaacattagcttttttttgtatgttatatttacccatgtattcataatttggggtactctttatttctttgtata

SEQ ID NO: 388473 - DNA, 201 bp, Homo sapiens
gggcatcttctctgggtttctttgagatcaacacaatatagtcagggctgtgggccctgagcccatctgaataggatcccagtcttcactctgccacttasgggccatgtgtccatcaccaggttacttgagatccccaaacctcagtttccctgtgtctaaagtgggggttccagtgctatgttatgatgctttgccagg

SEQ ID NO: 388474 - DNA, 201 bp, Homo sapiens
ggaacatccatatttccagaagacatcaggctctttctctagtgaccttagaaatccccgcattgaagggagacggccctggcatggggcccctgccactsggtggggaggggtggggaccagactgtgccagggaccccaaggagttggagggtgcagagcttcttgacctgagtggacagggagaccctctgagctcat

SEQ ID NO: 388475 - DNA, 201 bp, Homo sapiens
tgaaaagttgactcgtactaactatagaaagctgagagaatgcagataaaaaaggaatagtttaaatcatcctaccttatttgattttttaaaaataaacwgattttggaataatcttagatttttggaaaagttgcaagcaacgtatggtgtggtttactttttgtgggtaatttttctccccccaggagatcacatttg

SEQ ID NO: 388476 - DNA, 201 bp, Homo sapiens
ctgtaggtcctagcccgtaggtagacagatgctgtggggcagggccagcccttttgtggagtaaaaagcccttttgcgggtggttctgatggccacaccastccagcccgcctggaagccgccatagagatagctttcacatacctggtgatacgtggcaggtcctagaaggtatgggtgaaggtggtgtgtaccaggggt

SEQ ID NO: 388477 - DNA, 201 bp, Homo sapiens
aaaaaaggaatagtttaaatcatcctaccttatttgattttttaaaaataaactgattttggaataatcttagatttttggaaaagttgcaagcaacgtayggtgtggtttactttttgtgggtaatttttctccccccaggagatcacatttgtctccttccagtttctggcaccttagcccagtagctcctgtgtaggg

SEQ ID NO: 388478 - DNA, 201 bp, Homo sapiens
aaggcaaaggtaatattttctgtcatgaacaaggtttgtggatattgctaattacttatttgaaagaaataataaaatgaaattcagtaaaatcaaataasttggcagttatttgaaggaagcggctcttttctgctgggctgcgactttgaggagcagttgcgtcatttccgggtgaagccaagagcccttgccatcacc

SEQ ID NO: 388479 - DNA, 201 bp, Homo sapiens
ccctccccatagttcagttctctgtgtaggtgtcagtttctccataagctctcagctgcccacactctccccccgaagtgtggccccagccctgcggagtrgttccctaaccgccactctgcccacctcgtgctagcctgggtgtgggcttgcctgctggctctgggctcaggctggggtgctgtcagggttgcaggggtc

SEQ ID NO: 388480 - DNA, 201 bp, Homo sapiens
aagtattgtcaatttagctttttcatgggattctgggatacagagttgcttggtccattgaaatctatatatgtaattttgtttttaatcaaacctaactyctgggttttagaaagcatctcctgtccacagcttttgagaaaggtcccataaattggatgacaccaaatggctccagcaccagaatgaaaaggaagagca

SEQ ID NO: 388481 - DNA, 201 bp, Homo sapiens
gtctggcctcccccgttgaatggccctctcttgaggttgttgggcattggtgaagatcctgatgggatctcatcactggagtcagacgtctttcttcctgrgtctggggcatggcggtattactgtgcgggctgttgggagagggtccgttaccctcatggctgcttgtgacctgtccaggccaccactgtgccagccttt

SEQ ID NO: 388482 - DNA, 201 bp, Homo sapiens
cacccacctgggggctgtttcctagtgctgggcagaatcctggggtcagggttggagggccttaaggccagattggaggtgggagcatggcaaggttgccrtgccaggatgcacagtgtccatctggggtcctggagcggcctgggttcttcccgcagggtgctgtcctctgcctgacaagtcctgttccctgtctcctcg

SEQ ID NO: 388483 - DNA, 201 bp, Homo sapiens
ttttggtggatgacaaatatgataggaaccacgtgtcttggggaaaacactggaattgatgagtgagaatggatacattattggctctattggaaattatsgctgacagatctgaagctctgtcatgcattgggggcttgctggttatttcagtttagtaatttcattgatctgtaacagatatgtgtcaaagagttttag

SEQ ID NO: 388484 - DNA, 201 bp, Homo sapiens
ataccagactcagccacgtgcttcatgtgatgggaacccggtatactagatgcaggcacgtgcttcatgtgatgggaacccggtatattagatgcaggcaygtgcttcatgcagtaggaaccctgtatatcagatgcagccacgtgcttcctgtgatgggaaccccgtataccagacacaggcacattcttcctgtgatgg

SEQ ID NO: 388485 - DNA, 201 bp, Homo sapiens
ttgctgctgtcagtgtcctcaggaatgtttccctttggcgctgacagcagtgtcccagccggaaggctgcgcacatccactccagcccagacggtgcgtckctgagactcgctcattgaaaacatcccttatattcaggatgaatagagtgattgtgcatttaagggaggagagtgaaaaatggacttggaatgttagaaa

SEQ ID NO: 388486 - DNA, 201 bp, Homo sapiens
atgttaaaaacagtcagccctccgccacctgcatgttcccatgtcatagtcgtcagaagcctcttagactgcgtcattggtgcacgttaccaaactcatcrtcaaattaggatgagctgtgtgatgtgccggaagccagagtcccaccttgcagccatgtcatctgctggcaccggctgtcaccccacaaggtcccacctc

SEQ ID NO: 388487 - DNA, 201 bp, Homo sapiens
gggtgatgggggatcagatgagaaagtgcgtgccaccctcagcacagtgcatgagaggcgtgaggcacggcggatgctgcgggtcttataaggcctttaaygctcgaggggaagttcctagaataatgggcgaagaaaaggaatgatatatttctaaaagttactgaatttagctagctagcccaagaaaagcccatgtgt

SEQ ID NO: 388488 - DNA, 201 bp, Homo sapiens
ccctcttctgttgtaaatttaaatgtcagggggaaaaaaaaaaaagcaagaaaaatatgtaaataaatacatttgcaatcatatgttatcggatgagaagrgtagcggtttcaagagttacattcagagtaatcgttgagcacattgatggcaagttgatagtttcgttattatgaaatatttactttggacaaaggagta

SEQ ID NO: 388489 - DNA, 201 bp, Homo sapiens
catcgttcttcttagatagcatcagtacactgtttattcgcttagcaaagagcagagcaagaattgaatgactgaaggtgtgtctctgaaattgaataatrtttaagccaagcagaagttctcctttccgtggccagacctcactaacggggaaggaaattgggcagtgaaaagacagcactcccatgccctaaggaaact

SEQ ID NO: 388490 - DNA, 201 bp, Homo sapiens
tggtgaagatcctgatgggatctcatcactggagtcagacgtctttcttcctgggtctggggcatggcggtattactgtgcgggctgttgggagagggtcygttaccctcatggctgcttgtgacctgtccaggccaccactgtgccagcctttgtgtggctggtattgtggcttctaagttgagcctccgcctggctggg

SEQ ID NO: 388491 - DNA, 201 bp, Homo sapiens
gcatcctgcctgagaagcagtggcccgggatggtgggagatgtctgcaggcgcagggcggaggctgtgggccaagattgtggctctgagaaatggagatgsgagaaggggaggcagtcactttggaagaatgggcgggatggtgatgatttgaatgagacttgggggagttggggcagcgtactccaggggataagatcag

SEQ ID NO: 388492 - DNA, 201 bp, Homo sapiens
ctgattgttatgctttaatttcttctattgagctgtccagaaccctccaggatgacttcagtaagtgtggtgacaacagacgtccttccctgtttcctggyttgggggagcttgcaggatttcaccagtgaggacttgctccccatgttgggtttcagaggcgtcttcctcactgtgtggaatttttgtcaaatgatattt

SEQ ID NO: 388493 - DNA, 201 bp, Homo sapiens
tcctgctgtatcggaatccgcattgcacaagctcccagcactggccgctgtggagggaatggcgctgtctcgtggtaccttctccccaaggctggctgctrctcttccttaggtctgagtctggctgtcctctttccaggtcgaggatttaaagccgcctagctcagggctcagtcctgggtgtgtggctggccaagaaag

SEQ ID NO: 388494 - DNA, 201 bp, Homo sapiens
agtgggtctttttgcgataaaaacattgtgaatacatttaggattcagtgagcttctgtcatttactcgctcattctctaaacgtgtgagtgccctgctcygtgtcagaccagatggcaggccctgcatggggtggggaggggccagaatgtgcagccccacctgcagcccaagcccagctcaggggcagacaggggcaga

SEQ ID NO: 388495 - DNA, 201 bp, Homo sapiens
attagagaagaggaaagtgagtgcctggcatgaaggaagtaccatcaatgtcactaaacaactcttactattaagtgtttctgagttgagttgtggcttakcgatgcgtgaagcagttgttgaattgtagtctgtgccgttcagtgccttgaatataagtatatttgataacgtttatgataagtgttggtgaggatgtgg

SEQ ID NO: 388496 - DNA, 201 bp, Homo sapiens
gcaattataaggacaaacatgtttttaagacttaacccattatagtaggaaaatacaaggcttggggtatgctgactctttcccttgttcgtctctcaaayagaaaaatggtgtgtgtaagtaggtgtttgtatatgtacattataagacattctagaaatttctgtcctatttctttaatattcttgccactaaaaatat

SEQ ID NO: 388497 - DNA, 201 bp, Homo sapiens
tgttgctggtgggaatgtgaaatggagcagctgctgtgggacacttctggaggttcctgaaaacatgaagcatagaattcccatgtggcccagcaattctrcccctaaggacataccccccaaaattgaaagcagggtcttgagtagatatttgtacactggtgttcatagcagcatcattcacagtggccaaaaggagaa

SEQ ID NO: 388498 - DNA, 201 bp, Homo sapiens
tgagctttctgatctttattttatccttttcagtggctctgtttggaagagttattgtacaacccagcactgcttttattaaaaagaaaactgggccactyatttccttcaaagtttttggtgtgtttaaatcttctctaggtaaacaaaacttttattgaaaataatattttgagaccgtgacacccttctcacaagaag

SEQ ID NO: 388499 - DNA, 201 bp, Homo sapiens
ggccctgggagcccacagtccagccaggaggtggtgagcacagggcggagtgtggggttggggactccacttgtggtgttcccagatttgggggatttccrcaaggccccgttgaagggcagtgctccttagatacagtgcagagtccttggggtgagggtcctgtctcattacttgatagcacgtgtcctgtctcattac

SEQ ID NO: 388500 - DNA, 201 bp, Homo sapiens
gggcaaagagacccaggagaccaggccaggggaggaggcagagagcctggtcaggccaggctggtcctccaggtccaggccctgcaggatcctggaaggcrtgaagatgggctggaggtgtgagcaccaagaatggggcgcggcctgaccttgggtctctagaagttaccctgtggtggcattttctataattgatgtcat

SEQ ID NO: 388501 - DNA, 201 bp, Homo sapiens
acagcccagtagcagttctcagcctgtaggtcctagcccgtaggtagacagatgctgtggggcagggccagcccttttgtggagtaaaaagcccttttgcrggtggttctgatggccacaccactccagcccgcctggaagccgccatagagatagctttcacatacctggtgatacgtggcaggtcctagaaggtatggg

SEQ ID NO: 388502 - DNA, 201 bp, Homo sapiens
tgatagcacgtgtcctgtctcattacttgatagcacatgtttcagctggctctttaatgggaaagttggtgctttagtggaagctccagtcccctagatayagagtgtattgcggatatttatcccttcctggctgagcgcggggcagtttctgcctgcagatttgggctctggctctgggttatggacctttgaatgtgg

SEQ ID NO: 388503 - DNA, 201 bp, Homo sapiens
tgcagcaactttagggggttcacaatgttccgcagccatcaccgccgcccagcactggcatgtttcacagtgttccgcagccatcaccgccacccagcacyggcatgtttcacagtgttccgcagccaccaccgccgcccagcaccggcatgtttcacagtgttccgcagccaccaccgccacccagcaccggaatgtttc

SEQ ID NO: 388504 - DNA, 201 bp, Homo sapiens
gcctggtgtgttcactctcctactcctaaaagtttcttggtagaataatttcctacctgtgatgcttgcgaagtcagcagagtctcccacccagccctgcsgcccattcccagaagtctgggctgggggacaccgaatggatagtccaccagcggcgtggcttgtgaaaggaggtacttgttaaatctatgtgtttttatt

SEQ ID NO: 388505 - DNA, 201 bp, Homo sapiens
cagggtcactttcacagggaggaggccaggggtcttgttgcctgcctgccccaaacgtggcctccattccttctttctgtctcccgctggaaaggctgagygcaggtgccagctctctctgcctcactgagcgggtatgtgtgagaagcgtaggcctactggcaggctcctggggaagacgtttctcccctgatacaaaga

SEQ ID NO: 388506 - DNA, 201 bp, Homo sapiens
tcattactggaattacaccagccagccatgaggtcataaagttaccttgacagattgtgaatgccgagtccacagtaactctggagggctgcctggcatcrtccttcatcattgtccagaaacgctcctctcgggaaggctgggcgtaaaactgaaaagaggaggctcaaggaaagaacgcctcggtggctccatgcagga

SEQ ID NO: 388507 - DNA, 201 bp, Homo sapiens
cttgtgaaaggaggtacttgttaaatctatgtgtttttattatagacatcgttctgccagtcgcaataatgtgtttatggacatttttctgcaagcacagygcgggtggcagtttttactgacaaattgagtcatatgcgtagaggtttagaaagcgcttgccttattgacggatcaggcaattctggcacgggatgttca

SEQ ID NO: 388508 - DNA, 201 bp, Homo sapiens
catgtcatgttcatttgcttaacccgaaaggtatccatttggatgtttaaagaaactatgcagattaacattgttcccagtgcccacaagaaagctggctkatcttaaaggaaatccagggagctccttgaggaagtcggactgcagttgagcatacccttttgtggttttcccacctcttttgtaaaaagttcttcatag

SEQ ID NO: 388509 - DNA, 201 bp, Homo sapiens
tttatgttatcattaagacttccattcaacagtagggtattagcagttaagttttgggggagtcaaaaggttatgtggatttttgactgtgtggggcttcracagcccaacccctgcactgtccgagcatcagctgtatacatacatattttgccgtttgtattatagtagctctgtgcatggggcatgtctctgcaggaa

SEQ ID NO: 388510 - DNA, 201 bp, Homo sapiens
gggcttcaacagcccaacccctgcactgtccgagcatcagctgtatacatacatattttgccgtttgtattatagtagctctgtgcatggggcatgtctcygcaggaagagggactgtcctgactcttgggcctggtggtgattgtctggggcactcctcccagagccctgactactgacaggtcacttcaagaatcaaag

SEQ ID NO: 388511 - DNA, 201 bp, Homo sapiens
gacattggcctacagtaaaataaagtcagatgagaaagggtggggaggctttcctgctgtaaagggattatgtattcatactcgaaatagggatacattargggaatagattgtaatctctacatccccaatccatgaaaacaaaacagaaatggagggccaagaaacctacacagggaagacacgaaatagcaaacatac

SEQ ID NO: 388512 - DNA, 201 bp, Homo sapiens
acattttgtgccaacaattattaatcagttttaagattgactgggtttgtggactgtgcccagggtttgtgcacctcactcacggcagatttcctggcagmcctggggatggtcctgctcccccggggacagtttccatctcatggtgtagctttgggagtggggcccactgaagaaaagcagatagcaggcactgaagtt

SEQ ID NO: 388513 - DNA, 201 bp, Homo sapiens
ctcttagaaaggtgattagggtaactcagggtcattagaggagcccctcacccagtgtgaccggtgtccccatgagatggaggttgtggcacagacacacrgagggatggccacgtgaggaccctgggagaaggctgccttctgcaagccaaggagagagcgccttggagaaaaccagctgtgcctacaccttgggttcag

SEQ ID NO: 388514 - DNA, 201 bp, Homo sapiens
acttgcagcacccaggctgcagggcttcgtcagggcagccctggcggaagaacgcagcctcgtcggtgggtttggtgatgctgtgcagttcagctttaccrtcttgctgcagcgggaacgtcctgctgtagaagaggcgccgccatcccagacagtgttcataaacaccgacggcaaagtcaggacgggcaggagcgttct

SEQ ID NO: 388515 - DNA, 201 bp, Homo sapiens
aattcaacagagaatttaaaaactggctgtggtgagcaatgttagtcccaaatcactttttcacaacttgtttctgttctgtcgtagggctagtgagaccrgctttcccttgagttctggggcgggacgtggaatgtttgtgaggctacccttcattgaaggggggcccgtgatgttgagtgttcaccgtctttcagaacg

SEQ ID NO: 388516 - DNA, 201 bp, Homo sapiens
gatgcagccacgtgctttctgtgatgagaaccccgtataccatctgcagccagacacagacatgtgcttcctgtaatgggaacccgtataccagatgcagyctggtgcttcccatgatgagaaccccatataccagacgcagccacatgcttcatgtgatgggaaccccgtataccagacgcagccacgtgcttcttgtaa

SEQ ID NO: 388517 - DNA, 201 bp, Homo sapiens
tggtatttttaggctctttaacatactttaatcattgtgttgctgcatatatttcttctaagatagaagtaaattgtaattgtcctcagataataacctargaccttaaaatacacacaaatgtacacactaatgaattttgtaaatattacataactcggtaattattgtttcaaattagataatgcagaaatctctgga

SEQ ID NO: 388518 - DNA, 201 bp, Homo sapiens
gacaggtcacttcaagaatcaaagaacctcgactatgatgtcatttttctgtaagccctggactactataaattatgttttatctgtcataattaagactyggagactaccaagctgtcttcgaggggaaaggcctgtccctttctccagagaaataattaattgttagagtatatggtttttgaagaatttactgtaaga

SEQ ID NO: 388519 - DNA, 201 bp, Homo sapiens
taatgggacataagcctctgtaacctgaaattttcctctatgacatgttttcagaagtagaattattagatttgatgagtgtggatgcctaggtttgtagwcaactttttgaactgagctaatcaatgcatatttgggaagagcatataatccaaaatattgggtctacaaatgtaagattgcctttggtgatgagttggt

SEQ ID NO: 388520 - DNA, 201 bp, Homo sapiens
cgctgtaaggtgagtggttttggcatattgtgttgccttgatgggttattaaatcgtcacttggaaggatgaatgtgggttatagagtatgttgtgccatrtatcatcttagtcatcaggaatgtttcagaaaactgaataagagtaaagttttttaaatttatgattgaaattagcaattttattaggtccttttaaaaa

SEQ ID NO: 388521 - DNA, 201 bp, Homo sapiens
ataatgtaactaatttagaacataaaatttcctgccttgtggactagagcatcggattaatcatttggaagcggggcgcacttcctctgctgcgtggcctygcggtgagatggagcctgtcgctccaggagcacgagacctttacggagttcagtgccgtcaaggcccacttgtccacagccaccggagcatgttgggaac

SEQ ID NO: 388522 - DNA, 201 bp, Homo sapiens
atgtactcccgctgtaaggtgagtggttttggcatattgtgttgccttgatgggttattaaatcgtcacttggaaggatgaatgtgggttatagagtatgytgtgccatatatcatcttagtcatcaggaatgtttcagaaaactgaataagagtaaagttttttaaatttatgattgaaattagcaattttattaggtcc

SEQ ID NO: 388523 - DNA, 201 bp, Homo sapiens
cggattaatcatttggaagcggggcgcacttcctctgctgcgtggccttgcggtgagatggagcctgtcgctccaggagcacgagacctttacggagttcrgtgccgtcaaggcccacttgtccacagccaccggagcatgttgggaacaccgggagccgctggaacgtgtctggaacaccaggctcttccattcgggaca

SEQ ID NO: 388524 - DNA, 201 bp, Homo sapiens
accggagcatgttgggaacaccgggagccgctggaacgtgtctggaacaccaggctcttccattcgggacactgagtcataaatcatcccatgtgtctcaygcaagaattcttccctgcagaaatttcatgaaacttagtctttgctaagggtaaagaggatttaattctctttgttctcagtggtgtgcaggcttaatgc

SEQ ID NO: 388525 - DNA, 201 bp, Homo sapiens
attagaggatagccggcctctctacaccatgacttagaaaattccagccaggcacagtggcttacacctgtaatctcagtgctatgggaggattgcgtgargccagaagtttgagttcagcctgggcaacatagcaagaccctatctctaccaaaaaagaaaaagaataaagaaaattccagaaaacgtttgtgacagcat

SEQ ID NO: 388526 - DNA, 201 bp, Homo sapiens
aagatatgcaaggcctctctactaaacagcataaaaacatgactgaaagaaattaaagaagacctaagtaaatggatctttattagttattggaagaggcrgtgttacggagaggtcacatctacacaaattgccctctgcattcagttcagtcacacttttaaattatttcaaaatgcaaagagcctagaatatttaaaa

SEQ ID NO: 388527 - DNA, 201 bp, Homo sapiens
agtgccacaggcagtgcagcaagcatctggtttatctgcgtgagctcatgacgtgttcatcagtgggcagaaaaagatgggatcagacaaaacagatgctytcaggatccttcagatcaggatggcaaatgtttcctgaaatgggccaggccagaaatatttctggctctgtgatgtacagccgctggcacagctacctga

SEQ ID NO: 388528 - DNA, 201 bp, Homo sapiens
gatatgcaaggcctctctactaaacagcataaaaacatgactgaaagaaattaaagaagacctaagtaaatggatctttattagttattggaagaggcggygttacggagaggtcacatctacacaaattgccctctgcattcagttcagtcacacttttaaattatttcaaaatgcaaagagcctagaatatttaaaaca

SEQ ID NO: 388529 - DNA, 201 bp, Homo sapiens
tgttttggggcagtgagactgagtggccagtgagcaatccgtcatcaatggagatcaatacccaggaggtgccatctctcttggcgggtgacacgtaactkttacaaatgggtgcctgtccctgtcacgtcaccggagtgtgcgtcttgatgccctggctccctgaggcacctcgtgttttcgagtgtttccattttagag

SEQ ID NO: 388530 - DNA, 201 bp, Homo sapiens
caaatgtttcctgaaatgggccaggccagaaatatttctggctctgtgatgtacagccgctggcacagctacctgaccctgctgttagagctgctgcagamaggacccagaggaggagtggggctgctacccatgatgctagaccgaggttgccgaaactggagtgtcccattgtatgcacgtgtcctaaagcatctcctt

SEQ ID NO: 388531 - DNA, 201 bp, Homo sapiens
agtaaggatcaaaacttagaacagtgcaacagagagagagaccagtgttttttcagttcttgtatctttgagaaagacacaaagtagatcaatgaggaaartaaagtcttgttggccaggcatggtggcttacgcctgtaaccccagcactttgtgaggccatggcaggcggatcacttgaggccaggagttcaagaccag

SEQ ID NO: 388532 - DNA, 201 bp, Homo sapiens
tatttctggctctgtgatgtacagccgctggcacagctacctgaccctgctgttagagctgctgcagacaggacccagaggaggagtggggctgctacccrtgatgctagaccgaggttgccgaaactggagtgtcccattgtatgcacgtgtcctaaagcatctccttccatctccttgtctactcctaccgtgcgcata

SEQ ID NO: 388533 - DNA, 201 bp, Homo sapiens
tccccatcttcctttctgagacatgcagcatttctctgcaacaagcaaaattttgtatgtgcaaacacaccctcccaccccaaactttattttagtctctrtgtcttggttaaggtgtcttcctcgcagtgcctgccaccttgcggtcgagcccagctggcaaatgaagctgagctccagttctgcctgatgcaccacccc

SEQ ID NO: 388534 - DNA, 201 bp, Homo sapiens
cagccgctggcacagctacctgaccctgctgttagagctgctgcagacaggacccagaggaggagtggggctgctacccatgatgctagaccgaggttgcygaaactggagtgtcccattgtatgcacgtgtcctaaagcatctccttccatctccttgtctactcctaccgtgcgcatacagagcccctatggtgcgagt

SEQ ID NO: 388535 - DNA, 201 bp, Homo sapiens
ttttgttcatattgtcttatctcctcgtgggtctagttgttttttattttgtgccatattagtacattggagaaacagtgtgtagaaatgacgtattgccygggaggatgttttcttcctctagcagtgcttggggcaccggcagtgtgggatcagctcattctaatcctagggattaatacgatcagagcagggctgtgg

SEQ ID NO: 388536 - DNA, 201 bp, Homo sapiens
tgagtgcagctatgcagaagaccccaagtgacaactgctgagcccgacccttctgaattcaaggccatgaaagaaaggtcatttgtgttgtttggggccasgaagttggggattatctgttacctgtctgtagtgactggcacaagatgtgaggcactccccagtagttacttattcatcacacttcctttcatagctggt

SEQ ID NO: 388537 - DNA, 201 bp, Homo sapiens
gccatctctcttggcgggtgacacgtaacttttacaaatgggtgcctgtccctgtcacgtcaccggagtgtgcgtcttgatgccctggctccctgaggcasctcgtgttttcgagtgtttccattttagagacccggaaaagggatccttagagctgctttgttttcctttttcaccagaaacaaatgcctttgtgcttct

SEQ ID NO: 388538 - DNA, 201 bp, Homo sapiens
gtttacagctcaggacactggggtgccacggggacctgggggtctccttgtgcctgggattcctcctcgtcaggagccctcactcaggaagccctgcacgrgggcaaatgtcctgggattggagaggcaagcgtgaatcagacatttccaaagacgacaccgaagaacttctgctgtattccaagttaaaaactaattgat

SEQ ID NO: 388539 - DNA, 201 bp, Homo sapiens
tgcctgcctcgcaggttcagatgtgacgatagacataaaacacctggcccggctccggcgcacagatgctgaagtcagttttctgaggtcgtggtgggggygggggtgagggtggcaatggaaatagtgacaacagtagttggcgttgtcatcctgtttacggctagcctgcgagtggctcaggcgaatccagcacagcct

SEQ ID NO: 388540 - DNA, 201 bp, Homo sapiens
tgccgaaactggagtgtcccattgtatgcacgtgtcctaaagcatctccttccatctccttgtctactcctaccgtgcgcatacagagcccctatggtgcragtacagagcccctgtggtgcatgtacagagcccctatggtgcaggtgcagagcccctacggtgcaggtgcagagcctctacagtgcatgtacagagccc

SEQ ID NO: 388541 - DNA, 201 bp, Homo sapiens
ccgcagttcaaagggggttttaaagaagtcataaaaaatgaaggatcctaatattgcagttggagactgagagtgaatgacatattctttacacacctcarctgtcaacatttctaatcaaatcacccagccttcttacttcttaaatgatacaggcgatatttcctgtaataaacacccctaagtctaatgagaggccct

SEQ ID NO: 388542 - DNA, 201 bp, Homo sapiens
catctccttccatctccttgtctactcctaccgtgcgcatacagagcccctatggtgcgagtacagagcccctgtggtgcatgtacagagcccctatggtkcaggtgcagagcccctacggtgcaggtgcagagcctctacagtgcatgtacagagcccctaccgtgcaggtgcagagcctctatggtgcggtgcagagcc

SEQ ID NO: 388543 - DNA, 201 bp, Homo sapiens
gaattcattataattgaacaacataatctgcagggcaaagatgcctgctacccagctctgaacttcacagagcttgggtgttttatgaaaaatgttatacrttttgtttacaacgtatggctgctgtttgaagtattgtatgttcctgtagtacataagacggggccgcataatggaggaaaaatcaaggaggcaatcttt

SEQ ID NO: 388544 - DNA, 201 bp, Homo sapiens
cagagcccctatggtgcgggtgcagagcccctacggtgcgggtacagaacccctatggtgcatgtacagaccccatacggtgcgggtacagagcccctacrgtgcgggtgcagagcccctatggtgtgcatacagaacccctacggtgcgggtacacagcccctaaggtgtgcctacagagcccctacggtgagggtgcag

SEQ ID NO: 388545 - DNA, 201 bp, Homo sapiens
cctacggtgcgggtacagaacccctatggtgcatgtacagaccccatacggtgcgggtacagagcccctacagtgcgggtgcagagcccctatggtgtgcrtacagaacccctacggtgcgggtacacagcccctaaggtgtgcctacagagcccctacggtgagggtgcagagcccctacggtgcgcgtacggggcccct

SEQ ID NO: 388546 - DNA, 201 bp, Homo sapiens
ttttcaaacaggttatagttcagagaaattaatttaaatcagttggcttacagaagacccagtttagttttaatttgccttaacagccagggtcttcctgmtctacttacttagacgtcctcagagtgtcttctgagtagttggctaccatttgcatggcatgattccgctctcggagcttgatatctttccagattttca

SEQ ID NO: 388547 - DNA, 201 bp, Homo sapiens
tacagaacccctatggtgcatgtacagaccccatacggtgcgggtacagagcccctacagtgcgggtgcagagcccctatggtgtgcatacagaacccctrcggtgcgggtacacagcccctaaggtgtgcctacagagcccctacggtgagggtgcagagcccctacggtgcgcgtacggggcccctacggcacgcaggc

SEQ ID NO: 388548 - DNA, 201 bp, Homo sapiens
ccccgacccaacgacaaaataacatatattcctattaagtttagggattgatggagcttgtaattgttaatttgtcacagatgatactgttatttatgcgyagttactgtctccctttggagagtttcatgtgctaaattttcagcaaatagtttgagcctcacctacagcttcttgaccttttggggaaaaaactatcac

SEQ ID NO: 388549 - DNA, 201 bp, Homo sapiens
ggctggacacgggatttcaatccgtgtgtccccctgttgcccggggtggctgcatgcagggtgagttcagggaagctctggatgcagtgagcgaggccccrcccagcctcttggtgggagtcactggcctcacagctcactgcaattcagagacctgcagtgtgaagattcttccagattactggatggaagggacttcag

SEQ ID NO: 388550 - DNA, 201 bp, Homo sapiens
acctgcagtgtgaagattcttccagattactggatggaagggacttcagtgacctcatgtaagaaaggaagtcacccactggtagcctcagagagggaacstctggcagtctggctcacagccggggctagattcaaactgtatccaagagcagctgctgagagacccacctcagtcctgcaggagtccaggctctctccc

SEQ ID NO: 388551 - DNA, 201 bp, Homo sapiens
ttcgagaccagcctggccaacacagtgaaaccccatctctactaaaaatacaaaacttacctgggcatggtggtgcacacccgtagtctcagctactcggraggctgaggcaggagaattgcttgaacctgggaggcggaggttgcagtgagccaagatcgcaccactgcgctccagcctgggtggcagagcgagactccc

SEQ ID NO: 388552 - DNA, 201 bp, Homo sapiens
actggatggaagggacttcagtgacctcatgtaagaaaggaagtcacccactggtagcctcagagagggaacctctggcagtctggctcacagccggggcyagattcaaactgtatccaagagcagctgctgagagacccacctcagtcctgcaggagtccaggctctctcccaggcccccagggagggtgtttccacctg

SEQ ID NO: 388553 - DNA, 201 bp, Homo sapiens
tggaagggacttcagtgacctcatgtaagaaaggaagtcacccactggtagcctcagagagggaacctctggcagtctggctcacagccggggctagattsaaactgtatccaagagcagctgctgagagacccacctcagtcctgcaggagtccaggctctctcccaggcccccagggagggtgtttccacctggtacct

SEQ ID NO: 388554 - DNA, 201 bp, Homo sapiens
gtgctatgttggtgtgctgcacccatctattcgtcatttatattaggtatttctcctaatgctatccctcccccaaccccccaccccccgacaggccccartgtgtgatgttccctgccctgtgtccatgtgttctcattgttcagttcccacctatgagtgagaacatgcggtgtttggttttctgtccttgtgatagtt

SEQ ID NO: 388555 - DNA, 201 bp, Homo sapiens
ctcacagccggggctagattcaaactgtatccaagagcagctgctgagagacccacctcagtcctgcaggagtccaggctctctcccaggcccccagggasggtgtttccacctggtaccttggggagatgtgaccagagctgctggagggagcgtctacctgctggggtcagggggtctccatccgcccacagtgtcggc

SEQ ID NO: 388556 - DNA, 201 bp, Homo sapiens
ctaatgctatccctcccccaaccccccaccccccgacaggccccaatgtgtgatgttccctgccctgtgtccatgtgttctcattgttcagttcccacctrtgagtgagaacatgcggtgtttggttttctgtccttgtgatagtttgcttagaatgatggtttcgaacttcatccatgtccctgcaaaggacatgaactc

SEQ ID NO: 388557 - DNA, 201 bp, Homo sapiens
tattgctccatttgaagttccagccaatagcccaggccctttctgtctttgatgtctgtatggtgggcaagatctcatcacgacccacatcagctttgctrttagaaacgtgttgccacagaggagcacattcataattgaaatcaccaaatagggaattctttctagaggcagtggctgcctcagtgaaacgtgcatggc

SEQ ID NO: 388558 - DNA, 201 bp, Homo sapiens
ggactaattggtaaatcttaacatgcccacactgggtcttttccccatgtcacgtgagcctgaacttggaacatccatatttccagaagacatcaggctckttctctagtgaccttagaaatccccgcattgaagggagacggccctggcatggggcccctgccactgggtggggaggggtggggaccagactgtgccagg

SEQ ID NO: 388559 - DNA, 201 bp, Homo sapiens
aacatgcccacactgggtcttttccccatgtcacgtgagcctgaacttggaacatccatatttccagaagacatcaggctctttctctagtgaccttagaratccccgcattgaagggagacggccctggcatggggcccctgccactgggtggggaggggtggggaccagactgtgccagggaccccaaggagttggagg

SEQ ID NO: 388560 - DNA, 201 bp, Homo sapiens
ctgggcatggtggtgcacacccgtagtctcagctactcgggaggctgaggcaggagaattgcttgaacctgggaggcggaggttgcagtgagccaagatcrcaccactgcgctccagcctgggtggcagagcgagactccctgtgtggaaaaaaaaaaaaaagatactcagatgtagctgtctctgcctgggttgttttct

SEQ ID NO: 388561 - DNA, 201 bp, Homo sapiens
ttgttgaggtctttgttgcaaacatcgtttgttgagggctgccttacccttagaagacatagtaccatttctgggaaccatggttgctgttgagaaatgcrtccttacacgcccagatccagccgctgtctggtcccactgacatggcacaggaatcaaagcaggtgcttgggggatgtcaacagttgaatttggattcct

SEQ ID NO: 388562 - DNA, 201 bp, Homo sapiens
tacccttagaagacatagtaccatttctgggaaccatggttgctgttgagaaatgcgtccttacacgcccagatccagccgctgtctggtcccactgacayggcacaggaatcaaagcaggtgcttgggggatgtcaacagttgaatttggattcctcataaagcaatgttagcacatgacactctgtgaggaaataatga

SEQ ID NO: 388563 - DNA, 201 bp, Homo sapiens
tgcagtggcgtgactgggctgcttacaggccctgtctttccaagccaccatttaattggggagggctactgacatggcaccattgaacttgagacctgccwttcctccggtggcagtccttggagaacagggccccaggtctttctgaccccacatcattggcatggtctcgcagccaagtaggttatgttttctgaggaa

SEQ ID NO: 388564 - DNA, 201 bp, Homo sapiens
atgggggcctgacaggtatctcaaattttaattgccagcacacacgaatcaggagatttcatatttcaaaaagcatgtatggctgctgtttcttttttgtrtaaggcttaatttgttttttttttcatgttatagctttcctgagatacattttacatactctaaaatttacccatttaaattgtacagcatgctgggttt

SEQ ID NO: 388565 - DNA, 201 bp, Homo sapiens
agttgcaactacagtggtatttagtttcaggctaattattcccacaaccaaggcaggattgtaagaggagagatcatggccggggactcatggctagacawaaaacaggacctcagtcctatcagtgcaaggaaatgaattctgtcaatacatagtgagcttgaaagagactcgcagcctcagccctgggagtctcagttg

SEQ ID NO: 388566 - DNA, 201 bp, Homo sapiens
tgtggtaatttgtggtgatttgttatgcagcagtaagaggtaataccgtatgcatcttcttgcatcatttaccagctttttattatatgtggaagtcttaygtctttcctcccttttttattgccctctgagtaccttgttgtccctttctgtgtcacattcttcccactcgcacgcatgcatccaggaataagagcactg

SEQ ID NO: 388567 - DNA, 201 bp, Homo sapiens
tctattctaatcctgacatctggttttctttgcttgtttgtatttatttgttcctttatttttaccacgactgctctgagtaccaggaactcctttttggratgtcacagatcaccaacttccttctctgtgctgtgtcaatagggacgtcacccctgtggggaaaggaatttgcctgaacaagacactaaaaagataaaa

SEQ ID NO: 388568 - DNA, 201 bp, Homo sapiens
cagcagtaagaggtaataccgtatgcatcttcttgcatcatttaccagctttttattatatgtggaagtcttacgtctttcctcccttttttattgccctytgagtaccttgttgtccctttctgtgtcacattcttcccactcgcacgcatgcatccaggaataagagcactgtggctcggtgtggccaagacccactgt

SEQ ID NO: 388569 - DNA, 201 bp, Homo sapiens
agtgcctgtaggctttgcagaaagctactgttcctttcctgtgtgggtgtgtgactcctggacggttgccggagattgccctgaggctggggtgggtgccygtcctggagcccccatcccacagtgctctttgtccgtaggatctgcgcacacaagggtttggttgttgaacctggagacacacattatggtgaatcccag

SEQ ID NO: 388570 - DNA, 201 bp, Homo sapiens
cagattgtgaatttttttcaggattaacaatttacatttatgattctattttcttttataagtaactgctatttgtaaatgagactaattatttgaattcrtggtacaaataacgtaatttagagttacagaactcttgatcctctgggtctaagcaaaataaacgtagtacctaatgctggaatagagcaagagttttct

SEQ ID NO: 388571 - DNA, 201 bp, Homo sapiens
ggtatctttacacttaccacgttgaatattgcatgcagactacatatttgcagagcttaatgaacagagaggcattttaggacaactaggagaaactcgcscagattcccctcagggggagggaagctgttttgtaggtgtctctggcagtagcctaatgcagttgctttagaccctggtggtctggatactgcttcactg

SEQ ID NO: 388572 - DNA, 201 bp, Homo sapiens
ctttgcagaaagctactgttcctttcctgtgtgggtgtgtgactcctggacggttgccggagattgccctgaggctggggtgggtgcccgtcctggagccyccatcccacagtgctctttgtccgtaggatctgcgcacacaagggtttggttgttgaacctggagacacacattatggtgaatcccagtgttgactgatt

SEQ ID NO: 388573 - DNA, 201 bp, Homo sapiens
ggctccttaaagcagctttcgggcatgtgtggggaaagtacgccacagacacccagggctgtgcttccaaagaggttttcaagaggttgagtattgacacstttccttacaaggtagtggggaggcctggaggccaggcagtgaggcgaacagtgctcagtgaatccacgctccaggtgaggggaggcaaatgtcggcaga

SEQ ID NO: 388574 - DNA, 201 bp, Homo sapiens
ttcctgtgtgggtgtgtgactcctggacggttgccggagattgccctgaggctggggtgggtgcccgtcctggagcccccatcccacagtgctctttgtcygtaggatctgcgcacacaagggtttggttgttgaacctggagacacacattatggtgaatcccagtgttgactgattatatcattaagtgggtcacatga

SEQ ID NO: 388575 - DNA, 201 bp, Homo sapiens
gatatgtttttgaatgattccaatttaacattctgtctacactgttggcttgttagctatctctcttcttttttagtggctgctttaggatgtgtaatgtwcatacttagcttatgcttatcataatctgcattcatgtgatataatacaacttcacatgcagaataagcaccttaacaaaagtatgcttcaatttctctc

SEQ ID NO: 388576 - DNA, 201 bp, Homo sapiens
cccggcacctgctcggggcaggaattggtggctttggccaccttgcttaattgagaaagttgatgtttccgtcagatcttcttgtgttcgcacatgttacytattctctaagaagtcagtgaaacttcacccaactttagaggctataaagaatgaggttattttctgccatgacatatttaagctgaagcttcccaagcc

SEQ ID NO: 388577 - DNA, 201 bp, Homo sapiens
tcctcaagacagagcagacttcctggaggctcagccggaacgtctccagctctgtagcacgttttaattccatacaagaagttactcccaaagaagtaaaytgaagaacgaaatcgaggaaaagaaagtccttttttgaaagctcttaaacacttgactccgtttagttcggatcaggccttctctgcccttccaaagatt

SEQ ID NO: 388578 - DNA, 201 bp, Homo sapiens
  misc_feature (1)...(201): n = A,T,C or G
tcccaggttgtgaggagtgtgctgctggtggggtgagatgtgcgacccggcgggggcctcggcgggcacaggcgggagacccgggccagagccctgtgggntgagcgccatcctggccaggccacacggccggggcagcttctttcccttctgcaaggcagttggcattatcgcggatgttagcgtaggaagttctagcgg

SEQ ID NO: 388579 - DNA, 201 bp, Homo sapiens
accatcaagtcggcttcatccctgggatccaaggctggttcaacatacacaaatcaataaacatgttccatcacgtaaacagaaccaaagacaaaaaccayatgattatctcaatagatgcagaaaaggccttcaacaaaattcagcagcgcttcatgctaaaaactctcagtaaactaggtattgacggaacgtatctca

SEQ ID NO: 388580 - DNA, 201 bp, Homo sapiens
ccgaggatctcggcagagacttttacacccacaaaatgctccagcccagagacccagcctccagcacaggacagcgtgtgagactggcccgaggtcttccrtcgccgcccctgctgtcggatgacatgcacatttctgcacctgcaggacctcaaagcgaagtaaccctggacacacccttcactgggtctctttccccca

SEQ ID NO: 388581 - DNA, 201 bp, Homo sapiens
gcttctttcccttctgcaaggcagttggcattatcgcggatgttagcgtaggaagttctagcgggactagttaaaaatgagggaaaacatggtgttttctyattgtctttttcctagtaaactaaaggaatcatgcttgatgaaggctcaagtgtagtatgattcaatcgggcatgagactgtgctgaggtctcggatgtc

SEQ ID NO: 388582 - DNA, 201 bp, Homo sapiens
ggcagcttctttcccttctgcaaggcagttggcattatcgcggatgttagcgtaggaagttctagcgggactagttaaaaatgagggaaaacatggtgttytctcattgtctttttcctagtaaactaaaggaatcatgcttgatgaaggctcaagtgtagtatgattcaatcgggcatgagactgtgctgaggtctcgga

SEQ ID NO: 388583 - DNA, 201 bp, Homo sapiens
gtacctaatgctggaatagagcaagagttttctttgaatctcagaatatctgcattgtgaaactgggttaagttattttggaaactataaatagtcacttkgtaattaggtgtttggttttatttgttctaatggagtgcttattacagtcggtgcatttttaccccacggatcagaagcttttataggccaagtgatgag

SEQ ID NO: 388584 - DNA, 201 bp, Homo sapiens
ttacatgtggttcttgctgctctgtcatggctagaagtgggatccccaccaagttattagtggactcataaaaataaaagagaggcctgctgggctgttascagactgagattgctcagattacacaaagccctctggccctgaccccagactttttaccggcctgaagtgggtgaaaagaaagcttcactgactgctttc

SEQ ID NO: 388585 - DNA, 201 bp, Homo sapiens
ttattgctccatttgaagttccagccaatagcccaggccctttctgtctttgatgtctgtatggtgggcaagatctcatcacgacccacatcagctttgcygttagaaacgtgttgccacagaggagcacattcataattgaaatcaccaaatagggaattctttctagaggcagtggctgcctcagtgaaacgtgcatgg

SEQ ID NO: 388586 - DNA, 201 bp, Homo sapiens
tgttaattttatagataaattatggaaatctgtggtagacacagctccaggcagtaatgcatttccaagcgaatgaatggacatttcctatatggatcatytacagatattggtaaggtttctttaagtctcttttgtactctgcattcgtggctaaacctatgcactttgaccctgttctgcaaaacaaaccatggccta

SEQ ID NO: 388587 - DNA, 201 bp, Homo sapiens
ctgtgatgggaacccggtatactagacgcaggcacgtgcttcatgcagtaggaaccccatatatcggatgcagccacgtgcttcctgtgatgggaaccccrtataccagacacaggcacattcttcctgtgatgggaacctggtataccagatgcagccacgtgctttccgtgatgagaaccctgtataccgtccgcagcc

SEQ ID NO: 388588 - DNA, 201 bp, Homo sapiens
aaagaacgcctcggtggctccatgcaggaaacattatttctgatttcaagctggagagagaaaggactttggggcccctgttttggaggcctggagtgatragtactgtgtctccaagctcagaatgaagccaccagtggtggctgcctttgtttctgcactttcagttcctgcaggtgcaggagcttgccagggctgctg

SEQ ID NO: 388589 - DNA, 201 bp, Homo sapiens
tatgagctggactgagatggttgatctaaagtcacagttggcaagtccctgtttatgcgaggccggcaaagaattcacctctgagtgatctgtgggggcarccctgtgttggtgcctgaggcctctgcctttctgtggaggtctggctgatgcatgaggctagaaacagccattcatttggaagagggcgttgcaatgact

SEQ ID NO: 388590 - DNA, 201 bp, Homo sapiens
aggtgctaggtactaatgcaagttaaattgagacaataatgccgaaacttgcattgtgggattaggagggcacttgaaatgctgacgtgagcacatcctgyctgcctgcctgtctggcgctccgttcctgtttatacttaatgacctcaaaatttgtatgtcgttaacaccgtgtactgaagtgggagagaacacggtttg

SEQ ID NO: 388591 - DNA, 201 bp, Homo sapiens
gttttttctctgcaaatttataggacaacttagagggttcttgccctatggtagcttcacaagagttctgagttggcaccctccggtttgggaggtaggtrgagatggctttgacttttgttcaacttacaagggagtaacttcttggaagtgcagtccgggccagcagaaatggtcatagtaggccatggtggaaggaga

SEQ ID NO: 388592 - DNA, 201 bp, Homo sapiens
cacaatctcagcatcgaaatccccacgtctcttgctttaatttccaagtcacaaaagcatgggcacttctggttcatcccagtggggcaggggaggggggrgacccacttccttctagtgacccaggtgcacactccccagctcttcacaccatttaaaggattctgcccaaactgccaaccatgtgttacaaataaagcc

SEQ ID NO: 388593 - DNA, 201 bp, Homo sapiens
agtgacccaggtgcacactccccagctcttcacaccatttaaaggattctgcccaaactgccaaccatgtgttacaaataaagcccttcccgaaaatggaycaaaaacactttgtaatgagtgaaggagctggtttaaaaagggccaacatcaaacaaaatcccagtcctgagtcacagacactcaaatagccccttccag

SEQ ID NO: 388594 - DNA, 201 bp, Homo sapiens
agtattggttgcgatatctctgtactagaaatttcagtgctacctctacacaaacagacacactggggatgtgctgtgtgtattgtatgagtgtatcatakaatatttcattgtccgtggtagtacatttcacatcataggctgtctgtggctacttttaaaccttagacatttgaattttccctcaagctttattctggt

SEQ ID NO: 388595 - DNA, 201 bp, Homo sapiens
atggtgaactggcaaaggctgctaaataccaattactgagtaaagtgccatgagaaggtaaagccactttttgtgaattatttcattgcactaacgtgctygtactgaaaaacatggccaggctgcttccgatacagttcacttaaagaaaaatggctcacgttaaaaatagttgctttattttgtaaatgttttagaaaa

SEQ ID NO: 388596 - DNA, 201 bp, Homo sapiens
gtaatcagaggacatacctgttatgattttaatcctcctagatttgttgagagttgttttacagcccagaatatggtctaccttggtggatgtttgaaaartgtatactctgtggttcttgggtggagtgctctttaaatgtagttgggtaaggtttgttgataatgctcttcaagccttctatatccttattgaattttg

SEQ ID NO: 388597 - DNA, 201 bp, Homo sapiens
gtggaggggcttgtgtgaatgggggagttatgaaaccaggactgaagacaacagaaaggccccctgggagacaggtccctggcttgccctgtgcttccccrccactcggggggccggccatgcggagaacactctcctctcccagccaggcttcagaactggggggctcggcctccttcctctggccccagcagcccccga

SEQ ID NO: 388598 - DNA, 201 bp, Homo sapiens
tctgtggttcttgggtggagtgctctttaaatgtagttgggtaaggtttgttgataatgctcttcaagccttctatatccttattgaattttgtttccctmttctaaaaattattaggagtattgacatctccagctatgattggagacttattacccctttcagttctgttggttcttggttcatctgttctaagtgatt

SEQ ID NO: 388599 - DNA, 201 bp, Homo sapiens
catagctgacacccacccatgccaacagcctgcccctggcacaggcccctgcttggtgggcacaggactcctgtcagtcagggccttggccttgaccccaragacctcgttgtccagatccctgactgacagtggctgcccccctgtcttccaggtccccatcctcatcccgtgccacagagtggtctgcagcagcggagc

SEQ ID NO: 388600 - DNA, 201 bp, Homo sapiens
tggactcaaaccctgaagttgtatccataccatcttgagaatcagttgtttgaagcgtcacccattgtttctaaccatttttgttataaagataatacacwcagagagaagcgcctgcagtgaatctttgtgtaaccatcatgcagatcaggagacaaaccatggcggcccctcagaactctgccacgtgtttcttcccat

SEQ ID NO: 388601 - DNA, 201 bp, Homo sapiens
aagagaaggagtgtccaaagacccctgagaccagaaccctctgccaacgttggtagtgctgtttcggcctggagggcaggtgggcctctgggcacttcttygtcaggacatggagccatttcgggtagggccctgggtctaccctgtcccagccccgttccctatcagaaacccgaggcccagaggtgcagggcagctgca

SEQ ID NO: 388602 - DNA, 201 bp, Homo sapiens
tggaagcagcatcggcatgtcctttctggtgtgaactccaaatatctgagatggtctcagttaatttagaaagtttattttgccaagattaaggacatgcrcctgtgacccagcctcaggaggtcctgatgacacgtgccccaggtggtcggggcaccgcttggttttatagattttagagagacatgatacatcaattaa

SEQ ID NO: 388603 - DNA, 201 bp, Homo sapiens
gtgtgtgcctgtgtctgtgagtcagaagcaaacttgttcatttcatttaattttaagtctgccaggaacttcttggaaggaagaaaagaatggttgaatgmcagctacaaataggtgagttcagaatatgatccaaagtgtcagagcaaaagattttttaagtttccaacatttggagtaaaagagcactttagagtaaca

SEQ ID NO: 388604 - DNA, 201 bp, Homo sapiens
ctttagaggctataaagaatgaggttattttctgccatgacatatttaagctgaagcttcccaagccataacagttttaagaagtgacatttcattttgarcaccagcctgccacctctttactcctcatgacagactgtcactgtgcagcgcagcagttagttggttcctgaagtgccagaaaattcccaggttgtgagg

SEQ ID NO: 388605 - DNA, 201 bp, Homo sapiens
ctttacggagttcagtgccgtcaaggcccacttgtccacagccaccggagcatgttgggaacaccgggagccgctggaacgtgtctggaacaccaggctcytccattcgggacactgagtcataaatcatcccatgtgtctcatgcaagaattcttccctgcagaaatttcatgaaacttagtctttgctaagggtaaaga

SEQ ID NO: 388606 - DNA, 201 bp, Homo sapiens
aatatttattcagaatgatttttttcaaatatttaataagaatgaataattgaatgtactatagccttcttactttgccctgcgatcccataagacctttraagctaaaactagtttgggcccttgaggggtttatagaaattaggtatgtctgagtatggaaatggctggcatggtgaaagaattgagtccttaagtaat

SEQ ID NO: 388607 - DNA, 201 bp, Homo sapiens
gcctcggtggctccatgcaggaaacattatttctgatttcaagctggagagagaaaggactttggggcccctgttttggaggcctggagtgatgagtactrtgtctccaagctcagaatgaagccaccagtggtggctgcctttgtttctgcactttcagttcctgcaggtgcaggagcttgccagggctgctgtcaggga

SEQ ID NO: 388608 - DNA, 201 bp, Homo sapiens
tgatgatttgaatgagacttgggggagttggggcagcgtactccaggggataagatcagaggtgaagggggttgggctaaaatgttgatcatggtgggaayagtagtgatccccaaatcctacagagcctttgggaagcctggtctttgcatacgttccctctaaactcgtgccgacgttgtgatttggtctgatttatcc

SEQ ID NO: 388609 - DNA, 201 bp, Homo sapiens
acagcctctaacagaggtgcagtcttcaaattcacatttaaatgtctctgcctgctactgagaaatccacagcaagggaaaagagcaaaacagtctttctrtgaagggtctgttttattttttattttattttattttaattaatgagacggtgatcatccagggaacaggatctaaacgcagtctttgaacttgaactct

SEQ ID NO: 388610 - DNA, 201 bp, Homo sapiens
gccagagccctgtgggatgagcgccatcctggccaggccacacggccggggcagcttctttcccttctgcaaggcagttggcattatcgcggatgttagcrtaggaagttctagcgggactagttaaaaatgagggaaaacatggtgttttctcattgtctttttcctagtaaactaaaggaatcatgcttgatgaaggct

SEQ ID NO: 388611 - DNA, 201 bp, Homo sapiens
gtgattggagcgtggccagttctggttcctgctattttctgagcctgctcctccagccttcccagaagttctttgagttgtggagtagcctttcagtaaayggcatttgtgcttaaattagcccgtgtcagtttctgacacctgctgttaagagtgctacctgatacaggtgctcggggctggccaggatccccacctgag

SEQ ID NO: 388612 - DNA, 201 bp, Homo sapiens
tgcagagactccaagatgcaggtcctctcccttgaccccagccacagaagcccagcccaaggtacccagcaccacaggacaggcaggaggaagggcgagtktgggaaggagacaagggaagtggaggggtaagagaggaacatccagaatgtggcgttcggaggccgcgtcacagagccccaaggtctcggggctgccctc

SEQ ID NO: 388613 - DNA, 201 bp, Homo sapiens
atgctgagggacatggagccctccaccattatctgaattgattccatctttctctcctgcctctgctgtgggtttccataatgtgaaattaatgcatgtgcttaggttgcggggggccaacccctcagaaatatgcaaagacttcaagggagaccttttcttttcacaaagaggaagatcccccacccccaacacacacac

SEQ ID NO: 388614 - DNA, 201 bp, Homo sapiens
ttatatgtggcctaagacaattcttccagtatggctcagggaagccaaaagattagacacccctgccctacaccttggtcagatcagatccaggtcagagsccctacatcctgtccccacagtggacaggttggaaatgtaaggtcgtgtggccactgggggcccaggatgggctctgcctcagaggcacttccttccacc

SEQ ID NO: 388615 - DNA, 201 bp, Homo sapiens
taactaagccatctgcggtgtttcctttggggagcttgacttattaacgatcgctgacatcacagttcattttattgagtataccaacttggtatttttayatcagctaaacagaggcagcgtttggccgagctggagggacgggggttcgccgcctccacccactccaacacttgtgttagttttggcacagggttgcat

SEQ ID NO: 388616 - DNA, 201 bp, Homo sapiens
cctcggaaggcaggctgtgctgctggggtgggcagaggggcgatatctgtgatggggaccattatgccagatgcctccagaagaggcaaggaggctacccmagcactacactcctggaagctcccccctaccgggagcacatctccactgcatgagctcctggttgtcacagtgagcaggagaggagggagcctggaggag

SEQ ID NO: 388617 - DNA, 201 bp, Homo sapiens
cccagggactcaagggcctcaggggaggggaagtccatgctgagacatagctgacacccacccatgccaacagcctgcccctggcacaggcccctgcttgktgggcacaggactcctgtcagtcagggccttggccttgaccccaaagacctcgttgtccagatccctgactgacagtggctgcccccctgtcttccaggt

SEQ ID NO: 388618 - DNA, 201 bp, Homo sapiens
gagatgttttgtgcagcagctaggtgatgtcccagttctcctggaatatttgcatcgaccaggatgctgtttctgcgtcggaacgtggtgtctttgtttayccttaggcattatcttgcttgtttacctaaatctttaactctccttaggtgagtgacttcactgatactaagagtgattaaaataatgtgatgtatggag

SEQ ID NO: 388619 - DNA, 201 bp, Homo sapiens
cccctaccttagcctcccaagtagctaggattacaggcgcccaccaccacatccgactaatttttgtatttttggtagaaatggggttttcgtcatgttggctgctctcaaactcctgacctcaagtgatccacccacctgggcctcccaaagtgctgggattatagacatgtgccaccgtgcccggcctgccagggctgt

SEQ ID NO: 388620 - DNA, 201 bp, Homo sapiens
ggccagcccagtaacagcgaagcacaccactctcagctcctgagcttggctgaccagctatactctggcatattggtgaatttcatgggccaaagaacctraggttcagattgtgtcttagttcattgtttcatatttgaatatgcagtttcctacctagcaattgtcatgagtactttcttgctgtttatactatgaaca

SEQ ID NO: 388621 - DNA, 201 bp, Homo sapiens
cagagagagaccagaatgcagagggtactcagggcaggcagttgctactctgggctgtgtgcgtcatagcgtttgcatgacagacaccagcggttgaccaratgccccatttgaagcccatgtccaggcatgcagtgttgatctctgtgtatagatcgacgtggcttcttctctagggttggggaagagaactgtttaata

SEQ ID NO: 388622 - DNA, 201 bp, Homo sapiens
gtcagaccacagcctccctgtgacttccccacaccaggtctctggaagggtcgttctcatgcctttgagcttcgggtctttcatcatcagaggaatggacygtgtctcatttgcagggctcttgtaaggattagagaagaggaaagtgagtgcctggcatgaaggaagtaccatcaatgtcactaaacaactcttactatt

SEQ ID NO: 388623 - DNA, 201 bp, Homo sapiens
gcgtcggtggggccagatttctcattacaagatgtactgaacctttccactttcacccactgtaaatctataagtaatcaggcttctaaaataaagcaaamaaccttgttttgagattatgagaatcatttgaattgaatgtattctgttggaaaactggtgtattgaggcatggctttttatcttacgcttaaaaagttt

SEQ ID NO: 388624 - DNA, 201 bp, Homo sapiens
cttcttccctggtactccatcctgatgattctaggtgttttgttctttttgaattctaatctctttccccactttggtgagagcacccactggttttgtgycagatgaccctcctcctccttggcacagcctggaggctgcatccagccgttctctggcggctggctcacttcacttccctttccttggggagcatagccc

SEQ ID NO: 388625 - DNA, 201 bp, Homo sapiens
tgcgtcggtggggccagatttctcattacaagatgtactgaacctttccactttcacccactgtaaatctataagtaatcaggcttctaaaataaagcaamcaaccttgttttgagattatgagaatcatttgaattgaatgtattctgttggaaaactggtgtattgaggcatggctttttatcttacgcttaaaaagtt

SEQ ID NO: 388626 - DNA, 201 bp, Homo sapiens
ttatagacatcgttctgccagtcgcaataatgtgtttatggacatttttctgcaagcacagcgcgggtggcagtttttactgacaaattgagtcatatgcrtagaggtttagaaagcgcttgccttattgacggatcaggcaattctggcacgggatgttcagagatatttaggtgggtgaagagagtgaatgaatctcag

SEQ ID NO: 388627 - DNA, 201 bp, Homo sapiens
gacagacaccagcggttgaccaaatgccccatttgaagcccatgtccaggcatgcagtgttgatctctgtgtatagatcgacgtggcttcttctctagggytggggaagagaactgtttaataatgcacagttgcctagcctcaaagatcctttgagaaatagctactctgtgcaagttttcaacaatttgtttagactaa

SEQ ID NO: 388628 - DNA, 201 bp, Homo sapiens
ccacttgcactgttgtccccttttgtggacgtggacgttgactctccatgtctggtctgtgcaggaaagagtgagtcctctctttctcactccagagcctkcaggggtacccaccctcagccgggcagggcaagccaggacagaggctttgagggcatctgaggaggaaactgcaaggtgtgcagtttggcccagcagaga

SEQ ID NO: 388629 - DNA, 201 bp, Homo sapiens
tgagaatcatttgaattgaatgtattctgttggaaaactggtgtattgaggcatggctttttatcttacgcttaaaaagttttatttatattaaaataagrcataatctctctgcgtataattatacgctcttcgatttagtttttctatttaatagtctattccttcaccttcttgcccatttctttatgttattcctta

SEQ ID NO: 388630 - DNA, 201 bp, Homo sapiens
gggatttattgtctgtggtagttgttttattaattgttttagtaaaacaaagttagcttagttgtgggaattatttaaaaggagctcttaccaggtcagcwtccttcggtgttgcgttggttaaagataaacgagaagaatcgggatacagtaattttaggaaataaaaggagactgtagtattggttggctgctctaggt

SEQ ID NO: 388631 - DNA, 201 bp, Homo sapiens
gggaagtcagccctgttggaaatagatcctccagccccagtcgagccttcggatgagtgcagctatgcagaagaccccaagtgacaactgctgagcccgayccttctgaattcaaggccatgaaagaaaggtcatttgtgttgtttggggccacgaagttggggattatctgttacctgtctgtagtgactggcacaagat

SEQ ID NO: 388632 - DNA, 201 bp, Homo sapiens
cttccagtttctggcaccttagcccagtagctcctgtgtaggggtgctaaggcattggttaaacgtctcttgatcgttcctggtttgtttcccgttatttkgtctcccttttgcttctcccctggttgggtttctcctcacttctcagtgggttatttccacaatcgaccttggttctggaccagtcttgacagagctgcc

SEQ ID NO: 388633 - DNA, 201 bp, Homo sapiens
ccagtgagcttcactgctggtactcccactcttgttccttctcggatggagtcaggtctggccccaagctacagcaggatatggaggaagtgatggtgtgygacttccgaggctaggtcataagaggccttgcagctcccagtgtcctcagtcacctgctgtgagggcagccagtaccatgtcagaggacatacaggcagc

SEQ ID NO: 388634 - DNA, 201 bp, Homo sapiens
ttggtccattgaaatctatatatgtaattttgtttttaatcaaacctaacttctgggttttagaaagcatctcctgtccacagcttttgagaaaggtcccrtaaattggatgacaccaaatggctccagcaccagaatgaaaaggaagagcagcagagacttggggcacccacctgggggctgtttcctagtgctgggcag

SEQ ID NO: 388635 - DNA, 201 bp, Homo sapiens
ctcccagatgtggatacgcccctctctgtctggcatgagtttggtttgctctctgtccaggttgttatcttgtaacatcagtgaaatcaacagtgaggggscaggtcttctagaggaaaagtcttttgacatctcagagccgcctggaagctgtggagtaacagaaatcaacctgctttgcagactgagaggagcgggtcc

SEQ ID NO: 388636 - DNA, 201 bp, Homo sapiens
aggctactcatcctggactttatttcgttttagctgttacatgtggttcttgctgctctgtcatggctagaagtgggatccccaccaagttattagtggastcataaaaataaaagagaggcctgctgggctgttaccagactgagattgctcagattacacaaagccctctggccctgaccccagactttttaccggcct

SEQ ID NO: 388637 - DNA, 201 bp, Homo sapiens
aacctgaagcacttctggttcccagaatttcaggctactcatcctggactttatttcgttttagctgttacatgtggttcttgctgctctgtcatggctaraagtgggatccccaccaagttattagtggactcataaaaataaaagagaggcctgctgggctgttaccagactgagattgctcagattacacaaagccct

SEQ ID NO: 388638 - DNA, 201 bp, Homo sapiens; identical to SEQ ID NO: 85255

SEQ ID NO: 388639 - DNA, 201 bp, Homo sapiens
atgaagccaccagtggtggctgcctttgtttctgcactttcagttcctgcaggtgcaggagcttgccagggctgctgtcagggacacttttccaggccccrctgccctggctgggtttccttctctgagcaggaacaagtgcccgatgctgttgctggtgcagattggagggctgccagggctgggtgactccctgccgca

SEQ ID NO: 388640 - DNA, 201 bp, Homo sapiens
cgtgcatggctgagcagagcaaggaagagttagtggggccgggggcgtgctgatatcacagtggcgtggggtggggtgaagggatacaggtgtgtccctcytcttacccggcatggtgtttccagaaagcagatgggagagctgtgtgatgaacaggtgagacactggctggacccaggtgagctgctatagaagcagaat

SEQ ID NO: 388641 - DNA, 201 bp, Homo sapiens
tcttcttgcccatcagttccttttccttttatccaggatttcacacactgggacattttgtgccaacaattattaatcagttttaagattgactgggtttrtggactgtgcccagggtttgtgcacctcactcacggcagatttcctggcagccctggggatggtcctgctcccccggggacagtttccatctcatggtgt

SEQ ID NO: 388642 - DNA, 201 bp, Homo sapiens
ccagcgccatcgccactccgtgagggtagatgtgggtgccggccgtgtctgatgcctccccacaggggccttgggcacgctgtgtggacgctgcctgtgcrtgcttcctgagcgaccccatcagtaaagcgtcgccaccatgcaatgctgctggcagtccttgtactgagacaatgtggtagctgccatcctgaatttccc

SEQ ID NO: 388643 - DNA, 201 bp, Homo sapiens
ctgtggctctgtcttgggagttgggggctgcagtggttcactgggaggagggggtgcccctgcaggccccacctgcaccccacctcgccgccccacccccyccccccggctttcaggctgtgacctcaaggccttttatcattttcacaatgatgtctccaacagacctttaccccagtctcaaaaaagatactgccagag

SEQ ID NO: 388644 - DNA, 201 bp, Homo sapiens
ccctgtggctctgtcttgggagttgggggctgcagtggttcactgggaggagggggtgcccctgcaggccccacctgcaccccacctcgccgccccacccsctccccccggctttcaggctgtgacctcaaggccttttatcattttcacaatgatgtctccaacagacctttaccccagtctcaaaaaagatactgccag

SEQ ID NO: 388645 - DNA, 201 bp, Homo sapiens
cagaaaaatctaaaacctgaagcacttctggttcccagaatttcaggctactcatcctggactttatttcgttttagctgttacatgtggttcttgctgcyctgtcatggctagaagtgggatccccaccaagttattagtggactcataaaaataaaagagaggcctgctgggctgttaccagactgagattgctcagat

SEQ ID NO: 388646 - DNA, 201 bp, Homo sapiens
tttaacatttagctcaatcgtttactcctgggcaggggccaggtgtatggattttactgtttgaagaaggggaggtggatggtggatggttgctaacaggragttaattggttctcccagatgtggatacgcccctctctgtctggcatgagtttggtttgctctctgtccaggttgttatcttgtaacatcagtgaaatc

SEQ ID NO: 388647 - DNA, 201 bp, Homo sapiens
gggtgacacgtgatgtcctaggagaggcctaggggaggtgcgactctgatgggctctgagtgtttccccaccaatgctgggagagggtcttgtctcctgcwgggttcaagggatgggataggaaggggctgaggtgccaggcaaaagtcttgtctcctgcagggtttgagggatgggacaggaaggggctgaggtaccagg

SEQ ID NO: 388648 - DNA, 201 bp, Homo sapiens
gttgactatggacaccttgaaaatcccatgtggcaacagatatgagccaagtggtgacgtggaatgccccatcgttgagggatggggacgcaagggcagcraggaggtcctgtgggtccgggtgtggcgtgggcccagcgtggccatggcatctggggcctcagctgcagggttgcagtggaaggaaggggaaagaagctc

SEQ ID NO: 388649 - DNA, 201 bp, Homo sapiens
acagtagtatacaaacttggtccatatcaaatactgtttctcttccagggcttgtgtgtgcactgggaacagcaacaaaagttgaacagcaactgggtggkgtttctttatgtcttctgtttaatcagagtttcctgatggtttggccacttcattctcctttggcttaaggggttctaagccatggggcagaccttgggt

SEQ ID NO: 388650 - DNA, 201 bp, Homo sapiens
acaggttgatggcaacagcgctggggccatggggatgactgcggggagaagggctcatggcagagcaagcgcagtggaccctctccctctggccagtgttsttctgtgaagaggtgcatctctgcgtctctgcggcgtactctgcgagggtccctgtggaagtggctgagatcagcaagacgacgtgtttgcaggggttgg

SEQ ID NO: 388651 - DNA, 201 bp, Homo sapiens
tctctctcctaccacagatactgtccccagagaaggtgcacctctaccaccaatgccctccatcctcagttgacaaggattcaaaaagtttgttggtgacrctgacatgtaatattcccctgcgagttacacacatccaggtgaccttcggaccagcattgccggcacacccgtcacgccatcaacctgccaggctggaga

SEQ ID NO: 388652 - DNA, 201 bp, Homo sapiens
ttgtgtcttgctgaacagaaggttttaatgtcaaggtagtttttagtcaatcccctcatttatgattggtgcattttgtcaggtttaagaagtcttttctytcccataagaacgtgaagaaaacatattctcctatgttttatagaccataggttggcaaacttttttctgtaaaggactaaatagtaaacattttaagct

SEQ ID NO: 388653 - DNA, 201 bp, Homo sapiens
gtgaggaagtagcatgtacaaaggccctgaagatgaatgactgtgtgaaattttgaagagcagtttagcccgaaaatattccatgagtagctgccaggagrgcttttctggaacagtattaaactttagaaaaagtgttctgacatttatagactgacacgaaaacagaagtaaaagtctaaattgaaccaaagtcctcct

SEQ ID NO: 388654 - DNA, 201 bp, Homo sapiens
cagccagatgcagccacgtgcttcctgtgatgggaacccggtatactagacgcaggcacgtgcttcatgcagtaggaaccccatatatcggatgcagccaygtgcttcctgtgatgggaaccccgtataccagacacaggcacattcttcctgtgatgggaacctggtataccagatgcagccacgtgctttccgtgatga

SEQ ID NO: 388655 - DNA, 201 bp, Homo sapiens
gccttgggaggtgagtgtggtgtcgccttgcagccttgcactcagctttgcagccgtccctgtccagccagcttccacgcaagtggaagacacacagaatycacagcccaggcagctgctctcacctgtgtgtggagcacagggtgcccatcctcagagaccctgcccagcccctcgctgccatcccctctgctagaccag

SEQ ID NO: 388656 - DNA, 201 bp, Homo sapiens
aaatcattccagacacatgccagaaatttattttgcatagtgagtttttcataatcatttttgtgtataaatgaacatatattcatatatgatgtatatatggagttgtacacttatatatccttaaagggaaaaattaccttgagattttagatgtggtgaatttaaagcaattttgaatttcagatcagatttgctggg

SEQ ID NO: 388657 - DNA, 201 bp, Homo sapiens
aagttctagggtacatgtgcacaacgtgcaggtttgttacgtatgtatacatgtgccatgttggtgtgctgcacccattaactcatcacttacattaggtrtatctcctaatgctatccctcccccagccccccaccccacaacaggccctggtgtgtgatgttccccttcctgtgtccaagtgttctcattgttcagttc

SEQ ID NO: 388658 - DNA, 201 bp, Homo sapiens
cattgtgggcatgtctgggaaactcacatgtgtagccctttttttttttttttatactttaagttctagggtacatgtgcacaacgtgcaggtttgttacrtatgtatacatgtgccatgttggtgtgctgcacccattaactcatcacttacattaggtatatctcctaatgctatccctcccccagccccccaccccac

SEQ ID NO: 388659 - DNA, 201 bp, Homo sapiens
tattgctttgtttcccttactgtgcatgtgtcaggggacaaaatttttcattgtgggcatgtctgggaaactcacatgtgtagccctttttttttttttttatactttaagttctagggtacatgtgcacaacgtgcaggtttgttacgtatgtatacatgtgccatgttggtgtgctgcacccattaactcatcacttac

SEQ ID NO: 388660 - DNA, 201 bp, Homo sapiens
ttcccctaccttagcctcccaagtagctaggattacaggcgcccaccaccacatccgactaatttttgtatttttggtagaaatggggttttcgtcatgttggctgctctcaaactcctgacctcaagtgatccacccacctgggcctcccaaagtgctgggattatagacatgtgccaccgtgcccggcctgccagggct

SEQ ID NO: 388661 - DNA, 201 bp, Homo sapiens
attcccctaccttagcctcccaagtagctaggattacaggcgcccaccaccacatccgactaatttttgtatttttggtagaaatggggttttcgtcatgttggctgctctcaaactcctgacctcaagtgatccacccacctgggcctcccaaagtgctgggattatagacatgtgccaccgtgcccggcctgccagggc

SEQ ID NO: 388662 - DNA, 201 bp, Homo sapiens
ggattcccctaccttagcctcccaagtagctaggattacaggcgcccaccaccacatccgactaatttttgtatttttggtagaaatggggttttcgtcatgttggctgctctcaaactcctgacctcaagtgatccacccacctgggcctcccaaagtgctgggattatagacatgtgccaccgtgcccggcctgccagg

SEQ ID NO: 388663 - DNA, 201 bp, Homo sapiens
caggcacattcttcctgtgatgggaacctggtataccagatgcagccacgtgctttctgtgatgagaaccccgtataccatctgcagccagacacagacaygtgcttcctgtaatgggaacccgtataccagatgcagcctggtgcttcccatgatgagaaccccatataccagacgcagccacatgcttcatgtgatggg

SEQ ID NO: 388664 - DNA, 201 bp, Homo sapiens
cacttgtccacagccaccggagcatgttgggaacaccgggagccgctggaacgtgtctggaacaccaggctcttccattcgggacactgagtcataaatcrtcccatgtgtctcatgcaagaattcttccctgcagaaatttcatgaaacttagtctttgctaagggtaaagaggatttaattctctttgttctcagtggt

SEQ ID NO: 388665 - DNA, 201 bp, Homo sapiens
atggcagctgccatgatttttgggactgaatgctttgataccacccaaatatatggtctgaggtggttgtaaatagaattagcagaggagatgatacagaytcagagttgaattagggtttgaagaagggcttaggtctggagcgttacaggtgggaggaccagcagagagtggtcaggaatcaggaatgacaggacacac

SEQ ID NO: 388666 - DNA, 201 bp, Homo sapiens
gggattcccctaccttagcctcccaagtagctaggattacaggcgcccaccaccacatccgactaatttttgtatttttggtagaaatggggttttcgtcatgttggctgctctcaaactcctgacctcaagtgatccacccacctgggcctcccaaagtgctgggattatagacatgtgccaccgtgcccggcctgccag

SEQ ID NO: 388667 - DNA, 201 bp, Homo sapiens
agggattcccctaccttagcctcccaagtagctaggattacaggcgcccaccaccacatccgactaatttttgtatttttggtagaaatggggttttcgtcatgttggctgctctcaaactcctgacctcaagtgatccacccacctgggcctcccaaagtgctgggattatagacatgtgccaccgtgcccggcctgcca

SEQ ID NO: 388668 - DNA, 201 bp, Homo sapiens
caagggattcccctaccttagcctcccaagtagctaggattacaggcgcccaccaccacatccgactaatttttgtatttttggtagaaatggggttttcgtcatgttggctgctctcaaactcctgacctcaagtgatccacccacctgggcctcccaaagtgctgggattatagacatgtgccaccgtgcccggcctgc

SEQ ID NO: 388669 - DNA, 201 bp, Homo sapiens
gtggtatgtgggtgtctctgatgggccaagggaaatgacaggcccttgtgctgaagactgataggagttgatttacatgaaacacatgtgtttttttttttaaagacaattttaatgcacatattttcattttcagctttatagtgttttatgtcttttgcctttgtgatttaaattgtcttatattatttataagcattt

SEQ ID NO: 388670 - DNA, 201 bp, Homo sapiens
cacacccagatggggagtcggggtgaagccaccatcctgtgcgtgaatcaatggaaggcaaggctggactcacccccgcctttccccagggcattgggccrgatgttactgagcctccttcacttcctcttccctgtggccgccccccgaccttcatttccttggtaatgggacactttggccgctgtcatggttggccag

SEQ ID NO: 388671 - DNA, 201 bp, Homo sapiens
agaaattagcaaatgctactaattagaagtttatttgattatctagaccagaggttggtaaactatggcctggggctggggctggacatctttttttttttggtaaataagtatttgtcaacacagccacactcatttgtttatgtcttgtctgtggctgctttcatagctcagtagcagtcaagtgggagcaactgagac

SEQ ID NO: 388672 - DNA, 201 bp, Homo sapiens
agaggaaataagtacagatcctacagacattaaaagattatgaaggacatattataaacagttatgccagtaaatgtgacaacagacaaaatggacagaawcattgaaagacacaaactatcaaagctctctcaggaattcgtaacttagttgctgtggtgcctgtatgactgtacatgtcagtactcattgaactgtatg

SEQ ID NO: 388673 - DNA, 201 bp, Homo sapiens
ttttttattatactttaagttctagggtacatgtacacaatgtgcaggtttgttacgtaggtatacatgtgctatgttggtgtgctgcacccatctattcrtcatttatattaggtatttctcctaatgctatccctcccccaaccccccaccccccgacaggccccaatgtgtgatgttccctgccctgtgtccatgtgt

SEQ ID NO: 388674 - DNA, 201 bp, Homo sapiens
tctcattgaccccaggatgccatcagcccccttgccctgcctggagtatatcacatgggccctgggtgcctgggcctgtggagccacagctgctgaggtcmggtgtttttaaagcctgagagaggccatctgggggtagcactacaggagatgggaagaggcccccaggaaaccagggagagcaagaaggtcttctaagga

SEQ ID NO: 388675 - DNA, 201 bp, Homo sapiens
ttaatctagctttcaaaataagaaaccacaaagaagagaaaattgaaacatagacctagtagaagaaaggcaataatgaaaagcataaattaatgtaatgraaataaaaaaaatttttgagaaaatcaaagaaaccaatagcttatttcagttttgaagacatcaataaaaatgataaaactcaaactgagaaagagatta

SEQ ID NO: 388676 - DNA, 201 bp, Homo sapiens
agaagcgcctgcagtgaatctttgtgtaaccatcatgcagatcaggagacaaaccatggcggcccctcagaactctgccacgtgtttcttcccatcttttsctgctgctgctcccagaagtaaccctattccgacttttctgggttttcttggtaatcaatttctggtttttctttatagagttgttgcctaagtatgcac

SEQ ID NO: 388677 - DNA, 201 bp, Homo sapiens
cttgacagagctgccagagggagcctcgaaatgcaaaccagctgcatctcctcttgttgaaaactctgtggcttttcagggaaaaggcagccagcaggacyggcctggccatggcggcctcagggcccgagggtggctgtgtcccccacgcctctccaggcacaccaggcctcatcccccagctctcgtggcgggtgcctt

SEQ ID NO: 388678 - DNA, 201 bp, Homo sapiens
ttattctggccctcacagaataagaattcaaaggacaataattttcaagaagacttaatttaagttcatctaccttattagacttgatatagatagatagsctttttaatttttttttctcatggaaacagagttgaagaaaactaatttaccttctaaatttaggcacagctaaccaagtcaaggtgtggttctgttctt

SEQ ID NO: 388679 - DNA, 201 bp, Homo sapiens
tggactcataaaaataaaagagaggcctgctgggctgttaccagactgagattgctcagattacacaaagccctctggccctgaccccagactttttaccrgcctgaagtgggtgaaaagaaagcttcactgactgctttctaggcatgtttaagcctgcttattctggccctcacagaataagaattcaaaggacaataa

SEQ ID NO: 388680 - DNA, 201 bp, Homo sapiens
cttctggagatgcctggtgtgttctctgagtaggcccttcttccctggtactccatcctgatgattctaggtgttttgttctttttgaattctaatctctytccccactttggtgagagcacccactggttttgtgtcagatgaccctcctcctccttggcacagcctggaggctgcatccagccgttctctggcggctgg

SEQ ID NO: 388681 - DNA, 201 bp, Homo sapiens
aaaatcccatgtggcaacagatatgagccaagtggtgacgtggaatgccccatcgttgagggatggggacgcaagggcagcaaggaggtcctgtgggtccrggtgtggcgtgggcccagcgtggccatggcatctggggcctcagctgcagggttgcagtggaaggaaggggaaagaagctcagagtgcattctgagggtc

SEQ ID NO: 388682 - DNA, 201 bp, Homo sapiens
tggcaacagatatgagccaagtggtgacgtggaatgccccatcgttgagggatggggacgcaagggcagcaaggaggtcctgtgggtccgggtgtggcgtrggcccagcgtggccatggcatctggggcctcagctgcagggttgcagtggaaggaaggggaaagaagctcagagtgcattctgagggtcaaactggcctg

SEQ ID NO: 388683 - DNA, 201 bp, Homo sapiens
tagacagatgctgtggggcagggccagcccttttgtggagtaaaaagcccttttgcgggtggttctgatggccacaccactccagcccgcctggaagccgycatagagatagctttcacatacctggtgatacgtggcaggtcctagaaggtatgggtgaaggtggtgtgtaccaggggttggcaggggaaggaggaagag

SEQ ID NO: 388684 - DNA, 201 bp, Homo sapiens
ggacgccactcgctggcaaagcccagcagggcaaggaataagtgtcactcagtctttatccagaaaaatccaccaatgtacttttagtgcagtattaacasatggtagaaaatggaattgcctagaggattttaatctctgatggattattcttgtacctgtacctgtctgatggtcgtgtaagtccatgttaacaaacct

SEQ ID NO: 388685 - DNA, 201 bp, Homo sapiens
cctataatcccagcactttgggaggatggggcaggtagatcacaaggtcgggagttcgagaccagactgaccaacatggtgaaaccccatctttactaaaratacaaaaattagcagggtgtggtggcgcacgcctataataccagctactcaggaggctgaggcaggagaatcacttgaacccgagaggtggaggttgca

SEQ ID NO: 388686 - DNA, 201 bp, Homo sapiens
aagcccttttgcgggtggttctgatggccacaccactccagcccgcctggaagccgccatagagatagctttcacatacctggtgatacgtggcaggtccyagaaggtatgggtgaaggtggtgtgtaccaggggttggcaggggaaggaggaagagaggagtcgtagggctggaaaaggagaaaaaagttgatcttcacc

SEQ ID NO: 388687 - DNA, 201 bp, Homo sapiens
gtgtggtggcgcacgcctataataccagctactcaggaggctgaggcaggagaatcacttgaacccgagaggtggaggttgcagtgagccgacatcatgcygctgcactgcagcgtgggcgacagagtgagattccatctaaaaagaaaaaaaaaaaagtgagactttgaaagtgatgacagtttccacagttcccatggg

SEQ ID NO: 388688 - DNA, 201 bp, Homo sapiens
cagttcccatgggcaggtggctcagaatgaggtggcctgaggcccacagtctgtccttggggactgggtggcccccacgtccaggcagcagggagaggacktgctggctgccaagatggggtgggagaagcccagggcatcaagtgccacggaaataaagctggttgccttagttgaatggcgcctttgagttcccagaag

SEQ ID NO: 388689 - DNA, 201 bp, Homo sapiens
tttttctgaattgcatgatgacagagttagtctgtaagctgtgtggagatgaattgtgtcaattaggggtaggtacatcttagccctgttggtaccaaaartattatttctcattgcatgggctcacaggagaaagcaagcctgttctttaatagagacgacaaatcagaaaccgctgcctgcctgggagatggaacagtc

SEQ ID NO: 388690 - DNA, 201 bp, Homo sapiens
ggatgggggaggggcgggctgttccatgtgacagcatgtgggcttgtcatgattcggggtgaccactggcttccatttcccaggagtggctttgtcctcgyggtcttacggtatgtttccagtagatgagaaggcatgcctacagacagggcctgctggtgtctgctgtgtgtcatggggggaggcaaggttttcctcact

SEQ ID NO: 388691 - DNA, 201 bp, Homo sapiens
atatctgtgatggggaccattatgccagatgcctccagaagaggcaaggaggctaccccagcactacactcctggaagctcccccctaccgggagcacatmtccactgcatgagctcctggttgtcacagtgagcaggagaggagggagcctggaggagtggcaagcgggcagagggtgccccacctgctcactcaggagg

SEQ ID NO: 388692 - DNA, 201 bp, Homo sapiens
tgcatgagctcctggttgtcacagtgagcaggagaggagggagcctggaggagtggcaagcgggcagagggtgccccacctgctcactcaggaggtggacrtgttgggtgcctgttttatggcccacactcttctaggtgcccagagtacagcagctaacagacagaaaggtctacctgcgaggtgcctgcatcctagcag

SEQ ID NO: 388693 - DNA, 201 bp, Homo sapiens
tcgggggtggggaatggaacagacacagaggagaacccaccaagttctgtgtcttcaaacctgcagcatttccaggttccgactgcagagtcctatcaaartaagcaaaattggaagtgatgcccatttcctgggctttcacaaactttgttattctgcagtctaccacaaaatctgaaaaggcagagaaatgtagctttc

SEQ ID NO: 388694 - DNA, 201 bp, Homo sapiens
accagtagctggttgctttgtccagttcactggctttggagggtggagcgtggggaagctgggcatgggcagaaatcatttctctgttgagctggggataygctcagctggagagaaaaagaagagtggagtcggagtgatacccgggggtacccggagtgatacccggaggtagcctggacacgccccaaccttgggatc

SEQ ID NO: 388695 - DNA, 201 bp, Homo sapiens
cttcctcccttgtcggtggtcagtgactcattctcccttgtgggtgtgagagtggaggaggccagcacctacatggaaaccagaggcaggggccacagcayctgcccccacccaccacaggtggctctcagagcttcagccagacagtggacccatggagctcctcctgtctacacagctcgggcaacgccaaaggaccaa

SEQ ID NO: 388696 - DNA, 201 bp, Homo sapiens
tggaattatttcatgtgtatgtggattgagaaaatgactaagtgtgttgatgtttgggagaaccccctgtgaagaagagggacacttacatggagtaggcrtcaaggaagaagttggtgcagttgacttggaatcagcatcatctatatggactcattatttctcaaacatgcacatatgtacacacttcttccagctcta

SEQ ID NO: 388697 - DNA, 201 bp, Homo sapiens
aatcaacattctctgatcacagtgcaataaaactataaattgttaacaaaaacaaggcccatccacctagagacttaaaacctattcttgaatgaaagtgkaaatataaaccaacgtaatagaatgtctgtaaaataataactctgtgtatcaaaggcatagttaatgcagtgattagagaattcatgactgtagacacct

SEQ ID NO: 388698 - DNA, 201 bp, Homo sapiens; identical to SEQ ID NO: 85247

SEQ ID NO: 388699 - DNA, 201 bp, Homo sapiens
ggagaagtagatgcttgtcaggcgtcttgtctgctgggccaaggtgaatcaggaggtgagagcggcggctttcctcttgtttgggcagcgggtgaaggacrggcgtggcaggctgtatggtgagtgtgggcatggccgcccctccgtcctctttcccctctggcccgtctcgcatctgaacacctgggagtctgtgattag

SEQ ID NO: 388700 - DNA, 201 bp, Homo sapiens
agaagcctgctgcccatcagaaatatatatatatatatatatatatatatatatatatatatatatatatatatatatatatatttttttttttttcaggraatggtagagaacagtggagaagtagatgcttgtcaggcgtcttgtctgctgggccaaggtgaatcaggaggtgagagcggcggctttcctcttgtttgg

SEQ ID NO: 388701 - DNA, 201 bp, Homo sapiens
cttccagaagcctgctgcccatcagaaatatatatatatatatatatatatatatatatatatatatatatatatatatatatatatatttttttttttttcagggaatggtagagaacagtggagaagtagatgcttgtcaggcgtcttgtctgctgggccaaggtgaatcaggaggtgagagcggcggctttcctcttg

SEQ ID NO: 388702 - DNA, 201 bp, Homo sapiens
ccttccagaagcctgctgcccatcagaaatatatatatatatatatatatatatatatatatatatatatatatatatatatatatatatttttttttttttcagggaatggtagagaacagtggagaagtagatgcttgtcaggcgtcttgtctgctgggccaaggtgaatcaggaggtgagagcggcggctttcctctt

SEQ ID NO: 388703 - DNA, 201 bp, Homo sapiens
aaggacttgtctccttccagaagcctgctgcccatcagaaatatatatatatatatatatatatatatatatatatatatatatatatatatatatatatatttttttttttttcagggaatggtagagaacagtggagaagtagatgcttgtcaggcgtcttgtctgctgggccaaggtgaatcaggaggtgagagcggc

SEQ ID NO: 388704 - DNA, 201 bp, Homo sapiens
ataaggacttgtctccttccagaagcctgctgcccatcagaaatatatatatatatatatatatatatatatatatatatatatatatatatatatatatatatttttttttttttcagggaatggtagagaacagtggagaagtagatgcttgtcaggcgtcttgtctgctgggccaaggtgaatcaggaggtgagagcg

SEQ ID NO: 388705 - DNA, 201 bp, Homo sapiens
gctacttctgggcatctttctttgacctcagggagttccttctcaagcagtgtctcagtagttaggcagaggccacagggactcttctggagatgcctggygtgttctctgagtaggcccttcttccctggtactccatcctgatgattctaggtgttttgttctttttgaattctaatctctttccccactttggtgaga

SEQ ID NO: 388706 - DNA, 201 bp, Homo sapiens
aaataaggacttgtctccttccagaagcctgctgcccatcagaaatatatatatatatatatatatatatatatatatatatatatatatatatatatatatatatttttttttttttcagggaatggtagagaacagtggagaagtagatgcttgtcaggcgtcttgtctgctgggccaaggtgaatcaggaggtgagag

SEQ ID NO: 388707 - DNA, 201 bp, Homo sapiens
ccattcttttatgttgaacctgttcttgtcattacatttaatgtgtgtttcttgtagacaacacagttgggtctcttgctttaaaaaatctaatctgacartgtctttgtaaaattggagtatttagaccatttacatttaatgtaattattaatatggttgggtttaagtataccatctggctgttcatttgtcattcac

SEQ ID NO: 388708 - DNA, 201 bp, Homo sapiens
cattatggggaatgcaaaataaggacttgtctccttccagaagcctgctgcccatcagaaatatatatatatatatatatatatatatatatatatatatatatatatatatatatatatatttttttttttttcagggaatggtagagaacagtggagaagtagatgcttgtcaggcgtcttgtctgctgggccaaggtg

SEQ ID NO: 388709 - DNA, 201 bp, Homo sapiens
tccagctttcttttgattagtgtttctgtggtaactgtttttccattcttttatgttgaacctgttcttgtcattacatttaatgtgtgtttcttgtagamaacacagttgggtctcttgctttaaaaaatctaatctgacaatgtctttgtaaaattggagtatttagaccatttacatttaatgtaattattaatatgg

SEQ ID NO: 388710 - DNA, 201 bp, Homo sapiens
agtcatgtccttatttttattcctgatattggtaatttgcactttgtccccttttttgctaactggtctggctagaggtttatctgtttcttttcagagarccaactttcgttacttgatttttctctcttactgatttctcctgtttattattgctttcttgtgcttactttcagtttagtttgctttcttttttgtagt

SEQ ID NO: 388711 - DNA, 201 bp, Homo sapiens
cctgcctgttgccctgaccgtgccttcctcctagagtttggtgtcaatatcttggcccttgcggaggcatccacggttttccccagcatggcttctgtgtygtctttcaccgtgcggtgtgtggtcagccatagtttgtgcaggtgccctttagcagatgggggatgttttactcttttctgcagtgaatatggtggataa

SEQ ID NO: 388712 - DNA, 201 bp, Homo sapiens
ccttgctttggagggttgacagtaggggacacggcaggccgggggcattctgggacccaggtctcctgcctatgtggaatactgatgtgtgttgtgtggayaggtcactgatgtgtttaaatgtaaatctgaccttcctttaagagcaattgggcagcagtctgggagcttgagactgtatgatgtggacacctagtatct

SEQ ID NO: 388713 - DNA, 201 bp, Homo sapiens
aatactgatgtgtgttgtgtggacaggtcactgatgtgtttaaatgtaaatctgaccttcctttaagagcaattgggcagcagtctgggagcttgagactstatgatgtggacacctagtatctctttctggaagcttctagtgtataatagaaagtaggttggttactcattcccattgtctttgaataatggggcagtg

SEQ ID NO: 388714 - DNA, 201 bp, Homo sapiens
tggccaataaaccttttcttcccttttgccattgattattcttaagtttaagacaatgcccagtggcagatgtgcttaaccgccatccttcatctagttcwtgtgactttttaatgtcaattataaagaaaattactcctttggcttcagaagtttatttaaatctcttctgagaaaattggcagctcttcggagttaatg

SEQ ID NO: 388715 - DNA, 201 bp, Homo sapiens
caggggtacccaccctcagccgggcagggcaagccaggacagaggctttgagggcatctgaggaggaaactgcaaggtgtgcagtttggcccagcagagaragaccagaatgcagagggtactcagggcaggcagttgctactctgggctgtgtgcgtcatagcgtttgcatgacagacaccagcggttgaccaaatgccc

SEQ ID NO: 388716 - DNA, 201 bp, Homo sapiens
ggtcagcatggaaggttgacgtgctccaagatttactgtgcgtcaccttagccatcagtcccatcgtattcatttaactccactaataagaaacggagcaraagtggaattatgagttcagtagtattctatgaaaggtcagttgttaaaaaggcagagtctgacattctgtgaaaaaggtgccttcattaatcattctga

SEQ ID NO: 388717 - DNA, 201 bp, Homo sapiens
tttctagaagttgtcacatcaagtaaaagatcttcattccaggctgtctttaggggccaaattgagactggatgcatgcatttaataaattgtagtctcaygtagtcatttttgtaaataattagtttcagtgaaagaataagttagcatattgtatgcatctaatgttgcaaatgtacatacagcaaactttgctattaa

SEQ ID NO: 388718 - DNA, 201 bp, Homo sapiens
ttgtaaataattagtttcagtgaaagaataagttagcatattgtatgcatctaatgttgcaaatgtacatacagcaaactttgctattaatcaacagtcargcatcgcaagtggggtctcatacataatgaattgtgcttaagcctcatgggcttcttgatagaaaaataaaagaaaacacaagtgcagtaagcttttgaa

SEQ ID NO: 388719 - DNA, 201 bp, Homo sapiens
aaataattagtttcagtgaaagaataagttagcatattgtatgcatctaatgttgcaaatgtacatacagcaaactttgctattaatcaacagtcaggcaycgcaagtggggtctcatacataatgaattgtgcttaagcctcatgggcttcttgatagaaaaataaaagaaaacacaagtgcagtaagcttttgaataaa

SEQ ID NO: 388720 - DNA, 201 bp, Homo sapiens
acagtcaatcagtagactcacctgtgataagtgggaggccctcttgtaccagaaagtttaaaaaaaaaaatacattactcatacctgtcattgtttgttaygtaaacttaagcatatttttgatgttttgtgcgtgtttattcacttcttcctttcatagttgaacacatcttgttcttgaggttgcgttggaaatcagta

SEQ ID NO: 388721 - DNA, 201 bp, Homo sapiens
atagttgaacacatcttgttcttgaggttgcgttggaaatcagtagggtggcgcatgaatcactgagaacagcccacagtgtgtggtcagtgccatcgtcrtcatcgtcatcagcaacggcagctcaagaccagcaaggccgcggttgtgtctgtcatgagcccgttggcatgccgtttgttttttatctttgccacagtt

SEQ ID NO: 388722 - DNA, 201 bp, Homo sapiens
tttcagatcctcagtaaatgattgaatgaaattaagccactgcatttgtctgaaatatagagtcaaaaggttttattcagcctcctgtttaaaataaaatkatctttattaagagcaggtagcatagtttatttcttttcttcagtcttacccctgaaagaaaacatctgagctttagcaggaagttataattaaatgcag

SEQ ID NO: 388723 - DNA, 201 bp, Homo sapiens
caaaagtcttgtctcctgcagggtttgagggatgggacaggaaggggctgaggtaccaggtgagggtcttgtctcctgcactggctcctgctggcatcatsagctggcatccgtggcagcccccggagctgcaggatttgggcttccgagcaaaggtgctcccccggcaaggatggggcggaccacagggccggcatttca

SEQ ID NO: 388724 - DNA, 201 bp, Homo sapiens
agcattatggggaatgcaaaataaggacttgtctccttccagaagcctgctgcccatcagaaatatatatatatatatatatatatatatatatatatatatatatatatatatatatatatatttttttttttttcagggaatggtagagaacagtggagaagtagatgcttgtcaggcgtcttgtctgctgggccaagg

SEQ ID NO: 388725 - DNA, 201 bp, Homo sapiens
acagcattatggggaatgcaaaataaggacttgtctccttccagaagcctgctgcccatcagaaatatatatatatatatatatatatatatatatatatatatatatatatatatatatatatatttttttttttttcagggaatggtagagaacagtggagaagtagatgcttgtcaggcgtcttgtctgctgggccaa

SEQ ID NO: 388726 - DNA, 201 bp, Homo sapiens
ttacagcattatggggaatgcaaaataaggacttgtctccttccagaagcctgctgcccatcagaaatatatatatatatatatatatatatatatatatatatatatatatatatatatatatatatttttttttttttcagggaatggtagagaacagtggagaagtagatgcttgtcaggcgtcttgtctgctgggcc

SEQ ID NO: 388727 - DNA, 201 bp, Homo sapiens
tcttacagcattatggggaatgcaaaataaggacttgtctccttccagaagcctgctgcccatcagaaatatatatatatatatatatatatatatatatatatatatatatatatatatatatatatatttttttttttttcagggaatggtagagaacagtggagaagtagatgcttgtcaggcgtcttgtctgctggg

SEQ ID NO: 388728 - DNA, 201 bp, Homo sapiens
ggtcttacagcattatggggaatgcaaaataaggacttgtctccttccagaagcctgctgcccatcagaaatatatatatatatatatatatatatatatatatatatatatatatatatatatatatatatttttttttttttcagggaatggtagagaacagtggagaagtagatgcttgtcaggcgtcttgtctgctg

SEQ ID NO: 388729 - DNA, 201 bp, Homo sapiens
catagaaattctcccacgctcctttttgcttttagtcttgaggatcaacagtgttcatgtactaaatcaagcctgaaagccctttttttttttttttttttgagatggagtcttgctctgtcacccatgctggagtgcagtagcatgatcttggctcactgcaacctccgcctcctgggttcaagcgattctgctgcctca

SEQ ID NO: 388730 - DNA, 201 bp, Homo sapiens
accaattagggaggaatgttatcagtttccattttttaaaacttcataatgcctggatgaatagaagacagctagcttctcctgcttcattcagtctgttktgatatgtttgggttgaagcgcatcaagagaatctggcctcactcaggtaagtaattaaaagggaatagtgttttaacagcttcctcagataattgagga

SEQ ID NO: 388731 - DNA, 201 bp, Homo sapiens
ggcgggcgtagggggcataaatggcttatccctatgaacttcatcattatgaaatgtaaaaatggacagtcccattgccccagaaacagtgggggagcttytaagtaaatccaggtttatctgcatttgggaatattctgcattttttgaaaatgatgttcccaggaatctttataaccaaggagaatccttactgtaaac

SEQ ID NO: 388732 - DNA, 201 bp, Homo sapiens
gttaatagagtttaatttgcaagacaaatgaaagcttattttctcctaggctctctgctcataattctagtagggccacttttgaagaatagtaccttcarcagacacagagaacccttgttggacagcaacagaacttgctcacagtgagacccgacatcccctccgctcagtgggcatttcctacagtgcagagttgtg

SEQ ID NO: 388733 - DNA, 201 bp, Homo sapiens
gagattcttctcatttgcatcattgaaaaggggtctttgcaatgatgcttatagcccagtttggggtgaatcatacctctaagcaactgtcattgaaagaaggccttaatgctgatagtcattgtttcagttttactttttatttctttgtcttggctctctggctaggcctttaatacagttttgaatagaagtcgtgat

SEQ ID NO: 388734 - DNA, 201 bp, Homo sapiens
acatccattcacgatgaaaatgcactgcaaagtaagaatataaaggaaattctcttacatgacagcgtgtatacgagtgtgcacacgtgtgtgtgcgtgtkcatgcatgtatgtgtgtgtacacgtgtgcacctgtggttttctctccatgtttcttccagtactgatcagggttgcttgttttcaggagttttcaagtgc

SEQ ID NO: 388735 - DNA, 201 bp, Homo sapiens
tgaagccagagtcctggcttggggaatgtgttctgcttcctgtagtgctctatttgaagtgtggatttcagttcttcgttatcttttatttatttatttayttattagcacagcttgtttgttgttcagttccatagtgagaatctctaagaatatgattaaccttgagggtcatcttatcctgtaattattaatgattga

SEQ ID NO: 388736 - DNA, 201 bp, Homo sapiens
agccagcagaccatggaaaggcctggtgctgtcctggccctgggtgggcttgctctggtaagcggtagaggaacctgcgccctgatgggaaggagagaccrgctcaaatgctgccagactgggtttttaaaaccagtctctacaggttcattgggattctttttgttggttggttgatttttccccccctccagattggtc

SEQ ID NO: 388737 - DNA, 201 bp, Homo sapiens
tggtggttgacagcagccagctctgcatcactcaggagggagccggggctaaccctcactgcacagggcttccacccctctgttcggccgccttccccggrgatcaggacagcaaagtacattacatatttctccatcgttcttcttagatagcatcagtacactgtttattcgcttagcaaagagcagagcaagaattga

SEQ ID NO: 388738 - DNA, 201 bp, Homo sapiens
ctagtgagcttccttctttttcccttcattctctggctccttccttaaaaccgtcaggatttgtgtgcttggaaacctctgaccaccctcctgctccaccrtgaaaaacagtgtatgggggcccctatgtgcatctcacccaaaaaggtccatttttagaaagacccgaggatctcggcagagacttttacacccacaaaa

SEQ ID NO: 388739 - DNA, 201 bp, Homo sapiens
ccagcccagagacccagcctccagcacaggacagcgtgtgagactggcccgaggtcttccatcgccgcccctgctgtcggatgacatgcacatttctgcamctgcaggacctcaaagcgaagtaaccctggacacacccttcactgggtctctttcccccacatctcccccaacaatggaaggcaagcaccgctccacacg

SEQ ID NO: 388740 - DNA, 201 bp, Homo sapiens
gatcacctgaggtcaggagttcgagaccagcctggccaacgtgatgaagccaacatggagaaaccccatctctactaaagatacaaaaagttagctggccrtggtggcagtcgcctgtaatcccagctactagggaagatgaggcagaagaatcacttgaacccgggatatggaggttgcagtgagccaagatcgagccat

SEQ ID NO: 388741 - DNA, 201 bp, Homo sapiens
gtttgcttttccgatgtgtggaggcagggcccagaggtttactaagcccctgttctcacttttgcagtgccgtggaggtcccagcccccgctgcggttctyggaggtccggagcccctgatgcagtgcacagcctggctgaatgcctatttccaccagcccgaggctatcgaagagttccccgtgccggctcttcaccatc

SEQ ID NO: 388742 - DNA, 201 bp, Homo sapiens
tgcggttctcggaggtccggagcccctgatgcagtgcacagcctggctgaatgcctatttccaccagcccgaggctatcgaagagttccccgtgccggctyttcaccatcccgttttccagcaaggtcggtaactaagccatctgcggtgtttcctttggggagcttgacttattaacgatcgctgacatcacagttcatt

SEQ ID NO: 388743 - DNA, 201 bp, Homo sapiens
tttacatcagctaaacagaggcagcgtttggccgagctggagggacgggggttcgccgcctccacccactccaacacttgtgttagttttggcacagggtygcataattcttggcaaaggcaataaaaatgaagcatgcagatcgactcttgactctcgctggctgaaaggtttaaataggaacacatctgaatggcagta

SEQ ID NO: 388744 - DNA, 201 bp, Homo sapiens
ctccagccaagttttgggatggtagtgcgacagccgctcacatccttctctcttggtgttctagaactctgaggctggctgcagacccagggtgctgagckcagggccttctctcgagggtaggggctggagtcccctgggccaggcctgcctgcggatggttagtggttgctgtgggggctgggattccccaccacagca

SEQ ID NO: 388745 - DNA, 201 bp, Homo sapiens
cgcctggaagctgtggagtaacagaaatcaacctgctttgcagactgagaggagcgggtccattgtaacatggaatgaacatttccttgaccaattccttyttctgcacattttaatttctgtatatgtttaacatacttttgcatatcatttttcaccatagtctcacttctgagattgagaccaggtttatctatttca

SEQ ID NO: 388746 - DNA, 201 bp, Homo sapiens
ggcttgagtggaaatgtgctgtacaagtttgaagccttggttgggggcatttttctggtgttcaatgcatttaaattgacaccagacttcagtatgttgttcatttcaggcccagcactgtaggctcccatctttaaaatgtgtgggtgccgagcgctccctcgtcagcttttgcaaagcattttgcatattcccagtact

SEQ ID NO: 388747 - DNA, 201 bp, Homo sapiens
tggcttgagtggaaatgtgctgtacaagtttgaagccttggttgggggcatttttctggtgttcaatgcatttaaattgacaccagacttcagtatgttgttcatttcaggcccagcactgtaggctcccatctttaaaatgtgtgggtgccgagcgctccctcgtcagcttttgcaaagcattttgcatattcccagtac

SEQ ID NO: 388748 - DNA, 201 bp, Homo sapiens
ttggcttgagtggaaatgtgctgtacaagtttgaagccttggttgggggcatttttctggtgttcaatgcatttaaattgacaccagacttcagtatgttgttcatttcaggcccagcactgtaggctcccatctttaaaatgtgtgggtgccgagcgctccctcgtcagcttttgcaaagcattttgcatattcccagta

SEQ ID NO: 388749 - DNA, 201 bp, Homo sapiens
ggatgacttttgacgagccatgtcagatgtgacaggcaatctagttggcttgagtggaaatgtgctgtacaagtttgaagccttggttgggggcatttttstggtgttcaatgcatttaaattgacaccagacttcagtatgttgttcatttcaggcccagcactgtaggctcccatctttaaaatgtgtgggtgccgagc

SEQ ID NO: 388750 - DNA, 201 bp, Homo sapiens
taaaagtctctttgagttgccaccctggagtgtgtatctcctaatgggataatacttaaggcattttataaactttaaagtgccatggacatcagtcatttgtgcatttgtgagcactgcctcatttaagcctgccgtcgccttaatgtactgtgtacattagatacgacttcagttcccttatcccaggagggctgaaac

SEQ ID NO: 388751 - DNA, 201 bp, Homo sapiens
ggacatggcccccgctgtccttgtcacattttttggattgtttgtcactccagaaagccttcagggtcatggttctcacttcctcagacatttttctcttytgggtgtgaggatcttttgctcataagacttgccttctttgggcctgagacgcttctcccccagctgtggagatcatgacagttgcagcagacggcttct

SEQ ID NO: 388752 - DNA, 201 bp, Homo sapiens
gcagccataaaaaatgatgagttcatgtcatttgtagggacatggatgaagctggaaaccatcattctcagcaaactattgcaaggacaaaaaaccaaacwccgcatgttctcactcataggtgggaattgaacaatgagaacacatggacacaggaaggggaacatcacacactggggactgttgtggggtgggaggagg

SEQ ID NO: 388753 - DNA, 201 bp, Homo sapiens
ttatctaccctcttggccatagttgaccaccctgtggtcatccttggcccagcaagagcacaggctcttggaaagccacaatccatgaccatattcacagstgaccaaccatttgccaggaggcaggactttctgtgctaaaatggggatgtcccaggcagactggggtgggtggtccctgcctccctcggctctcattcc

SEQ ID NO: 388754 - DNA, 201 bp, Homo sapiens
ccgtgtcccagtgtagtgtcatttcctcgtacatgtggagtttaaagaattataggtaccttgagctactggcaggtaaaagacagtaaaaaaaaaaaaaatagtgaaagacacagtctaccctctgaactgatctacaaggctatgaaagcatcactttgaataatatgcagtagatatgttagaaaaatgtaatattgg

SEQ ID NO: 388755 - DNA, 201 bp, Homo sapiens
agagattgacgagggtggctgggcttcctccgggccctgggctcgcagtggccttgtcttcaaggggctccccgtgtggtagggagacgtgcttgtcacayccatacattttgtaggtactggtgagggctggctagactgaatgaggtgaagagcctggcctttgttggggggggtgttggggagcttggtaagtggttg

SEQ ID NO: 388756 - DNA, 201 bp, Homo sapiens
ggaccgcttgagcccaggagttcagagctgcagtgagctgtgattatgccactgcactgcagcctgggcaacagagtgagaccctgtctctaaaaaaaaaataaaataaaaaataaagatcctgtaagtgaagggttagaagagtggaatatatgtgctcttaacaaagaatggtgtgattatagagatgggaggtgaaaa

SEQ ID NO: 388757 - DNA, 201 bp, Homo sapiens
ttagagtaacaggtaaatgggttaacttcaggcagagagaggtggatgtttctgcctctctggtatgttaaaataaaaccccttaaatcccctgctcttamtaagtttccatttaagagtcattgggcttcacctctgttcggctctgtttgtgaagggagggcagcttttctggggagatcatgcccctctctcctttat

SEQ ID NO: 388758 - DNA, 201 bp, Homo sapiens
tctctatcttttccttggcatggttagatcatttacatttaatgtaattattaatgtttcaatttaggtctaacattttattgtttgtgccctctttttttcctttttcttccttcttttgggctatttttaacttgttttagtgttttgttttatttgttgtggtttttactatatctcttcatatagtttttctagtga

SEQ ID NO: 388759 - DNA, 201 bp, Homo sapiens
aatccagcagcacatcaaaaagtttatccaccaccatcaagtcggcttcatccctgggatccaaggctggttcaacatacacaaatcaataaacatgttccatcacgtaaacagaaccaaagacaaaaaccacatgattatctcaatagatgcagaaaaggccttcaacaaaattcagcagcgcttcatgctaaaaactct

SEQ ID NO: 388760 - DNA, 201 bp, Homo sapiens
tggcaagcatgtggggctggacaggaaggcagagctagccagtggggccagggcctgcggagcccaaatgctgcgctgggtgaagggccttgggagtcttktgagtggggaacactagcctgtcagtgcttcccagagaagatcacggggctggcaggggactgattggggcagaggatgcaggatggtggcagcaggcct

SEQ ID NO: 388761 - DNA, 201 bp, Homo sapiens
ccttgcgcttccggagtgaggcaatgcctcgccctgctttggctcgcgcacggtgcacgcacccactgacctgcgcccactgtctggcactccctagtgaratgaatccggtacctcagatggaaatgcagaaatcacccatcttctgcgtcgctcacactgggagctgtagaccagagctgttcctattcggccatcttg

SEQ ID NO: 388762 - DNA, 201 bp, Homo sapiens
gagtggaacgaccagggcagtggggccagaggaaagatgggaggatgcagagggccagccatgtcccgggactgtgcacacgcttcaccatgtccctgcasgccagggacccatgcctgattccctctgaaacatttgcgggactgtggctaccggtcaggtttctccaagtggcccaaggggtgggcattttgagcagag

SEQ ID NO: 388763 - DNA, 201 bp, Homo sapiens
acccgggcctcggagagtttgagtgacttgcacaggtctcctgggatagaggtagagttttgttttcaacccagatttatttgataaccaagtgcaggctyataaccacttgtgccaggctggctttgcaacgatgagcctgagaagctgttagaagtcctttaaggggcaagacagggtgtaaacagacacagacctgtt

SEQ ID NO: 388764 - DNA, 201 bp, Homo sapiens
gtttaacacagccatattcacctggccatcagttttttagtgaggagaccttcccagggctattggggatcagatgaggggcctagcatatactaagggcmgagctctgaataggttaacaagagccctagatcccattagagctgggactagttttatctgtgcaggcctagagcccccctatgcaaagtggcgtctggg

SEQ ID NO: 388765 - DNA, 201 bp, Homo sapiens
ggcatcctgtaagtggtatgacctcaagggaagaaagctagcgtggcctgcatacaggtgggcctgtggactgtaaaagcaggtttacttagcgggagtarttacccatgttgatgacagcctctaacagaggtgcagtcttcaaattcacatttaaatgtctctgcctgctactgagaaatccacagcaagggaaaagag

SEQ ID NO: 388766 - DNA, 201 bp, Homo sapiens
tctcatcacgacccacatcagctttgctgttagaaacgtgttgccacagaggagcacattcataattgaaatcaccaaatagggaattctttctagaggcwgtggctgcctcagtgaaacgtgcatggctgagcagagcaaggaagagttagtggggccgggggcgtgctgatatcacagtggcgtggggtggggtgaagg

SEQ ID NO: 388767 - DNA, 201 bp, Homo sapiens
agaataagggcaggaaaataaatgaaaccagtataccagatgcaggcatgtgcttcccatgatgggaaccccagataccagacgcagccagatgcagccaygtgcttcctgtgatgggaacccggtatactagacgcaggcacgtgcttcatgcagtaggaaccccatatatcggatgcagccacgtgcttcctgtgatgg

SEQ ID NO: 388768 - DNA, 201 bp, Homo sapiens
attaagagttggggcctttggggggagattaggttagtgcccttatgaaagagactccaaagaggtagagccctcgacgattgaggatgcagcaggaaggygccatctgcgaggaagtggggcctcaccaggcactgaatctgccggcgccttggtcttagacttcctggcctccacaactgtgagaaagaaatgtctgtt

SEQ ID NO: 388769 - DNA, 201 bp, Homo sapiens
cccccaaaattgaaagcagggtcttgagtagatatttgtacactggtgttcatagcagcatcattcacagtggccaaaaggagaacacacacaaacgtctmtctgtgagtgaacagatacattaaatgtggcctatccatgcaatggaacattattcagccttagaaagggtgggaattctggcacatgctgcaacatgga

SEQ ID NO: 388770 - DNA, 201 bp, Homo sapiens
ttttccggtctttcatagaggctaaaatataacatagttgttagaaatatgtggttttgtaggaagttacataccttggggaaaacgctggaattgacacstgagaatgggtgaaatgttggaagatgttgaacaggtgagaggactgaatcggtgcagagccacacctggtggtgggagcacgttgagggcctgcgggtg

SEQ ID NO: 388771 - DNA, 201 bp, Homo sapiens
tcagactgctgggagcgttggctggaataaagctggccctcacggggctgttaaaatacttgaacttgaattcaaagtcagatttaagctgacttcacccytcttcccttgcttctgaagattctggtttttcacgagacagaaaaaagggtggaaccaggagcttatccccttccttccttccttgcaagcagcagcaac

SEQ ID NO: 388772 - DNA, 201 bp, Homo sapiens
tcaacatttttaaaaatgtgattgtatttgagctcatccttgagttccagcacattgaccatttctttctgaaggcctggctggtaaaacttctgactgcscagtaccaagccctcatcccttcctcaggcctgtcctgctgctgaaagaccctctctcctgcacacggcctcttcgcggtaccacctcaccttccaggat

SEQ ID NO: 388773 - DNA, 201 bp, Homo sapiens
cctgctgctgaaagaccctctctcctgcacacggcctcttcgcggtaccacctcaccttccaggattcctctctggaacgaacatgctgtttgtgatttgytttttaaggctaaccacaaaaatatgcattacgttgaaccatatgaaattgctattttttaggttaaaacttatcaaataccagaaatttcagatggttc

SEQ ID NO: 388774 - DNA, 201 bp, Homo sapiens
gttgaaccatatgaaattgctattttttaggttaaaacttatcaaataccagaaatttcagatggttcaacttcttatcttggggaatttccaaagacagrttagtagctaggtagctgttgaagtatttctgccaagggacagtgaagctgcctttcccgaccaggtgtccggaggtccccggggctgcctcattgtgag

SEQ ID NO: 388775 - DNA, 201 bp, Homo sapiens
cgagggaggagaggagaagagagtggcgtcattacttgggtcctcaccggagccagccctttaagattagaaatccttcttgaagagccaagcaaaggctyatccagccccctacaaccccatcctgctgcctactcacatccaggaaagagcccacccctgatgggtgcccaagtagatggcctcccctggaaagaggca

SEQ ID NO: 388776 - DNA, 201 bp, Homo sapiens
ctgatgggtgcccaagtagatggcctcccctggaaagaggcatattagccctcctcacccgagggtcctagggcccgtttgggtgttcttaaaatgtgccytataagtcgtgatccagcctgagtttttctacagagacactgcagccaagaggggatgtttttctcgtagcttccacatagatcacggcagcacgcaggc

SEQ ID NO: 388777 - DNA, 201 bp, Homo sapiens
cctagggcccgtttgggtgttcttaaaatgtgccctataagtcgtgatccagcctgagtttttctacagagacactgcagccaagaggggatgtttttctygtagcttccacatagatcacggcagcacgcaggctttgtcctttcagcactttgtaccgatattttccctgaacttaagaaaaaaattaccaattgaaag

SEQ ID NO: 388778 - DNA, 201 bp, Homo sapiens
aaaccttcttccgatgcccgtttattgattagaacaagctaacaacactgcacttaagtggaaaaaacagctggtaaaaatgtaattctttcagccttagrgctgctgtgctccttttctggagagcaaatgtggaaatcaagatctgtggccttctggaaccttcaccaggaaaggtgaaaagaagaagaacccatccac

SEQ ID NO: 388779 - DNA, 201 bp, Homo sapiens
aaatcaagatctgtggccttctggaaccttcaccaggaaaggtgaaaagaagaagaacccatccacagctgagagtggatggcaggcccgcgggtttccargtggccagtaggattgtccgatgtctggaatgagtaccggggccgccaccaggaacacttgtcatttctaccatggagaggaaagcccagtgcatttctg

SEQ ID NO: 388780 - DNA, 201 bp, Homo sapiens
cctcaagatacactaaaaccttagcatgggcacacgcacacacataccctgtttctgagaattattgttctaaaggaatttatcaaaatggatgtagctcytatgaatgcttttgctgtgtgctttaccctctactaagcctaacattcctaatttaatagctatttttgtttgagacttaaaaactgtgcgcattgaagg

SEQ ID NO: 388781 - DNA, 201 bp, Homo sapiens
ctgcttaattcagaacattgttatttaaacgccattcatgttaaaagggagatgaaacgaaattcatttttccagaggtctccaaatagccatgaaaaatmaatttttttctgccaccaagtaccatcagccactcatgtggtttaggtggatgccgtggtggtgccgggagcactaccagcctgtggggccgtgggcttg

SEQ ID NO: 388782 - DNA, 201 bp, Homo sapiens
cccttcacacagacccgaagcccaggccacaagggacctgggctaccttgtttgtaaacagcttataaggaggctggtgatttttcccttttaacatgttygtttttatgtttttgaggtgtggtctcactgtgctgcccaggctggtctgcaactccaggactcaggcgattctcccacctccgcctctggataggtcgg

SEQ ID NO: 388783 - DNA, 201 bp, Homo sapiens
agccaagacatgagcagcgtttgtggaatgcggcttcagatagaaaccttctttcaatttgcaggcctggttatgtaattctaatgcagaatctcccccttcgtgtttgcatgcgtgtagccgggttcacagaactttagccacaaacaggagtgtttccctttttccagggctcccgtgttaggcccccaccaggaggct

SEQ ID NO: 388784 - DNA, 201 bp, Homo sapiens
aaaagggcagtattcaggtgggagtgacccgattttccaggtgccgtctgtcaccaatttctttgactaggaaagggaactccctgaccccttgcgcttcyggagtgaggcaatgcctcgccctgctttggctcgcgcacggtgcacgcacccactgacctgcgcccactgtctggcactccctagtgagatgaatccggt

SEQ ID NO: 388785 - DNA, 201 bp, Homo sapiens
tctcagctcactgcaacctccgcctcccgggttcacgccattctcctgcctcagcctcccgagtagctgggactacagacgcctgccaccatgcccggctwatttttttatttttagtagagacggggtttcaccgtgttagccaggatggtctggatctcctgacctcgtgatccacacgcctcggcctcccaaagtgct

SEQ ID NO: 388786 - DNA, 201 bp, Homo sapiens
tctaacatacaggaccctcagctgcaggtctgttggagtacccggccgtgtgaggtgtcagtctggccctgctggggggtgcctcccagttaggctgcttragggtcaggggtcagggacccacttgaggaggcagtctgcccgttctcagatctgtagctgcgtgctgggagaaccactgctctcttcaaagctgtcaga

SEQ ID NO: 388787 - DNA, 201 bp, Homo sapiens
gtctggaccgagcaggcagcaaagggccctgtgtgctgaactgagctgctgggacttaatgcacacagaaccacagaaccacagaacgtaatggagaagamttgggtaagggtgagtgggagataaagaagccatcagaatgctgctgagtctggtgggggttggaggtcaccggaaatagctcctcccaagttttactca

SEQ ID NO: 388788 - DNA, 201 bp, Homo sapiens
ttctaacatacaggaccctcagctgcaggtctgttggagtacccggccgtgtgaggtgtcagtctggccctgctggggggtgcctcccagttaggctgctygagggtcaggggtcagggacccacttgaggaggcagtctgcccgttctcagatctgtagctgcgtgctgggagaaccactgctctcttcaaagctgtcag

SEQ ID NO: 388789 - DNA, 201 bp, Homo sapiens
gtccgagcatcagctgtatacatacatattttgccgtttgtattatagtagctctgtgcatggggcatgtctctgcaggaagagggactgtcctgactcttgggcctggtggtgattgtctggggcactcctcccagagccctgactactgacaggtcacttcaagaatcaaagaacctcgactatgatgtcatttttctg

SEQ ID NO: 388790 - DNA, 201 bp, Homo sapiens
ttggttactctagttatacattcttctaaatttttttcaaagttttcaacttctttgcctttggtttgaatgtcctcccgtagctcggagtaatttgatcrtctgaagccttcttctctcaactcgtcaaagtcattctccatccagctttgttccgttgctggtgaggaactgcgttcctttggaggaggagaggcgctc

SEQ ID NO: 388791 - DNA, 201 bp, Homo sapiens
tacttccttaattcacgaaatatgtgaaaaaactttataaatcttaaagatgagaaaattctaaatgatgtgtgtacagacacacacacatacacacacayacacacacacacacacacacacacacacacatttggcccttggacaagacaggtctgaactgtgtggatccacttacacttagatgttcttctacctcag

SEQ ID NO: 388792 - DNA, 201 bp, Homo sapiens
tttctttattagtcttgctagcggtctatcaattttgttgatcctttcaaaaagccaactcctggattcgttaattttttgaagggttttttgtgtctctmtttccttcagttctgctctgattttagttatttcttgccttctgctagcttttgaatgtgtttgctcttgcttttctagttcttttaattgtgatgttag

SEQ ID NO: 388793 - DNA, 201 bp, Homo sapiens
ccagtccaatccgaatctgtattttgcagatctgcacacacccaagccctcactgggggcatgtgcacggtggtcagaagtgcaccttctgggaacagatsggcttccgtttggacctgctttacaagttacaatcctgtgcccttgagcagagttacttaaccttccaaggccagatttctccaaaagcagggccaggga

SEQ ID NO: 388794 - DNA, 201 bp, Homo sapiens
tcacttggtttacttccttaattcacgaaatatgtgaaaaaactttataaatcttaaagatgagaaaattctaaatgatgtgtgtacagacacacacacayacacacacacacacacacacacacacacacacacacacacatttggcccttggacaagacaggtctgaactgtgtggatccacttacacttagatgttct

SEQ ID NO: 388795 - DNA, 201 bp, Homo sapiens
agtttgtatttctgtgggattggtgatgatatcccctttatcattttttattgcgtctatttgattcttctctctctttttctttattagtcttgctagcrgtctatcaattttgttgatcctttcaaaaagccaactcctggattcgttaattttttgaagggttttttgtgtctctatttccttcagttctgctctgat

SEQ ID NO: 388796 - DNA, 201 bp, Homo sapiens
gttggcattgctgcaggttttctgtgcatatgggtctgagtacggttttgtaactcctgagagacgtgaatctcttcaaattgcaaacccaacatgttatyattgcttttgagttttcagttttgtggttatgacaagatgcagatgttaccaaaactttggcgtcagttttacaaacacacgcgaagcacgggcaacccg

SEQ ID NO: 388797 - DNA, 201 bp, Homo sapiens
agtccccttcccagcgtccctcctggggctgtgggtctggcctcccccgttgaatggccctctcttgaggttgttgggcattggtgaagatcctgatgggrtctcatcactggagtcagacgtctttcttcctgggtctggggcatggcggtattactgtgcgggctgttgggagagggtccgttaccctcatggctgctt

SEQ ID NO: 388798 - DNA, 201 bp, Homo sapiens
tctggggtcctggagcggcctgggttcttcccgcagggtgctgtcctctgcctgacaagtcctgttccctgtctcctcgggagaacaccagtaccaggackccaggagttgccaggtgggggcatctaaggaaaggaaatgttcatgggatgcgccacagagatgatccctcggagaatattttccggtctttcatagagg

SEQ ID NO: 388799 - DNA, 201 bp, Homo sapiens
atgggatgcgccacagagatgatccctcggagaatattttccggtctttcatagaggctaaaatataacatagttgttagaaatatgtggttttgtaggaagttacataccttggggaaaacgctggaattgacacgtgagaatgggtgaaatgttggaagatgttgaacaggtgagaggactgaatcggtgcagagccac

SEQ ID NO: 388800 - DNA, 201 bp, Homo sapiens
ttgtgtctctgcccagctttggtatcaggatgatgctggcctcataaaatgagttagggaggattccctccttttctattgattggaatagtttcagaagsaatggtaccagttcctccttgtacctctggtagaattcggctgtgaatccatctggtcctggactctttttgttgataagctattgattattgccacaat

SEQ ID NO: 388801 - DNA, 201 bp, Homo sapiens
tcccccttccagaaggatccatcggcagttggcattgctgcaggttttctgtgcatatgggtctgagtacggttttgtaactcctgagagacgtgaatctyttcaaattgcaaacccaacatgttatcattgcttttgagttttcagttttgtggttatgacaagatgcagatgttaccaaaactttggcgtcagttttac

SEQ ID NO: 388802 - DNA, 201 bp, Homo sapiens
tgcctgcctcagtctctcctctcctcctcctctccacccagaaaactacaacactatcccttctctctcagcacctcctccaggaagccttcctggactcsccaggacatccaaccccttgatacaggctctcattaatcctggagttctccttctgaattcctatctcaattatcattgcatgattcatataattagata

SEQ ID NO: 388803 - DNA, 201 bp, Homo sapiens
ttacacttagaagttaaaggtggagtatatcgaggtaaatgggtgctgacctctctggtatacaacagatttaatttttctttctttctttttttttttttgttttttgtttgtttttttatttcttttgagatggagttttgctcttgttgcccaggctggagtgcagtggtgcgatctcggctcactgcaacctctgcc

SEQ ID NO: 388804 - DNA, 201 bp, Homo sapiens
tcccagggatgaagcccacttgatcatggtggatcagctttttgatgtgctgctggattcggtttgccagtattttattgaggatttttgcatcaatgttmattaaggatattggtctaaaattctcttttttggttgtgtctctgcccagctttggtatcaggatgatgctggcctcataaaatgagttagggaggattc

SEQ ID NO: 388805 - DNA, 201 bp, Homo sapiens
agcgctggtggctgcctcgatgctattgtagatgtccaagtcctgagccctcggactgctttcaaagccccagctgccctaccctgtcctcccatctctcrttcctataatccgctctatccgaaagagtcgacttgccatttgtacaactccatacttcacatttttcttttctctgcctttgcacactgtttattcaac

SEQ ID NO: 388806 - DNA, 201 bp, Homo sapiens
aagggaatgcttccagtttttgcccattcagtatgatattggctgtgggtttgtcatagatagcacttattattttgagatacgtcccatcaatacctaayttattgagagtttttagcatgaagggttgttgaattttgtcaaaggccttttctgcatctattgagataatcatgtagtttttgtctttggttctgttta

SEQ ID NO: 388807 - DNA, 201 bp, Homo sapiens
cctggggtagtttgatcccttcggtcaggtgctgagcacaccaacaggctttgtgaattgctcagatggccacgagctgagacctgcagagtggtctctcrtctgcagttgctatttttttttttttttttgcagcatttcctcactaggccagtggttttcaactgggggcagttttgtccctcaggggaactttgtcat

SEQ ID NO: 388808 - DNA, 201 bp, Homo sapiens
acagtgtaaaagtgttcctatttctccacatcctctccagcacctgttgtttcctgactttttaatgattgccattctaactggtgtgaaatggtatctcmttgtggtttggatttgcatttctctgatggccagtgatggtgagcattttttcatgtgttttttggctgcataaatgtctacttttgagaagtgtctgtt

SEQ ID NO: 388809 - DNA, 201 bp, Homo sapiens
ggcagaccctaatgcttgagcacctctagggaaggccttaggatcctctgggaagtagcactctccagcccaggcaagatccgagtcccccttccagaagkatccatcggcagttggcattgctgcaggttttctgtgcatatgggtctgagtacggttttgtaactcctgagagacgtgaatctcttcaaattgcaaacc

SEQ ID NO: 388810 - DNA, 201 bp, Homo sapiens
ctgttttcagttcccctttgctggatgtgcaggaggactgccccgttccactccttcaagggtggcttggtcatggacttggtttggctaatgagcgtggsctggagtggcatgtggtgcttcttggtagatgtgtgtgcacaccagctcttggttctccccatgtgatactgggacagctgtgggatgggatgggcgcag

SEQ ID NO: 388811 - DNA, 201 bp, Homo sapiens
ggtgagagtgcaataaatgcctggtgtgttcactctcctactcctaaaagtttcttggtagaataatttcctacctgtgatgcttgcgaagtcagcagagkctcccacccagccctgccgcccattcccagaagtctgggctgggggacaccgaatggatagtccaccagcggcgtggcttgtgaaaggaggtacttgtta

SEQ ID NO: 388812 - DNA, 201 bp, Homo sapiens
ttgttcagaaagtcctcattggcgctgatttgggcaccgcctggtttcctaccgtagaagcgtgtgctgtggtggggtgaactgggcgggggattcacacyagcctgggccctgggccatggggggctgcctcccagggctgcttcagccgacaggagggtgcggtggtgaagaggcagggctctggggattggaatctcc

SEQ ID NO: 388813 - DNA, 201 bp, Homo sapiens
atttatatgggagggaggaggtttgagctgtgcaggagggtccttggttggcatgaggattttgtgaacctatgctgttagctctgcaggcctgtcttggrcataggtaagtagaagttggagaccttgtgttgtggaccaaatgttgcaagatgtgtgttctgtggcttttcattaactgctgcatatctgctggttggt

SEQ ID NO: 388814 - DNA, 201 bp, Homo sapiens
gtgttgttttaaataaattcattcatcatctataccttttccccttttaattactacactttaaaagggatcttggtatatatttatttttgttttgttawtttttttcttttttaaaaaattaattgtagagatggggtctctctacattgcacaggctcgccttgaactcctggcctcaagtgatccgcctacctcagc

SEQ ID NO: 388815 - DNA, 201 bp, Homo sapiens
aacgtgtatggaatctggcccgtcctaggcttatctctttccaccaggattcttcttcccatttttctcagcagagcatcttcacgtagttcacatgacaycagaacttcatcaggatgtaagttcctgcagaaataggcctgtgtctggtcagtaaacagagaatgtaatgacattcccagagcattcacaggccagagt

SEQ ID NO: 388816 - DNA, 201 bp, Homo sapiens
aacgtaatttagagttacagaactcttgatcctctgggtctaagcaaaataaacgtagtacctaatgctggaatagagcaagagttttctttgaatctcaraatatctgcattgtgaaactgggttaagttattttggaaactataaatagtcacttggtaattaggtgtttggttttatttgttctaatggagtgcttat

SEQ ID NO: 388817 - DNA, 201 bp, Homo sapiens
gaaatgccagcccctctcctaggaaaggggtgctcggctcctggtccactggcagtggctggaacagaaccacagcctgctgaatcccaggaaattcatgrtgtccctgtgcagagccctctgactaatcagcgatcccacaatgcctgtagcagaagcatagttaggtgagagttttatcctgaatgtaagaggtggcca

SEQ ID NO: 388818 - DNA, 201 bp, Homo sapiens
agttactcccaaagaagtaaattgaagaacgaaatcgaggaaaagaaagtccttttttgaaagctcttaaacacttgactccgtttagttcggatcaggcyttctctgcccttccaaagattcaggttaggtattggtaacgcccaggaagcacccactctggcgagcccaccctctccgccagtaaatatatacagtgta

SEQ ID NO: 388819 - DNA, 201 bp, Homo sapiens
ctcttaaacacttgactccgtttagttcggatcaggccttctctgcccttccaaagattcaggttaggtattggtaacgcccaggaagcacccactctggygagcccaccctctccgccagtaaatatatacagtgtagctgttactatgacaacgacttttttttcttgagtactgtttttaattgttgcacaaacacat

SEQ ID NO: 388820 - DNA, 201 bp, Homo sapiens
aaacacttgactccgtttagttcggatcaggccttctctgcccttccaaagattcaggttaggtattggtaacgcccaggaagcacccactctggcgagcycaccctctccgccagtaaatatatacagtgtagctgttactatgacaacgacttttttttcttgagtactgtttttaattgttgcacaaacacatattgt

SEQ ID NO: 388821 - DNA, 201 bp, Homo sapiens
cctgattttctcttcagcctttcctcacttagatggttttagtaagacctagcaaccgagctcaagagacacgtcaggacttactgcttgcccaagacatrtacttttcatagaaaattcgcgtctcttcctcttttcagaataaaatatgcaagaaccaacagaaatggcacattcccctgcttttccccaagaattggg

SEQ ID NO: 388822 - DNA, 201 bp, Homo sapiens
catcaccttccgctcaggtgtgtcccctttctgagatgtctagagccggtccatgtgcccgctcaggtatgtcaccttcctgagatgtctagagccggtcygtctgcctgctcaggcgtgtcaccgtcccaggctgtccagagccgatctgtgtgcccattcagctgtgtcaccttctgctcaggcatgtcaccttcccga

SEQ ID NO: 388823 - DNA, 201 bp, Homo sapiens
gggtcttatacaacagaaatctttctcagctctggagcctggaagtccgagaccgaggtgcggcagggtgtcagctactcagaccaaggtgctgaggctgycctgcttgccctgcagatggccgtctccttgctgcgtcctcactaggcctttcctctgggcgtgcatcgctcgggtctctatatcataatctccccttct

SEQ ID NO: 388824 - DNA, 201 bp, Homo sapiens
catcatggtggtctaggcagggaatgactgggtttagactagtagaaggatgacagcagtgacgtctgtaagtggacagattgccggaagagttaggagtkaaaacgaggactttgtgattaaatagggccaaagaggaggataaggcaggcgtgggcccgtgttgctggcatgtgtgactagcaggaggggagtccccat

SEQ ID NO: 388825 - DNA, 201 bp, Homo sapiens
tcccatctctcattcctataatccgctctatccgaaagagtcgacttgccatttgtacaactccatacttcacatttttcttttctctgcctttgcacacygtttattcaacgtacatagtacaaataccttcttaatctaccccctttaaactcctaaccattgttcaaaactcctcctcctatgaaacttttcttagtc

SEQ ID NO: 388826 - DNA, 201 bp, Homo sapiens
tctttgtaaaattggagtatttagaccatttacatttaatgtaattattaatatggttgggtttaagtataccatctggctgttcatttgtcattcaccaatttgttctttttgcccttcctccatcttccgtagcttcttttcagttatttggatatgtttttgaatgattccaatttaacattctgtctacactgttgg

SEQ ID NO: 388827 - DNA, 201 bp, Homo sapiens
gtcccaccaacagtgtaaaagtgttcctatttctccacatcctctccagcacctgttgtttcctgactttttaatgattgccattctaactggtgtgaaayggtatctcattgtggtttggatttgcatttctctgatggccagtgatggtgagcattttttcatgtgttttttggctgcataaatgtctacttttgagaa

SEQ ID NO: 388828 - DNA, 201 bp, Homo sapiens
ttacaagtatgcgttgggccttggggatgttatattgaaaaacccaattgtacagttaccatgggaacccaattaaaatagattggttgatttttttttttgtctttcatcttgaccaaaaatctaatgtattttaaatgttttcatatggaattgtagtcatatactgacttgctgtgccaaagtattctgctcgttttt

SEQ ID NO: 388829 - DNA, 201 bp, Homo sapiens
cagtcccaccaacagtgtaaaagtgttcctatttctccacatcctctccagcacctgttgtttcctgactttttaatgattgccattctaactggtgtgaratggtatctcattgtggtttggatttgcatttctctgatggccagtgatggtgagcattttttcatgtgttttttggctgcataaatgtctacttttgag

SEQ ID NO: 388830 - DNA, 201 bp, Homo sapiens
tttacaagtatgcgttgggccttggggatgttatattgaaaaacccaattgtacagttaccatgggaacccaattaaaatagattggttgatttttttttttgtctttcatcttgaccaaaaatctaatgtattttaaatgttttcatatggaattgtagtcatatactgacttgctgtgccaaagtattctgctcgtttt

SEQ ID NO: 388831 - DNA, 201 bp, Homo sapiens
acatgccacattttctttttttttggcattttttttaatttattattattatactttaagttttagggtgcatgtgcataatgtgcaggttagttacatatgtatacatgtgccatgcttgtgcactgcacccactaactcgtcatctagcattaggtatatctcccaatgctatccctcccccgtccccccaccccacaa

SEQ ID NO: 388832 - DNA, 201 bp, Homo sapiens
ggaaattaaggctaactgagtcataagagtgggatcctactctgctaggattgatggccttggcagagaaagagaggatcttttttcttagaagagaaagagaggatctctccctcccataccgtgtgaggacacagcgaggaggaggctgtgtgcaagccaggaaaggagccctcactggaaacggaatcagccaggacc

SEQ ID NO: 388833 - DNA, 201 bp, Homo sapiens
gcccaggccctttctgtctttgatgtctgtatggtgggcaagatctcatcacgacccacatcagctttgctgttagaaacgtgttgccacagaggagcacrttcataattgaaatcaccaaatagggaattctttctagaggcagtggctgcctcagtgaaacgtgcatggctgagcagagcaaggaagagttagtggggc

SEQ ID NO: 388834 - DNA, 201 bp, Homo sapiens
tgtgtccatgtgttctcattgttcagttcccacctatgagtgagaacatgcggtgtttggttttctgtccttgtgatagtttgcttagaatgatggtttcsaacttcatccatgtccctgcaaaggacatgaactcatccttttttatggctgcatggtattccatagtgtacacatgccacattttctttttttttggca

SEQ ID NO: 388835 - DNA, 201 bp, Homo sapiens
cgccccactcttgttttgaagtgaaaggatttatatgggagggaggaggtttgagctgtgcaggagggtccttggttggcatgaggattttgtgaacctaygctgttagctctgcaggcctgtcttgggcataggtaagtagaagttggagaccttgtgttgtggaccaaatgttgcaagatgtgtgttctgtggcttttc

SEQ ID NO: 388836 - DNA, 201 bp, Homo sapiens
aggaaattaaggctaactgagtcataagagtgggatcctactctgctaggattgatggccttggcagagaaagagaggatcttttttcttagaagagaaagagaggatctctccctcccataccgtgtgaggacacagcgaggaggaggctgtgtgcaagccaggaaaggagccctcactggaaacggaatcagccaggac

SEQ ID NO: 388837 - DNA, 201 bp, Homo sapiens
attttgagaatctctgttctaaaaagtccatttcttttactctaaaatattactcacattgcctgatatgttgtgggctcctccttttttaaattttttttattatactttaagttctagggtacatgtacacaatgtgcaggtttgttacgtaggtatacatgtgctatgttggtgtgctgcacccatctattcgtcatt

SEQ ID NO: 388838 - DNA, 201 bp, Homo sapiens
actttctgaaagagctggggtcttaccgcagaatattattttattatttttagagacaaggtcttggtctttcgcccaggctggagtgcagtggtgagatyatagctccctgcagcctcaagctcctgggctcaagcgaacctcctgctttgacctcccaagtaccagggactacaggtgtgcgccaccatacctggctaa

SEQ ID NO: 388839 - DNA, 201 bp, Homo sapiens
gaggaaattaaggctaactgagtcataagagtgggatcctactctgctaggattgatggccttggcagagaaagagaggatcttttttcttagaagagaaagagaggatctctccctcccataccgtgtgaggacacagcgaggaggaggctgtgtgcaagccaggaaaggagccctcactggaaacggaatcagccagga

SEQ ID NO: 388840 - DNA, 201 bp, Homo sapiens
tgtcacctgtaagagaatgagaatctaaaaggcaaataacatcctagtattgctatggaaatgattttgacctcacaaaccccctaaaggggtctcaggaacccctgatgatccctagaccacattttgagaatctctgttctaaaaagtccatttcttttactctaaaatattactcacattgcctgatatgttgtgggc

SEQ ID NO: 388841 - DNA, 201 bp, Homo sapiens
ggtgctaatgctcttttcagtatattctctttgatagaaaaaaaatggaggcaaaactgaattttctgcattatcttttcctttagcattattcttgtttytgcacttcattctgacccccttccccagcataaagttccatgtccagatccacttgccctgagatttttgacttccgtttgggactctagtccctccagg

SEQ ID NO: 388842 - DNA, 201 bp, Homo sapiens
caggaactcctttttggaatgtcacagatcaccaacttccttctctgtgctgtgtcaatagggacgtcacccctgtggggaaaggaatttgcctgaacaaracactaaaaagataaaataggctgaagcggagaagaataaaagattgtgctggcatgagctagttttgcaaaacccatttaaataaactcaggatattac

SEQ ID NO: 388843 - DNA, 201 bp, Homo sapiens
ggaggaaattaaggctaactgagtcataagagtgggatcctactctgctaggattgatggccttggcagagaaagagaggatcttttttcttagaagagaaagagaggatctctccctcccataccgtgtgaggacacagcgaggaggaggctgtgtgcaagccaggaaaggagccctcactggaaacggaatcagccagg

SEQ ID NO: 388844 - DNA, 201 bp, Homo sapiens
ctttcagcctccagaacagagaaaataaatgtgtgttgttaagccacccactctgtggtgttttgttatggcagcccacactaatacaggcagtgatggamtatctcgtgaggaagtgacgtttgaacacatctgaaagaaagtgtagaaggcagccaagggcatctgaggtaaggacattttaagacagaggaaccagtc

SEQ ID NO: 388845 - DNA, 201 bp, Homo sapiens; identical to SEQ ID NO: 85285

SEQ ID NO: 388846 - DNA, 201 bp, Homo sapiens
tagtagagacaggtttttgccatgttggccaggctggtctcgaacttctgacctcaagttatccacccaccttggcctcccaaagtaatgggattataggmatgagccactgcacctggcccacatatctgattatttaggatacattctaaaaagtggagttacccagttcacagcaggaacactaacaaaacaggttat

SEQ ID NO: 388847 - DNA, 201 bp, Homo sapiens
tggggctgctgggtctccgcgggggtggccgggggctttcgtgtggaacccggcggggggcagtctagaggaaggtgggggcccctgtgcaccccctgacycgtgttgcttgcacgtgcgcgcacaggtctacgcgtctattcctgtttccgagtgcgtgcgcacgccagtcccagggcgctgggcctttgctgtgcaagg

SEQ ID NO: 388848 - DNA, 201 bp, Homo sapiens
gcaggatggcggcggcggcggctgcaggcgaggcgcgccgggtgctggtgtacggcggcaggggcgctctgggttctcgatgcgtgcaggcttttcgggcycgcaactgggtaatgctgcgggctggggctgctgggtctccgcgggggtggccgggggctttcgtgtggaacccggcggggggcagtctagaggaaggtg

SEQ ID NO: 388849 - DNA, 201 bp, Homo sapiens; identical to SEQ ID NO: 85309

SEQ ID NO: 388850 - DNA, 201 bp, Homo sapiens
attgccgctgtgaacattcatgtataagtgtttgtgtatctgttttcaatgattttggatatatacctaggagcaggattgttcgaccatatggtaatttytgtgtttatcttttttttttttttgagatggagtcttgctctgttgcccaggctggagtgcagtggtgcgatctcagcacactgtaacctctacctccca

SEQ ID NO: 388851 - DNA, 201 bp, Homo sapiens
cccctgtgccaggagctttagcatcttccatttcatttaattcttacactgaccctgttaatcatcaacaaacaacctcttttgttgggaacctctgcccrgcatcggagtgagaaagccactctggcagagctgggattcaaacctgatctgtctgatttccaatcctaaagtccatccctctctgctgcaggacaggga

SEQ ID NO: 388852 - DNA, 201 bp, Homo sapiens
tattgtatgttactccttttacaagtttaggtaattttgtattttatagtttatggtaagctttgtttttttttttttttatacttaaataattctccagrttactgaaaaaacctctttgtagatgtgtgatattccattttatggaatggccacaatttatttagtttgtttattgtacatttgagttttttgcaggat

SEQ ID NO: 388853 - DNA, 201 bp, Homo sapiens
ggtggcctaaacaacagagatttattttctcataactctggaggctaaaagtctggagatcaaggtatctgcagggctggctccttctgaatcctcttttyttatagatggctgccttctccttttgtctgcatgtggtcttccctctgtgtgtctgtcctcgtttcctcctcttctaaggaaaccaggcatattggacta

SEQ ID NO: 388854 - DNA, 201 bp, Homo sapiens
aaactgagtatccgtaaagatgctagcctgtgttggcttaccttacagtttatacatttttttgttcttgtgttgaaggtgactgctgaggttggaaagcycttgggtgaagagaaggtggatgcaattctttgcgttgctggaggatgggccgggggcaatgccaaatccaagtgtgagtcctttcctgagtcactcatt

SEQ ID NO: 388855 - DNA, 201 bp, Homo sapiens
taggaccaaaagactgatttttctaaatgacagaagagtctcctactttcctttggtttgcaggtatcctttgattacattttgggtagtggttaagactkcaggctctggaactgtgcacgttggacttctcttaaggctctgccacttactgtgacacgttcggcaagttacttcgcctttctgagtctgcgttttgtc

SEQ ID NO: 388856 - DNA, 201 bp, Homo sapiens; identical to SEQ ID NO: 85316

SEQ ID NO: 388857 - DNA, 201 bp, Homo sapiens
atgaatgacgtgcttatctgtgtccattgcagggttaccctggataccccgatgaacaggaaatcaatgcctgaggctgacttcagctcctggacaccctkagaattcctagttgagtgagtattacagacatgtccatgactgagcagcttccagcccctattctctgcctgctgtggtccagaggacaagtctgtgttc

SEQ ID NO: 388858 - DNA, 201 bp, Homo sapiens
catttcacgaaatgggaaactgaggattccaaggtttagtagcctctcccagtgtcagtcactagcaagcagcagagcctggacacgaagccaggtagtcrggttccagggcacattacttctattgatttgatgggaaaccttcattgagtgcctgtcctgtgctaagggtatgctcacaattaagtactctattcctgt

SEQ ID NO: 388859 - DNA, 201 bp, Homo sapiens; identical to SEQ ID NO: 85319

SEQ ID NO: 388860 - DNA, 201 bp, Homo sapiens
cttccccccaccccacaagccgtcactgtgaaggtcagcatgtgcccagatttttgctttgagaatataaaaaaaacttttattttctgttccagaacttkccatgactggatcacagggaaaaaccgaccgagctcaggaagcctaatccaggtggtaaccacagaaggaaggacggaactcaccccagcatatttttag

SEQ ID NO: 388861 - DNA, 201 bp, Homo sapiens
gagtttatactgataaggtgattagtaggttggggcccctagacagcctcaggatggagctacttcttagaatgaccaagcaattaggaggttagaacttkcagctccacctaccgacctcctggaaggaagcaggggctggagattaagctctataaaaacttacagatgtgataagcatctgggttgaacacatggagg

SEQ ID NO: 388862 - DNA, 201 bp, Homo sapiens
gcccctattctctgcctgctgtggtccagaggacaagtctgtgttccctgagatcgtcaatccgggtggtcttgggaggtctctgggactctgaggatgcrttgcacatcagacggaatctcagagtagctggacttggagacaggcagcacagtggcagaatgggtagtgccgacatgaatcctggctcgctccctcacc

SEQ ID NO: 388863 - DNA, 201 bp, Homo sapiens
aggttcagttctgcaggcagcctccacccacttgttgtggtcatgtggcatgggtctggagtccggctctactgtttcctggctgggtgacctcaggtaarttatgtaacctctccaagcctcagtgtactcctctggaaaatgggaacattaacaattccttctgtataactttgttgtaaggctttaaggagacaagtg

SEQ ID NO: 388864 - DNA, 201 bp, Homo sapiens
tgttcaaaccccagagtaggggcctgaatgactggacctttacacatcagcgctggcccagaaggttacagattggcactgggagtctcccaggaaggaamtgctgagcactttttagttaatgaaggtccgaagtctcagctggtgaattgtcaaaatggatgatgtactcaaatgtaaatgttttgtgttaaagaatta

SEQ ID NO: 388865 - DNA, 201 bp, Homo sapiens
ttgcatctgtttctctcataaatttatgagaaggtaatatagcaaagtattgtgcatgtgtctctctctttgaatgaactaattaaaatctttaaaaacarttttttttttttttgagacagggtctcactgggtcacccaggctggagtgcagtgtcacgatcatggcttaccctagccttgatctccggggctcaagca

SEQ ID NO: 388866 - DNA, 201 bp, Homo sapiens
gtaggtcttatagtcactcttttcatttcacatatattctcactttaatctcatcaatattatctttttcagtttacaggttaggaaactaaaacttggaragttaagtaacttgtctgggtttgtgcaggaagtaagttgcagacttacttgaaccaaaaccctaatcatctaccaactgtgtattttttccattatgtc

SEQ ID NO: 388867 - DNA, 201 bp, Homo sapiens
aaacttatgccaaatcctgccactcagagattagaatgagtacaccactgaactcactgggggcctgggtatgtgtccatcatgcctactggcttttattwattttttattattttttggagatggaatcttgccattgtgtccaggctggcctcaaacacctgggctcaagcgatccgcccgccttggcatctcaaagtg

SEQ ID NO: 388868 - DNA, 201 bp, Homo sapiens
aacagtcgctgctgtgccaccccttccccccaccccacaagccgtcactgtgaaggtcagcatgtgcccagatttttgctttgagaatataaaaaaaactyttattttctgttccagaactttccatgactggatcacagggaaaaaccgaccgagctcaggaagcctaatccaggtggtaaccacagaaggaaggacgga

SEQ ID NO: 388869 - DNA, 201 bp, Homo sapiens
cagagaaatacggaagagtcgtggtggatggccagaattgcctgtcctgacagactgttcttttcataaattataacaagagggcatacatatattttcartgctttaaaatctcaaacaaacagaagcagagagatcattaaagtgaacccccatgtacttaatattaccaacatattgctattgactgtattttttctt

SEQ ID NO: 388870 - DNA, 201 bp, Homo sapiens
agagatgtttgtgaagttagcagtgtgcttctggcctgatgtcacaatctcatttaaattaaatcgggagaaatttgggacttgcgttttatgtttgaaaygtgtacttacagaacactttttatgtcccagtcaccattctaagcacttcataactcttatttaatgctcatagcaaactctgagggaggagctgtcatt

SEQ ID NO: 388871 - DNA, 201 bp, Homo sapiens
aagctaacattaaactttcagacataaaatatgtagctcagtaaaagctctctttatagctgtacagtaataggcccttggatttttatcacagagaaaayctgacgtagacatataggttcttattacaaatctgataccattcataaaataaaacaatctttgaattaaagccagtccagcaaatcagtaaactccagg

SEQ ID NO: 388872 - DNA, 201 bp, Homo sapiens
gagaaagccactctggcagagctgggattcaaacctgatctgtctgatttccaatcctaaagtccatccctctctgctgcaggacagggatcctttgtgarctgaatctggtctgccacctgtttttgtacagcccaagagttaagaatagttttacattttcaggtggttgaaaagaaaatcaaatgaagaattatattt

SEQ ID NO: 388873 - DNA, 201 bp, Homo sapiens
gaaaatcaaatgaagaattatattttgttgtatatgaaaattaatgaaattcacatttcagctctgaagatttattggaacacagctgcacttattttttycccctatttattgctgtgttctgttacaattgcagatttgagtaacaacagataccatatggccagcaaagcctaaggtaattgtgatctggccctttac

SEQ ID NO: 388874 - DNA, 201 bp, Homo sapiens; identical to SEQ ID NO: 85304

SEQ ID NO: 388875 - DNA, 201 bp, Homo sapiens
ccatggcgcccagcccttagtggcttttaaacagtcgctgctgtgccaccccttccccccaccccacaagccgtcactgtgaaggtcagcatgtgcccagwtttttgctttgagaatataaaaaaaacttttattttctgttccagaactttccatgactggatcacagggaaaaaccgaccgagctcaggaagcctaatc

SEQ ID NO: 388876 - DNA, 201 bp, Homo sapiens
ttctgtgattctgtgacatgattcccacagctgttttgaatgattcgaatgattcctgaggccttgatgttcttgggagattcatgcatatctgaattctrtattattctgccaaaaatcttaaggttttgtggaaaatagccacatatttaaaattttagtattttagtattctcatatttaaaggcatataactatctt

SEQ ID NO: 388877 - DNA, 201 bp, Homo sapiens
tgtctctgaccactgagccctgtgctgtttgtgttagaccttgctgtagatagggacctggggaccaggagggagggcctccctgagtgtggggctgcatragttgagctcaccttttggtttctttcctgggaatgctgagcccacatgtttttttcactcagctctctttaagaactgtgacctgatgtggaagcagag

SEQ ID NO: 388878 - DNA, 201 bp, Homo sapiens
gggcgcggcgctccggctcgaggcattcggagctgcgggagccgggctggcaggagcaggatggcggcggcggcggctgcaggcgaggcgcgccgggtgcyggtgtacggcggcaggggcgctctgggttctcgatgcgtgcaggcttttcgggcccgcaactgggtaatgctgcgggctggggctgctgggtctccgcgg

SEQ ID NO: 388879 - DNA, 201 bp, Homo sapiens
tgggaggtctctgggactctgaggatgcattgcacatcagacggaatctcagagtagctggacttggagacaggcagcacagtggcagaatgggtagtgcsgacatgaatcctggctcgctccctcaccaccggccatgctgagcacattattgacctgctgaggcctcagtttccccacctgtatcatgaggtccatcat

SEQ ID NO: 388880 - DNA, 201 bp, Homo sapiens
tgaggcctcagtttccccacctgtatcatgaggtccatcatgcttgttaggattaaacgtgatagtgtgcggcaagcactcaacacagtgtctggccatarcaagtgctcagtgatccccagctgcagtttgtgtccttactgctgtgatgaggagactccatgggggagggggacaccacgtagatggcctgggggcaca

SEQ ID NO: 388881 - DNA, 201 bp, Homo sapiens
gatgcgtgcaggcttttcgggcccgcaactgggtaatgctgcgggctggggctgctgggtctccgcgggggtggccgggggctttcgtgtggaacccggcggggggcagtctagaggaaggtgggggcccctgtgcaccccctgactcgtgttgcttgcacgtgcgcgcacaggtctacgcgtctattcctgtttccgagt

SEQ ID NO: 388882 - DNA, 201 bp, Homo sapiens; identical to SEQ ID NO: 85287

SEQ ID NO: 388883 - DNA, 201 bp, Homo sapiens
aaacgctgacggcttctttgctctgcaaagactatttcaactactttgcatagtcaggtgtcaatttccaggaggcggcaagtcggagcagagctgatacwtggccaaagacccttgacctcagccgctcagcaggcctcagcaatttcccggtggagacactgccagcggcagcgttctgggagcttagttagcagcagc

SEQ ID NO: 388884 - DNA, 201 bp, Homo sapiens
ctaacttttttgtatttttagtagagacaggtttttgccatgttggccaggctggtctcgaacttctgacctcaagttatccacccaccttggcctcccaragtaatgggattataggaatgagccactgcacctggcccacatatctgattatttaggatacattctaaaaagtggagttacccagttcacagcaggaac

SEQ ID NO: 388885 - DNA, 201 bp, Homo sapiens
actgtgacctgatgtggaagcagagcatatggacatcgaccatctccagccatctggctaccaagcatctcaaggaaggaggcctcctgaccttggctggygcaaaggctgccctggatgggactcctggtaagcctttatttccctatctgtggagtggggttgcttaccttgcttgctggggctgctgggcactttcat

SEQ ID NO: 388886 - DNA, 201 bp, Homo sapiens
agcctgatttaaatcttaagaagattgggccaggcgtggtagctcagtcctgttgtcccagcactctgagaggccgaggcaggcgaatcacctgaggtcargagttcgagacaagcctggccaacatggcgaaaccccatctctactaaaaatacaaaaattagctaggtgtggtggcaggcgcctgtaatcccggctact

SEQ ID NO: 388887 - DNA, 201 bp, Homo sapiens
gttcaccagctctgccagagcctggctgggaagaacagcggcatgccgcccggggcagccgccatcgctgtgctcccgtaagtgcttggggttccctggcygctgcccacctctgccccactgctgcaggtgaccgtttgtctgactgtagctttccacaggcgacctgggtgtgctctcacctctggttctgaaacacac

SEQ ID NO: 388888 - DNA, 201 bp, Homo sapiens
caacatggcgaaaccccatctctactaaaaatacaaaaattagctaggtgtggtggcaggcgcctgtaatcccggctactcaggaagctgaggcaggagawtcgcttgaaccggggaggtggaggttgcagtgagccgagatggcgccatcgcactccagcctgggagacaagcgaaactccatctcaaaaaaaaaaaaaa

SEQ ID NO: 388889 - DNA, 201 bp, Homo sapiens
atttaaatggagataaggcctccttctgttgcctagcccggagtacagtggtgcgatcatagctcactgagctcaagtgatcctctcgcctcaacctcccrggtagctggggctacaggcatgtgccaccacacctgactaattttaaaatttttttgtagggactgggtcttgctatgttgcccaggctggtctcaaact

SEQ ID NO: 388890 - DNA, 201 bp, Homo sapiens
caccaggatgttaactatgtgcaggcagtgaagctctaggtgcttttttcttttttttttaacctttccctacttttatttattaattgttgtatttcaagggatgctcatgtctctacctttcagaatgtatacacagagactctagattgttttttaaaaatcacactgaagtgtacttgggcttcaatgtctaaaatg

SEQ ID NO: 388891 - DNA, 201 bp, Homo sapiens
ttcttcctggcctcttctggaccctggaatgctgcagcttggatgcaccggtggcctgtgtgaagcctgtgtgttcttggaaactggccagaggccataaytcccaacccacgtgttcccatcccctctttctcgtggctctctgccattttttgatgggggttggtgagggcgtctgacctgaaggaggaggccagatgc

SEQ ID NO: 388892 - DNA, 201 bp, Homo sapiens; identical to SEQ ID NO: 85291

SEQ ID NO: 388893 - DNA, 201 bp, Homo sapiens
gtgtccatcatgcctactggcttttattaattttttattattttttggagatggaatcttgccattgtgtccaggctggcctcaaacacctgggctcaagygatccgcccgccttggcatctcaaagtgctgggatcataggggtgagccataatgcctgacctttagtggcttttatttatttatttatttattattttt

SEQ ID NO: 388894 - DNA, 201 bp, Homo sapiens
catcatgcctactggcttttattaattttttattattttttggagatggaatcttgccattgtgtccaggctggcctcaaacacctgggctcaagcgatcygcccgccttggcatctcaaagtgctgggatcataggggtgagccataatgcctgacctttagtggcttttatttatttatttatttattattttttgtga

SEQ ID NO: 388895 - DNA, 201 bp, Homo sapiens; identical to SEQ ID NO: 85295

SEQ ID NO: 388896 - DNA, 201 bp, Homo sapiens; identical to SEQ ID NO: 85296

SEQ ID NO: 388897 - DNA, 201 bp, Homo sapiens
gctccggctcgaggcattcggagctgcgggagccgggctggcaggagcaggatggcggcggcggcggctgcaggcgaggcgcgccgggtgctggtgtacgkcggcaggggcgctctgggttctcgatgcgtgcaggcttttcgggcccgcaactgggtaatgctgcgggctggggctgctgggtctccgcgggggtggccg

SEQ ID NO: 388898 - DNA, 201 bp, Homo sapiens
attaatgaaattcacatttcagctctgaagatttattggaacacagctgcacttattttttccccctatttattgctgtgttctgttacaattgcagattwgagtaacaacagataccatatggccagcaaagcctaaggtaattgtgatctggccctttacagaaaatttgctggcccttgatgtctctagaagtgcagg

SEQ ID NO: 388899 - DNA, 201 bp, Homo sapiens
ttcttccttttatttctttttttccccgagacggagtcttgctctgtcgcccaggctggagtgcagtggcatgatctccgttcactgcaacctttgcctcytgggttgaagcaattctcctgcctcagcctcctgagtagctgggattacaggtgcctgccaccacccccagctaattttttgtattttcagtagagacgg

SEQ ID NO: 388900 - DNA, 201 bp, Homo sapiens
agtgtggcaggcaggcaggccattttacagctgtgaagacaagtttgcgcgactaagtgacaaggccaacaagctactcagtggtggagtcaggatcatargtctccagatacgaactttaataagttcaggtgccacttggtctgtacgtgggtctgcttttcatttagttgcactttccttggtaatctcaatactgat

SEQ ID NO: 388901 - DNA, 201 bp, Homo sapiens
gtggagtcaggatcataggtctccagatacgaactttaataagttcaggtgccacttggtctgtacgtgggtctgcttttcatttagttgcactttccttrgtaatctcaatactgatgttttatgatccttatctggtttttataacaaatttttaaaattttagaagtgatgcatgtatgatatagaaaatacaaataa

SEQ ID NO: 388902 - DNA, 201 bp, Homo sapiens
atggggtttcatcatattggccaggctggtctcgaactcctgacctcaagcgatctgcccgcctcggcctcccaaagtgctgggatcacaggtgtgagccrtggcgcccagcccttagtggcttttaaacagtcgctgctgtgccaccccttccccccaccccacaagccgtcactgtgaaggtcagcatgtgcccagatt

SEQ ID NO: 388903 - DNA, 201 bp, Homo sapiens
aaaagaaaagggaaatcatttatagttctaccatatagttaatcatttatttatatttccttccagtctgtctctccaaaatatacatgtataaatctatrcattttgaacataaaactgtgagcacaactctgctactcatttgctctttctaaagtgtcagtttgacatagattggaatgtaaaagccagatgacttat

SEQ ID NO: 388904 - DNA, 201 bp, Homo sapiens
aaactgtttaaatgctgtctattaatgttactattactacccacccctgttcttttagccccattggatctgacagtttgaaggctcagcacggaaaaacrctgacggcttctttgctctgcaaagactatttcaactactttgcatagtcaggtgtcaatttccaggaggcggcaagtcggagcagagctgatacatggc

SEQ ID NO: 388905 - DNA, 201 bp, Homo sapiens
ctaagtcatacagattgaccttagtgaatttaatagtgaaagttgacatggcatcattgttagttgccaggcaccattctcagtgctttattttcattaayacgtgtagtcttcattacatccccaaacaaagcttctaattttatcctccttttaaatgggggtaactgaggcacagaaaggccctggtatttgtccaag

SEQ ID NO: 388906 - DNA, 201 bp, Homo sapiens
catcccctctttctcgtggctctctgccattttttgatgggggttggtgagggcgtctgacctgaaggaggaggccagatgcagctatttataaagttttyagggaatagagatctcaagagaagattgcatgtccttgctgtccccctggccgccagtggtcactgagccatcttctccccatttcccaggtatgatcgg

SEQ ID NO: 388907 - DNA, 201 bp, Homo sapiens
ggattggggtggggaaaacagggttgatcttctttttggattataattctgtgatttgtgaagagagtctggaaagaaatacaccaggatgttaactatgkgcaggcagtgaagctctaggtgcttttttcttttttttttaacctttccctacttttatttattaattgttgtatttcaagggatgctcatgtctctacc

SEQ ID NO: 388908 - DNA, 201 bp, Homo sapiens
aagaaaagcaccataatttgatgactcgatagaggcttttccatgccttattcttttcacttcatcatagattaaataatttaaaagttagtttgtctggmatattgagaaactcacgagttactgagaatcacctaccatagttttaatgaacagagctaccagtttgttcttttttttttttttttttttttttttttt

SEQ ID NO: 388909 - DNA, 201 bp, Homo sapiens
cgctccggctcgaggcattcggagctgcgggagccgggctggcaggagcaggatggcggcggcggcggctgcaggcgaggcgcgccgggtgctggtgtacsgcggcaggggcgctctgggttctcgatgcgtgcaggcttttcgggcccgcaactgggtaatgctgcgggctggggctgctgggtctccgcgggggtggcc

SEQ ID NO: 388910 - DNA, 201 bp, Homo sapiens
ttgcttgagccctggaggtgaaggatgcagtgagctgagattgcaccattgcactctagcctgggcaacagagtaagcttgtctcaaaaaaaaaaaaagamaagcaccataatttgatgactcgatagaggcttttccatgccttattcttttcacttcatcatagattaaataatttaaaagttagtttgtctggaatat

SEQ ID NO: 388911 - DNA, 201 bp, Homo sapiens
aaatgctcatcagagcttagtcttccgtctaattctcaaagcattaattgccaggtactgtaaactggcttaaaaagaagagaaaaagaaactgagtatcygtaaagatgctagcctgtgttggcttaccttacagtttatacatttttttgttcttgtgttgaaggtgactgctgaggttggaaagctcttgggtgaaga

SEQ ID NO: 388912 - DNA, 201 bp, Homo sapiens
ggcttaccttacagtttatacatttttttgttcttgtgttgaaggtgactgctgaggttggaaagctcttgggtgaagagaaggtggatgcaattctttgygttgctggaggatgggccgggggcaatgccaaatccaagtgtgagtcctttcctgagtcactcatttgttctgctctgctctttttccagctgacaagga

SEQ ID NO: 388913 - DNA, 201 bp, Homo sapiens
ggagcagctgggattacaggcatgcatcaccacccccagctaactttgtatttttagtagagacggagtttccccacgttggtcaggctggtcttgaactyctgacctcaggtgatccacctgccttggcctcccaaagtgctgggattacaggcgtgagccaccgcacctggccccagtttgttttttcattcccacagt

SEQ ID NO: 388914 - DNA, 201 bp, Homo sapiens
tctctctctttgaatgaactaattaaaatctttaaaaacaattttttttttttttgagacagggtctcactgggtcacccaggctggagtgcagtgtcacratcatggcttaccctagccttgatctccggggctcaagcaatcatcccaccacagcctcctgagtagctgggactacaggcatgtgccatgcccagctat

SEQ ID NO: 388915 - DNA, 201 bp, Homo sapiens
ttgtttggtgcagctgtgggtactctataaatgtttgattaaaaaaatgccaaataaatgaattgcatctgtttctctcataaatttatgagaaggtaatrtagcaaagtattgtgcatgtgtctctctctttgaatgaactaattaaaatctttaaaaacaattttttttttttttgagacagggtctcactgggtcacc

SEQ ID NO: 388916 - DNA, 201 bp, Homo sapiens
catcccaccacagcctcctgagtagctgggactacaggcatgtgccatgcccagctattttttgtatttttttagaggtagggtttcacccagttgcccasgctggtctcaaaaactcctgggctcaagtgatccacctgcctcagcctcccaaattgctgagattacaggtgtgagccaccacgcctggccaaattagaa

SEQ ID NO: 388917 - DNA, 201 bp, Homo sapiens; identical to SEQ ID NO: 85312

SEQ ID NO: 388918 - DNA, 201 bp, Homo sapiens; identical to SEQ ID NO: 85290

SEQ ID NO: 388919 - DNA, 201 bp, Homo sapiens; identical to SEQ ID NO: 85293

SEQ ID NO: 388920 - DNA, 201 bp, Homo sapiens
catatagaagtgctcagaaagtattggttgttattcttattatctgtttctaattttatatggaagtatgacgggaaagtaaagttcatgtcacacagcaygtggcaatacttcggttcttattgccaaataatattccattgtatggttatgccacattttatttgtccactcatcagttgttagacatgtgaattgttt

SEQ ID NO: 388921 - DNA, 201 bp, Homo sapiens
ccactcagtgtggcaggcaggcaggccattttacagctgtgaagacaagtttgcgcgactaagtgacaaggccaacaagctactcagtggtggagtcaggmtcataggtctccagatacgaactttaataagttcaggtgccacttggtctgtacgtgggtctgcttttcatttagttgcactttccttggtaatctcaat

SEQ ID NO: 388922 - DNA, 201 bp, Homo sapiens
acctgtgtctctgaccactgagccctgtgctgtttgtgttagaccttgctgtagatagggacctggggaccaggagggagggcctccctgagtgtggggcygcatgagttgagctcaccttttggtttctttcctgggaatgctgagcccacatgtttttttcactcagctctctttaagaactgtgacctgatgtggaag

SEQ ID NO: 388923 - DNA, 201 bp, Homo sapiens
cttttggtttctttcctgggaatgctgagcccacatgtttttttcactcagctctctttaagaactgtgacctgatgtggaagcagagcatatggacatcraccatctccagccatctggctaccaagcatctcaaggaaggaggcctcctgaccttggctggcgcaaaggctgccctggatgggactcctggtaagcctt

SEQ ID NO: 388924 - DNA, 201 bp, Homo sapiens
acagtgacatctaacttgaagagtactgtaaaactgtagaggtgtagctatgtagaaagtgcacatggtaggcacccataaatggcaagtcttactgttaytcacaataaatggtaggtcttatagtcactcttttcatttcacatatattctcactttaatctcatcaatattatctttttcagtttacaggttaggaaa

SEQ ID NO: 388925 - DNA, 201 bp, Homo sapiens
aaggaagaccaataggtagcaggtatacacaatgtcaaaatttgctcaaatggtacaccctaaatgtgtttaagtttattgtgtttcagttatacctcaasagacttggcgaaaaagaaagaaatatttttaggcatctgtcttctgggtgcttggcttgttgggctaagcttgatcttatttcatcaccagaggtatctg

SEQ ID NO: 388926 - DNA, 201 bp, Homo sapiens
tgtggcagtcacctgtaatcccagctactcaggaggctgaggcaggagaatcgcttgaacctgggaggcggtggttgcagtgagccgagattgcgccactrcactccagtctgggtgacagagtgagactctgtctccaaacaaacaaaaaaagaggctgaggtgggaggattgcttgagccctggaggtgaaggatgcag

SEQ ID NO: 388927 - DNA, 201 bp, Homo sapiens
aagtgattctacttcctcagcctcctgagtagctaggattacaggcacgtgctaccacggccaatttttgtatttttagtagagatggggtttcatcataktggccaggctggtctcgaactcctgacctcaagcgatctgcccgcctcggcctcccaaagtgctgggatcacaggtgtgagccatggcgcccagccctta

SEQ ID NO: 388928 - DNA, 201 bp, Homo sapiens
cagggtcttggaaaaggacttgctttgacaaatagagcttatgggaaaagacaaggcactgtattagtttttatttaaataatttaatcagtttttaaatyggaaaactaaccaatgcatgtagtaaaaattcacatggcactaaaagaaacacaatgaataggaagactctctcctactcacaccgctgatctctatggc

SEQ ID NO: 388929 - DNA, 201 bp, Homo sapiens; identical to SEQ ID NO: 85331

SEQ ID NO: 388930 - DNA, 201 bp, Homo sapiens
ctctctttaagaactgtgacctgatgtggaagcagagcatatggacatcgaccatctccagccatctggctaccaagcatctcaaggaaggaggcctcctraccttggctggcgcaaaggctgccctggatgggactcctggtaagcctttatttccctatctgtggagtggggttgcttaccttgcttgctggggctgct

SEQ ID NO: 388931 - DNA, 201 bp, Homo sapiens
taaagggatttttggattggggtggggaaaacagggttgatcttctttttggattataattctgtgatttgtgaagagagtctggaaagaaatacaccagsatgttaactatgtgcaggcagtgaagctctaggtgcttttttcttttttttttaacctttccctacttttatttattaattgttgtatttcaagggatgc

SEQ ID NO: 388932 - DNA, 201 bp, Homo sapiens
agctgccttaaagcaaaatagtttcatgtgaataaagtaataaaggccaaaatggctgggtgcagtggctcatgccagtagtcccagcacttcaggaggcygaggcaggaggatcacttgagcccaggagtttaagaccagcctgtgcaacatggcgaaaccccatctctacaaaaaaatacaaaaattagctgaatgtgg

SEQ ID NO: 388933 - DNA, 201 bp, Homo sapiens
gacctggtaactgttgattatcctaataaatgcacttcatttatcgtgttgcctttttattttgagacagagtctcgctctgtcacccaggctggagtgcrgtggcatgacgtcggctcactgcaacctccgcctgcctggttcaagcgattcttctgcctcagcctcccgagtagctgggactacaggcgtgcaccacta

SEQ ID NO: 388934 - DNA, 201 bp, Homo sapiens
caggcatgtgccaccacacctgactaattttaaaatttttttgtagggactgggtcttgctatgttgcccaggctggtctcaaactcttggcctcaagagrtcctcccacattggctcccaaagtgctggcattacagacgtgaaccactacacctggccaactcccctcatttctatgtgtgactctttcatggaataac

SEQ ID NO: 388935 - DNA, 201 bp, Homo sapiens
aggcgtgcaccactacacccagctaatttttatatttttagtagagacggggtttcaccactttggccaggatggtctcaatctcttgacctcgtgatccrcctgcctcggcctcccaaagtgctgggattcacaggcgtgagtcaccgtgcctggcctgtctctttaatcaaatcacatctcatatccagcagtcataga

SEQ ID NO: 388936 - DNA, 201 bp, Homo sapiens
tacacattaacaaaaatgagtgcctagaatcagctttcatgctcccaatatactcactcgtgaattgggattggcggcccccaagcccacactgccgcacyttacaccctcggaagagcccgtagtaaatgtccccaatgaacttgaccagctctctgtctgtggcgttgaccagatccactccagtctgacaaaggattt

SEQ ID NO: 388937 - DNA, 201 bp, Homo sapiens
tgatttacctctggctcttggtctttcccctccgagcttcttcctgccatcttagggagggctaggatgatggagacttttcattgtttcagtatcccccrtgggataacaagttaattaataatataacaaatgttgatgaatagatgctgtgtttacagcttaaggtagagataattatctctggggacttcagaccaa

SEQ ID NO: 388938 - DNA, 201 bp, Homo sapiens
tgaaccactacacctggccaactcccctcatttctatgtgtgactctttcatggaataacaactcactgcctcttaaccaaagctgttttctccttccagygggttgccagcgttgatgtggtggagaatgaagaggccagcgctagcatcattgttaaaatgacagactcgttcactgagcaggctgaccaggtagtttc

SEQ ID NO: 388939 - DNA, 201 bp, Homo sapiens
caagagaccctgagtaaggactgaacatcccctgtgccaggagctttagcatcttccatttcatttaattcttacactgaccctgttaatcatcaacaaamaacctcttttgttgggaacctctgcccggcatcggagtgagaaagccactctggcagagctgggattcaaacctgatctgtctgatttccaatcctaaag

SEQ ID NO: 388940 - DNA, 201 bp, Homo sapiens
tctctgaccactgagccctgtgctgtttgtgttagaccttgctgtagatagggacctggggaccaggagggagggcctccctgagtgtggggctgcatgarttgagctcaccttttggtttctttcctgggaatgctgagcccacatgtttttttcactcagctctctttaagaactgtgacctgatgtggaagcagagca

SEQ ID NO: 388941 - DNA, 201 bp, Homo sapiens
tccttccagtgggttgccagcgttgatgtggtggagaatgaagaggccagcgctagcatcattgttaaaatgacagactcgttcactgagcaggctgaccrggtagtttcaaaaaggcccccaaacattgtgaggggaaccctggggagaggtgaccactggctgtatgttcttcctttggctgtatgttcttccttttat

SEQ ID NO: 388942 - DNA, 201 bp, Homo sapiens
ccggctcgaggcattcggagctgcgggagccgggctggcaggagcaggatggcggcggcggcggctgcaggcgaggcgcgccgggtgctggtgtacggcgrcaggggcgctctgggttctcgatgcgtgcaggcttttcgggcccgcaactgggtaatgctgcgggctggggctgctgggtctccgcgggggtggccgggg

SEQ ID NO: 388943 - DNA, 201 bp, Homo sapiens
ttttcaattttcagatgaagaaacagttccacacactaagagacttaacgagggtacagttagtttcaggagagctggtagttttcattccgtttagaacyggacctggtaactgttgattatcctaataaatgcacttcatttatcgtgttgcctttttattttgagacagagtctcgctctgtcacccaggctggagtg

SEQ ID NO: 388944 - DNA, 201 bp, Homo sapiens
gttaggaaactaaaacttggagagttaagtaacttgtctgggtttgtgcaggaagtaagttgcagacttacttgaaccaaaaccctaatcatctaccaacygtgtattttttccattatgtcatttcttttgcattttttatgacctgtattagtttgtttgggtagccacagactgggtggcctaaacaacagagattta

SEQ ID NO: 388945 - DNA, 201 bp, Homo sapiens
atgaaagttaaacttatgccaaatcctgccactcagagattagaatgagtacaccactgaactcactgggggcctgggtatgtgtccatcatgcctactgscttttattaattttttattattttttggagatggaatcttgccattgtgtccaggctggcctcaaacacctgggctcaagcgatccgcccgccttggcat

SEQ ID NO: 388946 - DNA, 201 bp, Homo sapiens
ctggatttgaacctgtgtctctgaccactgagccctgtgctgtttgtgttagaccttgctgtagatagggacctggggaccaggagggagggcctccctgrgtgtggggctgcatgagttgagctcaccttttggtttctttcctgggaatgctgagcccacatgtttttttcactcagctctctttaagaactgtgacct

SEQ ID NO: 388947 - DNA, 201 bp, Homo sapiens
accatcgttgtaccaacagtggaccaggcagcttacattatggccttatctaacctgtatacagcctgatgaaatgggtattattattattattattattatttttgagatggagtcttgctctgtcacccaggctggagtgcagtggcgcgatctcggctcactgcaagctctgcctctgaaatgggtattattacacca

SEQ ID NO: 388948 - DNA, 201 bp, Homo sapiens
tgtagtagaactctccatctggatgttgaatgggcatttccaatgtatatatacaacatatttcgatccttcctacccctagatatgttcctttcaaagcytataaaatagtaccgttatttacccagtcaaaaccactgggctcatgttggacttgtttcattctttcacatcatgtctggttcatttgcaaaacctgta

SEQ ID NO: 388949 - DNA, 201 bp, Homo sapiens
gctagagaggtaaaggaactctgagaccacacagcaagctgggccagagtccaacctaaaaccaggtcttctcatgccctatatgctgcacccactttgcyctgtgccctgagcaaatacagtcctggggagatggctcaaatcagtaaatcccataatgtttttgctttccataatttgattgctgttagtcttggccca

SEQ ID NO: 388950 - DNA, 201 bp, Homo sapiens
tgcttttgtggaaagttcactgtattcttagtgaagtgatgtgcacatacttttaccagctgaagggtgtccaggttcttggcatcttgaacaaagaatcrgacaaaatgcacaaacaaagcaagggaagaatgaagcaacaaaagcagagatttattgaaaatgaaagtacactccacagggtgggagcagcctgagcag

SEQ ID NO: 388951 - DNA, 201 bp, Homo sapiens
attactgactatccaaaccttcatcatccctctccaggcaatgccttctccttcctactcagtgccctacaatttatggtccacacagcagccagagtaarccttttaaaaccaaatctaatcatgttattccaccctttgaaaccctccaaaggcttcccaacacatttagaataaaatctaaaatacttagtgaggact

SEQ ID NO: 388952 - DNA, 201 bp, Homo sapiens
tcaaggtggcataaaaagataaatagaatacaggaataaaatagattgtaaatagggcctacaagaataagaaaggccgggcgtggtggctcacgcctgtwatcccagcactttgggaagccgaggcagggagatcacctgagatcaggagttggagaccagcctgaccaacatggggaaaccctgtctctaccaaaaatg

SEQ ID NO: 388953 - DNA, 201 bp, Homo sapiens
gtaatcaggatgaaaaggaaatttgtttattccctttaatggattatcatggtcatttaacgttgagaaaagaaggacagtatctctttcggaaaaatctkcagtcatccaaaagactttactgtgaaaagacttttctttactgtaaatttaaaatatgcctccaaaaccacaaaaaagaaaacatgcatattgtaagaa

SEQ ID NO: 388954 - DNA, 201 bp, Homo sapiens
gaagatcatttgaggacactgagattacaaaacttaaccatgaatccaggataacttatggcagaattgagttctgttgacccctaaaccatccaagctcyattaccctcactcacaaagtatggtcctcattccagaagtacagacccctcctgggagcttgttacacatttgagtctcaggcccacccagatgttctga

SEQ ID NO: 388955 - DNA, 201 bp, Homo sapiens
tcctccaaaaatagaaaaaccagtcaggcgtggtggcgcacacccgcaatcccaggcacttggcaggccgaggcaggagaaccacggaagtccggggcagrgaggctgcagcgagccgagaccacggcagtatagtccagcctcggcaacggagggagaccgaagaaaggagggagggggagggggagagggagagggaga

SEQ ID NO: 388956 - DNA, 201 bp, Homo sapiens
atttttcttagtacagaacaaaatggtgtctcctatgtcaacttcttactacacagacacagtaacaatctgatctctctttcttttccccacatttcccscttttcttttcgacaaaaccgccatcgtcatcatggcccgttctcgatggtcactgtctctttggagctgttgggtacacttcccagatggggcggcctg

SEQ ID NO: 388957 - DNA, 201 bp, Homo sapiens
gtacagggaagatcatttgaggacactgagattacaaaacttaaccatgaatccaggataacttatggcagaattgagttctgttgacccctaaaccatcmaagctccattaccctcactcacaaagtatggtcctcattccagaagtacagacccctcctgggagcttgttacacatttgagtctcaggcccacccagat

SEQ ID NO: 388958 - DNA, 201 bp, Homo sapiens
aaaaggctcttctatccaattgccatattccaggtcctccaataactacaatcaaaactctaaacaaagaccctcatatctagtttctaaatcaaaaatttaggccagacacagtggctcacacctcccagcactgtgggaggcagagggaggcagatcccttgagcccaggagtttgagaccagcctgggcaacatagtg

SEQ ID NO: 388959 - DNA, 201 bp, Homo sapiens
aaataacggaagagggatttagattgaagggaaaaaagtaaacaagggagagtacatcaaatgaggggtaaatttagcaggcagcaactcaacaagcagcraaaatgatctgtaaagttgaaagaggtgagcctcagatttgcttctggtgttcctggtggctaaagcaatgtagaaaacacaagttgttgtagggttcac

SEQ ID NO: 388960 - DNA, 201 bp, Homo sapiens
tgacaaatagtttgcaggagtagcacaatccttctgaggcctttcttttttctaccactccaagctataagtcattatgcccataaaattcaagtggacaktttagtctctttcaaaattatccgatgtatttgttttcttgcatcttcttatttgctcttgatgtcatgaaagatcaaaacacctttttatgagttatag

SEQ ID NO: 388961 - DNA, 201 bp, Homo sapiens
tcaagttctgacagatgaaagttcttgggaaagagactgtgaagacgtttttactcttataatttaagctgcctcagcttccatgaataaaacatgagatrtgcatcttcagagctacaagtgctactaagatgttctttttcccctaggccttatatcaagtgatgggttttgcagatatctgatgtcagatgaaaacgc

SEQ ID NO: 388962 - DNA, 201 bp, Homo sapiens
gaatttttcttagtacagaacaaaatggtgtctcctatgtcaacttcttactacacagacacagtaacaatctgatctctctttcttttccccacatttcycccttttcttttcgacaaaaccgccatcgtcatcatggcccgttctcgatggtcactgtctctttggagctgttgggtacacttcccagatggggcggcc

SEQ ID NO: 388963 - DNA, 201 bp, Homo sapiens
tattatttttgagatggagtcttgctctgtcacccaggctggagtgcagtggcgcgatctcggctcactgcaagctctgcctctgaaatgggtattattamaccaatttttcagatgagaggactgaagcttagagaggtaacatattttgcacatgatcccacagcgggcaaccgattgcactaagattcaatcccagag

SEQ ID NO: 388964 - DNA, 201 bp, Homo sapiens
aaagactttactgtgaaaagacttttctttactgtaaatttaaaatatgcctccaaaaccacaaaaaagaaaacatgcatattgtaagaaggcgtgttgarttttttgttgattataggtacttgttactagcaccatgctctaaccaattgagctaactggccattgattataggcacttgtaaattagctttttttttt

SEQ ID NO: 388965 - DNA, 201 bp, Homo sapiens
gggtaagatttaatcttgaattcatcaggaaaatgacccctgaacatcccgagtctagccctcatttgagaactagtcctgctaattatataccttccccstaaagtacagtaagcataaaaatgtttccagatattcagccaaggaaaatagttattcatatacttaccttttatcaggcatagtctaggccataatgac

SEQ ID NO: 388966 - DNA, 201 bp, Homo sapiens
agtcctgctaattatataccttccccgtaaagtacagtaagcataaaaatgtttccagatattcagccaaggaaaatagttattcatatacttaccttttrtcaggcatagtctaggccataatgacctaaaagtgtaaaacacacttgccttctgcccttaggcagctcatggccccctgtagtttagggaaagggatcg

SEQ ID NO: 388967 - DNA, 201 bp, Homo sapiens
gatctacctacatagctggtatataaagataaaaatagcaagttgcaaatgcacacagtgggatagtttttacataaaattaaaaacagcccaaactaccygttgtttggataaatgcatatgtagtaaggttgcagaaccattttggaggtaaacaccaaaactaggatactagttatctatctggtatggaatggaatt

SEQ ID NO: 388968 - DNA, 201 bp, Homo sapiens
gcacgtgcagtgtctcactctctccaccgttatttattttttcttaagacagggtttcgctctgtcacccaggctcaagtgcagtggtgcaaacgtggctyattgaggccttgacatcctgggctcaatccatcctccctcctccacccctcaaatagctaggggtgcccaccaccacacatggctagtttttttatttgt

SEQ ID NO: 388969 - DNA, 201 bp, Homo sapiens
atgacctaaaagtgtaaaacacacttgccttctgcccttaggcagctcatggccccctgtagtttagggaaagggatcggaaacagcaaacaagcaagtaktcaaataactatataattacaacttacggtgagtgcaattatgaacataaacacgaatgctgaagaataatgaagtagaaagaataaggaaaccagaacg

SEQ ID NO: 388970 - DNA, 201 bp, Homo sapiens
ttatggtgcttttgatgtgctaggtgctagaacacaaaggtaaacaagactgcttcaaggactctgccctcttggaggttgttgcattctggtgtgggagycagtcagtaaatcaaggatcagggagagcctctctgaggaggggataatgaagacaaggtctgtagaatgaagaggagcctgatgcaccaagggcagtag

SEQ ID NO: 388971 - DNA, 201 bp, Homo sapiens
taattcttatgtcttgattagttgataattctcatttttttagtcagtaacaacataagacccgccatggccttttgggtaatagctaatgcttttcaggyggcacggaagacccttgcaatgaaacaactcttctatacatgtcccatcacaccccctgtcattctcttgaagtgctctagccacacaaacaaatttcta

SEQ ID NO: 388972 - DNA, 201 bp, Homo sapiens
tttaggaggaaacaggagtggaagcaggaaaagcagtgaggacaggctgctgctctaggccagacgagagtccccgatggtcaaaccagacaatgcatcaragaggactgagtggcttcaagacatattgagaaatgggacagcctactgatggatggaatgtgggaatgagagagaaagaagaagtgagatgaccctcta

SEQ ID NO: 388973 - DNA, 201 bp, Homo sapiens
ttctgatatagggaattgtgactactctgagaatattgaacgtctattaagactcaagagtattgttttaatacaaaaattagccaggcgccatggtacgygcctgtaatcccagctactcaggaagctgaggcaggagaactgcttgaacccaaaaggcggaggttgcagtgagccaagattgtgccactgcactccagc

SEQ ID NO: 388974 - DNA, 201 bp, Homo sapiens
agtttgagaccagcctcaccaatatgatgaaaccccgtctctactaaaaatacaaaaaattagccaggtgtggtggcgtgcacctgtagtcccagctactygggaggctgaggcgggagaattgcttgaacctgggatgcagaggttgcagtgagctgagatagcgccactgcactccagcctaggtgacagagtgagact

SEQ ID NO: 388975 - DNA, 201 bp, Homo sapiens
gtggctcatgcctgtaatcctagcactttgggaggccgaggtgggtggatcacctgaggtcaggagtttgagaccagcctcaccaatatgatgaaaccccdtctctactaaaaatacaaaaaattagccaggtgtggtggcgtgcacctgtagtcccagctacttgggaggctgaggcgggagaattgcttgaacctggga

SEQ ID NO: 388976 - DNA, 201 bp, Homo sapiens
ggtcacatccccccagactctgactcagtccatctggactggggcctcatattctgcaattcagtaaagctcccagctgatgttgatgctgctggtctagygactacactttagctctaggggctgttcaagatgcgctttacaggacaccaaatgaggttagataaaaaagcaaaaatctcagcaaatatctgaatgcta

SEQ ID NO: 388977 - DNA, 201 bp, Homo sapiens
ctactgtcttatctgccacattcctttttcataagaaggcaatttggtagcatcagaatttatcattgtttttgtccaaaaatgtgtgtcccaggccaggmgctgtggctcatgcctgtaatcctagcactttgggaggccgaggtgggtggatcacctgaggtcaggagtttgagaccagcctcaccaatatgatgaaac

SEQ ID NO: 388978 - DNA, 201 bp, Homo sapiens
aactagtcttaccactggaaattaaggaggcgcccatgtgatcagtacttggcagcactaggagctgggagtgatgagtcctcatgaattctcaagacaaggctggctgctgtcaccgtgcagttgcatttcccaccaccttaatatattattacagagcaataatcgagcagaccaatcacaaataagtaccaacaatgt

SEQ ID NO: 388979 - DNA, 201 bp, Homo sapiens
gaggcagagggaggcagatcccttgagcccaggagtttgagaccagcctgggcaacatagtgcaaccctgtctctacaaaaattacaaaaattagggtgtkttagcatgtgcctgtagtctcaactactcaggaggctgcggtgggaggatccattgagcctgggaggcagatgttgcagtgagctgagaatgcaccactg

SEQ ID NO: 388980 - DNA, 201 bp, Homo sapiens
cttgagtgtataccagaatcccctgagctcttgttaaaatgcagattctgattcaataggtctgaggtggggacaagattctccttttctaacaagctccyaggtggcatggatactactcatctgacaactacagtttgagtgacaaaggtctagatcagtaccacccagtagaaatgcaatgtgagccacatatataat

SEQ ID NO: 388981 - DNA, 201 bp, Homo sapiens
ttgggaggctgaggcaggaggactgcttgaagccaggagttcgagttcagcctggacaacatagcgaaactctgtctctacaaaaaaaaatttttttttttaattagccagccatgatagtgaatgcctgtagtcctagctactcatgaggctgaggcaggaggattgcttgagcgcaggagtttgaggctgcggtgctat

SEQ ID NO: 388982 - DNA, 201 bp, Homo sapiens
taaaaagtttctggaagaaagaaagagagtaagtattttattatatttttggcattcttcctttaaaaaactataaacaataacatgcttagccaccagayctctagctaatttgtttaatttgatttttctgtacattaaacattccagcttctctgctccctgaaagctaaaataatgtctcactaaaatctttaaggt

SEQ ID NO: 388983 - DNA, 201 bp, Homo sapiens
ctagagtgaccaggttctgatcatttaatagctacctgtggagagagtctccatttcccttccttacagtgttaggacttctgtgaattttgaaaagatargcctgattaaaaaacagcaaagtatcagtttattttggcctgtgcccacttcagcaaagtgaatattgcatttgaaatactgcaagccatgagctggact

SEQ ID NO: 388984 - DNA, 201 bp, Homo sapiens
cctgtctctagtaaaaatacaaaagttagccaggcatggtggcaggtgcctgtaatcccagctacttgggaggctgaggcaggagaatcacttgaacccargaggcggaggttgcagtgagctgagattgtgccactgcactccagcctgggtgacaagagcaagactctgtctcaaaaacaaaacagaacaaacaacaac

SEQ ID NO: 388985 - DNA, 201 bp, Homo sapiens
ctcagtcactgtagaatccagtctgagcaacaatcgtgctagttcagtttagtgaaaatccccagcccttggtatctgaccaccctggatatcctgtcacyttggcctgccttcagcaataatcctatcaagtcagtttggccagaagtccttatccttgatgtttcctcatagtaattttccatctgctggcgctcacct

SEQ ID NO: 388986 - DNA, 201 bp, Homo sapiens
gaactagtcttaccactggaaattaaggaggcgcccatgtgatcagtacttggcagcactaggagctgggagtgatgagtcctcatgaattctcaagacaaggctggctgctgtcaccgtgcagttgcatttcccaccaccttaatatattattacagagcaataatcgagcagaccaatcacaaataagtaccaacaatg

SEQ ID NO: 388987 - DNA, 201 bp, Homo sapiens
tgaactagtcttaccactggaaattaaggaggcgcccatgtgatcagtacttggcagcactaggagctgggagtgatgagtcctcatgaattctcaagacaaggctggctgctgtcaccgtgcagttgcatttcccaccaccttaatatattattacagagcaataatcgagcagaccaatcacaaataagtaccaacaat

SEQ ID NO: 388988 - DNA, 201 bp, Homo sapiens
atgaactagtcttaccactggaaattaaggaggcgcccatgtgatcagtacttggcagcactaggagctgggagtgatgagtcctcatgaattctcaagacaaggctggctgctgtcaccgtgcagttgcatttcccaccaccttaatatattattacagagcaataatcgagcagaccaatcacaaataagtaccaacaa

SEQ ID NO: 388989 - DNA, 201 bp, Homo sapiens
ccttttctaacaagctcccaggtggcatggatactactcatctgacaactacagtttgagtgacaaaggtctagatcagtaccacccagtagaaatgcaawgtgagccacatatataatttaaattgttcttgtagctgggttttaaaagtaaaaagatacaggtaaaattaattttaataaaatattttatttaacccag

SEQ ID NO: 388990 - DNA, 201 bp, Homo sapiens
gatgaactagtcttaccactggaaattaaggaggcgcccatgtgatcagtacttggcagcactaggagctgggagtgatgagtcctcatgaattctcaagacaaggctggctgctgtcaccgtgcagttgcatttcccaccaccttaatatattattacagagcaataatcgagcagaccaatcacaaataagtaccaaca

SEQ ID NO: 388991 - DNA, 201 bp, Homo sapiens
atcaaactgaggagaaataaaatttaaaaatttgtcatagcactaagaaagatacatagaaactgaaaatcatacttacatttttagatcaaagaagacaytttaacagaaattacccaatatttataactgaatgacaatgtaaacactatttatcaatgtgtagagggtagttaaagtgatatttggagggaaaaatat

SEQ ID NO: 388992 - DNA, 201 bp, Homo sapiens
caaaccccccctcccaataagttattaaaatattgggttaagatcagtcttttaataccatatccagcataccattgccctggcaagtgagtctcaaagakacttctcgaagaagtagaaagcctcgtaaatattttgtctgctaatcatgtgtttacagggtgattttacctctgtacagagctcccattatctttctgt

SEQ ID NO: 388993 - DNA, 201 bp, Homo sapiens
gggtacgtgagaaaactttacatgtatacaatgcccagtgatcaagtcagggcatttaggttgtccatcacccaagtactatacatttgtggctaagtatwgtcaccctactctgctatctcttataagtttgtatccagtggtatgtggttccaaaatatctacaaattggctgttttttaaaaaataatttttctatac

SEQ ID NO: 388994 - DNA, 201 bp, Homo sapiens
ccctcccaataagttattaaaatattgggttaagatcagtcttttaataccatatccagcataccattgccctggcaagtgagtctcaaagagacttctcraagaagtagaaagcctcgtaaatattttgtctgctaatcatgtgtttacagggtgattttacctctgtacagagctcccattatctttctgtaatgtgtg

SEQ ID NO: 388995 - DNA, 201 bp, Homo sapiens
cccacctcggcctcccaaagtgttgggttacaggcgtgagccaccgtgcacagccagttggctgatttagcttatctgtataaaaactggggcagggagtsgggggaacagcctctttcacctgtaacactgtgtgatgttaatgtactttttaggcaaatgttttaagatcattatctgtgggagctatagtcatacagt

SEQ ID NO: 388996 - DNA, 201 bp, Homo sapiens
ttctctaattaccaattcatattacaagaaacaggatgatgcagtatgagctcaagtattggggctttggggccacattgcctgggttcaaatccttgctygtccccttcccagctatgtgaagcagatatacgctggacctctctgtgcctcattttcttcatctgtaaaatgggaacagtactagaatatctgctctta

SEQ ID NO: 388997 - DNA, 201 bp, Homo sapiens
tgcaggccatgggctgaacacaacccttagcctaattttgtatgtcctgtgaactaagaatggcttttacatttttgaagcgatgtttaaaaaataaattwaaaaaaaaaacaggaaaactagacaacatggaactatgtgtgcccctgaagcctaaaatatttattatctggctcttaatggaaaagatttgctggtctc

SEQ ID NO: 388998 - DNA, 201 bp, Homo sapiens
tcatatactacttaggatccttaggggcttgtccatggggcgagctctgttctgtctctgtggcacatctctaggcctctgaaatcctgaaaaggtctacrtttgtttgtttgtttgtttgtttttgaaactccctactttcataaggaattaagtgtggatttttagctggcatttttcttagtgctggacttacttaaa

SEQ ID NO: 388999 - DNA, 201 bp, Homo sapiens
ttgttctattgttgactaatcttttaatgttagggacaagccttttcattaattgtggatctgttgcgtggcttttatgttttgggtttttttttttttttccccctgtactttactctgaatgcctcagatagccagtttggtttctttaaggtggatctgagactaaggacactcattgggcagagtgcaatggaatgc

SEQ ID NO: 389000 - DNA, 201 bp, Homo sapiens
gttgttctattgttgactaatcttttaatgttagggacaagccttttcattaattgtggatctgttgcgtggcttttatgttttgggtttttttttttttttccccctgtactttactctgaatgcctcagatagccagtttggtttctttaaggtggatctgagactaaggacactcattgggcagagtgcaatggaatg

SEQ ID NO: 389001 - DNA, 201 bp, Homo sapiens
aagaccagtgttgcccaatgagccatgacatctcatatttgatgaatatattatcttcatcagaaagctttgtagcaaagacccatgggaatgggaaaatrtctaatttctggcatgcatttgcaactttccattttcaggggaagtaattgtctcgaaatgaaaaaagaaacagaaatcaaaattcagacgctgacatca

SEQ ID NO: 389002 - DNA, 201 bp, Homo sapiens
tgttgttctattgttgactaatcttttaatgttagggacaagccttttcattaattgtggatctgttgcgtggcttttatgttttgggtttttttttttttttccccctgtactttactctgaatgcctcagatagccagtttggtttctttaaggtggatctgagactaaggacactcattgggcagagtgcaatggaat

SEQ ID NO: 389003 - DNA, 201 bp, Homo sapiens
tgttcaagatgcgctttacaggacaccaaatgaggttagataaaaaagcaaaaatctcagcaaatatctgaatgctagattttacagacaaaaaaaaaaaagaaaaaaaacacaaaacaaaaaccagtgacttaaaaaataatgtatctcctgatttttgacatcagtgggctagaacttgggaatccttcttccaagata

SEQ ID NO: 389004 - DNA, 201 bp, Homo sapiens
ctgttcaagatgcgctttacaggacaccaaatgaggttagataaaaaagcaaaaatctcagcaaatatctgaatgctagattttacagacaaaaaaaaaaaagaaaaaaaacacaaaacaaaaaccagtgacttaaaaaataatgtatctcctgatttttgacatcagtgggctagaacttgggaatccttcttccaagat

SEQ ID NO: 389005 - DNA, 201 bp, Homo sapiens
atatgaaatacacatagatataattacctcagttcgaaatgatggcaggatacataaatcaaattgggccaatgagaaatgtagagatttcccagggtacrtgaaatagtgtttgtgactcactgagtggttctactcaaacgtgagtatagcctaggagcctagaatcagggggccatgaaatatactaacagccctctt

SEQ ID NO: 389006 - DNA, 201 bp, Homo sapiens
taccttaaacactgtaacttaaggcatataaatgttgttctattgttgactaatcttttaatgttagggacaagccttttcattaattgtggatctgttgmgtggcttttatgttttgggtttttttttttttttccccctgtactttactctgaatgcctcagatagccagtttggtttctttaaggtggatctgagact

SEQ ID NO: 389007 - DNA, 201 bp, Homo sapiens
taaacactgtaacttaaggcatataaatgttgttctattgttgactaatcttttaatgttagggacaagccttttcattaattgtggatctgttgcgtggsttttatgttttgggtttttttttttttttccccctgtactttactctgaatgcctcagatagccagtttggtttctttaaggtggatctgagactaagga

SEQ ID NO: 389008 - DNA, 201 bp, Homo sapiens
ccatagtcttggtctttttccctgcaagacaagacactaaataaagaaatatacacaaataaagagttatccaggccgggcgcagtgggctcatgcctgtwatcccagcactttgagaggccgaggagggtggatcaggaggtcaggagatcgagaccatcctggccaacatggtgaagccccgtctctactaaaaataca

SEQ ID NO: 389009 - DNA, 201 bp, Homo sapiens
cttttgggggaataatacctagcaagaaggtggccttttggccaaagtccaacagagaaaagctgttttatgagccaggtgcagtggctcacacctgtaawcccagcactttgggaggccgaggtgggcagattacctgaggtcaggagtttgggaccagcttgaccaacatggtgaaacctcacctctactaaaaataca

SEQ ID NO: 389010 - DNA, 201 bp, Homo sapiens
tagggacaagccttttcattaattgtggatctgttgcgtggcttttatgttttgggtttttttttttttttccccctgtactttactctgaatgcctcagwtagccagtttggtttctttaaggtggatctgagactaaggacactcattgggcagagtgcaatggaatgcaaaatcctacagttctgtgacttttttccc

SEQ ID NO: 389011 - DNA, 201 bp, Homo sapiens
atcatcactggtcatcagagaaatgcaaatcaaaaccacaagagttgccatctcacgccagttagaatggcgatcattaaaaagtcaggaaacaacagatrctggagaggacgtggagaaataggaacgcttttacactgttggtgggagtgtaaatttgttcaacgattgtggaagacagtgtggcgattcctcaaggat

SEQ ID NO: 389012 - DNA, 201 bp, Homo sapiens
atgtgagggacctcttcaaggagagctacaaaccactgctcaatgaaataaaagaggacagaaatgaatggaagaacattccatgctcatggataggaagmatcagtatcgtgaaaatgcccatactgcccaaggtaatttatagattcaatgccatccccatcaagctaccaatgactttcttcacagaattggaaaaaa

SEQ ID NO: 389013 - DNA, 201 bp, Homo sapiens
ttacaagtacaattaatacagaggtagaatatcacatatttttatattttgataactatagctaatataattggtttttcattgttattctttgcattttmttttatacatataaagaaaagtatttaaaggtgaccaggggataaaaaagttccagagaagatgataggatcaggaagtcctggataccactgaggctgc

SEQ ID NO: 389014 - DNA, 201 bp, Homo sapiens
gatctgagactaaggacactcattgggcagagtgcaatggaatgcaaaatcctacagttctgtgacttttttccctaatcttttagttatcttgtctacayggaatttgagaaaaatatttttggcaacttgcctttaaagaaatcttcccaaaatattcagctagagaaacaacaatgccctttctttccacaagatcgt

SEQ ID NO: 389015 - DNA, 201 bp, Homo sapiens
agagacctacaaagagacttagactcccacataataataatgggagactttaacaccccactgtcaatattagacagatcaatgagacagaaggttaatargatatccaggacttgaactcggctcttcaccaagcagacctaatagacatctacaggactctccaccccaaatcaacagaatatacattcttctcagcac

SEQ ID NO: 389016 - DNA, 201 bp, Homo sapiens
atttcacccatgtccccgcaattcttcatcatgtgtatataaggtggttgttgcaggtttcttacaaggtcgagaccaccaggaaatggcgagagagagawcactgctgaaccttagaaacatggtgccttggtgcctgaacattctatttcttctctcttttcacgtcctcctcagtgtcgatctcaaggcctagggttt

SEQ ID NO: 389017 - DNA, 201 bp, Homo sapiens
tgggcagagtgcaatggaatgcaaaatcctacagttctgtgacttttttccctaatcttttagttatcttgtctacatggaatttgagaaaaatatttttrgcaacttgcctttaaagaaatcttcccaaaatattcagctagagaaacaacaatgccctttctttccacaagatcgtgtcattggtttacgcaattttta

SEQ ID NO: 389018 - DNA, 201 bp, Homo sapiens
atacaggagcatgcagattcataaagcaagtccttagagacctacaaagagacttagactcccacataataataatgggagactttaacaccccactgtcratattagacagatcaatgagacagaaggttaataagatatccaggacttgaactcggctcttcaccaagcagacctaatagacatctacaggactctcca

SEQ ID NO: 389019 - DNA, 201 bp, Homo sapiens
tttcccttctgtattcttctacttctcaaagagggtctctgatagtttttttttcatattcaagtgggtgctttaagagtcaataaaatattatctgaaayctgagtttctcagggttgaattttaaataaatacaaaatactttccagtgcatatgactctgaaaatatgattgtgcttttttcagtaaaagataacagc

SEQ ID NO: 389020 - DNA, 201 bp, Homo sapiens
ggaaacccatctcacatgcagagacacacacaggctcaaaataaagggatggaggaagatctaccaagcaaatggaaagcaaaaaaaaaaaaaaaaaaaaagcaggggttgcaatcctagtctctaataaaacagactttaaaccaacaaagatcaaaagagacaaagaaggccattacataatggtaaagggatcaattc

SEQ ID NO: 389021 - DNA, 201 bp, Homo sapiens
ccacctcccttcccctttctaccttaatctctctctttcctcctacgcattttcttccagcctctgggacttggcatttgctgttccttctgtctgtatcrtgctctttcccagttacacacagagctttctcccccacagccctcacgtgtctgctggaaaattgtcttagcaggagctccccatttcaccagccttcgg

SEQ ID NO: 389022 - DNA, 201 bp, Homo sapiens
gattctatttttctcccaaaggcttacttgaagcatttaaagaaacagcagaaggagctaaattctttaaagaagaaacatgcaaaggtacagtgctctamagctactattttgtgttatgtatggatgaatcatttgtagccaaaaacactactttgaagctgataccagaccacttaacagtaataactcattctaact

SEQ ID NO: 389023 - DNA, 201 bp, Homo sapiens
gtttggattttgtttttttaatcgtctgcctctagaatatcccttcatcagaattgttagctccagaagaggaaggtggctgtttctttccctcaccctcytcctgtgcctggagagatacttcacaaaataaaacagtctatctagaaattctgaatccagatactaccagttgaaagataccactattttattatgact

SEQ ID NO: 389024 - DNA, 201 bp, Homo sapiens
ccagtcctgtattcatccaagtcccgaccttcctcgggaggcagaatccctcatttgccacagctggggtccaaatgctgcctgtgtcatgaaagccagamccaccattgttacctcccctcacagtctgtgtcggttttccttccagagaaagctggtgggcttccctcggagatgcaggcgtagtattgtagctactca

SEQ ID NO: 389025 - DNA, 201 bp, Homo sapiens
gacaaacctgacaaaaacaaaaaatggggagaggattccctatttaataaatggtgctgggaaaactgtctaaccatatgtagaaagctgaaactggatcycttccttacaccttatacaaaaattaattcaagatggattaaagacttaaatgtcagacctaaaaccataaaagccctagaagaaaacctaggcaatacc

SEQ ID NO: 389026 - DNA, 201 bp, Homo sapiens
taaccagttaacatcataatgacaggatcaaattcacatataacaatattaaccttaaatgtaaataggctaaatgccccaattaaaagacacagactggmaaactggattaagagtcaagacccatcagtgtgctgaattcaggaaacccatctcacatgcagagacacacacaggctcaaaataaagggatggaggaag

SEQ ID NO: 389027 - DNA, 201 bp, Homo sapiens
tactggattcagtaaaataaagaatgtacaagatatttgaccttgagtgacattcatttgggtcaatgtaaatgtttctgttccagagtgacatagccgaygtgcccagtgacacttccaaaaatgacaagaaaggaaaggccaacaccgccaaagcaaatgtgacccctcagagtagctctgagctcagaccaaccacca

SEQ ID NO: 389028 - DNA, 201 bp, Homo sapiens
ctgacggagctgaaaaccatggcacgagagcttcgtgacacatgcacaagcttcaatagctgattcgatcaagtggaagaaagggtatcagtgattgaagrtcaaattaatgaaataaagcaagaagaaaagattagagaagaaagagtaaaaagaaaggaacaaagcctccaagaaatatgggactatgtgaaaagacca

SEQ ID NO: 389029 - DNA, 201 bp, Homo sapiens
aaaataccttcacagaaaaggatactgttgctactttagcctgaattctgtgctgatgtgttggacgctatgtgactgaaagcatacacctcaccagaaargctgaaaaatagcctgtgcagtggggcagcccagcttgataaagtatcagcgatgctgttgactctgtaatctcctaattccccttcccatacacccagc

SEQ ID NO: 389030 - DNA, 201 bp, Homo sapiens
gacattcatttgggtcaatgtaaatgtttctgttccagagtgacatagccgacgtgcccagtgacacttccaaaaatgacaagaaaggaaaggccaacacygccaaagcaaatgtgacccctcagagtagctctgagctcagaccaaccaccacggctgccctggcctctggtgtggaagccaagaaaggtgagagagagc

SEQ ID NO: 389031 - DNA, 201 bp, Homo sapiens
taacaaacagaaaggaatagcatcatcatcaacaaaaagttcatctacaccaaaaccccatctgtaggtcaccaacatcaaagacaaaaggtagataaaascgcaaagatggggagaaaccagagcagaaatgttgaaaattctaaaaaccagagcacctcttctcctccaaaggatcgcagctccttgccagcaatggaa

SEQ ID NO: 389032 - DNA, 201 bp, Homo sapiens
ctccacccctcaaatagctaggggtgcccaccaccacacatggctagtttttttatttgtacagatggggtttcaccatgttgcccagactggtctcgaamtcttgagctcaggcaatctgcctgccttggcctcccaaagtgctgggattacaggcatgagctactatgcctgacctcactggtcatttgtaaatgcgtt

SEQ ID NO: 389033 - DNA, 201 bp, Homo sapiens
acaccaccaagcaggggccgacagacacctcatataggtgggtgcccctctgggacaaagctgccacaggaaggatcaggcagcaatatttgctgttctgsagcctccgctggtgatacccaggcaaacagggtctggagtggacctccagcaaactccaacagacctgcagctgagggacctgactagtagaaggaaaac

SEQ ID NO: 389034 - DNA, 201 bp, Homo sapiens
tagcctaactgggagacaccaccaagcaggggccgacagacacctcatataggtgggtgcccctctgggacaaagctgccacaggaaggatcaggcagcartatttgctgttctgcagcctccgctggtgatacccaggcaaacagggtctggagtggacctccagcaaactccaacagacctgcagctgagggacctgac

SEQ ID NO: 389035 - DNA, 201 bp, Homo sapiens
acaaaaggcagcagacaacttctgcagacttaaacatccctgtctgacagctctgaagagagcagtggttctcccagcatggcgtttgagctctgagaacrgacagactgcctcctcaagtgggtccctgacccccatgtagcctaactgggagacaccaccaagcaggggccgacagacacctcatataggtgggtgccc

SEQ ID NO: 389036 - DNA, 201 bp, Homo sapiens
cagcagtcagatcgaaccgtgaggcagcaacctggctggggtaggagcgtccaccattgctgaggcttgagtaggtaaacaaagtggccaggaagctcaarttgggtggagcccactgcagctcagcaaggcctactgcctctatagacaccatctctgtgggcagggcatagctgaacaaaaggcagcagacaacttctg

SEQ ID NO: 389037 - DNA, 201 bp, Homo sapiens
ttggcaggttccacgcccatgtagccaggctcactgctagtgcagcagtcagatcgaaccgtgaggcagcaacctggctggggtaggagcgtccaccattkctgaggcttgagtaggtaaacaaagtggccaggaagctcaaattgggtggagcccactgcagctcagcaaggcctactgcctctatagacaccatctctg

SEQ ID NO: 389038 - DNA, 201 bp, Homo sapiens
aggcaggtggatcacctgagatcgggagtttgagaccagcctggccaacatggtgaaaccctgtctctagtaaaaatacaaaaattagctgggcatggtgrcacgcatctgtaatcccagctacttgggaagctgaggcaggagaatcgcttgaacccaggaggtggaggttgcagtgagctgagatcatgccactgcact

SEQ ID NO: 389039 - DNA, 201 bp, Homo sapiens
cggcactctgggaggccgaggcaggtggatcacctgagatcgggagtttgagaccagcctggccaacatggtgaaaccctgtctctagtaaaaatacaaamattagctgggcatggtggcacgcatctgtaatcccagctacttgggaagctgaggcaggagaatcgcttgaacccaggaggtggaggttgcagtgagctg

SEQ ID NO: 389040 - DNA, 201 bp, Homo sapiens
ttgagaaaagaaggacagtatctctttcggaaaaatcttcagtcatccaaaagactttactgtgaaaagacttttctttactgtaaatttaaaatatgccyccaaaaccacaaaaaagaaaacatgcatattgtaagaaggcgtgttgagttttttgttgattataggtacttgttactagcaccatgctctaaccaattg

SEQ ID NO: 389041 - DNA, 201 bp, Homo sapiens
tcatccaaaagactttactgtgaaaagacttttctttactgtaaatttaaaatatgcctccaaaaccacaaaaaagaaaacatgcatattgtaagaaggcrtgttgagttttttgttgattataggtacttgttactagcaccatgctctaaccaattgagctaactggccattgattataggcacttgtaaattagcttt

SEQ ID NO: 389042 - DNA, 201 bp, Homo sapiens
catagataattgaaattcctgctcccacccaaaagacagaatttcttacttcctgattattttttgctactgatgcttacacagagcttacttctctttgytctcgttcgtgctgctacaggttatatcaggtcaattcttatcagataagaaaattggcacctacgtagaggtggatatgtatgggttgcccactgacac

SEQ ID NO: 389043 - DNA, 201 bp, Homo sapiens
aatacagaaatacattttagataaactcctctcctctgcatgctaaattttgaggactgtttttttaggaacattatgtagcactttttactatcttttgrgcccttagtagaaaccccactaatcgcctgcaaagacacttatcaagcctccttaaagaaacagaggttttatcctcttgccacataatagtaagaatta

SEQ ID NO: 389044 - DNA, 201 bp, Homo sapiens
ataattgaaattcctgctcccacccaaaagacagaatttcttacttcctgattattttttgctactgatgcttacacagagcttacttctctttgctctcrttcgtgctgctacaggttatatcaggtcaattcttatcagataagaaaattggcacctacgtagaggtggatatgtatgggttgcccactgacaccatac

SEQ ID NO: 389045 - DNA, 201 bp, Homo sapiens
ggtttttcaacataaggtcattgggccaagagctggaggctttacaaaaatatgtattcttatgcctatctgacacttagctatcatctctaagaaaagartataggaaatacagaaatacattttagataaactcctctcctctgcatgctaaattttgaggactgtttttttaggaacattatgtagcactttttacta

SEQ ID NO: 389046 - DNA, 201 bp, Homo sapiens
cctgctcccacccaaaagacagaatttcttacttcctgattattttttgctactgatgcttacacagagcttacttctctttgctctcgttcgtgctgctrcaggttatatcaggtcaattcttatcagataagaaaattggcacctacgtagaggtggatatgtatgggttgcccactgacaccatacgtaaggaattcc

SEQ ID NO: 389047 - DNA, 201 bp, Homo sapiens
gcaatcgtcctgcctccgcttcctgagtagctgagactacaggtacatgctgccatgccggctaattttttgtatttttaatagaaatggggtttcaccaygttggccaggctggtctcgaactcctgacctcaagtgatctgcctaccttggcttcccgaagtgctggaattacaagcgtgagccactgcacccagcctt

SEQ ID NO: 389048 - DNA, 201 bp, Homo sapiens
cagggcacaaatatcttgggttccttcaggactggtttttcaacataaggtcattgggccaagagctggaggctttacaaaaatatgtattcttatgcctrtctgacacttagctatcatctctaagaaaagaatataggaaatacagaaatacattttagataaactcctctcctctgcatgctaaattttgaggactgt

SEQ ID NO: 389049 - DNA, 201 bp, Homo sapiens
gctcctgtgttacagatggagaaaaggaagcatccattgtttcaactagcgagtgttttagtctttgtaaaacctactaataaacttctatgctattgtcytaccaggtaccttctcaaaccagatttcatgaggcggcctgatcgaacatttgaccccttctctgaaactcctgttgatggtgttattgcagccacttgc

SEQ ID NO: 389050 - DNA, 201 bp, Homo sapiens
tcattaatattcaccatgatatcaaggttgcctggacttagtcttgctatgttgcccaggctgaagtgcagtagcacaatcttggcccaatgcaacctccrcctcccaggttcaagcaatcgtcctgcctccgcttcctgagtagctgagactacaggtacatgctgccatgccggctaattttttgtatttttaatagaa

SEQ ID NO: 389051 - DNA, 201 bp, Homo sapiens
tagtaaccttgcatctcataagcaactcatgaattcggttaggcaaaggtacctaactcagttttcttttcttttcttttctttttttttttttttttttkgagatggagtcttgctctgtcatgcagtggcatgatctcgactcactgcaacctatgcctcccgggttcaagcaattctcgtccctcagcctccagagta

SEQ ID NO: 389052 - DNA, 201 bp, Homo sapiens
ggcttgagaactcagacttgtaaccactatactcagctgcctctgatgtttctcacactaatttttcttctcttcacacatctttttctttatggtctcastaacaggtttttaagagcaatcatgaacctatcagggcacaaatatcttgggttccttcaggactggtttttcaacataaggtcattgggccaagagctg

SEQ ID NO: 389053 - DNA, 201 bp, Homo sapiens
acttgaaatgttttgtaacaaagagtttaaaatatataaataaattcctagaatattaacttgccaaaaataattgtctgtgatttttttttcctgagcargatttaagaactaatttttccacagctgttgttgagaggcaaagagttcttagggatcatgggtgataaaaacagaccttctcacatgccactggtggga

SEQ ID NO: 389054 - DNA, 201 bp, Homo sapiens
tggcaggtgcctgtaatcccagctacttgggaggctgaggcaggagaatcacttgaacccaggaggcggaggttgcagtgagctgagattgtgccactgcmctccagcctgggtgacaagagcaagactctgtctcaaaaacaaaacagaacaaacaacaacaacaacaacaaaaacatgttgtctttaaaaccaaaaaat

SEQ ID NO: 389055 - DNA, 201 bp, Homo sapiens
catttgctgcagacctctatgaaggtggggaggtgtgaaattccaaactgtttttcttagacattcagccaaacagcaacaactgcaccaacacgactttwtttttttttctgattttaagaacaaaggattaagaacacccagctcctaacttccagattagcaattaagagaaaacaagttattgttaaggaactatgc

SEQ ID NO: 389056 - DNA, 201 bp, Homo sapiens
gaatgggaaaatatctaatttctggcatgcatttgcaactttccattttcaggggaagtaattgtctcgaaatgaaaaaagaaacagaaatcaaaattcaracgctgacatcagatcacaaatctaaggtaagaaaatgcccatttttacagcagtgacttgcagaagacactttgtaattttttagaaggagtacctagt

SEQ ID NO: 389057 - DNA, 201 bp, Homo sapiens
gaaagaggttattgcagatgagaccacacctcatcatcagtgtgtccctggaaccatgcctagttaaaatctagtagtctattttctcaggaagtaaagcrctgtttaatgaatgataggggcaaggaaatctagattaagttggaaattgtcaaaaggaaggaagaatagaaataagttggcagcttgaggccaggtgca

SEQ ID NO: 389058 - DNA, 201 bp, Homo sapiens
aaagagatgaaagttcaagttccataggtcccgtatgtccgtgaatctcaaggtctcagtttcctcctttttaaaatctatttttttctttgtatctaatrccagtgagtgtggttgaatggtctgtatgttatctggaccctctttttaggtatacctggccctctacactccatgatttcacccctgatatttttccaa

SEQ ID NO: 389059 - DNA, 201 bp, Homo sapiens
tgtattacacatattggtgacaccaatatatttttgtttctcaccaagtgtaatcattgtgattacaaaaagaaaaaacaaaaaacctatttttgattctmtttttctcccaaaggcttacttgaagcatttaaagaaacagcagaaggagctaaattctttaaagaagaaacatgcaaaggtacagtgctctacagctac

SEQ ID NO: 389060 - DNA, 201 bp, Homo sapiens
gagatgattttttaaaaaattattatctctttcacttaaattataaagttacaagtcatctctcatccctgttttaagattgtaacccaaagttcaatcaraattttttttttttttttttttgcagcttgccatgaagcagtccaaagaaatggatcagttgaaaaaagtccagcttgaacatctagaattcctagagaa

SEQ ID NO: 389061 - DNA, 201 bp, Homo sapiens
ttactgtaaatttaaaatatgcctccaaaaccacaaaaaagaaaacatgcatattgtaagaaggcgtgttgagttttttgttgattataggtacttgttaytagcaccatgctctaaccaattgagctaactggccattgattataggcacttgtaaattagctttttttttttttttttagtatttattgatcattcttg

SEQ ID NO: 389062 - DNA, 201 bp, Homo sapiens
aaagcctgccttgtacacttaagcacatgactttttatggaagatgcatacccaagaatttaagtagtgaatttttttcccctcaattactgttggcaatygaatgtacagttgtcttgttctccctctgccctagtttcctagaactactgtaacaaataaccacagactgggtggtttaaaacagcagagatttatgga

SEQ ID NO: 389063 - DNA, 201 bp, Homo sapiens
ttccatgctcatggataggaagaatcagtatcgtgaaaatgcccatactgcccaaggtaatttatagattcaatgccatccccatcaagctaccaatgackttcttcacagaattggaaaaaactattttaaagttcatatggaaccaaaaaagagccctcattgccaagacaatcctaagcaaaaagaacaaagctggag

SEQ ID NO: 389064 - DNA, 201 bp, Homo sapiens
tggcacgatctctgctcactgcaacctccgcctcctgggttcaagtgactctcctgcctcagcttctcaagtagctgagattacaggcatgcgccaccaarcccagctaatttttgtatttttagtaaagacggggtttcaccatgttgcctaggctggtcttgaactcgtgacctcaggtgatccacccttctcgtgttc

SEQ ID NO: 389065 - DNA, 201 bp, Homo sapiens
acaacatacagtaatagaggtaacaacccataaaaagcctggaaagggatgctgtgaggctgggtaagaggatcagaaaggggcactggagacaagtggtrggtttaggagcagcagtccgtggcaaacctcagaaacctccctgcaacacagcatggtggtggccatggggcatcagctgatgagttaaatcatactcca

SEQ ID NO: 389066 - DNA, 201 bp, Homo sapiens
ggagaataaattgatgcaatttcggtggagtgcaatttggcaataactaccataggacaaatactcttacccatcattctaacttctaagaatctattctrtaaatatatgtagaggtatgctacgaaatgttcaaagacattcactacaatactttaatagcaaagaactggaaggacaagctgtctaccaataggaact

SEQ ID NO: 389067 - DNA, 201 bp, Homo sapiens
caaaattcatagtccaggctccttcctccttctcctttgtctttcataaaaaaaaaaaaggaagcacattagaagctacaacatacagtaatagaggtaayaacccataaaaagcctggaaagggatgctgtgaggctgggtaagaggatcagaaaggggcactggagacaagtggtaggtttaggagcagcagtccgtgg

SEQ ID NO: 389068 - DNA, 201 bp, Homo sapiens
agcctcccgagtagctgggattacaggtgtgcaccaccacacggggccaatttgtgtgtgtgtgtgtttgtgtgtgtgtgtgtgtgtgtgtgtgtgtgtgtatttttagtaaagataggatttcaccatgttgaccaggctgatcttaaattcttgacctcaaatgatccacccacctcagcctcccaaagtactgggatt

SEQ ID NO: 389069 - DNA, 201 bp, Homo sapiens
cagcctcccgagtagctgggattacaggtgtgcaccaccacacggggccaatttgtgtgtgtgtgtgtttgtgtgtgtgtgtgtgtgtgtgtgtgtgtgtgtatttttagtaaagataggatttcaccatgttgaccaggctgatcttaaattcttgacctcaaatgatccacccacctcagcctcccaaagtactgggat

SEQ ID NO: 389070 - DNA, 201 bp, Homo sapiens
gtgcttatcattagagtacatgatatagcaaggctcagaaatgtatgagcgcatgggggtgggcggggtgtctgtagacacagatataatttctatacttyactggaacacatcactattttatctggggaatatgggataattttgctgtttgtttttagtagtgcatgcttctgtggagggcagattttctgcaactaa

SEQ ID NO: 389071 - DNA, 201 bp, Homo sapiens
tctcccatgttcaggcgattctcctgtctcagcctcccgatagctagaactacaggcgtgcaccactatgcccagctaattttgtgtttttagtagagacsgggtttcaccatgttggccaggctgatcttgaacttctgacctcaggtgatccacttgccttggcctcccaaagtgctgggattacagacgtgagccact

SEQ ID NO: 389072 - DNA, 201 bp, Homo sapiens
cagagtcaaaaattaaaataagccatgaggatttttccatcccaaaattcatagtccaggctccttcctccttctcctttgtctttcataaaaaaaaaaaaggaagcacattagaagctacaacatacagtaatagaggtaacaacccataaaaagcctggaaagggatgctgtgaggctgggtaagaggatcagaaaggg

SEQ ID NO: 389073 - DNA, 201 bp, Homo sapiens
taataataactacctccctcatagcattattgtgaggtgcttatcattagagtacatgatatagcaaggctcagaaatgtatgagcgcatgggggtgggcrgggtgtctgtagacacagatataatttctatacttcactggaacacatcactattttatctggggaatatgggataattttgctgtttgtttttagtagt

SEQ ID NO: 389074 - DNA, 201 bp, Homo sapiens
ggcagatcacaaggttaggagatcgagaccatcctggctaacacggcgaaatcccgtctctactaaaaatacaaaaaattagccgggcgtggtggcgggcrcctgtagtcccagctacttgggaggctgaggcaggagaatgtcgtgaacctgggaggcagagcttacagtgagccaagatcgtgccactgcactccagcc

SEQ ID NO: 389075 - DNA, 201 bp, Homo sapiens
tggaatcccagcactttgggaggccgaggcgggcagatcacaaggttaggagatcgagaccatcctggctaacacggcgaaatcccgtctctactaaaaayacaaaaaattagccgggcgtggtggcgggcacctgtagtcccagctacttgggaggctgaggcaggagaatgtcgtgaacctgggaggcagagcttacag

SEQ ID NO: 389076 - DNA, 201 bp, Homo sapiens
gctgtgaggtccaatatagtaatttctttttttttttttttgagatggagtcttgctctgttgcctggtctggagtgcagtggcacaatctcagctcaccrcaacctctgcctcctgggttcaagcgattctcctgcctcagcctcccaagtagctggaattacaggctcacgccaccacacccagctaatttttggcatt

SEQ ID NO: 389077 - DNA, 201 bp, Homo sapiens
aatcagtttgataatttagaatgctcagattgttaagtgatcagttaagacaaacaaattgaccatttttttttttttttgagatggagtctcactctgtygcccaggctggagtgcagtggcgtgatctccgctcactgaaagctctgccccccgggttcacttcattcgccattctcctgcctcagcctcccagtagct

SEQ ID NO: 389078 - DNA, 201 bp, Homo sapiens
catgcagcaggaaaagcatatctatatattcaaatgccagaatttggagagggcccaaggaaaattgagaggaaagtagaagcattttagaatttctcaakatataaggaaccagcattttataattttatacactctaaagtcctcataagtttcccttttcagtttgccccgtgctctatacctatctagggatactag

SEQ ID NO: 389079 - DNA, 201 bp, Homo sapiens
ataaagagaggtaaaaggttttgcttaaaggccaggttctccacttactgccacagaagagaggcacagtctgggaatgacaggcgttggttgtttgtttygtttcttttttttctgttgagatcaactaggggaaagtttgtcactgaggggtgtgtacatgttttatccttagctttttgcttttctgtatatggtttt

SEQ ID NO: 389080 - DNA, 201 bp, Homo sapiens
ttatctctttcacttaaattataaagttacaagtcatctctcatccctgttttaagattgtaacccaaagttcaatcagaattttttttttttttttttttgcagcttgccatgaagcagtccaaagaaatggatcagttgaaaaaagtccagcttgaacatctagaattcctagagaaacagaatgagcaggtattttac

SEQ ID NO: 389081 - DNA, 201 bp, Homo sapiens
cagcagatgacatctggggctgactggttcccttgggtgggttatcccggacggcttactcacatgctggcagtggatgctggctgaacgctgggagctcmgctgggcctcactgaccatagtatccctgtggcctctctctgtgacttgggcttctcatagcacgatggctaagtcccccagatggaacatctaagagcc

SEQ ID NO: 389082 - DNA, 201 bp, Homo sapiens
ttccctcaccctcttcctgtgcctggagagatacttcacaaaataaaacagtctatctagaaattctgaatccagatactaccagttgaaagataccactrttttattatgactaagaaagaaaaagtagtttccattcactggaaaaaaccgtcagttgaagaacacactacaatatcagaaatattaaatcaaaaaaag

SEQ ID NO: 389083 - DNA, 201 bp, Homo sapiens
tgatgcttgctgaggctttcgatgctatttacagctctgcttttgctagtcacaaaagaaaatttacctcttataacccctaagtcttccctcagaaaacygttaggtgtgaccaggatcagcaaaaactgttagattcacatccattagtttggctactacttaaaaaaagaaacaaacaaacaaaaaaacccagaaaat

SEQ ID NO: 389084 - DNA, 201 bp, Homo sapiens
aaaccatcattctcagcaaactatcacaaggacagaaaaccaaacaccgtatgttcttactcataggtgggaattgaacagtgagaacacttggacacagkgtagggaacgtcacacaccgggccttttggagggtgggggactgggggagggatagcattaggagaaatgtctaatgtaaatgacgagttgatgggtgca

SEQ ID NO: 389085 - DNA, 201 bp, Homo sapiens
gtgatctgcctaccttggcttcccgaagtgctggaattacaagcgtgagccactgcacccagccttcctggacttttaactgcaactgagttgctaaaaagttagtgaaaggggaaactgtgacagtccttggagctttctcatgcaggatctatttttgaaacaaatgaaaggtttccccttactcttacctactcagct

SEQ ID NO: 389086 - DNA, 201 bp, Homo sapiens
tcagagcagaactgaaagagatagcgacacaaaaaacccttcaaaaaaatcaatgaatccgggagctggttttttgaaaagatcaacaaaattgatagacygctagcaagactaataaagaagaaaagagagaagaataaaaaagatgcaataaaaaaatgataaaagagatatcaccaccgatcccacagaaatacaaac

SEQ ID NO: 389087 - DNA, 201 bp, Homo sapiens
caggcatggtggcaggtgcctgtaatcccagctacttgggaggctgaggcaggagaatcacttgaacccaggaggcggaggttgcagtgagctgagattgygccactgcactccagcctgggtgacaagagcaagactctgtctcaaaaacaaaacagaacaaacaacaacaacaacaacaaaaacatgttgtctttaaaa

SEQ ID NO: 389088 - DNA, 201 bp, Homo sapiens
tcacctgaggtcaggagtttgagaccagcctcaccaatatgatgaaaccccgtctctactaaaaatacaaaaaattagccaggtgtggtggcgtgcacctrtagtcccagctacttgggaggctgaggcgggagaattgcttgaacctgggatgcagaggttgcagtgagctgagatagcgccactgcactccagcctagg

SEQ ID NO: 389089 - DNA, 201 bp, Homo sapiens
ctctgtaatttatttcgacaaacaactaaattagaatgatcagaaaaagcccagtgaacagtctcagaaattgtccactttttttttttttgtctaggaarctatggactttgttttgtgttttagaacatgtagtaagcctgcaggttgagaaaatgcatcccagttaatgccaacccaattatttgtgctttttctgtc

SEQ ID NO: 389090 - DNA, 201 bp, Homo sapiens
gacctgggactctgcattcctaacaagctcccagatgatgttgatgctgttggtcttggggccctttgagtagtaagggtttgcaacagtgcttcttaaaygtgtgtgtgcaaaagaatcacagggaaggctgattaaaacgtggattcctatttcccatcctgaagattgattcagccggaggcctgataatttgcattt

SEQ ID NO: 389091 - DNA, 201 bp, Homo sapiens
ttgtcttgctgtttacataacccatgcagtctgcctttctctcaaattcacaaatttacactcagtttatcctcccactcagaccaaagttttggaaatarcaattctcttttgccaccttccctcctctctcgtaacctggagtgaacaccaatgactagaaaattgggaagtgagtagccagacagtagttgtgggcag

SEQ ID NO: 389092 - DNA, 201 bp, Homo sapiens
tggaaattgtcaaaaggaaggaagaatagaaataagttggcagcttgaggccaggtgcagtggctcatgcctgtaatcccagcactttgagaggccgaagygggcagatcatgaggtcaggagatcgagaccatcctggctaacatgttgaaaccccgtctctactaaaaatacaaaaaattagccaggcatggtggcgag

SEQ ID NO: 389093 - DNA, 201 bp, Homo sapiens; identical to SEQ ID NO: 85334

SEQ ID NO: 389094 - DNA, 201 bp, Homo sapiens
agcctaaggcccacacaaatcagagtgttggctgagtgtggtggctcacgcctgtaatcccggcactctgggaggccgaggcaggtggatcacctgagatsgggagtttgagaccagcctggccaacatggtgaaaccctgtctctagtaaaaatacaaaaattagctgggcatggtggcacgcatctgtaatcccagcta

SEQ ID NO: 389095 - DNA, 201 bp, Homo sapiens
ctctgatataaacaattccacggaaaaactgtttgaagtaattagagagttcagcaaggtaaccagagaaacaatgagcaaagcaaaaacctggagacacrcatacactgccattaaccaggtagaatagatagtaggaaaacataaatcccatttatattagcaaaagacatgctggttcctaccaccttccagctggtt

SEQ ID NO: 389096 - DNA, 201 bp, Homo sapiens
tctagatttctttaggtcataggaactgtaagactactcaggaaagtctatagcctttatttttaatccaagtgtctgccctgaatttattccttttctawcctagtgaactcaactggaagaactagacaaaaacatgaatgtcggcttgaagaagccttgtcaaacatagagaacattctgcctgttccttgcactccc

SEQ ID NO: 389097 - DNA, 201 bp, Homo sapiens
ctcctgtaattcttagacataacatttaattttttaaaaatatcatcatccatactttcttgttctgccattcagattctttctttaagtatttattattygtcaaccttttatccctcacaattacagtagacaatagtattcttttttttaatagtgtttccttctatttgatgtcttcttaacattaaggaagtacct

SEQ ID NO: 389098 - DNA, 201 bp, Homo sapiens
cacgcccgtgtcaactgtggttaagtgtgggaaccaggataaggacaactgaaggcatggattgagttgtaaggggccgcctccttttccctaggcccagwtattgtcaacatgagggtttgttctagagctactgtcttatctgccacattcctttttcataagaaggcaatttggtagcatcagaatttatcattgttt

SEQ ID NO: 389099 - DNA, 201 bp, Homo sapiens
ggagtggtgatgactcttaactagcatgctgccttctagcatctgtttaacaaagcacatcttgtaccgcccttaatccatttaaccctgagttgacacascacatgtttcagagagcacggggttgggggtaagattatagattaacagcatcccaaggcagaagaatttttcttagtacagaacaaaatggtgtctcct

SEQ ID NO: 389100 - DNA, 201 bp, Homo sapiens
ccatctggatgttgaatgggcatttccaatgtatatatacaacatatttcgatccttcctacccctagatatgttcctttcaaagcctataaaatagtacygttatttacccagtcaaaaccactgggctcatgttggacttgtttcattctttcacatcatgtctggttcatttgcaaaacctgtaagatccagcctcaa

SEQ ID NO: 389101 - DNA, 201 bp, Homo sapiens
ccctggcctctggtgtggaagccaagaaaggtgagagagagccgttgggttccttatcttctgcacccaccttaattacacagtgtacaatatctatagckttaggaaatatataaattcgaagttctttgtgggaaagaaccttttacatagtgatgttaactaattcatccccactctcttccagaccctcccataggt

SEQ ID NO: 389102 - DNA, 201 bp, Homo sapiens
ttgtacataagcaatacttattctaatgtgataaaattatctacacacagtcaaagcaacgtgtcaatctgtagaaactaaatcaaacagtttgtggtatrgtctaaagataaagcaagtggtctaccctcttctcaagtggttctcctggcactgtgtaaaccagtccccaaaatttaatgtgtataaaaacttcctgga

SEQ ID NO: 389103 - DNA, 201 bp, Homo sapiens
cccaagacattttttctaagccagagataaatgtaaacattctcccatagtatttccctcaaaggtttctttctgttctcctgtgaccctactcctaatcsgtgtcccaaatctccccttccaaagcaaggcctggaatggattcagtccattagctaaaccagtgttgggggcactggcagaaacaaaccaggcgtcagt

SEQ ID NO: 389104 - DNA, 201 bp, Homo sapiens
ctttagctcggttgaggtcaaattatcttcaatttggagttactgctaacttaattagcaagggtcttaaaaatttatcttattttgaaaactgtacttayttgttgtaactttctatttttatttgtgcaactgtatgggggtacgtgagaaaactttacatgtatacaatgcccagtgatcaagtcagggcatttaggt

SEQ ID NO: 389105 - DNA, 201 bp, Homo sapiens
cctgccattgcactccagcctggccaacagagcaaaactccatctcaaaaaaaaaaagaaaagaaaaaatgtcattctctggatgttattctcagataagyaactttgtttaagggccttatatacatggaaatgacaccttcttcagtttgaaaacaccaaatattccagccatgataaaacctcatgaatttgaactgt

SEQ ID NO: 389106 - DNA, 201 bp, Homo sapiens
agccatatctgaggagagtttctcatcattaatattcaccatgatatcaaggttgcctggacttagtcttgctatgttgcccaggctgaagtgcagtagcrcaatcttggcccaatgcaacctccgcctcccaggttcaagcaatcgtcctgcctccgcttcctgagtagctgagactacaggtacatgctgccatgccgg

SEQ ID NO: 389107 - DNA, 201 bp, Homo sapiens
catatctaattggattaataaggttcaccaaaatattttcttaggaaaaaaatctgtgtcaatttacatccaagcctcaaagtctctacttgtcctgttcygcactaaaatatttaaagaaatagccttcaccctcctttcaatgatatttgcaagataatataggactgtggcacttctgatatattttgagacctgcag

SEQ ID NO: 389108 - DNA, 201 bp, Homo sapiens
ttttcctctcattcctaagcacagtggtgctctaataagacaagaagtcagttggcaagtgtaacacagatgctctgatgccttgaatttggctaatattscttcttcattcaaacgtcattctgtagctttccctgagtttctggtgtcaaaattcaaagcaatggttgtcaaactttcgtgtgtgttcgaatcttctag

SEQ ID NO: 389109 - DNA, 201 bp, Homo sapiens
aacaactttgtggtacaaagagccctattcctcatatctaattggattaataaggttcaccaaaatattttcttaggaaaaaaatctgtgtcaatttacakccaagcctcaaagtctctacttgtcctgttctgcactaaaatatttaaagaaatagccttcaccctcctttcaatgatatttgcaagataatataggact

SEQ ID NO: 389110 - DNA, 201 bp, Homo sapiens
aaaacatgagatttatgcacagactttttttttttttttctctcattggctatcattagtgtcagcgttttatgtgtggcccaagacaattctttttccartgtggcccaaggaagccaaaagatttgccactgctggcctagataaataattctactttttagacttaaagagaagcagagaatctatgaactatatctc

SEQ ID NO: 389111 - DNA, 201 bp, Homo sapiens
tacacaaatagaagtactagattgggtgctaggagcattcttcctttgtcaaatccaatgagactccgagtgctgggattatctttgctgctttatctgtrggtgccaacgccaccgtagatggcatttgcccattgcaaggctttatcagtgttagacactgctgtaggagacaggaagcagttccagggctaatggcaa

SEQ ID NO: 389112 - DNA, 201 bp, Homo sapiens
gaagtcaggagtttaagaccagcctggccaacatggcaaaaccctgtctctagtaaaaatacaaaagttagccaggcatggtggcaggtgcctgtaatccyagctacttgggaggctgaggcaggagaatcacttgaacccaggaggcggaggttgcagtgagctgagattgtgccactgcactccagcctgggtgacaag

SEQ ID NO: 389113 - DNA, 201 bp, Homo sapiens
ggaaagtgccctggattgatgtcacgacatcctgaagttcatgttcctaactccaaaataaatcactgagtaatgttgcacatacatttttgaacttcatkttaaacctgctaatttcttcataaagcaaagaacattaacctgtgctccatagataggctttatgagatctgtgaattcattctaattgcatgcaatttt

SEQ ID NO: 389114 - DNA, 201 bp, Homo sapiens
agaaaaagagggaatcctccctaactcattctatgaggccagcatcatcctgataccaaagcctggcagaggcacaacaaaaaaagagaattttagaccartatccctgatgaacatccatgcaaaaatcctcaataagataaatactggcaaaccaaatccagcagcacatcagaaagcttaaccaccatgatcatgtcg

SEQ ID NO: 389115 - DNA, 201 bp, Homo sapiens
tgttcgtaccctgccaagtgacaagtctgagtatacaccctacagcagcctttgcctgtgtgcacaagaagatatgcaccatacttcatccactcatctgyttattcaacagacacttattgtgtcaggtattacagggcccacgcacccgatcgttgtagcgttgtttgaaaataacctaatttttgttaatggcaatga

SEQ ID NO: 389116 - DNA, 201 bp, Homo sapiens
ggtgcctgtaatcccagctacttgggaggctgaggcaggagaatcacttgaacccaggaggcggaggttgcagtgagctgagattgtgccactgcactccrgcctgggtgacaagagcaagactctgtctcaaaaacaaaacagaacaaacaacaacaacaacaacaaaaacatgttgtctttaaaaccaaaaaatgaaaa

SEQ ID NO: 389117 - DNA, 201 bp, Homo sapiens
acacttggacacagggtagggaacgtcacacaccgggccttttggagggtgggggactgggggagggatagcattaggagaaatgtctaatgtaaatgacragttgatgggtgcagcaaaccaacatggcacatgtatacctatgtatcaatcctgcacgttgtgcacatgcaccctagaacttaaagtataataaaaaat

SEQ ID NO: 389118 - DNA, 201 bp, Homo sapiens
gtttagttacttgagagtcaaatcccctgttagagatccctccccattcaggagatcttgcttttttccccagatggcatctgggtatgagggaagctcaygtgtccacctggcaattggtaggagcatctggtttccccattgttggacaggtcctaactgcactctactgcagctttgcaaagtgggccttcccacccc

SEQ ID NO: 389119 - DNA, 201 bp, Homo sapiens
ctggacttagtcttgctatgttgcccaggctgaagtgcagtagcacaatcttggcccaatgcaacctccgcctcccaggttcaagcaatcgtcctgcctcsgcttcctgagtagctgagactacaggtacatgctgccatgccggctaattttttgtatttttaatagaaatggggtttcaccatgttggccaggctggtc

SEQ ID NO: 389120 - DNA, 201 bp, Homo sapiens
gtggcatgatctcgactcactgcaacctatgcctcccgggttcaagcaattctcgtccctcagcctccagagtagctgggattacaggagtgcaccaccaygcccggctaatttttgtatttttagtagagttgggtttttgccatgttagccaggctagtctcgaactcctgacctcaggtgatttatgcgcctcagcct

SEQ ID NO: 389121 - DNA, 201 bp, Homo sapiens
ccgtcattgattattctcacagctcagatatagggaagatgaaagctgctgcctatagcatcttgcatcctcttgcttccacatacaagaaatgtgaactkcaatcccctaaaaaggtcagagtttccattctagtgaacacatttgttcagcccaggtggggtgggacatgacaaaaaccaagagtgggtctagaaccat

SEQ ID NO: 389122 - DNA, 201 bp, Homo sapiens
acttaaaagttaaaccttgagttcctcattcacactagccacatttcaggtgctcaagagccacagatggctagaggccgtcagttggacagacccacgcrtggaacattcccattattgtgcaaagctctatgaggaaggctgttcttggcacgcagatggaactgtcctcttctgtagagtgtggtttttttttttcta

SEQ ID NO: 389123 - DNA, 201 bp, Homo sapiens
tgtaacaagcaatcacaaaagtcagtaatttaaataagtaagcatctattatagctcatgaggttgtctgggtggcttttctggttatgggaggattagtrtcagtgactcagctgatcttagctatgcttattcaaatgtttggggttcagctaaagtgtcattggctgggacaagtgggctgtcttccttgtggactct

SEQ ID NO: 389124 - DNA, 201 bp, Homo sapiens
gagctataagaaatggcacccaggggccaggtgcagtggctcacacctgtaatcccagtgctttgagaggccaagacaggaggattacttgagcccaggasttcaagacatagcaagaccccatctctattttgaaaaaagaaatggcccctgccatcagagggcttacaggtgttggcaagatacaacacccatatgaac

SEQ ID NO: 389125 - DNA, 201 bp, Homo sapiens
ggacttggcatttgctgttccttctgtctgtatcgtgctctttcccagttacacacagagctttctcccccacagccctcacgtgtctgctggaaaattgycttagcaggagctccccatttcaccagccttcggcacttcctcactccttttcctgctctgtgtttcttcttagcacgacttacttaccataatatccat

SEQ ID NO: 389126 - DNA, 201 bp, Homo sapiens
gtgaaaaattacaagagctagttgcaaattgtaagagaacagcaggaggtggccccaggaattctcctgtgggttgaaaaacgtcatggccctcaaacatygtcacttccagactccctcacaggtaaagaagaaaaaggtagtacctctttccttcctaagaacatataataaccagctgctgctggtaggataatgtct

SEQ ID NO: 389127 - DNA, 201 bp, Homo sapiens
cacttcctcactccttttcctgctctgtgtttcttcttagcacgacttacttaccataatatccatttattcatttattttcttcctctgtctgcaggacrgcactgttctgttcactgctgtatctgcaacatctagaactgtcagtgcccgacacttagtgagtgctcaataaaaacctattctattgaggtatttatg

SEQ ID NO: 389128 - DNA, 201 bp, Homo sapiens
ccttatgtaaatcttgcccagtagcctacttctgaaatagatttatttttgctttttacccataagaagtggtattttgacagtgattgtgaaaaattacragagctagttgcaaattgtaagagaacagcaggaggtggccccaggaattctcctgtgggttgaaaaacgtcatggccctcaaacatcgtcacttccaga

SEQ ID NO: 389129 - DNA, 201 bp, Homo sapiens
ggtatttatgttgactaaatgaattccaacccaagtgataaaggtgtataaaccttaatgttgtgcaactcaagtttgtacagttcagttgttagaacagmcaggaagatgatcctttgacaacaagactgagaaaatgtgattcaatgatagtctaaaggaaagacagaactctgggatcccgtgtgttatttttagagc

SEQ ID NO: 389130 - DNA, 201 bp, Homo sapiens
aactagaagagctgatgtagagagggcatagtgtgtggctggagcagacggcatttgctgcagacctctatgaaggtggggaggtgtgaaattccaaactrtttttcttagacattcagccaaacagcaacaactgcaccaacacgactttttttttttttctgattttaagaacaaaggattaagaacacccagctccta

SEQ ID NO: 389131 - DNA, 201 bp, Homo sapiens
aaggccatccctcttgccgccaagtctggcacaaatcacatgagttcaagctaaatcaagctccatctgaaaccacaactttgtttaactcttttttctgytcagtcttctctcactctcttcatccctaaaacatcccgttattaaagtagttagtggtgcttctacgaaacttaagacagaaactttactaaatcatca

SEQ ID NO: 389132 - DNA, 201 bp, Homo sapiens
tactgattgttgctcctgtagttaccacgtgggctctaccccatgtcagaaaggtgtgatcgaaatgaagggtggcttttggggccacgtttcaatgaccrctgtatactcttctcaccagtcccataacctgacttttagataaaattgaaaactgaattgtttaaactcagaagcaccatcatctccaagaaaaatccc

SEQ ID NO: 389133 - DNA, 201 bp, Homo sapiens
gcatggaagtacaagagagaagtctataggtgttcttcccacgcctctccatggattggggtggggtggggaataaactctactccaggagcctttggggraagtgatgtcatttgagaaagcaagcctccatttctttccagaaaactgtcttaatttgagtcaccccaaagaccctgagagaaggcttccagtgcaagt

SEQ ID NO: 389134 - DNA, 201 bp, Homo sapiens
ctaaaaaaaaaattgattctctatttaaattgagtcctcctggctttgctaacatcctgcaaagcctccaagccctgcaaccagttcctctactgatattyaaccacagcattaccccaagggatcagaggcttcagcctcgtctggggacttcttagaaatgctattgcatttcttaaaattcagttttaattatactgt

SEQ ID NO: 389135 - DNA, 201 bp, Homo sapiens
aagcctccaagccctgcaaccagttcctctactgatatttaaccacagcattaccccaagggatcagaggcttcagcctcgtctggggacttcttagaaakgctattgcatttcttaaaattcagttttaattatactgtataggccagtggctctcaatacctgagaacttattagagatgcagattcccaggccctgcc

SEQ ID NO: 389136 - DNA, 201 bp, Homo sapiens
tttgttttgttttgggtttctttaacgtttccaagactgaaagttgacattttcttgttaattgtttttcttgaagctcttctgagttcattggaaacaawtcaatgagggggggcattaagctgtccggagtgcagagctgtgaatcagaacaaataattgagtgcatattcttaagtttaaatgtcccatcccacctaa

SEQ ID NO: 389137 - DNA, 201 bp, Homo sapiens
tgagaacaatgtcttataattaatacattttccatttttaaagagcacctctcgtatctattctcatttcccattatgaagatcttggaagtcagataggkccagtctttttccccaattgacagaagaagaagctgagatctaggagccaaaggagtgagtagcaagagcagaacttgatacaggccccctggacccctg

SEQ ID NO: 389138 - DNA, 201 bp, Homo sapiens
tttgcctaagatgaaaatctgcagtcaaacagaaactgtttgaggatctggctacaactgttgttgccatgacaacacctggcctagcatcactcagatascaggatgacttagtgtattaccctagctcctcctggtatgctcctgttatacactggtttgattttattatttcctgtatgtttaaggcattgctgtgct

SEQ ID NO: 389139 - DNA, 201 bp, Homo sapiens
gccacattcctttttcataagaaggcaatttggtagcatcagaatttatcattgtttttgtccaaaaatgtgtgtcccaggccaggcgctgtggctcatgyctgtaatcctagcactttgggaggccgaggtgggtggatcacctgaggtcaggagtttgagaccagcctcaccaatatgatgaaaccccgtctctactaa

SEQ ID NO: 389140 - DNA, 201 bp, Homo sapiens
aattaaaactttttcttaggtttcaatgtaaccgcaaatccccatgatctgtgaggtggattttcatgggcgctcagctcttgctgttttagaaatcatcyagcctccttcacagttgtgtttgaaatgctgtgctcttcatggggcacatggttttcagtgctggagcctttctcaccactgcatttcatgaacttgaca

SEQ ID NO: 389141 - DNA, 201 bp, Homo sapiens
tttgaggtagagcttttcattctctgattacagattattttaaatgtggctattaaaaatcaatttccttttttgatatgcagcactcttcgtatctaccyatccatatgtctcacatatatatgcctctggccagtggagaaactgaattacaatgaaaaattatcttaaagatgccaaggcaggccttggctccctaat

SEQ ID NO: 389142 - DNA, 201 bp, Homo sapiens
tatgtggatctcagcaaggaagaaagctattcagctgtttcctaaactttttttttaattttttgatgagacaccattaacatctttcagaaccagtgtgrcactgaataaaagtcagtaaattatatcatagaggcattattcagctcaatatttttctagaagtatcaaaacaatgatgtaatctaaggattcatttat

SEQ ID NO: 389143 - DNA, 201 bp, Homo sapiens
aacaaacgaaaatcaactgagttctcctgaaaagccaataagcatctggaagtctgtactaaggaattgctatcttcatttccattcttagagacacctamattgatgctttcaactctatatgaaagtcaggaagcatggcagggaggaagggaggggaaaagcagggcctacatggagagtctttactaggagagacca

SEQ ID NO: 389144 - DNA, 201 bp, Homo sapiens
gtagcttgatctcattacttcttcagcagtgcccagaaactcagcaacaactgtggacaaagtacagcttagggagttgcaagcctgaaattatcacaatktatatggtctgggaccaaaagtttgaagaccattaagttatgacactgtaacagttggctattgatgtgtaacaagcaatcacaaaagtcagtaatttaa

SEQ ID NO: 389145 - DNA, 201 bp, Homo sapiens
tctattttgaaaaaagaaatggcccctgccatcagagggcttacaggtgttggcaagatacaacacccatatgaacagttaagtcagataacaaagtagcrtatgacacatattttaaaatgtcatgggcactaaaggcatccagctcagaggagctctaccttttcagagtggtcatggagacttttcaaaatggtaggg

SEQ ID NO: 389146 - DNA, 201 bp, Homo sapiens
agaaagaggttattgcagatgagaccacacctcatcatcagtgtgtccctggaaccatgcctagttaaaatctagtagtctattttctcaggaagtaaagygctgtttaatgaatgataggggcaaggaaatctagattaagttggaaattgtcaaaaggaaggaagaatagaaataagttggcagcttgaggccaggtgc

SEQ ID NO: 389147 - DNA, 201 bp, Homo sapiens
ggcatgctaagggcaaggtaagaattatgatactcatgcttctgttataacacacctatcacattgtgttaataaagtattaacaaccagagaaagaggtyattgcagatgagaccacacctcatcatcagtgtgtccctggaaccatgcctagttaaaatctagtagtctattttctcaggaagtaaagcgctgtttaat

SEQ ID NO: 389148 - DNA, 201 bp, Homo sapiens
ttttctctgaggaacctgttagttgcatgacctgctatgggtgatgcaataggacagagatcatatactacttaggatccttaggggcttgtccatggggygagctctgttctgtctctgtggcacatctctaggcctctgaaatcctgaaaaggtctacgtttgtttgtttgtttgtttgtttttgaaactccctacttt

SEQ ID NO: 389149 - DNA, 201 bp, Homo sapiens
tcatacctttgctttttgaagtttcactgtacataaactttctttcatgaacaaaattactaaaaatattgtataaaattaccttcaggctgtgtataagwtgtatataaaacataaatgaattttctgtttagacttgggtcccatccccaggatacctcattatgtatatgtaaatgttccaaaatctgatatccaaaa

SEQ ID NO: 389150 - DNA, 201 bp, Homo sapiens
taactgaatcaggtttctgctatctgaactcagattttatgttcatttattccgtttggggatagcaggagtaggtgtcttagaatcaaagtatgttaatktttctagctaccgcatcttactctatttaacatcccaacatttgctggaaactgaggagtacaagaaacaaggaggacccaaatttatgtacaaaagtta

SEQ ID NO: 389151 - DNA, 201 bp, Homo sapiens
aaacatagcactcagatcaagcaagatgtcctggttgcttttagccaataaaaaggcattcctgattaaacacattggataccctttttgtaatgttgctrttttgtaactgaatcaggtttctgctatctgaactcagattttatgttcatttattccgtttggggatagcaggagtaggtgtcttagaatcaaagtatg

SEQ ID NO: 389152 - DNA, 201 bp, Homo sapiens
aagtcaaaattgctttgctaaacttgaattgtgttgagtgaaagacttactgcaatggttccagaagaaggaatttattctttgtttcactaaaaaaaaaattgattctctatttaaattgagtcctcctggctttgctaacatcctgcaaagcctccaagccctgcaaccagttcctctactgatatttaaccacagcat

SEQ ID NO: 389153 - DNA, 201 bp, Homo sapiens
taccataaatattctatttattttccctgtttttccacttccacttgtcttcactcctcactgttttctgctgtgtgtggggagactttaccttaaaagayagagaaccaggtaatgaaactcaagcccaccgatttagattccttttagtagctcttatattgaaagtcctatttagtttatagaattacctatagattt

SEQ ID NO: 389154 - DNA, 201 bp, Homo sapiens
tcttcctctgggccagctccctgctgcctgatgagatcctggaaatcaccagctcctgaatttcctgtggctgtgaaatatcctcttacccaacctccctrcagctgcctgcattgcttttatgttgcctgtaactttctttcaaatacttcaacacatgcagtggggtgtgtgtgaattttcatccaaaaccagggaatg

SEQ ID NO: 389155 - DNA, 201 bp, Homo sapiens
agaatttggagagggcccaaggaaaattgagaggaaagtagaagcattttagaatttctcaatatataaggaaccagcattttataattttatacactctraagtcctcataagtttcccttttcagtttgccccgtgctctatacctatctagggatactaggtacatatgagtgtgtgactgtgtatatgtgaatagag

SEQ ID NO: 389156 - DNA, 201 bp, Homo sapiens
aataatctcaggacttcctgatgcagtttaaacttgttccatctgtcctcttccttaagggtgctaaaatgtcatattttattaaatatttgttgaaaaamccagttgcatattcacagtgatatctttcttgtggccttttctgtactacagaaaatattagtcagacttcaagaagaaaagctctggaggggaaggggg

SEQ ID NO: 389157 - DNA, 201 bp, Homo sapiens
ggaagatgaaagctgctgcctatagcatcttgcatcctcttgcttccacatacaagaaatgtgaacttcaatcccctaaaaaggtcagagtttccattctrgtgaacacatttgttcagcccaggtggggtgggacatgacaaaaaccaagagtgggtctagaaccatggggctcttcccagggctatcactatgagatag

SEQ ID NO: 389158 - DNA, 201 bp, Homo sapiens
gaataataggactagttattttaggatgacgggccagcctgtgcctagtgaaagcttagaaatgccaatagcagactgagcacggtggctcacgcctgtarttccagcactttgggaggccaaggcggacagatcatctgaggtcaggagttcaacacaccctggccgacatggtcaaaccccctctctactaagagtaca

SEQ ID NO: 389159 - DNA, 201 bp, Homo sapiens
agttgataggcatctagttcacgcctggcgtaactttccaacaaaactccagggctctactgacacctgctggcatttcatctactttatgttaaaaaaamcccaacaagacaaagaatcattaatatttttcctgcagtcctttgcccttgttatgttacttgtactttacctgaacgataatagaaggggcctttacca

SEQ ID NO: 389160 - DNA, 201 bp, Homo sapiens
tttatatttattaaatttaaatagccatatgtgtctagtggataccatactagacagtgcatatagagtatacgtctatattactatctattccaagatakttttccttcctcagcactaagccgcaaatctaagcagtcaggctgtaaacctaagaaggtaaggaatcagcttatgtgtgggccaccgttctatttaacc

SEQ ID NO: 389161 - DNA, 201 bp, Homo sapiens
tgagataggaaatctatagagtctgtgttccctggagtattgatattccctcttcattccacaggaacaagttcaagatgaagctcagcaccatcacactyagcattttctagaaaaaaaaatgttttttttcccctaggaaaaaaaagaaactcatcaatatacatcattagatttatatttagctaaagaaagatagtg

SEQ ID NO: 389162 - DNA, 201 bp, Homo sapiens
gttgaccaggctgatcttaaattcttgacctcaaatgatccacccacctcagcctcccaaagtactgggattacaggcatgagccaccgtgaccggcctcygctttattttcttagtactccttccattcatcattcttcaataactattttaaagcttattaagaataaattttgttaggaatgcctatcaggcatatga

SEQ ID NO: 389163 - DNA, 201 bp, Homo sapiens
tctagtaaatgcccttttagagacccaaattcctctactgccatgcacaatttcccttcacttgtccttgtaaaacagtggagtgatggtatgaactacamgtgaggtccaagtccttatacagaaattatgtgagcacatcgctgtttgctctgatcaccctggcaatgaaagaatgtttttctttttaaggctttgctg

SEQ ID NO: 389164 - DNA, 201 bp, Homo sapiens
cttaaccagagttgacattcaaatacaatttattcaaaattctctggtcatttattttatatgtgaagaaaccagggacagacattatgcggtgtcagggwcttccctgtagataacagaagaagaatatgagaactgtctttttccaaatctctgatcttctttatagcttcttgacttattcaaaatatacttatattt

SEQ ID NO: 389165 - DNA, 201 bp, Homo sapiens
tccagccaaactaagcttcataagtgaaggagaaataaaatcctttacaggcaagcaaatgctgaaagattttgtcaccgccaggcctgccttataagagytcctgaaggaagcattaaacatggaaagaaacaaccggtaccagccactgcaaaaacatgccaaattgtaaagaccaacgaggctaggaagaaactgcat

SEQ ID NO: 389166 - DNA, 201 bp, Homo sapiens
taccactggaaattaaggaggcgcccatgtgatcagtacttggcagcactaggagctgggagtgatgagtcctcatgaattctcaagacaaggctggctgstgtcaccgtgcagttgcatttcccaccaccttaatatattattacagagcaataatcgagcagaccaatcacaaataagtaccaacaatgtgttttgctc

SEQ ID NO: 389167 - DNA, 201 bp, Homo sapiens
gggtcccagtaacctcaaataaaaaattccaccacagatttgtccctctttgaagcaagagtacctggcttttgtgtttccatattaggcagtcattggcygcctgagactggggggaaggtttgtgtgtcctctatagaaggtgccaagtgcaagccctttagacacagctggtgaaggggatctgaggagctgtcaata

SEQ ID NO: 389168 - DNA, 201 bp, Homo sapiens
aggccgaggcaggtggatcacctgagatcgggagtttgagaccagcctggccaacatggtgaaaccctgtctctagtaaaaatacaaaaattagctgggcrtggtggcacgcatctgtaatcccagctacttgggaagctgaggcaggagaatcgcttgaacccaggaggtggaggttgcagtgagctgagatcatgccac

SEQ ID NO: 389169 - DNA, 201 bp, Homo sapiens
ctgctctgtgctgtctacttgtttgtcattgttggcctagacctttgttgttttagctctttgttgtttatttttctctgctgtaggactctttttttctsttttccttaataagttacagttataacaaacggcaaatgagtcgcatttaccccaagggaggccgagtcgattccagtaattacatgcctcagattttct

SEQ ID NO: 389170 - DNA, 201 bp, Homo sapiens
ggctgccagatggtttcactgaactatcaaaccccaggtaggagctgatgtccagtgaccccaaattccatgagaacactttgacaggatggtgccagcamttcccatcagttggctgtgggcattttttaaaggaagcagacatatggcaaagcaatgtgttattggatttatataatggtgagaaataaaaaaaaaaaa

SEQ ID NO: 389171 - DNA, 201 bp, Homo sapiens
gctgtgacaatctgcccaaatgaaaattgtttttataatccacacagtgaactgtgatcttaagcatcatttgtaaatgtgaaatctgctctgtgctgtcyacttgtttgtcattgttggcctagacctttgttgttttagctctttgttgtttatttttctctgctgtaggactctttttttctgttttccttaataagt

SEQ ID NO: 389172 - DNA, 201 bp, Homo sapiens
gtcaccgtgcagttgcatttcccaccaccttaatatattattacagagcaataatcgagcagaccaatcacaaataagtaccaacaatgtgttttgctcartggaggcacccagtcatctcatttagctagggttgccagataaaatagaggacacttagttaaatatgaattttagataagaaacaaaaatattttagta

SEQ ID NO: 389173 - DNA, 201 bp, Homo sapiens
tttttaggatttatgtttcttttgcttatttgccatgagaaactgttagctaaacttaaagaagattttattgtgcacctactgtggaagggtgtggaccrtgtcttgagaagtgtgatgcctctgaacagagcattttcattctgggctttgctgctcctctggtgctcagggcagatggggatacttctctggcttcgt

SEQ ID NO: 389174 - DNA, 201 bp, Homo sapiens
aaatctgcagcacgtatccgtgggtcctactgaagtcatcaacttatatgttttcttccttgtgcttgtagggcctggtcactgtagaagatgagcaggcrtggatggcatcttataaatatgtaggtgctaccactaatatccatccatatttgtccacaatgatcaactacgcccagcctgtaaagtttcaaggtttcc

SEQ ID NO: 389175 - DNA, 201 bp, Homo sapiens
ggatcacaggtcaggagatcaacaccatccctgctaacacagtgaaactccgtctctactaaaaatacaaaaagaaaaaaaaaattagccgggtgtggtgkcaggcacctgtagtcccagctactgggaggctgaggcaggagaatggcatggaacctggaggcagagcttgcagtgagtcgagatggcaccactgcactc

SEQ ID NO: 389176 - DNA, 201 bp, Homo sapiens
aagaataaagaaaacatggacaggatacatcctccacatgtgttctttaatacttaagtggacagatttcaccctctgaggattccccatgcatccctctyttctgcttctcacttccttccaggggttagggtttacacatggtctctgggtacagttggaaactctttccacagtagtgatgggaattctttaccaaac

SEQ ID NO: 389177 - DNA, 201 bp, Homo sapiens
tgtatggtcccaaggagagcttatttccaaacttgcaggttagctaccagatagaaaggaacagtggggtgagtgtgaggttctgccatttgcaaataggygtgcaatttgctgttaggatattgagaagaaaagatgggggtaacgaccatttgcaccccagatggatataaaaatgctcattaaaatgtctatttttgg

SEQ ID NO: 389178 - DNA, 201 bp, Homo sapiens
tctgtgtggatgcattgagcagtggcatgtgctgtggctcctggcatttctgactctcctttgcctccttccctgcccagctgcttcattctgctctgcarcttccattctgcatccctgtgagactatctccatactcccttgacattactcttttcatatttaacagaattgtcccagaagacctcatttttctcaatc

SEQ ID NO: 389179 - DNA, 201 bp, Homo sapiens
cttgcaggttagctaccagatagaaaggaacagtggggtgagtgtgaggttctgccatttgcaaataggtgtgcaatttgctgttaggatattgagaagawaagatgggggtaacgaccatttgcaccccagatggatataaaaatgctcattaaaatgtctatttttggaaaatggcaatgatcaactgcatttgaccct

SEQ ID NO: 389180 - DNA, 201 bp, Homo sapiens
ttgagaagaaaagatgggggtaacgaccatttgcaccccagatggatataaaaatgctcattaaaatgtctatttttggaaaatggcaatgatcaactgcmtttgaccctctgaatgtactggcaatcaaacttctacttgtctcatactttctagaaccacttcaattcgaaatggaaactagggtaatggtttttcaag

SEQ ID NO: 389181 - DNA, 201 bp, Homo sapiens
ttgttgcctgggcattttaacctaaatctctaaaaatgtaaatagtttgcttcaaatgatttttgtcacctttcttaagaaaaggaaatgaaggccagctygctgtgttacacagtttttattttagagaagctcaccaacactgcctcaaccaggcacaacattagcatgaataattaactaataaattcaattctacaa

SEQ ID NO: 389182 - DNA, 201 bp, Homo sapiens
acttgaagaaagattgaagcctggtactattttaataagtcctatttgaaatataaatttcagtttgaaaagtaaaatcttacatggttaccctaagcccrttcacatggtcttgcaaaaattcacaaaataagcataattaaaccttgggcttgatttattcagcatccctcaggcaggcacttttctccctcaaggtga

SEQ ID NO: 389183 - DNA, 201 bp, Homo sapiens
aaaaataattctgtattggattttttattcaaactcaatactatttgagcctgctcttactgaagaaactaagtgtttcagcttctgggaactattacatygaatttcattaatagcataatatataaataaatataaatctcattgtccaaactggacagtgcattgtcctttcggttgattgacactggagaaaatatt

SEQ ID NO: 389184 - DNA, 201 bp, Homo sapiens
ctcaggcaggcacttttctccctcaaggtgagttggaggaaatatttatattcgttctttggggtatttcccagagcaaggccagctgtagccaggtgttygcacacacagaatctggcagcatgataactagaaacactgatgtacacgcactgttttttagtgagatggcctggcagtgcctggaagttggcctcctgg

SEQ ID NO: 389185 - DNA, 201 bp, Homo sapiens
aattgatttttagttttaccttcattctttgtttgacttcttacaaagatgataactagggtcctgcagaattgggagatgggtggagggcaggagagagrgataaaaacaaggaagagagggaaaaggccttaggtggccacaggaatcaaggagtagctttactttcttgttgctggtaatcttcccccttcctcacac

SEQ ID NO: 389186 - DNA, 201 bp, Homo sapiens
gaagaggttggtcttggtgtctcaggggtggcagaggtggaggaggtggaagtggagtcaggagaggcaggcacattggtgtaacttttactgaaaaaaaatccatgtataagtgggcccacatagttcaaacccatgttgttccatgaccagtgatatatgtttgagggttgggggtggggggatgtatacttcaaggga

SEQ ID NO: 389187 - DNA, 201 bp, Homo sapiens
aaaagcaaatgttaataagaaaatcataaggaagaaaaaatatattattcatgaattgaaagtggatcatcataaaagtctttatcctcatcatcctcackttgagtaagcagaggaggaagaagaggaagaggttggtcttggtgtctcaggggtggcagaggtggaggaggtggaagtggagtcaggagaggcaggcac

SEQ ID NO: 389188 - DNA, 201 bp, Homo sapiens
tacaataaagtaagctagagaaaaagcaaatgttaataagaaaatcataaggaagaaaaaatatattattcatgaattgaaagtggatcatcataaaagtstttatcctcatcatcctcacgttgagtaagcagaggaggaagaagaggaagaggttggtcttggtgtctcaggggtggcagaggtggaggaggtggaagt

SEQ ID NO: 389189 - DNA, 201 bp, Homo sapiens
gtctgaggactgcatttcttaaagaggcattctgtgccctttaggcctgtggaggcaaagaatccctgttttatatagaacatcagtgtgcaaagtacacwaacacccccaggatctagcaactgtagcaaaacgtcagataccctcctgggaaaaccctctgtgctccctggctgatcttgtgggaggacgcaccactgg

SEQ ID NO: 389190 - DNA, 201 bp, Homo sapiens
tatatgtattacctattgtattcttacaataaagtaagctagagaaaaagcaaatgttaataagaaaatcataaggaagaaaaaatatattattcatgaaktgaaagtggatcatcataaaagtctttatcctcatcatcctcacgttgagtaagcagaggaggaagaagaggaagaggttggtcttggtgtctcaggggt

SEQ ID NO: 389191 - DNA, 201 bp, Homo sapiens
atatccatccatatttgtccacaatgatcaactacgcccagcctgtaaagtttcaaggtttccatgtggcagaaggtaacaccaaaggttaaatgcagtcrccttttttgcttgattttcttttatggtgctgatgagcttttatctaatttgttgccatttttctttgtgggcatgggggctgttccacctcaccttatt

SEQ ID NO: 389192 - DNA, 201 bp, Homo sapiens
tggggaggctgaggcagtaggatcccttgagcccagaggttcaaggctgcagtgagctatatgtaatcctaccactgcactccaggctggacaacagactraggccttgtttcaaaaataaatgagtaagaaaaccaggaatttctttcagaagacccttttatataataatgccgttttaattcctcatagtaatatttt

SEQ ID NO: 389193 - DNA, 201 bp, Homo sapiens
tttctagcatgaatggatttgttttgaaaatttctgaagggtcaagtagtactagaggactaatgctaaagatcttcatatttatttaaattctttggtayggaaagcttacatcatgcttcagagggatgtaaagagacacaaaataaacatctggttcaatttcatttggaggatctttgggtcttatggttttcagat

SEQ ID NO: 389194 - DNA, 201 bp, Homo sapiens
aattttctgttctggaagaaaacaacttattttgatgtctttcttttaatttgtatgaacactatttcattgtaaagtttcaatattgtaacttcactatrtccctagatgtgttgaacttgactgctgggatggaaaaggtgaagaccaagaaccaataataactcatggaaaagcaatgtgtacagatatcctttttaa

SEQ ID NO: 389195 - DNA, 201 bp, Homo sapiens
actcaggaagctgaggcaggagaactgcttgaacccaaaaggcggaggttgcagtgagccaagattgtgccactgcactccagcctgggcaacagagcaakactgtgtctcaaaaaaaaaaaaaaaaaaaaagttgctaaagccttcatcaatattgtcttagtgtcttagtcagttggtgctgctatcacaaaaatacca

SEQ ID NO: 389196 - DNA, 201 bp, Homo sapiens
ggatggtctaatgaatgtcataccctctgactaaattttaatagtgtttaattgggaggacatctgaaacactgaacatgcttctatccttgtgagacttrggtacttttctttttactgatgtgcaaatatgttaaaatgcatacctttatatgttaggtaaagtgattcttatacttgagcacatcagaattactcaga

SEQ ID NO: 389197 - DNA, 201 bp, Homo sapiens
aaaataatgtctcactaaaatctttaaggtaatgatttggcaccattttatacagaaaatgaagccaggtttagtcatgcgtaagtcctctattattttckaagattttagcaggaaagatcttcccagaaataattatgagtttaaactctccaaattttgagatgattttttaaaaaattattatctctttcacttaaa

SEQ ID NO: 389198 - DNA, 201 bp, Homo sapiens
aaaaatgtctgagttctgtctcctttcctaattttatctcttctctctcctgtagctgaatcccttttttctctcattttttaattcatatggatttgccycatcatctccatgagttcaaaatatttaccaacaaacatatttttaaatttaaaaaacttaattttaataaggaagataaataaagtggccacctatgaa

SEQ ID NO: 389199 - DNA, 201 bp, Homo sapiens
gtctcgaaatgaaaaaagaaacagaaatcaaaattcagacgctgacatcagatcacaaatctaaggtaagaaaatgcccatttttacagcagtgacttgcrgaagacactttgtaattttttagaaggagtacctagtgtaaattagaaataacagtagcccagagctggtctagtagcctgcagctgatctgggatgtca

SEQ ID NO: 389200 - DNA, 201 bp, Homo sapiens
tctagaaccacttcaattcgaaatggaaactagggtaatggtttttcaagtgtctattatatgagacacagaaaaaggagaattaattaacaataatcctyccccagcacatgactcattgggatccagagctgcagttactttcattaagagacaggcatgcttttcaattgtccaatgaggtcaattccttagagccaa

SEQ ID NO: 389201 - DNA, 201 bp, Homo sapiens
tattgaccaggttttgctcacacctgcttatctgtcattattccaaacttccattgaggtttgctttatttattcacttattcattatttttgtaagggcygaccagggacacagtgctgtcctctaatcctcagtgaacagaaaggaagtttagtggacccactgccaacacacatacacacacaaacacacactattgg

SEQ ID NO: 389202 - DNA, 201 bp, Homo sapiens
gacactttgcctccttcatatcaggaaaaactttgtatcaggaaaaactaaataaaaaaatcatctggtctttggcccttgcttttaactcctttcttgtyttctgcaactagctgtgccttcctcagtgtgtcttatgtcctaggaaaagattattaacagaaagcacaacaggtatccaggattgtagtttattaagca

SEQ ID NO: 389203 - DNA, 201 bp, Homo sapiens
tcccgtatgtccgtgaatctcaaggtctcagtttcctcctttttaaaatctatttttttctttgtatctaatgccagtgagtgtggttgaatggtctgtakgttatctggaccctctttttaggtatacctggccctctacactccatgatttcacccctgatatttttccaagcccaatagttttccctttagttgtagt

SEQ ID NO: 389204 - DNA, 201 bp, Homo sapiens
gagaattaattaacaataatcctcccccagcacatgactcattgggatccagagctgcagttactttcattaagagacaggcatgcttttcaattgtccartgaggtcaattccttagagccaaaaatgtaaaacccaaagttggatacatatctccagtaacgtgttagaaggggaattacaattcaaatgcctatgggg

SEQ ID NO: 389205 - DNA, 201 bp, Homo sapiens
tggggcagcccagcttgataaagtatcagcgatgctgttgactctgtaatctcctaattccccttcccatacacccagctggtggcaaaggctgtcagtgrcagggaaaagagaagaaattgccgtcacctgcatgcctctgtgttccatggcgatggtagatgtggggcccggtgctgcacaggagctcctgtcactggt

SEQ ID NO: 389206 - DNA, 201 bp, Homo sapiens
aagacttttgtacgttacagtactgccctttcaattcacaggaatatggtgaaaacatagatatgcaaaaatacttttttaaaaaggagaaagaatagaaygaatgaaagtcaaagatgtgatgtttcctaaacacacacagtcatctgaaattagcatctgtatggcttcatgtattattcttaaaggtgctttcccacc

SEQ ID NO: 389207 - DNA, 201 bp, Homo sapiens
gcctcagtttccctgcttgtaaggtggtggggctcatgcagtaatttggctagtatttcccttccctaccttcattctttgaagtttgtagagggctgacygggtgccaagcactgtgccagatgctaggaattcaaaacaataagaaatgtccccagccttgaaggcagttgcgatctgttcaaggagaaagacaagtga

SEQ ID NO: 389208 - DNA, 201 bp, Homo sapiens
cagtgatcaagtcagggcatttaggttgtccatcacccaagtactatacatttgtggctaagtatagtcaccctactctgctatctcttataagtttgtayccagtggtatgtggttccaaaatatctacaaattggctgttttttaaaaaataatttttctataccaaatgatagttatattctaaacccatactgtgtg

SEQ ID NO: 389209 - DNA, 201 bp, Homo sapiens
catcgttgtaccaacagtggaccaggcagcttacattatggccttatctaacctgtatacagcctgatgaaatgggtattattattattattattattatttttgagatggagtcttgctctgtcacccaggctggagtgcagtggcgcgatctcggctcactgcaagctctgcctctgaaatgggtattattacaccaat

SEQ ID NO: 389210 - DNA, 201 bp, Homo sapiens
tgctgttagtcttggcccattctaagaaccacgttctgaaacatacccttgagtagattatggatgtgtactgttggcccttgaacaatgtgggggttagrgctaccatacccctgtgcagtcgaaaatccatgtataacttttgactcccccaaaacttaatagcctactgttaactgaaagacttatgataatattaac

SEQ ID NO: 389211 - DNA, 201 bp, Homo sapiens
ctaagttttaaaggtctatgaagtgaccattgacacatctaaaaagggtagcttgaccatttcacaagtgatggaaattttaacgtctgtcattttcaagygtgggtgagaatggagtacaaagccattcttataaacttctggtaagaccctacattggtacaaccatcttggggaatattttggcaatagtttataaag

SEQ ID NO: 389212 - DNA, 201 bp, Homo sapiens
ccatcgttgtaccaacagtggaccaggcagcttacattatggccttatctaacctgtatacagcctgatgaaatgggtattattattattattattattatttttgagatggagtcttgctctgtcacccaggctggagtgcagtggcgcgatctcggctcactgcaagctctgcctctgaaatgggtattattacaccaa

SEQ ID NO: 389213 - DNA, 201 bp, Homo sapiens
tggcttttccccacccctcccgggtctccctacttctctactcccaggatccgtgctcccgccccagctctatctttacttctcccctcttcccccaattsaggccgaggacgtgagggtggagggctcctttcccgtgaccatgcttccgggagacggtgtggggcctgagctgatgcacgccgtcaaggaggtgttcaa

SEQ ID NO: 389214 - DNA, 201 bp, Homo sapiens
ataaattaaatatgttgactaaaaataaagcattaaggccggggcgggtggatcacttgaggtcaggagtttgagaccagcctggccaacatggtgagacmctgcctctactaaaaatacaaaaaattagccaggtgtggtggcacatgcctgtaatcccagctactggggaggctgaggcaggagaattgcttgaacctg

SEQ ID NO: 389215 - DNA, 201 bp, Homo sapiens
acatgtcgggcaggggcgggcgaaggagcggagagtttgtcctagggtttcctaaacagggcaaagtcaactgtagtgttcggggtctggatgtctcaaakctgaccttacaggcttgtgtgtccctgttgcaggcgctggtctccgccgggaaccctggggcatggagaggtctgagtacctcggccgcggcgcacgctg

SEQ ID NO: 389216 - DNA, 201 bp, Homo sapiens
aaatcgtgactggaggccgggcttggtggctcacgcctgtaatcccagcactttgggaggccgaggcgggcggatcacgacgtcaggagatcgagaccacrgtgaaaccccgtctccactaaaaatacaaaaaaaaaaaaaaaaaaaaaaaaaaattagccaggtgtgatggcgggcgctactcgggaggctgaggcagga

SEQ ID NO: 389217 - DNA, 201 bp, Homo sapiens
tttaatcttctcatcctactactatataggagaatgtcgcacctaaaggattgcagaggaggcacaaagcctatgcatattccccaagaatagaagcactkggaatgcctttgcgttgccacctttttggctggttgaggtatatacgaaggaggaacttatcacagagaacctagctagtggttcttaaatttcagtgtg

SEQ ID NO: 389218 - DNA, 201 bp, Homo sapiens
cagacacggcgttggcattttccaaggcaacctgggatgaggcaaagggacaaaaggccaccagacgaacgatgctgtggaatttgcccaggttgagcacrgactcctccacctggggggagaaagaggctaagtggtttccttccctccctcctgcctctgcggcgcagtcaagcagcggttctcagccttggaagctct

SEQ ID NO: 389219 - DNA, 201 bp, Homo sapiens
ctgcactttacctgacacgcatagagaaggtattgatgtccttatccagctggtccaggaggctaatggactggatgatcatattgtccacccggttcacrttaaacttaactttggcacgggaatagctgtgtcccagccccagctgtgctttacaagctgacagatcggtcagacccttcaccagattgtggaagtgca

SEQ ID NO: 389220 - DNA, 201 bp, Homo sapiens
acgcattgacacacaaattttaacagcttcccaaggattttctctcaatcgcttgttaagctcaggtcctcgtctgataaacatgacgctacatttttccycctaatgttattttgaagtttcgacgtagattaaatatggcgactgaaaacaaagcaagagacaaagtgcttgcgcatcccatgacctccccaccggcaa

SEQ ID NO: 389221 - DNA, 201 bp, Homo sapiens
aataactgtcagagcaaagaacaaaaccctgtaagaaaaaactacgaggcgacgggtaatacagaggtcctgggcactctcggagactggcggagaaaccygacacacacctcccatgtctgtactgtattcctcgagagcctgacatacaggtattcagtgagtactggttaaaagaataacaaacgcattgacacacaa

SEQ ID NO: 389222 - DNA, 201 bp, Homo sapiens; identical to SEQ ID NO: 85362

SEQ ID NO: 389223 - DNA, 201 bp, Homo sapiens
tcagctcactgcaacctctgcctcccgggttcaagtgattctcctgcctcagcctcctgagtagctggctggtattacaggagcgtgccaccatgcctggytaatttttgtatttttagtagagatggggtttcaccatgttggtcaggctggtctcgaactcctgaccttgtgatctgcccgccttggcctcccacagtg

SEQ ID NO: 389224 - DNA, 201 bp, Homo sapiens
tgtggtggcacatgcctgtaatcccagctactggggaggctgaggcaggagaattgcttgaacctgggaggcagaggttgcagtgagcccaggtcgtgccmctgcactccagcctgggcgacagagtgagaccctgtgtctctcacacacgcacacacacacacacacacacacacagaaaatgcaatagatgaaatgttt

SEQ ID NO: 389225 - DNA, 201 bp, Homo sapiens
caatactgcatttgtttgccaggtatcgggagatgcggcctttgttcttggcagctgctcggccaatgaaggtggagtggaaaatgagtccatattttggrgtgttaccccttgtcttcagggctctgagagaatattcagtggagagtttaagatcagaaatttcaaccccattagccaaggcagctcagctcctcccct

SEQ ID NO: 389226 - DNA, 201 bp, Homo sapiens
ggcggtattcagataaagacaccacacgactggagaagctctcgatgtttatcaagtcaatggcagatatgtccatgcctaggaaaaaccaagtgtgaatkcaagaggccagctatttagagccccataccttatgcaggttgccaggctctgcactgacccatggaggaccgtgaggcatccagaatagccttagccttg

SEQ ID NO: 389227 - DNA, 201 bp, Homo sapiens
cttagccttggccccatccattgtcagctcctccagcttctccagcttgtcctcattcagttcccttcggtttccaataaactgggcaagacggcagtatrtggcattgtcgttgatgatcttcaccagctccggaaagtgatacccgtaccactccctgcaaagagccacagtcactccctggcccagctgcttcatcaa

SEQ ID NO: 389228 - DNA, 201 bp, Homo sapiens
tcatgtcagctgtctatgcagaaaagttccaggggttctgagtctgtcctgaggctacatcaactgtcatcaaatcttattcattgcatttctggaatacyacttttagctgccccttttctttttttttttttcccctcccttccttcctctttgtttcttcttgctctgtcgcccaggctggagtgcagtggcgcgatc

SEQ ID NO: 389229 - DNA, 201 bp, Homo sapiens
ttcccagaaatcacaacaagcaaccaagtttccagaacctcctcccccaaaatgtccaggataacaggaatataacagatgatggtctcacctcgcaggayctcagctatgactcctccagtctggcagttgtaccctaactcctcctgtattgcggcaccaatcttgggatccccaactcccaagagtactttcttcttt

SEQ ID NO: 389230 - DNA, 201 bp, Homo sapiens
agtctgaaattaaggtgttggcagggccctgctccctctgaaggtttaggggagaaacctttcttgcctcttctggtggctcttgctgttttttgacttgyagatgcatcactccaatatctgtggttttcttccctctctgtctcggtatcatttttctcctcaaatatttagccctggatgggacgattttttctcaag

SEQ ID NO: 389231 - DNA, 201 bp, Homo sapiens
ccttcacgccccatctccttttcgctgtgattctttccttccacctggtcttgtctctatttcttccaaggaaggtagccacatcctgcctctgatctgcrtttcccatcatctttgcctgctcagcctcctgtcctgccctggctgcagcacagctaatagtggcttaagaggagtggcaggtccatgtgcttcccatcc

SEQ ID NO: 389232 - DNA, 201 bp, Homo sapiens
agaaataccaggaactcagtacaggccggaagtcggggtacggggccgcgccagcttcaggcgtcacttcccacgcgacttcctgcgggaaacatggcggyattgagcggagtccgctggctgacccgagtgaggccccgggacatgtcgggcaggggcgggcgaaggagcggagagtttgtcctagggtttcctaaacag

SEQ ID NO: 389233 - DNA, 201 bp, Homo sapiens
attcttggcttccatttcctcaatcacattgccctacctcccttcatgggctctcttttctccctccccacggctgttgccggtggtggctgtaggtgcgractcgagacatgggcggctacagcaccacaaccgacttcatcaagtctgtcatcggtcacctgcagactaaagggagctagagccctttatttcttccaa

SEQ ID NO: 389234 - DNA, 201 bp, Homo sapiens
ccatctgaatgcagaacttgcagctctccttgggggtggaacagcaagggatacaggcaggctgaagcatcagcttcaccttcacgccccatctccttttygctgtgattctttccttccacctggtcttgtctctatttcttccaaggaaggtagccacatcctgcctctgatctgcgtttcccatcatctttgcctgct

SEQ ID NO: 389235 - DNA, 201 bp, Homo sapiens
gagacggtgaggctgctttctccctcggcccttcctctgacctcaagtccgccattcctctcccatcccaatatctccacttcctaagtgatcttggcctrttcttcccccacgctgcccaccatgcctcttttcagtgaccctggcctgagctccccctcccataatgtccttttccaacctaagcctctgcatacccct

SEQ ID NO: 389236 - DNA, 201 bp, Homo sapiens
ggcatccaatgtcgctgacctggaaacttggtccctttgctgggccctgggaatcactcagacaccaggactggccatcacccccatagcagaggcctgtrtaggtcagggagccctggtcagccatcaccgtgatcccccaacaagcagtgggcaccagaagtggcacctgattgtgggcaggtgccctcactggtacct

SEQ ID NO: 389237 - DNA, 201 bp, Homo sapiens
ttggcctgttcttcccccacgctgcccaccatgcctcttttcagtgaccctggcctgagctccccctcccataatgtccttttccaacctaagcctctgcrtacccctcctgcctcctcccagtgtctagcctgcccctctctccacagggtgcccggcacccatttgcccaggcagtgggcaggaatatagccaatccca

SEQ ID NO: 389238 - DNA, 201 bp, Homo sapiens
  misc_feature (1)...(201): n = A,T,C or G
atgcggtgaagaaggtgatcaaagttggcaaggtgagttgagaagagtagtgctggcttcaggatttagagtagttctggtgtcagcacctcggcactacnctctggggaacctgaatgggggtctcctttccccccaggtccccagaacatctgctccctgacatccctgcatccctctcagggctgttcttcatctccc

SEQ ID NO: 389239 - DNA, 201 bp, Homo sapiens
tgggggagtcacagtttcttcctgtccatatccacagtcttgagtatcactccagcatgatcgcagatgcggtgaagaaggtgatcaaagttggcaaggtkagttgagaagagtagtgctggcttcaggatttagagtagttctggtgtcagcacctcggcactaccctctggggaacctgaatgggggtctcctttcccc

SEQ ID NO: 389240 - DNA, 201 bp, Homo sapiens
taaaacttagcttttataattataattattattgttattttgagatagagtctctctctgtcgctcaggctggagtgcagtggcgcaatctcagctcactrcaacctccgcctgctaggttcaagtaattctcctgcctcagcctcccaagtagctgggattataggcacaacaccacgccctgctaattttgtaattttt

SEQ ID NO: 389241 - DNA, 201 bp, Homo sapiens
gtcccaggaccacacttggagaaccgtggtctatcaccatgcaaggagtaaatgatataatgtatataaagtatttggcatcattcttactacctaatgarcattcaatttatgtttattatcagtgtttttgatattattatcaataataatatattatcaataacataataaatcaatcaataaaataaaaataataat

SEQ ID NO: 389242 - DNA, 201 bp, Homo sapiens
tcataatattcctttactctctgtttttttcctaactccccaaacttgttacctttactatccttttaatgtccatggaatctgtagagatgtcctctctkgcatttatcatattagtaacttgtgccttctctcttttttttctgagttagccttgctagaggcttattgactttactgatcttttcaaagaaccagctt

SEQ ID NO: 389243 - DNA, 201 bp, Homo sapiens
ccagtgaacccatctgggattaatgtgttctggtttggaaggttattaagtactgattccattttttagtagatataggcctattcatgttgtctgtttcktcttatgtgaattttagcagatttttttctttcaagaactggtcccttttatctggattatcaaacctgtgggcataaagttgttcataatattccttta

SEQ ID NO: 389244 - DNA, 201 bp, Homo sapiens
atttttttttcttaaattcttggtataattcaccagtgaacccatctgggattaatgtgttctggtttggaaggttattaagtactgattccattttttartagatataggcctattcatgttgtctgtttcttcttatgtgaattttagcagatttttttctttcaagaactggtcccttttatctggattatcaaacct

SEQ ID NO: 389245 - DNA, 201 bp, Homo sapiens
tttaattttaatttccaattgttcattgctggtatataggaaaatgattgacttctgtatattagtaatcttataccctgtaaccttgctattaccactcrtaagttccaggattttttgtttgttgttgttgacaattcttttggattttctacataaacaattatatcatttgtgaacaaagactgttttatttcttcc

SEQ ID NO: 389246 - DNA, 201 bp, Homo sapiens
attgtacaattgtactgactactctgggtcttttgcctcttgacataaacttttttatgtcatggctctttaaaaaaatcttaattgatatatattagtartacatattttgtgggtacacatattttgatacatgtatagaatgtgtaacaatcgaatcagggtaattgggatatccatcaccttatacatttatctgta

SEQ ID NO: 389247 - DNA, 201 bp, Homo sapiens
ggtcaacaagtcctttcagcgtcttcattcccctcccttgaccatatgggaacttctggatccctgcctgccgtggacaggaggcttgtttcaggcctacctctcaagctcctctgtctgcaaaaatgcatttataaaaggataaaggaggacccgcagaatcatcaggagcactcagcttccaggaataagatccagaac

SEQ ID NO: 389248 - DNA, 201 bp, Homo sapiens
agcctgggcaacagagtgagaccctttctcaaacatcaacaagcaaacaaataaaaaactggaagttctgagtgtgtgcttgagggtgtccttgtagggtkactacacagggctgtggagctgaggaaactctcatgtcagtatctttaagtctttcctttggagctgacggaatcgtgagcactgtttcctcctggctgc

SEQ ID NO: 389249 - DNA, 201 bp, Homo sapiens
gatcacttgagcccaggaaggtcgaggtgagagtgagctgagatggcgccactgcactccagcctgggcaacagagtgagaccctttctcaaacatcaacwagcaaacaaataaaaaactggaagttctgagtgtgtgcttgagggtgtccttgtagggtgactacacagggctgtggagctgaggaaactctcatgtcag

SEQ ID NO: 389250 - DNA, 201 bp, Homo sapiens
catcaaatttggggagttttcagcaattatttcttaaaatattttctctgcccctttctctcattcttctccttttgggattcccacaatgcttatttttkcccacttaatggtgtccaccacaggtttgttaggttatgtttacttttcttcaatctttttttttttctatttcccatattcaataatttccattgtcct

SEQ ID NO: 389251 - DNA, 201 bp, Homo sapiens
tatcccgctcttgttttatggttgcaatattttttcacagctctgaaaacatcaagaatagtttattttcctgaatgttcttctcctcaaataggctgatycctctgagcttcttattttagtatgtttattttttttcctttctctttcatgttagaaattttctttagatgtctggcaaatcttttctgctgatattta

SEQ ID NO: 389252 - DNA, 201 bp, Homo sapiens
tattctatgatttgaaaagctgtcatctcagcactttgggaggccaaggcgggtggatcacgaggtcaggagattgagaccatcctggccatggtgaaacyccatctctactaaaagtaaatttaaaaaaaaaattagctgagcatggtggcgggtgcctgtagtcccagctacttgggaggctgaagcagaagcaaggtg

SEQ ID NO: 389253 - DNA, 201 bp, Homo sapiens
cttacctggcttattcctttaatgttgcaggatatcctccagttgtcagctgtcatcctgggtctcccttcagcatcaccctggaacttgtatcctaagtkggttctattgtttcatgtagcaaacatattttcttcttacctagcttactccttctttgttgcaggatatcctccaacagcttctcaagaaagggccctt

SEQ ID NO: 389254 - DNA, 201 bp, Homo sapiens
aatgacagtgcatagctatattctatgatttgaaaagctgtcatctcagcactttgggaggccaaggcgggtggatcacgaggtcaggagattgagaccakcctggccatggtgaaactccatctctactaaaagtaaatttaaaaaaaaaattagctgagcatggtggcgggtgcctgtagtcccagctacttgggaggc

SEQ ID NO: 389255 - DNA, 201 bp, Homo sapiens
taatattgtctaataacaacaatatttagtgagagcttatcatgtgccaattagatagatagtattgttatttctattttacagagaaggaagctgagtcyctgagatgttgagtagcttctcatagattaataagctggtaatggcgaagcagacagtgaattcaggcagtctagctccagagcccatgtgcacaaccac

SEQ ID NO: 389256 - DNA, 201 bp, Homo sapiens
gttcttgattatcctgctcagtgccttgcttgtgggcctcttgtccccactttacagataggaaaactaaagcttgccgggacagattaatgaaaacagtwataaaagttcacacactgacctcatggtgaggcagtttgtatggtggtttgatgggggaagagaggtgagagaagaggacagattccagagcctaaggag

SEQ ID NO: 389257 - DNA, 201 bp, Homo sapiens
aataccacactgtcttgatgactgtacctttatagtaaatcttaaaggtacctgaagtcaggtagtgccagtcctctaactttgttcctctccttcaatawtgtacaattgtacaattgtactgactactctgggtcttttgcctcttgacataaacttttttatgtcatggctctttaaaaaaatcttaattgatatata

SEQ ID NO: 389258 - DNA, 201 bp, Homo sapiens
gtctttgtccattctttcactaataccacactgtcttgatgactgtacctttatagtaaatcttaaaggtacctgaagtcaggtagtgccagtcctctaaytttgttcctctccttcaataatgtacaattgtacaattgtactgactactctgggtcttttgcctcttgacataaacttttttatgtcatggctctttaa

SEQ ID NO: 389259 - DNA, 201 bp, Homo sapiens
gcatgctcccatagtcctagctacctggaggctgaggcaggaggattgcttgagcccaagagctggaagtttgcagtgagctatgatcacaccactgcacytacagcctgggtgacagagcaagaccttgtcttaaagaaaaaaaaaaaaagatcactgatcatagaagcaaacacatgctcttggaaaaatggctcttat

SEQ ID NO: 389260 - DNA, 201 bp, Homo sapiens
tgtaactctcattaacttgaacacctagaggccattgtaggtttattaattggcctaatttcaatattattgtgtatccgggaataggaaggcccaaggamagggagagagatagggaaatggccagtcggtggagcagtcagaactcacatgacattttttaattaagttcaacatcttacagggcatggtttgtggtgc

SEQ ID NO: 389261 - DNA, 201 bp, Homo sapiens
atcttatatggagatcactaaaactttctccatattagcaataaggctattttgctttcttatcattcctatgtcacttttagtttccttcaagagtagcrcttttaatttccttcaagaactttccctttgcattcaaaaccttgctgtttggcacaagaggcctagcttttggcccatcttggctttctatgtgccttc

SEQ ID NO: 389262 - DNA, 201 bp, Homo sapiens
gagaatcagggccttgctctggattaggctttggcttaatggaatgttatggctggtgtgatcttatatggagatcactaaaactttctccatattagcartaaggctattttgctttcttatcattcctatgtcacttttagtttccttcaagagtagcacttttaatttccttcaagaactttccctttgcattcaaaa

SEQ ID NO: 389263 - DNA, 201 bp, Homo sapiens
caactaagtttatgtaatattcaaaatcttttgttgccatttcaacaacgtttagagcatcttcaccaggagtagtttccatctttgaaaaacactttctktgctcacacataagaagcaactcttcatctgttcaagttttaccatcagatggagcaattcagtcacatctttaggctgcactctaattctcttgctgtt

SEQ ID NO: 389264 - DNA, 201 bp, Homo sapiens
tggagcctcaggagagggcctcagtccagtttgacatcaccccctccaaaagtggcccaaggcagctgcaggtggaccttgtaagccctcacttcccggayatcaagggctttgtgatcgtccatgtggccactgccaagtgatggatcatgagggactgagaggggtggatttggcccctgtcctcctcctgcccattct

SEQ ID NO: 389265 - DNA, 201 bp, Homo sapiens
taacattggttactttactatcaggtgcttaccttattaagctttgtaaattcacagttgatccatgtagtaaaatcatgtttacttttcctttcctcagyaacattttgctttcccttccctggagttaatgattcaaagtctagcctttatattggcttagttttctatacacccactactatttcaatcccaaacatt

SEQ ID NO: 389266 - DNA, 201 bp, Homo sapiens
taaaacattttcatcaccctaaacaggcaccttatacccataaagcaactcctcctcattcctcacctccaacccagcccttggcaaccatcggctttccrtatcattttacctattctgggcatctcatataaaaggaatcagacaatatatgactttttgtctgtcttctttcacttcgtataatgttttcaaggttta

SEQ ID NO: 389267 - DNA, 201 bp, Homo sapiens
taattctacctcatggtataattctacctcattagtggagtgctgcacacactaacccagaataatactgggcaattagattacatgttttattaattgakgtgaaattcacataacataaaattaaccactttaaagtgaacaattcagtgggatttaggacaattcagtggcatttgtgcaaatggtgacttccataca

SEQ ID NO: 389268 - DNA, 201 bp, Homo sapiens
tgagccaagattgcgccattgcactccagcctgggcaacaagagcgaaactccatctcaaaaaaagaaaaaggcgcgtattactccattttttggaatggwataaattgaagagaaagaatagaattgcctaaataaatttaaaaaagtaaataaggttataattctacctcatggtataattctacctcattagtggagt

SEQ ID NO: 389269 - DNA, 201 bp, Homo sapiens
cccaggaggcgaagggtgcagtgagccaagattgcgccattgcactccagcctgggcaacaagagcgaaactccatctcaaaaaaagaaaaaggcgcgtaytactccattttttggaatggtataaattgaagagaaagaatagaattgcctaaataaatttaaaaaagtaaataaggttataattctacctcatggtata

SEQ ID NO: 389270 - DNA, 201 bp, Homo sapiens
cctgacctcagatgatctgcctgcctcagcctcccaaagtgctgggattacaggcctgagccactgcacccagccaagatagccctactttggatggaggyaccagagaaagactctctgaggaagtgacgtttgagctgaaatgttaataattacaataaaaataatgattaaaatttaacttagttaacgtgcttccta

SEQ ID NO: 389271 - DNA, 201 bp, Homo sapiens
gaggccgggcgcggtggctcacgcctgtaatcccagcactttgggaggctgaggtggacggatcatgaggtcaggagatcgagaccatcctggctaacacrgtgaaaccccatctctactaaaaatagaaaaaattagcctggtggggtggcaagcacctgtagtcccagctactagggaggctgaggcaggagaatggtg

SEQ ID NO: 389272 - DNA, 201 bp, Homo sapiens
ttaaagaaagtatttttatttttactttttattaatgacttacacacttactaggcctgcccttagcaattgccaggctggggcaggagtagaaacggagkcttatgaatttggtatgcaaatatttaaaagtcataagtcatgttaataagctgctaaaaaatatgcattgtctactccagccttgacaaatatgtatat

SEQ ID NO: 389273 - DNA, 201 bp, Homo sapiens
gctgaaaatcagcctaaggcataaatttaaggttgtatcgggtctttgctgagcctgccccttttgggagcatgtgcagtcgttttttaatttcctccatraatacagttgcttttgaatgtcctagtgtctaatatctggtccccaaaagcacaaaaacagaaaaatgaagggaaagtcagatgtcccacccctttaagt

SEQ ID NO: 389274 - DNA, 201 bp, Homo sapiens
aatctaacaatgtggtaactctggaaatccaattcccccttacccagagtttgcagtttttttgttttgtttatggcttttgattttttttcttatagacygtctctgtgctgaaaatcagcctaaggcataaatttaaggttgtatcgggtctttgctgagcctgccccttttgggagcatgtgcagtcgttttttaatt

SEQ ID NO: 389275 - DNA, 201 bp, Homo sapiens
gagtttctgattctcttttggtttttatctcctttattaatatttccattttatttatacatttgttctttattttcactacatttttctttagttctttragtatctttaagacagttattccaaagtctttgtccagtagatcaagccttttccagaaacagtttctgctaatttattttttcctttaagtgggccata

SEQ ID NO: 389276 - DNA, 201 bp, Homo sapiens
aaagctaaatgtgatcatggatgtcaaggccttaacagtgcctcggtgggcacagtcataatacaaataatatttattgtaccagaaggcctagggatcckggctctgccccttaactggctgtgtgactttggggaaattacttaaactctctgcacctcagtttcctcatttgtacaacacagataataatggtgctca

SEQ ID NO: 389277 - DNA, 201 bp, Homo sapiens
ctcctgggttcaagcaattctcctgcctcaccctcccaagtagctgggattacaggtgcccgccaccatgcccagctaatttttgtatttttagtagagayggggtttcaccatgttggccaggctgcccttgaactcctgacctcaggtgatctactcacctcagcctcccaaagtgctgggattacaggcatgagccac

SEQ ID NO: 389278 - DNA, 201 bp, Homo sapiens
atttactcaaatcatataactcattcactcagtcattcactcatatcattcattcatactttcatttatttatccatttattcactcactttcattcattkgctctctttcactcattcattcatgcattcttcaatttgcttactctttattcactcatttgttcattttttcattcacttattcctacatttatgcttc

SEQ ID NO: 389279 - DNA, 201 bp, Homo sapiens
ccatctctactaagaatacaaaaattagctgggcatggtggcatgtgcctgtagtcccagctactcaagaggctgaggcaggagaattgcttgaacccagraggtggaggttgcagtgagccgagatcatgccactgcactccagcctcgcgacagagcgagactccgtctccaaaaaaaaaaaaagactgaggtttatgg

SEQ ID NO: 389280 - DNA, 201 bp, Homo sapiens
atcattcttactacctaatgagcattcaatttatgtttattatcagtgtttttgatattattatcaataataatatattatcaataacataataaatcaawcaataaaataaaaataataatacccgctcatggaattgttgtaaggattaaataagtcaatctgtgaaagcgcttccaagtgcagtacactttaatccct

SEQ ID NO: 389281 - DNA, 201 bp, Homo sapiens
taaagaaaaaaaaaaaaagatcactgatcatagaagcaaacacatgctcttggaaaaatggctcttatagagttgcctgactcagggttgccacaaaacttcaatttgtaaaaaatgcaatatctgcaaagtacaataaaatgaagcacagtaaaataaggtatgcctgtctttgtccattctttcactaataccacactg

SEQ ID NO: 389282 - DNA, 201 bp, Homo sapiens
ttaaagaaaaaaaaaaaaagatcactgatcatagaagcaaacacatgctcttggaaaaatggctcttatagagttgcctgactcagggttgccacaaaacttcaatttgtaaaaaatgcaatatctgcaaagtacaataaaatgaagcacagtaaaataaggtatgcctgtctttgtccattctttcactaataccacact

SEQ ID NO: 389283 - DNA, 201 bp, Homo sapiens
gcttcagcttgcacttttatgttatagagatggcgtctttccttaaaccttatgaaccaacctgtgctagcttcaaacttgtcttctgtagcttcctaacrtctctcaatccttatagaattgaagagaatcagggccttgctctggattaggctttggcttaatggaatgttatggctggtgtgatcttatatggagatc

SEQ ID NO: 389284 - DNA, 201 bp, Homo sapiens
aacctctttcaaacttggagtcaatcctctcaaaccctgccactgctttatcaactaagtttatgtaatattcaaaatcttttgttgccatttcaacaacrtttagagcatcttcaccaggagtagtttccatctttgaaaaacactttctttgctcacacataagaagcaactcttcatctgttcaagttttaccatcag

SEQ ID NO: 389285 - DNA, 201 bp, Homo sapiens
gagtttgagaccagcctggtcaacatggtgaaacctcatctctactaaaaacacaaaaagtagctgggcgtggtggtgggtgcctgtaatcccagctactygggaggctgaggcaggagaatcgcttgaacccgggaggcggaggttgcagtgagccaaaatcacaccagtgcactccagcctgggcgatagagcaagact

SEQ ID NO: 389286 - DNA, 201 bp, Homo sapiens
gatcaggagtttgagaccagcctggtcaacatggtgaaacctcatctctactaaaaacacaaaaagtagctgggcgtggtggtgggtgcctgtaatcccarctactcgggaggctgaggcaggagaatcgcttgaacccgggaggcggaggttgcagtgagccaaaatcacaccagtgcactccagcctgggcgatagagc

SEQ ID NO: 389287 - DNA, 201 bp, Homo sapiens
gaggcctcagttaatcctgcctcaacctctgccctactttgtaaacttaggcaagttccttctcctcctgggcctcagtttactcttctgtaaaatgaagkgttgcactcagtaatccttaaacttttggacaaccatagatgatgtaagaaccgagggagcctctccaaccttcatctctcatccccatggctgggaggt

SEQ ID NO: 389288 - DNA, 201 bp, Homo sapiens
cgtggccattctgcagaagtggctcaagggcaggtacaagccagtcaagtacggccagtgctgggtcttcgccggagtcctgtgcacaggtaccctgggaragaagggccccagggtacctgtgcccccagcttcctctatctaaatgtatttacatatatttgcatatgctgcaacccatcttcattgatggattcattg

SEQ ID NO: 389289 - DNA, 201 bp, Homo sapiens
cttcctccactcttagggtttttttgtttgtttatttgttttgtttttaaagaagaacggccgggcatgatagctcacgctcagcattttgggaggctgaygtgggtggatcgcctgaggtcaggagttcaagactagcctggccaacatagtgaaaccccatctgtactaaaaatacaaaaaattggctgggcgtggtgg

SEQ ID NO: 389290 - DNA, 201 bp, Homo sapiens
cctgtaatcccagctactcggaagactaaggcaggagaatcacttgaacccaggaggtgaaggttgcagtgaaccgagattgcaccactgcactccagccygggcaacggagcaagactctgtctcaaaaaaaaaaaaaaaagtggaccggtcaggtgcaaagcttgtagaaactgttttttgggatgctcaagacatttt

SEQ ID NO: 389291 - DNA, 201 bp, Homo sapiens
cttcatttcagctgtcatactataaacaaataacctttctctgttcatttaaaactagggttttttttgcatttttgtgctttttttgttggtgatttctytgtttaaaatggccgctgagcataggactgaagtgctgtctcatgttcctaggagcaggaaagctgcgacacgccttacactaaaaatatgtgttaggtg

SEQ ID NO: 389292 - DNA, 201 bp, Homo sapiens
ggaaaaaaagttaaccctaaaatgttacatactatatgtttctatttatataacattcttgaaatgacaaaaattatagaaatgaagaacagcgtagtggwtgccagtaggacagagggagtgtaggacagaagttgatgaagttgatgtggttataaaagaacacaagaggccgggcgcggtggctcacgcctgtaatcc

SEQ ID NO: 389293 - DNA, 201 bp, Homo sapiens
agttgcttggtttttgctgctcttaagattttctgtttttgatttttaagagtttgattttaatgtgtcttggtgtaggtctctttgagttcattctactyggagttcattgagcttcttggatgtttatattcatatcttcatcaaatttggggagttttcagcaattatttcttaaaatattttctctgcccctttctc

SEQ ID NO: 389294 - DNA, 201 bp, Homo sapiens
ttcccttgtatgtgagaagttgcttggtttttgctgctcttaagattttctgtttttgatttttaagagtttgattttaatgtgtcttggtgtaggtctcyttgagttcattctacttggagttcattgagcttcttggatgtttatattcatatcttcatcaaatttggggagttttcagcaattatttcttaaaatatt

SEQ ID NO: 389295 - DNA, 201 bp, Homo sapiens
tcttttagcctttttagtatatcagctcactgcctttgggcctctaaagtttttaatgagaaatttacttttaatcttattgagattcccttgtatgtgakaagttgcttggtttttgctgctcttaagattttctgtttttgatttttaagagtttgattttaatgtgtcttggtgtaggtctctttgagttcattctac

SEQ ID NO: 389296 - DNA, 201 bp, Homo sapiens
catctttacagttccatccccacccattcagttgtaaatgtcacaaaagtagtctcttaaatcatgtataaaacaaaaaaggaattataaaccattgttaygataatactagcttttatacttgcccatgtgtttacctttaccgagattgttatttcttcaaacagctttgagttactatatagtgtccttttatttcac

SEQ ID NO: 389297 - DNA, 201 bp, Homo sapiens
aatacacaaaaactctgcatctttacagttccatccccacccattcagttgtaaatgtcacaaaagtagtctcttaaatcatgtataaaacaaaaaaggarttataaaccattgttacgataatactagcttttatacttgcccatgtgtttacctttaccgagattgttatttcttcaaacagctttgagttactatata

SEQ ID NO: 389298 - DNA, 201 bp, Homo sapiens
accaagaaaggtgaagtcacgagttcagagtcacacagtcagtgtgcatagttgcaggacccaaatccaggcagtctggcatgagagacacactcctgacyaagaccaggaaggggcaaagccagggttcaaagccaggaacgttgaccacagtgcacatttactcagctgatgcaattgcttgactgcaggttatggaat

SEQ ID NO: 389299 - DNA, 201 bp, Homo sapiens
atgatgttgcccaggctggactcgagtgatctgcccgccttggcctcccaaagtgctgggatgacaggcttaagccacggcaccaggccagagatgtttaytaagtgcttaaatgtgccaagtcctgtcccaagaattctgcatgcgacggcacaatccctccagccaccttgtgtgtggtactagtgctagctccatctt

SEQ ID NO: 389300 - DNA, 201 bp, Homo sapiens
gaggcttttgacccagctctcagagaagctggaaatttgcatttttatgtgaaatttcctggcaactgatttaaaactttatttacatagagaatcaaacrcaaggcatgtggcgccggtgtgcatatggctcttgaactgccagtttgacttccatgagccatagtaaattaaaggagcaagggggtgcctgccgctgac

SEQ ID NO: 389301 - DNA, 201 bp, Homo sapiens
aattatgttcaattgatttctacatgggtgtcaagacaattcaatggagaaagaataaaaatagtcttttcaataaatggtgttgggaccgctgtatacccacatgcaaaagaatgaagttgttataccctacagttctgtaatcatatttatactcagttttaattacatgcaaattaaagggcagattatgcagaaatt

SEQ ID NO: 389302 - DNA, 201 bp, Homo sapiens
tgtccccactttacagataggaaaactaaagcttgccgggacagattaatgaaaacagtaataaaagttcacacactgacctcatggtgaggcagtttgtwtggtggtttgatgggggaagagaggtgagagaagaggacagattccagagcctaaggaggatgctcagcaggacctggtgagggctctgttgtgagtgat

SEQ ID NO: 389303 - DNA, 201 bp, Homo sapiens
ataagaatagtcttttcaacaaatggtgttgggaccactgtacatccccacatgcaaaagaatgaagttgttataccccactggttacatgaaaaattttwaaaaaagggaaataaaaagaatgaagttggcctcctatctcacacgatacacaaaaatttctcaaaatggtttatagacttacatgtgagagctaaaact

SEQ ID NO: 389304 - DNA, 201 bp, Homo sapiens
acacaacaatatgaatgtacttaatgacactgaagtatacacttaaaaatggttaagatggtaaattttatgttatgtattttatcacaatttttaaaatagaaagaagacaaaagaagagagggaggaagacagggagggagaaatggaaacagagaaatttccaaattggaaagaaatttgcacatgacataattttgt

SEQ ID NO: 389305 - DNA, 201 bp, Homo sapiens
agctctgggtagatggtagtgatggttacacaacaatatgaatgtacttaatgacactgaagtatacacttaaaaatggttaagatggtaaattttatgttatgtattttatcacaatttttaaaatagaaagaagacaaaagaagagagggaggaagacagggagggagaaatggaaacagagaaatttccaaattggaa

SEQ ID NO: 389306 - DNA, 201 bp, Homo sapiens
gagctctgggtagatggtagtgatggttacacaacaatatgaatgtacttaatgacactgaagtatacacttaaaaatggttaagatggtaaattttatgttatgtattttatcacaatttttaaaatagaaagaagacaaaagaagagagggaggaagacagggagggagaaatggaaacagagaaatttccaaattgga

SEQ ID NO: 389307 - DNA, 201 bp, Homo sapiens
agagctctgggtagatggtagtgatggttacacaacaatatgaatgtacttaatgacactgaagtatacacttaaaaatggttaagatggtaaattttatgttatgtattttatcacaatttttaaaatagaaagaagacaaaagaagagagggaggaagacagggagggagaaatggaaacagagaaatttccaaattgg

SEQ ID NO: 389308 - DNA, 201 bp, Homo sapiens
cataaggcttcatgaactctcagagaggatggcctcaaggtgatctatgaatcccaaacttctgtgagttgtgaacgtcctcacaattttcacctttctckgagaactattgattctgtctttacttaactttttaatgtttttatacttttattgagatataattaacatacaatagaatataaatcttaagtgttccat

SEQ ID NO: 389309 - DNA, 201 bp, Homo sapiens
ctctttgagcaaagtcatataggattatatatctgaaattttggtgtaaattataatgtgctgaaagcactaacaagggggttgttattattacccaactvttgtcaccagcaatggcttcttcacaagcataaggcttcatgaactctcagagaggatggcctcaaggtgatctatgaatcccaaacttctgtgagttgt

SEQ ID NO: 389310 - DNA, 201 bp, Homo sapiens
catgtgtttttggtgcttgagggatatcctggtggagtttctccagtagacattggttattgttttctggaactcagaagataagagatatgaaacacatyaaactacaggtgatattcaaagtcatgggcatggatgagatcactcaaaataaatgcttagagcagaaaaagaatttaagaatcactgtcttttaaccat

SEQ ID NO: 389311 - DNA, 201 bp, Homo sapiens
ccatggtgattagatgtgggagttgaggggcaggaggagtagaagaggaccacaggcttccagctggagttggaagacaggaactgacaccatcaaagcargttaagggaagacaaaaagacagcttgggacatgtgtttttggtgcttgagggatatcctggtggagtttctccagtagacattggttattgttttctgg

SEQ ID NO: 389312 - DNA, 201 bp, Homo sapiens
cacctctgaaagccatctggactcagggaaaagttgacttcatacaatattttaaattctttatgtatgagaaaaataagataaacaggccatggtgattrgatgtgggagttgaggggcaggaggagtagaagaggaccacaggcttccagctggagttggaagacaggaactgacaccatcaaagcaggttaagggaag

SEQ ID NO: 389313 - DNA, 201 bp, Homo sapiens
ttttgctcctcacctctgaaagccatctggactcagggaaaagttgacttcatacaatattttaaattctttatgtatgagaaaaataagataaacaggcyatggtgattagatgtgggagttgaggggcaggaggagtagaagaggaccacaggcttccagctggagttggaagacaggaactgacaccatcaaagcagg

SEQ ID NO: 389314 - DNA, 201 bp, Homo sapiens
catctcctgtttagcatctgccagggcctgtgccgtgataccaatttatggccattggttcattgaagagcccctacttgttaggctacaaaaacaaaacrgttgtattttttcttatagctgtttccaactatatactttaaaaatctccctttcccactgtgtaacaggttccttagcaatgttatgatctgattaaca

SEQ ID NO: 389315 - DNA, 201 bp, Homo sapiens
ggacagttctaggatgtattccatacagcttctcagacagtccccagtaagactgagccccagttacccacagtgaactactcattcacaaacacttgacygacattcctcccttcccagtatcactcctaatgctccttcacttctgcttctttgactcacctcccaaatcgactatatgtacccatgattatcttaggg

SEQ ID NO: 389316 - DNA, 201 bp, Homo sapiens
tttcctactcatattctcatctttaacacggggaattaaaaataaggctggaattaccagagtctatggtgctctgcataatcagaaccctacctaccccmtctgctggccatatcccagagatacttaaatactttctgctccttgaacacacaaggccttttcttgtctcacttaggacctttgcacatgctgttcctt

SEQ ID NO: 389317 - DNA, 201 bp, Homo sapiens
ggtatcagccctacagttctagagggacagttctaggatgtattccatacagcttctcagacagtccccagtaagactgagccccagttacccacagtgawctactcattcacaaacacttgactgacattcctcccttcccagtatcactcctaatgctccttcacttctgcttctttgactcacctcccaaatcgacta

SEQ ID NO: 389318 - DNA, 201 bp, Homo sapiens
  misc_feature (1)...(201): n = A,T,C or G
ttaactaattcaaatgtgtttgaaaacatcatgtagaccaaatgagcatatcagcgaggtggatgtggctcgagagcctccgattttagctcagactttantgtgggtagtcaggagccacaggagattgttgagcaggggagagacatgattaaggctgaggttctgattccccaggtgactctttgaggaagggtttcc

SEQ ID NO: 389319 - DNA, 201 bp, Homo sapiens
ctattttatcattaattacattaaatgtaaatggcagctcagagagggtcctgtcaggggtacatgcatcttaacagagatttcatgtgaatagaatgagwgcttgagattttaatgctggaatttcagtatctgccagggaattggggatatacagtcatatatgtcaagtaggggcacacagagtgaagctactaatta

SEQ ID NO: 389320 - DNA, 201 bp, Homo sapiens
gaaggaaatatgagaaatatgaggctactactgacatcaaggaggcccacccaaagctgtcagttcccataaaactcttttgggattggtccctgcttggwtaaagacttgccaggagggatggagtttggcagggaggcagcacgggagctcgcaagccccctcttgacctctcctgccccagtcagcctccgggcgctg

SEQ ID NO: 389321 - DNA, 201 bp, Homo sapiens
taaatcttcacatatatagccaaatgattttttgcaagggtgcccaaaccattctgtagggggaaaagacagtcttttcaacaattggtgctgagaaaackatatccaaatgcaaaagaatgaagttggactcttacctaataacatatacaaaacaaattcaaaatggaccaaagaactaaatctaagagctaaaactat

SEQ ID NO: 389322 - DNA, 201 bp, Homo sapiens
acaccgtatcaatagaaaaaaggacaaaataacatgatcatctcaatagatgcagaaaaagcatttgacaaaatctcatacccctttatgataaaaaaaaacactcaacaaattaagaatagaagtaaacttcctcagtctgataagtcacctataaaaaagctacagctaaaatgatacttaatagtgaaacgttgaaca

SEQ ID NO: 389323 - DNA, 201 bp, Homo sapiens
tcagcaacatataaaaaagattatatgccatgagcaagtgggatttatcccaagaatacaagatgggtttaacattgaaaatcagctaatataatacaccrtatcaatagaaaaaaggacaaaataacatgatcatctcaatagatgcagaaaaagcatttgacaaaatctcatacccctttatgataaaaaaaaacactc

SEQ ID NO: 389324 - DNA, 201 bp, Homo sapiens
agttctgtgaacccctctagcaaattatgaaacctaaggctggggccagttatgagaaccccaaatctgtagcaaagttggacagaagtgtgagtaacccygagtaaccaacacttgtgactggagtctgaagtctcagtcttgtgggactgagcccttcaacgtgtggagtctgatgctaactccaggtagctactgtta

SEQ ID NO: 389325 - DNA, 201 bp, Homo sapiens
cattgaggtgctgagagggtggcatgcttagagaggagatggaaaccccacaccacccctgccccctgccataccttgccctgtgtatctctcccacttgrctcttccagagttatatccttcataacaaaccaggaatggtaagtaaactgtttttctgagttctgtgaacccctctagcaaattatgaaacctaaggct

SEQ ID NO: 389326 - DNA, 201 bp, Homo sapiens
aggttggggaagacattgaggtgctgagagggtggcatgcttagagaggagatggaaaccccacaccacccctgccccctgccataccttgccctgtgtawctctcccacttggctcttccagagttatatccttcataacaaaccaggaatggtaagtaaactgtttttctgagttctgtgaacccctctagcaaattat

SEQ ID NO: 389327 - DNA, 201 bp, Homo sapiens
cccgtcagtctcactgtccccatgaggactaagagggacactggctaggacagaacgtatctgaaatcaccggtagttccccctgcagaatcctggacccyaaccccggctattacaccacatatggcaggtcatggaggtgtgatgctgatggatgtggatgacttagatcaccaaagcagcagctccagggacagattc

SEQ ID NO: 389328 - DNA, 201 bp, Homo sapiens
cctgaaaaatcaaggcatgattagggattggggactttaaaccccatctctgacctccagggaggggagagaggctgaagattgagtttatcacctaaggyctatgatttaatcagtcatgcctatgtaatgaaactctgtaaaaactgctaaacaatggggtttggagaggttccaggttggggaagacattgaggtgct

SEQ ID NO: 389329 - DNA, 201 bp, Homo sapiens
ctgaggtcaggagttcgagaccagcctggccaacattgggaaaccctgtctctactaaaaatacaaaaattaattgggtgtgggggcatgcacctatagtyccagctactcgggaggctgaggcaagagaatcacctgaacctgggaggcggaggttgcagtgagccgagatcaggccactgcactccagcctggatcaca

SEQ ID NO: 389330 - DNA, 201 bp, Homo sapiens
taaaatcattttatgagccaggcatggtggctcacgcctgcaatcccagcactttgggaggccaaggtgggcagatcatctgaggtcaggagttcaagacyagcctggccaacatggcgaaaccccatttctactaaaaatacaaaaattagctgggcgtggtggtggttgcctgtagtcccagctgttcaggaggctgaa

SEQ ID NO: 389331 - DNA, 201 bp, Homo sapiens
tatctagaacttgctaagcaaaatggtaagcaatgtccaagcattatttcatttaatatttattttaaaatcattttatgagccaggcatggtggctcacrcctgcaatcccagcactttgggaggccaaggtgggcagatcatctgaggtcaggagttcaagactagcctggccaacatggcgaaaccccatttctacta

SEQ ID NO: 389332 - DNA, 201 bp, Homo sapiens
aaaaaaaaaaaaaaaaaaaaaaaaaaaaaaaccatggccacaggagaaattaacatcctgttacatgataacagtgatgacaatcactgttactgagcgcyggctgtgggctggccattttcacatgttatgtagtcattttatttaacaaatgtttacaaagcccttaccatgagcttttaagtgagacactagtacaaa

SEQ ID NO: 389333 - DNA, 201 bp, Homo sapiens
gacaccactaataagcacaccccttcctccactcttagggtttttttgtttgtttatttgttttgtttttaaagaagaacggccgggcatgatagctcackctcagcattttgggaggctgacgtgggtggatcgcctgaggtcaggagttcaagactagcctggccaacatagtgaaaccccatctgtactaaaaataca

SEQ ID NO: 389334 - DNA, 201 bp, Homo sapiens
gggaggcagaattctaagatgctcaccatgagggttaatatcatgtggcaacttgactggaccatggagttctcagatatttggtcaaatattgttctagrtgtttctgtgagggtgttttgggtgagattaatatttaaattggtagactgagtaaagcagatggccctctctaatgtgggtggcccttatccaatcagg

SEQ ID NO: 389335 - DNA, 201 bp, Homo sapiens
atgttcaaagaactaagagaaagcatgtctaaacaattaaaggaaagtataggggtgatgtctaaccaaatagaggatattaataaagagatacaaattayaaacaagaaccaaatggaaatcccagcattgaaaagcacagtgacttttcataaaataagtaaaatgaaattttgactagagaggctcaacaacagattt

SEQ ID NO: 389336 - DNA, 201 bp, Homo sapiens
aaaaccagccatatgttaaaatttgttgaacctgtcttgatgggtacatgggactttattatcctattctctctatttgtgtatgtatttgaaattttccktaacagaaaatacatacatacatacaatgcatattctggagatggaaattcaggaataaggacctctgtaaaagcaatgaaaatgctgacaaaaattgtc

SEQ ID NO: 389337 - DNA, 201 bp, Homo sapiens
attgagctctcatgttacgaggactctaaatgacaggggccattatcctcacaatcacgccacaggcattattcccattctgcagagcggggaactgagakgcagagaggtcaagaaggcgggccaggaacagtggtcacgcctgtaatcccagcactttgggaggccaaggcggacagattgcttgagctcaggagtttg

SEQ ID NO: 389338 - DNA, 201 bp, Homo sapiens
caggcattggctaaagcatcatctctgtcaaagtggttccttactgccgccccacagcaccaggatttgagagtacaattcattctgactggaggtaattragaggacttttgaaagaggtgagatttggatttctctttagtcagaagtggtctaatcagggctgagtctgtgacatcagggagatgcctacattgaggg

SEQ ID NO: 389339 - DNA, 201 bp, Homo sapiens
gaggaggttgttgtaaccacccaggtaagagatgagggtggcgtggtccagtttggtagcgatgggtaggtgggaagtggagaaggcagagcccacaagaygtgatgagggactggctatgggctgtgagggaaggaagcatgcaactaacaccagtgcttttccacctgagcaattcagggactccaggtgtcacagggc

SEQ ID NO: 389340 - DNA, 201 bp, Homo sapiens
ctgtcaactggagcagtcttagagcagatgctgcctctcccatcccctccattgggcagtgggtgagctacctctcagaggtacggcaagctgggaccatratcacgtattcaccaagaattcggccaagggaatttgtgcctgggcaggaagttgtgagggagatggtctctgagatttgaggataatgatgataatggc

SEQ ID NO: 389341 - DNA, 201 bp, Homo sapiens
aaaatctccttgcaccccatgcacattccatggatccagagacgtttctgggcatagttgggaattgtggcctgcgtgggaaggagtgagaggcccccatyggctgcatcctcgcctgattcccaccccaagcacttgagggcaagagcagctctggctcaagtgaaaacagctatatgaccttgagcaagaaaatttgcc

SEQ ID NO: 389342 - DNA, 201 bp, Homo sapiens
ttacaataatctgaggagcattcattccagaaaattgcaaaatctcaataaaaacaccaagatctgtgactttgtaatttgacctgtttccctcccccttyctcttctctgtagccttataacccggaagcctcacaatcacccatatctttaaaaaccagtaacgcagccaccagatggggcagaccagtttgaagctcc

SEQ ID NO: 389343 - DNA, 201 bp, Homo sapiens
gaaaatctccttgcaccccatgcacattccatggatccagagacgtttctgggcatagttgggaattgtggcctgcgtgggaaggagtgagaggcccccaytggctgcatcctcgcctgattcccaccccaagcacttgagggcaagagcagctctggctcaagtgaaaacagctatatgaccttgagcaagaaaatttgc

SEQ ID NO: 389344 - DNA, 201 bp, Homo sapiens
cctgggaggcagaggttgcagtgagctgagatcacaccactgcactccagcctgggtgacatagcgagactccatctcaaaaaaaaaaaaaaaaaaaaaamaaaggcaatcagttgcacttagcagtggctagctcaataacaccctagtattggctctttctctaggaaagccctccttaataaagtgtctacatcttca

SEQ ID NO: 389345 - DNA, 201 bp, Homo sapiens
atggccaccaggcctctaagctcctggctggaggccactcacaaagtcagggcagatgggcctagcttctgagtcagaaccagctctcccctttttcttayctacctcctctcaagagtctagtgtccaccaaggaagtctagtggccctgaaggaggatcatggacctctgcctctttagatgcctgcagaacagagtgg

SEQ ID NO: 389346 - DNA, 201 bp, Homo sapiens
tttcagctgagacctgaaggatccaagcctggtaagtccatctgtagcaatggacattcactggctgaatcgaggagaggagaaaatgttgaacggatatmaggaaactcacagaccagctggaaatattagggaatcaggcttagaaaacacgcaggcgcaaagagtgaccatgaagcccagcactacagccaaaactgc

SEQ ID NO: 389347 - DNA, 201 bp, Homo sapiens
aattgtgtttcagctgagacctgaaggatccaagcctggtaagtccatctgtagcaatggacattcactggctgaatcgaggagaggagaaaatgttgaamggatatcaggaaactcacagaccagctggaaatattagggaatcaggcttagaaaacacgcaggcgcaaagagtgaccatgaagcccagcactacagcca

SEQ ID NO: 389348 - DNA, 201 bp, Homo sapiens
tcctaagatttaactatgaccagctgggtgcggtggctcacacctataatcccagcactctgggaggccgaggcaggcagatcacctgaggtcaagagttygagaccagcctggccaacatggcgaaaacccgtctctactaaaaatacaaaattagccaggcatggtggcccatgcctgtaatcccagctacttgggagg

SEQ ID NO: 389349 - DNA, 201 bp, Homo sapiens
gcttgattctggaaagcagaggttgcagtgagacaagattgtgccactgcactccagcctgggcaacacagtgagaccctgtctcaaaaaaaaaaaaaaaagtacatgaggtctgtgggtcttttgtcctaagatttaactatgaccagctgggtgcggtggctcacacctataatcccagcactctgggaggccgaggca

SEQ ID NO: 389350 - DNA, 201 bp, Homo sapiens
tctagcatcatattttacagctctggttgcacttttttttttttctttgagacagaatctcactcttgttgcccagactggagcgcaataatgtgatctcrgctcactgcaacctccgcctcctgggttcaagcaattctcctgcctcaccctcccaagtagctgggattacaggtgcccgccaccatgcccagctaattt

SEQ ID NO: 389351 - DNA, 201 bp, Homo sapiens
gggcctgtgccgtgataccaatttatggccattggttcattgaagagcccctacttgttaggctacaaaaacaaaacagttgtattttttcttatagctgyttccaactatatactttaaaaatctccctttcccactgtgtaacaggttccttagcaatgttatgatctgattaacatattttcaaccatttctgcttgt

SEQ ID NO: 389352 - DNA, 201 bp, Homo sapiens
cgcctgtagtcccagctactctggaggctgaggcaggagaatcgcttgaacctggaaggcagaggttgcctctgtgagccaagatcatgccactgcgctcyagcctgggtgacagagtgagacttcgtctcaaaaaaaaaaaaaattcattctaacttacttaattttctgaaataggaaaaacattcatgtggtttaata

SEQ ID NO: 389353 - DNA, 201 bp, Homo sapiens
taaaacaaaattcttcacataaagctttaaaaaattcattccaggccaggcacggtggctcacacctgtaatcccagctactcaggaggctaaggcaggakaattgcttgaacccaggaggcagaggttgcagcgagctgagatcacaccattacactccaccctggtcaacatagtgaaaccccatccctactaaaaaca

SEQ ID NO: 389354 - DNA, 201 bp, Homo sapiens
gccctgcggatagtggtgcctcttccaagatgtaaggtctgaggtcaagagatgtagactcagaggtcaggaggggcctcaagatttgattgccttgaacscccggttctactctgtctgggaatctgtggcttcctggggtggggtggggtgggaactccttctgcacaggtacctctggatcaggctcctgcttccgta

SEQ ID NO: 389355 - DNA, 201 bp, Homo sapiens
ctatctcaaaaaaaaaaaaaaagaaaagaaaataagaaaaaaagaaggaaatatgagaaatatgaggctactactgacatcaaggaggcccacccaaagcwgtcagttcccataaaactcttttgggattggtccctgcttggataaagacttgccaggagggatggagtttggcagggaggcagcacgggagctcgcaag

SEQ ID NO: 389356 - DNA, 201 bp, Homo sapiens
acttgaacccaggaggtggaggttgcagtgagccaagattgcgccattgtactccagcctgggcaacaagagcaaaactctatctcaaaaaaaaaaaaaaagaaaagaaaataagaaaaaaagaaggaaatatgagaaatatgaggctactactgacatcaaggaggcccacccaaagctgtcagttcccataaaactctt

SEQ ID NO: 389357 - DNA, 201 bp, Homo sapiens
aggaaagctgcgacacgccttacactaaaaatatgtgttaggtgaacattcaggcatgaactatagcgctgctggccacaagttcaatattaatgaatcawcaatatatattaaattatgtttgtttgttttgagagggagagtctcgctctgtggcccaggctagagtgcagtggtgcaatctgagctcacggcaacttc

SEQ ID NO: 389358 - DNA, 201 bp, Homo sapiens
tctgggaggccgaggcaggcagatcacctgaggtcaagagttcgagaccagcctggccaacatggcgaaaacccgtctctactaaaaatacaaaattagcsaggcatggtggcccatgcctgtaatcccagctacttgggaggctgaggcaggagaattgcttgaacctgggaggcggaggttgcagtgagccaggatcgc

SEQ ID NO: 389359 - DNA, 201 bp, Homo sapiens
gtatctctcccacttggctcttccagagttatatccttcataacaaaccaggaatggtaagtaaactgtttttctgagttctgtgaacccctctagcaaaytatgaaacctaaggctggggccagttatgagaaccccaaatctgtagcaaagttggacagaagtgtgagtaaccccgagtaaccaacacttgtgactgga

SEQ ID NO: 389360 - DNA, 201 bp, Homo sapiens
tgatcctggttctctgcatcctggccaacatttggaacaaactattaatacatacaacaattggaagaatctcatgggagttacactgtgtaggaaaaaawgttaaccctaaaatgttacatactatatgtttctatttatataacattcttgaaatgacaaaaattatagaaatgaagaacagcgtagtggttgccagta

SEQ ID NO: 389361 - DNA, 201 bp, Homo sapiens
atgaagtgcagaatcttgaacaaagtgataactggagcagcaaagccagagcatggcaacctccttgtatttctgccatgtccatccctgcccattgtagmgctagcaccatggttaagactatagatactaaactcagactctctgggttcaatttttgactccattcattatcaactttgtgaacttgagaagtatgca

SEQ ID NO: 389362 - DNA, 201 bp, Homo sapiens; identical to SEQ ID NO: 85372

SEQ ID NO: 389363 - DNA, 201 bp, Homo sapiens
aatgaagtgcagaatcttgaacaaagtgataactggagcagcaaagccagagcatggcaacctccttgtatttctgccatgtccatccctgcccattgtarcgctagcaccatggttaagactatagatactaaactcagactctctgggttcaatttttgactccattcattatcaactttgtgaacttgagaagtatgc

SEQ ID NO: 389364 - DNA, 201 bp, Homo sapiens
gtacgctcaattgggtggggtaagttccagacccctgcttttccttacccatgctgctcatgcccacccctcctgcccaggtgtgttccggtgcggcccarcctcagtcaccgccatccgcgagggtgatgtgcacctggctcacgatggccccttcgtgtttgcggaggtcaacgccgactacatcacctggctgtggca

SEQ ID NO: 389365 - DNA, 201 bp, Homo sapiens
attcatccgccgaaggactggctgttttcagcattggagtattaagaataaagttgctatagacattcatatacagattttagtgtgaacataagttttcmtctctctaggttaaatgccaatgaggacaattgctgagtcacacggaaattgcatgtttagttttgtaagaagctgccaacctgtttccagagacgctgt

SEQ ID NO: 389366 - DNA, 201 bp, Homo sapiens
agattgggccattgcactctaacctgggtaatagagccagaccctgtctcaaaaaaaaaaaaaaaaaaaaaaaaaaggttgacaacttagataaaatgaayaaattccttgaaagacacaaactatcaaaacccattgaggaagaaatagatatccaaagtatccctatatctattttaaaatttgagtttggagtgaagt

SEQ ID NO: 389367 - DNA, 201 bp, Homo sapiens
atctgatggactatattaattgacctttaatattgacccagccttacatgcctagaataaatcccacttgatcatagcatgtaattttttatacattgttrattcaatttaccaatattttgtgggaatttttgcatctatgttcatattggtctgtagttttgtttttcttgcaatgtctttgtctggtttttggcatta

SEQ ID NO: 389368 - DNA, 201 bp, Homo sapiens
ttcctagtttgctgagagctttatcaggaatgggtgttggattttatcaaattctttttctgcatctattgatatgatcatgttattttttcctgttgatytgatggactatattaattgacctttaatattgacccagccttacatgcctagaataaatcccacttgatcatagcatgtaattttttatacattgttaat

SEQ ID NO: 389369 - DNA, 201 bp, Homo sapiens
caatatgatgttgaaaaggaatagtaagaggggacatccttgccttgttcctaatcatcatgggaaagcttccagtttgtcaccaataaggacaatgtttrctgtaggttttttgtagatgttctttatcaagttgagtaaattcctcctctattcctagtttgctgagagctttatcaggaatgggtgttggattttatc

SEQ ID NO: 389370 - DNA, 201 bp, Homo sapiens
ttgttgacaattcttttggattttctacataaacaattatatcatttgtgaacaaagactgttttatttcttccttcccaatctgtatacattttatttcyttgttttatcttattgcattagcaaagacttccaatatgatgttgaaaaggaatagtaagaggggacatccttgccttgttcctaatcatcatgggaaag

SEQ ID NO: 389371 - DNA, 201 bp, Homo sapiens
gagattatacagtccatcctcaacacttgtggattctgtatatgcacgttgctaatatttatttttaaagccaaaatctatactctgcactttcttggccrttcacagacatgcacagagtgcggaaaaattgtcacctgacctgacatgcatattcccagctgaagctgaacaggcaatattctgcctcttcatttcagc

SEQ ID NO: 389372 - DNA, 201 bp, Homo sapiens
aaaaattagctgagtatggtggcatgtgcctgcagacccagctacttgggaggctgaaatgagaggatcacttgagcctgggaggcagagattgcagtgakccgagattgcgccactgcactccagcctgggtgacagagagacactctgtttcagaaaaaggaaggtgcttcagccagtagatggccaggttagaatctg

SEQ ID NO: 389373 - DNA, 201 bp, Homo sapiens
gagccttgacagaaaaagaaaataaatttcagtattcatcattcataatacggggaaatagtaatgaaacttttgtttcagtttatatctgtgcatgtatrtatgttcgcaggcatatggagtatggaacatttaaaactgtttcttatgttaatcacaataaaactagtataaccactgacccagtggtcaacagctgga

SEQ ID NO: 389374 - DNA, 201 bp, Homo sapiens
aaacaaggccactccataatcatgagtgaacacagacaaaaacatgaacattgtctaagccacttactggtctcgatctactgacatattagccctatagrtgggctaatatgaataacggctgcttctttactacttatgacactagcctcaattcattcttcccatcttctacgtaaggactattaagatactcagaca

SEQ ID NO: 389375 - DNA, 201 bp, Homo sapiens
aagaccctatctcaaattaaaaacaaacaaacaaacaaaaaaaaaacaggctgtgtaactctgtacctcagttttatcatctgtgacattgagttaacagyagtacctccctcatatggtttattaagattaaatgagctaatatttataaaatatttggaaaagcacttggttcataggaagatttattaaataaaacct

SEQ ID NO: 389376 - DNA, 201 bp, Homo sapiens
gagatgggaggattgcttgaggccaggagttggagaccagcctggtcaacatagcaagaccctatctcaaattaaaaacaaacaaacaaacaaaaaaaaaacaggctgtgtaactctgtacctcagttttatcatctgtgacattgagttaacagtagtacctccctcatatggtttattaagattaaatgagctaatatt

SEQ ID NO: 389377 - DNA, 201 bp, Homo sapiens
ttgtgaagctgagatgggaggattgcttgaggccaggagttggagaccagcctggtcaacatagcaagaccctatctcaaattaaaaacaaacaaacaaamaaaaaaaaaacaggctgtgtaactctgtacctcagttttatcatctgtgacattgagttaacagtagtacctccctcatatggtttattaagattaaatg

SEQ ID NO: 389378 - DNA, 201 bp, Homo sapiens
aacccgggaggcggagcttgcagtgagcagaaattgtgccactgcactccagcctgggcgacagagtgagactccgtctcaaaaaaaaaaaaaaaaaaaaatccctgttcgtagagctcatcactgtggacccagcaccaggctacgtacctgatgaatagggagacgttgatcctggtggaagcccattgccctagcgtg

SEQ ID NO: 389379 - DNA, 201 bp, Homo sapiens
ctgttttcagcattggagtattaagaataaagttgctatagacattcatatacagattttagtgtgaacataagttttcatctctctaggttaaatgccartgaggacaattgctgagtcacacggaaattgcatgtttagttttgtaagaagctgccaacctgtttccagagacgctgtattattttatattctcactgg

SEQ ID NO: 389380 - DNA, 201 bp, Homo sapiens
catctcagcactttgggaggccaaggcgggtggatcacgaggtcaggagattgagaccatcctggccatggtgaaactccatctctactaaaagtaaattwaaaaaaaaaattagctgagcatggtggcgggtgcctgtagtcccagctacttgggaggctgaagcagaagcaaggtgagaacccgggaggtggagcttgc

SEQ ID NO: 389381 - DNA, 201 bp, Homo sapiens
gtatagatgtaccatggtttaacaattcatccgccgaaggactggctgttttcagcattggagtattaagaataaagttgctatagacattcatatacagrttttagtgtgaacataagttttcatctctctaggttaaatgccaatgaggacaattgctgagtcacacggaaattgcatgtttagttttgtaagaagctg

SEQ ID NO: 389382 - DNA, 201 bp, Homo sapiens
catttctaagagttcaaaaattaggtttctccctgacttctcgtttctaccacctccttttattttccaccttactttttgtttttaattaggcaatgtayctaggagactgtttcatatccacgtgcatcagtctgcctccactttttaaatagctacatagtattttattacatggatagatcataatttatcccatta

SEQ ID NO: 389383 - DNA, 201 bp, Homo sapiens
aacagatgtgctatcatcctggcttcgttgttcctttatggaccacaggcatagtagatttagcataattcttaagggccctaggatttagaaatttaaawgagcattggcttcaacttaaagtcaccagctgcattagctccttaatgcacagagtcagcctctcctttgaaactttgaagccaggcattgacttctgtc

SEQ ID NO: 389384 - DNA, 201 bp, Homo sapiens
cgccactgctgagctgctacaccagtcttgagactgtcaaattctggacactgtatgaactaaacaaataaagatctttaggattttaagccaccattgtygaagatgctgttacttgcagagaaggcatttttaatcattacgaagaaaaacagatccacactcgaggagtttttatctaacgtgactggtagaatgtgc

SEQ ID NO: 389385 - DNA, 201 bp, Homo sapiens
tcagcacttgttgcttcagcttgcacttttatgttatagagatggcgtctttccttaaaccttatgaaccaacctgtgctagcttcaaacttgtcttctgyagcttcctaacgtctctcaatccttatagaattgaagagaatcagggccttgctctggattaggctttggcttaatggaatgttatggctggtgtgatct

SEQ ID NO: 389386 - DNA, 201 bp, Homo sapiens
tttatgttatagagatggcgtctttccttaaaccttatgaaccaacctgtgctagcttcaaacttgtcttctgtagcttcctaacgtctctcaatccttayagaattgaagagaatcagggccttgctctggattaggctttggcttaatggaatgttatggctggtgtgatcttatatggagatcactaaaactttctcc

SEQ ID NO: 389387 - DNA, 201 bp, Homo sapiens
tcttaaagaaaaaaaaaaaaagatcactgatcatagaagcaaacacatgctcttggaaaaatggctcttatagagttgcctgactcagggttgccacaaaacttcaatttgtaaaaaatgcaatatctgcaaagtacaataaaatgaagcacagtaaaataaggtatgcctgtctttgtccattctttcactaataccaca

SEQ ID NO: 389388 - DNA, 201 bp, Homo sapiens
tgagcccaagagctggaagtttgcagtgagctatgatcacaccactgcacttacagcctgggtgacagagcaagaccttgtcttaaagaaaaaaaaaaaaagatcactgatcatagaagcaaacacatgctcttggaaaaatggctcttatagagttgcctgactcagggttgccacaaaacttcaatttgtaaaaaatgc

SEQ ID NO: 389389 - DNA, 201 bp, Homo sapiens
agagagttcccatacccctgtccaccaccacgcctctcctcctgttattaacatcttgctttagtgtggtacatttgttacaattaatgagccaatattgrcacagtattattaactaaaattcatagttaatattagggttcactctgtgttgtgcattctatggcttttgacaaatgtataatgacatgtatctaacat

SEQ ID NO: 389390 - DNA, 201 bp, Homo sapiens
ggctcgctgtatcttcccacctcagcctcccaagtagctgggactacaggtgcacaccaccatgcctggcttgttattttaaataataataataataatgyttttgaaaggtagtatatacccacagtcaaacatttctaagagttcaaaaattaggtttctccctgacttctcgtttctaccacctccttttattttcca

SEQ ID NO: 389391 - DNA, 201 bp, Homo sapiens
tttggcaaaatatatcataattttgcttgtttatttgtttttagagacagagtcttgctacgttgcccaggctggacccaaactgggctcgctgtatcttyccacctcagcctcccaagtagctgggactacaggtgcacaccaccatgcctggcttgttattttaaataataataataataatgtttttgaaaggtagta

SEQ ID NO: 389392 - DNA, 201 bp, Homo sapiens
gtttgaaccggggagacagaggttgcagtgagtcgagatcgcaccaccgcactccagcctggggaacaagagtgaaacaccatctcaaaaaaaaaaaaaaatgtattgcaaaaggcattggaggccaccataaagagtttgaacttaggaccttgttgggagtgagaagccacagggcctttggaatgaggagtgccacag

SEQ ID NO: 389393 - DNA, 201 bp, Homo sapiens
accccatctctactaaaaatacaaaaactagctgggcatggtggcacgtgcctgtaatcccagctacccgggaggctgaggcaggagaatcgtttgaaccrgggagacagaggttgcagtgagtcgagatcgcaccaccgcactccagcctggggaacaagagtgaaacaccatctcaaaaaaaaaaaaaaatgtattgca

SEQ ID NO: 389394 - DNA, 201 bp, Homo sapiens
tgaagagcaacaaagagacttgggataaattaagatggtactgctggccaagcgtggtggctcctgcctgtaatcctagcactttgggaggccaaggtggkcagatcactttaggtcaggagttcgagaccagcctggccaacatggtgaaaccccatctctactaaaaatacaaaaactagctgggcatggtggcacgtg

SEQ ID NO: 389395 - DNA, 201 bp, Homo sapiens
ctttccaatctctgtctctaaccacccccaaaggcaaccactgttctgatgtttttcctaccataggttggttggcaaaagccctctaattttggcttttycctgaaactatggaaatttgccccagaaagctgaaatcagatagaaaatctgcctgcttctccttccttggtctcacttctcttccccatactcaacaca

SEQ ID NO: 389396 - DNA, 201 bp, Homo sapiens
gaactggacagctagaaaacatgatgctacatgaagcaaaaacccttttttcattttattatgaaaattttcaaacatagagcaaagttaaaagaatttamtagtgaacaccatatgcccctcacctaggattctaccattaacattttactatgcttattttatcactcttccatccatcctttcgtccatccacacatc

SEQ ID NO: 389397 - DNA, 201 bp, Homo sapiens
tcaagggcaggtacaagccagtcaagtacggccagtgctgggtcttcgccggagtcctgtgcacaggtaccctgggagagaagggccccagggtacctgtrcccccagcttcctctatctaaatgtatttacatatatttgcatatgctgcaacccatcttcattgatggattcattgacagggagaacgaagtctggctg

SEQ ID NO: 389398 - DNA, 201 bp, Homo sapiens
aggctgaggcaggagaatcgcttgaacctggaaggcagaggttgcctctgtgagccaagatcatgccactgcgctccagcctgggtgacagagtgagactycgtctcaaaaaaaaaaaaaattcattctaacttacttaattttctgaaataggaaaaacattcatgtggtttaatatttgaaaggtacaaaatgggttgc

SEQ ID NO: 389399 - DNA, 201 bp, Homo sapiens
gagagacaggaaccaatggagagcttgagaacaacgagtgatcttagattttaacaggatccttctggcttccatgttgagaatgagccctgaggatatgygggggtgggggcacaggggaagtgaaatagggaacccagtgagcatgacagcatctagaaaatgaaaggggccatagtacctcccttaggtgtatgttag

SEQ ID NO: 389400 - DNA, 201 bp, Homo sapiens
ctactcaggaggctgacacggaaggatcttttgagcccaggagtttgagtccagcctgggaaacatagcatagaccttgtttcttaaaaaaaaaaaaattrataacaataaaaagaactggacagctagaaaacatgatgctacatgaagcaaaaacccttttttcattttattatgaaaattttcaaacatagagcaaag

SEQ ID NO: 389401 - DNA, 201 bp, Homo sapiens
agctactcaggaggctgacacggaaggatcttttgagcccaggagtttgagtccagcctgggaaacatagcatagaccttgtttcttaaaaaaaaaaaaawtaataacaataaaaagaactggacagctagaaaacatgatgctacatgaagcaaaaacccttttttcattttattatgaaaattttcaaacatagagcaa

SEQ ID NO: 389402 - DNA, 201 bp, Homo sapiens
attagaagcagcaatcagcaatcagagcacagattcctgatatttggaggacagggtcccttttgcccactctggctcttttaagctgctcccagaatgcrtgcaaagtttcctaccatggagaatgggtagttgctactgcactaaaagctaaaatttagtaaaattaattgcaatttaccatccaaaccttctcttggc

SEQ ID NO: 389403 - DNA, 201 bp, Homo sapiens
ttgccagatggctcagtcccatggcttccaaataattctgtctgtcagctgggagctcagtgggctgtgggttggaagccttggttcgtctccaggtgagmttctccgtgggccatttgggtttcttcatggcatggtggctgggttctaagagcaagcaacccaagggaaccagaaagaagctgtattaacttttataat

SEQ ID NO: 389404 - DNA, 201 bp, Homo sapiens
cagctactcaggaggctgacacggaaggatcttttgagcccaggagtttgagtccagcctgggaaacatagcatagaccttgtttcttaaaaaaaaaaaaattaataacaataaaaagaactggacagctagaaaacatgatgctacatgaagcaaaaacccttttttcattttattatgaaaattttcaaacatagagca

SEQ ID NO: 389405 - DNA, 201 bp, Homo sapiens
atagatcataatttatcccattaatgaagacaggagagttttcactctttctgttataattaatgttgcaataaatatcctcgtacttaaatctttccacrcttttggatccatctgtcggacaaattcctgcacatggaattgctgtcttgaagaatggctcctctcaacaatttcacttggcagaaattgtcccatcat

SEQ ID NO: 389406 - DNA, 201 bp, Homo sapiens
gattagaagcagcaatcagcaatcagagcacagattcctgatatttggaggacagggtcccttttgcccactctggctcttttaagctgctcccagaatgygtgcaaagtttcctaccatggagaatgggtagttgctactgcactaaaagctaaaatttagtaaaattaattgcaatttaccatccaaaccttctcttgg

SEQ ID NO: 389407 - DNA, 201 bp, Homo sapiens
atgaggtgatgtagaggtgagttagagcttcacagtcttttattagttgcccgatgactttgcccaagggtgagagggagcagtatcatcttccattttayagccaggtaaacagaggcccagagaggggaagggacaccctgctgcccgaccagtccaggtctagctgtgataggttgttctaactcattgtcttgtgag

SEQ ID NO: 389408 - DNA, 201 bp, Homo sapiens
catgctgttcctagtggcacccactccccagagctgggggagggcgtcagaagctgggggggtttgtgcctttaactccagctttagctctccagggtggraggagtgggttggacataaggggatgggtgcaatagtggcactcagcaatggggtatatggaggtgggggtggacatgactaatgatccatcctctaact

SEQ ID NO: 389409 - DNA, 201 bp, Homo sapiens
tattttaaatatttttataagctcctcacaaacatcattttaatagatatttaaataaatagaatttaacagatctttaaataaatatatggtgacctatsttttcttttaggtagttatcagcttattgctattaaaaataacactaaacttttgtttatctacagagtgtcaggtaagcaagtgaacattttgatgcaa

SEQ ID NO: 389410 - DNA, 201 bp, Homo sapiens
atgataatacctctgtagtacctcctagagaaaaaaaatatagcaccaagtgctatagtacacatagcaaatctgcaaaagtgctagctatcattattatmtgaggcttttgacccagctctcagagaagctggaaatttgcatttttatgtgaaatttcctggcaactgatttaaaactttatttacatagagaatcaaa

SEQ ID NO: 389411 - DNA, 201 bp, Homo sapiens
taagggagcatgaatggaatttggagctttactgcctggttcaagtcccagctccctcacttaccacataagctgtgtgattgaggagttactttacttcyctgtgtctcggcttccttgtctgttaaatgtgggtgatgataatacctctgtagtacctcctagagaaaaaaaatatagcaccaagtgctatagtacaca

SEQ ID NO: 389412 - DNA, 201 bp, Homo sapiens
ccagctactcaggaggctgacacggaaggatcttttgagcccaggagtttgagtccagcctgggaaacatagcatagaccttgtttcttaaaaaaaaaaawattaataacaataaaaagaactggacagctagaaaacatgatgctacatgaagcaaaaacccttttttcattttattatgaaaattttcaaacatagagc

SEQ ID NO: 389413 - DNA, 201 bp, Homo sapiens
cgcctgtagtcccagctactcaggaggctgacacggaaggatcttttgagcccaggagtttgagtccagcctgggaaacatagcatagaccttgtttcttwaaaaaaaaaaaattaataacaataaaaagaactggacagctagaaaacatgatgctacatgaagcaaaaacccttttttcattttattatgaaaattttc

SEQ ID NO: 389414 - DNA, 201 bp, Homo sapiens
acgcctgtagtcccagctactcaggaggctgacacggaaggatcttttgagcccaggagtttgagtccagcctgggaaacatagcatagaccttgtttcttaaaaaaaaaaaaattaataacaataaaaagaactggacagctagaaaacatgatgctacatgaagcaaaaacccttttttcattttattatgaaaatttt

SEQ ID NO: 389415 - DNA, 201 bp, Homo sapiens
gaggctggaaatttgcaaaatacagcaaaggcattcaaaagggtctgcaagccgtgtgcagtggcatacgcctgtagtcccagctactcaggaggctgacmcggaaggatcttttgagcccaggagtttgagtccagcctgggaaacatagcatagaccttgtttcttaaaaaaaaaaaaattaataacaataaaaagaac

SEQ ID NO: 389416 - DNA, 201 bp, Homo sapiens
tttgacctgtttccctcccccttcctcttctctgtagccttataacccggaagcctcacaatcacccatatctttaaaaaccagtaacgcagccaccagayggggcagaccagtttgaagctccttatgtagcctcatccccagaacattgtcactatttgattcatcttgcagctccctggaaaggtgttgtttttacat

SEQ ID NO: 389417 - DNA, 201 bp, Homo sapiens
gagcactcagcttccaggaataagatccagaacctcagaaccggcttgacgaggaaatagaagctgctaccaacgctcctgcccctgttctgccaatgctyctctggggcaggaactcatcctgcagctactagtaaaccatgatccccatggaagctggtctctgccaccattcatgccaacagacctgcctcctgcagg

SEQ ID NO: 389418 - DNA, 201 bp, Homo sapiens
agaccagtttgaagctccttatgtagcctcatccccagaacattgtcactatttgattcatcttgcagctccctggaaaggtgttgtttttacatgatctracttaaattttgccctggaggagaagtcctagtcccaaagtgtttttcaaaaacaatcagcagcacctgtttaacatcacagctgcctggagcagtgata

SEQ ID NO: 389419 - DNA, 201 bp, Homo sapiens
gccagtttggcccagagataacagaacccaggactctactgccaggctatgatgctcacttctaaactgagtatgggccgggtgcagtggctctcacttgkaatctcgcactttgggaggctgaggtgggcagatcacctgaggtcaggagtttgagaccagcctggccaacatggcgaaactgtctctacttaaaataca

SEQ ID NO: 389420 - DNA, 201 bp, Homo sapiens
aggctgtggtccctgccctgtgcctccagctgagaagtcctcactttccatggcttctgtcccaactccaggctactgctggtcaacaagtcctttcagcrtcttcattcccctcccttgaccatatgggaacttctggatccctgcctgccgtggacaggaggcttgtttcaggcctacctctcaagctcctctgtctgc

SEQ ID NO: 389421 - DNA, 201 bp, Homo sapiens
gtacccctgccctgagctggtggttcgcaggggccagtcgttcagcctcacgctggagctgagcagagccctggactgtgaggagatcctcatcttcacgrtggagacaggtaactgggcttgccagcaccctcttctcgtctgcagctggagggacctgtcttatgactcagtaacataagaccttgcagtcagcagctc

SEQ ID NO: 389422 - DNA, 201 bp, Homo sapiens
actcttccagtccaagcggtcttgtaattataatccagcccctgccgcgtaagtgcttaatctctcagactcctcctccttctgttctcctccaggattgyatctagggagcctggaatgggggcttctgtgagggaggttgggacccacatgttctctgtttacagacttgtctgctttcgcctggtccttgattggtga

SEQ ID NO: 389423 - DNA, 201 bp, Homo sapiens
attatcaactttgtgaacttgagaagtatgcatattctttctgagcctcagttttcccttcagaaaagtgggaacaacactggtgcttagtagtaggtaaratgcaaattagagcagctcctgacacgcagaaagtgcacagtaaatggtagcactgcagttctccaatgggtaatgaaaagatgactttatttttatcac

SEQ ID NO: 389424 - DNA, 201 bp, Homo sapiens
atacttttttcaactgatttccttaaaaaacacttagaatttacaagaagaacatcattctcccaacagaattaaattactttcattctttttcccgggaragttttgctggaaatgtcctctcctagctctgagctaacacaactctctgttaatgtatttcttaggaatcatccacttcaatgggctgccacttttgtg

SEQ ID NO: 389425 - DNA, 201 bp, Homo sapiens
gcagagctcggcagggacagcttgcgtctgcatcagctggggcagattgcctgggggctgaaggacccacttgccagatggctcagtcccatggcttccarataattctgtctgtcagctgggagctcagtgggctgtgggttggaagccttggttcgtctccaggtgagcttctccgtgggccatttgggtttcttcatg

SEQ ID NO: 389426 - DNA, 201 bp, Homo sapiens
gaggcaggattgcttgaggctaaatttaagaccagcctggcaacatagtgggacccccatctttacaaaaaattttaaaattagccgggtgtggtggtgcrtgtctgtggtcccagctcttcaggaggctgaggtgggaggatcacttgagcccaggaaggtcgaggtgagagtgagctgagatggcgccactgcactcca

SEQ ID NO: 389427 - DNA, 201 bp, Homo sapiens
attgtgttctatggggttaatggggagcaaaatagggacaaatggggagaagttgcaagaagaaagagcttggctcagcagaaggaagggctttctaacaytgggcggtgagtgagctacctctcagaggtatggcaagctgggaccatgatcaagtatccaccaagaattcggccaagggaatttgtgcctgggcaggaa

SEQ ID NO: 389428 - DNA, 201 bp, Homo sapiens
cgtcagtctcactgtccccatgaggactaagagggacactggctaggacagaacgtatctgaaatcaccggtagttccccctgcagaatcctggaccctarccccggctattacaccacatatggcaggtcatggaggtgtgatgctgatggatgtggatgacttagatcaccaaagcagcagctccagggacagattcca

SEQ ID NO: 389429 - DNA, 201 bp, Homo sapiens
tgtactcccagctactcagaaggctggggtgggagaatcacttgagcccaggagatccaggctacaatgagctatgattcattaagcctggatcctgatarttaatggaaacttaaagagtttactaaacgctttcttggcaaagcctagctttaaaaacaacattgtcttatgaaggacaaaacaaaacaaaacagaaac

SEQ ID NO: 389430 - DNA, 201 bp, Homo sapiens
gttaacttctctctgattcttccgaagtccttcttgccgtactggtgaggcttcaggaactgactgcaggtgttcacgccaatatctatgccgggaagccsttttactcctctgttctgcaaagctctcagtaaggcatttttgtgttttagggggcggcattcatgtctggctttctgtagtgactggcctgaggatgag

SEQ ID NO: 389431 - DNA, 201 bp, Homo sapiens
tttgctgttgttaacttctctctgattcttccgaagtccttcttgccgtactggtgaggcttcaggaactgactgcaggtgttcacgccaatatctatgcygggaagcccttttactcctctgttctgcaaagctctcagtaaggcatttttgtgttttagggggcggcattcatgtctggctttctgtagtgactggcct

SEQ ID NO: 389432 - DNA, 201 bp, Homo sapiens
caagatgcctggatctgcagcaaccacctggtggcaatgaagcaacaggcacagaaaacagccaagagtcaaggatagtgaaacacagacgttgaaggaaygaggccctttggcgccactgctgagctgctacaccagtcttgagactgtcaaattctggacactgtatgaactaaacaaataaagatctttaggatttta

SEQ ID NO: 389433 - DNA, 201 bp, Homo sapiens
gcacagcctctctggggagcagtttgaggaggacatcctgaacatctgcctctccatcctggatcgaagccccggtcaccaaaacaacccagccaccgacrtgtcctgccgccacaaccccatctacgtcaccagggtcatcagtgccatggtgagaagcccctccatccctgcacatgtacttcctcaaggatcccccag

SEQ ID NO: 389434 - DNA, 201 bp, Homo sapiens
aatttgactcccacctcatcttaatttcttggtttacttcctatatgagtttgaacaggaaaatacccactctgggccttaggtttcttcatctgagaacygaggaaaataaagcctgtctcagaatggttgcaaggaccagagagaaaggagctattagttgtgcattcccttccttcttcccagtgccattgaagaaag

SEQ ID NO: 389435 - DNA, 201 bp, Homo sapiens
tttaaagtgaacaattcagtgggatttaggacaattcagtggcatttgtgcaaatggtgacttccatacagttctaaaacattttcatcaccctaaacagkcaccttatacccataaagcaactcctcctcattcctcacctccaacccagcccttggcaaccatcggctttccgtatcattttacctattctgggcatct

SEQ ID NO: 389436 - DNA, 201 bp, Homo sapiens
tggtgtgaacccaggaggcagagcttgcagtgagctgagatcacaccactgctttccagcctgggcaacagagtgagactctgtctcaaaaaaaaaaaaaagaacataagagatccttttagtgatggggttgttttatacattggctgtggtggtggatacacaaacctacacatgtgataatatttgcatacaaataaa

SEQ ID NO: 389437 - DNA, 201 bp, Homo sapiens
gagagggttgactggaattcattaagcatccaccatactgtcctgatttggctccatctgacttctttttatttcctaatctcttttttttttttttttttgagacagagtcttgctctgccgcccaggctggagtgcagtggcgcgatctcagctcacctcaacctctgcctcccgggttcaagcgattctcccgcctca

SEQ ID NO: 389438 - DNA, 201 bp, Homo sapiens
gaatcacctgaacctgggaggcggaggttgcagtgagccgagatcaggccactgcactccagcctggatcacaaagcgagactgtctcaaaaaaaaaaaaagaacctagaaaaagaagagcaaactaaacacctaaaaaagcagaaagaggaaacaagaaagattaaagtggaaataaatgttaatgaaataaagagcaga

SEQ ID NO: 389439 - DNA, 201 bp, Homo sapiens
caagacattttgcttgtcggttttctggagaaccaaagagtaacaacacctgcttattacgagtgttttgataaagttagctgaagctttcagaaaaaaaacccagaaaagcttcaccagagagtccttctccaccacaataatgttcctgctcattcctctcatcaaacaaaggcaattttgtgagagggttgactggaa

SEQ ID NO: 389440 - DNA, 201 bp, Homo sapiens
tacaaagcccttaccatgagcttttaagtgagacactagtacaaagtttattttacagaggagaagacagatgtacagagaggcaagttgacccagccagrgaacatagctagtaagggagaactctcctgcagaacccagagcccatgctcctcactctgcactgcactgccactatttaattataatattgtctactgt

SEQ ID NO: 389441 - DNA, 201 bp, Homo sapiens
ccttcccccggatggcccatcagctgcagagggcccactgcaggtggcctggagccaggcctcaccccatgtatatgacgctgacagcagcttccattcaygttgtctctgtgctctgagccaagtgcctttatttaggctacattaatagcttcctctgtttgctaagcacctcttctaccttagaagatttcccatttg

SEQ ID NO: 389442 - DNA, 201 bp, Homo sapiens
ataaaggaagaaaacaaaaaaaattagccaggcatggtggtacacacctgttgtctcagctactcaaaagtgaggtgggaggatcacttgagcccgggagktcaaggctgcagtgagctgagatcctgccactgcactccagcctgggtaacaaagggagactctttctcaaaaaaaaaaaaaaaaagttaaccatctgaa

SEQ ID NO: 389443 - DNA, 201 bp, Homo sapiens
tttttccccgtgtggatatccagttgcttcagcaccatttgttgactatcttttctccattgtatttcctttgctactttgtcaaagatcaactgactatrtttgtgcaggtctatttctgaactctcttctattccattgatctagaggcatacctcagacatattgcaggtttggttccagacaaccacaatagtagga

SEQ ID NO: 389444 - DNA, 201 bp, Homo sapiens
gcttactccttctttgttgcaggatatcctccaacagcttctcaagaaagggcccttaaaggcagatcttttgagaccttgcatgtctaaaatgcattttrtcttcacacttggcttatagtttggctgggtatagaatcctacaatggaaatgattttcccttggaattttctgcactctagtgttattgttgggaaaac

SEQ ID NO: 389445 - DNA, 201 bp, Homo sapiens
ctggaacttgtatcctaagttggttctattgtttcatgtagcaaacatattttcttcttacctagcttactccttctttgttgcaggatatcctccaacarcttctcaagaaagggcccttaaaggcagatcttttgagaccttgcatgtctaaaatgcattttatcttcacacttggcttatagtttggctgggtataga

SEQ ID NO: 389446 - DNA, 201 bp, Homo sapiens; identical to SEQ ID NO: 85371

SEQ ID NO: 389447 - DNA, 201 bp, Homo sapiens
ttgatccatgtagtaaaatcatgtttacttttcctttcctcagtaacattttgctttcccttccctggagttaatgattcaaagtctagcctttatattgrcttagttttctatacacccactactatttcaatcccaaacattcactaattttttaaatagcctctcaagacttttagacacaccaggtattctatcaga

SEQ ID NO: 389448 - DNA, 201 bp, Homo sapiens
actttctgttgtgagaattggcaagggtaatggaaaagccccctggaactgttgttccagctcgtgccacatggggtcactgttgaacactggtcctgcasagtgctcactcaccacagcaggggctgtaggagctcccaatcttgggacacatgtgtcagctatgtgagttcctacccacatgttcagtcattatcccca

SEQ ID NO: 389449 - DNA, 201 bp, Homo sapiens
tactttactatcaggtgcttaccttattaagctttgtaaattcacagttgatccatgtagtaaaatcatgtttacttttcctttcctcagtaacattttgytttcccttccctggagttaatgattcaaagtctagcctttatattggcttagttttctatacacccactactatttcaatcccaaacattcactaatttt

SEQ ID NO: 389450 - DNA, 201 bp, Homo sapiens
gatgggcatttgggttgcttctgcctttcagctattgtaaatgctactaccataaccatgcctgcacatgtgcttattggaaattttacttcttttgagtrtatacttgcaagtggaatttctgggttttttgataattctgttgaacttttgagaaacaatgacttttttcatagatgttcttttaagctgctaagtttg

SEQ ID NO: 389451 - DNA, 201 bp, Homo sapiens
gtactccaccctgggtgacagagtgagattctgtctcaaaaataaacagacaagacaaaaattacaacagatatacagtaacccagacagtgtgatactgrcatgagaatggacatatagatcaaagaaactgaactgagagttgaaaaataaacccttaaaattatgatcaattgattctacaagcgtgtcaagacaatt

SEQ ID NO: 389452 - DNA, 201 bp, Homo sapiens
catataaaaggaatcagacaatatatgactttttgtctgtcttctttcacttcgtataatgttttcaaggtttagtacaattgttttcaaggcttatctaygttgtaagatgttatcagtactttgtctcacttttcggctgagtaatgctccatgcatattccaccgtttatccattcatctgaggatgggcatttgggt

SEQ ID NO: 389453 - DNA, 201 bp, Homo sapiens
tccattaaaaagctattagaaatgataaacaagttcagcaagtttgcagaacacaagatcaatatacaaaaattaatcagatttctagatactggcaatgrataatccaaaaatgaaattaagaaaataaatccatttacaatagcatcaaaaagaataaagtacttaggaataaattcaacaaaagaagagcaagactta

SEQ ID NO: 389454 - DNA, 201 bp, Homo sapiens
agcacttggttcataggaagatttattaaataaaacctatccaatggtctagccaacaattactgacatttcctgtatgcttggcatcaaataagatacarccaagagttgcatgacaagtgtcctttggtggggagtacctggtgatgtaacttcagtggttctcaactgtggcagattatatttcacagggtggtcata

SEQ ID NO: 389455 - DNA, 201 bp, Homo sapiens
aacaggcaccttatacccataaagcaactcctcctcattcctcacctccaacccagcccttggcaaccatcggctttccgtatcattttacctattctggscatctcatataaaaggaatcagacaatatatgactttttgtctgtcttctttcacttcgtataatgttttcaaggtttagtacaattgttttcaaggctt

SEQ ID NO: 389456 - DNA, 201 bp, Homo sapiens
cagggtggtaaggtttctcaaatttctgtgtgaatcaggatcaactggggctgcttattaaaatgcagattctcacaatccatccccaagctcactggctragactcaacgaggaataagcatttttatggcatacagatgtgtctgatgcaggaggcccactgggcagacttggtgagcagaggcacagggggacccggg

SEQ ID NO: 389457 - DNA, 201 bp, Homo sapiens
tgggtagcttctaggacctgagagcagtccttagctgacagctagcaaaaaaacaaagacctcagtcctagaacttccggtttctcccaacaatctgcatragcgtggaagaggaccccaagcctcagatgagaagcggccctgggtagcagcctggtttcagccatgtgagaacatcagcagagaatccaattaaatagc

SEQ ID NO: 389458 - DNA, 201 bp, Homo sapiens
cacttggcaagtgactatgggtagcttctaggacctgagagcagtccttagctgacagctagcaaaaaaacaaagacctcagtcctagaacttccggtttytcccaacaatctgcatgagcgtggaagaggaccccaagcctcagatgagaagcggccctgggtagcagcctggtttcagccatgtgagaacatcagcaga

SEQ ID NO: 389459 - DNA, 201 bp, Homo sapiens
ttgagctttcaaggttttgctgttgttaacttctctctgattcttccgaagtccttcttgccgtactggtgaggcttcaggaactgactgcaggtgttcaygccaatatctatgccgggaagcccttttactcctctgttctgcaaagctctcagtaaggcatttttgtgttttagggggcggcattcatgtctggctttc

SEQ ID NO: 389460 - DNA, 201 bp, Homo sapiens
gcttgagcttaggaggtagaggctacagtgagccaagatggtgccactgcactgcaggctgggcaacagagtgagaccctgtctcaaaaaaaaaagaaagwaagataatgtgtcccccacgacctcaatatagtgagcagcaaactccctctgcaagaacttgtctgttagatgctggggcccggtaatgagcaagtcagc

SEQ ID NO: 389461 - DNA, 201 bp, Homo sapiens
ttgtacctgctgcacccttctcctcacatcctctcggcacctgtaggaggggggccagcttcctaacccatgacccaactcagtgggcaggtttgttctarcctcttgacattagctacgccaggtctggccagcacggtgcccagacattgcattccatggggtttgctcaagggaggtaaaagctttatttgttctaca

SEQ ID NO: 389462 - DNA, 201 bp, Homo sapiens
cacttttttctttctttagaaacagggtctcactctgttgcccaggctggagtgcagtagcaccatcatagctcattgtaaccttgaactcctgggctcawgcagtcctctcgcctcagcctcccaagtagttgggactacaggcactcaccaccgcacctgtctaatttaaaaaaaaaaaatttttttagagacagggcc

SEQ ID NO: 389463 - DNA, 201 bp, Homo sapiens
tctttagaaacagggtctcactctgttgcccaggctggagtgcagtagcaccatcatagctcattgtaaccttgaactcctgggctcaagcagtcctctckcctcagcctcccaagtagttgggactacaggcactcaccaccgcacctgtctaatttaaaaaaaaaaaatttttttagagacagggcctcactatgctgc

SEQ ID NO: 389464 - DNA, 201 bp, Homo sapiens
gaggcatgcctttggtcttcctcttctctgctcctagcacatagtaggtgctcaataaacagagaaggatgggatgaatggatgatgggctgagagatttycatcttgaataagtagggaaagcttggaaacatctctgggggctcttggagaaattatctggtattgtggtagctccctgacctaaatttgactcccacc

SEQ ID NO: 389465 - DNA, 201 bp, Homo sapiens
caaatttggggagttttcagcaattatttcttaaaatattttctctgcccctttctctcattcttctccttttgggattcccacaatgcttatttttgcccacttaatggtgtccaccacaggtttgttaggttatgtttacttttcttcaatctttttttttttctatttcccatattcaataatttccattgtcctgtc

SEQ ID NO: 389466 - DNA, 201 bp, Homo sapiens
ctttttagtatatcagctcactgcctttgggcctctaaagtttttaatgagaaatttacttttaatcttattgagattcccttgtatgtgagaagttgcttggtttttgctgctcttaagattttctgtttttgatttttaagagtttgattttaatgtgtcttggtgtaggtctctttgagttcattctacttggagttc

SEQ ID NO: 389467 - DNA, 201 bp, Homo sapiens
ggtccagtttcaatcttctgcacatggctagcctgttatctcagcactgtttattgaataaggagtccttcccccattgcttgtttttgttgactttgtcraagatcagatggttgtaggtgtgtggctttatttctgggttctctattctgttacattggtctatgtgtctgtttttgtacctgtaccatgctgttttgg

SEQ ID NO: 389468 - DNA, 201 bp, Homo sapiens
gagcgcaataatgtgatctcagctcactgcaacctccgcctcctgggttcaagcaattctcctgcctcaccctcccaagtagctgggattacaggtgcccrccaccatgcccagctaatttttgtatttttagtagagacggggtttcaccatgttggccaggctgcccttgaactcctgacctcaggtgatctactcacc

SEQ ID NO: 389469 - DNA, 201 bp, Homo sapiens
gtgaagtccagaataggacaaaaaggctgactctcccctgaacaagagggaattcctcctgcctgcctgacttcgaatttggacatcagcttttcccttcyttcagactcaaactgaaacatcagctcttcctgattcttgagcctgctgggcttcagagtagaactataccgttggctgtcctgggtctccagcttgctg

SEQ ID NO: 389470 - DNA, 201 bp, Homo sapiens
aaaagaaagaaaataccaacaaatgctggaacacagaagaaacttgaggacattatgctaagtgaaataagccagacataaaagaacaaatattctatgakgccgcttatatctatgaagtacctagagtagccaaactcatacagacagaaagtagaatggtggttgtcaggggctaagatctggggagaatgggcatta

SEQ ID NO: 389471 - DNA, 201 bp, Homo sapiens
tggtggatacacaaacctacacatgtgataatatttgcatacaaataaacacacacacatcagtaggagtaaaaactagggaaatgtgcataaggttgacsggttgtatcaatgttaatttcaacgtgatactgtactgtcgttttacaaggtgtcaccattgggagaaactgggtaaacagtaacctgggatttttctgt

SEQ ID NO: 389472 - DNA, 201 bp, Homo sapiens
ttatagaaatgaagaacagcgtagtggttgccagtaggacagagggagtgtaggacagaagttgatgaagttgatgtggttataaaagaacacaagaggcygggcgcggtggctcacgcctgtaatcccagcactttgggaggctgaggtggacggatcatgaggtcaggagatcgagaccatcctggctaacacggtgaa

SEQ ID NO: 389473 - DNA, 201 bp, Homo sapiens
taaagaaagtatttttatttttactttttattaatgacttacacacttactaggcctgcccttagcaattgccaggctggggcaggagtagaaacggaggyttatgaatttggtatgcaaatatttaaaagtcataagtcatgttaataagctgctaaaaaatatgcattgtctactccagccttgacaaatatgtatatt

SEQ ID NO: 389474 - DNA, 201 bp, Homo sapiens
ctcctgggctcaagcagtcctctcgcctcagcctcccaagtagttgggactacaggcactcaccaccgcacctgtctaatttaaaaaaaaaaaatttttttagagacagggcctcactatgctgcacattgcttgacctcctggtctcaagtgatcttcccacctcagcctcccaaagcgctgggattataggtgtgagcc

SEQ ID NO: 389475 - DNA, 201 bp, Homo sapiens
cttgaactcctgggctcaagcagtcctctcgcctcagcctcccaagtagttgggactacaggcactcaccaccgcacctgtctaatttaaaaaaaaaaaawttttttagagacagggcctcactatgctgcacattgcttgacctcctggtctcaagtgatcttcccacctcagcctcccaaagcgctgggattataggtg

SEQ ID NO: 389476 - DNA, 201 bp, Homo sapiens
ccttgaactcctgggctcaagcagtcctctcgcctcagcctcccaagtagttgggactacaggcactcaccaccgcacctgtctaatttaaaaaaaaaaawtttttttagagacagggcctcactatgctgcacattgcttgacctcctggtctcaagtgatcttcccacctcagcctcccaaagcgctgggattataggt

SEQ ID NO: 389477 - DNA, 201 bp, Homo sapiens
caaatgttttttattttcttgcttgtacttttcagttccagagtttctgattctcttttggtttttatctcctttattaatatttccattttatttatacmtttgttctttattttcactacatttttctttagttctttgagtatctttaagacagttattccaaagtctttgtccagtagatcaagccttttccagaaa

SEQ ID NO: 389478 - DNA, 201 bp, Homo sapiens
ccttttgggattcccacaatgcttatttttgcccacttaatggtgtccaccacaggtttgttaggttatgtttacttttcttcaatctttttttttttctrtttcccatattcaataatttccattgtcctgtcttcaagtttgctgattctttcttctgcctgttcaaatttgcttttcaatccctctatcaaatgtttt

SEQ ID NO: 389479 - DNA, 201 bp, Homo sapiens
tctgttctcctccaggattgcatctagggagcctggaatgggggcttctgtgagggaggttgggacccacatgttctctgtttacagacttgtctgctttmgcctggtccttgattggtgacagttgatgtgtgtctgatcacaactggccttctggatgtggtgctggctcccagcactggaggctgtggtccctgccct

SEQ ID NO: 389480 - DNA, 201 bp, Homo sapiens
tctccttttgggattcccacaatgcttatttttgcccacttaatggtgtccaccacaggtttgttaggttatgtttacttttcttcaatctttttttttttctatttcccatattcaataatttccattgtcctgtcttcaagtttgctgattctttcttctgcctgttcaaatttgcttttcaatccctctatcaaatgt

SEQ ID NO: 389481 - DNA, 201 bp, Homo sapiens
gcccaggctggctcaggcgctgtctcctgggctggggccaggtctcacccctgtgcctcggaggactgaaggaggcaggcacaggaaggcaggggcagaaraaagaaaatctccttgcaccccatgcacattccatggatccagagacgtttctgggcatagttgggaattgtggcctgcgtgggaaggagtgagaggccc

SEQ ID NO: 389482 - DNA, 201 bp, Homo sapiens
atccagtagacaaatgtcccttgaataccccattttcagcatagaccctagacctcagctgagcttgttgtgcttcagcccagagaccctctcttttactmtcactgaagaacaaagccacagacttttgttgggccagggaaggggcagtgattcagctcacagaatgtggaggggacctgggacccactacttcataaa

SEQ ID NO: 389483 - DNA, 201 bp, Homo sapiens
ggaggaacagaggagtccagctggccttcacatggcaggtaagtgggcagagcctggggccttgggacaccagggctcatgaggggggcttcaagaaacaygggtctgtgggatgacgtttgatcatcgattgttaggattttacagctggatagtccaccatgaacacatgaactcttcgtgtggattcatgaggcccag

SEQ ID NO: 389484 - DNA, 201 bp, Homo sapiens
tcagcctcatctttacttgagtccacagcctcaggctccctcccctgtgatttgggtcagtctgaagttttctcttaagggacagacctggaatcctagargggaagtgcactctaggccagcagttctcaatcttttggggctcaagacccctttacacttttaaaaattattgagatgccaaagagcacttgcttatgt

SEQ ID NO: 389485 - DNA, 201 bp, Homo sapiens
gcactacttttatccccacattacacataagaaaactgaggcctagaaaggttaacttatttgccaatagagaactaagtgatgaagctgaaatttgactraggcagtttgactccagagccaagatctgaggcaaccatctaaacacaggtaacccatctaaacattcatacattgagcatctactacatgccaggaacc

SEQ ID NO: 389486 - DNA, 201 bp, Homo sapiens
aagttttctcttaagggacagacctggaatcctagaggggaagtgcactctaggccagcagttctcaatcttttggggctcaagacccctttacacttttwaaaattattgagatgccaaagagcacttgcttatgtgggttatatctatagtttttttttactgatttggaagctaacaatgagaaacttacaaaaatgt

SEQ ID NO: 389487 - DNA, 201 bp, Homo sapiens
ggccaatcgttagctgaccactaagccaactgaacagagacaacaatagcagcacagcaaaaaagtgtggaaatctgatttccagagttcccaggttctawgtagaatgtccagttttcaacacaaattatgagacacacatgaaacaggaaaatatgtccatactgagaaattaagtattaataaaaactgtccccaaag

SEQ ID NO: 389488 - DNA, 201 bp, Homo sapiens
ctgggtcccttcagctgggagcttctggaacttagaacgtggggtctagcctgggcaacatggcaaaaccccatctctataaaaaatacaaaagaattagycaggcatggtggcatatgcctgtagtcccagctactcaggaggctccagtgggaggaatgcttgattctggaaagcagaggttgcagtgagacaagattg

SEQ ID NO: 389489 - DNA, 201 bp, Homo sapiens
gcctttttagtatatcagctcactgcctttgggcctctaaagtttttaatgagaaatttacttttaatcttattgagattcccttgtatgtgagaagttgmttggtttttgctgctcttaagattttctgtttttgatttttaagagtttgattttaatgtgtcttggtgtaggtctctttgagttcattctacttggagt

SEQ ID NO: 389490 - DNA, 201 bp, Homo sapiens
ttgcttgttaatttgtttaagttccttatagattctggatattagacctttgtcagatgcatggtttgcaaatattttcttccatcctgtaggttgtctgtttactctgttgatagtttcttttgctgtgcagaagctctttaatttaattaggtcccatttgtcagtttttgtttttgttgcagttacttttgtcttctt

SEQ ID NO: 389491 - DNA, 201 bp, Homo sapiens
tttgcttgttaatttgtttaagttccttatagattctggatattagacctttgtcagatgcatggtttgcaaatattttcttccatcctgtaggttgtctgtttactctgttgatagtttcttttgctgtgcagaagctctttaatttaattaggtcccatttgtcagtttttgtttttgttgcagttacttttgtcttct

SEQ ID NO: 389492 - DNA, 201 bp, Homo sapiens
ttttgcttgttaatttgtttaagttccttatagattctggatattagacctttgtcagatgcatggtttgcaaatattttcttccatcctgtaggttgtctgtttactctgttgatagtttcttttgctgtgcagaagctctttaatttaattaggtcccatttgtcagtttttgtttttgttgcagttacttttgtcttc

SEQ ID NO: 389493 - DNA, 201 bp, Homo sapiens
tttttgcttgttaatttgtttaagttccttatagattctggatattagacctttgtcagatgcatggtttgcaaatattttcttccatcctgtaggttgtctgtttactctgttgatagtttcttttgctgtgcagaagctctttaatttaattaggtcccatttgtcagtttttgtttttgttgcagttacttttgtctt

SEQ ID NO: 389494 - DNA, 201 bp, Homo sapiens
ttatttttttgactttttactaatagccattctgcctggtatgagatggtatctcattgtggttttgatttgcatttctccaataattaatgatgttgagmagtttttcataggtttgttggccccatatatgtcctcttttgaaatgtgtctgtttatgtcctttgcccaatttttaatggggttgtttgtttttgcttg

SEQ ID NO: 389495 - DNA, 201 bp, Homo sapiens
atttttaacttttactttaggttcaggggtacacatgcaggtttgttacacagaaaaattgtgtgtcatgggggattgatgttcagattattccattcccycaagtaataagcacagtacccaataggtagtttttcaatcctaaccctcctcccaccctccacccccaagtaggccctggtgtctattgttcccttcttt

SEQ ID NO: 389496 - DNA, 201 bp, Homo sapiens
accaaagaactaaatctaagagctaaaactataaaatccttagacgaaaacagagggcaaatatttcatgacattggatttggtaatgccaccaaaagcayaagcaataaaagaaaaaatagacaaattggacttcatcaaaattaaaaactttgtaaacactatcaatagagtaaaaaggcaactcaaagaatgggagaa

SEQ ID NO: 389497 - DNA, 201 bp, Homo sapiens
tgagcaggcttgtgtgaggcctcgagaaagcctcaatatttcacatatatttggccttgaggtcttatgccagcaggaagtaaaggctaaagcagaaatcstagaactgccaagtgatgcagatgtgccccaacacacacagagagccccttagcaaaggatacaaacacttattgatcaaggaatttaagagaatctccg

SEQ ID NO: 389498 - DNA, 201 bp, Homo sapiens
gctgcctggagcagtgataccaatttagtcaaacaagagcctagccaaaaacgtagagaaagatgtgagaagtgaaatatccacattgaaaagatctggcwtattcctgaggatctagaaggctgttttgtgagcaggcttgtgtgaggcctcgagaaagcctcaatatttcacatatatttggccttgaggtcttatgcc

SEQ ID NO: 389499 - DNA, 201 bp, Homo sapiens
accgaggtgtggtgcaaggacagtggcagggcaagtacggcggcggcaccagcccgctgcactggcgcggcagcgtggccattctgcagaagtggctcaarggcaggtacaagccagtcaagtacggccagtgctgggtcttcgccggagtcctgtgcacaggtaccctgggagagaagggccccagggtacctgtgcccc

SEQ ID NO: 389500 - DNA, 201 bp, Homo sapiens
tgtatgcattaattcacttagaaactaaaaaacctattgcatcttaacacatacaacatgtatttatgaaaaataactgtactttccaagaacaaaaatarcattagtatgagtggcattgttttagatataaatttttttttgcaaatttctttaactaaatggcaggcttaacagagaacagctggattctcatagctg

SEQ ID NO: 389501 - DNA, 201 bp, Homo sapiens
aactgtactttccaagaacaaaaatagcattagtatgagtggcattgttttagatataaatttttttttgcaaatttctttaactaaatggcaggcttaayagagaacagctggattctcatagctgcttttgtattcaattttttaaacattatatatcatgaagcctctggaaaattccactgtacattcagggctagg

SEQ ID NO: 389502 - DNA, 201 bp, Homo sapiens
ttgcaaatttctttaactaaatggcaggcttaacagagaacagctggattctcatagctgcttttgtattcaattttttaaacattatatatcatgaagcytctggaaaattccactgtacattcagggctagggagatgctttgagtcctgaaaaaaatcatggtgcccttccaatccatataattaaaacaaaagtaaa

SEQ ID NO: 389503 - DNA, 201 bp, Homo sapiens
aagagtttgaacttaggaccttgttgggagtgagaagccacagggcctttggaatgaggagtgccacagaataaaaatggtggtttgaggatacgtatgtrtctagagggaaatttggcaaaatatatcataattttgcttgtttatttgtttttagagacagagtcttgctacgttgcccaggctggacccaaactgggc

SEQ ID NO: 389504 - DNA, 201 bp, Homo sapiens
aacagcattgctggacgtgttgggcccttcaggctcctaggataggtctgttctgaagaccaggccttgccaacaccagctcacagcccagactgcctgtktccagagctggggttgcctccctgatggccctggtgcagaggggattgcctttgttcctccaagatctgcttctcaaagttcacctagatgatccctctt

SEQ ID NO: 389505 - DNA, 201 bp, Homo sapiens
atggggtgagtgtagagttgggcaggggaggtgccgggggctggcagattgggatttctaggtggtttctgcaaaaccccatcaaggagcaaaagaagaaktgtgttctatggggttaatggggagcaaaatagggacaaatggggagaagttgcaagaagaaagagcttggctcagcagaaggaagggctttctaacact

SEQ ID NO: 389506 - DNA, 201 bp, Homo sapiens
agaaagcctctcttccatcctcactccccatcaagagacccttatttctctgaactcctccccaaaggacagggtgctttagcacgacctcctcttcactrgatttagggcatggtgctggggagcagatgggaggacagagagacctgaatccctcaagacatcctcatcaaggaggctgtggtgggaaggaaacaagcc

SEQ ID NO: 389507 - DNA, 201 bp, Homo sapiens
ggatttctaggtggtttctgcaaaaccccatcaaggagcaaaagaagaattgtgttctatggggttaatggggagcaaaatagggacaaatggggagaagytgcaagaagaaagagcttggctcagcagaaggaagggctttctaacactgggcggtgagtgagctacctctcagaggtatggcaagctgggaccatgatc

SEQ ID NO: 389508 - DNA, 201 bp, Homo sapiens
ggagaaagcctctcttccatcctcactccccatcaagagacccttatttctctgaactcctccccaaaggacagggtgctttagcacgacctcctcttcaytggatttagggcatggtgctggggagcagatgggaggacagagagacctgaatccctcaagacatcctcatcaaggaggctgtggtgggaaggaaacaag

SEQ ID NO: 389509 - DNA, 201 bp, Homo sapiens
ttaagaagcaatagatgagtaaaacatcaacttttttgtccgtaataccctccctctcaatataacaagtatttaatagtgtcccttcaccaacctgaaawtgaattgacacatcttacctacctctatactccactttttaaaaaattgtatcctaactataatataaatagtaaataagaggaaatcaatttttcacta

SEQ ID NO: 389510 - DNA, 201 bp, Homo sapiens
ctgtggaatagtaaatgcatggggtgtttttgttttgtttttcagaaagagtcttatttcacatagacaaggtcatgatttctggatattcttcctcatgytgcagaatacagacttgtcctatttagttgataactcaagttaaaaggacccaggacattttcaaaagacaccactaataagcacaccccttcctccact

SEQ ID NO: 389511 - DNA, 201 bp, Homo sapiens
ggagaggtcttgtccaaggtcacgggacacccatggccaccaggcctctaagctcctggctggaggccactcacaaagtcagggcagatgggcctagcttmtgagtcagaaccagctctcccctttttcttacctacctcctctcaagagtctagtgtccaccaaggaagtctagtggccctgaaggaggatcatggacct

SEQ ID NO: 389512 - DNA, 201 bp, Homo sapiens
cgccagctgcctatcacctatgtcaccggctacaggcatggtcctaaggatgaggtgatgtagaggtgagttagagcttcacagtcttttattagttgccygatgactttgcccaagggtgagagggagcagtatcatcttccattttatagccaggtaaacagaggcccagagaggggaagggacaccctgctgcccgac

SEQ ID NO: 389513 - DNA, 201 bp, Homo sapiens
ttggcattaaggtaatgctggcctcatagaatgaatcaggaagtatttctctgcttccattttctggaagagattgtagagaattgctataatttttttttcttaaattcttggtataattcaccagtgaacccatctgggattaatgtgttctggtttggaaggttattaagtactgattccattttttagtagatatag

SEQ ID NO: 389514 - DNA, 201 bp, Homo sapiens
ggccaaggtggacaaatcacctggggcaaggagttcgagaccagcctggccaacgtggtgaaaccccgtctctacaaaaatacaaaaattagcaggcatgrtggcaggtgctcgtaatcccagctggggaggctgaggcaggagaatcgcttgaaccctagaggcagaggttacagtgagcagagattgcgccactacact

SEQ ID NO: 389515 - DNA, 201 bp, Homo sapiens
cctggctagtgtttgtttgtttgtttgtttgtttttctttttttcttttagtagagacagggtttcaccacattggccaggctggtctcaaactcctgacytcagatgatctgcctgcctcagcctcccaaagtgctgggattacaggcctgagccactgcacccagccaagatagccctactttggatggaggtaccaga

SEQ ID NO: 389516 - DNA, 201 bp, Homo sapiens
tatttatgttttttatttatttattttagacagaatcttcctctattgcccaggctggagtgcagtggtgcaatcttacttcactgcaacctccacctccygggttcaagcaattctcctgcctcagcctcccgaatagctaggggtacaggcacacaccaccacacctggctagtgtttgtttgtttgtttgtttgtttt

SEQ ID NO: 389517 - DNA, 201 bp, Homo sapiens
cagatcacttgaggccaggagtttgagaccaacctggccaacagagcgaaacctcgtctctactaaaaatacaaaaaattagctggacgtggtggtgcacrcctgtaatcccagctactcaggaggctgaggcaggagaatcaaactgcttgaacccaggaggcagaggttgcagtgagccaagatcacaccactgcactc

SEQ ID NO: 389518 - DNA, 201 bp, Homo sapiens
ttccagtacaacgctcttgcccttggtgccttcgagtagcattttaatgggacaaaagtggcctccctggttattccagccccagtggaaagcagaagccrccccaacagccaatgagaaagccctgcttgtgagtgggagaggtagagaaattgacagaagacagcttagaagtccaagggagagtgtgagtgggaatgt

SEQ ID NO: 389519 - DNA, 201 bp, Homo sapiens
gcgatctcagctcacctcaacctctgcctcccgggttcaagcgattctcccgcctcagcctcctgagtagctgggattacaagcgtgtgccaccacgcccrgctaatttttgcatttttagtagagatgggatttcaccatgttggtcaggtgcgtctcaaactcctgacctcaagcgatcctcctgcctcagccttccaa

SEQ ID NO: 389520 - DNA, 201 bp, Homo sapiens
gtggcgcgatctcagctcacctcaacctctgcctcccgggttcaagcgattctcccgcctcagcctcctgagtagctgggattacaagcgtgtgccaccaygcccggctaatttttgcatttttagtagagatgggatttcaccatgttggtcaggtgcgtctcaaactcctgacctcaagcgatcctcctgcctcagcct

SEQ ID NO: 389521 - DNA, 201 bp, Homo sapiens
gaaaggtgaagtcacgagttcagagtcacacagtcagtgtgcatagttgcaggacccaaatccaggcagtctggcatgagagacacactcctgaccaagaycaggaaggggcaaagccagggttcaaagccaggaacgttgaccacagtgcacatttactcagctgatgcaattgcttgactgcaggttatggaatggtca

SEQ ID NO: 389522 - DNA, 201 bp, Homo sapiens
ttatttcctaatctcttttttttttttttttttgagacagagtcttgctctgccgcccaggctggagtgcagtggcgcgatctcagctcacctcaacctcygcctcccgggttcaagcgattctcccgcctcagcctcctgagtagctgggattacaagcgtgtgccaccacgcccggctaatttttgcatttttagtaga

SEQ ID NO: 389523 - DNA, 201 bp, Homo sapiens
cccccctggattttttagctctgtcactctgtgagaatctgcattcatagcccaatccttatggagcgactgaccagggatccctcctctcatcatgcggrttcctttctcctattatgcatctgccacaagtgaaaggaacactgtaagcatcttccctggaacaggaggccatctgccactccacgtataaagatgctc

SEQ ID NO: 389524 - DNA, 201 bp, Homo sapiens
tggcttagtaagtaagacgggataaacagacctcccacagggaggagaataccaacttccctttctgtaggcacccccaatcttgatcagccagtcatttyttgctgaagatacccccaaaccttaacactgattcttttaaacacctactcacacccccaactcacactttagctcctatctccaggaacatggcacttt

SEQ ID NO: 389525 - DNA, 201 bp, Homo sapiens
aagaatgaagttgttataccccactggttacatgaaaaatttttaaaaaagggaaataaaaagaatgaagttggcctcctatctcacacgatacacaaaamtttctcaaaatggtttatagacttacatgtgagagctaaaactataaaacttttggaagaaaacataggagtaaatcttcatgatcttcggttagaccaa

SEQ ID NO: 389526 - DNA, 201 bp, Homo sapiens
ctcagctgggatggttcatcttctccaggtggtgctggctgggatctcacatatgtctgtcacgtgggactgctgagatggctgggtctgtgttcccactyggcctctcatgtcccaacaggccagcccatgcttttctgaatagcagcaacattcccagaaggtgagagatgaagctgtgaggtttctagaggcctggct

SEQ ID NO: 389527 - DNA, 201 bp, Homo sapiens
gaaggaacgaggccctttggcgccactgctgagctgctacaccagtcttgagactgtcaaattctggacactgtatgaactaaacaaataaagatctttargattttaagccaccattgtcgaagatgctgttacttgcagagaaggcatttttaatcattacgaagaaaaacagatccacactcgaggagtttttatcta

SEQ ID NO: 389528 - DNA, 201 bp, Homo sapiens
gggatggattgaacaggttgagctgaaaaacactctgaagctgttggggccatacagtcgcttaagcgagaagcaaagaggggagaataacaagaaacccygtgcatgtaggaattggggaggggaggaccaaagtgatgggggagatgtgggaaaggagtgatgatgtaaaaatccctgtttgtaggccgggcgcggtgg

SEQ ID NO: 389529 - DNA, 201 bp, Homo sapiens
gagagggagcagtatcatcttccattttatagccaggtaaacagaggcccagagaggggaagggacaccctgctgcccgaccagtccaggtctagctgtgrtaggttgttctaactcattgtcttgtgaggatgaattcccaaaacaacacaggtgactcccagccagagtgcacaggggatcctgtgtccagctggttgc

SEQ ID NO: 389530 - DNA, 201 bp, Homo sapiens
cagctggttgcttggcccttggaactcacccatgggcggtaccaggtctgtggttgctggacccacggggctctggatatgggggttccaagcagcagagrggcctggggtgccacccacagggcacagctgctctggatttttctggccctcagcctcatctttacttgagtccacagcctcaggctccctcccctgtga

SEQ ID NO: 389531 - DNA, 201 bp, Homo sapiens
aaacactatcctcatcacagagtgagtgagccgaactgaaccaaggggaggatctagaatcagatgacatcgagaagttgatagcaaaagtgttagaaccrctgacatctcaataggttccacagtgattctccctttaatgagcatgaagaagtatttgctgaatgagttttgacaggaattaatgaatgcagaatggaa

SEQ ID NO: 389532 - DNA, 201 bp, Homo sapiens
aagcctgggcaacacagtgcgagaccctgcctccacaaaacataaaataaagtaaaaattagccagacatagtggcacatgcctgtactcccagctactcrgaaggctggggtgggagaatcacttgagcccaggagatccaggctacaatgagctatgattcattaagcctggatcctgatagttaatggaaacttaaag

SEQ ID NO: 389533 - DNA, 201 bp, Homo sapiens
ttacaaggtgtcaccattgggagaaactgggtaaacagtaacctgggatttttctgtgttatttctcacaactgcatgtgaatctacaattaccccaaaaytgaaagtttaactttaaaaagacacctcagccaacatgttcaagtgctatcggtaccatcacaaatagctgccctggtccatttctcagatctggaggta

SEQ ID NO: 389534 - DNA, 201 bp, Homo sapiens
ggaccttgtaagccctcacttcccggacatcaagggctttgtgatcgtccatgtggccactgccaagtgatggatcatgagggactgagaggggtggattyggcccctgtcctcctcctgcccattctttgtctcttccacatgggagccaggaggcctcagttaatcctgcctcaacctctgccctactttgtaaactta

SEQ ID NO: 389535 - DNA, 201 bp, Homo sapiens
gccacaaggtgaacttgatcctgaggagcctggggagccgtggattggcaggccagactcagaatggcaagaggactgacagtctgcctttctcccctccytttcctccagcgtgcctaccctggagcctcaggagagggcctcagtccagtttgacatcaccccctccaaaagtggcccaaggcagctgcaggtggacct

SEQ ID NO: 389536 - DNA, 201 bp, Homo sapiens
ctgacctcagatgatccacctgcctcagcctcccagtgtgctgggattacaggagtgagccaccgcacctggcctgcaaacatgttgataaggcttgaatrtcaagccacaaggtgaacttgatcctgaggagcctggggagccgtggattggcaggccagactcagaatggcaagaggactgacagtctgcctttctccc

SEQ ID NO: 389537 - DNA, 201 bp, Homo sapiens
taaacttgaaattaagtaaacacaacacagtttttattttcccaaggtgagtcctttgattttttttttttaatgttaaaatattttttaaaattcaggcyaggcacggtggctcaagcctgttatcccagcactttgggcagatcacttgaggccaggagtttgagaccaacctggccaacagagcgaaacctcgtctct

SEQ ID NO: 389538 - DNA, 201 bp, Homo sapiens
ctcccaagtagctgggattataggcacaacaccacgccctgctaattttgtaattttttttagtagagacagggtttcaacatgttggtcaggctggtctygaactcctgacctcaggtgatccacccgccttcacctcccaaagtgctgggattacaggcgtgagccacggcacccggcctataattattatttattact

SEQ ID NO: 389539 - DNA, 201 bp, Homo sapiens
tccaatccatataattaaaacaaaagtaaacttgaaattaagtaaacacaacacagtttttattttcccaaggtgagtcctttgattttttttttttaatrttaaaatattttttaaaattcaggccaggcacggtggctcaagcctgttatcccagcactttgggcagatcacttgaggccaggagtttgagaccaacct

SEQ ID NO: 389540 - DNA, 201 bp, Homo sapiens
gagtctctctctgtcgctcaggctggagtgcagtggcgcaatctcagctcactgcaacctccgcctgctaggttcaagtaattctcctgcctcagcctccyaagtagctgggattataggcacaacaccacgccctgctaattttgtaattttttttagtagagacagggtttcaacatgttggtcaggctggtcttgaac

SEQ ID NO: 389541 - DNA, 201 bp, Homo sapiens
ctaattttggctttttcctgaaactatggaaatttgccccagaaagctgaaatcagatagaaaatctgcctgcttctccttccttggtctcacttctcttycccatactcaacacaggtgggctcccctcagtgccctggtagaaaggatttccctgaaatggtgtatccaggccaggtacagtggttcatgcctgtaatc

SEQ ID NO: 389542 - DNA, 201 bp, Homo sapiens
tctactacatgccaggaacctactaaactttagattcatgactctgactgttggctgtggtctcctacttgagcacataggatagaagaacatgatttctrgaagtagcttgttcagcatcttcatgccatggtggacttgggggtattctgggggggtgctgctgagcctgtgtgaggccaagtattcatgaagagcaac

SEQ ID NO: 389543 - DNA, 201 bp, Homo sapiens
atctactacatgccaggaacctactaaactttagattcatgactctgactgttggctgtggtctcctacttgagcacataggatagaagaacatgatttcyggaagtagcttgttcagcatcttcatgccatggtggacttgggggtattctgggggggtgctgctgagcctgtgtgaggccaagtattcatgaagagcaa

SEQ ID NO: 389544 - DNA, 201 bp, Homo sapiens
tgtggtccctgccctgtgcctccagctgagaagtcctcactttccatggcttctgtcccaactccaggctactgctggtcaacaagtcctttcagcgtctycattcccctcccttgaccatatgggaacttctggatccctgcctgccgtggacaggaggcttgtttcaggcctacctctcaagctcctctgtctgcaaaa

SEQ ID NO: 389545 - DNA, 201 bp, Homo sapiens
caggattgcatctagggagcctggaatgggggcttctgtgagggaggttgggacccacatgttctctgtttacagacttgtctgctttcgcctggtccttkattggtgacagttgatgtgtgtctgatcacaactggccttctggatgtggtgctggctcccagcactggaggctgtggtccctgccctgtgcctccagct

SEQ ID NO: 389546 - DNA, 201 bp, Homo sapiens
tgtcccacctactcctggcctagcgcggtcccataggacatgtctacggaaatggagggcgtgagggtgggaggaaggaaggaaggcaagaaggaaagaaggaaggagaaggaaaaaggagaagagagaaaagagggagggtgggcaggtagcaccatgcccattttgcaggtgagaacactgaggagacataaccgggaa

SEQ ID NO: 389547 - DNA, 201 bp, Homo sapiens
atgtcccacctactcctggcctagcgcggtcccataggacatgtctacggaaatggagggcgtgagggtgggaggaaggaaggaaggcaagaaggaaagaaggaaggagaaggaaaaaggagaagagagaaaagagggagggtgggcaggtagcaccatgcccattttgcaggtgagaacactgaggagacataaccggga

SEQ ID NO: 389548 - DNA, 201 bp, Homo sapiens
gttctaggtttgaggaatgaatgaatgactgaataaacagagcatgggcccaggtgcaaaacagagtcatccgtcgtgccaaccccatgggcgggagcagygcagtgacggccattgcttctctgtctccacagtctttgaagagcctgaggaccccagtaaccgctcattcttctcggaaatcatctcctccgtgtccga

SEQ ID NO: 389549 - DNA, 201 bp, Homo sapiens
catgtcccacctactcctggcctagcgcggtcccataggacatgtctacggaaatggagggcgtgagggtgggaggaaggaaggaaggcaagaaggaaagaaggaaggagaaggaaaaaggagaagagagaaaagagggagggtgggcaggtagcaccatgcccattttgcaggtgagaacactgaggagacataaccggg

SEQ ID NO: 389550 - DNA, 201 bp, Homo sapiens
tccgcctcccaggttcaatggattctcctgcctcagcctcccgagtagctgagattacaggtgcgtgccaccatacccagctattttttttttggctttttctttagtagagacagggttttcatccaacagatgttagataaaatgttgcccaggctggtctcgaactcctgggctcaagcgatctacccgcattgggct

SEQ ID NO: 389551 - DNA, 201 bp, Homo sapiens
gtagctgggattacaggcacccgccactatgcccagctaatttttttttgtatttttagtagagacagggtttcaccatgttggccagtctggtctcaaastcctgacctcgtgattcgcccacctcggcctcccaaagtgctgggattacaggcgtgagccaccgcacctggcccccagcttcagctgtttctattggga

SEQ ID NO: 389552 - DNA, 201 bp, Homo sapiens
ctgcagcctccgcctcccaggttcaatggattctcctgcctcagcctcccgagtagctgagattacaggtgcgtgccaccatacccagctattttttttttggctttttctttagtagagacagggttttcatccaacagatgttagataaaatgttgcccaggctggtctcgaactcctgggctcaagcgatctacccgc

SEQ ID NO: 389553 - DNA, 201 bp, Homo sapiens
ataacatattatcacacgtttggttgtttaaacagcagaaacttacactcttcctgttctacagtccagaagtccaaaatcatggtgtccgtaggcctacrttccctctgtagcctgcaggggtggatccttccttctctagaggctgccagcatctcttggctttatggccacattactctaagttctgcttcggttttt

SEQ ID NO: 389554 - DNA, 201 bp, Homo sapiens
ctagcaataaatgctcataaaatctgctggagttttggaggattagtccattcatcctgacttgtgtcctgtttctgctgggtcattgttgacttcccccwcttgcctcacacttgtaaggccatgtggcacaccatcaacattcatctctgattaaggagcttgtttcttgtagtggctgccataacatattatcacacg

SEQ ID NO: 389555 - DNA, 201 bp, Homo sapiens
tgaacccggcaggcgaggttgcagtgagctgagatcgtgccaccgcactccagcctgggcagcagagtgagactccatctgaaaaacaaacaaacaaaaaraccagttgggtttctagcaataaatgctcataaaatctgctggagttttggaggattagtccattcatcctgacttgtgtcctgtttctgctgggtcatt

SEQ ID NO: 389556 - DNA, 201 bp, Homo sapiens
agtgcaagctctatctcaagatcctccaaaaatgaagaaagtaacagatgaaaaatatgcgcaagaaaacatttgccataaatcagatgaaaatgtcaacwgtacataatgccttggactaaggaaaaaaataattgagcaatcacacctctaaacaagagtataaagttgagatacaagaactcaggagaggtggtaaca

SEQ ID NO: 389557 - DNA, 201 bp, Homo sapiens
gtagcattggtttgcttctgggagtttgtgctaatttgcttctttggggcatccacagttgcagagcacagggagaagggtgttagctggccagcagtttytatttcaagaggaagactcttgcttatgcttcttccttttctgcccgagcacagggggacactttgtgcaaataatcacatacaatttaggaatgctttt

SEQ ID NO: 389558 - DNA, 201 bp, Homo sapiens
gcagggttgagtagttgtgacggtagttgagacagtgtggccctgtatttattctctggacctttatggaaaaaggttgctgacccttggttcatgtcaaygactcatatggagcagcaggaaacattctgaatttggagctgaatgaccagggtttgacgcctggctcagggaactctagtaacagagtagagagtgttt

SEQ ID NO: 389559 - DNA, 201 bp, Homo sapiens
catttcactcctgagggcctcaccttctgtgattctgcctgggactcccttccctgtatctttgtcattattcaggtcccagctgaaaagtcacctcctcygggaggcctccccggaccaccctccatctggagttgtctgtcactggatccaggtgcaaagctctggaatgaaatgagcctggcgtgttctgtggcagca

SEQ ID NO: 389560 - DNA, 201 bp, Homo sapiens
tgacccacctcctgtttttgtgaataaagtttaaatgaagatgcagtcacacctatgtgtttaggtattgcctgtggctactttcacactacaacagcagrgttgagtagttgtgacggtagttgagacagtgtggccctgtatttattctctggacctttatggaaaaaggttgctgacccttggttcatgtcaatgact

SEQ ID NO: 389561 - DNA, 201 bp, Homo sapiens
gagaggctgagtgactcactcaaggtcatgcaggcagtgagcatggaggtgagactggggcccaggcccgtgggatgagccattggctgtccccctacccygctgtgacctcagctgcacctcgtgctgcggtgacaaggtgacaggttaaaaataaagcactgtggtgctgccagacctttattggcacagggtgagggc

SEQ ID NO: 389562 - DNA, 201 bp, Homo sapiens
tttctggagagaaatcagaaattcaggtctacatgttgaatcttttaatattgaaatgttcacttggcaatgtgtaaacatcatttgggtcaaagcccatstgtgaaccaagttagtcaaagacaacttgggcatttggacctcagctttatagtctatataagggttggtaaactatggcccacatgctaatctgaccca

SEQ ID NO: 389563 - DNA, 201 bp, Homo sapiens
ctttcttggggatgccaagctggctctgtggtccctgtcactcagagcgggctcctcccctccacacacccattttgagaccccagagcacagtgatgccrcagctgcacttaacaagcaggaatgtgtccctcctgttggtcaacatttggggcctcactgtgacaggtgcacagcagcctggtggagaaccaccctatg

SEQ ID NO: 389564 - DNA, 201 bp, Homo sapiens
gaaatggagcaagatccttgtcctttgcttcggtggtttttaaaacttggatgcctaaagaaaccaggaaggtcatatcagtgagcaaagtacaaaatgtrtaagcaagacacagtgcaccatgacgctgagagtggcaaagtaacagtccaaccatgcatcagggagtggtggggactgtggcgtgctggcaagcatagc

SEQ ID NO: 389565 - DNA, 201 bp, Homo sapiens
gtgacagagtcctggattaggtgacatttgataagagctctatccctaacttcctcttaattctggacaagccactccccgctctggctgtagttcccccrtctttaaaatgaaacagttgaatcagacaactacaaaaggacttgccaggccttctgtctcagatcctgtgttgttgaagggatgtctgaggccagagat

SEQ ID NO: 389566 - DNA, 201 bp, Homo sapiens
ttattcctggagtcctcgtcttctcttcctccctcccagaccctctcacctccttgtctcacttgaacctctaatcctgggaaggctccaccataagcacmctacagataatgaaaccaaggctcagagaagttgtgtggcttacccaagaccacacagctgaagcactggagccaagactccaaccagcacttctgtctg

SEQ ID NO: 389567 - DNA, 201 bp, Homo sapiens
catgtattattcacctaataggtttctttaaatgttggccctctaccataaatggaaaaccagcaaatcaggccaaaaatagaagtaaccaaagacaagcrcaggtgtttctgctctaatgaaatagagacatcctgagaaacttctcattctgcaaaatcccaaacaaatgacatcagagctgatggacagaatggggtt

SEQ ID NO: 389568 - DNA, 201 bp, Homo sapiens
cgccagcctcctgctttctgcgtgacttccctcgccccagcaatgaaccctggagccacctgcaaatgggaaagctcttttgttagtttccacagaatgcycaccgtgcacatgatcagagagtttgcgagcctagctcaggtcagtggaactggttcttttcgtacatgtaggaagtaatgcagggtgctgccgaataaa

SEQ ID NO: 389569 - DNA, 201 bp, Homo sapiens
ttgttttttcaagggtttatagtctatagttatctgtgagagagttgctgcactaggagctactaggctattaccggaagcatttagagcagggcctggcrgacagtaatcacttaagaaatgtgagttaatgtggtcaaccatagtgcggcgctgtttcctctggtcaaggctagagacaacgtggacacagacagcacc

SEQ ID NO: 389570 - DNA, 201 bp, Homo sapiens
gatcctttgtccaaatggaagctgccgtgtgtgtgttgaggtccttgggtcaatctgatcatgctctgtctcctgctctgtgcccgcactgtgtcagggamcacctggataccactcatgtattattcacctaataggtttctttaaatgttggccctctaccataaatggaaaaccagcaaatcaggccaaaaatagaag

SEQ ID NO: 389571 - DNA, 201 bp, Homo sapiens
atacattaggagcccaacaagagttcccctcccttctcccttgcttctctgagcctcggtttccccatccatataccaggaggaaccccctgcccatctcrtagggctctttgacatggtgaaatgagatccagatactggctgtctgtgtcaactgtaaagtgctgtcctgagtgaccagttgttgttggtgcctgtagc

SEQ ID NO: 389572 - DNA, 201 bp, Homo sapiens
tgcgagtgtctcagactctgtttgctgctctatcaagccagtgagactctggctttccgtctgagttctggcagccctatgacacaggctgggacttgtcytcaggctgtgaaagccatgagaccaggaaagccaacgccggctgttcctcccaattgctgaccgcctgcagcatctgctgcggcctcaccctccgatgcc

SEQ ID NO: 389573 - DNA, 201 bp, Homo sapiens
gtcatacccatgtgaagggagatagaggtggacagaaagacaaccataatgtcattttgacaaattctgggaaaagatgggccacccagcctgtgagaccygtatgtagtgatggagggatggggaacggtggaggtgtcagggaagctccccaggggagctgttccttgaggtggttttaagagcttagcaagagttttc

SEQ ID NO: 389574 - DNA, 201 bp, Homo sapiens
tccactgtcctggcattccatggccctgtgtccccagatatccgcacctgttcctgacaccatcccttcctgtcgtgtgagcgagatgctcttctgtggamcctgggttcctatggtcactgggagggtgaccctgagttcacagagaaaggggagcaggctgttcaggaaaactaagcacatgtggtgagcatccacagg

SEQ ID NO: 389575 - DNA, 201 bp, Homo sapiens
cttcttctagccctggctgggttgcagctgctggaagtctgtcctgtgtgtgtgtggtttggggtcagcccaagacatgggcagagtttatttgccccctmtggggatctgtcttggtggctctcttcattccagaatttactcccacatttttccagctgctgcgagtgtctcagactctgtttgctgctctatcaagcc

SEQ ID NO: 389576 - DNA, 201 bp, Homo sapiens
ctcccagcccttggggccatgctatttgtggtaggaaatggggcctgaaaccatcaaactaaactggactgaatgatcagtccaccgaccaccacagtcamggcttggtggccccacggactgaagcacgtggccaagggcagttttcccttctctgtgtgggttccactgggtccaagtacattgttcctaagcccaggc

SEQ ID NO: 389577 - DNA, 201 bp, Homo sapiens
ctgggcgggtcactagggataccacctctcacctctctgggcacccattggtaggcctgtgctgtgcccagcaccagggggctggctgaggcctccttgtycagtggctcctgtgtgcctctccacttgggggttgccctagagctgcccaggaagggaggaggcacctcagggggggaaggacagcatgagtttccatgg

SEQ ID NO: 389578 - DNA, 201 bp, Homo sapiens
ctgtaacagtggacatgctggcgctggccagtttgatccctttgaaagccccccgatattcacctccaagagagaaggccctggcaggtcctccagcatgyggacgaggcgcatgcactgtgaggcagcggctctgtgggaggacggggccttttgtccactgtcctggcattccatggccctgtgtccccagatatccgc

SEQ ID NO: 389579 - DNA, 201 bp, Homo sapiens
aatgcaaatggattgaaatggccggtggtctgaccttgggatgttccattggtagtttcagaggggctctgagcccccaggccggctgtaacagtggacaygctggcgctggccagtttgatccctttgaaagccccccgatattcacctccaagagagaaggccctggcaggtcctccagcatgcggacgaggcgcatgc

SEQ ID NO: 389580 - DNA, 201 bp, Homo sapiens
gcagacatgcgagtggcagagtggaccaggctgtgtggccctgatactcaccccacactgtggctctcagcctgaggacttcatgctggctgtggaggccrcgtagccccttggcagggcaggctggatgggtaggagaggcagggccctcagctgtgggatggggtgttggcaggctgtgcccaccagcttgttggcctc

SEQ ID NO: 389581 - DNA, 201 bp, Homo sapiens
ctttttttctttgctttaaaaaagcagaaacagtgaagcaagcataaatttgcctttgaaataagaggctgaatgtctgccaaatgcaaatggattgaaayggccggtggtctgaccttgggatgttccattggtagtttcagaggggctctgagcccccaggccggctgtaacagtggacatgctggcgctggccagttt

SEQ ID NO: 389582 - DNA, 201 bp, Homo sapiens
cacctgggctgtgaatgtctgagttaggggctgggtttgtgtcactccctcttgtattctgggcatctggcacccgtgtggtccaggtggccctccgtctyggagaccagtgcttcggtgttacattcagctccttgccccagtaggatgcaagctctttgagggcaaggcctggcatgcgggaggtgctgtgttcctgtc

SEQ ID NO: 389583 - DNA, 201 bp, Homo sapiens
tggggtggtcattgaacctaagtcagaccgtggcttcccagctcatgcagaataaaatgctcaggcctctcccggcctgctgggtgcaggaccccggcccrgcccacctctctgagctctgagctcatgtcctgccccatccctctcacacgcacactggcctccttgctggcctgcaacagatcaaactcaccctacctc

SEQ ID NO: 389584 - DNA, 201 bp, Homo sapiens
aaaggccaacgcatctaacagccaggaaggtttgctttaacattccagcatgttctgttgatttatggctgttgctaggtaacagaatacaccgaggctgygtgattttaaagctacggctcccgactaaagagtcgacagaaagagaaaaccattaatcaggttgggggctgggcgtggatttaaatgcaaaccagaaga

SEQ ID NO: 389585 - DNA, 201 bp, Homo sapiens
ccacccctgaaagtgctcgtccatgctagaaagacagaaggatggggtggtcattgaacctaagtcagaccgtggcttcccagctcatgcagaataaaatsctcaggcctctcccggcctgctgggtgcaggaccccggcccagcccacctctctgagctctgagctcatgtcctgccccatccctctcacacgcacactg

SEQ ID NO: 389586 - DNA, 201 bp, Homo sapiens
tgcccagtgagggtctgcttcctctggcacttacttaacaaacccgagagtcacccatgtgtgaggcatgggctgggcacagaagggtccacgcccacccstgaaagtgctcgtccatgctagaaagacagaaggatggggtggtcattgaacctaagtcagaccgtggcttcccagctcatgcagaataaaatgctcagg

SEQ ID NO: 389587 - DNA, 201 bp, Homo sapiens
cagtgagcagagatcgcaccaccgcacttcatcctgggtgacagagtgagactctgtctaataaataaataaataaataaataaataaataaataaataaaacagggggaatagtagtccctactccatagggctgttgtgaagatctagtgagatcaatgttcatgaaggactttggcgctgcacacgtttctgagaaag

SEQ ID NO: 389588 - DNA, 201 bp, Homo sapiens
ccccatggagggggccttcctagccaggcatggctttcatatgcccagtatgtaggtgaagacacggaggctgaagaaatccagcaactcatccccacacstagcttggcagagggcaggagtgctcagtcttgcctcacagggagctttggatgtccctgagcaaggcctgcagtccagggcccaggggcctcaattcca

SEQ ID NO: 389589 - DNA, 201 bp, Homo sapiens
gcagtgagcagagatcgcaccaccgcacttcatcctgggtgacagagtgagactctgtctaataaataaataaataaataaataaataaataaataaataaaacagggggaatagtagtccctactccatagggctgttgtgaagatctagtgagatcaatgttcatgaaggactttggcgctgcacacgtttctgagaaa

SEQ ID NO: 389590 - DNA, 201 bp, Homo sapiens
tgcagtgagcagagatcgcaccaccgcacttcatcctgggtgacagagtgagactctgtctaataaataaataaataaataaataaataaataaataaataaaacagggggaatagtagtccctactccatagggctgttgtgaagatctagtgagatcaatgttcatgaaggactttggcgctgcacacgtttctgagaa

SEQ ID NO: 389591 - DNA, 201 bp, Homo sapiens
ctgcagtgagcagagatcgcaccaccgcacttcatcctgggtgacagagtgagactctgtctaataaataaataaataaataaataaataaataaataaataaaacagggggaatagtagtccctactccatagggctgttgtgaagatctagtgagatcaatgttcatgaaggactttggcgctgcacacgtttctgaga

SEQ ID NO: 389592 - DNA, 201 bp, Homo sapiens
ggcggatcacgaggtcaggagattgagaccatcctggctaacacagtgaaaccccgtctctactaaaaatacaaaaaattagccaggtgtggtggcgggcrcctgtagtcccagctactcaggaggctgaggcaggagaatggcgtgagcccaggaggcggagcttgcagtgagctgagattgcgccactgcactccagcc

SEQ ID NO: 389593 - DNA, 201 bp, Homo sapiens
ttttctgtgaagggcctgatagtagatattttagactttgcaggctgtgtaaatctctgttgcatatttttcttttcttttctcttcttttcttttcttttctttctttttttagacagagtctcactctgtcgcctaggagtgcagtggcagtggcaccatctcagctcactgcaaccactgcctcccgggttcaagcga

SEQ ID NO: 389594 - DNA, 201 bp, Homo sapiens
tctcaattcccccttttggtgtgagcctctgaagactggttgagcatttgtgagaaacaaagttttgactactcaagactctagttaaaaaaaaaaaaaaattgcaccaatgtgccatccggctgcagcgtctcaggggcatgattcggtttttgcaacagggagtagctcttcttgaaacattatgggatttctttccta

SEQ ID NO: 389595 - DNA, 201 bp, Homo sapiens
cacaccaagctggttcctaccctctagctccctcccactgactcctcctcaccctgagatcctcctcagcttatcaaaaaaagattcccccattttctcayttcaaccctttgttcatttcctccaaagtactgtattacagttaatgattattttttgggtctgtttacctgtttgggcttcgcctccccagtggtatgt

SEQ ID NO: 389596 - DNA, 201 bp, Homo sapiens
ctgctcataccactacctccctgatctttcagttcctcaaacacaccaagctggttcctaccctctagctccctcccactgactcctcctcaccctgagaycctcctcagcttatcaaaaaaagattcccccattttctcacttcaaccctttgttcatttcctccaaagtactgtattacagttaatgattattttttgg

SEQ ID NO: 389597 - DNA, 201 bp, Homo sapiens
tggccccaggacagccaggtgggcagtgaatggacgaaatcagtctgtgcaggagggaaacactaacactaaccctaaccctaaccctaaccctaacacaytctcaaaacatttgattctaacttaaaacacacaagggcactcctttccatggccctactacatgatctggcctgacctgcctttctggcctctgctcat

SEQ ID NO: 389598 - DNA, 201 bp, Homo sapiens
ctgcccagtgcctgaggacacccaggtccctctgcggccttggggctttacccagcgtctgcatggcatcccgcagcaccctgcctctggagcgcaccctrtgtgtatcctaaagtgcgctttgcctagaaaacctttctaatgaaactggtggaagatggagaagccaaattcagttttcagagatgacactaatcctat

SEQ ID NO: 389599 - DNA, 201 bp, Homo sapiens
gtgggcagagggctgaggaccccagccctcccttagaacatcatgttggtgtgagacatttagagccaggcctccctgcttagaaagcacctcttgggtcrcttgcattagtgaagttatacatttgaaactccatttatttatttatttatttagagacagggtctctccttgtcacccagactagagtaccgtggtgcc

SEQ ID NO: 389600 - DNA, 201 bp, Homo sapiens
aaggagctggcgacctcgatgggttgtggttcccgcagggatgtgcttgcgctgctgttactccagccgtagctgaggcacgggagaaaacggagaccccragaagttcagaggcttgtgcaggtcacgctgttcctacgaggtagaccctgactttgaccccaggctgtgtccctgccaagcttggagcctctttctcaa

SEQ ID NO: 389601 - DNA, 201 bp, Homo sapiens
cccccggtcgtagtgcggctcccacgggggtgtaccaggagcctctgctcctcctatgcttcctgaaaaagggcccagagaatatttccatcaggaataastgagtgaatcccagaaacttcctatcacatttagggtgattaggcagatgcatacgattctcactgtgggaaaggagctggcgacctcgatgggttgtgg

SEQ ID NO: 389602 - DNA, 201 bp, Homo sapiens
cttgtgcattttggtgagtctacattccagttacgtgctcttatgtttgcatttaaaattggaggtgcacactagaatggtgagtgataaaatgcacgctragagtttaagcttttttttttttaaatttgaattgacattaaatagcaaataacaccatgacaaaatatggaaggcatgaaaaggctttgtatcttagca

SEQ ID NO: 389603 - DNA, 201 bp, Homo sapiens
cggagttcagcaggacctccgtgagccttcgtgcaggtggctcattgcagcacgtccccttggggtggtggccattggcttgtggttcctttgctcactgsggggaggaggacagccaggcacaggtgaaaggggcttgcgggtgacgattctagtccttggcccggggaatgtccctgggcttctgaggcctcacctccc

SEQ ID NO: 389604 - DNA, 201 bp, Homo sapiens
tcactttggatcctgtgttttgtaagcgaaatctgatgggacgggggagcctgggaatgagcagaggggtacgtgcggcaggcgagtctgtggttacacayattggctcccacagcacgctaccctgtgttcacttgagcgtctgagccccatgcacagtggacagctcatgcaccttctcagtgcgtctgtagtttcaca

SEQ ID NO: 389605 - DNA, 201 bp, Homo sapiens
gactggggtgggccccaggagctgggaagtgaggaaaatccagctgtgtcctgagggttagactccactgccaatgttcacaggatctggagctgatgggracctgcggtgtcaccctgaagggacagatggcccccaggctagcaggaggtggcagtgtccgtttggcagcaacatttgacaagcagaaggcagttggtc

SEQ ID NO: 389606 - DNA, 201 bp, Homo sapiens
tttccgggggctggggagaggaggggatagggaatggctgccgacggatgtggggtttctttttggggtggtgggaatgttctgagtttctttttggggcrgtgggaatgttctggcattagactgtggtgatggttctagaattctgtgaatctgttaaaatccaatcaagtgtacatttaaaagtggtgaatttcatgt

SEQ ID NO: 389607 - DNA, 201 bp, Homo sapiens
agggtccaggccccagacgggatcccacaaagacctaggacagtgagccaagagtggagagaggggacgagggtggactggggtgggccccaggagctggraagtgaggaaaatccagctgtgtcctgagggttagactccactgccaatgttcacaggatctggagctgatgggaacctgcggtgtcaccctgaagggac

SEQ ID NO: 389608 - DNA, 201 bp, Homo sapiens
ttgtcatgaggctgtaaggagccaagggcatgtggactctgaagttctacacgtgtaaaaggcgactgctgtcaatttccccaaattgtagtgtaggccarctcccacgcccctgctgtaagcaatgtgctcctttctttttaatcaacccgaacttaaagcttggcgcagtcacagagcacggtttttctcattttcttt

SEQ ID NO: 389609 - DNA, 201 bp, Homo sapiens
catctgcctctgtgccagccaggctggcagacactccatcgggcgggccccacctggcttggccagggagaaactggcagccacagcccctggcctccccratccctgtcccttgtgcactgcccatgggaggggcagtggccttccacgctgggtctggctcctgcagtagcagagctgggtgcagacacgggttggagg

SEQ ID NO: 389610 - DNA, 201 bp, Homo sapiens
ggtgaccccctcatcaaaaccccaaactgggatgcttctctggctacataggcatggccacatggggacagtgggaggacatgtgataatttggggcagcrgctgaaagcctaggggttagggctactgtgtccttctaaggtggtgcagggcgcacagccctctgggcctcagtttcctcttctgtgaaatggggactct

SEQ ID NO: 389611 - DNA, 201 bp, Homo sapiens
gacttttgaaaatcaagatgtggactgttcagattctgtgttcctttcgcttctgtttggaaacgccacttacataagcttcccttgggcttcacagcgartgtgggctccatttcagtgctggggtgccctccatcaaatcacatcactttctgagcctcagtttccctgcactgcctggtgccctgggttgtcatgagg

SEQ ID NO: 389612 - DNA, 201 bp, Homo sapiens
actcaagtgataggtccgcatcagtgtcaggcctccatgccccccatcctgggatgggaacagcacatcacagtttgcagagccctgcggcaggggtgacycttattgccattttgcaaatgggaaaactgagacttagagtctctctgactcacataagcaggacaggagacagtcgaaccaggtcccccagctgcaatt

SEQ ID NO: 389613 - DNA, 201 bp, Homo sapiens
atcctggctcctactcttggtagcagtgtgactttatgtgacctttctgaacctcagttttctctgttgtaaaatggggaaaaccacacatcgtgggggcrgttgtgtgcacctaaggaagccaccccagggctgggcacacgggtagccgattgtcatatccttgttatggaaggttgttatccttgttaggctggtggg

SEQ ID NO: 389614 - DNA, 201 bp, Homo sapiens
gctctggagtcatctgtagattacagcaagcccatcagtctctatgtctcttgcttacaacaaaggattgatttcagctccagcactaggtaggtgacttrtgctgtgttcattatctcttgataggtgtctgacaggagatggggcttgggctgtgccagggaggagccgtgtggtgcaccacctatctccgcaggcata

SEQ ID NO: 389615 - DNA, 201 bp, Homo sapiens
aaacccatccatccttcctttgcttagcaccatttgccaagcacatcctgccctgggcagcagtgatgaccaagacacaggagctcagccaaggggaggtrgttcaggctgaccaggtagatcctggcagtgactgggtctttctggggagcaacagtcactctcatgtgcctgacaggtaaggcacttccggagcacact

SEQ ID NO: 389616 - DNA, 201 bp, Homo sapiens
ctgtgggaccccaggtgctgggagcacagaagccagccaggccatctggcccggctgagactcaagtgataggtccgcatcagtgtcaggcctccatgccycccatcctgggatgggaacagcacatcacagtttgcagagccctgcggcaggggtgactcttattgccattttgcaaatgggaaaactgagacttagagt

SEQ ID NO: 389617 - DNA, 201 bp, Homo sapiens
ctctttcccatctccctccccaatactccagcgtcagtcagtctccccccgacagggggaagggagagaggccaggagccttcccctggggcacacacagrgagcccagcaggcttggaagaagtgtctccctcctcctccagccctgccagatggtcccagccctcctgcagggttcccgaagtggaaggatctggactc

SEQ ID NO: 389618 - DNA, 201 bp, Homo sapiens
acttccagactagactgaacttacaaaacccatccatccttcctttgcttagcaccatttgccaagcacatcctgccctgggcagcagtgatgaccaagayacaggagctcagccaaggggaggtggttcaggctgaccaggtagatcctggcagtgactgggtctttctggggagcaacagtcactctcatgtgcctgac

SEQ ID NO: 389619 - DNA, 201 bp, Homo sapiens
catctgtgcctgcagggggcccataagccttaatgccctgcagagagggggcctgggggaggctgggactcacaccagctggggaacaaggcctgcagctrgggggctaccaggatgctccttgccagtaaagagggtcctcaggagatcagccacagctcaatcaggagggtctgcccatttcacaggggaggaaagcga

SEQ ID NO: 389620 - DNA, 201 bp, Homo sapiens
tcccccaggaagagaggagaggcggggctggactctttcccatctccctccccaatactccagcgtcagtcagtctccccccgacagggggaagggagagwggccaggagccttcccctggggcacacacagagagcccagcaggcttggaagaagtgtctccctcctcctccagccctgccagatggtcccagccctcct

SEQ ID NO: 389621 - DNA, 201 bp, Homo sapiens
ttaggtgtacctgcaggccacctgggggcacagagaactttgcatgaatggggtcagggtgtggggagagcagtgtagctgatagggcactgggccctggrccctggaccctggagggtgctaggaagtctccatctagttagacatttctcaagagctggatatggttccaggaaggactcttcctggctctgttctttc

SEQ ID NO: 389622 - DNA, 201 bp, Homo sapiens
gtggctcaagcagaacatctgtgcctgcagggggcccataagccttaatgccctgcagagagggggcctgggggaggctgggactcacaccagctggggarcaaggcctgcagctggggggctaccaggatgctccttgccagtaaagagggtcctcaggagatcagccacagctcaatcaggagggtctgcccatttcac

SEQ ID NO: 389623 - DNA, 201 bp, Homo sapiens
ctcccccaggaagagaggagaggcggggctggactctttcccatctccctccccaatactccagcgtcagtcagtctccccccgacagggggaagggagaraggccaggagccttcccctggggcacacacagagagcccagcaggcttggaagaagtgtctccctcctcctccagccctgccagatggtcccagccctcc

SEQ ID NO: 389624 - DNA, 201 bp, Homo sapiens
gtgatgattaggtgtacctgcaggccacctgggggcacagagaactttgcatgaatggggtcagggtgtggggagagcagtgtagctgatagggcactggrccctggaccctggaccctggagggtgctaggaagtctccatctagttagacatttctcaagagctggatatggttccaggaaggactcttcctggctctg

SEQ ID NO: 389625 - DNA, 201 bp, Homo sapiens
ggagttgtggtttccccatgtggaagctggcagcatgccacgcacctgccagggctgccgcgagggttcgcacacactgtgtgtaatgctcctgtgtgagytccccggtgacccaggtcccactggggtggccggcgtgtaaccaggacaggaacatctccaaagccactccttgtttgctgcctggtggctcaagcagaa

SEQ ID NO: 389626 - DNA, 201 bp, Homo sapiens
tctgccagagctaaggggagtctccgtcatctcaaatcattgggtcaaatgacagaaatctgctggcatgctgccttttgaggctcggcgacttctctgargctttcctgatggctgctctgggtgtctggaatgagctgtggacgagggccgtcctctgagtgaccatgccccccacgcagccgaggttcccctctgcct

SEQ ID NO: 389627 - DNA, 201 bp, Homo sapiens
tgagccagttgttaaactgtgggtagcatggaaatcagccctggcttgagtattcatgccacggacttggcaaatgccgcaaatcagggccttctctctamcccctcccagccccaacccgaagacctgattgttaactgcactggcaaacccctggctctgcctcctggagcctcaggttccttatctggaagcggggag

SEQ ID NO: 389628 - DNA, 201 bp, Homo sapiens
attctaggtcttgttctaacaggaacatattttcgcttatttaatccttaggaccctctgaagcaggtgtgaatattaagcccattttatggataaggaarctgaggttcggagaggatgagtaactttcccaggtaactgaggaggaagtgagccttgcccctggtaggtctggcagctgcacttgcccttagcctctag

SEQ ID NO: 389629 - DNA, 201 bp, Homo sapiens
ttgatccacatgtctgtccttttaccaggaccacactgtctgtatcactgtatctttatatcagctggggtaaatcctccaactgtgttcctttatttatwtatttattgcaaagtcattttggctattctaggtcttgttctaacaggaacatattttcgcttatttaatccttaggaccctctgaagcaggtgtgaata

SEQ ID NO: 389630 - DNA, 201 bp, Homo sapiens
ccacatccttagcagcttctgccgtggcccttcctccagccggggaccctggcagaatgcatgggcaggaggaggtgccttggccccaggacagccaggtrggcagtgaatggacgaaatcagtctgtgcaggagggaaacactaacactaaccctaaccctaaccctaaccctaacacattctcaaaacatttgattcta

SEQ ID NO: 389631 - DNA, 201 bp, Homo sapiens
gtttctcccctgccagcaaactcctttggaccaagaattgatgccatggtgttagcatacaataaagcttcaaggagctggtgaaacactctgagacggtyataaaattggcttttcatccctgtcggagctttcttattacagacaacaagcagtgtcagggagcagcacggtagatgctgcttaacccagcagcaggcg

SEQ ID NO: 389632 - DNA, 201 bp, Homo sapiens
ggaagccactgataaacatcttccaacaaacaggatcagggatctgcaaagttttttttttttgttgttgttgtttttttgagacagagtcttgctctgtygcccaggctggagtgcagtggtgcgatcttggctcactgcaacctccgcctcctgggttcaagtgattctcctgcctcagcctcacaagtagctgggatt

SEQ ID NO: 389633 - DNA, 201 bp, Homo sapiens
gctgccggaagaggcagatggcagtgtcccagggctatggaagccactgataaacatcttccaacaaacaggatcagggatctgcaaagttttttttttttgttgttgttgtttttttgagacagagtcttgctctgtcgcccaggctggagtgcagtggtgcgatcttggctcactgcaacctccgcctcctgggttcaa

SEQ ID NO: 389634 - DNA, 201 bp, Homo sapiens
tgtgcctggaacgggagcgacaggtaagccctgacctcagcccgcacctcacctcaccgtagggagggtttctgccctgcaggggtctgggctgggattcyggtgacccgcagcatggggctactcagcctcaatgggtccaggtgtctgggtgaagcccacgctttccagagcaggtccaactctcagcgctcagattca

SEQ ID NO: 389635 - DNA, 201 bp, Homo sapiens
ctctgactttgctgggcaaccctggacaaagccctcaccctctctgagccttcacggccccttctatggactggggatgatgatcatgaccaaggcagtcrtgaggaccatagatcgcacttgccatggccaggccatctgtaaagtggagtgttcaggttagagaggacaagttggtgttattggagggaacctgtggtg

SEQ ID NO: 389636 - DNA, 201 bp, Homo sapiens
tatttatggattcattgatccgattagtgttgattgtctataacaggtgtgtgggtggggtagggggattcaggaagaaggaatagggcgcagctcccccmccccaggatttctggaatgagggagacataacagatggctgtgatccggtgtgaggggcagggatgcagtgggcccggttgcagcctgggagcaggtggt

SEQ ID NO: 389637 - DNA, 201 bp, Homo sapiens
ttgcattcaatatccccttattaaaggcggcagctcaagaatattaaatcatgggaattcctcactgtggaagtgggaaggcagcccgtggttcaccgtgrggggcacccagagctccccctccactgcgttcagtgtgcagccctccagccagcctgtctgcttcgggagcaatccatcatggaatgaactgaccgaagg

SEQ ID NO: 389638 - DNA, 201 bp, Homo sapiens
actgcattgagggttatggtgatgattaggtgtacctgcaggccacctgggggcacagagaactttgcatgaatggggtcagggtgtggggagagcagtgyagctgatagggcactgggccctggaccctggaccctggagggtgctaggaagtctccatctagttagacatttctcaagagctggatatggttccaggaa

SEQ ID NO: 389639 - DNA, 201 bp, Homo sapiens
agacggaatttcaaccatgttggtcaagctgatcttgaactcctgacctcaggtgatctgcccgccttagcctcccaaagtgctggaattataggcgcaarccaccgcacctggctcatgctcatttttatggatccacaccacccgtacagcaaggactgcctgcactcattccaagtggtcagagtggtcaccgcatgg

SEQ ID NO: 389640 - DNA, 201 bp, Homo sapiens
agtctacactcccccaccacaccccagctgctctgatctacctcctgttccttgagcaggccattttctttcttgcttcagggcatttgcaatggctgttscctggaatacccacctcctgcctttctcaccactgactctttctcatcctttgggccccatgtccaatgtcatctttgcccgtgggagccctgcttgggt

SEQ ID NO: 389641 - DNA, 201 bp, Homo sapiens
ctcctccctcagagcttccagagggagccaggcctgcccacgctgtgatgtcacattcctggcctccagaactaggagaggataaagttcgattgttttcyagctgtctgtgtgtagtaatatgttacagcagccacaggacactgatacccagacacatcccaggccctaacatcccagaagaggagtccctgatactcc

SEQ ID NO: 389642 - DNA, 201 bp, Homo sapiens
aacccaggaggttgaggctgcagtgagctatgattgcaccactgtactccagcctgggtgacagagccagaccctgtctcaaaaagaaaaaaaaattcccwgtgcattccctatggacatttgtaactgtccataaaagactttttaatgtcttgacaaaaaattttaaaggccacagaagaattgtaatttcctcattga

SEQ ID NO: 389643 - DNA, 201 bp, Homo sapiens
gttctacctgtggttgagtctacactcccccaccacaccccagctgctctgatctacctcctgttccttgagcaggccattttctttcttgcttcagggcrtttgcaatggctgttccctggaatacccacctcctgcctttctcaccactgactctttctcatcctttgggccccatgtccaatgtcatctttgcccgtg

SEQ ID NO: 389644 - DNA, 201 bp, Homo sapiens
tgcgtttaaatgtgtccttctctcaagaataatgtccacttggaacctcagaatgtgaccttatttggaaatagggttcttgtgtatgtcactagttaagwtgaggtcatattggattcgagtgggcctcaagtccaatggctggtgtccttctaaggagaggacacacagagacacagggagaggaaggccgtgtgatga

SEQ ID NO: 389645 - DNA, 201 bp, Homo sapiens
ccctgtctcttcaaaaaataaaaaaaaattagccaaggatggtggcatgtacctgcagtcccagctactcaggaggctgaggctggaggatcacttgaacycaggaggttgaggctgcagtgagctatgattgcaccactgtactccagcctgggtgacagagccagaccctgtctcaaaaagaaaaaaaaattccctgtg

SEQ ID NO: 389646 - DNA, 201 bp, Homo sapiens
tgctccacctcttcaccaactccatattattagtctttttaatgttcgccactctgatgggtgtacactggtatctcgttgtgatttgcatctgcgtcttktgatgactgatgatgttaagccccttgccatgtgcttcctgaccattcttgtattttggtttgggaagtgtctgcccaaatcttttgcctattttaaatc

SEQ ID NO: 389647 - DNA, 201 bp, Homo sapiens
gaatatagttctccagaggatgcagaaaaattggggattgcagactgtcgtgcgtttaaatgtgtccttctctcaagaataatgtccacttggaacctcaraatgtgaccttatttggaaatagggttcttgtgtatgtcactagttaagttgaggtcatattggattcgagtgggcctcaagtccaatggctggtgtcct

SEQ ID NO: 389648 - DNA, 201 bp, Homo sapiens
ttggtatcgtaaggtatacaataacagtagcgagcactgtgcaaactctctccatatgtcttttacaaagaaataaagcacttgacatctcaatgtttctratgctttaaattacattgtaccaaataaatattagttgtactattttaaaaaaactttcccggttgggcattgtggctcacacctgtaatccaagcactt

SEQ ID NO: 389649 - DNA, 201 bp, Homo sapiens
gccatgatttatttattccttcccctgctgatgaatatttgagttttttctaattctgagctactgtgcagaaagctgctatgaacacgtacgtatgcacmtttgtgagtttgtgagctttcgtgactcttggttacaaggatggttggttcgcatggtagacccgtgcttattttcacgctttaagaaactgccttgctg

SEQ ID NO: 389650 - DNA, 201 bp, Homo sapiens
tgcctgctgttgatagaacgggacaggtggggggatgcttttgattcatgtacggtgaatgatcttattctcacctttatcactggtggcacattctgatrgaaggagacattggcagtgggactgggcaagaaacaggtcatttgtcatggctgtgtgccagcctcctgtcgttgcacagcctgtccttgggaagtcttg

SEQ ID NO: 389651 - DNA, 201 bp, Homo sapiens
caggaagttggacctcagtggacaccaaatctgctgtgccttgatcttggacttccagcctccagaattgtgaggaataaatgcttgttgtttataagccrcccggtctatgatattttgttatagcagcctgaacagactaagccactcccagtgatgagcctgcatgatgttttacacaaacagatcactgaaagaagg

SEQ ID NO: 389652 - DNA, 201 bp, Homo sapiens
actgtaggatagtctgcactttcaagaatttcatatgaatagagtcatagatgcatgcattttttggtctggcttctttcactcagtgtgggtattttgarcttccccctggttgctgtgtgtgtcaatgatttgttcctttttctttgaggagaattctgttctgtgaatatgccatgatttatttattccttcccctgc

SEQ ID NO: 389653 - DNA, 201 bp, Homo sapiens
cagccgtcattccatgtcaaatacttatctgtgccgtcatcgtcgaggtctggtttccaactctatggctccattgtctcatgtttaaccagtcctcttaytgggcatcagcttttccatttttgctctgtgagaggttgttgagttagttggaggaccaagcccataatttcctggatgacagttcgtgtcccgcagata

SEQ ID NO: 389654 - DNA, 201 bp, Homo sapiens
ttccgctgcaccctgcacccagctcagcacctgctatcttccaaaggccattgctgattgcttgtacacacctgttagttcatgcacagacagcaaagcaygtagttgtgctgcctccttgccttcctgctatgatctgaatgtttaagtaccccctccaaattcacaggttgaaatccagacccccaatgtgagggtatt

SEQ ID NO: 389655 - DNA, 201 bp, Homo sapiens
tcacccccataattaagatttggagcatggccttcacccacaaaacgtttcctgttctctgtgtggtccattcctatctctgccctgcaccctgggtagcyagtgatttgcctttggtcactgtaggatagtctgcactttcaagaatttcatatgaatagagtcatagatgcatgcattttttggtctggcttctttcac

SEQ ID NO: 389656 - DNA, 201 bp, Homo sapiens
cctgggcactggcatgtcccagccgtcattccatgtcaaatacttatctgtgccgtcatcgtcgaggtctggtttccaactctatggctccattgtctcakgtttaaccagtcctcttattgggcatcagcttttccatttttgctctgtgagaggttgttgagttagttggaggaccaagcccataatttcctggatgac

SEQ ID NO: 389657 - DNA, 201 bp, Homo sapiens
ccccttaaagtgtagacttccatattcttagaattggcaagctatgtatatgtttgtgaaatcacccccataattaagatttggagcatggccttcacccrcaaaacgtttcctgttctctgtgtggtccattcctatctctgccctgcaccctgggtagccagtgatttgcctttggtcactgtaggatagtctgcactt

SEQ ID NO: 389658 - DNA, 201 bp, Homo sapiens
gggaaacagagagaaaggtgtggcctctccacttctgtggacaccccaaataggaagaagggtgcacacaaagcaccgcttcctccacgaagccctcctcrggcacatcgaggagaaccagctgcccaagctcttggctgctgcccttctgaggcctgcctggtaggtggcgtaggaggaggcttggtaagcagatgatgg

SEQ ID NO: 389659 - DNA, 201 bp, Homo sapiens
tcaatctctttaatctctagcttaatagatgatggttggattctcacatcagctcctgcattcagtctgttgtgatacattgtttggttgaggtattgtcraacatctatcctcaaacagatatgtagttggaaaagggagaaccccacaatcccctgaaaacgtcttggggtcccctggaggtacttagaccacagtctt

SEQ ID NO: 389660 - DNA, 201 bp, Homo sapiens
ttgcaaacatgaggacaaaccctcactccatttggggcctgcagattcagcaagagtggaaaaaccagctttttaaaatggcagcctgggaatcccagaaktaggaagcacaagcttgtctttggcaggccaggccagctgctgacccgcacggccttcaggggccagccagtgcgaccatgattgaatgcacagccctga

SEQ ID NO: 389661 - DNA, 201 bp, Homo sapiens
ccattacatgttaacgtaaataatattttttttggaaaataactgtgttttgttttaaaaagtgagaagagtggcgtgtgtatcaatctctttaatctctrgcttaatagatgatggttggattctcacatcagctcctgcattcagtctgttgtgatacattgtttggttgaggtattgtcgaacatctatcctcaaaca

SEQ ID NO: 389662 - DNA, 201 bp, Homo sapiens
ttcgttttcacggccgccattttggctgcccgcagagtgcctggtgcaaagcggatgacactcagtatctagagcggcacttccgggtaatccacaaacayttatcaaacacttaggtgtcacttggggtgctcggaattgcaaacatgaggacaaaccctcactccatttggggcctgcagattcagcaagagtggaaaa

SEQ ID NO: 389663 - DNA, 201 bp, Homo sapiens
agtgtctggcatcggcaggtagcttccatggcagataccccccctctcccaccagattctgccctttgagcgacaggaagataaatagcgctgttctccartgtcacttgtgactttcctctgtgagttcattgtcagggtgctcctgagctgagctgtggccaccactcattggtgtggtccctggagacacttggataa

SEQ ID NO: 389664 - DNA, 201 bp, Homo sapiens
caaagctactgttcgatttggggaaatggggccgcttgtatgaagagccgcaggcaaagtggaaagtgccgagggctggaagtcagatgggtgtgggtgcrcagccttcctgtgtacctgtgggcaccacttacctgctctgtgaccctgagcagggcacctttgccttcgaaacttgaagatcacagtcgtccaggtgga

SEQ ID NO: 389665 - DNA, 201 bp, Homo sapiens
tggagaagccaaattcagttttcagagatgacactaatcctattaaggttgatggggccagagcatgtgtggaattagtcctgccaggcggcggccgggcwcctgcctggaaggctggaggggatcctaacaagagtggtgccgaggagagagagggaaggggcctcatctctcccagaggtttaaaaaaactgaggccac

SEQ ID NO: 389666 - DNA, 201 bp, Homo sapiens
tccacctgccttggcctctcaaagtgctgggattataggcgtgagccactgtgcccaggctggagaggtttttggatgcactgggccatggatgtgaaggygaacacatggaaacgatccctgccacctgcttgtgtgtccagtggacatgtctctgatctatccagattgttacactgtcaaagtgaaaactgctgagag

SEQ ID NO: 389667 - DNA, 201 bp, Homo sapiens
gcaccgtggtctgaatcagcccagcaccccttcgcctctgttgcagtgctcacatttatccctcactcctccatccagcatgttttgttttttttttttttacaagcagacactttgctttataaaagaattctgctgtgagctgccgtatcctctctgagcctcccttttgtcatctgctgaatggtaacagcagcgcct

SEQ ID NO: 389668 - DNA, 201 bp, Homo sapiens
aggcctcctcagagtgggaggcaccgacccaagagtggctggctcccctttcatgctcccaccctctctacccagctcaagaccccggggctccttggtgwgagtgagagccaggccagctccccagggacccccaaggcctggtccttcccatggtctcttttctctagcaggtctttgtcttgggctgctgccagccac

SEQ ID NO: 389669 - DNA, 201 bp, Homo sapiens
gtataatgggagttggctgaggtggcagcgtgtccccacggaagggtgcgagggaccttctctgcaccgcaggcctcctcagagtgggaggcaccgacccragagtggctggctcccctttcatgctcccaccctctctacccagctcaagaccccggggctccttggtgagagtgagagccaggccagctccccagggac

SEQ ID NO: 389670 - DNA, 201 bp, Homo sapiens
tttgatgaaaggcaaagactgtgccatttgacctacttgatattgacttgttataaagctgtctctctacggcagggtagtactgccacatgggccagacrgaaagaccaatggaacagaatagagaatccagaaataaaggcacatgtatatgggaacttcgtatagaaaagaagtggcattttaaatcagtgggaaaag

SEQ ID NO: 389671 - DNA, 201 bp, Homo sapiens
gcttgtgcaggtcacgctgttcctacgaggtagaccctgactttgaccccaggctgtgtccctgccaagcttggagcctctttctcaaaagggcgacggaaggatgttgttacagatgtggttgccagtttcctccttttcattaaatcaccagggaaatggtctcttgcaacccccctaaagcagggggaaggaggagga

SEQ ID NO: 389672 - DNA, 201 bp, Homo sapiens
gagagcactgtgattgaccgctcacagggatagggagtgcagtggcgccatctcggctcgctgcaacctccgcctcctggagtcaaacacttctcctgcckcagcctcccaagtagctgggattacaggcgccacgggtggcgagggcaggagcctttctttccccaaaggaaagaggagcggagcactggggctgaaagc

SEQ ID NO: 389673 - DNA, 201 bp, Homo sapiens
cacctgccttggcctctcaaagtgctgggattacaggtgtgagccactgtgcccagcctgtgcccagtgtacccatcagtaaagcagggatcaaacagttyttaaatcctgcagcggtggtgagagccacctgaggaaacgatgcaaagggctttgacggagtctggcacagagaacgcacccaataaatgactgccgtga

SEQ ID NO: 389674 - DNA, 201 bp, Homo sapiens
gaaggatctgattggctctgtgtgggtcacttgcccactttttgcaccaatcagcatggacagggatatcacatgcccaagttggccaggccaaggggcgrggagagcactgtgattgaccgctcacagggatagggagtgcagtggcgccatctcggctcgctgcaacctccgcctcctggagtcaaacacttctcctgc

SEQ ID NO: 389675 - DNA, 201 bp, Homo sapiens
cccggggaatgtccctgggcttctgaggcctcacctccctgggtagtcaggagggttacgagggtggggcctggccctggggactccagggtgtggcagcrgtgggagtgaggaaacagccctgagacggagggagagaagggcgatccagatggcggtggcctcctcacccctcggccagtgatgcatggtagtggtttt

SEQ ID NO: 389676 - DNA, 201 bp, Homo sapiens
caagagtggagagaggggacgagggtggactggggtgggccccaggagctgggaagtgaggaaaatccagctgtgtcctgagggttagactccactgccartgttcacaggatctggagctgatgggaacctgcggtgtcaccctgaagggacagatggcccccaggctagcaggaggtggcagtgtccgtttggcagcaa

SEQ ID NO: 389677 - DNA, 201 bp, Homo sapiens
gaaggccaggttatgggggcagtggggaggggacactgtctggggagtcctcattgcccactctgtcccagtctataattgtccaggtgggcagcaaaccrttgcctttagggaccagataagcaacttcctgtgcagagcaggtgctccaagaaaaaaggagatggtcagtggatggcatacaggagactgtaccaactc

SEQ ID NO: 389678 - DNA, 201 bp, Homo sapiens
ttagcctgggtcaatctctgttgcttataactgacagacatgggaaaccagccccagcaatgagaggtgacccagctcagatcatgagacaggacaggaayccaggcctttctgaaacatagcccagggtcccatcccacaacgtgtcagtagacaccatgcctgctgggtcatgcctgcttccgctgcaccctgcaccca

SEQ ID NO: 389679 - DNA, 201 bp, Homo sapiens
cagattcatgaaccaaataaatggtttctgcttgaagccattaagttttgaagtgctttgttacacagcagtgggtaactggaagagtcatggattcctgmcattgaattcctggtcctcctccttctcaggctacttgtctagatgttctgttctctccatgattctgtggatccctcagagccttccggtaacttcctt

SEQ ID NO: 389680 - DNA, 201 bp, Homo sapiens
cgtcttgtggtccatctgcccgtgagcattccagccaggtctgtgggcttcgttttcacggccgccattttggctgcccgcagagtgcctggtgcaaagcrgatgacactcagtatctagagcggcacttccgggtaatccacaaacatttatcaaacacttaggtgtcacttggggtgctcggaattgcaaacatgagga

SEQ ID NO: 389681 - DNA, 201 bp, Homo sapiens
caccgtgtagctttggaggctaagtaaaaaataggtcatgtgcttctgccttggagccagccaccatattgtgaggaagcccaagcagtttgtggagaggyacatgcagagaggaaccaaggtcctggttgagctgcctgcctaatatccagcaccaccttgccagcaggtgagtgagccatcttacaggtagagcctcca

SEQ ID NO: 389682 - DNA, 201 bp, Homo sapiens
attgctagtggcgactagatccaacatatttaatatttgccaatattatggtaaaaattgctgtttttttgtgtgtgtgtgacagaggcttgctctgttgstcaggctggagtgcagtgtcgtgatcttggctcactgcaacctctgcctcccaggctcaagcaattcttgtctctcagtctcccaagaagctggcattat

SEQ ID NO: 389683 - DNA, 201 bp, Homo sapiens
tctcacgcaagtggcggctaagcccagaggcacttgtctccatttcagtgccctgctattggctggttagaaagtcaatattttatggagcctcatcaacytcccaagtcttgggtctcaattcccccttttggtgtgagcctctgaagactggttgagcatttgtgagaaacaaagttttgactactcaagactctagtt

SEQ ID NO: 389684 - DNA, 201 bp, Homo sapiens
ccaaatttaatttttcaagctctctctagcagcaaagtatttcccccatataaaaaaatgaggacgctgaggctcagagaggtgaactcgtttgccggagycacagggcttgctggcgggcgttggcactgatagttgaaccctggtccactagtgtgcctccagagatggtgcaggccacgccgtctgccttggtctcac

SEQ ID NO: 389685 - DNA, 201 bp, Homo sapiens
acaaacctttacattctcagtccaaaaaaccctactaagaatcctgtgctggagacaccctcactcaacccctgaccctcccctctccctgcttcagtgtmcacacgtgcacggtgctgtgagatgcagagtccagagtcatgcggtggctaggaggtcagggacgccttcctgggagaggcgatgtctgagctgagtctg

SEQ ID NO: 389686 - DNA, 201 bp, Homo sapiens
gaatacagttaccaaatttaatttttcaagctctctctagcagcaaagtatttcccccatataaaaaaatgaggacgctgaggctcagagaggtgaactcrtttgccggagccacagggcttgctggcgggcgttggcactgatagttgaaccctggtccactagtgtgcctccagagatggtgcaggccacgccgtctgc

SEQ ID NO: 389687 - DNA, 201 bp, Homo sapiens
tcacatggccccacctaatgcaaggggctctaggaaatgtagtccctggctgggcagcccagtggctactctgcagtgggaagaacctgcatcttggtggrtgtcttgccatctttgccacatgaccccacaaaacaaacctttacattctcagtccaaaaaaccctactaagaatcctgtgctggagacaccctcactca

SEQ ID NO: 389688 - DNA, 201 bp, Homo sapiens
ccagaactgtgaggaaatagatttcttttgtttaagtggcacagtctggggcactttgttatggtggcactagaaatgaatacagttaccaaatttaattyttcaagctctctctagcagcaaagtatttcccccatataaaaaaatgaggacgctgaggctcagagaggtgaactcgtttgccggagccacagggcttgc

SEQ ID NO: 389689 - DNA, 201 bp, Homo sapiens
tggtgccctcgccactccctggctgagtgatcttgggcaagttgtccagccaggccgtgcctgggtgaccacatctgagctgggggtgagcgtggctgcamcatcctctctgggatgtggtgggtgttgaatgagatggtgcatgccacgtgctccgtgggcctggtgcctgtgggtccctgtcttacccccatgatgggg

SEQ ID NO: 389690 - DNA, 201 bp, Homo sapiens
aggagattaggacagagacacacacagaaggacaactgtgtgaagacacagggagaagacagccatctgcaagccaggagagaggcctcagaagaaaccawcctgctgacaccttgatcttggacttccagctccagaactgtgaggaaatagatttcttttgtttaagtggcacagtctggggcactttgttatggtggc

SEQ ID NO: 389691 - DNA, 201 bp, Homo sapiens
gtagggcacagccatcggggagccagcgtgacagatgtgagtgctgtggccctgggatgcgatgacaaccccttctcactggggtgtaccctggattgggktggtgcatgtagaatatatggcatgctgctggcacttggcaggtgctctgtcaaggttagttgttgttacttaaaaactctaatcaagtaagcatgacat

SEQ ID NO: 389692 - DNA, 201 bp, Homo sapiens
agatggtcagtggatggcatacaggagactgtaccaactctgtggcagtcagatttgattttgttacaaaccccatggcaatgaaacaaaacccacctatragtagggctcagccatgcctgcccaggacaccatgaacagagataactactggcccaaggtcccagggccagttagtgccagagccacaagcagtgccca

SEQ ID NO: 389693 - DNA, 201 bp, Homo sapiens
aacgcagctctggagtcatctgtagattacagcaagcccatcagtctctatgtctcttgcttacaacaaaggattgatttcagctccagcactaggtaggtgacttatgctgtgttcattatctcttgataggtgtctgacaggagatggggcttgggctgtgccagggaggagccgtgtggtgcaccacctatctccgca

SEQ ID NO: 389694 - DNA, 201 bp, Homo sapiens
caacgcagctctggagtcatctgtagattacagcaagcccatcagtctctatgtctcttgcttacaacaaaggattgatttcagctccagcactaggtaggtgacttatgctgtgttcattatctcttgataggtgtctgacaggagatggggcttgggctgtgccagggaggagccgtgtggtgcaccacctatctccgc

SEQ ID NO: 389695 - DNA, 201 bp, Homo sapiens
gcaacgcagctctggagtcatctgtagattacagcaagcccatcagtctctatgtctcttgcttacaacaaaggattgatttcagctccagcactaggtaggtgacttatgctgtgttcattatctcttgataggtgtctgacaggagatggggcttgggctgtgccagggaggagccgtgtggtgcaccacctatctccg

SEQ ID NO: 389696 - DNA, 201 bp, Homo sapiens
tgcaacgcagctctggagtcatctgtagattacagcaagcccatcagtctctatgtctcttgcttacaacaaaggattgatttcagctccagcactaggtaggtgacttatgctgtgttcattatctcttgataggtgtctgacaggagatggggcttgggctgtgccagggaggagccgtgtggtgcaccacctatctcc

SEQ ID NO: 389697 - DNA, 201 bp, Homo sapiens
aggaatagggcgcagctcccccaccccaggatttctggaatgagggagacataacagatggctgtgatccggtgtgaggggcagggatgcagtgggcccggttgcagcctgggagcaggtggtcagagatgaaaggctgtgggcagcagtggttggtggtccacagcagtaggcagcagggggagggggcgacattcatgg

SEQ ID NO: 389698 - DNA, 201 bp, Homo sapiens
tgttaaggtgctctttttgagaagatcttaattttatttctctattttatttcattacagaaacgtttgaacgtgtagacagtagaataaagggggggggrataacatccttcatttcactactccagaaacactgctcacattttgttgcatttccttctaactaccccctgcagattgtactatgttttgtgtctttta

SEQ ID NO: 389699 - DNA, 201 bp, Homo sapiens
agtagagacggaatttcaaccatgttggtcaagctgatcttgaactcctgacctcaggtgatctgcccgccttagcctcccaaagtgctggaattataggygcaagccaccgcacctggctcatgctcatttttatggatccacaccacccgtacagcaaggactgcctgcactcattccaagtggtcagagtggtcaccg

SEQ ID NO: 389700 - DNA, 201 bp, Homo sapiens
tggggactttgggagtgatgaggttgtgagggtggagccctcatgggtgggattagtgcccttataaaagaccttagagagctcccttgcccttctgtcaygtgaggacgcagcgagaaggcactgtttgagagtcaggaagttggacctcagtggacaccaaatctgctgtgccttgatcttggacttccagcctccaga

SEQ ID NO: 389701 - DNA, 201 bp, Homo sapiens
aatccaggcctttctgaaacatagcccagggtcccatcccacaacgtgtcagtagacaccatgcctgctgggtcatgcctgcttccgctgcaccctgcacccagctcagcacctgctatcttccaaaggccattgctgattgcttgtacacacctgttagttcatgcacagacagcaaagcacgtagttgtgctgcctcct

SEQ ID NO: 389702 - DNA, 201 bp, Homo sapiens
ttttttacaatttcaaaaaagttttgatgcaaactttcaaatttgtgccacttctgggccaaagtgtttaagaagggagtgcaccttcccccctccctctktcccagagaagggagagatgccgctccctggagcccctcatcactctgtggaagggactgctggccaactgttacaagaggagaaacttctttgcatttg

SEQ ID NO: 389703 - DNA, 201 bp, Homo sapiens
gaatccaggcctttctgaaacatagcccagggtcccatcccacaacgtgtcagtagacaccatgcctgctgggtcatgcctgcttccgctgcaccctgcacccagctcagcacctgctatcttccaaaggccattgctgattgcttgtacacacctgttagttcatgcacagacagcaaagcacgtagttgtgctgcctcc

SEQ ID NO: 389704 - DNA, 201 bp, Homo sapiens
aaatagtgcacactctgtaggttaatctcaataaaagggagctctttcatgatcatgattagcttctgaatgtttttttacaatttcaaaaaagttttgaygcaaactttcaaatttgtgccacttctgggccaaagtgtttaagaagggagtgcaccttcccccctccctctgtcccagagaagggagagatgccgctcc

SEQ ID NO: 389705 - DNA, 201 bp, Homo sapiens
gagaaacttctttgcatttgtgagaaaatagtctattgaactgcttccaatctatcaagatcttgctgtacttccttcatttactctcccctgcttttggmtgaagaatttttaggcaaatccaagactcctgtcgtttccccgttccatctgcaggcatctctgagtgttgagggcatttcttgtagcccagtgctgtta

SEQ ID NO: 389706 - DNA, 201 bp, Homo sapiens
cagtggcagaggccacaagtggacacgtggtccagggactgaagggcaggtggcatttccaggttggggggtgatgatgtgctgggacatggtattctagygcattctgggcaggaggaacggtgtgtgcaaagtggcataacacttgtcccctgacagtgtccggctcctctgcttgagaccaggaggcagttagttagt

SEQ ID NO: 389707 - DNA, 201 bp, Homo sapiens
gggttaggtggcctgttcagttctgattatgcaccacacttaggaggttttgggatttgaactagactacctggcttggtgctcttgctatctgtgttgcratgaaaggcaatcgagaggggtcagcaggaggagagacccccttcacggcacaggtagatggcagtggcagaggccacaagtggacacgtggtccaggga

SEQ ID NO: 389708 - DNA, 201 bp, Homo sapiens
cttgaaatgtggactctcctctcccagtgtcttgggtgccactgcgggacctagctacttctcaggagagagtctgaagctgctggaggagtctgtacatmcctcagcaccctggggagtcctgttagttacacagggccttgcaaagacaggcatctcaccattaagcccttgagcagaatgatccaagtggactttagg

SEQ ID NO: 389709 - DNA, 201 bp, Homo sapiens
gattattctccagaaagtttttctctttaaccacatgctgatcaacattaggtagtctaatttgtttgacctttgcaaatatcaaagatgaaaaatatttrttgtaattcacgtctgcataccaatgaggttgaacattttttccttttgttcagcgggtattggctgatccctgttatgtgccagggtgacattagattc

SEQ ID NO: 389710 - DNA, 201 bp, Homo sapiens
gcttaggagcctggtgacctgctgctgtgacttcctctccagagctggagctccaggggctgaggttccccttccctgggcagccccttcctcctaatccrgctttccctgtgaggaagagcctcctggccttaagccacatccttagcagcttctgccgtggcccttcctccagccggggaccctggcagaatgcatggg

SEQ ID NO: 389711 - DNA, 201 bp, Homo sapiens
tccacacgtgctatttcatataaagatcactagcatttttaatgttgttgacacacattggcagattattctccagaaagtttttctctttaaccacatgytgatcaacattaggtagtctaatttgtttgacctttgcaaatatcaaagatgaaaaatatttgttgtaattcacgtctgcataccaatgaggttgaacat

SEQ ID NO: 389712 - DNA, 201 bp, Homo sapiens
aatccctttagggcaggctcaggtcagtcatgctatggtcacccctcagtgccccgacatggctcagcagtgtccggtggcttgaatggaggaccacaaastgtcctctctctgcagaggggccccaggtcatatctgctgacttagcaccgcctataagatttaaagaccactctgttttcacctggaggaaccgtcagc

SEQ ID NO: 389713 - DNA, 201 bp, Homo sapiens
atgcccttcccctcactttgtcaaaccccagcagctgttcagcaggcacaccacagccgcctctggaggaggcattggctggtctcctgtgtcaatgtatygacactgcctggcgaggtctggctctccggcctccctgtgtatccacaggtctccccagctctgcaatccctttagggcaggctcaggtcagtcatgcta

SEQ ID NO: 389714 - DNA, 201 bp, Homo sapiens
ctgggaagggtgatttgcccccacccctgcatctcccacacggtcccatccctgaacccttgcacacacggcccctctgcctccatgcccttcccctcacyttgtcaaaccccagcagctgttcagcaggcacaccacagccgcctctggaggaggcattggctggtctcctgtgtcaatgtatcgacactgcctggcgag

SEQ ID NO: 389715 - DNA, 201 bp, Homo sapiens
aaagtagagactcttgtgtccccattttacagagtaggaaagtgaaccctaaagaggctgcctgctgttctgtggccacgcagctgggcagtggcggcatygggatttgaacccagaaactctggctgtacggtcttagccttggctcactctcacctccaagaaatagactctgagcagtgaggtgacgtgtcccaggtc

SEQ ID NO: 389716 - DNA, 201 bp, Homo sapiens
gcattcttcatgatggccctaaaagtagagactcttgtgtccccattttacagagtaggaaagtgaaccctaaagaggctgcctgctgttctgtggccacrcagctgggcagtggcggcattgggatttgaacccagaaactctggctgtacggtcttagccttggctcactctcacctccaagaaatagactctgagcag

SEQ ID NO: 389717 - DNA, 201 bp, Homo sapiens
gacagctagatctggagatgctgctgcccatgagttctgcccctttgtttctgtgtttggaaggcctggcccaaaatggggattgggggtgccccagtctkgtctgggatgggcaggaattatttcccagcaaggtcaaggctgctcaacactgtgagaaccctggcctgggcatcaggaaacatggcttcctctccagct

SEQ ID NO: 389718 - DNA, 201 bp, Homo sapiens
cactcaggcattcttcatgatggccctaaaagtagagactcttgtgtccccattttacagagtaggaaagtgaaccctaaagaggctgcctgctgttctgyggccacgcagctgggcagtggcggcattgggatttgaacccagaaactctggctgtacggtcttagccttggctcactctcacctccaagaaatagactc

SEQ ID NO: 389719 - DNA, 201 bp, Homo sapiens
gagcctgctgggaaggaaggctgttagccgctgccttgcaggtgccatagcaatgccaggcagcccacctgctccttggattagatgggggatcagagccrtgagggaagcaggcctgtacccaggaacaggctcatcccgcccctgccctggcccggtactgatggacctggagccatagagtgcctctccccgcaacac

SEQ ID NO: 389720 - DNA, 201 bp, Homo sapiens
ttccccttgcttccaccctggcagcagcagctgggtgcagttgcatgagcgttggccccaggctctccagccacactccaggaagggccaagtatggcctyctcccttcccatgcatccctgacctgtgtcccaggatgcctgtctgccctgctcccagctgatgcctccctgtgcccggggctcccacctggacggcgtg

SEQ ID NO: 389721 - DNA, 201 bp, Homo sapiens
tgctaatattgattccttttgaatcaatattcaaaaggtaggggattgtaataatacattttagtccatttaaaatatgtcactaaaacaaataaaatacaaaaaaaaaaaggtctgatcatgattatgtaaaaacaaaactctacgttgaaaaggtcctgggataacacactctaaaaggtttctggcaattacatttgg

SEQ ID NO: 389722 - DNA, 201 bp, Homo sapiens
acacagggagttggctggagacgcagttggggccagactgtgaagacctttgagctgagatgttgtcatatggagctgggagcctggaaacatctgaaccrggaaggggaacacggaccacatgagggaggggtgaggctctgaattctggcagagtgaggaggctggctcgaggaggggaagggctggagagctctgtgt

SEQ ID NO: 389723 - DNA, 201 bp, Homo sapiens
gatccctctggctgcccagtggggaataagctgaggggtgaggtagaagtgggggctggctgggggctagcgtgttcacgcaggtgagagacgctggtgckcagagtgagtggccggtgcaggtggggaaggtggtgggccctgccccccatggcaggtggggcctgctggatttgctgctggattggatggagagggagg

SEQ ID NO: 389724 - DNA, 201 bp, Homo sapiens
acctctttggtaaactggttgacgtccatgactaaagctaaacaaacagaccctatcactcagcaattcctagaatttcttttgaagagaatcttgctgtrtggcccaggctggagtgcagtgtggcaccatcctggctcactgcaacccctgtctccaaggctcaagtgatcctcagcatcccgagtagctcggaccaca

SEQ ID NO: 389725 - DNA, 201 bp, Homo sapiens
ccagctggctagggtgatgagtatggacgaggatggaggcaggctgtggctgctgtctcatccaagtagccttttcctgacaccccaaggctgggcagagrgactgagttggtcccagggcggagcctgctgggaaggaaggctgttagccgctgccttgcaggtgccatagcaatgccaggcagcccacctgctccttgg

SEQ ID NO: 389726 - DNA, 201 bp, Homo sapiens
gctcgtggaacaaacacaggcagcaatggaagaatccccaccactgggattttcagcagctgatcgtagaagggagctggactgcaaggccgtctccgacygcctccctctcactgcccagctggctagggtgatgagtatggacgaggatggaggcaggctgtggctgctgtctcatccaagtagccttttcctgacacc

SEQ ID NO: 389727 - DNA, 201 bp, Homo sapiens
gtcctcgtttgagcattgagatgctgaacgttaaactgtccttcattctccagctcagttcttttattcatccaacaaacacagagtagctactgtgtacyagatactattctaggcactgggcatacagtggggcccccagctcgtcctggcctcccagcccagtgggtgtggagcagtgagcaggaggacctcgagtgt

SEQ ID NO: 389728 - DNA, 201 bp, Homo sapiens
aggggcttgcccatcctttggccttgctggagccaagggtgtgaaatgggagctgagagtaggatgttagtagcagtggcttcctgggaagggcccccacrtgggagcctctggcctggttgcaaatggcaggaccaaggaggtggttgttgagttagttggaaggcactgtcctgccaggatttcccacgtcctcgtttg

SEQ ID NO: 389729 - DNA, 201 bp, Homo sapiens
ggagggcaagaagaaggcttggccaggaagatggggtagggctcattcctggcaggtccagcctatgtgaagcccagagacccagtgaggggcttgcccaycctttggccttgctggagccaagggtgtgaaatgggagctgagagtaggatgttagtagcagtggcttcctgggaagggcccccacgtgggagcctctgg

SEQ ID NO: 389730 - DNA, 201 bp, Homo sapiens
tgccctgccctggcttcttgcggtgagcaggtcttatggagttgctctaaccactgtccatccaggccggggttagaggatccaaacacagccatgttgaygggaacctggaggcaaatagagggcatgagaccctcctctcctgaaacctttctggccttcttattggatacccaccaaacagtcttgatcttaaaactt

SEQ ID NO: 389731 - DNA, 201 bp, Homo sapiens
gaccaggacacagtcaccagcaatcagctttcatcgacttggctggaccttggaaacttaaggcttgccctgccctggcttcttgcggtgagcaggtcttrtggagttgctctaaccactgtccatccaggccggggttagaggatccaaacacagccatgttgatgggaacctggaggcaaatagagggcatgagaccct

SEQ ID NO: 389732 - DNA, 201 bp, Homo sapiens
agtcaaccctccagggctgtgaaacttctgctgccttgatacgatgtgatttccgaaccagaaaaatggaggaggccctggcccctaatgcttaagtcacrggtgactctgtgcaattggtttcttccctgtctcctgtccctctaaaaagaaccacctgagctcccggactgtgctatatccaggcctaaaggctggtgg

SEQ ID NO: 389733 - DNA, 201 bp, Homo sapiens
ggcccagtgcctgtctttgtaaataaagtttgattggaacagagtcatgcccatgtatctacacattgtctgtggatgcctttctgctataatggcagagktgcagagttgccaaagaggacatatgtcccacgaagcctaaaatattggctatctggccctttgcagaaagaatttgctgacccttggtatagaggaaag

SEQ ID NO: 389734 - DNA, 201 bp, Homo sapiens
agtttttatttttcaaagtcttaaaaaacacaagtcagtgaaagttttggtctttgttactgtcttcctaccaggtacgagggcctgaaagtcactgttarttgattattgattatctgattagaaccgtacatttactttttaaggaaatgtgaaaaataagcctagaaatgaaatcaaaagtgcggtgttgaagttaga

SEQ ID NO: 389735 - DNA, 201 bp, Homo sapiens
tcaacctctggcacctggccatcaccgacaggagcttcagtatccttcactgtggccttggccagtgcctcccacgggcagagtagcttccgttgggtggygggtttggtttgattggcagacagctggtttggggatggctgcattgtttaacttcttcagtgaggcacctctggctcctagtatgcgtgtgaggcccag

SEQ ID NO: 389736 - DNA, 201 bp, Homo sapiens
ccagacatgtgaaagagccatcttggacatccagcccagttgggccttcagatgagtgcagcccccactgctgtctgcaacttcatgaggaacaccaagarggaacagctcagctaagcccagtcagtctgcccaaccactatagcagatggtaatgaattgttttaaggggctgtttgttacacaacagtaggtaactgg

SEQ ID NO: 389737 - DNA, 201 bp, Homo sapiens
ggcagtgtccatttggcagaagaggaacctgaggctgagagaagttgattcccaaaaacacagcctgttgtggggggccagggtcccagcccagcagtccrgctcagagtcacaccctgctgtcatgttgttacccggacagcgggcaggttcagttgcgtggtgggtgacagtccagcgaccacagccacggagggctta

SEQ ID NO: 389738 - DNA, 201 bp, Homo sapiens
gcacagcagcctggtggagaaccaccctatgcgcctgtagaaagggccagatggcaggagccaccttgcgttttgccttgaggtttagttgggatggccayttacagtggtcgcagccactgttctgagagctttgcatgttcagtgggtacaaatctcatggttgcctaggaggtaggggatggggcagtgtccatttgg

SEQ ID NO: 389739 - DNA, 201 bp, Homo sapiens
agcgttgtttactcactgggccaacagtgttgagtgcccgctgtggccagcactgggccggcccctggggtcgcagcagtgggcaagcggacagtgactcytgaggctcacactgagcggccgacccagacagacagagtcagtctgttaactagaccccgactgggggcgagtgccatgagaaatccaccagggcagcca

SEQ ID NO: 389740 - DNA, 201 bp, Homo sapiens
ttcaagaatcctcagttttctcatctgcaaactggaggtgttggcacccacctcactgggttgtctggaggctaatggttgatacgttccatggggcccaygcagcttggctcatggtgtgcacgcattgactatgagccccctgctggctcccagcctggccgcttaggtgggcggctcaggtggtgcctagaggagagg

SEQ ID NO: 389741 - DNA, 201 bp, Homo sapiens
ccttgctcctctttcaatcagttgtccattatcttcccagcaccacacctgaagagccaattatttctgcttgctgaagagccaacacattattttagaakgtcatgtgagtaggatcatgtggtgtgtactcttgtgtttggcttcttttgcccagcatgcctatgaaattcatccacattgttgcagtaagcagtattt

SEQ ID NO: 389742 - DNA, 201 bp, Homo sapiens
ggagtgggcaattgaatcttatgtagtgtattagttagctattgctgtataacaaaccaccccaaaattcagtggcttaaaacaaccattgatttgctcargagtttgtgatctgggccaggcttagctagtggttcttctgctggtctcacctgaggctacttagtgacttttagcagtcatctggaagctcacctgggc

SEQ ID NO: 389743 - DNA, 201 bp, Homo sapiens
ctcctgagtacctgagaccacgggcatgtgtcactgtgctcagcatcaaatgctacatcattgttttttgctctacagctcatcctaaatttgatttgtcktctaaggattttcagagctgaaaggtatttcagcaatcatgttcaaccctcccatttcatagatgaggaaattaaattctaaggaagaaacatgatttac

SEQ ID NO: 389744 - DNA, 201 bp, Homo sapiens
tcatttggggcaggctctcctgccctgctcagttctgcctaactacctactctaacaatactatgtagttgtttatttttatttttagagactggggtctyactatgtagcctaggctggcctgaaactcctgggctccagcgatcctcctgagtacctgagaccacgggcatgtgtcactgtgctcagcatcaaatgcta

SEQ ID NO: 389745 - DNA, 201 bp, Homo sapiens
aggcgtgagccaccgcacctggcccccagcttcagctgtttctattgggagactgcctttccctgatgccagctgtaaccaattattattttagagagacmgtttaataaccgcctgaccatcacctgatggtcacctgacattcctcatttggggcaggctctcctgccctgctcagttctgcctaactacctactctaa

SEQ ID NO: 389746 - DNA, 201 bp, Homo sapiens
ctgctgctgggcagcagggaagggataggaaaagagcaggtgctggggccggggaggttgtgaggctgaatccagccttaccactcacacctgggccaccscggacgagttgctcatcttctctgtgctctagtgtaacagtcagggatactgcctttgcaagcagcaaagttcttgactctaaacaaaaaatggacattt

SEQ ID NO: 389747 - DNA, 201 bp, Homo sapiens
gtgaagttcagtaaggacctgagagctgctccgagcgggcagcgtgtcctggaaagccatgggaggcattcggcctgggagggctgggctgccaggtggaygctggagaaatcagcatggcaggaggagggctcttttcttgcttggccttcagtatcatttttcattatttaatcgctgcttcttttcatactggaaaac

SEQ ID NO: 389748 - DNA, 201 bp, Homo sapiens
cctggccacactgtccccactctccccacccaacctctgaccacaggcctgggagctgccccatctccaccaagttcaggctgcaggaggaaacgtctcaycaggcccgctggaaggtggggtggtgatgaaatgtgggggttcttcagcgagagtggaattcagtaataaggtgatcatcactgccgggcggtgcctgga

SEQ ID NO: 389749 - DNA, 201 bp, Homo sapiens
aaaatcccatcagggatattccgttccctggcccggaatgaggtcttcgtctttctgatcgcccttggagagcccaacggccttccgtcactcactcagtrctgatgtccagtcccggcaacagtctgactccgcccagacttggcgcttcccctcccatgcgcccgccgcccggcgtgctccctgctggagggtgacatg

SEQ ID NO: 389750 - DNA, 201 bp, Homo sapiens
agattcctggccacgttgcagggagaggttgcccactggagtctgctggaacccccgagttgaaagaatgagctgagtctggggagatcaaagtggctggrtttcacaggcagactaatggaatggagagagctgcaaagaaagacagctctggagttatgcagaagtccaacttgagtgctcagttgagtaatgatcagc

SEQ ID NO: 389751 - DNA, 201 bp, Homo sapiens
ggcagaggggatcccagggtttcacggggctgctgggctgagccatctcatggggggttaaagtcagtgcaggtgcggtggcggatcacgcttctacataygtcgcgtgcatggaaaatggcggataagctcctctcctccctgggtggggtttttaggatgggcttggaccttttctgaaacaaggagaactcaagatgc

SEQ ID NO: 389752 - DNA, 201 bp, Homo sapiens
gcagaggggatcccagggtttcacggggctgctgggctgagccatctcatggggggttaaagtcagtgcaggtgcggtggcggatcacgcttctacatacrtcgcgtgcatggaaaatggcggataagctcctctcctccctgggtggggtttttaggatgggcttggaccttttctgaaacaaggagaactcaagatgca

SEQ ID NO: 389753 - DNA, 201 bp, Homo sapiens
ctgaggacagagacatgcccctgggcatcttttttccagaccaaatcctcttccatctccaattcttcatttatttgttcagcaaatgctttctaagcacytgctatgtgctgggctttctgctgagctctgggaccaaaaagacaaagatactgggtctctctccttatgggacctgtcataggccattgtttggaccag

SEQ ID NO: 389754 - DNA, 201 bp, Homo sapiens
aggacccttctctggggctccccagacacacactgtctctctgcctctgcccagagaccatggcttcctctccatgcaccagcaccactgctccttgaaargaaaacagcatctctgtgcccactctttggactgactccatcgtattccagggcctatttgttaaactggatggaaaaccaaagcctgtagggctgtaat

SEQ ID NO: 389755 - DNA, 201 bp, Homo sapiens
tccccactggagaaaactgagccaagtggggaggagatgggggcctctgggggcccttccctggcctgcccaccaccccttctggggtgtggcccagtgcrcgcccttttcatgggtctgcactgctgatgggggagcacagctgaagctccctggttgggcacagatgcccttaatgaactggtccaggcttgttcaccc

SEQ ID NO: 389756 - DNA, 201 bp, Homo sapiens
gccccaactttatgggatgagcattcttatgaatgcccattgtcctgtattccagattattcttgtgtctgtccaggtagggatgcaatttcttgatgtarggctataggtgtttttaagggcttgcataaagatttgaatatgatgttgtctagtagagtaaaaatcaaattgggcaaaacatttttgtttgggtgattt

SEQ ID NO: 389757 - DNA, 201 bp, Homo sapiens
gctgggtctccttgaatggtgtttggtcaatgcaagaccacaggagtgtgactagaaggctgggggtgcagatggtggcaggtggaggatggagagagctkctcccactgctgaacaacgactgccccaactttatgggatgagcattcttatgaatgcccattgtcctgtattccagattattcttgtgtctgtccaggt

SEQ ID NO: 389758 - DNA, 201 bp, Homo sapiens
gctggaggaaggctgggtctccttgaatggtgtttggtcaatgcaagaccacaggagtgtgactagaaggctgggggtgcagatggtggcaggtggaggayggagagagctgctcccactgctgaacaacgactgccccaactttatgggatgagcattcttatgaatgcccattgtcctgtattccagattattcttgtg

SEQ ID NO: 389759 - DNA, 201 bp, Homo sapiens
ctcttgctatctgtgttgcgatgaaaggcaatcgagaggggtcagcaggaggagagacccccttcacggcacaggtagatggcagtggcagaggccacaaktggacacgtggtccagggactgaagggcaggtggcatttccaggttggggggtgatgatgtgctgggacatggtattctagcgcattctgggcaggagga

SEQ ID NO: 389760 - DNA, 201 bp, Homo sapiens
ctgccaaacccacgctcctgactgctacattaattggctgggacccacagggcagggttaggtggcctgttcagttctgattatgcaccacacttaggagrttttgggatttgaactagactacctggcttggtgctcttgctatctgtgttgcgatgaaaggcaatcgagaggggtcagcaggaggagagacccccttca

SEQ ID NO: 389761 - DNA, 201 bp, Homo sapiens
aggtgccacagcagatgaaagggggatttgaggctgggacccagggtcccacctgacagcccctccctgcccagcacctcactgtccctgtctcatgccgstggctgcagctgtgactttctcctcctgctccctgagcctcagatgacgcagagtccagagaggctgagaggctagcccgaggctccacagcagatgaaa

SEQ ID NO: 389762 - DNA, 201 bp, Homo sapiens
tggggcccatcatgaggtgaaccagtatttgcacactgcttttggcgtttgtggagtgctttgcatacttgcttctctcttgagctccttgccagaaccarccagtgatgcttcttcatttcacatacctggctatatttccagtcagcagagatttgccctgtagaggagcgagcagcccttggttcctgtgcccacctt

SEQ ID NO: 389763 - DNA, 201 bp, Homo sapiens
ggctgcctccatccctaactccggtggctgcttggttgccatggcgacagcttcctccatcctgagagcaggctcctgccgagacatctggatgagcctcrctgtgctcggtgaaatcggtggagcccaaggctgcagccctctttctcatggatccctgctctgcacccagcatcccccttgctgaggacacaagccagt

SEQ ID NO: 389764 - DNA, 201 bp, Homo sapiens
ctcttcatcagtgagcattcattgtgcccacctgtgccattgtaggaactccctgctccctccccactgtgtacagcctcagggatagggaaagaggccgmacaggaggcccctccccaaacagtggcatcacctggaacccaggagcaagccagtgtccaggggtgctcggggatccataacccccatcgtccttcttct

SEQ ID NO: 389765 - DNA, 201 bp, Homo sapiens
tcaattgttctctcagcctttgatctttgcggtttttcctgctggaggctggtaggatacttggccactcgttctgccctgtgacacccagcaccggtgcmccctgtgattctggctgaatccacccgcaagtcctgctgggaacctagaccagccctcaaggtctgggggagtctggtctgagagacccctgagcaggcg

SEQ ID NO: 389766 - DNA, 201 bp, Homo sapiens
ctcatcagaaggctcgagctgggcttgcctaaggccccctctctgccctgagccctgatggatcattaatggtgtcagcagcacttatggtgatggacgargggagcaagtcccccgacgtgctggggaggaagtccgtgacgagcatcttcatctcctgtctgcaggcctcggccagagtttccagggaacgtcctagtc

SEQ ID NO: 389767 - DNA, 201 bp, Homo sapiens
tttcaggcttattaatatcccttccgatctatcgtttgcattcctgttccttgtgtccttaaaaaccctcagaaatgcccgagtacagccagcagtggggygacaagggccagcgccgtttggctttgtttccactatcgattcaattgttctctcagcctttgatctttgcggtttttcctgctggaggctggtaggata

SEQ ID NO: 389768 - DNA, 201 bp, Homo sapiens
atgtttctttaaacccatggcaggaataattactgtgaaatgtccttagcgattcagtcaattagaggggagaccccttatctcttgttagcgctctgaargtggtgcagcggggtgtgtgtgtgtgtatgtgtgtgtgtttgcgtgcgtactcgggggcagcgattgatatggaatagtagattccactatcttttggaa

SEQ ID NO: 389769 - DNA, 201 bp, Homo sapiens
tctgagggtatcatgccctcatttcaaataaccaggcagaattgcaggggcaaagcagctcaccccaggtggtgagatatatatgagcaagccaggacttctggttacctgactgcaagcccacaccctcatctcaggccactctgtctcctccttccttttctgcagttttgtgtctctgtggatcactttcaggtcctt

SEQ ID NO: 389770 - DNA, 201 bp, Homo sapiens
tccagaccaaatcctcttccatctccaattcttcatttatttgttcagcaaatgctttctaagcacctgctatgtgctgggctttctgctgagctctgggrccaaaaagacaaagatactgggtctctctccttatgggacctgtcataggccattgtttggaccaggtgctccatctgtcctctggaggctgaggtcctc

SEQ ID NO: 389771 - DNA, 201 bp, Homo sapiens
tgtccactccgtgcctccctcctcctctgcacatctcccaccctggggcaggcaccattgtcattcttgaggttcttaggacccctctcaactccccagcrtaccccttcatccactcaccccctgtagccagagccattggtctaacctatgaatctgatcctgtccctctctgcctgttaaagcgccttgggggctccc

SEQ ID NO: 389772 - DNA, 201 bp, Homo sapiens
accaggttttgtaccttctgaaaaaaaaagtcaaaggacggtaaattattttttccttacataaaatgaattcggtgcacatgaacatggttctgcttttktattcttcagcttcctaaatatatgaggcccaattatacaccccatctgtatttgaacatttttagcatgcctcagaattagtgttgatttaatttattt

SEQ ID NO: 389773 - DNA, 201 bp, Homo sapiens
ccaggctcagcatgatggactgttgaaatgataaatgaaaggaagaggtgcatcaggggaggggatgcatttctgtaggaagacatcccaaagagccgcarggtaatttcttctgtcttttttttcctagttgtgcaggccgggccctctcacctcttagaacctcagtttcttcatttgcaaaatggggaaaatatgtat

SEQ ID NO: 389774 - DNA, 201 bp, Homo sapiens
acaagtcattagctgagcctcagttttatcatctgtagagcagggggcaaagtaccaacttcccaggtaatatggacctggagagtttgtaggtaggggarctggtattggaacccctgtctacctggcttccagaccccagtatttccccttcttcccacactgggctccaaggtgggcctccaggctcagcatgatgga

SEQ ID NO: 389775 - DNA, 201 bp, Homo sapiens
gcattctgtcctatcaggataaggaggtatgtaagccccagaggtcatggtgataattaataagaacaatggacaaagaatacagaaatcagtctccattsggccacttcccagccctgggcactttgcctcctgcacttcagtttctctgtgtgaaacatggctgataactccagccttgagagttgctgggaagaatct

SEQ ID NO: 389776 - DNA, 201 bp, Homo sapiens
cacatcacctcgagggaggagaggagggccctggaggggtgggacgtgggttagggctcctgagacgactcctaagaagtgcatacgcagggagatgaagmcacactgaatgggtgggctcctctctggagcactgggaggaagccactgtgtggggtgtcccttgttagggccttgagggggctcaatgaatggcagaag

SEQ ID NO: 389777 - DNA, 201 bp, Homo sapiens
tgggctgttctgcagatgcagtgtgtggcaagggagagtggccccctggaaaggggaccggtggccagtccaggggaagcggtaccagctcctgtgtaagygcctcctacgtatgaactcacatcacctcgagggaggagaggagggccctggaggggtgggacgtgggttagggctcctgagacgactcctaagaagtgc

SEQ ID NO: 389778 - DNA, 201 bp, Homo sapiens
agtgggagctgtgtctggctcagcagatattagccaagaaccaggggccaaggagaagggccccagggcagacccctgctgagacctcagcatcctgtggyatcagaaactggtgcagctggtccctccgtgccctgtggccacttctgggtgctcacgcagccagcccctgggcccacatttgagcagaactcagtgctc

SEQ ID NO: 389779 - DNA, 201 bp, Homo sapiens
ggcccctgtggatcctgggaacatccctggccgcacaccctgccgtgtaactcagtgtcagatctctgtgtaacttcccattctgtgaaaatgattattarttcatcaaaacataaagcaccctggccttagtgatagaggagtgtgtgtctatagcatgaacaagattctgagctgggcttgaggcagccctgatagggc

SEQ ID NO: 389780 - DNA, 201 bp, Homo sapiens
ccccatggcaggtggggcctgctggatttgctgctggattggatggagagggagggagggtcggggatggcttcaggctctgtacagagaccaggctcccrtctgtgtggagctttgtggagggaccacaggaaggggactagtaaataagtaggtgcattggagtgggaaggtttccatgaagggcatcaggagccctct

SEQ ID NO: 389781 - DNA, 201 bp, Homo sapiens
tccccatggcctcctccctgtatctgtgtgtgctgtgtcttcatatggacttcttatcaggataccagtccttagatctagggcccaccataatccagtaygaccgcaccttaacttgatcatctgcaaagactctatttccaaataagttcccattcataggtaccaggggttaggattttaacatctttttgtgggatg

SEQ ID NO: 389782 - DNA, 201 bp, Homo sapiens
  misc_feature (1)...(201): n = A,T,C or G
gggcaccacagcaggagacccccaatcccgggtcttttttccctatgctgagatccccatggagggggccttcctagccaggcatggctttcatatgcccngtatgtaggtgaagacacggaggctgaagaaatccagcaactcatccccacacgtagcttggcagagggcaggagtgctcagtcttgcctcacagggagc

SEQ ID NO: 389783 - DNA, 201 bp, Homo sapiens
cagccggcactcaggacctaaggtggtcctaagcagctctcccctgtcccctggaagtacgtggaggtaaaagctgcatccctggcagaatcagaccccamactccagacccttttgctgtgagtctcaggctagggtctcccacctgcaggaatcattttgggccttttgagggtctctttcatagacgtgggtggggcg

SEQ ID NO: 389784 - DNA, 201 bp, Homo sapiens
gaatcggggccgatgatggccaagacccttcataggcccccaacgacgtgcctggcccggtgttgggtgaaataataaccgcagctcattctttgcacacytagtgcaaacacatgctgttttcagtttatatctcattaaatactcagcacctatgatgggtgtgttatagtattcatcctacagatgaggaagttgaat

SEQ ID NO: 389785 - DNA, 201 bp, Homo sapiens
gggggtgatgatggctgagaccctgatttcttagaatcggggccgatgatggccaagacccttcataggcccccaacgacgtgcctggcccggtgttgggygaaataataaccgcagctcattctttgcacacctagtgcaaacacatgctgttttcagtttatatctcattaaatactcagcacctatgatgggtgtgtt

SEQ ID NO: 389786 - DNA, 201 bp, Homo sapiens
caataggcaaagggattagatgatagttaaaatttctcgtgtgtttatatgcaaggcattcttgtaagcacgttagaagtactcactcatttagtctgcaygacagctctttgaggtgagtactctgtggttctctttttgtgcatgagaaaaccaggacacaaagagatgagtctcttgcccagggtcacataaacagct

SEQ ID NO: 389787 - DNA, 201 bp, Homo sapiens
gaagacgctgatgggaaagagagacacgggtgagcaggggctgtggggcatcatgagagttgggagggtccccatcgtggagctggccagccctgagtggkagccccggcacagtcctctgctagctgtggcctttggccagtctccacttctcagagtctcagtgaccccagctgccaccaccaggattgttggggtgtc

SEQ ID NO: 389788 - DNA, 201 bp, Homo sapiens
atcagtgttaacttccaggctcttgctggttagccctgcaatgctgcctcccagcctttggcctggcacagagtaggtgcttgggaaatgctcaccatccrgtacttgttgaatgctcttcccagctgtgccaagaaggttctggttctatgagagtgttcggttgtcaaacaagagaagtattttgctctcttccccagt

SEQ ID NO: 389789 - DNA, 201 bp, Homo sapiens
agcaagtcctgcctgttagggccatcctgaggatggggtgaccagagcatgagcagccgggtgcccagggcacctgggcaacagccctgtgggtaggtggstctgaatggttgagccccacgttttagtcaagaccactctccttgcagagcagttcatgtccacttgcccacatccttcctgtcccagcaccgtctgtag

SEQ ID NO: 389790 - DNA, 201 bp, Homo sapiens
atgactcatgaggaggggctggcatgttcctgaacttcaggtgttgactctgcagtgaggcgatttggatcagagagactgtgcaggtgcccaggacacayagcaggtgaggtgcacagccaggcttggctagcaattgggctcttaatgatgctcacactggacgtgtcagagtgcctgctcctgggcgtgcacagcctt

SEQ ID NO: 389791 - DNA, 201 bp, Homo sapiens
ctctccttgcctccaggggctccgtgtctgttagatgtgtaaacagatccatcaccgagcatactgatgagtcctggcctagggacaagcatggccacaartgaggtgtctggaaagggctcacaggggaaggagccactgaggagggcaagaagaaggcttggccaggaagatggggtagggctcattcctggcaggtcc

SEQ ID NO: 389792 - DNA, 201 bp, Homo sapiens
ctggaggaaggctgggtctccttgaatggtgtttggtcaatgcaagaccacaggagtgtgactagaaggctgggggtgcagatggtggcaggtggaggatrgagagagctgctcccactgctgaacaacgactgccccaactttatgggatgagcattcttatgaatgcccattgtcctgtattccagattattcttgtgt

SEQ ID NO: 389793 - DNA, 201 bp, Homo sapiens
gagagtgggtgggagggagctgtgagtggccgggagagtgcaggcaggagcggtgcatttcacagagacaggcccatcgggtgaggtttggaaacaacacwtctctgttcccagagctcagtggcccccacttgtcatggcccccaaagccattggcttaggggcccccttgcctcttggggagaacagaacccaataaga

SEQ ID NO: 389794 - DNA, 201 bp, Homo sapiens
catgctcatttttatggatccacaccacccgtacagcaaggactgcctgcactcattccaagtggtcagagtggtcaccgcatgggccctccacgtggccrggccacagtgatgtttcaaaccctggctgggggattgcattcaatatccccttattaaaggcggcagctcaagaatattaaatcatgggaattcctcact

SEQ ID NO: 389795 - DNA, 201 bp, Homo sapiens
ttaaaataaggctggcagggtagaccctaatccaatctgactggtgttcttataagaagaggtgattagaacccacagagagatgttaagatgcaggaatragaatgtgaggacacaaggagaaggcagtcaccttcaagccgaggagacgggcctcagaaggagccagccctgctaacaccgtgttattggacttcggac

SEQ ID NO: 389796 - DNA, 201 bp, Homo sapiens
gttcaagttaccagcacacaactgctctggggccttcacaaggccaggcagttggtcagtcagcctccaccatgactgagggcttcctgcgtgccatggckctgtccatggtgctgaccccgttgtgagccattgcgtcgaggtcagcatctccacctcccaccccactgtcactacttgctgtgtcacacggtgttctga

SEQ ID NO: 389797 - DNA, 201 bp, Homo sapiens
ctgctgcagtgacaagacacagatccagggctcacaccacagagagaagccttacttggcagagaaagtgtgaggactgtgggctgcaggtgctgcgatgrggactgatagcagccgagtaatgagaggaggcgtttcatttctgacatgggaggaggccagaaaggcagctgagaccccatgcggagctgggaattgctc

SEQ ID NO: 389798 - DNA, 201 bp, Homo sapiens
tgcaatgggggtgataacagcacacaagaacatcttggagttgttaagaagattcagtaataggtgtaaaatgctaaagctggggcctggctcccaggaastgcccagaaggtgtactgtgataaccacagacgccacgtcaccccgctggacctggactccgtgaggagggggctccccatctccttatcccagtgtcag

SEQ ID NO: 389799 - DNA, 201 bp, Homo sapiens
cccctgatactgacactgagtgtgtttctgaacactgcagggggtgaggaataaggtgggcatattgtagcttcaggaggtgatgcttgtgtctgaaatayaaggaccacaattgccatgcaggtgtaaatatctccagtgattacacatttccctgcaccgaccgagtggctgcacccagtctggggctctgtctctcct

SEQ ID NO: 389800 - DNA, 201 bp, Homo sapiens
atatcctgtacggaaactttctctttcgtgccagcaaaaagattgtgcagcagtttttagcatgcttttacagcttccatttctcctcatttaatttgccrcacattggggcgagtggctgaagtgtctgtccttctgcatgccttgtccgggctgtgtttttgctctgtggctctcatgggaaatcaagcacgcagccgc

SEQ ID NO: 389801 - DNA, 201 bp, Homo sapiens
atttatgcaaattttatttaaaatttttctagaatatttttcattatcaaactcaatatcctgtacggaaactttctctttcgtgccagcaaaaagattgygcagcagtttttagcatgcttttacagcttccatttctcctcatttaatttgccgcacattggggcgagtggctgaagtgtctgtccttctgcatgcctt

SEQ ID NO: 389802 - DNA, 201 bp, Homo sapiens
cttggcggcaccgtttcaggcgacgctacttagatctgcaaaactgttgatgtcttacaataccaagtgtagggcggggctggagaaatggaaactcatgscaccactggaaatggatatgaaagcaaaccatttgcaaagtcatttgccaatatccagatatgtccaagcagcccctctgttccccttctaggtaaatag

SEQ ID NO: 389803 - DNA, 201 bp, Homo sapiens
tagggtggtgtggtggttaggacccagacccctctacccacacagctgcacgggcttggggagatctagtttctgtgcctcaggggcctcacttgtcgtayggggagactcctgtatcgcccgcaaggttgtggtgaggctgagcgagggtaatcgggaatgcctagtgcagcttccgcctgcagggacactcagcaaacc

SEQ ID NO: 389804 - DNA, 201 bp, Homo sapiens
cctttgcccactttttgatggcgttgtttgatttttttttgtaaatttgtttaagttctttgtagattctggatattagccctttctcagatgagtagatkgcaaaaattttctcccattccgtaggttgcctgttcgctctgatggccattttttttttttttttgctgtgcagaagctctttagtttaattagatccca

SEQ ID NO: 389805 - DNA, 201 bp, Homo sapiens
cttagatgctagagtgtgattggaagggaaacaaatcccaccagacagttggagtggaattagatgggaaaacagaagatgaataattcaagcagctttgycaggggaaaggggactcttaaatgagcctaattatgcttgttcccaagggaggccagtcctgaaatgaaccttgtgaagcagtttttcaagcaggattta

SEQ ID NO: 389806 - DNA, 201 bp, Homo sapiens
acttgtgtgcaaatctattcggcgtccttttgagggagagaaggaaaattttaagcaaccagtttaaaatgccgagaaaatgatgtcgacagtgatgacawccatgtactagaatattgttcggtcatgtcagctattgttttagaagaatttttaatgccacagggaagtgattatgttgaaagatttaggggataacaa

SEQ ID NO: 389807 - DNA, 201 bp, Homo sapiens
ctttgccgtgtagcataacatagtcacaggtgctagggatcaggacgcagccgtctctgggggccgttccaccgcctactacaggacactgcccccccacytacgcctcccgcccattcactcaggccacatgtgcctccagctgtgcctgtgtacagccaggtctgggtccgaatggaatgggagaatattggggaagag

SEQ ID NO: 389808 - DNA, 201 bp, Homo sapiens
aacagggattgtttccaaggtgtgtgtgggggtgggacccaggctcctgccagaggccagggcggcagagccctgacaggcagatcctgggttcctgggtrtccaggttacgtgggtgggcaggtggcagctggcacccaccccatacagacactctctgacaccccccaaaaatactcccaccagccccttcacattttc

SEQ ID NO: 389809 - DNA, 201 bp, Homo sapiens
gacaccccccaaaaatactcccaccagccccttcacattttcctccagccaagtgaccaaagcacagctcagggcccatttgccctggccacactgtcccyactctccccacccaacctctgaccacaggcctgggagctgccccatctccaccaagttcaggctgcaggaggaaacgtctcaccaggcccgctggaaggt

SEQ ID NO: 389810 - DNA, 201 bp, Homo sapiens
acacagcagcccccagcataacagctcacactgaacactcactctgagcccagcccttaccaagggctttacctgtgaactcatcgaatcttcacacaagycccaggagatgctgttcagaagaggaaacagaagctccagttattggcccaaggtcacccaaattcaatcgtggcagagctgggctgcctggcactgggt

SEQ ID NO: 389811 - DNA, 201 bp, Homo sapiens
atttgccctggccacactgtccccactctccccacccaacctctgaccacaggcctgggagctgccccatctccaccaagttcaggctgcaggaggaaacktctcaccaggcccgctggaaggtggggtggtgatgaaatgtgggggttcttcagcgagagtggaattcagtaataaggtgatcatcactgccgggcggtg

SEQ ID NO: 389812 - DNA, 201 bp, Homo sapiens
gtagcatgatctcagctcactaaaacctccacctcctgggttcaagcaattctcatgcctcagcctcctgagtagctgggattacaagcgtgtaccaccaygcccagctaatttttgtatttttagtagagacaaggtttcaccatgttggccaggctggtcttgaactcctgacctcaagtgatccacccaccttggcct

SEQ ID NO: 389813 - DNA, 201 bp, Homo sapiens
cctcctgagtagctgggattacaagcgtgtaccaccacgcccagctaatttttgtatttttagtagagacaaggtttcaccatgttggccaggctggtctygaactcctgacctcaagtgatccacccaccttggcctcccaaagtggtgggatgacaggcgtgagccaccacacctggccttattcttggatttataaaa

SEQ ID NO: 389814 - DNA, 201 bp, Homo sapiens
acccatagagacctaccaggtgggcaccacagcaggagacccccaatcccgggtcttttttccctatgctgagatccccatggagggggccttcctagccrggcatggctttcatatgcccagtatgtaggtgaagacacggaggctgaagaaatccagcaactcatccccacacgtagcttggcagagggcaggagtgct

SEQ ID NO: 389815 - DNA, 201 bp, Homo sapiens
ttgggacagagttttactctgtcacccaggctagactgcagtggtaaatcacagctcactgcagtctctgcctccccaggctcaggtgatcctcctgcctcaacctcctgaatagctgggactacggtcatttttaatttttttttgtagaggtggagtctcgctatgttgtccaggctggtcttgaactcctaggctgaa

SEQ ID NO: 389816 - DNA, 201 bp, Homo sapiens
agtggcgccatctcggctcgctgcaacctccgcctcctggagtcaaacacttctcctgcctcagcctcccaagtagctgggattacaggcgccacgggtgkcgagggcaggagcctttctttccccaaaggaaagaggagcggagcactggggctgaaagcagccggcgttgtggtcccacatgcagatgaggctaggaga

SEQ ID NO: 389817 - DNA, 201 bp, Homo sapiens
tatttttagtagagacaaggtttcaccatgttggccaggctggtcttgaactcctgacctcaagtgatccacccaccttggcctcccaaagtggtgggatkacaggcgtgagccaccacacctggccttattcttggatttataaaaattgcattttaatttatctatgagcttttaaatctctatctctgcattatgttt

SEQ ID NO: 389818 - DNA, 201 bp, Homo sapiens
tttcaccatgttggccaggctggtcttgaactcctgacctcaagtgatccacccaccttggcctcccaaagtggtgggatgacaggcgtgagccaccacasctggccttattcttggatttataaaaattgcattttaatttatctatgagcttttaaatctctatctctgcattatgtttttaatggttgctctgggatt

SEQ ID NO: 389819 - DNA, 201 bp, Homo sapiens
tttctccttcaccaactcctcagcctcccatctctgaccccataaacgctgagaggagaaccaggcctggggggcaagttcaaggactcaggaggcagacygctggaatccaatctctcccctgcccttactagctgagcggctgttggcaagttgtcttctctgtgcttcagtttcttcatctgtgcaatgggggtgata

SEQ ID NO: 389820 - DNA, 201 bp, Homo sapiens
gccacacctaccacatcaactccatctccgtcaacagtgactgcgagacctacatgtcggcggatgacctgcgcatcaacctctggcacctggccatcacygacaggagcttcagtatccttcactgtggccttggccagtgcctcccacgggcagagtagcttccgttgggtggtgggtttggtttgattggcagacagc

SEQ ID NO: 389821 - DNA, 201 bp, Homo sapiens
gaagaagataacaggggtcagagctgtagcccactcgagatgcacacgcagcaggagtgagaaatagccttgaagccgctgcgttttggagggtcattcayggctgtggtcttctagttcattccggctgaggcagggctgtcatgtgttgaggacagaatgaagtcacctatgtgaagtgctcagccaccagctggcaaa

SEQ ID NO: 389822 - DNA, 201 bp, Homo sapiens
tcctgtggttggctgtgttatagtgcaacgtattagcagccccatcctggagggagactgtacttgcacgctccgctgaggtcacgtggccatgtgaccckcagtgccctccctgcccttactgaacttgcatgtggtggttttgtgaattgtttgggccagcgacgctgtagagtgagctcaccacccctgtctctctct

SEQ ID NO: 389823 - DNA, 201 bp, Homo sapiens
cacttccctgccacctccatctatttctcttctgaaaataagtagctggccactcttcctcttgcacccatgatcacaccctgctgctgggtgtcctgccrgtgctcatggtgctgtttcctcagttggggtgcctcctccctcttttccctgaatgactgctgctcaggtgtggactcagatcaagcattgtccccttaa

SEQ ID NO: 389824 - DNA, 201 bp, Homo sapiens
gttggtaatgggaaagaatggaaatatctgtaatggccatcacaggggactgtttacataaattattccagagcgtgatagtggatagcaatgaaaagaaygtgacagctcagggtgcgctgatgtagaatgatgtttaagattctttaggtgaaatgagcaaggtgcaaaatagtggatgatccatgacatgctttatga

SEQ ID NO: 389825 - DNA, 201 bp, Homo sapiens
ttacagtgggggaaatgggataaaacagatctgtgagtgacacagagcagggccctggagcattggggctgtggcagagggtttacgtggggtggtgcccygcgttcaggagaggtctggggcacagctctgcagccaggcctcctggcgtcaggtcttatccactgctcatgtgtgacctggctgaggttgcttaacctc

SEQ ID NO: 389826 - DNA, 201 bp, Homo sapiens
agcttgcccagtggtgtggagctggagccccctctgcttaagtaaaggcctctgagggacacatgtcatgcagatgatgacaccagactggctcctcactktaaactctacttcctgagagcagaaggcagggaaggcctcagttggaggtgaaaatggaactttcatccaccagatgttagataaaagataggaagggtg

SEQ ID NO: 389827 - DNA, 201 bp, Homo sapiens
gcttggctagcaattgggctcttaatgatgctcacactggacgtgtcagagtgcctgctcctgggcgtgcacagccttgtgggaggggccgacaggtggayagggaattatagggtggggggacagggagctgtgctggctgttgtggggacaccacagggaaggccccctgactctcatgttccagcattgccacttcct

SEQ ID NO: 389828 - DNA, 201 bp, Homo sapiens
acttacggtccccaggcagccttaagcagctgtgcgtcataggcattaacgacataaaacagtatgtttccttaggcccagtgccggccatggggtgctgrgccctggatggctggtatcggggctgtgggtaccaggccctggcaccccacagttgttctgcctgtgctggggcaccttttgtttggggcaggaggacag

SEQ ID NO: 389829 - DNA, 201 bp, Homo sapiens
tgtgttggtgtgtgtttgttgatatgtgtatgtgttggtgtgtgtgttgtatgtgttgtgtgtgtgttggtgtgtgtgtatgttggtgtgtgttagtgtasgtattgatgtgtggcattgatgtgtgttgatgtgtgttttttgatgtgtgtatgtgttggggtgtgtgtgttgggatatgtgtgtgtcttgctatgtggt

SEQ ID NO: 389830 - DNA, 201 bp, Homo sapiens
tgtgtgtgttggtgtgtgtttgttgatatgtgtatgtgttggtgtgtgtgttgtatgtgttgtgtgtgtgttggtgtgtgtgtatgttggtgtgtgttagygtacgtattgatgtgtggcattgatgtgtgttgatgtgtgttttttgatgtgtgtatgtgttggggtgtgtgtgttgggatatgtgtgtgtcttgctatg

SEQ ID NO: 389831 - DNA, 201 bp, Homo sapiens
gcagccatgcggaggcggggttgtcactgcgaagtacagggtgcaggaaggcgcccgagggagtgtgcgggccgtgcgtgttggggggtgtgtgttggtgtgtatctctttgggggtgtgtgtgttgatatgtgtgtgttcatgtatgtgttgatgtgtgtgtttaggatgtgtgtgttgtatgcgttgatgtgtttgtat

SEQ ID NO: 389832 - DNA, 201 bp, Homo sapiens
aaatcccatcctcagaggcctgggctggtggggtccagatgggatgattctttggtctgattattttcacactatgaatgtgtttctttcaaagttaggaytttctttccataaatagagggctgaactttgcccccccgcaaaatatgtccaagatctaatttgcagtaactgtgaatgtgacacatttggaaataagag

SEQ ID NO: 389833 - DNA, 201 bp, Homo sapiens
agagagggcagttgttgtttggcacagtctatggatcacgctcttatacctgccctgctatttactatggccctcccacccccgtccatacgtatggcatygtcacactccctgtgtccatcacagactttatttatttatttatttatttatttatttatttatttatttatttattttgagatggagttttgctcttgt

SEQ ID NO: 389834 - DNA, 201 bp, Homo sapiens
tgcaaaactcaaagatattagcaaaacaaatatggctctatctatcgtctatcaatcaatctatctatctatctatctatctatctatctatctatctatccatttatctatcagtcatctaattaccatgtgaagttcaccctaggaatgtcaggatagttaaagacaaaaaatgttaacttaatttacttctttaatag

SEQ ID NO: 389835 - DNA, 201 bp, Homo sapiens
gtgcaaaactcaaagatattagcaaaacaaatatggctctatctatcgtctatcaatcaatctatctatctatctatctatctatctatctatctatctatccatttatctatcagtcatctaattaccatgtgaagttcaccctaggaatgtcaggatagttaaagacaaaaaatgttaacttaatttacttctttaata

SEQ ID NO: 389836 - DNA, 201 bp, Homo sapiens
ggtgcaaaactcaaagatattagcaaaacaaatatggctctatctatcgtctatcaatcaatctatctatctatctatctatctatctatctatctatctatccatttatctatcagtcatctaattaccatgtgaagttcaccctaggaatgtcaggatagttaaagacaaaaaatgttaacttaatttacttctttaat

SEQ ID NO: 389837 - DNA, 201 bp, Homo sapiens
aggtgcaaaactcaaagatattagcaaaacaaatatggctctatctatcgtctatcaatcaatctatctatctatctatctatctatctatctatctatctatccatttatctatcagtcatctaattaccatgtgaagttcaccctaggaatgtcaggatagttaaagacaaaaaatgttaacttaatttacttctttaa

SEQ ID NO: 389838 - DNA, 201 bp, Homo sapiens
cagctgtgggacctgagacaagtcattcaacttgtaggggtgcccgcctcagtgggccgttgggaagattaaatggaatgatgaatgcagaactttttttytggattgtttttaatgtggtaaaatatacataacataaaactaatcattttaagcattttcagtgtctaattcagtagcatccggtacattcctattgtc

SEQ ID NO: 389839 - DNA, 201 bp, Homo sapiens
ttttaatttttttttcttttccaaaaggaaaacaatctcccagcaccaccgagtaaatggtttacctgttcccactggtctggaacatcctctctgtactmtgccatttcctgatatgcacagtgtggattccattttgttctgtgggcctgtttgtctgtccttgcaccaatatcacacggccttaagtattgtgacaac

SEQ ID NO: 389840 - DNA, 201 bp, Homo sapiens
ctataatgtcttgcacaagtttttcagttttgcttttcatggttaaatctttagtttacttagtatttatttttgtctagggtttgaggtagggattttartttttttttcttttccaaaaggaaaacaatctcccagcaccaccgagtaaatggtttacctgttcccactggtctggaacatcctctctgtactatgcca

SEQ ID NO: 389841 - DNA, 201 bp, Homo sapiens
tctttccttcctggtcacacacaaccatgaaagcaggttctttggcaatgtcctgggtccctcctgggatgactctggccaaggtgggggtcccctgtgaygggccccttccaaatgatggtaggtccaaggccgacagcttggagtggatgagatcaaatagggttagggtgactcctgtcttctcatcttcacccttct

SEQ ID NO: 389842 - DNA, 201 bp, Homo sapiens
ttgaaccgttaatcctggggcacctacagggtatgtaccatgcaaggcccttgggctatttgtcatttggggtccagggccccggatgcaccccaggactyggctcaaatgaacccccctctttccttcctggtcacacacaaccatgaaagcaggttctttggcaatgtcctgggtccctcctgggatgactctggccaa

SEQ ID NO: 389843 - DNA, 201 bp, Homo sapiens
tggaggtctgttgtagaaggattcagacaccagagagggttagactggatgaccttcagttcccctcctgggtgaccacagctcttcaaagcccctcactrctgcccgcttctgcaggattcagggttgaatgtcagaagtctgctggaatgctgtcgattgaggcacggtgacttggccaagcctttcctggtggctgct

SEQ ID NO: 389844 - DNA, 201 bp, Homo sapiens
gtggccactcttcccgtgtcagcttttattatcatgaacacccagctccctcagggccctgcagggttttagataattcctcagattagagcaatttgtcyccagcttcagggtgtttgaaccgttaatcctggggcacctacagggtatgtaccatgcaaggcccttgggctatttgtcatttggggtccagggccccgg

SEQ ID NO: 389845 - DNA, 201 bp, Homo sapiens
tgtttgggcagcttgcctggctgtgtggcagcaggcaggcattctgccgtcttgcccagagaggcttcccgctccctgcctctcctgtgtggatgtgtgcygtgcgacggcttcgcagccctgtggttaatgtggccactcttcccgtgtcagcttttattatcatgaacacccagctccctcagggccctgcagggtttt

SEQ ID NO: 389846 - DNA, 201 bp, Homo sapiens
tgattctctcttcccccagagttgcgggatctgtttgggcagcttgcctggctgtgtggcagcaggcaggcattctgccgtcttgcccagagaggcttccygctccctgcctctcctgtgtggatgtgtgccgtgcgacggcttcgcagccctgtggttaatgtggccactcttcccgtgtcagcttttattatcatgaac

SEQ ID NO: 389847 - DNA, 201 bp, Homo sapiens
cacaggtggcgacttcctgttgtgtcctcacatgggggaaggggcaagggagcttttgtaggcccttcttctaagggcactaatcccattcatgggggctmcaccctcatgacctcatgacctcccaaaggccccacctcctaacaccattatcttggggttagggtttcaacatatgaatttgaggggacacagccattc

SEQ ID NO: 389848 - DNA, 201 bp, Homo sapiens
ttctaagggcactaatcccattcatgggggctccaccctcatgacctcatgacctcccaaaggccccacctcctaacaccattatcttggggttagggttycaacatatgaatttgaggggacacagccattccatctgtgaccgtcctcaatcagccttctccctgcagggctgcaaatgagggtgctgccggattcata

SEQ ID NO: 389849 - DNA, 201 bp, Homo sapiens
gtaattaaataagatctcaagacgagattgtcctggttttgctctctggtaactggtcctaaatcccatgactggtgttctcataagagaaaagagagggkggttagggagatacagaggaggaggcagagactggggtgatgtgttcacaagccaaggggcaccaaggagtgccgccatggagagccgggagggggccct

SEQ ID NO: 389850 - DNA, 201 bp, Homo sapiens
gaaaaatcagacagaccctaaggtggtttaaaaaatgtgcaaacccaggtacgctgcaggctcgaagctgggtgtagccgaggcgtggggcaaatgagcaygtttggattaaaaaaggccaacgcatctaacagccaggaaggtttgctttaacattccagcatgttctgttgatttatggctgttgctaggtaacagaat

SEQ ID NO: 389851 - DNA, 201 bp, Homo sapiens
tatggctgttgctaggtaacagaatacaccgaggctgcgtgattttaaagctacggctcccgactaaagagtcgacagaaagagaaaaccattaatcaggktgggggctgggcgtggatttaaatgcaaaccagaagacagggaactgttgggagcaatgagggcgaagccaggtccacccctccgtgtctgccgtccttc

SEQ ID NO: 389852 - DNA, 201 bp, Homo sapiens
tggatggcaggcgtgctggttgcaattgcaggtagggggaacctggttggcctcattaggaaggtgacatttgagtcaagtcttgtgcaaagtgaggggcygaggcttgcaggtatctgagggaagaatggcccaggggaggaaatagcagatgcaaagtccccgaggcagggtatgcatgttgagctggaggaacagctg

SEQ ID NO: 389853 - DNA, 201 bp, Homo sapiens
gtcttgttttcctgacatggccaggcccaggtgggaggtggggatgagcatcaggcctttgggcacctcttgaaagggctgaaccagctggtgggagggayggatgcctgggggctgcacacatggctggcaagtgctgtgaattattgatcactagagagcaatgtgcaggcggaggtcattttcctcctgggccaaact

SEQ ID NO: 389854 - DNA, 201 bp, Homo sapiens
ctggcctaggggagggattagctctatgcccatttatttttcttgaatccagtgtatggggtaaaaagttacaccatccatttctctttggtattaagttygaaaatagtggatgcaattaattcaggtggtaacaggtggtttcctgtcctacctggtatggcaaagaggtgcttctctgtgaatctcaatccccacaag

SEQ ID NO: 389855 - DNA, 201 bp, Homo sapiens
aaactatcaaattatggaagattaccgaacgagataaaaggcccgaaggatacaacctgaaggatgaagaggggaaacttaaggacctgtccacggtgacrtcactgcaggtgagctccggcgagcgggaagcaggcacacgcctctttattacacctgaggattttagggctggaaaagcctttgagatttgagccagag

SEQ ID NO: 389856 - DNA, 201 bp, Homo sapiens
agagtagaagatattaagctagaagaatgaggggaaagcattcccggcagaggaaacagcacgtgtttcgggttggcgttgtaggagtgcatggcttgttrgtgaagggtgaagttctgtgcagctgggcgtagccttcccgggaggaagcagtgagagctgaggctgcagagggtagtgggggtgtcttggcaagggtct

SEQ ID NO: 389857 - DNA, 201 bp, Homo sapiens
cctgagggcactgtggggagggggcagacttggtaactgggctgggggctgattgtgtctgtgctttgggatgtgccggctggtggctgtgaggaggggarcaggaagcttggaggtggagaaggtgggttgtcatccatctcattccaccagtgggggacggggaggctcagagaggctgagtgactcactcaaggtcat

SEQ ID NO: 389858 - DNA, 201 bp, Homo sapiens
taggttgggagccttttccagcactcagatcagggttcaaaccctaactgtgcccttcaggagctgtgtgacttgggcattccttcattttttattcaagsacacagctgacatctacatgcctgctgtgtgtcagggagatagaaatagaggggtgagcccctgtgatattaggcaggcagctttcccttccagggtctc

SEQ ID NO: 389859 - DNA, 201 bp, Homo sapiens
tgggactcccttccctgtatctttgtcattattcaggtcccagctgaaaagtcacctcctctgggaggcctccccggaccaccctccatctggagttgtcygtcactggatccaggtgcaaagctctggaatgaaatgagcctggcgtgttctgtggcagcaaggaggctggtgtggccaaagcagagagtgggaagggtg

SEQ ID NO: 389860 - DNA, 201 bp, Homo sapiens
gccttttccagcactcagatcagggttcaaaccctaactgtgcccttcaggagctgtgtgacttgggcattccttcattttttattcaaggacacagctgrcatctacatgcctgctgtgtgtcagggagatagaaatagaggggtgagcccctgtgatattaggcaggcagctttcccttccagggtctcatttttctca

SEQ ID NO: 389861 - DNA, 201 bp, Homo sapiens
taggaggtcctgccttctgggtgtatctatggcttccctgtggtgtccctgggcacttctctcctgcccctctattttcataatcagaaatccgcagagcktttattagattgagcctcaggcctgtttttcttggcaggaatgcttggttattggtgaggtgggcttcccagtgcatcccgccagaaggcacccagtgtc

SEQ ID NO: 389862 - DNA, 201 bp, Homo sapiens
ggacatccagcccagttgggccttcagatgagtgcagcccccactgctgtctgcaacttcatgaggaacaccaagagggaacagctcagctaagcccagtyagtctgcccaaccactatagcagatggtaatgaattgttttaaggggctgtttgttacacaacagtaggtaactggaacacctactcagaatctttgctt

SEQ ID NO: 389863 - DNA, 201 bp, Homo sapiens
tcttagaaaaagagggttgctcagagattctataggagaaactgatgtcagagaggtgcagccactggttcagaatggctgagtgcattcatgtctgagcygggatgggaaccaggccccctgaccttgtcccagagcctcttccttggtgtctggttctctgccttgagcctcatgggtatcatggaaaagagacttatg

SEQ ID NO: 389864 - DNA, 201 bp, Homo sapiens
cctgctttttttcctgttgggttgtcttccaaaaattgattacgacaattttgtccttctaatatattctgcacatgaatcctgagttcaaatgggttgtmaatatctaaggttgtggctttttcacttaaactttacagtggaagcacaaagtctggttttctatttcttctcgtgtcagtgttagtgagctgtattttt

SEQ ID NO: 389865 - DNA, 201 bp, Homo sapiens
ggagactgcctttccctgatgccagctgtaaccaattattattttagagagacagtttaataaccgcctgaccatcacctgatggtcacctgacattcctyatttggggcaggctctcctgccctgctcagttctgcctaactacctactctaacaatactatgtagttgtttatttttatttttagagactggggtctca

SEQ ID NO: 389866 - DNA, 201 bp, Homo sapiens
aatccaagcactttgggaggctgaggtgggtagatcacttgagctcaggagttcaagaccagcctgggcaacatggtgaaactccatctctacaaaaaatrcacaaattagccaggtgtggtggcatgcgcctgtagtcccagctacttggtggggctgaggtgggaggattgcttgaacctgggagggttgaagctgcag

SEQ ID NO: 389867 - DNA, 201 bp, Homo sapiens
tttttttaaagttagaaaatgactcacatggctgggcacagtggctcacacctgtaatcccagccctttgggaggccaaggtgggtggatcacttgaggckaggagtttgagaccagcctggccaactctactaaaaatacaaaaattagctgagcgtgatggcaggtgtctgtaatcccagctactctggaggctgaggc

SEQ ID NO: 389868 - DNA, 201 bp, Homo sapiens
tgagttcagggtggcatagctcacagctttgtgaatgggcacaagggcagggttgagctctctgaaagggtggcttcgttggactagaggcagacacagcyacttaaatgagatcgtggtaagggtagattagtttggttggatttctgggcagatttattaaacacaccatttcccctggtgtaaaggtttacctcctca

SEQ ID NO: 389869 - DNA, 201 bp, Homo sapiens
caggtgtggtggcatgcgcctgtagtcccagctacttggtggggctgaggtgggaggattgcttgaacctgggagggttgaagctgcagtgagcagagatygcaccaccgcacttcatcctgggtgacagagtgagactctgtctaataaataaataaataaataaataaataaataaataaataaaacagggggaatagt

SEQ ID NO: 389870 - DNA, 201 bp, Homo sapiens
ctctccctgatgcacaaggaaagaccattctgagcacacccatcttcatgcagaaaccacatgtgtggagcccttatgcactgtggtgggaacgtgaaatrgtgtagccactttgggaagtagtttggcagttcctcaaaaggttaaacatagatttatctcatgacccagcaattctactcctaggcatctaccaaagag

SEQ ID NO: 389871 - DNA, 201 bp, Homo sapiens
gtgacctggccaggctcactggggtggtaagtggcagggatgggcttctccacgtctcccctgtgatattaggcaggtgtatgcagttgcttcacgtccarccacaccccctcacacacatgcagatcagccagcatggcacaccagacacatttctgctgcacctttccccacacagtacctaccacctggcgtgcctct

SEQ ID NO: 389872 - DNA, 201 bp, Homo sapiens
atcaactgatgaatgggtaaacaaaatatggtctatccatacagtggagtattatacagccctaaaaaggaaggaagccctgccacacgctacaacatcartgaaccttgaacacatcatgttaagatcatgttaagtgaaagaagccagacacaaaagaccacatagtgtatgattccatttataggagatgttcataat

SEQ ID NO: 389873 - DNA, 201 bp, Homo sapiens
ctactgaattgtacactttataaaagtaaagtgtgtggtatatggcttatgcctcaataaagctgtgattaaagactgcatatgctttaaagtgagaagcktggtgtcattggagccaggcgacagagtagggcagggctaactgcagggtcctcacgggcctggggcaggtggccacgtggccagtttctgccttctcta

SEQ ID NO: 389874 - DNA, 201 bp, Homo sapiens
ttccctctgtagcctgcaggggtggatccttccttctctagaggctgccagcatctcttggctttatggccacattactctaagttctgcttcggtttttmcatcacctcctcctctttcccccatgtcttctcctctgtgtgtctcttataaagccacttgccactgcatttagggcttactcagataattcagaatgat

SEQ ID NO: 389875 - DNA, 201 bp, Homo sapiens
tcacctgaaggtagactgtgataagttaaagatgtatactgtaaaccttaaaataactactaaaacaataagagttgtaactaagaagccagaaagtagayagaatggaataattgaacaatgcttaattaatcccaaagaagacagaaaaggagaaagaagggaacaaaggaaaatggaataaatggaaaatgaatatca

SEQ ID NO: 389876 - DNA, 201 bp, Homo sapiens
aatgatgtttagcatgatatctgggcatcccgtggccccgtcaagttgacacatggaatgaacccccacgtgccccatgcggatgctccccagaggcatcyttcacgcaggaggctctcggtcacaggatagacacgctagcctgcctgtgggtgctgggcagactctttccagccaccccagggctcactcttgggctca

SEQ ID NO: 389877 - DNA, 201 bp, Homo sapiens
agtttctgtgcctcaggggcctcacttgtcgtatggggagactcctgtatcgcccgcaaggttgtggtgaggctgagcgagggtaatcgggaatgcctagygcagcttccgcctgcagggacactcagcaaaccccagatctgattcttccatttccccacgcacttgccacccttgaccactgcctggtcggcaggcgct

SEQ ID NO: 389878 - DNA, 201 bp, Homo sapiens
cctcaggggcctcacttgtcgtatggggagactcctgtatcgcccgcaaggttgtggtgaggctgagcgagggtaatcgggaatgcctagtgcagcttccrcctgcagggacactcagcaaaccccagatctgattcttccatttccccacgcacttgccacccttgaccactgcctggtcggcaggcgcttctgtagtct

SEQ ID NO: 389879 - DNA, 201 bp, Homo sapiens
taagacaacagaaacgtattgtccccagttctggaggctagaagtccaaggtcacagtgtgggcagggctggtgccctctgagggttatggggggaatctktcccagcctcttctcctggcttctggtgttttgcccacaacctgtgccactccctggcttgtggaagcctcatcccaacctccacctccatcctcacacg

SEQ ID NO: 389880 - DNA, 201 bp, Homo sapiens
gcaggggattgattttgttcccttcccaccattgggtgtgttcagcaccatcaacacagattgttaaatcatccttgtatgtttccgttttgctctgaaaygcttgcgtcgctggggacgatgaacttggctcaatgcacctgtgtgtcggtggaacttggcagatgggcggcgggcacctctccatgccgatatctgtac

SEQ ID NO: 389881 - DNA, 201 bp, Homo sapiens
catccatgactgccccatgagactgggagcccctagggggcagaagccgctccatgtcccacctactcctggcctagcgcggtcccataggacatgtctayggaaatggagggcgtgagggtgggaggaaggaaggaaggcaagaaggaaagaaggaaggagaaggaaaaaggagaagagagaaaagagggagggtgggca

SEQ ID NO: 389882 - DNA, 201 bp, Homo sapiens
cctatttcagaccacggaggatcaggatggacgcccacccctgtgttccagcctccggttgggatcacatgctcacggcatgctatgtcctgatgccaccrcctggccttcacctcttccctgcctcctcatcctctgcaggtgccagtgctgaagcccatggatctgatggtggaggtgagccctcggaggatctttgcc

SEQ ID NO: 389883 - DNA, 201 bp, Homo sapiens
atggccatgtcttatttccccaggtccatgctgatgtccatgtatgtcgtttaccaatacttgccattacaaacaacactggaaatgattgttcttgacasaagagtgagatttacacctgaatccctagcagacaaggggcctgtgcattgagaagcctcacattgtcaaattgtcccctgtggagctgcccccttctcc

SEQ ID NO: 389884 - DNA, 201 bp, Homo sapiens
aagcctcatcccaacctccacctccatcctcacacggcactctccctatgtgtgtgtgtctgtgtgtccaaatttccgccctctctctcttttttttttttggaaggacatcaggcatattggattagggactcagcttaatgacgccatctcaatgcatttcatctgcaactaccctatttccaaataagatcacatcct

SEQ ID NO: 389885 - DNA, 201 bp, Homo sapiens
cacactgagcggccgacccagacagacagagtcagtctgttaactagaccccgactgggggcgagtgccatgagaaatccaccagggcagccatgcggagrcggggttgtcactgcgaagtacagggtgcaggaaggcgcccgagggagtgtgcgggccgtgcgtgttggggggtgtgtgttggtgtgtatctctttgggg

SEQ ID NO: 389886 - DNA, 201 bp, Homo sapiens
cctggcttgtggaagcctcatcccaacctccacctccatcctcacacggcactctccctatgtgtgtgtgtctgtgtgtccaaatttccgccctctctctcttttttttttttggaaggacatcaggcatattggattagggactcagcttaatgacgccatctcaatgcatttcatctgcaactaccctatttccaaata

SEQ ID NO: 389887 - DNA, 201 bp, Homo sapiens
acccagacagacagagtcagtctgttaactagaccccgactgggggcgagtgccatgagaaatccaccagggcagccatgcggaggcggggttgtcactgygaagtacagggtgcaggaaggcgcccgagggagtgtgcgggccgtgcgtgttggggggtgtgtgttggtgtgtatctctttgggggtgtgtgtgttgata

SEQ ID NO: 389888 - DNA, 201 bp, Homo sapiens
ccatttccccacgcacttgccacccttgaccactgcctggtcggcaggcgcttctgtagtctgggcttgagaagaactttcagaatggtagattttttatyctttattttttgaaggggagaaggaaagcagtggcaggaatcgtcctctgtgatgttacaacatattataaagctcagtcattgaaatagtctggaagtt

SEQ ID NO: 389889 - DNA, 201 bp, Homo sapiens
cttccatttccccacgcacttgccacccttgaccactgcctggtcggcaggcgcttctgtagtctgggcttgagaagaactttcagaatggtagattttttatcctttattttttgaaggggagaaggaaagcagtggcaggaatcgtcctctgtgatgttacaacatattataaagctcagtcattgaaatagtctggaa

SEQ ID NO: 389890 - DNA, 201 bp, Homo sapiens
ggggtgatgaaatgttttaaaagtaaatcatggtgagggctgcacagctctgtgaatacactaaaactactgaattgtacactttataaaagtaaagtgtrtggtatatggcttatgcctcaataaagctgtgattaaagactgcatatgctttaaagtgagaagcttggtgtcattggagccaggcgacagagtagggca

SEQ ID NO: 389891 - DNA, 201 bp, Homo sapiens
tcgcatggtagacccgtgcttattttcacgctttaagaaactgccttgctgtttcccacggggctctatcgtttttcattcccccagcagtgtgtgagggrctgtttgctccacctcttcaccaactccatattattagtctttttaatgttcgccactctgatgggtgtacactggtatctcgttgtgatttgcatctgc

SEQ ID NO: 389892 - DNA, 201 bp, Homo sapiens
tgaggaggggccaggtctgtctgtgcttcccagagtagaagatattaagctagaagaatgaggggaaagcattcccggcagaggaaacagcacgtgtttcrggttggcgttgtaggagtgcatggcttgttagtgaagggtgaagttctgtgcagctgggcgtagccttcccgggaggaagcagtgagagctgaggctgca

SEQ ID NO: 389893 - DNA, 201 bp, Homo sapiens
actgccctggagagcggtgccggctgtctcagggtgggaagcctccttggtgacactgtgtgaatggaaccccacccgcccttgctgcctttggtgccacyaggcacagctcccggccccaggaggggtgatctttcttggggatgccaagctggctctgtggtccctgtcactcagagcgggctcctcccctccacacac

SEQ ID NO: 389894 - DNA, 201 bp, Homo sapiens
ggagggtgtgtgttcccgtatctgtctcggagatggacagatcgactcagagaggtgtgaagggctttgcccaaggtcacacagctggtcagggtgggatkcaaacgcaggtctttccccctttccacacagtggcagttctgggggatcactgcatgcaaagggcatagccatggcacctccaggcctccagccccaccc

SEQ ID NO: 389895 - DNA, 201 bp, Homo sapiens
  misc_feature (1)...(201): n = A,T,C or G
ttaccgaacgagataaaaggcccgaaggatacaacctgaaggatgaagaggggaaacttaaggacctgtccacggtgacgtcactgcaggtgagctccggngagcgggaagcaggcacacgcctctttattacacctgaggattttagggctggaaaagcctttgagatttgagccagagtcaggtgcagaccctggttgg

SEQ ID NO: 389896 - DNA, 201 bp, Homo sapiens
aacgactgcattttcgacaagtttgaatgtgcctggaacgggagcgacaggtaagccctgacctcagcccgcacctcacctcaccgtagggagggtttctsccctgcaggggtctgggctgggattccggtgacccgcagcatggggctactcagcctcaatgggtccaggtgtctgggtgaagcccacgctttccagagc

SEQ ID NO: 389897 - DNA, 201 bp, Homo sapiens
ggttgtagatgtgtggtgttatttctgaggcctctgttctgttccattggtctatatctctgttttggtaccagtaccatgctgttttggttactgtagcyttgtagcatagtttgaagtcaggtagcgtgatgcctccagctttgttcttttgcttaggattgtcttgggaatgcgggctcttttttggttccatatgaa

SEQ ID NO: 389898 - DNA, 201 bp, Homo sapiens
gcctgcctagctttgttgagacagccgtatttcttggttcttgctttaggtcctgtggaaagacaggcccaattgcaggatagatgggaggttgttttgckatgagcatggctgtcagtagctgtatggcagtcctcacgtttgccctgcaggtggcatggtagaggtgtgcgaccctggcctgcctcctgtcccttcttg

SEQ ID NO: 389899 - DNA, 201 bp, Homo sapiens
gacatcgggccccaccagtccacagtgctcatagcagcagttggttagactctttctgctgcacgagcatgtttgatgtggataactgtaagagagctgcrggccaggtggcttcaggggctggagcatcgtgggtgatggctctctgggctgattgcctctgctgtcttctgtgtttcaatctcaggtgccagtagttgg

SEQ ID NO: 389900 - DNA, 201 bp, Homo sapiens
gcagaatcagaccccaaactccagacccttttgctgtgagtctcaggctagggtctcccacctgcaggaatcattttgggccttttgagggtctctttcayagacgtgggtggggcgtctgctcagcacctgctttctccttcaccaactcctcagcctcccatctctgaccccataaacgctgagaggagaaccaggcct

SEQ ID NO: 389901 - DNA, 201 bp, Homo sapiens
gcggcaaagggccctcgcccgtggggttcactctcatcacccagaagcagggagaagggcctgcggctgcaggcctggctgccacaccggcctccagacarcacacagcaggtggggccttgtcctgtatgccttagatcagcggctgactgttttgtgactgtcacctgcacagccacatacacaggtttgaggaccagt

SEQ ID NO: 389902 - DNA, 201 bp, Homo sapiens
tgtccctgtgaggtcccagccaagccatctgcctatggagacatgaataggccagctctgggctgctctgaacctggtgatggcaagaaataaagtaagtytcgtgcgcgtccgtgtgaagagaccaccaaacaggctttgtgtgagcaacaaagcttttaatcacctgggtgcaggccggctgagtctgaaaagacagtc

SEQ ID NO: 389903 - DNA, 201 bp, Homo sapiens
tacgagaacgactgcattttcgacaagtttgaatgtgcctggaacgggagcgacaggtaagccctgacctcagcccgcacctcacctcaccgtagggaggrtttctgccctgcaggggtctgggctgggattccggtgacccgcagcatggggctactcagcctcaatgggtccaggtgtctgggtgaagcccacgctttc

SEQ ID NO: 389904 - DNA, 201 bp, Homo sapiens
acaggagaactccttgtgaggacagaggcagagattggatgctgcagctacaggccaaggagcaccaaccattgctggcaatgccggaagctgggagaggygaggaagaatcctcccctggatccctggtggctctgccggacacctcgatcttggacttctggtttccaggacagctttacagtactttattatggcagt

SEQ ID NO: 389905 - DNA, 201 bp, Homo sapiens
ggtcagccgtgtgcctggtcatgggcctcccgatgagatgagcagggctgtgtcgggctgtgtcagagcattcagaccctcgctgagatgagcaggtctgygctgggccatgtcagggcatgcagaccctcgctgctctttgagacccttcttgtggaagggccaggatggtcgggacgccccgtccactcacctcatccc

SEQ ID NO: 389906 - DNA, 201 bp, Homo sapiens
cctggcacagagtaggtgcttgggaaatgctcaccatccggtacttgttgaatgctcttcccagctgtgccaagaaggttctggttctatgagagtgttcrgttgtcaaacaagagaagtattttgctctcttccccagtttgccagagcctccagttgactggttaagatttaaccattaagagctgatttgattctacc

SEQ ID NO: 389907 - DNA, 201 bp, Homo sapiens
accagtgaacccatctgggcctggtactttctgtttgggaaggttattaaattgttggttccatttctttttctcttttcttttctattcttttttttttaagacagagtcttgctctgttgcccaggctggagtgcaatggtgtgatcttgtctcactgcaacctccacctctcgggttcaaacaattctcctgcctcag

SEQ ID NO: 389908 - DNA, 201 bp, Homo sapiens
gcagtgtggggacagcgatggccaaaaagagcacatgccaaaggccctgccacttaggggactttgggaaagtttgaccaagtttccttgtctctaagtarggaatgataattggtcgatgggattgttctgagatgaaagtgctggtccttgggaaagcttcagctgaaatgtctttttattttgcccttcactcttttt

SEQ ID NO: 389909 - DNA, 201 bp, Homo sapiens
atttttttatttttagtagagatggggtttcaccatgttggccaggctggcctcgaactcctgacctcagatgatccaaccatctcggcctcccaaagtgytgggattacaggtgtgtgccaccacgcccagcttttatttttattgtttattttgttatttatttatttggagagagtgtctcaccctgtcacccaggtt

SEQ ID NO: 389910 - DNA, 201 bp, Homo sapiens
tgacccttggtatagaggaaagttagtggcacaagtttagatcgcctatagtgaaagaccttgcaggaccaggagtcaggcagacctgggttcgaaacccrctctgccacttcctggttgtgacttcaagctgcttgccttttcctctcagggttctgtttctgtctctgtcaaatgcagccaaatactgcccagtttgca

SEQ ID NO: 389911 - DNA, 201 bp, Homo sapiens
agaggagtggtggtcctcaccttgcaaagcagcactgcgggtaagacgaggcaacgggcaggaatttgctgtgcacacagtccttgtcatcatcctctttkcaggctgcaatgccaagaaactctcccaggatggtcctggagcccccagggcagggttctggggatgtgtggaggacgatgggcagtcaggaccacactg

SEQ ID NO: 389912 - DNA, 201 bp, Homo sapiens
ttatggctctgggcccttccacacagacttcgtcttcatttgctgggtcttggcatatttcagaattccaagacattttctctccgtccagaggcatggcracctgggttgtgggtggggtgggtgggctttcgtcttatcatttcactggaggaaagatccattgcggcactatttgcccagcctctatgaggttcaaag

SEQ ID NO: 389913 - DNA, 201 bp, Homo sapiens
cttcagccgtatctctgtggtctcatttttcaaatgaaaagaaccgaagcaaagctgggcactttggcttgtgtgtgtagtcccagctacttcagtggctraggtgagaggattgcttgagtccaggaattagagacgggcctgggcaacatagtgagaccctgtgtctacaaaaaataaaataaaagtaaaaaagaaagc

SEQ ID NO: 389914 - DNA, 201 bp, Homo sapiens
aacataaataggaagaaagcactactttggggatagtgtttgcctctggaaagagaaaggaaagatgaggactaggaagggatgtaaaggaacttcagccrtatctctgtggtctcatttttcaaatgaaaagaaccgaagcaaagctgggcactttggcttgtgtgtgtagtcccagctacttcagtggctgaggtgaga

SEQ ID NO: 389915 - DNA, 201 bp, Homo sapiens
ggctctgccggacacctcgatcttggacttctggtttccaggacagctttacagtactttattatggcagtgctagcaaacaaatacaagcacctaacttmgtgctggcatgcagttggagcttgataaatgcttgctgaatgaatgatatttattgagtgcttactacataccaggcaataggcaaagggattagatgat

SEQ ID NO: 389916 - DNA, 201 bp, Homo sapiens; identical to SEQ ID NO: 85384

SEQ ID NO: 389917 - DNA, 201 bp, Homo sapiens; identical to SEQ ID NO: 85385

SEQ ID NO: 389918 - DNA, 201 bp, Homo sapiens; identical to SEQ ID NO: 85386

SEQ ID NO: 389919 - DNA, 201 bp, Homo sapiens; identical to SEQ ID NO: 85388

SEQ ID NO: 389920 - DNA, 201 bp, Homo sapiens; identical to SEQ ID NO: 85389

SEQ ID NO: 389921 - DNA, 201 bp, Homo sapiens
ctgtacgagaacgactgcattttcgacaagtttgaatgtgcctggaacgggagcgacaggtaagccctgacctcagcccgcacctcacctcaccgtagggrgggtttctgccctgcaggggtctgggctgggattccggtgacccgcagcatggggctactcagcctcaatgggtccaggtgtctgggtgaagcccacgct

SEQ ID NO: 389922 - DNA, 201 bp, Homo sapiens
agcgcagtgttcccctggcattgcagagccacagagctgggagccactgttgctgtctttcctgtgcactcctggctggaggctggtgtcccatcagagcygcagggctgggtggtgaattcccaggatgggcacctgtgagggtgcaaggtcagaaaaaaagatgacgctgggctttgggggctgtgatggagactcact

SEQ ID NO: 389923 - DNA, 201 bp, Homo sapiens; identical to SEQ ID NO: 85382

SEQ ID NO: 389924 - DNA, 201 bp, Homo sapiens
tcctgtacccctctcccagcttattgtgatttgctgtccatctttggcattctttggcttgtagatggtgtcaccgtggtgtctgcctttctccctgtgcytgtctgtctctgtgtccaaatttcctctttgatgagggcacccgtcattttggattgggggtaaaccctactccagcatggcctcattttaactaatgac

SEQ ID NO: 389925 - DNA, 201 bp, Homo sapiens
aagtttgaatgtgcctggaacgggagcgacaggtaagccctgacctcagcccgcacctcacctcaccgtagggagggtttctgccctgcaggggtctgggytgggattccggtgacccgcagcatggggctactcagcctcaatgggtccaggtgtctgggtgaagcccacgctttccagagcaggtccaactctcagcgc

SEQ ID NO: 389926 - DNA, 201 bp, Homo sapiens
gtctgcctgctgtatggggcatggactttgtggggggcaaagtgagaaccaggggatgactttggaggctactgcagtgtaggagtgagcaatgatggtgkcttagaccagtggcttagctccagaggtctggacaggattaaccaatttattcaacagatatttaccagacaccttgcacgtgggaggaactgagccaat

SEQ ID NO: 389927 - DNA, 201 bp, Homo sapiens
tggacgcgcttccttttggtttgggcacacttgggggtcttcctgcacctcggccttttgctctggacagatggcctttgctgtcacgggttggctctgaygtcctttcctctgtgagggtgcacagcacccctgggcccctgcagcctgcctcagcccctcctcactgccatctgcaccctcagaacatgagacttggtg

SEQ ID NO: 389928 - DNA, 201 bp, Homo sapiens
gatgcttgcagattctcccaggaggcaaaacttcagggggagaatctggttgctcatgttgctggggaggaaccacagcctggagtagggatctacactartgcatgggttggcaagctgggcagggctctggaaagaacaaggttgcaggatgatgacaaggtggcctggggaagaggtgtgtggatggacctctcaaat

SEQ ID NO: 389929 - DNA, 201 bp, Homo sapiens
agcttttgtcctctgtgcataacccctggagacccagggatccacctggttctgtcacagagcagtgtcaccctcaggaagcccagctcagcttccaaaakgaaacaggatttcctccctgaagagccttcagcaggacaacttctttatggtcgcttttcgtaacatcctcttcctccccagttaccttgcacctcacag

SEQ ID NO: 389930 - DNA, 201 bp, Homo sapiens
ataaagcgggtgcggctttggtcacatggacgattaggatcgaggagtacctggtaaataacaagaagcaaagtgcctcaagcccagcactgtgcggggtrttcagcctatgtcccctgattcacgctcaccaggggctgcgttcccttgttgatcccagttcttatagaaaactaagagagtgcgcatgtcagggtaggg

SEQ ID NO: 389931 - DNA, 201 bp, Homo sapiens
gggcccctccctctcccccagagcacgtgtcagctgaattccacacccgaacagggggaggatcaggaactgtgtgggttgcaaatgactttaattatgtygctctccttccactaaatggatcagaagaaccagcattgtgtgaaatcacccaggttcattctgtgaactgttccctgaagaacaaagggggctgcctcc

SEQ ID NO: 389932 - DNA, 201 bp, Homo sapiens
ctcttcagagatgacccccaaatcattcccctttccattatcctcagccagccaacccctcccagggactgtgtaaaactctcatggaaggatctgattgkctctgtgtgggtcacttgcccactttttgcaccaatcagcatggacagggatatcacatgcccaagttggccaggccaaggggcggggagagcactgtga

SEQ ID NO: 389933 - DNA, 201 bp, Homo sapiens
acggtcggggtcagccgtgtgcctggtcatgggcctcccgatgagatgagcagggctgtgtcgggctgtgtcagagcattcagaccctcgctgagatgagyaggtctgcgctgggccatgtcagggcatgcagaccctcgctgctctttgagacccttcttgtggaagggccaggatggtcgggacgccccgtccactcac

SEQ ID NO: 389934 - DNA, 201 bp, Homo sapiens
ggtggagccctcatgggtgggattagtgcccttataaaagaccttagagagctcccttgcccttctgtcatgtgaggacgcagcgagaaggcactgtttgwgagtcaggaagttggacctcagtggacaccaaatctgctgtgccttgatcttggacttccagcctccagaattgtgaggaataaatgcttgttgtttata

SEQ ID NO: 389935 - DNA, 201 bp, Homo sapiens
ttgaactgcttccaatctatcaagatcttgctgtacttccttcatttactctcccctgcttttggctgaagaatttttaggcaaatccaagactcctgtcrtttccccgttccatctgcaggcatctctgagtgttgagggcatttcttgtagcccagtgctgttatcccacctcacaaaacatatcctgattctttgtta

SEQ ID NO: 389936 - DNA, 201 bp, Homo sapiens
tgcacagtgggggccattgtcctccagaacccagggctgaatgtcccattgaggcagaacaaaggctgctcagaggttcccagctggggtgtgggctgccscaagcagggatgggatctccaactgcaggccaagggcctcctccaggctggcctggcctcctgcagccccacccccacccctcctcaggaccaggactgt

SEQ ID NO: 389937 - DNA, 201 bp, Homo sapiens
ttgtgggagactcagcattcagtgaaatctgcacccttatggtggacgttgcagctgatctccacaacagttagtctctcttcttccaaggagaacacatrtggttcctagtaagagatctcaggccatagctggatgtgatcagtgcaaggatgatctcattccccttgcagtgactggttccagaatggatgtgggagt

SEQ ID NO: 389938 - DNA, 201 bp, Homo sapiens
tctttactaaaaaactggttttgagctctggtttggtggatggcagcaaatggctggagcactggatgaactgggtcccaaggccgcctggagaaaacagraagcaatgttgccggaaggaagcaggaggtggactgagatgccaagactttgctgggccagtgatgctctgcccttctccagagcagctgggctccctct

SEQ ID NO: 389939 - DNA, 201 bp, Homo sapiens
ctgttccctgtacgagaacgactgcattttcgacaagtttgaatgtgcctggaacgggagcgacaggtaagccctgacctcagcccgcacctcacctcacygtagggagggtttctgccctgcaggggtctgggctgggattccggtgacccgcagcatggggctactcagcctcaatgggtccaggtgtctgggtgaagc

SEQ ID NO: 389940 - DNA, 201 bp, Homo sapiens
cctgcaggaatcattttgggccttttgagggtctctttcatagacgtgggtggggcgtctgctcagcacctgctttctccttcaccaactcctcagcctcycatctctgaccccataaacgctgagaggagaaccaggcctggggggcaagttcaaggactcaggaggcagaccgctggaatccaatctctcccctgccct

SEQ ID NO: 389941 - DNA, 201 bp, Homo sapiens
gagtgaggacccaggggaagcactgggctggtgcccgcctcctgtctctgtgcccaggcctactgtctgcttcacactttactccccagaaccaggcatgrcacttagtacagggcaggccgagctcgggggagatttgcttgaagaatgaggaacgtttctggaagcctctctgaccacccagcaggcaggggcaggtct

SEQ ID NO: 389942 - DNA, 201 bp, Homo sapiens
aatggaagaatccccaccactgggattttcagcagctgatcgtagaagggagctggactgcaaggccgtctccgaccgcctccctctcactgcccagctgsctagggtgatgagtatggacgaggatggaggcaggctgtggctgctgtctcatccaagtagccttttcctgacaccccaaggctgggcagagggactgag

SEQ ID NO: 389943 - DNA, 201 bp, Homo sapiens
aatgggagctgagagtaggatgttagtagcagtggcttcctgggaagggcccccacgtgggagcctctggcctggttgcaaatggcaggaccaaggaggtsgttgttgagttagttggaaggcactgtcctgccaggatttcccacgtcctcgtttgagcattgagatgctgaacgttaaactgtccttcattctccagct

SEQ ID NO: 389944 - DNA, 201 bp, Homo sapiens
tggggatgagaccatgtgtgatgccttcagcaagatcccagttcgtatgcgcaggggtgccgcagtgatcctgcgtggactatcctattggcaggcctgcscttccccaggttacctacccggaggaatcccgcaggccctcccacaacaggcttcaacgccccctcctccatgaagttctccttgatctgtcctgcctgg

SEQ ID NO: 389945 - DNA, 201 bp, Homo sapiens
attctaccctcgccaccgtgtgcttgaggaagcccctaagtcagctcggctggaaagtggttctaggaaactggccttcgtggccgctttggggatgagascatgtgtgatgccttcagcaagatcccagttcgtatgcgcaggggtgccgcagtgatcctgcgtggactatcctattggcaggcctgcccttccccaggt

SEQ ID NO: 389946 - DNA, 201 bp, Homo sapiens
aggggtctctcagcagagcccgagctcaggcaaggggctggcatggtgatcacagggggccactaaaggatgcttagaaaaccaggatggaggcccgaccyggggctgggctggcacagctgggtcagcaggacacaggaccttctctctaggccctgcccccagatagatcccagacacccccagcagacagggctcctc

SEQ ID NO: 389947 - DNA, 201 bp, Homo sapiens
tggctcagagaaacagaaccaacaggatggggatagagactgagaaagaagggagatttgaaggaattagctcacgtggcatgttctaaatctgcagagcmggcgggcaggctggtgacccaggggagagtgactatgcgagcccacacgcatctgttagcggaatcccccggtcctcagggaggtctgtctttgttctat

SEQ ID NO: 389948 - DNA, 201 bp, Homo sapiens
aacattttttggtggcttgtgatgtgctagaaattgtgtgtagcaggactgcgttcggctggtgtgcggtgcttaacaaatcggggctatttttctcccamaacagggagtctggagagggcagtccaggaaggtgggggggctccatgaccccggcagcgccacagtggttccttctgtgatccagtccaccatcatttg

SEQ ID NO: 389949 - DNA, 201 bp, Homo sapiens
aatgactgttctggagcgtgaggccgtaagctgggcacttggcatctggcccagctgacctattgatgctaaaataatagcaataactacataaaagcagmacaacaaccaacattttttggtggcttgtgatgtgctagaaattgtgtgtagcaggactgcgttcggctggtgtgcggtgcttaacaaatcggggctatt

SEQ ID NO: 389950 - DNA, 201 bp, Homo sapiens
ccccaccagaaaccccagccggttcctcaccgtgtcactcctcacacacggggtgccacgtgcttgacatctgtcacctccattctttactgtccggtgasaaggagccatcatcctatttggtggaaagggaactcgggcactgagaggtagggagatgagggaggtgtctctcggctgggcggtgacagattcagagcc

SEQ ID NO: 389951 - DNA, 201 bp, Homo sapiens
gggccttgaaggatgggtaagatctggccgtgcaaacatgggtgggaaaacaccccaccagaaaccccagccggttcctcaccgtgtcactcctcacacayggggtgccacgtgcttgacatctgtcacctccattctttactgtccggtgacaaggagccatcatcctatttggtggaaagggaactcgggcactgagag

SEQ ID NO: 389952 - DNA, 201 bp, Homo sapiens
atagagacctaccaggtgggcaccacagcaggagacccccaatcccgggtcttttttccctatgctgagatccccatggagggggccttcctagccaggcrtggctttcatatgcccagtatgtaggtgaagacacggaggctgaagaaatccagcaactcatccccacacgtagcttggcagagggcaggagtgctcagt

SEQ ID NO: 389953 - DNA, 201 bp, Homo sapiens
ctctgtggcagtcagatttgattttgttacaaaccccatggcaatgaaacaaaacccacctatgagtagggctcagccatgcctgcccaggacaccatgarcagagataactactggcccaaggtcccagggccagttagtgccagagccacaagcagtgcccagtctggtagaggacattgtccagcacatttgagaatg

SEQ ID NO: 389954 - DNA, 201 bp, Homo sapiens
gggaggaaggaaggaaggcaagaaggaaagaaggaaggagaaggaaaaaggagaagagagaaaagagggagggtgggcaggtagcaccatgcccattttgyaggtgagaacactgaggagacataaccgggaagtggcagggccaagcacacccttggcagctcattatactttcccttcagcctagcaaagctactgttc

SEQ ID NO: 389955 - DNA, 201 bp, Homo sapiens
ggagatggtcagtggatggcatacaggagactgtaccaactctgtggcagtcagatttgattttgttacaaaccccatggcaatgaaacaaaacccacctrtgagtagggctcagccatgcctgcccaggacaccatgaacagagataactactggcccaaggtcccagggccagttagtgccagagccacaagcagtgcc

SEQ ID NO: 389956 - DNA, 201 bp, Homo sapiens
atgccatgtggtgcttgtttacatccatgactgccccatgagactgggagcccctagggggcagaagccgctccatgtcccacctactcctggcctagcgyggtcccataggacatgtctacggaaatggagggcgtgagggtgggaggaaggaaggaaggcaagaaggaaagaaggaaggagaaggaaaaaggagaagag

SEQ ID NO: 389957 - DNA, 201 bp, Homo sapiens
agctctgcttccctgtttctggggtagagaccagagcaggccagcaggcaaggctgccactcagccggtttccatggggacagctggacaggttgtcatakgtttaggtatttccagattggctggtgaatggctgtcaactccaccaccctgttctcttcccatcgttccctgggtctctctgtggcccaggtcctaggg

SEQ ID NO: 389958 - DNA, 201 bp, Homo sapiens
actagcagtgtctctgctctttctgacccttcaggttatgcagtgcctcctcctccaggaagtcatccctgatccccaggctgggccctcagaatccccaygtctccctccatcgcagccctggccatgccatgtggtgcttgtttacatccatgactgccccatgagactgggagcccctagggggcagaagccgctcca

SEQ ID NO: 389959 - DNA, 201 bp, Homo sapiens
aagcagcttccctccccctcctctcacctcccctcacctccctgcatgcagtggcctgggatcaggatggtgacacctgggctctgcagccctggcccacygggtgctggaacttccttcctccgtcgggaggggactccagcctcctgcctgcccctccctacctccttgactcagatttcatcctccctgtctctgaac

SEQ ID NO: 389960 - DNA, 201 bp, Homo sapiens
ccactagcagtgtctctgctctttctgacccttcaggttatgcagtgcctcctcctccaggaagtcatccctgatccccaggctgggccctcagaatcccyatgtctccctccatcgcagccctggccatgccatgtggtgcttgtttacatccatgactgccccatgagactgggagcccctagggggcagaagccgctc

SEQ ID NO: 389961 - DNA, 201 bp, Homo sapiens
agatctcctgagcttcaggggtctgcttcagagacaggtgtttggaggccttgctctcaagagaggtgggggggaccttcctcctgctgcctgctctgatytggggggataccagaggcatgaacataaacgtgggagccttttcctgccctgtaagcagcttccctccccctcctctcacctcccctcacctccctgcat

SEQ ID NO: 389962 - DNA, 201 bp, Homo sapiens
tctgtctgccgttgaggtcctgcctccctcctctctgccaccactctccatgggacaggtgctccagctgggcgcatgcatgcccctctcacctgaatgcytcccactagcagtgtctctgctctttctgacccttcaggttatgcagtgcctcctcctccaggaagtcatccctgatccccaggctgggccctcagaatc

SEQ ID NO: 389963 - DNA, 201 bp, Homo sapiens
tgggttgggctcctggaaagggaggcgcctactgtcagttttgagtttcgttaaacacctgccagcctgatagcattctaattccaaaatatgacaccacytattagtggataaactaggctccctccctccttcctgatcttgacgccaggactggaaggagcgaccacctgccctcaggatacccggtgcagtgccatg

SEQ ID NO: 389964 - DNA, 201 bp, Homo sapiens
gcctggtcttactagctgatctttgaaggtgtgagtgagccgggagacatgcagagcctagcactccctctgctgcattggtctttcttggcaggccttcrtggctttgcagagggcgggcagttgaggcctctgtctgccgttgaggtcctgcctccctcctctctgccaccactctccatgggacaggtgctccagctg

SEQ ID NO: 389965 - DNA, 201 bp, Homo sapiens
catggggacagagatgctgatggcctgggctgaggggcagagcgcaaggggttcagatggaggaaccccaggacctgaaggctggctggacaagggaaggkcttagaatgaggaagaagccccctgatgcctggcttggtgccccagggctggggatgaggaaatgggagttctagagaaggagcggtgtgggggctgttg

SEQ ID NO: 389966 - DNA, 201 bp, Homo sapiens
ggtttcaccatgttggccaggctggtctcgaactcctgacttcaggtgatctgcccacctcagcctcccaaagtgctgggattacaggtgtgagccacctyacctgacctgatatctttccatattggcacacacacatagaaatgcctcatcctgttcaacagttgcttagcatccactgatagatggccatgtcttatt

SEQ ID NO: 389967 - DNA, 201 bp, Homo sapiens
gttctaattagcccaaagtggccccttctggcctcagtggaaattacggccctcctgccgcctggtcttactagctgatctttgaaggtgtgagtgagccrggagacatgcagagcctagcactccctctgctgcattggtctttcttggcaggccttcatggctttgcagagggcgggcagttgaggcctctgtctgccg

SEQ ID NO: 389968 - DNA, 201 bp, Homo sapiens
ggaaagcaaagtggagcaccagctgccttctgcaccctgttagtgtgtgttggggtgggggtggggggcaaatgactgtgaacagagtttctaaattggargggctgttcccagggaaaggttcagagtcgtctccccatctaatatttgcccacggatcagtcatgcagcgaacatgtcccaggcaccagctctgggcag

SEQ ID NO: 389969 - DNA, 201 bp, Homo sapiens
ctctgagcctgtctctggacctaaggaaagcaaagtggagcaccagctgccttctgcaccctgttagtgtgtgttggggtgggggtggggggcaaatgacygtgaacagagtttctaaattggaggggctgttcccagggaaaggttcagagtcgtctccccatctaatatttgcccacggatcagtcatgcagcgaacat

SEQ ID NO: 389970 - DNA, 201 bp, Homo sapiens
cacctcctccgtgcgcacaacctgcagcttcttctaaggggcaatggggcctggctgtggggggctgtgggcggaggaacccaagctggattcgcaatcaygcacccgggctcaggtatcagctctgctgctcactgactgtggaaccctctgagcctgtctctggacctaaggaaagcaaagtggagcaccagctgcctt

SEQ ID NO: 389971 - DNA, 201 bp, Homo sapiens
ttcattcacattcattcagtcagcaactacttactaaacacctactgtgtgccaggcactgaaggtgcagcagcaatcctgacaggcaggtccctgccctsgctggggacagatagcaacaaacaggccaataatgtaataagcagtgattaatgcttgcaaaaagagaaagcagaaaatctataattaaacaaggtaaaa

SEQ ID NO: 389972 - DNA, 201 bp, Homo sapiens
aggcacccactgtcctgccatgtgcataattgaagtcttcagactgcttagtggttctaattagcccaaagtggccccttctggcctcagtggaaattackgccctcctgccgcctggtcttactagctgatctttgaaggtgtgagtgagccgggagacatgcagagcctagcactccctctgctgcattggtctttctt

SEQ ID NO: 389973 - DNA, 201 bp, Homo sapiens
ctggcgcacagcctcaccccgctgtaaacagagctgggattgaagtgcgatttcggtttctttttctttttttctaatcaaataaaaacacctagggggcrggaagcgaggaggaagaggccagggagtaattcttgttgccaaaccagtttctaaggggctccgctccgctcccagcatttctgtctctgaggctccgac

SEQ ID NO: 389974 - DNA, 201 bp, Homo sapiens
tgcagtgcccagcaccccagcctcatggttaaggtaggcagtccccaggagtccccttcctgggacatcaactctcctggtgggaacaaatgctgagcacstcagcatgagatgggtacagtcagggactccacaggcaggtcatgtcacagacaaggtcacacagctaggtggtggcaggttggagagagagggcagtcc

SEQ ID NO: 389975 - DNA, 201 bp, Homo sapiens
agcgtgggcttcaccgtgctgtgtaaactgtgaagtgcagtaccccctgtgttgagctcgcctcccactctgtgaatagagcagacaatgctggggatgcrtctcccagcctcccttgcagctagggcacagatacctggccccccggtgctgctgccttgggacttgactcagaatgttggctggcaatgtgaggaacag

SEQ ID NO: 389976 - DNA, 201 bp, Homo sapiens
caactcagaatttccagggcccataatttcctacaggcccctcgggtgattgctttctcagtaggcaacttagggccgtccctccaaacctttagagtgasaagcgtgctacctgggtgcttcataactgatgttgcaaatgttcaaccaagtgtaggaagtgaacacactttgtatctgcaaagtgctgtgcatacaagc

SEQ ID NO: 389977 - DNA, 201 bp, Homo sapiens
cctgcttttgtgcttggtgcagacccctgcttcctcatgggcacctgcctccttagaaccccccttggaatctgttaactacagcttcctgggcccacacsagcatccctctgcaactcagaatttccagggcccataatttcctacaggcccctcgggtgattgctttctcagtaggcaacttagggccgtccctccaaa

SEQ ID NO: 389978 - DNA, 201 bp, Homo sapiens
tcgctcatgggccttggagcaggtgcagtggagaccagaggaagcagtgtaggaacaagttcttcctgatggacttcactggacccgcagcacgtgtgacrtgcttcccagaccacagtgctctttttttttttttttttttttccaggcagagtctcactctgtcacccaggccggaatacgtggcacgatctcagctca

SEQ ID NO: 389979 - DNA, 201 bp, Homo sapiens
catggccacgcttgtccgtggctggctttataggcccatccttcttttatatgatcatcaagatggcactaatttgggtttgcaaatgaggttttcgtgaygttgtcatgtcagcatctggattcaagaggggctgcttcccagaccctgaccctcccctgtggcctgggagcaggcccagcccctccctccatctaatca

SEQ ID NO: 389980 - DNA, 201 bp, Homo sapiens
aaaagatctcgctcatgggccttggagcaggtgcagtggagaccagaggaagcagtgtaggaacaagttcttcctgatggacttcactggacccgcagcaygtgtgacgtgcttcccagaccacagtgctctttttttttttttttttttttccaggcagagtctcactctgtcacccaggccggaatacgtggcacgatc

SEQ ID NO: 389981 - DNA, 201 bp, Homo sapiens
agaatgtctcaaattgttcaaaaataaatacgttagttcttgtaacgtgctccgaatagggtgaggctcaacatgagcacttaataaatgctcagtttaaktgtggtaattgtaattctcattggtatatatttatgtcctgatcctatacctctgttattaatgagactgataataggtaagtgaagggaaaaagagacc

SEQ ID NO: 389982 - DNA, 201 bp, Homo sapiens
cacacctcactcatggaaggcagaggggattggatgagctacagatgcgaagctagtcccacccagccagccggccgcacgtgttagctgcgacaggtacyaggtgcttggctggggtttgggggatataaacagtagaacaactttgcctagtcaggtgaatgacacaagcaggtcagccagtatttgcaacctaaaaag

SEQ ID NO: 389983 - DNA, 201 bp, Homo sapiens
gcttctcctcgccgagcctctgtttccaatgtagaaggggcacacctcactcatggaaggcagaggggattggatgagctacagatgcgaagctagtcccrcccagccagccggccgcacgtgttagctgcgacaggtaccaggtgcttggctggggtttgggggatataaacagtagaacaactttgcctagtcaggtga

SEQ ID NO: 389984 - DNA, 201 bp, Homo sapiens
agttggggaaaccgaggcacagagaggttcagaaacttgcccaaagacacatagctagcaagcggcagagctggagccacccccagatggtcagggggcarggattgcactctggagccacggagggcgtatggaagactctggagcccaactgagtcccaggcctggtctgacccttctctccttgtccctgagcaattg

SEQ ID NO: 389985 - DNA, 201 bp, Homo sapiens
agtggctgccataacatattatcacacgtttggttgtttaaacagcagaaacttacactcttcctgttctacagtccagaagtccaaaatcatggtgtccrtaggcctacgttccctctgtagcctgcaggggtggatccttccttctctagaggctgccagcatctcttggctttatggccacattactctaagttctgc

SEQ ID NO: 389986 - DNA, 201 bp, Homo sapiens
atcactgcccaccctgggcctccctctcctcctgggtggggttggcacatgggcagttcctgcctgcaggggtggactatttgactggtctgtgctaggcrtggctctctggggttattaccatgtctcaaagttcaattacttgctgtggtttttagattagcttgtcgtgggatctccactggggcccatcatgaggtg

SEQ ID NO: 389987 - DNA, 201 bp, Homo sapiens
acagaattgttgttcataattagcctccacactgaacaaacaacctatgtgcccaacaacagtggggtcagctgcagtgtatttctgccatagaatattayacaacaatgaaaaatgaataaattacagttacatatatataaataacatgagtgcttctcagaaaaaaaacattgtgcaaatgaaagcagttatgaaaac

SEQ ID NO: 389988 - DNA, 201 bp, Homo sapiens
ggaatccaggcctttctgaaacatagcccagggtcccatcccacaacgtgtcagtagacaccatgcctgctgggtcatgcctgcttccgctgcaccctgcacccagctcagcacctgctatcttccaaaggccattgctgattgcttgtacacacctgttagttcatgcacagacagcaaagcacgtagttgtgctgcctc

SEQ ID NO: 389989 - DNA, 201 bp, Homo sapiens
caacagtggggtcagctgcagtgtatttctgccatagaatattacacaacaatgaaaaatgaataaattacagttacatatatataaataacatgagtgcytctcagaaaaaaaacattgtgcaaatgaaagcagttatgaaaacattcctaccttacaatttactagtaaactagtaaaactacagtgttaaaagtcaag

SEQ ID NO: 389990 - DNA, 201 bp, Homo sapiens
ttggtactaacaactccctttccccagagcattgctagtggcgactagatccaacatatttaatatttgccaatattatggtaaaaattgctgtttttttktgtgtgtgtgacagaggcttgctctgttggtcaggctggagtgcagtgtcgtgatcttggctcactgcaacctctgcctcccaggctcaagcaattcttg

SEQ ID NO: 389991 - DNA, 201 bp, Homo sapiens
agacacccctcagctggtcactacatacagcaggaccagcactttctgagggaagagggatgttctcttgggaagtctggatgctgaagacagtttgttamtctgattaataccagttacaaagaaacccccacattccaggggttgatgtcatagaagtttatccctttgtaacagttcattgtggatgatcccagttgg

SEQ ID NO: 389992 - DNA, 201 bp, Homo sapiens
tggggggtgatgatgtgctgggacatggtattctagcgcattctgggcaggaggaacggtgtgtgcaaagtggcataacacttgtcccctgacagtgtccrgctcctctgcttgagaccaggaggcagttagttagttgccagccggcccgggagcaggacacacctgggggcccctgtgctgcccaggacaggcactgcc

SEQ ID NO: 389993 - DNA, 201 bp, Homo sapiens
agtgtaggccaactcccacgcccctgctgtaagcaatgtgctcctttctttttaatcaacccgaacttaaagcttggcgcagtcacagagcacggtttttstcattttctttctggaagatgaaaatcaaattctaataaaatttttccactccatctcctgactgttgtcatttgctacactttttagtgtttatcctta

SEQ ID NO: 389994 - DNA, 201 bp, Homo sapiens
gtgagatccaggacatagaggcctgatgtccaggccgcctctgaacttccagttacatgagctgttacttttccttttcgttgtgcactttcaagtctccrttacttgcagcccatagcaccccaactcgtacagccctgactgcttatcaagaaaaccaggaggctgatctgtaacccacagctaagactcgagatacat

SEQ ID NO: 389995 - DNA, 201 bp, Homo sapiens
gaaatttaatggtttaaatcctggatttgccatttcagccctgcccaaagcccgcagaattttctaggctgccctctccctggagaagaagagggacccgrggggaaaaaaacataatccattgccagatcctcctgggaggcccgcctgcccgggcccctccctgtcctccagaggcagggtccctgagtgggagggaga

SEQ ID NO: 389996 - DNA, 201 bp, Homo sapiens
cgtgcccctcagccggccctgggttgccgtggctcgggtgtgtttgccacggggctacagacctaatggagccctgcatacttttattaattaattaattwatttatttatttatttttgagatggagtcttgctctgtcacccagtctggagtgcagtggcgcgatctcagctcactgcaacctctgcctccccagtcaa

SEQ ID NO: 389997 - DNA, 201 bp, Homo sapiens
ttgaatggcctttgtcagtgacgatccactcctaaaaaacccctcacaccctggggcctccttgaccatgcctcttttttttttttttttgtgctttctgkggctttcttttttcttttttttattatactttaagttttagggtacatgtgcacattgtacaggttagttacatatgtatacatgtgccatgctggtgtg

SEQ ID NO: 389998 - DNA, 201 bp, Homo sapiens
attctggatattagccctttctcagatgagtagatggcaaaaattttctcccattccgtaggttgcctgttcgctctgatggccattttttttttttttttgctgtgcagaagctctttagtttaattagatcccatttgtctattttggcttttgttgccattgcttttggtgttttagtcatgaagtccttgcccatgc

SEQ ID NO: 389999 - DNA, 201 bp, Homo sapiens
ggcggccactgtctcgccgtgtgctcccgtgagcacctggggagagagtgggcaagctctttggtctcttcctataggggcactaatctctccatgaagaycccaccctcatggccttgtctaacccaaatctcccaaaggccccacctgcaaacatcatcacattgggggttagggcttcagcctgtgcacttgagggga

SEQ ID NO: 390000 - DNA, 201 bp, Homo sapiens
cttctgccttggagccagccaccatattgtgaggaagcccaagcagtttgtggagaggcacatgcagagaggaaccaaggtcctggttgagctgcctgccyaatatccagcaccaccttgccagcaggtgagtgagccatcttacaggtagagcctccagccctcaggcaagccatccatatggaacagagatgagccatt

SEQ ID NO: 390001 - DNA, 201 bp, Homo sapiens
ggggaggaggagaaaccagttctactgttagtatcagctcatctaacatttggcccctggtgggggtttttgcatccttttgggggtctaggtctcttctrccattttgttggcactttaatttcttgttaacaaacccaagagcacatacaacttaatttttaaattcccaataatttccagcatcctctaagttagtgc

SEQ ID NO: 390002 - DNA, 201 bp, Homo sapiens
tctgattatgcaccacacttaggaggttttgggatttgaactagactacctggcttggtgctcttgctatctgtgttgcgatgaaaggcaatcgagagggktcagcaggaggagagacccccttcacggcacaggtagatggcagtggcagaggccacaagtggacacgtggtccagggactgaagggcaggtggcatttc

SEQ ID NO: 390003 - DNA, 201 bp, Homo sapiens
ctgcctctaggagggtgtggctacctcttgatccaatcagtggagggcagcatggggatgtgatcatgcagtgaagaacctgtaccgggggtagttaggcrccagggaaggggaggaggagaaaccagttctactgttagtatcagctcatctaacatttggcccctggtgggggtttttgcatccttttgggggtctagg

SEQ ID NO: 390004 - DNA, 201 bp, Homo sapiens
gggagagaaagactctgggagttctaatttaactaaattcaatttaactgtagccatgtgctgggtcttttgacatatgtcatctggtgaaatcctcattrcagccctgcaaagcagaagttatcaacccattctacagataagaaaagcagagcacagaaaggctgagttttcaagagatcacacagatgttaggcagtg

SEQ ID NO: 390005 - DNA, 201 bp, Homo sapiens
agccagggccaaggaatccaaatactaatcaagcccactgtaattgccctgcatctgaggtctgaaatcactcgcctgctctggattatctgtgctccagrgtggcctcagtttacaccatcctacctccccattgaaaccttactgctcacgatggcccaggttcccacccatcctgggagagaaagatgattggctcag

SEQ ID NO: 390006 - DNA, 201 bp, Homo sapiens
aatctctcccctccccagaagagagggtattgttcaagttaccagcacacaactgctctggggccttcacaaggccaggcagttggtcagtcagcctccamcatgactgagggcttcctgcgtgccatggcgctgtccatggtgctgaccccgttgtgagccattgcgtcgaggtcagcatctccacctcccaccccactg

SEQ ID NO: 390007 - DNA, 201 bp, Homo sapiens
tcctgagagcagaaggcagggaaggcctcagttggaggtgaaaatggaactttcatccaccagatgttagataaaagataggaagggtgttccaggcagargggaaagtctgggcaaaggcttggaggataaaagggcaccgcatgtttggggagcggggcatgttccctggggccagagacctgagttctcctcttggct

SEQ ID NO: 390008 - DNA, 201 bp, Homo sapiens
tacccggaacagagggctaattaaatcacacgctgaggtttgtagaacatgggacgcttcattaggctctgtgtgaacaagtgcgcccagcctgctcccastactccagcagactcgagcctggtataatcacagctcacactctgcttcatcagctcgctgaggctgtggggagggctcacacctttgggctctaaagag

SEQ ID NO: 390009 - DNA, 201 bp, Homo sapiens
atgatgggtgacgagggcatacccggaacagagggctaattaaatcacacgctgaggtttgtagaacatgggacgcttcattaggctctgtgtgaacaagygcgcccagcctgctcccactactccagcagactcgagcctggtataatcacagctcacactctgcttcatcagctcgctgaggctgtggggagggctcac

SEQ ID NO: 390010 - DNA, 201 bp, Homo sapiens
ccttctaagcaagtctcagtggggcggattctggctgtcagagggtgacagttctgatgagtcctgacaagaaaaacccagggtcaggaggcctgtgtccrcgcagagccaggggaaggcttgggctggacttggggtttgcatccttctgacccctgctctctggggtcctcactcggcccgatgacactgttcagtcct

SEQ ID NO: 390011 - DNA, 201 bp, Homo sapiens
caggtgtatgcagttgcttcacgtccagccacaccccctcacacacatgcagatcagccagcatggcacaccagacacatttctgctgcacctttccccayacagtacctaccacctggcgtgcctctctgcccatccccatctttttgatattttaccttccacctaaatccgaactgaaatcccagacctcactagctg

SEQ ID NO: 390012 - DNA, 201 bp, Homo sapiens
ggcgggcatttgccatctgtcactgcctatttcagaccacggaggatcaggatggacgcccacccctgtgttccagcctccggttgggatcacatgctcayggcatgctatgtcctgatgccaccacctggccttcacctcttccctgcctcctcatcctctgcaggtgccagtgctgaagcccatggatctgatggtgga

SEQ ID NO: 390013 - DNA, 201 bp, Homo sapiens
gtaagtggcagggatgggcttctccacgtctcccctgtgatattaggcaggtgtatgcagttgcttcacgtccagccacaccccctcacacacatgcagaycagccagcatggcacaccagacacatttctgctgcacctttccccacacagtacctaccacctggcgtgcctctctgcccatccccatctttttgatatt

SEQ ID NO: 390014 - DNA, 201 bp, Homo sapiens
  misc_feature (1)...(201): n = A,T,C or G
ggcgtcttcctgccccttgcctcagtttcctcaccagcagcatacagatgaccacgtttcttctaggcttcttgtgagcatgcaggggtggtgtatggctntaaagtgcttttcacctatagctgagggtggagagcaaggcagataatcccttgttataagaagggggaaactgaggcccagagagagacagcaactcac

SEQ ID NO: 390015 - DNA, 201 bp, Homo sapiens
tggggtggtaagtggcagggatgggcttctccacgtctcccctgtgatattaggcaggtgtatgcagttgcttcacgtccagccacaccccctcacacacmtgcagatcagccagcatggcacaccagacacatttctgctgcacctttccccacacagtacctaccacctggcgtgcctctctgcccatccccatctttt

SEQ ID NO: 390016 - DNA, 201 bp, Homo sapiens
cgaacgagataaaaggcccgaaggatacaacctgaaggatgaagaggggaaacttaaggacctgtccacggtgacgtcactgcaggtgagctccggcgagsgggaagcaggcacacgcctctttattacacctgaggattttagggctggaaaagcctttgagatttgagccagagtcaggtgcagaccctggttgggctg

SEQ ID NO: 390017 - DNA, 201 bp, Homo sapiens
ctacagaaaaggtcatctttcagcactccctacactccgctcccctcaaagcttcccacctgggtttgaatcctggcttcactctttcctaatggcagggycttgggtacctttcagatgctccactgaccccagttctcagttctcttcccagttccttctcatcaacatggtgctatttgttttgactcctgtagtagt

SEQ ID NO: 390018 - DNA, 201 bp, Homo sapiens
atatgtgtagaaaatgaacttcaatccatattttgtaccatatacaaatattcaaaatggatcatagatctcaatataaaccctaaatctataaaacttcyagaagaggaggtgaagaattttttcttaaaggaccagatagtaagtattttaggcttgtaggccatatggactctgttgtaatgatagaactctgctatt

SEQ ID NO: 390019 - DNA, 201 bp, Homo sapiens
gtccaacaccatgcccagctaatttttgtattttttagtagagacggggtttcactacatgttggccaggtggatctcgaactcctgacctcgggtgatcygcctgcctcagcctcccaaagtgctgggattacaggcatgagccactgtgcccagccaggacacacctggattctgtccctgccctgcctcccttgggca

SEQ ID NO: 390020 - DNA, 201 bp, Homo sapiens
actaccagttatgatatgaggtaggaaggaatacatctgataaaagacatgaaagacttatgcactgaaaattataaaacactgatgatagaaattaaagmagacctaaatgagtggagagatatactatgggagtggattggaagactcaatattgttaagatggcagttccccccaaattgatctgaaattcaacacag

SEQ ID NO: 390021 - DNA, 201 bp, Homo sapiens
agatgtttctaccaaatgctggtttgtatttcacttatattgtgagcatttttctatgtcttcagaacgcctagaaaataatatcctttttgagcagcatrtaaatcccatgagtgagtatgccagaccccctcagacgctccctgtgtctggacacagggctgcccccctttttgagcagcatgtaaatcccatgagtga

SEQ ID NO: 390022 - DNA, 201 bp, Homo sapiens
ctatgagaaaaacctacaggctaaatgaaagattgaatgctttctccctaagactgggagaaggcaaaaatgtctactctcagcacacattcttctcgacrttatagctagtgcaataaagcaagaaagagaaaaaaagatgttcagattagaaaagaagaagtaaaactgtctttattcacagatgacatgattatttat

SEQ ID NO: 390023 - DNA, 201 bp, Homo sapiens
ggctctatacggagggctgtgtacacatcatctcatccatccacacagccacctgatcaagaggattctgtgatttttccgcgcattttataaataaggaractgaagcgtgaagaggtgggtgagtccctcatggccacaaactgtgagtgttggggccagggtctgaccccaggcagcgtgtccgcagagccccaaggt

SEQ ID NO: 390024 - DNA, 201 bp, Homo sapiens
gaagtcacttcccctctgagtctctgtttgctggtctgtgaaatggggagagtcgtggtgctcaagcagaggaggcctggagggtagaatgcgatggtgcrgggaggacttagtggggtgtccagcttgtagcaggcgctggggaacattcgcattagcaagttagccggctcgggtgtgagtgtttcatgggaccgcacg

SEQ ID NO: 390025 - DNA, 201 bp, Homo sapiens
gaggccctgagaggggacagatccccgctccctggccaaggtcgctcagcgagttggtagcaaatagctaatattaagccagttcgtttggaattctaggsagaaatggaaatatttcaatggcacagataaaaaaactgaggctcagggtggctgaggctgcctgggatcaagcgatttacaatggagctgagattcaaa

SEQ ID NO: 390026 - DNA, 201 bp, Homo sapiens
cctggccaaggtcgctcagcgagttggtagcaaatagctaatattaagccagttcgtttggaattctaggcagaaatggaaatatttcaatggcacagataaaaaaactgaggctcagggtggctgaggctgcctgggatcaagcgatttacaatggagctgagattcaaacctgcagctcccgacaccagcctgggctcc

SEQ ID NO: 390027 - DNA, 201 bp, Homo sapiens
ttttgtaaatttgtttaagttctttgtagattctggatattagccctttctcagatgagtagatggcaaaaattttctcccattccgtaggttgcctgttygctctgatggccattttttttttttttttgctgtgcagaagctctttagtttaattagatcccatttgtctattttggcttttgttgccattgcttttgg

SEQ ID NO: 390028 - DNA, 201 bp, Homo sapiens
cgttgtttgatttttttttgtaaatttgtttaagttctttgtagattctggatattagccctttctcagatgagtagatggcaaaaattttctcccattcygtaggttgcctgttcgctctgatggccattttttttttttttttgctgtgcagaagctctttagtttaattagatcccatttgtctattttggcttttgt

SEQ ID NO: 390029 - DNA, 201 bp, Homo sapiens
ttcgttgtctcacttggtgctcagagacagtggtaatttgatgatcaccccatttcacagatgaggaaacggaggctgggggagatgagggactggcccasagtccccagttggcaggggcagagccagagctcatgctcgggcctccatgcctggtccagggcttttgccctggcctcggcctgccccctgcagccctgg

SEQ ID NO: 390030 - DNA, 201 bp, Homo sapiens
ctgctcccaaattcatttattcctcaagtcaggcctgagttggacacgtggaatccaggagcaagtcagggcccaagacacgagggtggccagagcctcaagccttggcgtcaggcaggcctcggcagaggggtgctcgccggagagtgacctcacggctctgggaagtcacttcccctctgagtctctgtttgctggtct

SEQ ID NO: 390031 - DNA, 201 bp, Homo sapiens
accctggatgaatggtcaggatgtggcacaggcagctgctgccccagcttgtgccttcagtgaaaccttcctctgcctgggtgacctgcgttgtcctggccagactggggagcgggaggactccactcttgcccagctgtcacagccctcagactgagctaggtggtttttgctcaggcctgggcccttgtcctcacccct

SEQ ID NO: 390032 - DNA, 201 bp, Homo sapiens
cgaatatttcgactgaattcagaattctgggtttccaggttttaacattttctttcggcacattaaaagagtcttctgggtgccattatttctgctgacamgtcagcagtctctgagtcctggtgtctctgaatgtaatatgttgtttttattctagctgctttaacattttctcattatttcagtttccagtagtttgca

SEQ ID NO: 390033 - DNA, 201 bp, Homo sapiens
caatggtgcaatctcggctcattgcaacctccaccacctctcaggttcaagcaattctcctgcctcagcctcccagatagctgggattacaggcgcccgccaccatgcccggataatttttttgtatttttagtagagacagggtttcatcatgttggctaggctggtctcgatctcctgagctcaggtgatccacccggc

SEQ ID NO: 390034 - DNA, 201 bp, Homo sapiens
ctggagtgcaatggtgcaatctcggctcattgcaacctccaccacctctcaggttcaagcaattctcctgcctcagcctcccagatagctgggattacaggcgcccgccaccatgcccggataatttttttgtatttttagtagagacagggtttcatcatgttggctaggctggtctcgatctcctgagctcaggtgatc

SEQ ID NO: 390035 - DNA, 201 bp, Homo sapiens
ctttgaaattaaaactcagacagttaaaaagatttatatgaattcattgaaaaataaaaagtgtaaacccattacatgttaacgtaaataatattttttttggaaaataactgtgttttgttttaaaaagtgagaagagtggcgtgtgtatcaatctctttaatctctagcttaatagatgatggttggattctcacatca

SEQ ID NO: 390036 - DNA, 201 bp, Homo sapiens
aaacactaaggaatgttgcttacatcaatagacgccttagttacttaggtcaatagataccttagttgcttagatcaatagatgccttagtagatcaaacrcccaaatcacccaatgtacttttagggcaatggttgccaaactttttggtcttaggacccctttttacactcttaaaaattattgtggctcccaaagagg

SEQ ID NO: 390037 - DNA, 201 bp, Homo sapiens
cgagacagagctgcagttctggtccaaagccgtctgttggcagaaccccctccttccccaggaggtgcctcatgatttcaccttctaaagtggatcttctsttccatccggctgcttaattatgtgactcgctttattttgttctgtttttaaagataaaactatcaaattatggaagattaccgaacgagataaaaggcc

SEQ ID NO: 390038 - DNA, 201 bp, Homo sapiens
accagcctcagcccagaccctgcagctctccaggtgcaggaccagggcaaagctccccaacagtgggaacagcccatgtgagggccctgtggctggatacrgaggctggagagaggaggtgaggtcagagaggtgtgtggctggaggaggcctcacaggccagagcaagagcttcgggtttcctctgaaagggacaggaac

SEQ ID NO: 390039 - DNA, 201 bp, Homo sapiens
atctctcccctgcccttactagctgagcggctgttggcaagttgtcttctctgtgcttcagtttcttcatctgtgcaatgggggtgataacagcacacaasaacatcttggagttgttaagaagattcagtaataggtgtaaaatgctaaagctggggcctggctcccaggaagtgcccagaaggtgtactgtgataacca

SEQ ID NO: 390040 - DNA, 201 bp, Homo sapiens
tgcaggaatcattttgggccttttgagggtctctttcatagacgtgggtggggcgtctgctcagcacctgctttctccttcaccaactcctcagcctcccrtctctgaccccataaacgctgagaggagaaccaggcctggggggcaagttcaaggactcaggaggcagaccgctggaatccaatctctcccctgccctta

SEQ ID NO: 390041 - DNA, 201 bp, Homo sapiens
cgaagacgctgatgggaaagagagacacgggtgagcaggggctgtggggcatcatgagagttgggagggtccccatcgtggagctggccagccctgagtgsgagccccggcacagtcctctgctagctgtggcctttggccagtctccacttctcagagtctcagtgaccccagctgccaccaccaggattgttggggtgt

SEQ ID NO: 390042 - DNA, 201 bp, Homo sapiens
tttccttacaattttttcatttgtttaatagtttttatttttcaaagtcttaaaaaacacaagtcagtgaaagttttggtctttgttactgtcttcctacyaggtacgagggcctgaaagtcactgttaattgattattgattatctgattagaaccgtacatttactttttaaggaaatgtgaaaaataagcctagaaat

SEQ ID NO: 390043 - DNA, 201 bp, Homo sapiens
ttggatacccaccaaacagtcttgatcttaaaactttgtgcaaagcaataggatgaacttgtaggacatgcataaagaggaaggtatggattgtgacatgmggctcttagggatgctcctcctacagtgctgagtgaccctcctcagaggcacaggtgtgggcacagcttgttctttcaaatcctggcaccccagctgttc

SEQ ID NO: 390044 - DNA, 201 bp, Homo sapiens
tttgtttctcccctgccagcaaactcctttggaccaagaattgatgccatggtgttagcatacaataaagcttcaaggagctggtgaaacactctgagacsgtcataaaattggcttttcatccctgtcggagctttcttattacagacaacaagcagtgtcagggagcagcacggtagatgctgcttaacccagcagcag

SEQ ID NO: 390045 - DNA, 201 bp, Homo sapiens
aacatttcaacatgtttcccctcgtgcaccgaggaggcatgcactctcctctgagggtctgaggctttcttcacggagactttgtaaaccacttctccccmgcactctggagtgggggagtcacgtagggaagtcatttctctcctcttggacctctcagtcccctttggcttctcgctgataccaggcagtcaggtggat

SEQ ID NO: 390046 - DNA, 201 bp, Homo sapiens
ccaagcactttgggaggctgaggtgggtagatcacttgagctcaggagttcaagaccagcctgggcaacatggtgaaactccatctctacaaaaaatacamaaattagccaggtgtggtggcatgcgcctgtagtcccagctacttggtggggctgaggtgggaggattgcttgaacctgggagggttgaagctgcagtga

SEQ ID NO: 390047 - DNA, 201 bp, Homo sapiens
gtggactcaccacctgactatgctgggagctccacggtcaagggtctttattagaaggagctctgctgcctaaaccaggccaagcactgctgaggaaagcyggggacagattccaatccaggtctgacattgccagacattctgtcccaatgttaaagtctgctcccaaattcatttattcctcaagtcaggcctgagttg

SEQ ID NO: 390048 - DNA, 201 bp, Homo sapiens
aggtcacttgggcagcaggtgaacatggctcaggagaggcaagggagggtggggacaggtaggaagcagaagccacttactgggcaaagaccatagccatraggatggggagggactgagtagccagagaggcgctcatcaaagcctactgctgtcgtctgaaggtctggtttctcccaaattcgtatattgaaattaagc

SEQ ID NO: 390049 - DNA, 201 bp, Homo sapiens
gaagattaatggtttaacagcctctgtggttgaagaaggcaagggtgaaggggctggggacggttgttgaatgagccacactgaggtaagtccatagtatrctttgcctcatctaagcctcccagctgtcctgggaggtggggccggtattctccccatcccattttattggaagacaattgagttaaatggcaaatctgt

SEQ ID NO: 390050 - DNA, 201 bp, Homo sapiens
agaggatgggttggtcttgcagtctcaggggtagcagaggcgaaagaaaatcatgtataagtgaccctcacagctcagctcatgtttgagggtcaactgtrttctaaaatccaagaggctctgaaagcctaaagattttttcctaacttatttggcagtgaaacccaacctaaattgatgtgaaaccatttatagcccttc

SEQ ID NO: 390051 - DNA, 201 bp, Homo sapiens
gccagctttcagccccagtaacaggccagggagatggatggacattctcgctgcccagggccaggcaggcactgcgctcagggtgccctcaacatggagcrttcacgaccaccccctcttcttttcttttcaccaatttaaccattttagagtgcacagttcagtagcatttagtatattcatgttatacaaccatcacca

SEQ ID NO: 390052 - DNA, 201 bp, Homo sapiens
ctgggaagattaatggtttaacagcctctgtggttgaagaaggcaagggtgaaggggctggggacggttgttgaatgagccacactgaggtaagtccatartatgctttgcctcatctaagcctcccagctgtcctgggaggtggggccggtattctccccatcccattttattggaagacaattgagttaaatggcaaat

SEQ ID NO: 390053 - DNA, 201 bp, Homo sapiens
tggaatgccgaggtgggagtggcgggcggtggtagggggagtgcactgggtgggctggcaaagccaggttctgagccccctgccctcagccgatgtttgcrgagagctgcctgcatcccatgctctgtcctagaccctggatgaatggtcaggatgtggcacaggcagctgctgccccagcttgtgccttcagtgaaacct

SEQ ID NO: 390054 - DNA, 201 bp, Homo sapiens
gtgcacagagagccattcagcaacagagcagaccctcgaacaacacggggttgggggagccaaccccctgcacagtcaaaaacccacatacaacttttgamtccccaaaaacttaactaatagcctcctcttgattggacttccaaaaacatgaacagttgataaacatacattttgtatgttatatgtattatatactgt

SEQ ID NO: 390055 - DNA, 201 bp, Homo sapiens
gagatggatggacattctcgctgcccagggccaggcaggcactgcgctcagggtgccctcaacatggagcattcacgaccaccccctcttcttttcttttyaccaatttaaccattttagagtgcacagttcagtagcatttagtatattcatgttatacaaccatcaccactatctaggcccagaacattttcatcaccc

SEQ ID NO: 390056 - DNA, 201 bp, Homo sapiens
accatttcccagatgatgcaccagggatgttaagtaaccaaggaatatggcagggccactgggatagtgggctgttagaaaagtcagggtggaggccgggygcggtggctcatgcctataatcccagcactttgggaggccgaggtgggcggatcacgaggtcaggagattgagaccatcctggctaacacagtgaaaccc

SEQ ID NO: 390057 - DNA, 201 bp, Homo sapiens
actggaaatgtggatttttataggaaatcttctacttttcaaatattaagaatgacttcaaattaaaagtaataatcattttggggctgcagtaaaacttkttggtggagcaggcctcaggcttcaggttggtgagctgtcctccagtgggggtttctcttccaggctagggccttgtcctcccctgctctcccccactcc

SEQ ID NO: 390058 - DNA, 201 bp, Homo sapiens; identical to SEQ ID NO: 85381

SEQ ID NO: 390059 - DNA, 201 bp, Homo sapiens
aagttgttgaggatgaactgagtcaattcaagggaaagaatgaggacagaacctggcacaaaaaaatacagtcaaattagctattatagtgactgcatgtrtagttgaacccagggtctggatttggaacccgtatgcttattggcccaatgggggggatgacttggccacagaacagccacagccaggcagtaaagggca

SEQ ID NO: 390060 - DNA, 201 bp, Homo sapiens
gtaggaggaaattattagtcctagattgataatttctgcaagcatccttagcaaatcatcaaagcaaaacttttgaaagggtgaaactgtttcatttttgtttttttagacagggttttgctctgtcacccaggctagagtgcagtggtgtaatcatggctcacagcagccttgatctcccaagttcaagccatcctcctg

SEQ ID NO: 390061 - DNA, 201 bp, Homo sapiens
gagcctcctctccctcccggcagcagttctgtttcaaagcgccttggcatcttttagctgattttcaccacatcccctggaggaaggctcagtgacctacyatctccatttccaggtggagaaagtatcctcacctcactgtcaccctcgtgcaatgttgctttctcttggaatcactgccagagcatgggatgaacccag

SEQ ID NO: 390062 - DNA, 201 bp, Homo sapiens
tccattttgctaaaggtggtatcacagattttggagactacagaatccaggccaggagagcaaagaacgacagaggtcccattcacagcagcgggccatcmcgggctcctactagcttttgctgcttgggcctatggggatggtattctagaactttccatcttccaagacatactggaaatgtggatttttataggaaat

SEQ ID NO: 390063 - DNA, 201 bp, Homo sapiens
tcatccccaggttgcgagcccctctgcatgccaggtactgtgccaggcaccggtgatctgggagtgcccgggacactgttttcgtgggtgctggtctgcaygggccccaggcctgccccagctgctgtgttctggggccaactgtccttccagcctcctcgatagccatatggcattccctgtgccgacgatggcttgatg

SEQ ID NO: 390064 - DNA, 201 bp, Homo sapiens
agtgggccagcctgcgcaggtcctgctcctggtaccgccagaggcgttgatggcaacccccagtacctaagcccctttgcatctctgtttgcggcttgtcraattgccgttctgcaggccaaagcaaaacacagggacaagcccagaatcaaggtggggggcagagaacaggtcacctggcccaccatgggaggggtgaag

SEQ ID NO: 390065 - DNA, 201 bp, Homo sapiens
catacccttgcattgggtggtcagtggagaaagggaccttgggcgcaggcagctgaatgaagtaaggagggagcccagcaggtgtctggggtaggagttgttttttttttttttatggttcaatggtccattctgtttattcagaacagtaagataaatataccttaaatattacaaatttttatatacagaaatgaccac

SEQ ID NO: 390066 - DNA, 201 bp, Homo sapiens
tctctggcctggctactgcgtacaggcaccatttgaagccgtgaattaagcctgaggctcctgccctcatgaagtttacgttctggccaggaagagagccyacagatgataaaagcctttacagaaagaaaaacatcagattaggttggggcagggatggtcagggtgtcctgtatgagggtgctggggtgcagacagcag

SEQ ID NO: 390067 - DNA, 201 bp, Homo sapiens
ctcccagctgatgcctccctgtgcccggggctcccacctggacggcgtgccgcgtgtgcttggtgccctgggtgcttgctggcctccacctgggctgtgartgtctgagttaggggctgggtttgtgtcactccctcttgtattctgggcatctggcacccgtgtggtccaggtggccctccgtcttggagaccagtgctt

SEQ ID NO: 390068 - DNA, 201 bp, Homo sapiens
tggctcagaaggccagggcaggccaggagctgtcctaaaaggcccagactggaaaaagaaaaggcatttcttggatagatatctctggcctggctactgcrtacaggcaccatttgaagccgtgaattaagcctgaggctcctgccctcatgaagtttacgttctggccaggaagagagcccacagatgataaaagccttt

SEQ ID NO: 390069 - DNA, 201 bp, Homo sapiens
gcaggtgtctggggtaggagttgttttttttttttttatggttcaatggtccattctgtttattcagaacagtaagataaatataccttaaatattacaartttttatatacagaaatgaccactccgcagcaagtttgaaaagacaaaaaaaatcatctcctcctgctttataaaaccctagatgacccattaggcagaa

SEQ ID NO: 390070 - DNA, 201 bp, Homo sapiens
gtcaggacagctgggacctgaccctgttctgactccatgcccggtgggcgtttccgtgttcccacagagctgcttttcttatcttgtctttttaagttcartgacatgtgcatctgtcttgatggatggatggatacgtccagcccgtcatcccacttctaaccaccctctctcaatcttttctgttgcctcaaagctggc

SEQ ID NO: 390071 - DNA, 201 bp, Homo sapiens
cattttatacccaattttatatcccgttccttcaccctcagggggttttaatatgaaatagcaagaaccagcgccccatcggggaccctagcacagctggkctgggtggttctggcttctgcccagatgtgtctgggtgtccctgggccagggcaggctgccccacggagggacaatgtcaggacagctgggacctgaccc

SEQ ID NO: 390072 - DNA, 201 bp, Homo sapiens
ttttatagtccagaagttctttctataatgtcctcataaatattttatttggccttaggttaaatgtcagtttccatgtcctgccacgtgccacttgaccracgtgtgtgggaacgtctctactttggacacactgtctatatgaatggaggcccttctaccccttgaaatgttcctcaactcccagctcagtttcccttc

SEQ ID NO: 390073 - DNA, 201 bp, Homo sapiens
tgttttcatgttcatattttatagtccagaagttctttctataatgtcctcataaatattttatttggccttaggttaaatgtcagtttccatgtcctgcyacgtgccacttgaccaacgtgtgtgggaacgtctctactttggacacactgtctatatgaatggaggcccttctaccccttgaaatgttcctcaactccc

SEQ ID NO: 390074 - DNA, 201 bp, Homo sapiens
ttctttgctttatgacacttcatgctacatagagacttgaattttgtacacgtattgaattaaccacttttatgatgtccaggttttgcatcataccctgcccagtgttggtttaaataatttaatccatgtattttactattttgtttttgttttaaacatttaaccaagctggaattttactggggagggatcataagc

SEQ ID NO: 390075 - DNA, 201 bp, Homo sapiens
aactagattcaagttattttgcagtaccttgatctgtctagggaggggagatttctctctaaaaatcagacaaatggtttggctttagatcttaggggtgrtttactgtattggtgagagataaacagctagaattatattaatgttcccagttttagatttaattttcccatttacccaattatttctcacaagtttaga

SEQ ID NO: 390076 - DNA, 201 bp, Homo sapiens
tgtgatgtagttgtaatcttccaactacatctcagttttatttgtaattaaaaaaaacttatttttatttattacaaataaaaacctttagtttgtcaggmgaatgagcatttatgtgcagcaatgtaaatggactgtttttaaatggtccatttataggaaaagtgttgaaataagaggcaagtaagaagtcagggaata

SEQ ID NO: 390077 - DNA, 201 bp, Homo sapiens
ttgtcattgtaaccagtattttgctatatgtagtgctattgtgattacagtaagttagtgttgctcatgttgtgtaatatggttgctaagaacataccagrttgaactagagcctgtctttgtttattccttcaccaataaaagaaacattatgtaaggactcggctaatatcactggctcttcactgacttggttgggga

SEQ ID NO: 390078 - DNA, 201 bp, Homo sapiens
tttctgctgtatgaaccctttatgttttggctggctctcagaaattaagacagtatttaatatgtaattctaggcttttttttcttttagagttgctttgstttctttgtttcagtgtagtgacggtgggtgttttggcttgtatattcatttaacagtatgggtttagtaataaagtacaggatttctatccctgcagtt

SEQ ID NO: 390079 - DNA, 201 bp, Homo sapiens
cctttctggtttatttagcttattctttataacaatttttttaattagagaacattcctgtgtgggtgattcatggtgccttcttttctccccgccttctrcctttttagatcatgaatcggttcagtggtgttatgacaacttcattaactacaggtccctgatgtccgcagacaatgtacgccagcagctatctcgaat

SEQ ID NO: 390080 - DNA, 201 bp, Homo sapiens; identical to SEQ ID NO: 85409

SEQ ID NO: 390081 - DNA, 201 bp, Homo sapiens
aaagatgtttgtggtggagaatgggaaacccttgattgtagggtattttttattatttctgatagttacataatccattggactttttattcatttgaacrttggacatttactctctttgtgattataacgctaccgtgaacattctgcataaaattcagaatctgaattctaaatttttgtttttaggaaggatcgaga

SEQ ID NO: 390082 - DNA, 201 bp, Homo sapiens
taacagtacttacaaccaattcatttaatggctaaaatttacctttcagaattattttcctatctttttttttatttgcaaatttctgctgtatgaacccwttatgttttggctggctctcagaaattaagacagtatttaatatgtaattctaggcttttttttcttttagagttgctttgctttctttgtttcagtgta

SEQ ID NO: 390083 - DNA, 201 bp, Homo sapiens
ggaaccattgggaattgtctggatgatagaagttttggccatttaactaagtacttgcaatatgcatagttaataaagcacaataaaatatttccattaakctaatttataatatttatagtctgccatctgtaacatttcttcccttagaaaaataaaaaggaatgtctgttggttagctctgctccatattgtgattga

SEQ ID NO: 390084 - DNA, 201 bp, Homo sapiens
tcttaacaggtagttgtgtcaactaacatagcagagacgtctttgacaatagatggtgtggtgtttgtgattgatcctggatttgcgaaacagaaggtacrtatttagtggatactttataaattagagttggtttaacagtacttacaaccaattcatttaatggctaaaatttacctttcagaattattttcctatctt

SEQ ID NO: 390085 - DNA, 201 bp, Homo sapiens
gatccatgtccttgtctcatcacaaacacccattgtaacttataatgctggagagtggaaataactatacacaggacaggcagctccttagaaatgtagtyacttaccctcgtgtattacttctttcctccataccacatgtaccttggcccctgttactgtattgattaagggcctaaaactattttctgacatttttgt

SEQ ID NO: 390086 - DNA, 201 bp, Homo sapiens
aacaggttggtgaaaattgcccctcaatattatgacatgagcaatttcccacagtgtgaagcaaagagacagttggaccgcatcattgccaaacttcaatycaaggaatattcacagtactgaattcagtgcttagaactgaagttattgagaggacagctttaaaagatgaatgaactcaaaagttcgagttgtgctctt

SEQ ID NO: 390087 - DNA, 201 bp, Homo sapiens
cagtattcgtttttagactcacttttattttgtaggaaattgatgaagcctgtaagagaataaagcgtgaagttgatgatttgggccctgaagttggtgayattaaaatcattccattgtattctacacttccacctcagcagcagcaacgcatttttgagcctccacctcccaaaaaacagaatggagcaattggaagaa

SEQ ID NO: 390088 - DNA, 201 bp, Homo sapiens
gtaagtgtaaatttgattggagacactcttgtctaaatgtcacttgcagtgtataagatgtttctttgtcccactttgatttattatccgtgacaacttayattagaaacccagaggtacttttgaaaaactcctgacgagcatttaaaatagaaattgccaatctttttcaaagttgtttatgtttataatcaggggata

SEQ ID NO: 390089 - DNA, 201 bp, Homo sapiens
cgcatttttgagcctccacctcccaaaaaacagaatggagcaattggaagaaaggtaacattagaaatgctctttataaatatttcactaataatgatttwtgagatataaactgtattcagttataaaggactaagttatgggtgattgtgatctaggttttatacaacaaaataatatccatttgtagggttccgcata

SEQ ID NO: 390090 - DNA, 201 bp, Homo sapiens
tttctttgctttatgacacttcatgctacatagagacttgaattttgtacacgtattgaattaaccacttttatgatgtccaggttttgcatcataccctrcccagtgttggtttaaataatttaatccatgtattttactattttgtttttgttttaaacatttaaccaagctggaattttactggggagggatcataag

SEQ ID NO: 390091 - DNA, 201 bp, Homo sapiens
catacatttctttgctttatgacacttcatgctacatagagacttgaattttgtacacgtattgaattaaccacttttatgatgtccaggttttgcatcataccctgcccagtgttggtttaaataatttaatccatgtattttactattttgtttttgttttaaacatttaaccaagctggaattttactggggagggat

SEQ ID NO: 390092 - DNA, 201 bp, Homo sapiens
tcatacatttctttgctttatgacacttcatgctacatagagacttgaattttgtacacgtattgaattaaccacttttatgatgtccaggttttgcatcataccctgcccagtgttggtttaaataatttaatccatgtattttactattttgtttttgttttaaacatttaaccaagctggaattttactggggaggga

SEQ ID NO: 390093 - DNA, 201 bp, Homo sapiens
gtcatacatttctttgctttatgacacttcatgctacatagagacttgaattttgtacacgtattgaattaaccacttttatgatgtccaggttttgcatcataccctgcccagtgttggtttaaataatttaatccatgtattttactattttgtttttgttttaaacatttaaccaagctggaattttactggggaggg

SEQ ID NO: 390094 - DNA, 201 bp, Homo sapiens
tgtcatacatttctttgctttatgacacttcatgctacatagagacttgaattttgtacacgtattgaattaaccacttttatgatgtccaggttttgcatcataccctgcccagtgttggtttaaataatttaatccatgtattttactattttgtttttgttttaaacatttaaccaagctggaattttactggggagg

SEQ ID NO: 390095 - DNA, 201 bp, Homo sapiens; identical to SEQ ID NO: 85415

SEQ ID NO: 390096 - DNA, 201 bp, Homo sapiens
aaatggggaatacatactgatcaataaccaactgtaagaaatcacctgtaaaagaaggaactagtaagtaccttcttgttttgtttctgctttgctgtgcyttcattttagactttatttctccccctttatagtaatgcatttttaagcccaatcttctcaatttgtaacccacctagttcttttataatctaataacat

SEQ ID NO: 390097 - DNA, 201 bp, Homo sapiens; identical to SEQ ID NO: 85416

SEQ ID NO: 390098 - DNA, 201 bp, Homo sapiens
aatactggaatcacaaagcaaatgtctaatttaagcacttaatttttaatgtgtgaaatctggatattttgtgatttctgagcatttatttttcatttatrtacagtaaaattaacaaaattgcagatactcttaaatgttggaatcctagttttatattatgttcaaatgttttttaagttggagagctcttaatttttt

SEQ ID NO: 390099 - DNA, 201 bp, Homo sapiens
gtgacatcagtaaccagtgtggaatggacaggagatagctgacccctgcaaagttatacaatcttgacccttgatctcattgccttcattcttacgtggcrcctgtcttgtgataactggagtccatattagcagccttcacttgagccatccctaactaagcctggtttccctttttggttcattgatcaatctgacgtc

SEQ ID NO: 390100 - DNA, 201 bp, Homo sapiens
agcactgagtatcaagaggctgggaaatggagcaatagggtgtaaatatgctagtatttgagcaaatgttggaagagtaaccaatccttttttttttttttgccttgcaaatcaacagaccgctctattgaagctaagagaggtaactcacaaatagaggaagctgtatgttatgttctgctactgagatcatgtacaaga

SEQ ID NO: 390101 - DNA, 201 bp, Homo sapiens
catttctttgctttatgacacttcatgctacatagagacttgaattttgtacacgtattgaattaaccacttttatgatgtccaggttttgcatcataccmtgcccagtgttggtttaaataatttaatccatgtattttactattttgtttttgttttaaacatttaaccaagctggaattttactggggagggatcata

SEQ ID NO: 390102 - DNA, 201 bp, Homo sapiens
catggtgccttcttttctccccgccttctacctttttagatcatgaatcggttcagtggtgttatgacaacttcattaactacaggtccctgatgtccgcrgacaatgtacgccagcagctatctcgaattatggacagatttaatttgcctcgtcgaagtactgactttacaagcagggactattatattaatataagaa

SEQ ID NO: 390103 - DNA, 201 bp, Homo sapiens
aattacctctaaggtgtgctgtttcagctcccaaagatattcagtgctttgatttaaatgtcaatggcttcagatggttaacttttatttctcattccagrtggattaattaatgggtgttctaatatgttattgtattctttaattcaaaaatctatttcctatctccacctcacccatccttaatttctgaaatgggga

SEQ ID NO: 390104 - DNA, 201 bp, Homo sapiens
tacatggattatggattttggtgggctcaatatttaaaactttgtaccttttgtctttatatctaaagttttatatttcatactgctattctgtggtctgrttatgggtagcctcatttcagagatgagtttattaatggttagtgtagaaggaggtcaggtcaactcaagatgaggtttgtgattatttggattaatatt

SEQ ID NO: 390105 - DNA, 201 bp, Homo sapiens
cctcgtgtattacttctttcctccataccacatgtaccttggcccctgttactgtattgattaagggcctaaaactattttctgacatttttgtcccccaragtctatgatgttcccctttttgctgtgttgtgtgtgtatactattcattggaatgtagactcatcccttgttgatacaagtgttatagaagggttcata

SEQ ID NO: 390106 - DNA, 201 bp, Homo sapiens
agggaaaggaacaaaaaaaagcccagctcttcaaagtttgggtggacttcacttttgtttttgttttttaatttttagtatgatagtggattttatagatsgttttaaggaattaattttgttttctaaataccttgtaaatagcttcgtaatgacatagtgcttacaaaagtaaagtaagtcattgtgcacaaaagataa

SEQ ID NO: 390107 - DNA, 201 bp, Homo sapiens
taaatttgaatagcctccatgaaattgagtaatctcataaaaatttaaaactggtttttaagaacatattctgaccactaaataaaagtgcttctgtagtyacatgagttaatttgggagggagagagaacagtttaaagtgttgcctagatagtaattagataagagtgattgtaattaaataattttatttttaatttt

SEQ ID NO: 390108 - DNA, 201 bp, Homo sapiens
atttatttgttcttactgtgtttaagaacgttgtgttttttgatatagagacacagttggacattaaaaaaatataaagtaaatgtcctaaaattcttcckcaccgtttagtatcattgtcctttgaaaaaaacacgcactttgttgacaagggtagcttctgattgggtcatttattggacaggctgcctagtgtataat

SEQ ID NO: 390109 - DNA, 201 bp, Homo sapiens
ggttgagaaaagcactgatgtagcttccctggacagtcctagggagagtaaaggaagacttccttggcagttgctgcatcattttcattatgaggaagaamattctgaggcgcagcatgttaagcacaaatttaaagttttcatacaagcctggcttatagaggagggatctatacaagttttactgttcatatgtaattt

SEQ ID NO: 390110 - DNA, 201 bp, Homo sapiens
atggatgtgatgttgggccaggaagttggttactccattcgatttgaagactgcagtagtgcaaaaaccattcttaagtaagtactatatctttaatgacrcttttagtcctctgcttgccattttctgctattagatagaagactttgctagtgcaggcttatgtcatccaaatttagaattatccaaagtaggccttct

SEQ ID NO: 390111 - DNA, 201 bp, Homo sapiens
ggcgcagcatgttaagcacaaatttaaagttttcatacaagcctggcttatagaggagggatctatacaagttttactgttcatatgtaattttaaacttactgtttgtgtctaattgtgaaaaaatatttgatttttttgttaaactgttctaatataaggatagtagctagcataaagcaaatatataaaagttgaaag

SEQ ID NO: 390112 - DNA, 201 bp, Homo sapiens
gagatttctctctaaaaatcagacaaatggtttggctttagatcttaggggtggtttactgtattggtgagagataaacagctagaattatattaatgttyccagttttagatttaattttcccatttacccaattatttctcacaagtttagaaatacagtagaaccatcagatgttagttactagtcatttgttcttaa

SEQ ID NO: 390113 - DNA, 201 bp, Homo sapiens; identical to SEQ ID NO: 85410

SEQ ID NO: 390114 - DNA, 201 bp, Homo sapiens
ggagggatctatacaagttttactgttcatatgtaattttaaacttactgtttgtgtctaattgtgaaaaaatatttgatttttttgttaaactgttctartataaggatagtagctagcataaagcaaatatataaaagttgaaagtttttgaacaaatataatacttaatacaaattttaatttccatcaaattaattg

SEQ ID NO: 390115 - DNA, 201 bp, Homo sapiens
tttttaaaagtgattttcttcataaatattttcagaactatggttttcaccccagaattccagaaagccagaagacgtcttctgtatttacaggcatgtarttggttctgtatagatttgagatagggtctcagtctgttgcctagggtggagttctgtgccatgatcatagctcactgcaacctgaacctcctggactca

SEQ ID NO: 390116 - DNA, 201 bp, Homo sapiens; identical to SEQ ID NO: 85411

SEQ ID NO: 390117 - DNA, 201 bp, Homo sapiens
tggttgtatggtgtgccatttacaattagaacatggttagggcttgcctcactcaactgctgaagtaccaaagaagcttttatcttgtcatttattagttygcttttgcattgtgtgtgtgtgtatttagccttagctatttttagtccttgagaaaggcctaaaacttgtgcttttttgttaaggactcaatttaacact

SEQ ID NO: 390118 - DNA, 201 bp, Homo sapiens
acagacatcttcaacttaatatcagtaacctgttcctgaaaatcatgtcctgagttaaaatactaatgaggaatccccatttcccattgtttaaaaaaaarttatatgtaacatgtatttcccaagtccttaactaattttctaaaacatatgtaatatatagtaaaacatgcacgtataccaaacaagctatcatattag

SEQ ID NO: 390119 - DNA, 201 bp, Homo sapiens
attccaagaccctccccctcccacgcctaaaaactggaatatgctgaaccttacttacatatactatgtataaatatctttctttacaatttcactgataraagatgcattctttctttagatgtgatttttttgctcttttgttactaggtttcaactttttttctttccttactaactttcagcgtttcacttaaagga

SEQ ID NO: 390120 - DNA, 201 bp, Homo sapiens
acatttggtagagctgtccttattagttaaaggtgaggatttagcctttaatcactgattgccaccttttcaaataagagaagctcttaaaaaaaaaaaaagcaaaaaactttgccagatccccacgtgttattatttcgatatatccatatatatatggatatgaaaatatttggaatattttcacgaaagctttttaaa

SEQ ID NO: 390121 - DNA, 201 bp, Homo sapiens
ttgctaagtgacaaatgggtgtatagtgtatatagcatactactaagaatggtgcacaatttaaacttgatgaattttttctggaatctttaaaatttttyctgttgacactgcttaactgaaaccatggaaattgcgagttcagatgagtgaagactactatacgaatttctttctgcagttgcgagttttatggacagt

SEQ ID NO: 390122 - DNA, 201 bp, Homo sapiens
tacattttgctttttccatccagtatgcatcaagattaagtcttacatgatagcattaaaactaaaaaaggtgacagttatatgagcacatttttttttttcttcaaaagttattatgggggggtttgggtaaattgaattatcctctgggcatgaaaatgtgagaattcctaagttttctttggggaaaaacagtttgat

SEQ ID NO: 390123 - DNA, 201 bp, Homo sapiens
ccaaggttttagtgagaacctgaaagtagaaattaagaactcttatgaaactttttatggaggaacctttttatatctggtccacttatttttttttttttgcattttctgttttttcctatttgcaaagttttgttttaataatggtagcaataattatactgcatattaatgttttcttttagcaatctgaattacata

SEQ ID NO: 390124 - DNA, 201 bp, Homo sapiens
tggaaattagattttccctaaaggagaagaaatattgttaagaaacaaatgaatagctattcttacagctaaaaatagaaaataagttcttactgacgatyaaaatattctctgctactagttttagcacgggagagaactgactccctattgctgagtggtttattgaacttaatgctgcaaatatttcaaaatattctg

SEQ ID NO: 390125 - DNA, 201 bp, Homo sapiens
cactgccctgatagagcggggcttttccgcttacgcacggccgcgtcgaaaccgcggcatccaaatgtcttcagcattaagatgccaggcctcgggtgtgwgaggaaaccgagatgcaggagagggcgagaagaaaggaggccgggagaccctggggcctgggaagtgaggggaggggtaccgggaaaaccgcggctggca

SEQ ID NO: 390126 - DNA, 201 bp, Homo sapiens
gtgacagcagggagagaaaatgagaaagaattcagggctgcctatgtgattctgatccccccactcctttctcctagggctgagccttcaggcagcttctsgtcaggaggtataccaggtgagagaaaacaagaaggcaaggaggccaagtaggcatcaagaatgctgggagggaggcagggctactaagggaaggatggg

SEQ ID NO: 390127 - DNA, 201 bp, Homo sapiens
agtgggggtggcagagcccaaggttgggtggggaagaatgggagatgattggaatgggaggtgggaacctctgatgaatgggggacttaagctcaaacggsggcttaggaggtgggaagtgaggacagaagggactctaggaatttcagaagactgtaactggggagttttgggggaaataatctattctttgctgactaa

SEQ ID NO: 390128 - DNA, 201 bp, Homo sapiens
tggcaggggaagtgactggagttactctcactggagagggtcaggcagatctcacccttgtcagcccagggctggaccaactcaacaggcaactacaactkgtcacttacagcagccgaagctaccagaccaacacagcagacacaggtgcaaggcctgggtggagagacgggcaggctgggcaaacagagaagaaccaga

SEQ ID NO: 390129 - DNA, 201 bp, Homo sapiens
acctcaccaaggcctttgaccctgcagagctgagggctgcctctgccacaagagagcaggagttccaggcctttctgtcgaggtaccagcttgaaagaagygcatgactcctcagggggagagcagtgattgtgccgggagggagagaccctctccccccgactctgctctgtcctctccttcctccactgccaggagcca

SEQ ID NO: 390130 - DNA, 201 bp, Homo sapiens
tctgggctatggccagagctgtccagccacacaatgggtgcttcaactggaccagcagggccagagggagaaagggggcctttgttcatctggggctggarcaggccagagggaaacccgagccttgggtgtgtctcccctttaggccaactgtggggggccccaggaagagacttgtctaaggagttagaagactatatt

SEQ ID NO: 390131 - DNA, 201 bp, Homo sapiens
gggaaccccagaacagttctgcagtgatttaccaagacctgcacctgggcgagagacagctcccaccctctcccagccccgcatactctttttttttttttataaatatatatattttttgttatactttaagttctagggtacatgtgcacaacgtgcaggtttgttacatgtgtatacatgtgccatgttgaatctcca

SEQ ID NO: 390132 - DNA, 201 bp, Homo sapiens
tattgactccatttacacaagagtaagactgagacccagggagttgatttacatgctcagggtccttagaaacaagcctttgcacacacactttccacacyctaaatttgagagttctcccttaccagtcggccttctgcaccctcaggatccctcactgtgtactcccctccacccccagaattcttcttggatgggctt

SEQ ID NO: 390133 - DNA, 201 bp, Homo sapiens
cgggaaccccagaacagttctgcagtgatttaccaagacctgcacctgggcgagagacagctcccaccctctcccagccccgcatactctttttttttttttataaatatatatattttttgttatactttaagttctagggtacatgtgcacaacgtgcaggtttgttacatgtgtatacatgtgccatgttgaatctcc

SEQ ID NO: 390134 - DNA, 201 bp, Homo sapiens
ctgggaagtgaggggaggggtaccgggaaaaccgcggctggcagtgcaaaccctagcgcgatgtgtggagtggagagcgcccttgggagccggcaggagcytctgaggacgcgggggccaagggccccatcccttgccctcccttcttccctccctttctcactccccaccctacccccacctaggatgtggctgggccgc

SEQ ID NO: 390135 - DNA, 201 bp, Homo sapiens
accgggaaaaccgcggctggcagtgcaaaccctagcgcgatgtgtggagtggagagcgcccttgggagccggcaggagcctctgaggacgcgggggccaarggccccatcccttgccctcccttcttccctccctttctcactccccaccctacccccacctaggatgtggctgggccgccgggccctgtgcgctctggtc

SEQ ID NO: 390136 - DNA, 201 bp, Homo sapiens
aggccgggagaccctggggcctgggaagtgaggggaggggtaccgggaaaaccgcggctggcagtgcaaaccctagcgcgatgtgtggagtggagagcgcycttgggagccggcaggagcctctgaggacgcgggggccaagggccccatcccttgccctcccttcttccctccctttctcactccccaccctacccccac

SEQ ID NO: 390137 - DNA, 201 bp, Homo sapiens
ggcgccagccaccacgcccagctaatttttgtatttttagtagagacgggctttaccatgttggccaggctggtctcgaactcctgagctcagatgatccrcccgcctccacctcccaaagtgctgagattacaggcatgagccaccgcacctggccaacactcactttcaactaaagtaaataaaggagtgatttttttc

SEQ ID NO: 390138 - DNA, 201 bp, Homo sapiens
agccggtctcggaatctcacgttcaattccttgaccggcacgagcagcgccaggctgagcgcggagatggtcagttcggccggactgctccgaggcagcgyagtcagcaaggaggccagcgtctgagggcaggggcgatgagcagagggccccgtgccagggctcatgcgccccggcgcgggacccccagagcgaggccct

SEQ ID NO: 390139 - DNA, 201 bp, Homo sapiens
agttgtcatgtctctgtagtctcctttaatctggagcagttcctcattctttgtctttcatgaccgacatttttaaaaactactagccagtttctttttctttttctttttttttttttttttgagacagagtcttgctctgtcacccagactggagtgcagtggcgaaatattggctccctgcaacctttgcctcccaag

SEQ ID NO: 390140 - DNA, 201 bp, Homo sapiens; identical to SEQ ID NO: 85417

SEQ ID NO: 390141 - DNA, 201 bp, Homo sapiens
ctactcccagggcttcccctagttcagaccacagtcggtgcaacccatctggcgtttatttaacctctgggagtaggggtaggtttttcgattttcaaagyacaagtatattgactccatttacacaagagtaagactgagacccagggagttgatttacatgctcagggtccttagaaacaagcctttgcacacacactt

SEQ ID NO: 390142 - DNA, 201 bp, Homo sapiens
tcgggggagagaaagaaaggtggcagagggccatgtcctatttctgcagcctccccaaccacacacacctttctgccagggctggttcgcaggccggaacytggccgtgtctcaagtaaccaccaagtacgtgctgtgggtggacgacgacttcgtcttcacggcgcggacgcggctggagaggcttgtggacgtgctgga

SEQ ID NO: 390143 - DNA, 201 bp, Homo sapiens; identical to SEQ ID NO: 85420

SEQ ID NO: 390144 - DNA, 201 bp, Homo sapiens; identical to SEQ ID NO: 85422

SEQ ID NO: 390145 - DNA, 201 bp, Homo sapiens
aactgtggggggccccaggaagagacttgtctaaggagttagaagactatattcccaacccaccccttactagagggcaaaggtctttactttcctgagakcccatttctcttccagcaaaagaggcctaaaagccctctttgcttctccccaaagctggtttgttgcactaagtttgcttccaccttagggcctttgcac

SEQ ID NO: 390146 - DNA, 201 bp, Homo sapiens
gtccagtcattgcccaggcactgggccccgctcttctccacacatctcaccattacactgagccaggaggaggcggatcctagcatctcgacatcggctgrccagctgcagggatggggcaaaggggttaagtcccagatcagagggtatgagtgagatgctaaggggtttctcctcaacctaccctctccctcacctgca

SEQ ID NO: 390147 - DNA, 201 bp, Homo sapiens
ccagtcattgcccaggcactgggccccgctcttctccacacatctcaccattacactgagccaggaggaggcggatcctagcatctcgacatcggctggcsagctgcagggatggggcaaaggggttaagtcccagatcagagggtatgagtgagatgctaaggggtttctcctcaacctaccctctccctcacctgcacc

SEQ ID NO: 390148 - DNA, 201 bp, Homo sapiens
aattttctttgttgttttttctcctacccattagaatgtaagttccataaaggtaagaaccttctgttcttgtccaccaaggcctagaaaggtgggacacagagtaggcacttaaatattgattggctgaaaacagaatgttatcccacccttcagggtcaaatgccatgtcctttcttcccagtccggttctccaccgag

SEQ ID NO: 390149 - DNA, 201 bp, Homo sapiens
aaattttctttgttgttttttctcctacccattagaatgtaagttccataaaggtaagaaccttctgttcttgtccaccaaggcctagaaaggtgggacacagagtaggcacttaaatattgattggctgaaaacagaatgttatcccacccttcagggtcaaatgccatgtcctttcttcccagtccggttctccaccga

SEQ ID NO: 390150 - DNA, 201 bp, Homo sapiens; identical to SEQ ID NO: 85426

SEQ ID NO: 390151 - DNA, 201 bp, Homo sapiens
gttgtcatgtctctgtagtctcctttaatctggagcagttcctcattctttgtctttcatgaccgacatttttaaaaactactagccagtttctttttctttctttttttttttttttttgagacagagtcttgctctgtcacccagactggagtgcagtggcgaaatattggctccctgcaacctttgcctcccaagttc

SEQ ID NO: 390152 - DNA, 201 bp, Homo sapiens; identical to SEQ ID NO: 85418

SEQ ID NO: 390153 - DNA, 201 bp, Homo sapiens
cttcttgatcttcctcagaccctttcccaaacccctctccctgggtctccagccacttacccctgcctcacttgccgcagcccagtgcctcctggctcccrctcctggtgctactgccccttaccaggctccccagggcataagcagctgcatcctgcacactcacaaacagctgatctggagtcaccctgtccaggagtc

SEQ ID NO: 390154 - DNA, 201 bp, Homo sapiens; identical to SEQ ID NO: 85425

SEQ ID NO: 390155 - DNA, 201 bp, Homo sapiens
ttcccaaacccctctccctgggtctccagccacttacccctgcctcacttgccgcagcccagtgcctcctggctcccgctcctggtgctactgccccttamcaggctccccagggcataagcagctgcatcctgcacactcacaaacagctgatctggagtcaccctgtccaggagtcctacccgggtcagtgtcccctgc

SEQ ID NO: 390156 - DNA, 201 bp, Homo sapiens
gaacccaagccgaaagctggtccctccctcttccccggcccaatttccctggcccctcagcagggatccccccgggttcctccccgggtcctccctcaccrtcaacgccccgctcccgaaggccacggccgcggctaccccaacccgttgagcgtccagctgctccttctcgattccgctcagattccccacgaggggttc

SEQ ID NO: 390157 - DNA, 201 bp, Homo sapiens
cttggtggggagcaagttgggagagggcagtcctgggaggggatatctacctgttcccctctcccaaccctccttgtctgcacccaaccctgtgcccccawtctcagcccagtacaacatcagcgctctagtcacgattgccaccaagaccttcctccgttatgatcggctacgggctctcatcaccagtatccgccgctt

SEQ ID NO: 390158 - DNA, 201 bp, Homo sapiens
acgtgctggagcggacgccgctggacctggtagggcaggggctgcaggatgtgggggtggagaagggccttgaacaggctaaggccacagcgggggcgctrcggccaggaacggccagccctaggacaaagagagaaccacgaagtggggcctgggaactgtctgggtcctgcaggggtgaagcggaagaggatggggcag

SEQ ID NO: 390159 - DNA, 201 bp, Homo sapiens
gcagcatctgcaaaggtgacaccactgaagtctaggaccaccaccctgacaggctcagcaactagaatgggagaagacaggagtacccaggtgtcaccatrcaacatgcccaaatcttccttcttgtcaccccatctcacctgcaaccattgggccatctggctttgaagtctcctataagtaaagaagggcagtcaccac

SEQ ID NO: 390160 - DNA, 201 bp, Homo sapiens; identical to SEQ ID NO: 85428

SEQ ID NO: 390161 - DNA, 201 bp, Homo sapiens
gcctttcgaaagcactcaaaagtctggagaagaatacaagctgagaagggtcgggggagagaaagaaaggtggcagagggccatgtcctatttctgcagcytccccaaccacacacacctttctgccagggctggttcgcaggccggaacctggccgtgtctcaagtaaccaccaagtacgtgctgtgggtggacgacgac

SEQ ID NO: 390162 - DNA, 201 bp, Homo sapiens
taatcccagcactttagaaggccaaggcaggactgcttgagcccaggagttccagaccagcctgagcaacgtaatctctaccaaaaacacaaaaattagcygggcgtggtggcacgcgcctgtagtcccagctacttgggaggctgaggtgggagaatcacttgagtccaggaggtcgcggctacagtgagctgagatcac

SEQ ID NO: 390163 - DNA, 201 bp, Homo sapiens
aaaaaaaagaggagaaagaaaagtcagcctggagggtcttggctaaaaaccataagcagagagtagtgggatgtgatttgggatacagctgtagtgactgmgtctgtggaagtcactggaggtgagaacagaccagggaagcatcacagtgtggagttagatgagatctaactgagctagcatagagccctagacagaagg

SEQ ID NO: 390164 - DNA, 201 bp, Homo sapiens
aacaagaaccagaaagtatatattggtgaagaggagaagaaaatatttctggagaagctgaagagagatgtggaggtgatgattgggtgctctgggaaatrgctttcctttttttgctccctagagggtagttgtctctttcattcacggtatgagggagctcctccccttccctttattcttcaggtcctctgcctatat

SEQ ID NO: 390165 - DNA, 201 bp, Homo sapiens
gctaacactccatctttgtaaaggtgagtaggcctctcagcccaccagctaaaagaaaaggaatctagtattcccccaggcttcctgggaaagctgtcctyttcctggagggaaggaagagtacagcagggtcctgggaaagtgaagaaagtgactagccctccagtctagaggggggagtgaaaaaggggtggatgaata

SEQ ID NO: 390166 - DNA, 201 bp, Homo sapiens
aaggggtggatgaatagaggttgttgccagtttgggagattcctgcctgtcttggctgaggaagtcttttggctggtggaaaaacctggcttgatgtggcyccagggaagtgagttggattgggcggagactgcttgatgtgggaagcagagcagagctttttttttttcttctttgagagtttttaactctatttgaacc

SEQ ID NO: 390167 - DNA, 201 bp, Homo sapiens; identical to SEQ ID NO: 85443

SEQ ID NO: 390168 - DNA, 201 bp, Homo sapiens
gtgagccccgcccctccctaaatgccagacttgggagctgacagacagcactgcctgtgctgggtttaaaaggtgacaatgagaactttgttattgcaggrgctgctgccactttgttcacatccttaacagacttcagcagaagggactgagttagctctcaaggaaggctccctggcaataggggctgaattatttggc

SEQ ID NO: 390169 - DNA, 201 bp, Homo sapiens
ggtccaatctggctcctctgcactaaagctgcaactcatggaaaagagggcaacggtggggtagacaagccatgctgtctccagacccactagggtggaargaaggttcctgtgggcctgtggacttaggctaatatttgctgtcagcagggcacttaagaatccagggggttttatgtaatgttgccaccacatggttct

SEQ ID NO: 390170 - DNA, 201 bp, Homo sapiens; identical to SEQ ID NO: 85447

SEQ ID NO: 390171 - DNA, 201 bp, Homo sapiens
ttagatactaggacatataggcactaaaggcagtggtatgccctgcaacctcaatttttatacttcctttccccagaagggccccagaaattcaaaggtayaggtacaggggtgatacctagcagtgaagagtgagagagaggtgtctgatttgtcagtgggtctcagtttctagtgcagctgaagatcatggactacagc

SEQ ID NO: 390172 - DNA, 201 bp, Homo sapiens
gctggaataagctaaaaggatgatcttagatactaggacatataggcactaaaggcagtggtatgccctgcaacctcaatttttatacttcctttccccakaagggccccagaaattcaaaggtacaggtacaggggtgatacctagcagtgaagagtgagagagaggtgtctgatttgtcagtgggtctcagtttctagt

SEQ ID NO: 390173 - DNA, 201 bp, Homo sapiens
acacactgagcggacattggggcaggcaggcaggcgccggggggcggggccagcgtcgccccgccccgtcctgcctcgccctgttcgcgcgtccgctgtcyggcctccggtcacgtgacagcagcgcaggtgagcgccgcttccggggtcgggcgcctggatagctgccggctccggcttccacttggtcggttgcgcggg

SEQ ID NO: 390174 - DNA, 201 bp, Homo sapiens; identical to SEQ ID NO: 85444

SEQ ID NO: 390175 - DNA, 201 bp, Homo sapiens
tcattgatgtctatgccatccggagtgctgaaggtgagagaaccgggacaatttaagggtggagaggggatttttcctggaggacagagaccagagtgctsggggagagcctgattagcttttcagaacaaaactgactgcttcctggagaaagggaattggaactaaacctactctgaattgttggtctctctcccagga

SEQ ID NO: 390176 - DNA, 201 bp, Homo sapiens
gtcagtgggtctcagtttctagtgcagctgaagatcatggactacagccttctgctaggcatccacgacatcattcggggctctgaaccagaggaggaagsgcccgtgcgggaggatgagtcagaggtggatggggactgcagcctgactggacctcctgctctggtgggctcctatggcacctccccagagggtatcgga

SEQ ID NO: 390177 - DNA, 201 bp, Homo sapiens
caaccatgttacttaggcaggtcactgaatcactctgagacagtctcctcttctataaaatggaaataatatgtttttataggacctcacaagggccaggygtggtggctcatgcctgtaatcccagcagtttgggaggccaaggcgggtggatcacttgaggtcaggagttcgagaccagcctgcaaacatggcaaaacc

SEQ ID NO: 390178 - DNA, 201 bp, Homo sapiens
ttaagaatgttgtttgtggccagtcggatctcttttggatttgtggctctctgggtggtaagctcttagtgagtattcagtggaaggcacttggtatgggraaggctgatggaggtagggctgcctctcatatgtaccttccaggtgattcatccattccctgtgggatgcttaacagggagggttttcccttgttaagga

SEQ ID NO: 390179 - DNA, 201 bp, Homo sapiens
cgggccgacatgcacccccacccggcggtggggatccgggggctttggctactgagggatgtggggagttggttccgggtcgggtcttggaggaggccgtsgggggagggcgggagctgcttcagtggatgcccccagggacccttgcccatccgggctgtgcctccctctggcctctgtctggagggagagactggttcc

SEQ ID NO: 390180 - DNA, 201 bp, Homo sapiens; identical to SEQ ID NO: 85445

SEQ ID NO: 390181 - DNA, 201 bp, Homo sapiens
taaaagaggcagagaaagagctgaagaaagctcagaggcagggggagctgatgggctgcctggctctggggggtggaggggagcaccctgagatgcaccgygcaggcccaccccctctccgagcagccccacttctgcccccaggagctcgggggctcccccctcctcctccccccctgcccccacctcttcctcctcgcc

SEQ ID NO: 390182 - DNA, 201 bp, Homo sapiens
gggctgtgcctccctctggcctctgtctggagggagagactggttccttgtccggcctgggttgccacagaggaatcacagacccaccctaaactggggcyccgcctcccttttctgtgccagcaggacttggacctaggacacctaggtcctgggtcccccgtgatggggagagaagtgttgcatcgcggatagactgta

SEQ ID NO: 390183 - DNA, 201 bp, Homo sapiens
tattgtccccaggtcttcaggaacctccgtgatcgatttggcattgatgaccaagattacttggtgagagtccattaaggggtgagggtagccctttctcyccagcaactgaggagtactatttgggacagccatatttggagaaatgagagtcttggcaaatataattctttacctttttgtgattgcagcattttcaaa

SEQ ID NO: 390184 - DNA, 201 bp, Homo sapiens
gtttggaaggggcagtgggagcagctgctttaacactggcatgggttattccatatggaaggcttggggatgggtgaggttgccagacttgaagagcaaartgtttaacttccacttcccattctgggttattttattcaagcagctacttttgcttaagaagacacaggccgggcatggtggcttatgcatgtaatccca

SEQ ID NO: 390185 - DNA, 201 bp, Homo sapiens
ctgatttggacatactgaatttgaggtttctgcaattcatccagatgaggatgtccagtaagtggttggggtatgtgtacagaattcaggaaagaggattrgactgggagtataggtttgagaattatatgtgagtaagtgatcattaaaaccatggctatagatacgattattgtagggaggttgtgtgcagtgaaatga

SEQ ID NO: 390186 - DNA, 201 bp, Homo sapiens
agccccgcccctccctaaatgccagacttgggagctgacagacagcactgcctgtgctgggtttaaaaggtgacaatgagaactttgttattgcaggggcwgctgccactttgttcacatccttaacagacttcagcagaagggactgagttagctctcaaggaaggctccctggcaataggggctgaattatttggcaat

SEQ ID NO: 390187 - DNA, 201 bp, Homo sapiens
ggaactaaacctactctgaattgttggtctctctcccaggagccccccagaaggaggtctacttcatgggcctcattgatatccttacacagtatgatgcyaagaagaaagcagctcatgcagccaaaactgtcaagcatggggtgagagttcgcaaaagcctttcctttcctgtcttgactattctttgggaatagagtc

SEQ ID NO: 390188 - DNA, 201 bp, Homo sapiens
gaggcgggaggatcacctgaggtcgggagttcgagaccagtctgaccaacatggagaaaccccgtctctactaaaagtacaaaattagctgggcatgatgrctcatgcctgtaatcccagctgctcaggaggctaacgcaggagaatcacttgaacccgggaagcggaggttgtagtgagccgagatcgtgcatttgcact

SEQ ID NO: 390189 - DNA, 201 bp, Homo sapiens
gccaggtgtggtggcgcacgtctagtccccgctacttgggaggctgaggcaggagaatcacctgaacttgggaggcgaaggttgcaatgagctgagatcgyaccactacactccagcctgggtgacagagcgagactccttgtcaaaaaaaaaaaaaaaaagaattttgcattcagtttccttcagtccacatatggacac

SEQ ID NO: 390190 - DNA, 201 bp, Homo sapiens
aactccgcctaaaaaaaaaaaaaaagattaaaaaaaaaaagatttacttggaatgtggagtttatggaatgttttggcagtaaaaacactcttcttgaacrtctctactgaagaaaaatttcaccaaaatcagtgagcaaggaatacatcagagtccaaaaggagtctttggtttatgcaacaaatattgaatacctctta

SEQ ID NO: 390191 - DNA, 201 bp, Homo sapiens
gtgcattgctaccgatgactcccactccctgagctgcctgagcctaaagtttggagtgtcactgaaatcctgcagacacctgcttgaaaatgcgaagaagmaccatgtggaggtggtgggtgtgaggtgagcactgggaacccctgccatcccctcccacaccaggctccctgcctctttcccaggaattaattctatatg

SEQ ID NO: 390192 - DNA, 201 bp, Homo sapiens; identical to SEQ ID NO: 85520

SEQ ID NO: 390193 - DNA, 201 bp, Homo sapiens
tgggtcacaagatgcacgttctggaccttggtggtggcttccctggcacagaaggggccaaagtgagatttgaagaggtaaccctggagctgggagtgtcrtgctgggctctatggcggggaggatagggagggattagatgatcggagggagaccaccgtgcgtgggtcctatgcactgcatgcagtgcttggtgcttac

SEQ ID NO: 390194 - DNA, 201 bp, Homo sapiens
agcctggcggtggaataagacattgcatagatgacaatacacataataagttaactcctgtggtgctgggagtgtgtgtcagagggattcagcctggctgrgggtatccgtaccttctttcccaaagaaggtccccttacaagtattagttttggcatctttctttgcatacctgctcttccttcccagggactttgtgtt

SEQ ID NO: 390195 - DNA, 201 bp, Homo sapiens
ggaggcgagtggggcagcagagccggccccccagcggttcccttcatctcccctcgccccgcagtgtgttgcatactttctaaggcggcggctgcagcagmggctccatccagcccgtcagctcctcctgcaaggcatggctggctacctgagtgaatcggactttgtgatggtggaggagggcttcagtacccgagacct

SEQ ID NO: 390196 - DNA, 201 bp, Homo sapiens
cctcccacaccaggctccctgcctctttcccaggaattaattctatatgagaccttccccagggcctctgagtagggcctgtccctgggcctggaattctkccatttgagaatttcctctgtttgaaaaggaagtttagaagggtcccttccccagtcccagggtccccagaaggtcttgtcccaggaagttccatccaga

SEQ ID NO: 390197 - DNA, 201 bp, Homo sapiens; identical to SEQ ID NO: 85474

SEQ ID NO: 390198 - DNA, 201 bp, Homo sapiens; identical to SEQ ID NO: 85477

SEQ ID NO: 390199 - DNA, 201 bp, Homo sapiens
atggtactggcataaaaacgaacatatagaccagtggaatagaatagagagcccagaaataaatccatgcatttacggtcaattgatcttcaacaaacgtrccaaggacacacaatgggaaaggacagtctcttccataaatggtgttaggaaaactagatatccacatatagaagaataaaattggatgctatctcacac

SEQ ID NO: 390200 - DNA, 201 bp, Homo sapiens; identical to SEQ ID NO: 85478

SEQ ID NO: 390201 - DNA, 201 bp, Homo sapiens
tgagtcaccacgcctggtgaatattgtcttttgcagtgcagaaatttttaattttaataaagtccagtttatcaattatttcttttatggattgtgccttwggtgttgtgtgttctattcttttttttttctgtagtgcttattaccttctaacatactatataatttacttgtttgcctcccccctgctaaactgtaaac

SEQ ID NO: 390202 - DNA, 201 bp, Homo sapiens
gggtttcaccatgttggccaggctggtcttgaactcctgaccttgtgatccacccacctcggcctcccaaagtgctgggattacaggcgtgaaccacggcrcccggcctgaagaattcttaagtaaggaatagagacaaacaagaatctcaagaaaataaggaaaaaagcaacccaatagaaatacaggcaagagacttta

SEQ ID NO: 390203 - DNA, 201 bp, Homo sapiens
tgatcttggtagtgattggaagagagaaaaaaattgagattttgtaaccacaagccagccttcttttgggcttatggcccaaattcacattaactatggtytgaaaaaccttaagcctcaaaataatttcatctagcagaagcaaacaaattctctctggaggaggaatcttcagtttaggcttctcactgataaggtttc

SEQ ID NO: 390204 - DNA, 201 bp, Homo sapiens
ggaggctgcagtgaactgagatggcgccactgcactccagcctggcgacagagccagactccatctcaaaaacaaaacaaaacaaacaaacaaaaaaactytaaagacttcaccaaaaaactattagacttaataagttcagaaaattagaagatacaaagttaacatacaatgtttctatatgctaactatctgaaaaag

SEQ ID NO: 390205 - DNA, 201 bp, Homo sapiens
ccctgccccttctgcctcctgtcagcagaggcctcggctccgcaactgccactcctcctcggggtgttgcacaagtttcgaggtcaccggcgacccccccyagcagcgcgcctggctctggcccccgcgaaggaggacggagtttggtaaggggccctgggggttggggggacctcagccctgcactctgtaggagtcact

SEQ ID NO: 390206 - DNA, 201 bp, Homo sapiens
atccacccgcctcagcctcctaaagtgctgggtttacagccgtgagccaccgcgcatagccactttagattaactttacttatctactgtcattcagtatytactgaactcctacagcgtgtagtcactgtgctaggcagggctagcaatacagaattgatagactgctgtccttgagttgaatgcttagtttatttattt

SEQ ID NO: 390207 - DNA, 201 bp, Homo sapiens
gcggggcgtgggggtctgtggctgctgggctggcggggcgcaggccgcgggacccgagcccggggaagcgagagagcggaggcgccgaggatccgattcaytccctggggagacctatgggccgaagccgtgtaaatgcgttttaaggcgagtgcggaaagtggcctggggagcctcggggagcggacgccctccgccctg

SEQ ID NO: 390208 - DNA, 201 bp, Homo sapiens
gggtgtgaggtgagcactgggaacccctgccatcccctcccacaccaggctccctgcctctttcccaggaattaattctatatgagaccttccccagggcytctgagtagggcctgtccctgggcctggaattcttccatttgagaatttcctctgtttgaaaaggaagtttagaagggtcccttccccagtcccagggtc

SEQ ID NO: 390209 - DNA, 201 bp, Homo sapiens
tgggaggccaaggctggtggatcacttaaggtcaggagttcaagaccaccctggccaatgtggtgaaaccctgtctactagagatacaaaattatccaggygtaaagatgtgtgcctgtaatcctagctacttaggaggctgaggcatgagaattgcttgaacctgggaggcagaggttgtagtgagccgagatcatgcca

SEQ ID NO: 390210 - DNA, 201 bp, Homo sapiens
ttgcccagtgaaccccgggcttgtgctgggggcgggttgtgacgggattgggatccctggcctcgggaggcgagtggggcagcagagccggccccccagcsgttcccttcatctcccctcgccccgcagtgtgttgcatactttctaaggcggcggctgcagcagcggctccatccagcccgtcagctcctcctgcaaggc

SEQ ID NO: 390211 - DNA, 201 bp, Homo sapiens
ggtggaggagggcttcagtacccgagacctgctgaaggaactcactctgggggcctcacaggccaccacggtgaggggctgggaatgggggtgggtcccckgtcccctgtacagatcagctgcctcctcaggaagggtccctagggccctcatcttatcctttcgcttatttggtacgcaatccttgctatttgcaagaga

SEQ ID NO: 390212 - DNA, 201 bp, Homo sapiens
tcaaaaacaaaacaaaacaaacaaacaaaaaaactctaaagacttcaccaaaaaactattagacttaataagttcagaaaattagaagatacaaagttaayatacaatgtttctatatgctaactatctgaaaaagaaatcaagaaaactatcccatttataattgcatcaaaaaattacttaggaaatttaaggaggtaa

SEQ ID NO: 390213 - DNA, 201 bp, Homo sapiens
accacccattttccacgctgcagacagaatgatcttttaaaatcccaaagattatgcccctcctctgcttaacaccatctgtggcttcccattgctctcaraataaaacctagactccttaccacaacgagcaaggctcctgccatcttcccaggcacctctgccctcactcctgtccctgttttcagctccacttacctg

SEQ ID NO: 390214 - DNA, 201 bp, Homo sapiens
ctcatttttgtcttttaaaatatttttgtacgaattattgatttattcttttctttttttttttgagatggagtcctgctctgtcacccaggctggagtgsagtggtgcgatctcagctcactgaaacctccgtccgggttcaaatgattcgcctgtgtcagcctcctgagtagctgagattacaggcgcctgccaccatg

SEQ ID NO: 390215 - DNA, 201 bp, Homo sapiens
cagcaagttcctaggcctatattgtaaagaaactcttggcatgtgtgttcgaggagatatatcagaacatatatatctttataatataaaacattggaaaygaccttaatgtttattggcagggtagcagaaacataaattatggtgtattctgtacagtgaattctatacagtgtattgtgaacttgtagagattacata

SEQ ID NO: 390216 - DNA, 201 bp, Homo sapiens
ggcagtcagcatcattgccaagaaggaggttctgctagaccagcctggcagggagggtaggtgccaggtgggcagtggagccctgttctcccctgaagctkcagatagtggttggctgagcaggatctggttttagacccagtggcagaggatgggggaatctggagaatgaatgggttcttgctttagggaaactttcag

SEQ ID NO: 390217 - DNA, 201 bp, Homo sapiens
aacaataagttacaattgtgctgactttctgtgcaccctcgccgtgtgccgccactgttctacatgctctccatacactaactcatttatccttgcagtarccttacgaggtaggtactgttgttatccccattttacaaatgagcaaactgagacatggagagattaagcattttgcccaaggtcacacagctaacaact

SEQ ID NO: 390218 - DNA, 201 bp, Homo sapiens
gagggcacgagcagatcagggagactgaaatggtgttacccatggggatggagaccatggggcacatgaggatgttcagaagctgggctcagcagggctcractgggtgtgggaacaagattgccaactgtttacaactctgatagtggagccattgatcaacatgggtatgtaggaggagaagcagtttgtgggattgtt

SEQ ID NO: 390219 - DNA, 201 bp, Homo sapiens
gtgtaaatgcgttttaaggcgagtgcggaaagtggcctggggagcctcggggagcggacgccctccgccctggtgctgacctgcctccctgccccttctgyctcctgtcagcagaggcctcggctccgcaactgccactcctcctcggggtgttgcacaagtttcgaggtcaccggcgaccccccctagcagcgcgcctgg

SEQ ID NO: 390220 - DNA, 201 bp, Homo sapiens
ctccctgccccttctgcctcctgtcagcagaggcctcggctccgcaactgccactcctcctcggggtgttgcacaagtttcgaggtcaccggcgacccccsctagcagcgcgcctggctctggcccccgcgaaggaggacggagtttggtaaggggccctgggggttggggggacctcagccctgcactctgtaggagtca

SEQ ID NO: 390221 - DNA, 201 bp, Homo sapiens
cgattctcttgggaggcctcagcctcccaaatacctgggactacaggcgcccgccaccatgcctggagagatggggtagagatggggtttcaccgtgttarccaggatggtctcgacctcctgacctcatgatctgcctacctctgcctcccaaagtgttgggattccaggcgtgagccaccgcgcccagctggttttatt

SEQ ID NO: 390222 - DNA, 201 bp, Homo sapiens
tttgaacagggaaattttaacataaagaatggttaactgtaaaggtggttcattacaattactaaaaggggtaaaatcagctaccacccctggtcctgagrgagagtgaagaaggcaggaacttagaaacacagaggaggagggctcctccctccaaggctgatattgaaacctttgaggagaggctgcagtgtcacagaa

SEQ ID NO: 390223 - DNA, 201 bp, Homo sapiens
ctctggaggaggaatcttcagtttaggcttctcactgataaggtttcaaagtacatgagctcacagtcaaaaatcacaacatacaaagaaacaagtcatcrtgaggaagaaccgcaaaagcaataggtagcagatcagacctgcgtttacttcatatattggaattatcaggtgctaacattcttttacaatgtttgaaga

SEQ ID NO: 390224 - DNA, 201 bp, Homo sapiens
gagtgtatgctgaatcatggtagcattgaccttcagttttgatatctgtgtgggttcctagggcctagtcaagatggagaatccaataggatgcccttacrtagagctgagaacccaaaagaagtacatccttagtgtaagagtcaactagagaaaaaagcccattctacagagaatggcagcaagaaaacttcactgttt

SEQ ID NO: 390225 - DNA, 201 bp, Homo sapiens
agaaaacttagcagcagggtagctctgtggccagtactgaacctgggtcaggtacttggaaggatcacggatggcatgcacagggtgcgagctggatgggrtctcacattcatccacttcttgtcattcaggacgaggtagctgccttcttcgtggctgacctgggtgccatagtgaggaagcacttttgctttctgaagt

SEQ ID NO: 390226 - DNA, 201 bp, Homo sapiens
gccatcatgccccgctactttttgtatttttagtagagatggggtttcaccatgttggccaagctggtcttgaacacctgaactcaagtgattcgcccacyttggcctcccagagtgctgggattacaggcatgaaccaccgtggcccagattgacttctttcacttagtaatatgcacttaagtttccttcattcctttc

SEQ ID NO: 390227 - DNA, 201 bp, Homo sapiens
ggcggggttatataagccagcggcgggcggaaggcggggcgtgggggtctgtggctgctgggctggcggggcgcaggccgcgggacccgagcccggggaarcgagagagcggaggcgccgaggatccgattcactccctggggagacctatgggccgaagccgtgtaaatgcgttttaaggcgagtgcggaaagtggcctg

SEQ ID NO: 390228 - DNA, 201 bp, Homo sapiens
tgtttttatctaatttttaaaaagtcaaacatatttattgtcgataatagacaacaaggatgacgaaggttatcacccataatcccaccacactctttgascattacatattttaaaaaatgccttatacttttttcatgacattggaatcatattgttttgtaacctgctttttccatttatatggggtgtagctctttc

SEQ ID NO: 390229 - DNA, 201 bp, Homo sapiens
aactagatatccacatatagaagaataaaattggatgctatctcacaccatatacaaaatggattaaagactttcagattgacttttttttttttttttttgagacagagtctcactctgttgcccaggctggagtgcagtggtgtgatcttggctcactgcagtctctgcctcctgggttcaagtgattctgctgcctca

SEQ ID NO: 390230 - DNA, 201 bp, Homo sapiens
gcctgtggggcccggcggttgatggctgtgattgcgtggctgagggcctgtggctgccgcaactacacgtaggggactggctggtctttgacaacatgggygcctacactgtgggcatgggttcccccttttgggggacccaggcctgccacatcacctatgccatgtcccgggtggcctggtaagagggccctgctggaa

SEQ ID NO: 390231 - DNA, 201 bp, Homo sapiens
gaggcttgccctctgctctgggaccctcatgcaggggagcctcaggactgtgcgcttttccccagagagaattcatgtgaagggtggtgggctccaggtaraatgtcctgtgttcgtgtgtggcattcttctggcttcctttatagacctgggggattgtcccgtctgatccaatcaagagacctggcttctcattctggc

SEQ ID NO: 390232 - DNA, 201 bp, Homo sapiens
gcgcagtggctcatgcctgtaaccccagcactttgggaggccgaggcaggcagatcacttaaggtcaggagttcgagaccagcctggacaatatggtgaarccctgtctctactaaaaatgcagaaattagctgggcacggtgatgggtgcttgtaatcccagctactcaggaggctgaggcacaagaatcatttgagcct

SEQ ID NO: 390233 - DNA, 201 bp, Homo sapiens
atcatacaccatgatccttttaaagtggaatttatccctgggatgcaaagaaattttaacatgtctgaatttataaatgtgatgtactataatattaccayaatgaaggataaaaatcatatgatcatctcagtagatggagaacaagcatttgacaaaattcagcatcctttcatgataaaaactttcaacaaattaggt

SEQ ID NO: 390234 - DNA, 201 bp, Homo sapiens
gcatgtactaccaagcctggctaatttttgtatttttggtagagatggggttttgccatgtttcccaggctggtctcaagctcctggcctcaagtgatctrcccacctcagcctcccaaagtgttggggttacaggcgtgagccactgcgccctgtcctattttcagtttttttttgaggaacctccatactgttttccaa

SEQ ID NO: 390235 - DNA, 201 bp, Homo sapiens
gcctccgcctcctgggttcaagtgagtctcctgcctcagcctcctgagtagctggaactacaggcatgtactaccaagcctggctaatttttgtatttttrgtagagatggggttttgccatgtttcccaggctggtctcaagctcctggcctcaagtgatctgcccacctcagcctcccaaagtgttggggttacaggcg

SEQ ID NO: 390236 - DNA, 201 bp, Homo sapiens
tgtccacagttatcagctggggccttagcagctgccaaatccttcttccggaaatcaaagcagctttcaagaaatagacttggagctgtagcaagtcttcrgcataaagcccacatttcaaacacataattgtctccccattctcctcctaccagattgcttccgtgatcaactcagccttggacctgtacttcccagagg

SEQ ID NO: 390237 - DNA, 201 bp, Homo sapiens
tcagacttggaatcagaagacatgggtttgagacctggctctgccatagaccagctgagtaaccttaggcaaagcaagctacttaatctctctgagccttrtttctctagtttctccatttggaaaatgacagggctgaacttcagtgtatctcaatgaagtcagagttggatcattatttaaaatagtctctcttcattg

SEQ ID NO: 390238 - DNA, 201 bp, Homo sapiens
tcttctgcctcagcctcctgagtagctgggattacacgcccagctaatttttgtatttttagtagcgacagggttttgccatgttggccaggctggcctcraactcctgacctcaagtgatgcgcccgtgtccgcctcctaaagtgctgggattacaggcgtgagccaccgcgcccagcctattgatttattctttaaaag

SEQ ID NO: 390239 - DNA, 201 bp, Homo sapiens
ggcccaggcctccctgaggaagtgggagtcaactacaggagtgggtggtaggacttcccagaagaaaggaacggagagcaagtgtggtgcattcaaggctygcatggagagtggctgtgactgcagagggaggcagggctagatctgggaagggcttgaaggccgagtgacacgctttgacagcagtgggaggcatggacc

SEQ ID NO: 390240 - DNA, 201 bp, Homo sapiens
ttagattccacatataagtgagatcatgcatgtttgtctttctgtgcctggcttatttcacttaacatgatgtccttcaggctcatccatgttgctgcaaatgacaggatttcctgcatttttaaggttgaataatattccattgtgtatgtggaccacattttctttatctgttcatctgtgatggacacttaggtggct

SEQ ID NO: 390241 - DNA, 201 bp, Homo sapiens
tttagattccacatataagtgagatcatgcatgtttgtctttctgtgcctggcttatttcacttaacatgatgtccttcaggctcatccatgttgctgcaaatgacaggatttcctgcatttttaaggttgaataatattccattgtgtatgtggaccacattttctttatctgttcatctgtgatggacacttaggtggc

SEQ ID NO: 390242 - DNA, 201 bp, Homo sapiens
tttttagattccacatataagtgagatcatgcatgtttgtctttctgtgcctggcttatttcacttaacatgatgtccttcaggctcatccatgttgctgcaaatgacaggatttcctgcatttttaaggttgaataatattccattgtgtatgtggaccacattttctttatctgttcatctgtgatggacacttaggtg

SEQ ID NO: 390243 - DNA, 201 bp, Homo sapiens
atttttagattccacatataagtgagatcatgcatgtttgtctttctgtgcctggcttatttcacttaacatgatgtccttcaggctcatccatgttgctgcaaatgacaggatttcctgcatttttaaggttgaataatattccattgtgtatgtggaccacattttctttatctgttcatctgtgatggacacttaggt

SEQ ID NO: 390244 - DNA, 201 bp, Homo sapiens
  misc_feature (1)...(201): n = A,T,C or G
gcttgtgctgggggcgggttgtgacgggattgggatccctggcctcgggaggcgagtggggcagcagagccggccccccagcggttcccttcatctccccncgccccgcagtgtgttgcatactttctaaggcggcggctgcagcagcggctccatccagcccgtcagctcctcctgcaaggcatggctggctacctgagt

SEQ ID NO: 390245 - DNA, 201 bp, Homo sapiens
ggtctcgaactcccgacctcaggtgatccacccgcctcggcctcccaaagtgctgggattacgggcataagccactgcacccagccatatatatatatatwtttttttgagacagagtcttgctctgttgcccagggtggagtgcagtggcgtgatctcagttcactgcaacctctgcctcccaggttcaagcgattctcc

SEQ ID NO: 390246 - DNA, 201 bp, Homo sapiens
ctcagcctcccgagtagatgggattacaggtgcacaccaccgtacctggctaattttttggtattttcagtagagacaggatttcagcatgttggccaggytgatctcaaactcctgaactcaggtgatccacccgcctcagcctcctaaagtgctgggtttacagccgtgagccaccgcgcatagccactttagattaac

SEQ ID NO: 390247 - DNA, 201 bp, Homo sapiens
gggtaggtgccaggtgggcagtggagccctgttctcccctgaagcttcagatagtggttggctgagcaggatctggttttagacccagtggcagaggatgrgggaatctggagaatgaatgggttcttgctttagggaaactttcagtcaagtcgccccaccccaagacatttatttagcatcttttttcctaggcatgtt

SEQ ID NO: 390248 - DNA, 201 bp, Homo sapiens
cctaaagtgctgggtttacagccgtgagccaccgcgcatagccactttagattaactttacttatctactgtcattcagtatctactgaactcctacagcrtgtagtcactgtgctaggcagggctagcaatacagaattgatagactgctgtccttgagttgaatgcttagtttatttatttctattctgtccttgctag

SEQ ID NO: 390249 - DNA, 201 bp, Homo sapiens
gattgtacttttagatagtttggccagggaatggttcactgagatttgaatacagacccaaaagagccaagggatcaagccaggtagataaccagggaaakggcatttcaggcagcaggaacagcaggtgcaaaggccctgaggtgggagcaagtccagtgggcactgctttgtgatattgtcattagcactattttcttg

SEQ ID NO: 390250 - DNA, 201 bp, Homo sapiens
ggctgagagagaccttgatgacagcggggactggagaagcatctgccctttgctgagtgtgtctgttgtgtcaggtactttgccaagtgttttctgtacaygatctcattttattctcacaacagccctgtgaggtaattactattttttttaatggggattctgaccgtagcctggtgaggacacatttaacgtataagg

SEQ ID NO: 390251 - DNA, 201 bp, Homo sapiens
ctgggattacaggtgtgcactaccaagcctggctagtttttgtatttttagtagagacggggtttcaccatgttgtccaggctggtctcgaactcctggcytcaagtgatctgcctgcctcgacctcccaaagtgctgggattacaggtgtgagtcaccacgcctggtgaatattgtcttttgcagtgcagaaatttttaa

SEQ ID NO: 390252 - DNA, 201 bp, Homo sapiens
taagctgacaaataaaaattgtatatatttatggtgtacaacatgatgttttgatatatgtatacgttgtggaatggttaacaagctaattaggcattaaytcacatacttacctttttttgtggtgagaacccctaaggtctattctttagcaatttccaagtgtaccatatattgttattaactatagtcaccatgatg

SEQ ID NO: 390253 - DNA, 201 bp, Homo sapiens
gactaagaagacagaagactcaaataaataaaattataaatgaaagaggagacattacaggataccacagaaattcaaaggatcataagagaccactactmgcatgaataactatacaccaagaaattggataacctaggcaaaatggataaattcctagacaaatattacctacaaagactcaatcatgaagaaacagaa

SEQ ID NO: 390254 - DNA, 201 bp, Homo sapiens
gggtctgtggctgctgggctggcggggcgcaggccgcgggacccgagcccggggaagcgagagagcggaggcgccgaggatccgattcactccctggggasacctatgggccgaagccgtgtaaatgcgttttaaggcgagtgcggaaagtggcctggggagcctcggggagcggacgccctccgccctggtgctgacctg

SEQ ID NO: 390255 - DNA, 201 bp, Homo sapiens
catttataaagtagacataagcacagcatctccttcaaggggctgtggtgtgcctttaacaggacaggcacataatacacttggccaggtatccgtctcartgtctgggattatgcataaggagtgcagacttaatcttgaagaaaatggagttttaagcaaaggagtaccagtcaacttggaagagagaatgaacacaaa

SEQ ID NO: 390256 - DNA, 201 bp, Homo sapiens
ggtcttctggactcaggattagagatgagaatgggccacgtgtgtcagaacaggcaatttggccgggcacagtggctcacacctgtaatcccagcactttrggaggctgaggcaggcggatcacaaggtcaggagttcgagaccagcctggccagcatggtgaaaccctgtctctactaaaaacacaaaaattagccaggc

SEQ ID NO: 390257 - DNA, 201 bp, Homo sapiens
gtaccccctcaggctgccaggagatagcagaggaattccgtgcccaggaaatcgacgggcaagccctgctgctgctcaaggaggaccacctgatgagcgcyatgaacatcaagctggggcccgccctgaagatctatgcccgcatcagcatgctcaaggactcctagggctggtggcagccaggattctggcccagggcgc

SEQ ID NO: 390258 - DNA, 201 bp, Homo sapiens
tgccttccttcctcccacttctttctccaggcctggttaactcttccgttgtcagcttctcccccttcagcctgtttctgcagcagccagggttctccccmctacaccctctgcaggtggagagagagaagctgggcccagccgggccgtgcctgctggcacagacgccttaacgctgtgtgtatgactgtgtgactgtgt

SEQ ID NO: 390259 - DNA, 201 bp, Homo sapiens
gaccaagggctgccccgtggaccaggcgggcagaactgctgggctacttgggccttcgtctctcccaaggcctcggtgctcccacttccatcacacatgckgagtagggcgttcctgccccagccctagggtcagacactcaatgtacagaaaattctgggatactgaggtcctgagttccaagattctgagtccaacacc

SEQ ID NO: 390260 - DNA, 201 bp, Homo sapiens
ggtaccccctcaggctgccaggagatagcagaggaattccgtgcccaggaaatcgacgggcaagccctgctgctgctcaaggaggaccacctgatgagcgycatgaacatcaagctggggcccgccctgaagatctatgcccgcatcagcatgctcaaggactcctagggctggtggcagccaggattctggcccagggcg

SEQ ID NO: 390261 - DNA, 201 bp, Homo sapiens
tgccccgtggaccaggcgggcagaactgctgggctacttgggccttcgtctctcccaaggcctcggtgctcccacttccatcacacatgctgagtagggcrttcctgccccagccctagggtcagacactcaatgtacagaaaattctgggatactgaggtcctgagttccaagattctgagtccaacaccacgaaatgct

SEQ ID NO: 390262 - DNA, 201 bp, Homo sapiens; identical to SEQ ID NO: 85524

SEQ ID NO: 390263 - DNA, 201 bp, Homo sapiens
tccgtgcccaggaaatcgacgggcaagccctgctgctgctcaaggaggaccacctgatgagcgccatgaacatcaagctggggcccgccctgaagatctaygcccgcatcagcatgctcaaggactcctagggctggtggcagccaggattctggcccagggcgcctcctcccgactgagcagagccagacagacattcct

SEQ ID NO: 390264 - DNA, 201 bp, Homo sapiens
tggagggcagtggctaactcagctcaagtgtccttgtgagctctctctccttgtaagaagcaaagccagagggctcctggccaggctgacatgcttctcayggctgcctgccccccgcccctcaacccaccacaggcatctggaagccctcatccccatgggcgtctgcccttcggccacaatgtcccagctgagagacaa

SEQ ID NO: 390265 - DNA, 201 bp, Homo sapiens
tagcatctgatactgttcccaatcacagcattcattgtgccgtgttccacacatctgttttcagtgtgtcatgtgacccataccctcaccactgccccccygcccaactacacccacatcttcctgactccgcaccctgaagacagggtctgtgtctcattcacctctgaatccctgacttagcacagtgcttgacgctga

SEQ ID NO: 390266 - DNA, 201 bp, Homo sapiens
ctgcccgtggagcgcgtggcgcgcgagcggcgctggcaagacgtgtcgatggcgcgcatgcgcacgttgcacgcggcgctgggcgggctgccgggccgcgkggcgcacttcatgttctgcatggacgtggaccagcacttcagcggcacttttgggcccgaggcgctggccgagtcggtggcgcagctgcactcctggcac

SEQ ID NO: 390267 - DNA, 201 bp, Homo sapiens
tgtctaaactgggtgtcgaccttcctgaagtgacacgaaggggactcttggctgacagtggcagtcagatcctataacctagtttcgggcaactaaaagargcatttctaaaagtggaactagttgctttgggaaggtggtgagagcctcccattcaggaaggatggggaaggaattttgttaccagataccccagacaac

SEQ ID NO: 390268 - DNA, 201 bp, Homo sapiens
ttttaatgtggctactagacatgtttaaattacatgtgactcacactatacttccactggatgatgctattcaagatctcttcctacactcatgaaagaaygcggctatacgtgactgcaaaggctcgagtgcacaggcacagatgcttccccctgccagaagcaaggtctgcctctccgtattagttattccttcctttt

SEQ ID NO: 390269 - DNA, 201 bp, Homo sapiens
caaatgtctgcgtctcagctgggagaccaactgctgaagactggtgggggccagcttaggcttcctcactcatggcagcacccaagttctgggacttcttmtatggaggcttagagctctaaagagagaaacgctgccagtcgtccaaagggccagtatgaggcaggagtggcaggcaatttgcaagcatcttcagtccaa

SEQ ID NO: 390270 - DNA, 201 bp, Homo sapiens
gccttgcagaggtgagctgtcactgagatctgctccaagcctccatgcatcctctctcacacagtgaccctggcccagcccccttgctgagcgctgccctsaggtattgtgtgtcccctggacagcagtattcacctgagtgtcccaactcagtgcttctcaagctgcagtttgcatttccttgatctttccttctatgtt

SEQ ID NO: 390271 - DNA, 201 bp, Homo sapiens
cagggctcctggaatttcccttgatccagctaggctgggacactccctaaatcagctgcgtgttgttagcatcaggcagaatgaatggcagagagtgattytgtcttcatagagggtggggtacttctccataaggcatctcagtcaaatccccatcactgtcataaattcaaataaaatgtctgaacaagggtgtctgga

SEQ ID NO: 390272 - DNA, 201 bp, Homo sapiens
ttgaggctgaggtcagaagatcacttaatggcaggagttcgaggttacagtgaactataattgcaccactgtactccatcctgagcaacagagcgagaccrtctgaaaagaaaaaaaattgtaagtaaggaccaggtagccactcagaaatacttaaaagatagacatttattctccaactacaaattcataacaattttg

SEQ ID NO: 390273 - DNA, 201 bp, Homo sapiens
gtcagccaagaaatcagtggggaattttgacataggctgaggaacccatcccaatccctagcctcctccagccctgaactccaatagctgtttcctctgcytagtctttcgctgtctgcttggtctctttttatcagcacctggtttgcaaagaaataccctcagtgagaaagcccaaggcaagtgtggtcaccttacttc

SEQ ID NO: 390274 - DNA, 201 bp, Homo sapiens
ctggagtgcagtggcacaatcttggctcactgcaacctctgcctcttgggttccagcaattctcctgcctcagcctcccaagtagctgggactacaggcgygtgccaccacacccagctaatttttgtatttttagtagagacagggtttcaccatgttggccaggaatggtcttgatctcttgacctcatgatctgcccg

SEQ ID NO: 390275 - DNA, 201 bp, Homo sapiens
ctccacctcccgggttcacgccattctcctgcctcagcttcccaagtagctgggactacaggcgcccgccaccacaccctgctaattttttgtatttttartagagacggggtttcaccgtgttagccaaggtggtctcggtctcctgacctcatgatcctccgaccttggcctcccagagtgctgagattacaagcgtga

SEQ ID NO: 390276 - DNA, 201 bp, Homo sapiens; identical to SEQ ID NO: 85533

SEQ ID NO: 390277 - DNA, 201 bp, Homo sapiens
acggggtttcaccgtgttagccaaggtggtctcggtctcctgacctcatgatcctccgaccttggcctcccagagtgctgagattacaagcgtgagccacygcgcctggcaaaactcatcttttttttttttttttttttttttttgagacagagtcttgctctgtcaccaggctggagtgcagtggcgtgatcttggctc

SEQ ID NO: 390278 - DNA, 201 bp, Homo sapiens
gaatttcccttgatccagctaggctgggacactccctaaatcagctgcgtgttgttagcatcaggcagaatgaatggcagagagtgattctgtcttcataragggtggggtacttctccataaggcatctcagtcaaatccccatcactgtcataaattcaaataaaatgtctgaacaagggtgtctggatgtgagctgga

SEQ ID NO: 390279 - DNA, 201 bp, Homo sapiens
tgtgtttgtaggatgctatgttttctgtagattgctaaattactgacttatcacctgggttctgtcaggggttggttttaggctttgttagaacgtctacytcagcttagcctttactcctgtggtgtggtccttgttcctagagcatggcctttctagagactcaaactgaaatatcatggtgttcacaaagccttctct

SEQ ID NO: 390280 - DNA, 201 bp, Homo sapiens
tgcccctctctgttgggacttcctgcatttgagcccctctctccctccttctttccagacctttttgaattcaaggtgcctaaggagcatgggggtcttargaccttgcattacatctccgacagatcatttgaggccctgtgtcagggacttcagacatttcttcatttgatcttcagtctgtaataggagattatcccc

SEQ ID NO: 390281 - DNA, 201 bp, Homo sapiens
ttttgacataggctgaggaacccatcccaatccctagcctcctccagccctgaactccaatagctgtttcctctgcttagtctttcgctgtctgcttggtstctttttatcagcacctggtttgcaaagaaataccctcagtgagaaagcccaaggcaagtgtggtcaccttacttcccttcgctcaagatttgctgccct

SEQ ID NO: 390282 - DNA, 201 bp, Homo sapiens; identical to SEQ ID NO: 85528

SEQ ID NO: 390283 - DNA, 201 bp, Homo sapiens
gggaggccaaggcaggagagttgcttgagcccagaagtttgagaccagcctgggccacatgatgaaaccctgtctctacaaaaaatagaattacctgggcrtggtgacacattcctgtagtcccagctttccaggaggctgagatgggagaatctcttgagcccaggaggctgaggctgcagtgagccatgattgtgccac

SEQ ID NO: 390284 - DNA, 201 bp, Homo sapiens
gccaatgctcatttacattccaaaaatcctagtgcctttaagaattatgctaaataggccgggcatggtggctcatgcctgtaatcccagcactttgggakgccgaggtgagcaaatcacttgaggccaggagttcgagaccagcctgaccaacatggtgaaacccggtctctactaaaactacaaaaaaaaaaaaaaaaa

SEQ ID NO: 390285 - DNA, 201 bp, Homo sapiens
cagagacagaaggttatgcacccagtggcctgggaccattgttctgggctttttttcccttcgacatggatttgcttctcactgtgtaccccaaccaccawaaccaccctgagatcaatgctggtgctcctgcatcagatggcttagagatccttccacctcttaacacaagcatctaggtccactttactcaaatctggc

SEQ ID NO: 390286 - DNA, 201 bp, Homo sapiens
ttgcaagtcagagtgcaggtgtctaattccaggcatcaggctttctgttgcgattgttgcctgtggatattatgcaaccaaacacagccaggaactcagcrtgggggacggatgttagtcagagggaacttgtttatctgttaaatctggtctgatagactcacctgatccctatcggcttgcctggactagctacaggcc

SEQ ID NO: 390287 - DNA, 201 bp, Homo sapiens
ctcctgacgtctctccctggcagcacccagatgcagacagcctgtatgtagagaagattgacgtgggggaagctgaaccacggactgtggtgagcggcctsgtacagttcgtgcccaaggaggaactgcaggacaggctggtagtggtgctgtgcaacctgaaaccccagaagatgagaggagtcgagtcccaaggcatgc

SEQ ID NO: 390288 - DNA, 201 bp, Homo sapiens
cctccgtggtcacacagcacgattccaagaaggctggagctgaggtggtaaagcaggtggagcaccctttgctgagtggcctcttataccccggactgcakgtacttaagggggatggagtggcccgatgaccttttctgctctggtttgatgacaggcatatcttattgcactttgctttactgcactacgcagatattg

SEQ ID NO: 390289 - DNA, 201 bp, Homo sapiens
agggaaagttcactttggttctgatcattagaacgtggaaatccaaagatgtgaaaggttgagttctgggttcccaaacatggcttaccttcagaatcatytagggaatttaaaaaaaaaaaaaaaagtgttgattagaccttgtccatagagattctgataaagtagttctgggaggaacttaggaatctgtatttcctt

SEQ ID NO: 390290 - DNA, 201 bp, Homo sapiens
aagtgcaggaatgtcatgtcctactggctcctagaatggaacttgagtcattttgatttgggtttggttaacatcaggaagtgatcacatccttttgtacmggcattgctgagagctgctggtgtaagatgtatactttggtccttctagtctgtttgttaaatctgcctcttcattaaagatagtgaccggggccagaca

SEQ ID NO: 390291 - DNA, 201 bp, Homo sapiens
aatatttaagagtccctcttgagctcgtgtacttgagggaaagttcactttggttctgatcattagaacgtggaaatccaaagatgtgaaaggttgagttytgggttcccaaacatggcttaccttcagaatcatctagggaatttaaaaaaaaaaaaaaaagtgttgattagaccttgtccatagagattctgataaagt

SEQ ID NO: 390292 - DNA, 201 bp, Homo sapiens; identical to SEQ ID NO: 85538

SEQ ID NO: 390293 - DNA, 201 bp, Homo sapiens
ggcagggtgtgaggtaagaactaatgctataagcccttggggaatgacccaagggagacccaagagagacttaacaaggacagggtggggctggaggagayaggttggaggtaattggacaaattcacattttggtggccccttatctcttgtccaggtaacaattctgtttgcggacctccacgcatacctggataacat

SEQ ID NO: 390294 - DNA, 201 bp, Homo sapiens
aaaaaaattgtaagtaaggaccaggtagccactcagaaatacttaaaagatagacatttattctccaactacaaattcataacaattttgtgtgctataamcaaagcctgagaagaatataaaaaataaaatagtttaatttgttagatggcaggattgtgagtggtttttcactgtcgcccaggctggagtgtagtggca

SEQ ID NO: 390295 - DNA, 201 bp, Homo sapiens
gaagggaaaagactgcaaagatgtccaatgtagcattatatataatttgtaaaaattaggatagaatctaacagtttggagtttgctaaattatgtttccrctaataattgggaatataatatggcataaaaactataagtaggccacacattgtggttcacacctgtaatcctagcactttgggaagccaaggtgggcag

SEQ ID NO: 390296 - DNA, 201 bp, Homo sapiens
ggaattccaggtggtttggtctgactagagtctaaaaggtgaggagggggattatgggagagataggcagggccaggtcacaaagggaagatgtgataatmccatatataggaataaaatggggggttttgtgattgactctgaattcaggtccaaccaatttaatggagctgctagaaatgttaatgtacgccaggtgcg

SEQ ID NO: 390297 - DNA, 201 bp, Homo sapiens
cccaagagattttgattcattaggtttgggtggaacccagtaaaaggtgattcatatactgtcacatgtgagctagaatttggtaaccactgaactcaaawgaccatgaactcactctttccaaataagaaacaaagcctattacctaaaaaggaaaaatggctgtagataatatataatacttagtgtggctgattgctg

SEQ ID NO: 390298 - DNA, 201 bp, Homo sapiens
gtgagccactgtgcccagccaaatgttaaaatatttttattgcccgggtgcagtggctcacacctgtaatcccagcactttgagaggccaaggcggggcaratcacgaggtcaggagatcgagaccatcctggctaccacggtgaaaccctgtctctactaaaaatacaaaaacaaaattagctgggcgtggtgacaggca

SEQ ID NO: 390299 - DNA, 201 bp, Homo sapiens
aatcccagctattcgggaggctgaggcgggagaatggcgtgaacccaggaggcggagcttccagtgagctcagatggcgccactgcactccagcctgggcracagagtgagactccgtctcaaaaaaaaaaaaaaatctttatttatttatttttaccacatccacaggaaaatatctgcaagtacctaatgttaaaatct

SEQ ID NO: 390300 - DNA, 201 bp, Homo sapiens
tgaggcgggagaatggcgtgaacccaggaggcggagcttccagtgagctcagatggcgccactgcactccagcctgggcgacagagtgagactccgtctcaaaaaaaaaaaaaaatctttatttatttatttttaccacatccacaggaaaatatctgcaagtacctaatgttaaaatctttgtaaaaagaatttttttag

SEQ ID NO: 390301 - DNA, 201 bp, Homo sapiens
catatttagtataaaaagattggaagcaatataacaactactcagttgctggccaagtcagatgagatcagggcactgaggaggaacttagactaatatckgcttttgtgtgtttctctaatctctcagtacctccctgcacttggctattcaaaacgggtccatctgatgaatcctatggttccaggattaacaggcagc

SEQ ID NO: 390302 - DNA, 201 bp, Homo sapiens
ccagaagatctagctaagatcattgatgaaggtggctacactcaacaatggattttcaaggtagatgaaatagccttttttcggaagaagatgccatctcrgactttcgtagctagagagaagttgattcctggcttcaaatcttcaaaggacaggctgactctcttgttaggagctaatgcagctggtgacttgaagttg

SEQ ID NO: 390303 - DNA, 201 bp, Homo sapiens
tccagagcccatgtgcctggtgacaaccaggaagctgctcccgcacctgttggatttactcctttcctaatagcccagtttccaaggagaggcattaccarttggaactactgtcctttcacagagcatttggttcgcatttcccagcatctttttctttttcttgtcttttttttgagacaagttctcactctgtcgccc

SEQ ID NO: 390304 - DNA, 201 bp, Homo sapiens
aaatggcaacaaaagattttgaatattacataaacttcgttgataaagcagcagcagggtctgagaggatggactccaatattgaaagaagttctgctgtkgacagaatgctatcaaacagcatcacctgcaccagataaatctttcgtgaaagggagagtcaattgatgtggcaaacttcattgttgtcttattttaggg

SEQ ID NO: 390305 - DNA, 201 bp, Homo sapiens
ttgagaggctgaggtgggaggatcacttgagctgagatcaaagcttcagtgactatgattgtgccattatactgcaacctgggcaacagagcaagatcctktctcaaaaacaaaaaaacatggaaatagattgggaaattttgatatcagttgaaaaggcattccaaatgaagagactgaaggagaatggcagagaagcag

SEQ ID NO: 390306 - DNA, 201 bp, Homo sapiens
ggggttctaagtatgtggggccggggactcggcgctggcgcagctctgagagagcctgtagatctcactgctggtcggtcagtcaatcaagcagcccttcyctgggttccccagaaatcacagtgggctcacctcttgcgtccagttgtcttgtgttggagccaaactttgaatccaggactcccattccacccccctatt

SEQ ID NO: 390307 - DNA, 201 bp, Homo sapiens
ctgagcgggggaagcaggggtagcggagccatgggggacgctcccagccctgaagagaaactgcaccttatcacccggaacctgcaggtcaggcctggggkttggaaatgcgccgttggggattaggagcccgaggttcagtgattttgagccccattacggggttctaagtatgtggggccggggactcggcgctggcgc

SEQ ID NO: 390308 - DNA, 201 bp, Homo sapiens
gatcagcagctgacctgccacagggaagaattctacctcatggggttcttctcattcccagagccaatggccaaaggccctgccaagaattcagaaccagwggaggtcatcccatcccggctggatatccgtgtggggaaaatcatcactgtggagaaggtactcatttttcaccacatctcagagaggcagattggggtc

SEQ ID NO: 390309 - DNA, 201 bp, Homo sapiens
aaactggccagcgctgcctacccagatccctcaaagcagagtaaggccagctggagaggggccgacatcatcaggagagagagcttgtcaatgagccttgraaaaatgcctgtcttaaattgagggcacaacaacccagggggtctgaagtgcaggaatgtcatgtcctactggctcctagaatggaacttgagtcatttt

SEQ ID NO: 390310 - DNA, 201 bp, Homo sapiens
tacttttggtaatctcactagtgtccattttccttcaaaattgcagttttggttaaagtttcttgtcagttagcttttctgacttaggaattttgttaatrcagatggatttctatccctcggggccctttccttacctggcagggactctgtctcacctcttctcaggaaacatttcttatcagtaaatgtctgtaatct

SEQ ID NO: 390311 - DNA, 201 bp, Homo sapiens
tttcagatggaggaaacagaaattgtggcaaatttagctggagtggagtgagcaaagttatgaggaagcacttaaatatttatattgcttaccccttaactttttcaggcttctgactgttgtcaccttatcagcgacgcatgatttccgaccactttatttaaataacaaaccctctggcaccagaactgccccatacct

SEQ ID NO: 390312 - DNA, 201 bp, Homo sapiens
accccatctctactaaaaatacaaaaattagccaggtgtggtggtgcacgcctgtaatcccagtactcaggaggctgaggcaggataatcgcttgaacccmcggggcagaggttgtggtgagccgagatcgcaccactgcactccagcctgggcaacagagcgagactctgtttcaaaaaaaaaaaaaaaatggtggggga

SEQ ID NO: 390313 - DNA, 201 bp, Homo sapiens
tggggagcacctctgccccgccgccccgtctgggatgtgaggagcgcctctgtccggccgcgacccggtctgggaactgaggagtgtctctgcccgaccgmcaccccgtctgggaggtgaggagcgtctttgcccagccgccccgtctgagaagtgaggagcccctccgcctggcagccgccccgtctgggaagtgaggag

SEQ ID NO: 390314 - DNA, 201 bp, Homo sapiens
agcgagacctcatctctactaaaaatcaaaaaaattagctaggcatcatggcatgcacctgtaatcccagctacttgagaggctgaggtgggaggatcacytgagctgagatcaaagcttcagtgactatgattgtgccattatactgcaacctgggcaacagagcaagatcctgtctcaaaaacaaaaaaacatggaaat

SEQ ID NO: 390315 - DNA, 201 bp, Homo sapiens
taagaaacaaagcctattacctaaaaaggaaaaatggctgtagataatatataatacttagtgtggctgattgctgtgaacaagtatcctcacacattgtygacagcaatgttgattaggatacctttcaaaaaacaattttgaacctagcaattttcggcatcttaaggaaatgattctagagaagggaaaagactgcaa

SEQ ID NO: 390316 - DNA, 201 bp, Homo sapiens
actcattcagtagaaaccatacttcttcaagtacccatacaaccattctgtttttcactttctgtattcaataaattacatgagatactaaaaaaaaaaaraaaaaagaaaatgggctgggtgcagcagctcacacctgtaatcccagcactttgggaggccgaggtgggtggatcacctgaggtcaggagttcgagacca

SEQ ID NO: 390317 - DNA, 201 bp, Homo sapiens
ccggccagggctctgtttatgctctccagggctgcatattttgttaatggctttgatgaggattcaggtggttcccagattcgataggcaaatggtacaawgctaatatactggtgctttaatcactctccaaatgacttagcaggctggaataaaggacctaactcagcaaaaatgaagtatttcaggaacagatgcaaa

SEQ ID NO: 390318 - DNA, 201 bp, Homo sapiens
aaccccgtctctactaaaatacaaaaaattagctgggcgtggctgcatgcgcctgtagtcccagctactcaggaggctgaggcaggagaattgcttgagcycaggaggcagaggttgcaatgagctgagattgcgccactgcaccccagcctgggcgacggagcaagactccgtctcaaagaaaaggcagtcacaggacac

SEQ ID NO: 390319 - DNA, 201 bp, Homo sapiens
ctgagaagtgaggagcccctccgcctggcagccgccccgtctgggaagtgaggagcgtctccgcccggcagccgccccgtccgggaggtggggggcagccsccgcccggccagccgccctgtccaggagggaggtggggggcagcccccgcccggccagccaccccgtccgggagggaggttgggggtgcctctgaccggc

SEQ ID NO: 390320 - DNA, 201 bp, Homo sapiens
ggaagtgaggagcgtctccgcccggcagccgccccgtccgggaggtggggggcagcccccgcccggccagccgccctgtccaggagggaggtggggggcarcccccgcccggccagccaccccgtccgggagggaggttgggggtgcctctgaccggccgccccgtctgggaagtgaggagcccctctgcccggcggccac

SEQ ID NO: 390321 - DNA, 201 bp, Homo sapiens
tctgttgaagtcgcactgaacaagttgctggatccaatccgggaaaagtttaatacccctgccctgaaaaaactggccagcgctgcctacccagatccctyaaagcagagtaaggccagctggagaggggccgacatcatcaggagagagagcttgtcaatgagccttggaaaaatgcctgtcttaaattgagggcacaac

SEQ ID NO: 390322 - DNA, 201 bp, Homo sapiens
gtgtccattttccttcaaaattgcagttttggttaaagtttcttgtcagttagcttttctgacttaggaattttgttaatacagatggatttctatccctyggggccctttccttacctggcagggactctgtctcacctcttctcaggaaacatttcttatcagtaaatgtctgtaatcttatacacacgagtggtccct

SEQ ID NO: 390323 - DNA, 201 bp, Homo sapiens
tcacctaagagctctgatggagagcttctgtagagcttgagatgttcaggagttgaatgttattttcatgcctgctaacacaacatccattctatagcccrtggatcaaggagtgatttcaactttcaagtcctactatttaagaaatatatttcaaaaggctatagctgccatagatagtgactcctccgatggatctgg

SEQ ID NO: 390324 - DNA, 201 bp, Homo sapiens
ggacagaatgctatcaaacagcatcacctgcaccagataaatctttcgtgaaagggagagtcaattgatgtggcaaacttcattgttgtcttattttaggkaattgccacagccactgcagccttcagcaaccaccaccctgatcagtcagcagccatcagacatggaggcaagaccctccaccagcaagaagattatgac

SEQ ID NO: 390325 - DNA, 201 bp, Homo sapiens
aaattagccaggtgtggtggcatgcccctgtagtcccagctacttgtgaggctgaggtgggagaatcgcttgaacgcaggaggtggaggttgcagtgagcygagatcatgccactgccctccagcctgggtgacagagtgagaccctatcttaaaaaaagaaaacccggagacatgctagttctgcactgttggctgggcg

SEQ ID NO: 390326 - DNA, 201 bp, Homo sapiens
cactgtgcctggcttagttttttgatatagttaatgaatacagaaatgcttactatatatatatatatatatatatatatatatatatatatatatatatatattttttttttttttttttttttttttttttttgagactgagtttcgctattgtcacccaggctggagtgcaatggctcactctcggctcactgcaacc

SEQ ID NO: 390327 - DNA, 201 bp, Homo sapiens
ctgtgcctggcttagttttttgatatagttaatgaatacagaaatgcttactatatatatatatatatatatatatatatatatatatatatatatatatattttttttttttttttttttttttttttttttgagactgagtttcgctattgtcacccaggctggagtgcaatggctcactctcggctcactgcaacctc

SEQ ID NO: 390328 - DNA, 201 bp, Homo sapiens
gtaaaacaggcaaaaaagttagaaagacaaatggttacgggaaaacaaacagttccgggcgcaggggctttaaatccatcacaaggtgatagacgcggagrctttgggtaccatcaaccagacacaaatgctggggcttagggtaatatcaactgggcaaattcctgggaactgcggctatagctttccacaatatcttat

SEQ ID NO: 390329 - DNA, 201 bp, Homo sapiens
tgtgcctggcttagttttttgatatagttaatgaatacagaaatgcttactatatatatatatatatatatatatatatatatatatatatatatatatattttttttttttttttttttttttttttttttgagactgagtttcgctattgtcacccaggctggagtgcaatggctcactctcggctcactgcaacctcc

SEQ ID NO: 390330 - DNA, 201 bp, Homo sapiens
gaataattgcttgagcccaggaggtgtgatcctggctgcagtgagccatgatcacaccatcacactccaaactgggtgacaaagcaagaccttgtctctgaaaaaaaaaacaaaaaagaaaaaaataaatacattttttgattatttcttattatttgttttttgttgttttttgtttgttttttaaagacagagtctcac

SEQ ID NO: 390331 - DNA, 201 bp, Homo sapiens; identical to SEQ ID NO: 85529

SEQ ID NO: 390332 - DNA, 201 bp, Homo sapiens
atgagctaagaatggtttttacattgtttaaggattgtgaaaaaagatgaagaataagcagtaaagagcatatgtggcccataaagcctaaaatctttttwttttttttttgagagggagtctcgctttgtcacccatgctggagtgcagtggcacaatcttggctcactgcaacctctgcctcttgggttccagcaattc

SEQ ID NO: 390333 - DNA, 201 bp, Homo sapiens
ctgggcgtggtgacaggcacctgtaatcccagctattcgggaggctgaggcgggagaatggcgtgaacccaggaggcggagcttccagtgagctcagatgrcgccactgcactccagcctgggcgacagagtgagactccgtctcaaaaaaaaaaaaaaatctttatttatttatttttaccacatccacaggaaaatatc

SEQ ID NO: 390334 - DNA, 201 bp, Homo sapiens
aatttagcaacgtgaaggtcttctgtgatcttagcaagattatgtgtgatgtgatatggaatttagtagtatgatgtagtatggaattaaaattggaatgrgagattaggaaatggagcccaaaagaagagacaactgttacaagaaattggctatgaaaggaaggagagtgagttagaggcatgtaaaccaaaaagtatc

SEQ ID NO: 390335 - DNA, 201 bp, Homo sapiens
gcccccacccgcgagacgcggcagaaaagcccgcggctatcttcccgccagcaacagcctcccgccgagccggccgggacagaggcggcccccacccccastgggcaggggactgcagacggcgctccccgactctcaagacgaccagggagcttcccttttcctcagcggggtgaggggcatctgtcgcccgccgacttg

SEQ ID NO: 390336 - DNA, 201 bp, Homo sapiens
ccactgcgcccagcctaacttactctttcttaacctcagatatgcatttataagtacatagcgctctattagtcacttttgcatttaaacccttagaacarctttttaaagtaagcattattttgctaaggaaattaattcagatttaactttcctgagtttatacatctagtaagtagatgagtcaggatgtgaacccag

SEQ ID NO: 390337 - DNA, 201 bp, Homo sapiens
ggaaatgttttgcttattcataatgtagtattttctaaatcatttaatccccctaattctcaaatatgaatgttgaataatagactgatttctgaactgcmaaaggaaaataaccatgatttgctgctcagagttttaaaaactgcttttctttttcttaggtccagataactctcacctcacatgactgtggtgaactga

SEQ ID NO: 390338 - DNA, 201 bp, Homo sapiens
ctctgcagtgcgtcaatggacagtatgttggtgacagacagtgactctgtgagcagacagagcatggcagtggtgggactcgaggcagggagtttccacastaggagtgcttggacccagacagggtgggattggcatttgtaaaggaactttgcttttttgttgttcctgtagacagaaggtgggagaggtctgcaagtg

SEQ ID NO: 390339 - DNA, 201 bp, Homo sapiens
tatttgacttactgagttaaggaggaactaagggtcattttccccccatcatttgcatgttttgactcctgaactgagggtctacggccactgaagctagmagctagaagggtgttaatcagtagtgagctctacttactccatgtgtcactgacagatgtaaaaaggaatatcaagtaatctattatttaaaaattgtaa

SEQ ID NO: 390340 - DNA, 201 bp, Homo sapiens
aactatgattctgttatgtaagcttgtgggtgagtctcttccatttttctatgtgtttaaaactgtgagctttaaatagaagggtttaacatttataggtyactcatactccacagagatccacatccaccaggcctctcattctaataggaatgataccctcctgttaacatttgagtggcatgttcagctggtaaataa

SEQ ID NO: 390341 - DNA, 201 bp, Homo sapiens; identical to SEQ ID NO: 85553

SEQ ID NO: 390342 - DNA, 201 bp, Homo sapiens
ctttgtgaatgtcatccccaggatgcgtagaaacaggccagacagtgcacacaagtgctttggactgggcagtactctggccaaactatggagagagtttktctgactggtgctctgagaagagggcttcataaacccaccccactgaggccagggctttttacctgtagtccagaggatctgtggacccccagaagttag

SEQ ID NO: 390343 - DNA, 201 bp, Homo sapiens; identical to SEQ ID NO: 85554

SEQ ID NO: 390344 - DNA, 201 bp, Homo sapiens
cgtggtggcatgcacctgtaatcacagctactcaggaggctgaggcagaagagtcgcttgaacctgggaggcagaggttgcagtgagctgagatcacaccrctgcactccagcctgggtgacagagcaagacttggtctcaaaaaaaaaaaaaaaaaaggtactctcattctttccttttgttagttgtggggaagaatag

SEQ ID NO: 390345 - DNA, 201 bp, Homo sapiens; identical to SEQ ID NO: 85555

SEQ ID NO: 390346 - DNA, 201 bp, Homo sapiens
agaaggttcagataaaattggaggaggaaccaggatacctcaaaaatcaagctactgcgtttttaaacacaacacaaaagcagaagaatgagctcagtgasgttagaaccacaccatcttctaaaagctcaagaaaacaaattttatgtaaaacagcacaatagaaaaagattgatgctgctatagttgtgtttttagaaa

SEQ ID NO: 390347 - DNA, 201 bp, Homo sapiens
gtgaagcactttagatgagattaacttggtataaagtggtcacaaatgggttgctttaaatttaactgacaagaaaataacacccaaaacttaggaaattrctgaggcatttgcctgcattgctggtaccgcttaaataggttgactgtgaattaataacaatagactgctggctcaataattgcagaaaataattgaaag

SEQ ID NO: 390348 - DNA, 201 bp, Homo sapiens
caactttttgacaggaggaacgatgatgaatgtcgggcatttgtgaagagagtcataatgagccgtttctttaagataattatgattagcactgtcacatygaatgcgttttttatggccttgtggaccagttatgacataaggtaccgcttgttcagacttcttgaggtaagcagacaaaatgggtccattttcttcttt

SEQ ID NO: 390349 - DNA, 201 bp, Homo sapiens
gctgcagcgggagggaggaggagttctctgggtgcccaggctgggttggtggtgctctgcacatcctagcagcagtagcaccatatgtgactttggggttygtaaaatgtttcttttcctgtgtccacagagactcctgtgtagagcagttcaaagttacttttgctgccttactttataaaaatgttttattgaggaatt

SEQ ID NO: 390350 - DNA, 201 bp, Homo sapiens
tatcatgaaactctttaaatatcataattttgaaaacataagatatgaggtatttcagagcagtactctattctctaggcactaaagatagaagtgaatgragctcttttttcctgacttctcagcctcctcacaatcccttggtgagtggccctcttttggacaagtgcaggggctgagtgtggaggttgagtgtcatgt

SEQ ID NO: 390351 - DNA, 201 bp, Homo sapiens
tggccttgaactcttgggctcaagcaagcctcccacctctgcctcccaaagtccaaggattacaggtgtgagccattgcccccagccagtataacagtttktgtgtgtgtgtgtgtgtgtgtgtgtgtgtgtgtttgacacggggtctcattctgttgcccaggcagtagtgtagtggtgcgaccatggctcactgtagtc

SEQ ID NO: 390352 - DNA, 201 bp, Homo sapiens
cttggcgtggtgaggagtttggattttattctgtgaaggaaagctaatggaggatttcaggcagagaagtgtcatcctgtggctgtgttctaaaaaatcaycctggctgttctgctcagaataggcggtaggaaggtcagagtggaagcaggcagactctgtagaacactgttgcagatgtctagaccggggatgatgggg

SEQ ID NO: 390353 - DNA, 201 bp, Homo sapiens
ttcatcttctcagaggttttcaaagctgcccacagcccagccctaagcctacctcgcattactctgcaagaagcctctttgctcagagattagaactgcartgttcatgagaggtcacctactcatccctttcactgaagaagtggggaaaacaaggctcagacagggtgagtaccttgaccaaggccacaaaaattagtg

SEQ ID NO: 390354 - DNA, 201 bp, Homo sapiens
ctgtgtctggccagattcttttcatccttattgatgaattgatctttttgattagatgccaaaaggattttttaatcttccgagtttaactttgctacagwatatatatatatatatgattgaaatattacaatttatagatttaaaccctttatttttggaaaacttattttttttttaaatttttatccccaagtgttc

SEQ ID NO: 390355 - DNA, 201 bp, Homo sapiens
ccagctaattttttaattttttgtagagatggggtctcactatgttgcctaggctggccttgaactcctggcctcaagagatcctcctgcctgggcctccygaagcactggggttacaggcatgagccaccatgcctagcctatcttcttcctttcctttttctctcctctcctttattctcctttctctttttttctttc

SEQ ID NO: 390356 - DNA, 201 bp, Homo sapiens
tccaagaactaaaggtgtatctaccattcaatccagcaatcccactactgactatctccccaaaggaaaaaaaaatcactatatcagacacctgcatgcattttttttttttttgagatggaatctggctctgttgcccagactggagtgcagtgagaggcacgatctcagctccctgaaacctctgctctcaggttcaag

SEQ ID NO: 390357 - DNA, 201 bp, Homo sapiens
tttagtagagacggggtttcaccttcttggccaggatggtcttgatctcttgacctcgtgatccacccgcctcagcctcccaaaatgctgggattacaggygttagccaccatgcccagcccattataagattttaagggtattttgcttcaagaaattttctgtagaattctaaaaatactctaaaatctgggaagaggg

SEQ ID NO: 390358 - DNA, 201 bp, Homo sapiens
agcaacttggatggaattggagggtattattctaagtgcagtaactcaggattcaaaaaccaaatactgcatattctcacttataagtgggagctaaactrtgggtatgcaaaggcaaacagagtggtataatggacattgtggggagacagtgaactcagaagggggaggttgggaggagggtgagggacaaaaaactac

SEQ ID NO: 390359 - DNA, 201 bp, Homo sapiens
aacctgatggaaccttgtctacaaaaaatacaaaaattagccaggtgtggtggcatgtgcctatggtcccagctacttgggaggctgaggtgtgaggatcrcttgagcctgggaggttgaggctgcagtgagccatggtcatgccactacactccagcctggatgacagagcaagaccctgttttgaaaaaaaaaaaaagt

SEQ ID NO: 390360 - DNA, 201 bp, Homo sapiens
gaggcaggagaatggcttgaacccgggaggcggaggttgcagtgagcagagatcacggcactgcactccagcctgggcgacagagtactccatctcaaaarataaaataaaataaaaattaaaaaatgtcgttttgatttgaaagtataagctagtgtttgtgtgtctggcaccaggtaaagtgaaaactcgtatggctgt

SEQ ID NO: 390361 - DNA, 201 bp, Homo sapiens
gaaaaacctatttcttgaagctttgagttattccaggtttactataagaataaatagcccccaaaacacatttgaacttcttttctctcagagttttattytaaggtatggttagttccaaataatccaaattcattggatagctcagatggatacaaatacttggagattataagtacggagttttcaagggattctcct

SEQ ID NO: 390362 - DNA, 201 bp, Homo sapiens
gaggagcagaggttggttaatgaggtacaaagttacagttagataggaggaattaattttggtgttctgtgcaatagggtgatgatatttagcaatatgcrttgtatacttcaaaatagctagaagagaggactttgaatgttcttatcacaaagaaatggcgtgtttgaggtgatgaatatgctgattaccctgatttga

SEQ ID NO: 390363 - DNA, 201 bp, Homo sapiens
aagagtggtgatgtatgcctgtagtcctagctgcttgggaggctgatgtgggaggatcacttgagcccaggaagtcaagggtgcagtgagccatgactgtrtcactgcactccagactacgtgatagagcaagatcttgtctcaaacaaacaaactgacaaaatccccccaaacaaaaaacaattgaaattttaaaaaaat

SEQ ID NO: 390364 - DNA, 201 bp, Homo sapiens
aaaaaattataaaactgattctcaataagcaaaaacttgaaataaacattatatatcctttaatggctataaagcattgtcttagtttaaaatttctactrcccaaaacaaactaacctggactatatggtttacctgcatggaaggtataattataaacatataaaactgtccaggcgcagtggctcacacctgtaatcc

SEQ ID NO: 390365 - DNA, 201 bp, Homo sapiens
cattcccaagtacccagggtcagacccagccccaggtgtagggccacggggtagggaggacagagaaggggaagggaatcaggcacactgagcgtgtgctrtgtgccagaaactctgcctgggtttctctctcatgtgggtgacttaggagcaccccttccggggctcacgcagggagcaggccagagctctagggctgtg

SEQ ID NO: 390366 - DNA, 201 bp, Homo sapiens
tgtttttagagatggggtcttgttcggtcacccaggttgcagcctggaactcctgggctcaagcgatcctcctgcctcagtctcttgtgtagctgggattrcaggtgtgagccaccacacccagctcctcagttcagttcttttcttcctttattcaaactgttcttctcctttccatgccccatctcacactatcctgcc

SEQ ID NO: 390367 - DNA, 201 bp, Homo sapiens
  misc_feature (1)...(201): n = A,T,C or G
tgtgtgccagaaactctgcctgggtttctctctcatgtgggtgacttaggagcaccccttccggggctcacgcagggagcaggccagagctctagggctgngcagctcgatctgacttctccaacccttgctacccctgtagttctcggagatcttctttgtgtccatctgcacatctgagttgtccatgaaggtctatgt

SEQ ID NO: 390368 - DNA, 201 bp, Homo sapiens
gtatgatggttcatgcttgtagtttcagcactttgagaggccgaggtgggaggattgcttgagcccagtttgagtttggaccaacctgatggaaccttgtytacaaaaaatacaaaaattagccaggtgtggtggcatgtgcctatggtcccagctacttgggaggctgaggtgtgaggatcgcttgagcctgggaggttg

SEQ ID NO: 390369 - DNA, 201 bp, Homo sapiens
gagcccagctgctgaggctttttgctatatcatacatcaaactgacttcaagtgccctgtcctcgccatcgcagccctgtcggtggacatgcaccaggtgkgtggagcagccccaggctggctgggccaggagtcacatggtgtggttctgtcaggattcgtgaacccagcagagctgttgggcttatatccactgagggg

SEQ ID NO: 390370 - DNA, 201 bp, Homo sapiens
tagccagggcatccgggtgagtgcactgggggtgtcatggtgctgggagggcaggccgtaggcccatttgcccccaagacactaaggaaataatgactctmctaccatcttccagttgttgagtccaacatgtgtggcaggttgatctttaccaatattatctcatttaatcttaaaacaattctaagaatggtattatta

SEQ ID NO: 390371 - DNA, 201 bp, Homo sapiens
tctcctggcctgagctctacagactggacaaagccacagtcagaactaaagacaccctctccctgaaagagtgtgacccacacttggtggtgtcatattgraaaaaaatttgggggccaggcacgatggctcacgcctgtaatcccagaactctgggaggccgagttgagtgggttgcttgagccaaggagtttgaggcta

SEQ ID NO: 390372 - DNA, 201 bp, Homo sapiens
attcctggcttcagcgagacctctgtcgaccaccttttctttccctccctccctacctccctcccttccttcctttctttcttccttcctctctgcctccyttctttctttccttcctccctcccttccttcatccctctctctctctttttccttccttccttccttccaatacatattagatgtacatattttgggcta

SEQ ID NO: 390373 - DNA, 201 bp, Homo sapiens
acagacagaaggatcccggaattcagaaaagcggagtttagtatcccacagctaaaagtaacaaagttaggccttagatctagtttactctcttcaaatcmtagcctaccccccatcccctgaaaaaattaagcccaccaccaagggttctgctgtgaatgtgccctcatgggggcctttgatgttatgtagatgaagtgg

SEQ ID NO: 390374 - DNA, 201 bp, Homo sapiens
tggaggagttattaataaattgtcttttttggtgacatattgacttttctttccttttccaaggggccgtcagttttcctgctgtagaaattaatattttrgagtaaatggagggaaagttttaacatgcagcaccacctagtggaaaagtggtgcgttaaactcaccatctcattttaagttgcattttaaccgcccatt

SEQ ID NO: 390375 - DNA, 201 bp, Homo sapiens
tggactcttgttcttaaaaaaaatattttgccatatcctctgcaaaactgcttattaatttgcataaacttttttttttatttttgaggggggtgagggamagggtattttgctgtcgatggaatgcagtggcgtgatttcagctcactgcagcctcccgggctcaagccatcctcccatctcagcctcacggatagctgg

SEQ ID NO: 390376 - DNA, 201 bp, Homo sapiens
caggtgtcaacaatgcaaatatgacaccacactgcagtgtgaaaacaccatggtccttacaccaccctttaataaaaatggacttttaactgcataatttkctcttagtcatgtagtaaatcttctgtttacagaacttagcctgagtattttgttaaagtcaagcagccaagaagtataatttcctcaacagtctttgtc

SEQ ID NO: 390377 - DNA, 201 bp, Homo sapiens
caggtgccagcaggtggagccctccagggcaggagcccagccgggccaggcggcaacacccctttctgccccccagaaggctgtccctgttctttcacttytgaatacctggggctacccttgttcagcatggaaataagctcaggatcaggaacaggtaagcggcagtggctgggcgcttgggtgaatgataaattttgt

SEQ ID NO: 390378 - DNA, 201 bp, Homo sapiens
tagtcaatctttgttgtatctgtaataaaccacagaagggccgggcgcagtcactcatgcctgtaattccagcactttgggaggtccaggtgggcagatcrcttgagctcaggaattcaaggccagcctgagcaacatggtgaaaatccctctctaccaaaaatacaaaaaattagttgggtgtggtggtgtgcacctgta

SEQ ID NO: 390379 - DNA, 201 bp, Homo sapiens
tgaaaaaacttgagaaacgtggctggttgctaagcagttctcagtgtcactacagatttggggtcaaacatttaaagtgaacattttgtatgttttttttyctgctgtgttccgctgctgtgcacaagctggagtagatgcagagttgggcttaacaaggactgaacttttgctaaatgaatgcaatggaggaacagaggg

SEQ ID NO: 390380 - DNA, 201 bp, Homo sapiens
ccaagataaaaagtttcaaaatcattttcagtaatcaacttagtggcaacagtattagtagtgttattctgagacttgtatgtctgtaatacaggataagrcaattgagtaattatgggacagtttatttctgtcatctcctgtgttcttaagaaccaggatactcatggaggagagaacccaggacttctttgagaaata

SEQ ID NO: 390381 - DNA, 201 bp, Homo sapiens
tctcttcatcccctgcccttcctggcctctggtaaccactagtctactctctatcttcatgagatccacttttttagctcccacatatgagtgagaacatrtgatatttgtccttctgtgtttggttgcttccatcttttctaaaatagctgctaggacttcctcttctcctccaacctggcgagtccctttatcttcttt

SEQ ID NO: 390382 - DNA, 201 bp, Homo sapiens
ttattgcaaattagtaacacattttcaggtctgctcctaagaacagtgaataagctctttattttcatgcttgtctttctactgaagctaatatgagaaarttgggccaaatgaggctcctgaattaaaccggagtatcagccatgcagatacgtttcaaaacttaaggtaaattattgaaagaaatggtagcaaatcaga

SEQ ID NO: 390383 - DNA, 201 bp, Homo sapiens
gctccttgaggaacgggagctgtgaccagggccagagcccaggaaggtgctgggtacagagcagcagattggtaactgtttatatcacatgctttcaggarcagactgttgggaagattctgggatttccagacatgttaaaggtttcagatcctgtgtggaaagcagaaacgtaagaaactgataacttgttttgctgac

SEQ ID NO: 390384 - DNA, 201 bp, Homo sapiens; identical to SEQ ID NO: 85556

SEQ ID NO: 390385 - DNA, 201 bp, Homo sapiens
accccagaggcaggagtatgtcatgaatgattatggcttcatctaccaaggcagcaagaactggatccgcccatgtccctggaactatggacaggtgagtstcagccctgcttatggcccatcccggccccgagcttgtggggagagggagcagggcacatgtgagcttcacctagaactgctgaccaacgctaactaaat

SEQ ID NO: 390386 - DNA, 201 bp, Homo sapiens
aatttttaacctttattttagattcaggggtacacatacagatttgctatgtaggtaaattgcacaccacagaggtttggtttgatgtacgcattattttrttacccaggtaataagcatactacccaacaggtagtttttcttttttttttttgtaatggtttcttttttttattattatacgttaagttctatggtatg

SEQ ID NO: 390387 - DNA, 201 bp, Homo sapiens
  misc_feature (1)...(201): n = A,T,C or G
ctcagctctcccatttcctagcagaatggccttgggcagccattttggctcttttcagctcatttcctcatctaaaaagctgccacctgcttccctggganttggtacttgttgactttctcttctctgtggaagagagacccaggtccaacccaggtacggctgattttctcagctactctcaccccatccttgtgttct

SEQ ID NO: 390388 - DNA, 201 bp, Homo sapiens
ccagacagttctaggaccctgcaaagtggacgtctgtgcccatggccttttgtttgtttgttcttaactttaaaaagataatttttaacctttattttagrttcaggggtacacatacagatttgctatgtaggtaaattgcacaccacagaggtttggtttgatgtacgcattattttattacccaggtaataagcatac

SEQ ID NO: 390389 - DNA, 201 bp, Homo sapiens
gcacatgcggcccacagggacccccaggatagagcagggaagctggggccaccctgggaactctgcacgcctagacctcctctcatatgtatttacttatktactgtgcttctcctttcccttagtttccaggaattagtctatgcctgaccaataatctggctctggaacaggacatcacaccatgccctgctgtcttta

SEQ ID NO: 390390 - DNA, 201 bp, Homo sapiens
ccatgggatccaggagggccagtcgactgttttccctgtctctgtctcgtatctctctctctctctctctcagggccttctgagcagtggggagaaaagcrttaatgatggggccttctctcttgagcttgtgccacacccaggccccgggagacccaacactgggcctagggttggtgggggctgaagtgccctgtggtg

SEQ ID NO: 390391 - DNA, 201 bp, Homo sapiens
gaagcagtggaacgccacaggctgccagcccgtgcgctacgggcaatgctgggtctttgctgccgtcatgtgcacaggtaggaggtagaaaggaccccacraaaaggtcagaagtatagccgctcatgtatgagccttctgaaccattcccatcccagtcccacacagttcccaccaagggacatttggaaggaagccctt

SEQ ID NO: 390392 - DNA, 201 bp, Homo sapiens
cccctaaaatcagcctcccactgaagatggcagggaatttagtaaacactctgccattcatttattttatttagggtattatttaattcactgtgtttcastgagtctttggaggacaggctgaagtgagcccagatgttcactcccaccactcctccctgtgggaacggcacggccagaggctgactctgaggtgacagc

SEQ ID NO: 390393 - DNA, 201 bp, Homo sapiens
ctgttacaattaagtttgatcgtgaataacatctaccttcatcatataattttaagttaactagagtatttttcgttataaaaggaacgaatgcactgcaytgagtatttatggaatgaaggaaagggtcaaaaaaaaagaaagagaaaagtgtaaagtaaaaagtaaagcctcccaatctctaagttccattcaacagca

SEQ ID NO: 390394 - DNA, 201 bp, Homo sapiens
tttttttttttttttgagacgagatcttccttttttgcccaggttaatcttgaactcctgagctcaagcaatcctctcacctcagactcccaaagtactargattactggcatgagccatcgtgcctggctatccacagaggttttaagccctgtgtgtgctaagtctgtctttctatccaacagttcatttgctcatccc

SEQ ID NO: 390395 - DNA, 201 bp, Homo sapiens
aaacttcagcctcacctctgcagctgtcctgtgtcacctccacctacaacccacttgtcagctctacccaccacctgccctagttcttcagccctgttcaracctgccacgcgagctcaaggctccctttgggcttctcccctcccttttctggtcgcatccagaggcctgtccccaccctggcctggagaggctctgtgt

SEQ ID NO: 390396 - DNA, 201 bp, Homo sapiens
cagtgatgaggtgtctggggatccctacccgtgtgatcaccaacttcgactctggccacgatacagatggaaacctgatcatagatgagtattatgacaayacaggcaggattttggggaataagaagaaggatactatctggtgagaaacaacctctcaacctatttctagggccacacatcagagccaagccccatggc

SEQ ID NO: 390397 - DNA, 201 bp, Homo sapiens
tccacttgtcccagcaccactttttgaaaagagcattctttcccccattgaattgtcttggcacctttgtcaaagatcaattgactgtaaatgggagtttwttgctagactctcagttctattccactgatctatatgtctatccttatgccactaccacattgccttgatcaagaagtgccactcctctaattttgtatt

SEQ ID NO: 390398 - DNA, 201 bp, Homo sapiens
tctgaagcaataatcctaactacagaaaggaatggaattccagctttggcttgaagatggagatttagggccagaagagaaatgcagttgagtcaggcctytgagttttgccaaaggaaaggcttgccagtcccaccctcctggcgtaagcagagctcacagcttgctagactttactggctcaggcagtgcttgtctgag

SEQ ID NO: 390399 - DNA, 201 bp, Homo sapiens
accccgtctctactaaaaatacaaaaattagcagggcacggtggcaggcacctgtaatcccagctactcgggaggctgaggcaggagaattgcttgaaccygggggggcagaggttgcaatgagccaagatcacgccactgcactccagtctgggtgacaagagtgagactccatctcaaaaaataaataaaaaaataaag

SEQ ID NO: 390400 - DNA, 201 bp, Homo sapiens; identical to SEQ ID NO: 85566

SEQ ID NO: 390401 - DNA, 201 bp, Homo sapiens
aaagcagcttctggaattatgaggcgtgggcaagtattcctgcacatgcggcccacagggacccccaggatagagcagggaagctggggccaccctgggawctctgcacgcctagacctcctctcatatgtatttacttatttactgtgcttctcctttcccttagtttccaggaattagtctatgcctgaccaataatct

SEQ ID NO: 390402 - DNA, 201 bp, Homo sapiens; identical to SEQ ID NO: 85564

SEQ ID NO: 390403 - DNA, 201 bp, Homo sapiens
ccacacatggcatgttgaggaaatggatgtttctaacacttctctatatggcttctcttcagatcaacagcaatgatgataatggggtgctcaatggaaastggagtgagaattacacagacggcgccaaccctgcggagtggacgggcagcgtggccatcctgaagcagtggaacgccacaggctgccagcccgtgcgct

SEQ ID NO: 390404 - DNA, 201 bp, Homo sapiens
aggggagggatttggtgtgcagggcatatgcaccaggtgaattgtgaccctagagttttgaaaccccacacctgaatgggagggaattcatggctgttctstttgacacagttaccttccaagtgagtttatattccactagggttggggggaagtcattactttttacatactcccacgtgacaagcatgggtgccttcc

SEQ ID NO: 390405 - DNA, 201 bp, Homo sapiens
ctcttgcctcactgctgtctcagggtccttcagtgacagcttttcaaacttcagcctcacctctgcagctgtcctgtgtcacctccacctacaacccactygtcagctctacccaccacctgccctagttcttcagccctgttcaaacctgccacgcgagctcaaggctccctttgggcttctcccctcccttttctggtc

SEQ ID NO: 390406 - DNA, 201 bp, Homo sapiens
agggcagggggaggcttgctccctgctctccctccctgccctcttctttggcacgttttcttgtcactgtgagtgtcatccaccctcctgactgtactttyagcataaatgcgcccctgcaatgctgctctcttgcctcactgctgtctcagggtccttcagtgacagcttttcaaacttcagcctcacctctgcagctgt

SEQ ID NO: 390407 - DNA, 201 bp, Homo sapiens
gttcccaaagcatgttttttgaaaatatatatgttattatttcatagccatagtaactaatgtttattggggacttcctttgtgccaggcactgtgctaawaccctgacagcctagagtagtggagaagcttgtggactctggaggcaagatgcgtgaggttgcataccagcactaccattaattggctgagtaaccttgg

SEQ ID NO: 390408 - DNA, 201 bp, Homo sapiens
ccaagtgagtttatattccactagggttggggggaagtcattactttttacatactcccacgtgacaagcatgggtgccttccctctctgcctctcccccygaagtttgaagacaaaatcatagacatctgcctgaagctgctagacaagagcctgcacttccagactgacccagccacagactgtgctctgcggggaagc

SEQ ID NO: 390409 - DNA, 201 bp, Homo sapiens
tctgcctcttgggctccagggctttggctgggtcttattcaaaagttgtttcggccaggtgcagtggctcatgcctgtaatcccagcactttgggaggccraggcaggggaatcaccaggtcaggagatcgagaccaacttgactaacatggtgaaaccccatctgtactaaaaatacaaaaaattagctgggcgtggtgg

SEQ ID NO: 390410 - DNA, 201 bp, Homo sapiens
ggcgatgggaggctgcctggttgggactgggactgggccctcttaaactaaagcaacccaacttgcatgtcttttatacatcaaatcctcacttatgattrgtttgcatatagggccctctgcttaatacttttttgaaaacccctgagctagatattatctaagatttttctaactcaattatgtaggggcctttaaaac

SEQ ID NO: 390411 - DNA, 201 bp, Homo sapiens
tgcctgctgagtagcctgcgtcatgtgcccaacctgaactgtagccagttagtgctgtctaataaattggtctccaaagggggcaagcttctttttccacygttaggtaaaagccaagtgctttcttagctggcagtgggtgtggacatttttttgatcatgagtgaaagccaacagtgggcaacagctcttgggggtgat

SEQ ID NO: 390412 - DNA, 201 bp, Homo sapiens
gtaagtggtggacaggattggctccacaaccccactattttgtctaaccctggctgccccattgcagggctagaagtggccctcacagacctccagagctscagaaataatgtgcggcaccacacggaggagatcactgtggaccacctgcttgttcgccggggccaggccttcaacctcaccctgtacttcaggaaccgg

SEQ ID NO: 390413 - DNA, 201 bp, Homo sapiens
tgagatgagaggctgagtaattaggaaactacaaactgattagtgtcctttctgagcacagagaatgggctcaatgaagatgtgtacatggaagggaaacrtgagtcagggctgtggtgtgggccatggggccagagcaagatggcaacccaagggaaatgaccttgaatttggagttgttgagggcctgatagcctgact

SEQ ID NO: 390414 - DNA, 201 bp, Homo sapiens
tttaaagctctcagaggtaagctccagctttgcaggggatgggaggacatgggtaaggggtagataggaacataataataaactaattcacagtggagcaraagtcagaagagtcaacccccatccttagccctccccagcaggtctggaagtccacagtaaaatgctgtcaaaagtctctcctctgtttctcaggcccat

SEQ ID NO: 390415 - DNA, 201 bp, Homo sapiens
aagacaaaatcatagacatctgcctgaagctgctagacaagagcctgcacttccagactgacccagccacagactgtgctctgcggggaagccccgtctaygtcagcagagtggtgtgtgccatggtgaggtccctggcgtgcccggggagggaggaagctgtgcagcgggagccctgcccactcacagttgccccctgca

SEQ ID NO: 390416 - DNA, 201 bp, Homo sapiens
tccatgtcatgaatatttgggtgaagtgagaggactgagtccttcaggaagcaagcacaagactgacaggtagagactagatcttgtataagatagagagrgaaccttccagtgtgtggaaaagcctagcatctaatgggccaggtatgtgtgtgtagaaggagtgagccaggtttgggtgtggttgtctggaactgcgtg

SEQ ID NO: 390417 - DNA, 201 bp, Homo sapiens
tccagagttgtgaagagagctggactgaaacagccccgagactcaggcaggaaaagacagacttgactacatcacgtaactgagtctcacgcggagagggsacatacccagggctgtggcgctaaagcaggctcaggctcggggaaggcctcagagggagtggcattcacaccaagtctgaaggaccaggaggagccagcc

SEQ ID NO: 390418 - DNA, 201 bp, Homo sapiens
accagcctcctatcaggctgtgtctgaggctgcctctgaggagggcacctttccctcagggtcagacagagtttccagacagttctaggaccctgcaaagyggacgtctgtgcccatggccttttgtttgtttgttcttaactttaaaaagataatttttaacctttattttagattcaggggtacacatacagatttgct

SEQ ID NO: 390419 - DNA, 201 bp, Homo sapiens
aaatatcactattccagtgttccagacagctccagcatgttcctgcagatggcaaatggaagatttccccaggtccaggccccaaagtccaggaatatacsggtccggaatctacagctcacaggtgatttttttgtgccctttttgcagtgatgaggtgtctggggatccctacccgtgtgatcaccaacttcgactctg

SEQ ID NO: 390420 - DNA, 201 bp, Homo sapiens
aggcctaaggtccagagttgtgaagagagctggactgaaacagccccgagactcaggcaggaaaagacagacttgactacatcacgtaactgagtctcacrcggagagggcacatacccagggctgtggcgctaaagcaggctcaggctcggggaaggcctcagagggagtggcattcacaccaagtctgaaggaccagga

SEQ ID NO: 390421 - DNA, 201 bp, Homo sapiens
caacgacgcctcctgcaccagcctcctatcaggctgtgtctgaggctgcctctgaggagggcacctttccctcagggtcagacagagtttccagacagttmtaggaccctgcaaagtggacgtctgtgcccatggccttttgtttgtttgttcttaactttaaaaagataatttttaacctttattttagattcaggggta

SEQ ID NO: 390422 - DNA, 201 bp, Homo sapiens
caattaccagggagccaggcaaaaatatccagtccatgagggccagaggcagggtgagggccagagctgggatctggctggggaggatctgagcaggtgcmaggcagggtggctgaagggcggtggggagggctgagcagttgctgggagtgctggtgagtgggtgtctgtggttcgtctacgtgggcctcggggacagac

SEQ ID NO: 390423 - DNA, 201 bp, Homo sapiens
tgcacttccagactgacccagccacagactgtgctctgcggggaagccccgtctacgtcagcagagtggtgtgtgccatggtgaggtccctggcgtgccckgggagggaggaagctgtgcagcgggagccctgcccactcacagttgccccctgcagtgggtgaaagagggaccctctggcaaagccatcttggatgagac

SEQ ID NO: 390424 - DNA, 201 bp, Homo sapiens
ggtgaggctctccagaagaaaggcaggccccgctcccgtggaaagcaccccacccctgcccagccctgcaacaaacagcccaccgaggctcccctgttctycttcaggcgtctactgctgtggccctgcctctgtcagagccatcaaagaaggagaagtggacctgaactatgacacgccctttgtgttttcgatggtgaa

SEQ ID NO: 390425 - DNA, 201 bp, Homo sapiens
agaaagaccaagcagtacaacgtctcccttggctctgtttgacacaggaacttccatgtctggaatgagtgctggatggcccggaaggatctgccccctgsatatggaggctggcaggtgctggacgccacacctcaggagatgagcaacggtgaggctctccagaagaaaggcaggccccgctcccgtggaaagcacccc

SEQ ID NO: 390426 - DNA, 201 bp, Homo sapiens
aaaaccacaaaaggaggctttgcgtgcctcaaagatgaggttatagtttttgcacatccatttagttgcctgttacttgagaattttagagaactccctgscctaccctttctgtgcccagggccaggcaccctggagttctaggccctcaggctcttcctgttctggcctttcactctttgacaagattggaaccctcag

SEQ ID NO: 390427 - DNA, 201 bp, Homo sapiens
tctgagcagtcagcatccccacctttgcctagaatctctcccatgagctccagaagtggggaaggaagttggaaatatcactattccagtgttccagacakctccagcatgttcctgcagatggcaaatggaagatttccccaggtccaggccccaaagtccaggaatatacgggtccggaatctacagctcacaggtgat

SEQ ID NO: 390428 - DNA, 201 bp, Homo sapiens
ctctgtaagccatgtgctaaccatcaggccataccacctcatgaacattgctagcagctgccattaatccagcaccaagtccctcaggaacacactggacrctttcacttttactaatcctgaccaccacctgcaaagtcgatatatcattatagccatttcacagatgaggaagcaggcttaaagtgactgagggactct

SEQ ID NO: 390429 - DNA, 201 bp, Homo sapiens
aaagtagtggtacctacctcataggattattgaagggattgagtgacttcatactggagagtgcttagaatagtgcctggctatagtgagtgttcaggaakcatcagttagggtcctcttgtctgatcccctaaatgaccttatgaggtgggacctatcatctccatttttcagaagaggaaattgagtggtggagccagt

SEQ ID NO: 390430 - DNA, 201 bp, Homo sapiens
aatatttgggtgaagtgagaggactgagtccttcaggaagcaagcacaagactgacaggtagagactagatcttgtataagatagagagggaaccttccaktgtgtggaaaagcctagcatctaatgggccaggtatgtgtgtgtagaaggagtgagccaggtttgggtgtggttgtctggaactgcgtgatgagagaagt

SEQ ID NO: 390431 - DNA, 201 bp, Homo sapiens
aaaggaggggcaacccccttcatttatctcgtgagcggtatcggaagctccatttggtctggcaacaacactgcattatagaagagattgctaggagccargagactaatcagatgttatttggattcaactggcagttactgtgagctccaactctgcctcaagacaatcacaaatgacgacagtagtaaaggctgattc

SEQ ID NO: 390432 - DNA, 201 bp, Homo sapiens; identical to SEQ ID NO: 85588

SEQ ID NO: 390433 - DNA, 201 bp, Homo sapiens
ggggctagtgagaattttaatgatatggtgaagaaaaatatatctgtataattaatttattatattggtgtatgggctgtgagttcaccttttagtggtcrtttgtcatttcataacaactatgcattttggttcactgtgatgatgatctatatttagtgactgcaacatgtttataccactgattcaaattccatccat

SEQ ID NO: 390434 - DNA, 201 bp, Homo sapiens
gtatttccaggaatttattccccttcataatttgtctcatttcattttatttcatccacttggtagatgaagtcacgtcaaacagttgtagacattttatrtgttggttaactcttctgcaattttgtatttggtgttttccccccaagtttagttcaactgacattggatcactgacaaaattctaataatctgtgatag

SEQ ID NO: 390435 - DNA, 201 bp, Homo sapiens; identical to SEQ ID NO: 85592

SEQ ID NO: 390436 - DNA, 201 bp, Homo sapiens
catttggctgccccggaggcgtttgcctcttaggtttgagcatcggtgaggttggagttggggctctttgcaatgcagagaacacgttctctgccgatatrtgatctgtgagtcaggacctgtatttccccagagtcaaattgtcaggacctgtgagtcaggatctgagagtcaggacctgtttccccagagtctaattgt

SEQ ID NO: 390437 - DNA, 201 bp, Homo sapiens
ctagccagtgttactcctctggaatattaggattttcgtatattcagaatctaaagtatacgtaaagtgcacggtactagttccaaagtggttcactaaattgtcgtacatgtttgtcaggataaaaaacatattattattttggccgggcgcggtggctcacgcctgcaatctcaatactttgggaggctgaggtgggtg

SEQ ID NO: 390438 - DNA, 201 bp, Homo sapiens
tggacaactagatgtttagaattggatataagagggcaaatactttaataaatacagtacagatatttttaataaaattttcaggactttttaactaacaraaaaaaatgtgtttcactagaatgatcaaggagaatgtaaagagtctccaaaatataacctgagagtgaagacgacttctctaggcataacataaacctt

SEQ ID NO: 390439 - DNA, 201 bp, Homo sapiens
atgaaatagacttccttgaagcttttaaaaatattcagccctcatcgtttcgaagcgtcattggattaatggatatcaagcctgttgactgggaggagatkggtggccttgaagatgtaaaactgaagttaaaacaggtaagacagataatctacttaatccagtaggatattacagattaacattctgtgcatttatgat

SEQ ID NO: 390440 - DNA, 201 bp, Homo sapiens
agccagtgttactcctctggaatattaggattttcgtatattcagaatctaaagtatacgtaaagtgcacggtactagttccaaagtggttcactaaattgtcgtacatgtttgtcaggataaaaaacatattattattttggccgggcgcggtggctcacgcctgcaatctcaatactttgggaggctgaggtgggtgga

SEQ ID NO: 390441 - DNA, 201 bp, Homo sapiens
ttaatatttttttcctaacaaaagatatttcgacaagcaagagcaagcactccagcaattttgtttttggatgaaattgattcaatcttgggagctcgctyagccagcaagacaggatgtgatgttcaagaacgagttctttctgttctcctgaatgaattagatggtgttggacttaagacaatagagagaagaggaagt

SEQ ID NO: 390442 - DNA, 201 bp, Homo sapiens
aggtcaggagttcgagaccagcctggccaagatggtgaaaccccgtctctgctaaaaatacaaaaaataagccgggcatggtggcacatgcctgtagttcyagctactctggaggctgaggcaccagaatcacttgaaccaggaggtggaggttgcagtgagctgagatggtgcccgctgcactccagactgggcagcaga

SEQ ID NO: 390443 - DNA, 201 bp, Homo sapiens; identical to SEQ ID NO: 85598

SEQ ID NO: 390444 - DNA, 201 bp, Homo sapiens
gacataatacttgtacttaacctaaataggccttaatctagaatcatacttcaggctttcttctatgaaaacataactttttaagagtcagttattctgtrgaatattcgtcagtttgggtttaactaatgtttcttcatgattcaattcaggttttgcattttgggcaggaatataatagaaatgatcctgtgtctttct

SEQ ID NO: 390445 - DNA, 201 bp, Homo sapiens
ctcaggaggatcacttgaggcttgaccccaggacacccaggagatcgaggctgcagtgagctatgattgcaccactgcactgcagcttgggcaacagagcragatcctgtgtctttaaaaaaaaattaaaaaacaattttgactgggcatggtggcttacacctgtaatcccagcactttgggaggccgaggcaggcagat

SEQ ID NO: 390446 - DNA, 201 bp, Homo sapiens
tgtcatttcaaagaaaaataaaaggtcgagtaaatcttcctctttagggatatgagagtcaagactttctgtagccatatatctccaccggttggtcatawgtatctgtctttttaagtagcctgtttaaggtgtaagccttcattggaggctcaggtgcactcaagtcaccagatgagtgttctcccctttgggataagg

SEQ ID NO: 390447 - DNA, 201 bp, Homo sapiens
tcccagcattttgggaggccaaggcgagaggattgctttagcccaggagtttaagatcagcctgggtaatacagtgagaccccatctctagaaaaaataaraaattagtcaaatgtggtgttagtcccagctacgtgggggactagtagtcccagctacttgggagggggagatgggaggattgcttgagcctgggaagcg

SEQ ID NO: 390448 - DNA, 201 bp, Homo sapiens
cacaaggtagtcatttacacatttactctgtgtgagctcagcagaattgaattccaacttggatataggtgtccatggtgttctacttaccctgggttccrccttcttccttgcctggtggcctttcatgacatcataattttgatcttcctttgttggatactctgatcttgttcacagagaaacataagcctaaatata

SEQ ID NO: 390449 - DNA, 201 bp, Homo sapiens
cagctacgtgggggactagtagtcccagctacttgggagggggagatgggaggattgcttgagcctgggaagcgaaggttgcagtaagatgagatcgtgcygctgcactccagcctgggtgacagagtgagactctgtctcttaggaaaaaaaaaaagctgaaggagtagacaatggccaggacacacgggtccttgtaaa

SEQ ID NO: 390450 - DNA, 201 bp, Homo sapiens
tttttttgttccttgggcttttatcaagttttgaagggatagaaaaataaaatttaatatctattatacctttaagttgtatctgataattcatgtatttrcttcttaagccatgtctgatagtattatttgtacccaagagagagatttagccgggcgtggtggctcacatctgtaatcccagcactttgggaggccaag

SEQ ID NO: 390451 - DNA, 201 bp, Homo sapiens
tctcctgactaacaacagtggggattagttttgtctgcttttgaactttatatgaatggaagcatgtggcatatgttattttctgtctggttctttaaccyaaaaagaaatttatccatagttttgtgtgtagcatagtttataatattctagtatatgaatattctacatttgtttatccattcttttattttggaatat

SEQ ID NO: 390452 - DNA, 201 bp, Homo sapiens
cccaggtgttgacgctgctggacggcgccagtggggaccgcgaggtcgtggttgtgggagccactaaccggccggacgctctagacccagcgctgcgtagrcccgggagatttgaccgagaggtgaatgggcttggcgggtttgcccactgtcggtggaacctcggccgcttctggcgccatttggctgccccggaggcgt

SEQ ID NO: 390453 - DNA, 201 bp, Homo sapiens
ccggttggtcataagtatctgtctttttaagtagcctgtttaaggtgtaagccttcattggaggctcaggtgcactcaagtcaccagatgagtgttctccsctttgggataaggcttttcataggttctcatatggagaatgtttctcttagctactcccttagccatgcacacaaagtagctctttggttaatgatttgt

SEQ ID NO: 390454 - DNA, 201 bp, Homo sapiens
acctcattttgaattgaagaaatttagttaacacagtaatgaatgagtactggttcttcctgtcatattggcagacatttaagagtttggaaatgggccaygtgcggtggctcacacctataatcccagcactttgggaggctgagatgggtgggtcagttgaggtcaggagttcaagaccagcctggccaacatggggaa

SEQ ID NO: 390455 - DNA, 201 bp, Homo sapiens
cctttcggccttcactcagctgctagcaacgcagtcttccctagcgcatgcgcgcaatctgcttccggcctgcgagctcggtgttccgctttttgtgggcygggtgggtttcctaatctggtttcgtctgcctggttcatctgtgtgcgatggctccggactcggatcccttccctgaagggccgctcttaaagctgctac

SEQ ID NO: 390456 - DNA, 201 bp, Homo sapiens
caacacccttgtaatttcctgagttacaggggtgctaggagaatctttggttctaatgtttggtcttcactctcgttcctgacatggagctcttaaatccygtggactttcctgagtgataggagcagtcttttgttctaccaaggcaattcttgcccggctcctagatgagggctggtcaccggaaagcccaaccatgat

SEQ ID NO: 390457 - DNA, 201 bp, Homo sapiens
ttaaatttgtccttgatctgcaggtctgtaattcatgactatttcctaacaatatttaagatattagattaaatataatacttttcaactttgttggttgkaaaatccagtattttgtatataataaatagtcctgaatccttaaacccattcaggaaaaaactgatttcagcaggctaaggattctgaaacagagttttc

SEQ ID NO: 390458 - DNA, 201 bp, Homo sapiens
atcccagcactttgggaggctgaggtgggaggatcgctcgagcccatgagttccagaccagcctgggcaacatagggagaccgcatctctacaaaaaaaawatatatatatttttttaattagccaggctggtggcacatacctgtagttctagctactccggagggtgaggtgcaaggattacttgagcctgggagactg

SEQ ID NO: 390459 - DNA, 201 bp, Homo sapiens
tgagtctactcagcgttattttgcaactagagtggaggaatcctaaagtgttaaaagggctttgaagattgagtcagcatccttatcatacagtgcagaartctgaaattacagagattatgcagtgtatcgtggtcaaccagtaaatttgttgtccgtaaagtacggtgcagaaatctgagattacagagattatgcagt

SEQ ID NO: 390460 - DNA, 201 bp, Homo sapiens
tcggaaggctgaggcaggagaatcacttgaacccgggaggcagaggttgcagtgagccaagatcccaccactgcacgacagcctgggcaacagagaaaccrtgtccggggggaaaaaagtgtataacctatagtcttagcactttagaaggccgagacaggaggatctcttgaggccaagagttcaagaccagactgggca

SEQ ID NO: 390461 - DNA, 201 bp, Homo sapiens
acccaggaggcggaggctgcagggagccaagatcacagcactgcactccaacctgggtgacagagtgagaccccgccaaaaaaaaaaaaaaaagagtttgrtaatgtctgtactggagaggtgtggagagaacacagcttcatattatcggagaagaataaattgttgcagcttccttagaggacaatttggtaatagctg

SEQ ID NO: 390462 - DNA, 201 bp, Homo sapiens
agcatccctgaaaactgttgactcagaaatctgtatatctagagtagacatttcttctgatcatcagaactacttcactgcctgcctactggataaccccrgggatgtcaaactcagcatgtaaaaagttcagctagtcagctctgcccccacacttggattccctacctcagttaatacagccagccaccccatccccta

SEQ ID NO: 390463 - DNA, 201 bp, Homo sapiens
cagtcttccctagcgcatgcgcgcaatctgcttccggcctgcgagctcggtgttccgctttttgtgggccgggtgggtttcctaatctggtttcgtctgcytggttcatctgtgtgcgatggctccggactcggatcccttccctgaagggccgctcttaaagctgctacccttagacgctagagaccggggcacccagcg

SEQ ID NO: 390464 - DNA, 201 bp, Homo sapiens
aggccaaggcagaagggttgcttgaggccaggagtttgagactagcctggccaacatagcaaggccccatatctgaatgaatgaatgaatgaatgaaaaayaaaggagattattatttccaatagtcttagtaatggaacatttccagttttcttgaggaatgagtttctttggttttaatgaattaaaatggcctttgga

SEQ ID NO: 390465 - DNA, 201 bp, Homo sapiens; identical to SEQ ID NO: 85594

SEQ ID NO: 390466 - DNA, 201 bp, Homo sapiens
aaataggccttaatctagaatcatacttcaggctttcttctatgaaaacataactttttaagagtcagttattctgtggaatattcgtcagtttgggtttractaatgtttcttcatgattcaattcaggttttgcattttgggcaggaatataatagaaatgatcctgtgtctttctcattgcatctgttaggcagcaca

SEQ ID NO: 390467 - DNA, 201 bp, Homo sapiens; identical to SEQ ID NO: 85595

SEQ ID NO: 390468 - DNA, 201 bp, Homo sapiens
tgatcagcctcttggcctcccaaagtgctgggatttgcttgggtccacttatatgtgaattttcttccacctctgccacactgaagcagtgaaccaacccytcctcttcttcctccttctcagcctactcaatttgaagagatggagacctttctgatgactcacttctgcttaatgaatagaaatatattttctcagcca

SEQ ID NO: 390469 - DNA, 201 bp, Homo sapiens; identical to SEQ ID NO: 85600

SEQ ID NO: 390470 - DNA, 201 bp, Homo sapiens; identical to SEQ ID NO: 85590

SEQ ID NO: 390471 - DNA, 201 bp, Homo sapiens
cttgaagatgtaaaactgaagttaaaacaggtaagacagataatctacttaatccagtaggatattacagattaacattctgtgcatttatgatgacaacrtactgcgctgaaactgctcttgctcctatcactaatgtgatcctaacatctaaatccaatgattgcttttcagtccttatttaattggacttctgtggat

SEQ ID NO: 390472 - DNA, 201 bp, Homo sapiens
atatatctccaccggttggtcataagtatctgtctttttaagtagcctgtttaaggtgtaagccttcattggaggctcaggtgcactcaagtcaccagatragtgttctcccctttgggataaggcttttcataggttctcatatggagaatgtttctcttagctactcccttagccatgcacacaaagtagctctttggt

SEQ ID NO: 390473 - DNA, 201 bp, Homo sapiens
tgtggagaatggactgtttccagctcataataggaggctgagaattgttaaatgaagaaatgaatttactggatgatatgacattttattattatactaaracaactcttctctttttgtgtactttcagagcattgagtggcctctgaaattcccttgggaatttgttagaatgggcctgacacaaccaaagggagttct

SEQ ID NO: 390474 - DNA, 201 bp, Homo sapiens
tggatcatgaggtcaggagttcaagatgagcccggccaacatggtgaaaccctgtctctactaaaaatacaaaaattagttgggcgtggtggcagccttcygtaatcccagctacttgggaggctgaggcaggagaattgcttgaaaccagaagacggaggttgcagtgagtccagatcgtgccactgcactccagcctgg

SEQ ID NO: 390475 - DNA, 201 bp, Homo sapiens
ctgatctaaaagacgttaaatggatgcagtacagggactggtaaaagcacaaaattgaaatgaacaatatggctacctgatagtggatttcacagtggaasctgtgggacgcaactcttcagatcctctcacctgcgttacagtttcagaaattgattttgccaattcgcctacatgtgatcctgccctaatgaactaggt

SEQ ID NO: 390476 - DNA, 201 bp, Homo sapiens
caagctggccttgaactcctgggcttaaacagtcctccaactcggcctcctaaaatggtgggattatagtcatgagccaccatgcctggcctacaaaaaawttttttaaattagccaggtgtggtagcacgtgcttatggtcctagctactcaggaggatcacttgaggcttgaccccaggacacccaggagatcgaggct

SEQ ID NO: 390477 - DNA, 201 bp, Homo sapiens
gttcagaaacaacccaggggaagtggaaggaagaaaggcaaaaagcatgaagggacagacaactgggaaggtactggctccatcttttattctttcccccrccagctgaggggctgctgctacctctccctgtaccagggcagataagggataccttacactttgttaaactttttgtgaagtattcctattaaaggatta

SEQ ID NO: 390478 - DNA, 201 bp, Homo sapiens
cgggtttgcccactgtcggtggaacctcggccgcttctggcgccatttggctgccccggaggcgtttgcctcttaggtttgagcatcggtgaggttggagttggggctctttgcaatgcagagaacacgttctctgccgatatatgatctgtgagtcaggacctgtatttccccagagtcaaattgtcaggacctgtgagt

SEQ ID NO: 390479 - DNA, 201 bp, Homo sapiens
ccagtgttactcctctggaatattaggattttcgtatattcagaatctaaagtatacgtaaagtgcacggtactagttccaaagtggttcactaaattgtcgtacatgtttgtcaggataaaaaacatattattattttggccgggcgcggtggctcacgcctgcaatctcaatactttgggaggctgaggtgggtggatc

SEQ ID NO: 390480 - DNA, 201 bp, Homo sapiens
agcaacgcagtcttccctagcgcatgcgcgcaatctgcttccggcctgcgagctcggtgttccgctttttgtgggccgggtgggtttcctaatctggtttygtctgcctggttcatctgtgtgcgatggctccggactcggatcccttccctgaagggccgctcttaaagctgctacccttagacgctagagaccggggca

SEQ ID NO: 390481 - DNA, 201 bp, Homo sapiens
cggccggacgctctagacccagcgctgcgtagacccgggagatttgaccgagaggtgaatgggcttggcgggtttgcccactgtcggtggaacctcggccscttctggcgccatttggctgccccggaggcgtttgcctcttaggtttgagcatcggtgaggttggagttggggctctttgcaatgcagagaacacgttct

SEQ ID NO: 390482 - DNA, 201 bp, Homo sapiens
ccccagctgtgggggttacaggagacaggcacaggcctggaagacaatggggtctgaatacacgcttttttaactgtgtcaacgatcgtcactgtcgaagrtcaattgcttctgtcatctcctacgtcccttcaaatgccctccctgccccatttcctaccccacacaggtccctgccatctccttggcctatgaggcagc

SEQ ID NO: 390483 - DNA, 201 bp, Homo sapiens
ttttgaaaagctttatgaaaataaagcactcacctatgcgaaggcaaccaggcttactaatgtgtcattcttaggcaaaagccaagagcgcatatcatgamgtggtgatcggatgctgattcacagttctgtctggaagccatggatagttctaattaattttaaatggggaaatgtattcaatacttattcacaaatgta

SEQ ID NO: 390484 - DNA, 201 bp, Homo sapiens
cagccgctgcttttgaacacacacccccactgcctgggctccctggctgagtggtgggaatggaggccccagcccctctcttccctgactctccggctctycctccctcaggctggccgtgagtactcacctgccgccaccacggcagagaatgggggcggcaagaagaaacagaaggagaaggaactggatgagctgaag

SEQ ID NO: 390485 - DNA, 201 bp, Homo sapiens
cccccactgcctgggctccctggctgagtggtgggaatggaggccccagcccctctcttccctgactctccggctctccctccctcaggctggccgtgagwactcacctgccgccaccacggcagagaatgggggcggcaagaagaaacagaaggagaaggaactggatgagctgaagaaggaggtggcaatggtgaggga

SEQ ID NO: 390486 - DNA, 201 bp, Homo sapiens
tgaccctgacagccaagcgcatggcacggaagaactgcctggtgaagaacctggaggcggtggagacgctgggctccacgtccaccatctgctcggacaaracgggcaccctcacccagaaccgcatgaccgtcgcccacatgtggttcgacaaccaaatccatgaggctgacaccaccgaagatcagtctggtgattggg

SEQ ID NO: 390487 - DNA, 201 bp, Homo sapiens
ctcaggtaagatggcagggctgggctctgggctaggctgtaaggttttggcaagagtccagctcatcttctgtcagctcccaggcactaagatagagatgracagaaaagatcctccagctttccatgccagcacctaattgtttatggggcttctccttctgcttgacggtgtgggagaccagcaggagaagaaggcagg

SEQ ID NO: 390488 - DNA, 201 bp, Homo sapiens
tcccctaccatcatcactctcagtcacagacaaaggtctgggctgtcatcttggatggcactgcctgctcatcccaagtggcagctgcccctttagggttkgggggaaggtcaggtccctgaaactctttctccttaccagctatatctgggtgtggtgctggcagctgtggtcattgtcactggctgcttctcctactac

SEQ ID NO: 390489 - DNA, 201 bp, Homo sapiens
cacagggatgatccaggcactgggtggcttcttcacctactttgtgatcctggcagagaacggtttcctgccatcacggctactgggaatccgcctcgacygggatgaccggaccatgaatgatctggaggacagctatggacaggagtgggtgagtggtgctgtgtaaacacagcgcacatgtgtgaaggtacgggaagc

SEQ ID NO: 390490 - DNA, 201 bp, Homo sapiens
agaaagaaagaaaattgttttaaattagctgagcgtggtggtgcatgcttgtggccccagctacttgagaggctgaggtgggagtattgcttgagccctaraagcggagggtgcagtgagctgaaattgcacactgcattccatcctgggtgacagagtgagaccctgtctcaagaaaaaaaaaaaggccatctgattcac

SEQ ID NO: 390491 - DNA, 201 bp, Homo sapiens
tcaagaacatggtacctcaggtaagatggcagggctgggctctgggctaggctgtaaggttttggcaagagtccagctcatcttctgtcagctcccaggcwctaagatagagatggacagaaaagatcctccagctttccatgccagcacctaattgtttatggggcttctccttctgcttgacggtgtgggagaccagca

SEQ ID NO: 390492 - DNA, 201 bp, Homo sapiens
agcagttgagtctaaggagaaggctgtgtgcagagctgagaggggcccagtgaggtttaaaggtggagagacccaggtccaaatgtcaacaccatgcctaygcccctgctaaaccttctctcagtgtggggtgcttgtgcagtgcctccttgcatctgtgtgttatgaatgctctatgccccaggtatttctttgttgtcc

SEQ ID NO: 390493 - DNA, 201 bp, Homo sapiens
actcaaattcacacagacacacacaaatccccacctcacatacacacacatcccacacacacacatagacacacacaatccccaccccccacacacacatytcacacacacgcacacatacacaaatccccaccccacatacacacacacacacataccccacacacacacacacatcccacacacacacattccctctca

SEQ ID NO: 390494 - DNA, 201 bp, Homo sapiens
gagtgggatacttggaacttgaaactaacagtctccaaactaccaatgtgtgtacagatcccacggcggtcacataccctagtgctctcctctcctctgcmcgccccagccccctgcccacagttagacccacagcccaccacacatgccccctccatctctccctccaccccactcccacatctctagtccttccctgca

SEQ ID NO: 390495 - DNA, 201 bp, Homo sapiens
caccaactgtgttgaaggtgagaagccaggctgccccctgtaggaaagagtctgaatcctgaatccatagtcaggatgaagggctctggtagtacttaccwggcaaaagctctgccattggtggggcaattgaggggtcagggggccctgaatattatggaaacaccctccacagagcagggtattgactgagggcagcct

SEQ ID NO: 390496 - DNA, 201 bp, Homo sapiens
caccctccacagagcagggtattgactgagggcagcctgactccatgggaaatgtatctcccttccccagggagatctctgttctgtccaccccaagacttgagtggatttcaaagctttcaggtattgggttaagaaccccttacgcatgcgcacacacagatgcacatacgctcagaaccaacctggattcttaggagt

SEQ ID NO: 390497 - DNA, 201 bp, Homo sapiens
acacacagatgcacatacgctcagaaccaacctggattcttaggagtctttggatttgattgatgcttctattccttgtggttctgggcctcgctgccccyttcgataacctttgctttggccagggccccagggtctgggagggccaagaaggcattctggccaggtgaacacttggggcctacttcaggctgcttctaa

SEQ ID NO: 390498 - DNA, 201 bp, Homo sapiens
aacgagactgtggaggacattgcagcccggctcaacattcccatgagtcaagtcaaccccaggtgaggcctctgcaggaagcccctgtgccctaatcaacmcgtcctcttgcacagaaggcttgggtgtcccctgggagtatttggatagcatttctgggacctttataggccttacctctgacactattgtgactggttc

SEQ ID NO: 390499 - DNA, 201 bp, Homo sapiens
ctgcattgaagaaggctgacattggcattgccatgggcatctctggctctgacgtctctaagcaggcagccgacatgatcctgctggatgacaactttgcytccatcgtcacgggggtggaggagggtgaggaggctgcatgggttgggatggtttgcaggatactgaagccggcacctctgttccctgtccctttacccc

SEQ ID NO: 390500 - DNA, 201 bp, Homo sapiens
aaagacatgtttcaccatgcacagactacccagtttgccccatccctgttctgggttctagagataaacaaaggtcaataagaactcccagagctgccatyacttaatggcaggggtccaagcacaactgaaacctgtgccctctgtggtaaagccagtgagcagagtcagggctgcatcagagaaggagtaggagggaag

SEQ ID NO: 390501 - DNA, 201 bp, Homo sapiens
ctgcggtggtgaagagaggcagggggcaggaggggctggtacaggtgccaggggtcagctgtctctgtccccacccaccctccagagaagccaaggcatgygtggtgcacggctctgacctgaaggacatgacatcggagcagctcgatgagatcctcaagaaccacacagagatcgtctttgctcgaacgtctccccagc

SEQ ID NO: 390502 - DNA, 201 bp, Homo sapiens
atcatagtggccaacgtgcctgaggggcttctggccactgtcactgtgagtgggtcaggctgaggtgccaccaggggagggtctcactactctttcctcaragtgatagaggcacagttgcttgtagcttctcactactttttccccctagagtcacttattggatgcgatactcagagatcacttaatacatggcttagg

SEQ ID NO: 390503 - DNA, 201 bp, Homo sapiens
gcacagaaggcttgggtgtcccctgggagtatttggatagcatttctgggacctttataggccttacctctgacactattgtgactggttcctcagccctragcttgtatccaggctgtgccactgaatacccatgtaaccttggagatgtcacattcccttcctgagcctccattttctcaccacaaaattaggatgcca

SEQ ID NO: 390504 - DNA, 201 bp, Homo sapiens
gcctttcaaaatgcctacatggagctggggggacttggggagcgtgtgctgggtgagaggccagaaacaggaggctcagaaggggattcccaagcctctgyggcatccctggggtgggggactgtgggggcgtccaggaagccactctgcggatctcactgatcccttctgcccccctttaggattctgtcaactgaatct

SEQ ID NO: 390505 - DNA, 201 bp, Homo sapiens
ggaaggattgctttagcccagggttcaaggatgcagtgagctataattgcaccactgcgctccagcctgggcaacatagcaagaatccatctcttaaaaaraaatctaggactctcctagaatccttgataaaataatctgaaggaagagagatggggaaaaaacagttgaggtgtctttccagggagcttatccagactg

SEQ ID NO: 390506 - DNA, 201 bp, Homo sapiens
aaataggcaccaggtggaaactgagcagcccctctatgacaaggactctatttcctgagggaagtgggaggagagaagactggggcagaagaggaagtaaraaggtacctttttgggaacttttcatggctacccaggccttcctcagcctctatcctattctatcaccccaagagggcctcctcttagaaggaaagattt

SEQ ID NO: 390507 - DNA, 201 bp, Homo sapiens
gcctgggcccccttctgtccctgaagttcctgagggtcacactgaagctcagccagcctgatctcttgcctctgttcccttgattgcatttcttccttttstcagctctgtcccaccacagacagttagtgaatgtaaagcatttcaatccactcaattaaatgaatcctcttaggtcacctgagaaaggcagaggcagaa

SEQ ID NO: 390508 - DNA, 201 bp, Homo sapiens
aaatctccatttgatagagaaggaacgtgaggctcagagaaattcaacattgcctgcaacccaaagctagtcaatggcagaactgggaatagacaccaccygtctgactgcagaaactgccctgagaacctccttattctatcctgcttttcaattctgataaagtgaacatatattaaccacttattatgcagtgatccc

SEQ ID NO: 390509 - DNA, 201 bp, Homo sapiens
ttttcacgtgttatctcccttaattttcccagcaaccctatgataaaaaggtaaaatctccatttgatagagaaggaacgtgaggctcagagaaattcaayattgcctgcaacccaaagctagtcaatggcagaactgggaatagacaccacctgtctgactgcagaaactgccctgagaacctccttattctatcctgct

SEQ ID NO: 390510 - DNA, 201 bp, Homo sapiens
tggaggttacagtgagctgtgatcgtccagcctgggcaacagagtgagactctgtctcaaaaaaaaaaagtggagtaataatgtgactgaacattttccakgtctgtcactgaacatttcagtgacagaacattgcagagcttttcacgtgttatctcccttaattttcccagcaaccctatgataaaaaggtaaaatctc

SEQ ID NO: 390511 - DNA, 201 bp, Homo sapiens
tagtagaggttaaaatatgatggcttacaaaccaaatactgtccaggaatactgtttggtttgacctgtgccatattttgtgtgtgtggggggaggagggkggattaattggtccgatatagaaaatttagggtctttcacataaaatctgaattcgacttctcctgaagatcagaagagctgttaatcccatgtccacat

SEQ ID NO: 390512 - DNA, 201 bp, Homo sapiens
cttcaagcctgcacaagcataaatgtcactgtgtgggggtgcttgagagtctgtgagcctgcccttaggagctgtgaggtatgggcttcacggaggaagargtcatagctgcaggaagatatactgtcttgggaccttcagctgcatcttgacatctctggctccccatggaaagggcatccctagctgagatgcaggacc

SEQ ID NO: 390513 - DNA, 201 bp, Homo sapiens; identical to SEQ ID NO: 85617

SEQ ID NO: 390514 - DNA, 201 bp, Homo sapiens; identical to SEQ ID NO: 85619

SEQ ID NO: 390515 - DNA, 201 bp, Homo sapiens
aagatcatggattccttcaagaacatggtacctcaggtaagatggcagggctgggctctgggctaggctgtaaggttttggcaagagtccagctcatcttytgtcagctcccaggcactaagatagagatggacagaaaagatcctccagctttccatgccagcacctaattgtttatggggcttctccttctgcttgacg

SEQ ID NO: 390516 - DNA, 201 bp, Homo sapiens
catcctgctgtggattggggctatcctctgcttcctggcctacggcatccaggctgccatggaggatgaaccatccaacgacaatgtgagcccacacgccygacccgggaacagcccgtgactgtcctccaaccctgaacccccaacacagtggggggtgggcagggaacaaggccctcacataacagtcctacagatgcc

SEQ ID NO: 390517 - DNA, 201 bp, Homo sapiens
ctgaggcaagagggtcacttgagcccaagaggtggaggttacagtgagctgtgatcgtccagcctgggcaacagagtgagactctgtctcaaaaaaaaaaagtggagtaataatgtgactgaacattttccatgtctgtcactgaacatttcagtgacagaacattgcagagcttttcacgtgttatctcccttaattttc

SEQ ID NO: 390518 - DNA, 201 bp, Homo sapiens
agcatccggctcccagagtcaccaagtagttccggacaccagctccaggggccctgagtgccaaggacagctgggcggggtgtggggaggaagaatgatgmcccagcccccaccccagcacccctccggatgtcccgagcagcattgtccgtgggttccaagccatgggctttgaggactttcccagaggctggtgacagt

SEQ ID NO: 390519 - DNA, 201 bp, Homo sapiens
agtctagagggtgagggaggctgctgaggaaggatgaagtgggaatgggatgtggaaggagcgggagagaggagctgagtgggatacttggaacttgaaastaacagtctccaaactaccaatgtgtgtacagatcccacggcggtcacataccctagtgctctcctctcctctgcacgccccagccccctgcccacagtt

SEQ ID NO: 390520 - DNA, 201 bp, Homo sapiens
gggggcatgccgtgggacaaacgggctgtctagggccagtggctaaaggggcgggaggggaggagtcctcagggatcctgtttcaacaaacgtttctttcsgaggaggggaaggcgggggagagggggagaaggacctatttaaagctaccctgttgctttggctttctctgtctgccagggtctccgactgtcccagacg

SEQ ID NO: 390521 - DNA, 201 bp, Homo sapiens
gggaacagtgtgtaccctggcgtggctagactgtacggagcgtgtgtaggggttggcaggggagaggtggcaaggagtactgggggttgagactggaacaytgggtcagagccagttggaaggacttggcttaaatgccagacttgggctttatcctgcaggccacagagagccatcagtgtcacgggggaggttgagctt

SEQ ID NO: 390522 - DNA, 201 bp, Homo sapiens
agcttttaggagactacctggtttgaggagggactggatttggggaagaactggagtcagggagagacaggttaagaggccattgccatagttcaggcaargaatgatgacctgaactagggcagaaacaaagggaatggagaggaatagccatgtctgagaaatgttttgagaacttggtgaccaaactggatatggaag

SEQ ID NO: 390523 - DNA, 201 bp, Homo sapiens
tctccatcctgctgtggattggggctatcctctgcttcctggcctacggcatccaggctgccatggaggatgaaccatccaacgacaatgtgagcccacaygcctgacccgggaacagcccgtgactgtcctccaaccctgaacccccaacacagtggggggtgggcagggaacaaggccctcacataacagtcctacaga

SEQ ID NO: 390524 - DNA, 201 bp, Homo sapiens; identical to SEQ ID NO: 85615

SEQ ID NO: 390525 - DNA, 201 bp, Homo sapiens; identical to SEQ ID NO: 112185

SEQ ID NO: 390526 - DNA, 201 bp, Homo sapiens
aggctcagaaggggattcccaagcctctgcggcatccctggggtgggggactgtgggggcgtccaggaagccactctgcggatctcactgatcccttctgsccccctttaggattctgtcaactgaatctgccatctggaaagtttcctcggggcttcaaattcgacacggatgagctgaactttcccacggagaagcttt

SEQ ID NO: 390527 - DNA, 201 bp, Homo sapiens
gggttgccaggacagaggaagagagagggatataaatgggtgagggtggacaaagccaaggggaatcatcactagcaggagtgggggtgtctgagggtcawgttccctccccctgctaagtcccccaggacagctcatatgactgcatgtctgattgcaactagccccagctcccaaaccttactccatcccttactacaa

SEQ ID NO: 390528 - DNA, 201 bp, Homo sapiens
tgtgcctgaccctgacagccaagcgcatggcacggaagaactgcctggtgaagaacctggaggcggtggagacgctgggctccacgtccaccatctgctcrgacaagacgggcaccctcacccagaaccgcatgaccgtcgcccacatgtggttcgacaaccaaatccatgaggctgacaccaccgaagatcagtctggtg

SEQ ID NO: 390529 - DNA, 201 bp, Homo sapiens
accttactttattttccttagtaacacttttctatctggcactaatatgtatttgtttattgtgtgtcacctctccagatcataagctcctcaagggcagrgactttgttggtcttgtccatctctgcatccgcagagtgacaattgtgcctggcactggatatacatttattaaatgaatgaatgaatgaaaaaaaaaaa

SEQ ID NO: 390530 - DNA, 201 bp, Homo sapiens
tccatcaggcctgctctttccatccctaccattccaccaccagacctggctctcctctggacacgttcctgcctaatcccctggctccccaaagactcttrctcccccaagttcctgagtatttctacccctctctaagtaaaattgccatggtgttgggctaagacattcctacagagtgattctactccctcaacaacc

SEQ ID NO: 390531 - DNA, 201 bp, Homo sapiens; identical to SEQ ID NO: 85626

SEQ ID NO: 390532 - DNA, 201 bp, Homo sapiens
tcctctcctctgcacgccccagccccctgcccacagttagacccacagcccaccacacatgccccctccatctctccctccaccccactcccacatctctmgtccttccctgcagcagtccctcctctcactgcatctcccggcctcccagctgaaaggatgtttggcactgtgagtcctcctgtctttgccacctcctga

SEQ ID NO: 390533 - DNA, 201 bp, Homo sapiens
agtggcccaatccttttacatgctgtgcctggctgctttccttttgtggaatactggcaaaagaggacacagagggaaagggcatgctgcggaacaggagrgtatgaggaagactgtgcctagggggagccgtgggtgtttctgggcccaggaggagtcaggcaaggacatgttattgcacctagttgagcagctgggaaa

SEQ ID NO: 390534 - DNA, 201 bp, Homo sapiens
cagggcgtggtggcacacacctgtaattccagctactggagaggctgaggcaagagggtcacttgagcccaagaggtggaggttacagtgagctgtgatcrtccagcctgggcaacagagtgagactctgtctcaaaaaaaaaaagtggagtaataatgtgactgaacattttccatgtctgtcactgaacatttcagtga

SEQ ID NO: 390535 - DNA, 201 bp, Homo sapiens
aagaaggaggtggcaatggtgagggaactgctgggccatggaggaggggccccatgctgggagagctgtccctgcagcccattgcactcagagaaactccrtgtcccccatgctgctcaactcacccctgtgccctgcagtaccctcatatgcatcttagatacctcctccccaaagtaactcaccctcccttccccagga

SEQ ID NO: 390536 - DNA, 201 bp, Homo sapiens
agaagaaaataaggaggtccttagtgagtgaaaatttggaaatcactggcttgaaccaaaaagaggtaccttgtgtaagaatacaaaagatggagtagccrgggacagtggttcacacctgtaatcccagcactttgggaggctgagacaggagaatcaattgagcccaagagtttggtactagcctgggcacatggtgaa

SEQ ID NO: 390537 - DNA, 201 bp, Homo sapiens
gcagctgagagtgatatcatgaagcggcagccacgaaactcccagacggacaagctggtgaatgagaggctcatcagcatggcctacggacagatcggtgygccaagccccgggcctcgggagggaaccccaacagggttcttttcccagctttcagaggaatgagccccaagcaaaattccaggacagaggccagctacc

SEQ ID NO: 390538 - DNA, 201 bp, Homo sapiens
tgctgctcaactcacccctgtgccctgcagtaccctcatatgcatcttagatacctcctccccaaagtaactcaccctcccttccccaggatgaccacaarctgtccttggatgagctgggccgcaaataccaagtggacctgtccaaggtgagtggaggggcttctagggaaggaacaaaagaggcaagaaaaccatgca

SEQ ID NO: 390539 - DNA, 201 bp, Homo sapiens
ctttcatgggccctgtgcctggagcaataacaagatcatgagacaggccccatgttgaccaccgtgtctccagtacagaacacgtcacccaacacctagaracaattatttaatgaatgaatatacgtgcaatagacaacattcggacgtaaactcagtaagcagaaaaacaaataacatcttcctttggttacataaagc

SEQ ID NO: 390540 - DNA, 201 bp, Homo sapiens
acaatggggtctgaatacacgcttttttaactgtgtcaacgatcgtcactgtcgaagatcaattgcttctgtcatctcctacgtcccttcaaatgccctcyctgccccatttcctaccccacacaggtccctgccatctccttggcctatgaggcagctgagagtgatatcatgaagcggcagccacgaaactcccagacg

SEQ ID NO: 390541 - DNA, 201 bp, Homo sapiens; identical to SEQ ID NO: 85613

SEQ ID NO: 390542 - DNA, 201 bp, Homo sapiens; identical to SEQ ID NO: 85614

SEQ ID NO: 390543 - DNA, 201 bp, Homo sapiens
gagcaagactccatctcaaaaaaaaaaaaaaagtaaaacaaatggaaactgcaagtgggtaagtcttttccccaaaataaaaccaccagtaagtgatggastgggactatgaagcatgatctgcttgaccggaaagcctgagctcctgctgcttggccaggtgcctctctctgtgatcagaaccatcacggaggcctgggc

SEQ ID NO: 390544 - DNA, 201 bp, Homo sapiens; identical to SEQ ID NO: 85620

SEQ ID NO: 390545 - DNA, 201 bp, Homo sapiens
tgtggcctccagatctgcggctttggctcacctatcctgtgatgattttccttgctcaggaaataggatgggactgcagtccctgggagccacaaggcacmcaacctgatgccccaccatgttgcaggcactgccaggggcattgtgattgccacaggagaccggacggtgatgggccgcatagctactctcgcctcaggc

SEQ ID NO: 390546 - DNA, 201 bp, Homo sapiens
tgccccaagatgggccgtggggtgagtatccctaaagagcaggggtcgcagtctagagggtgagggaggctgctgaggaaggatgaagtgggaatgggatktggaaggagcgggagagaggagctgagtgggatacttggaacttgaaactaacagtctccaaactaccaatgtgtgtacagatcccacggcggtcacata

SEQ ID NO: 390547 - DNA, 201 bp, Homo sapiens
ctggagaggctgaggcaagagggtcacttgagcccaagaggtggaggttacagtgagctgtgatcgtccagcctgggcaacagagtgagactctgtctcaraaaaaaaaagtggagtaataatgtgactgaacattttccatgtctgtcactgaacatttcagtgacagaacattgcagagcttttcacgtgttatctccc

SEQ ID NO: 390548 - DNA, 201 bp, Homo sapiens; identical to SEQ ID NO: 85621

SEQ ID NO: 390549 - DNA, 201 bp, Homo sapiens
ggttcttttcccagctttcagaggaatgagccccaagcaaaattccaggacagaggccagctacccaagggtcagggacctccatctctggccctgaggggctgtgccccttctgcttcctgctctgaccctgcccctgcctttggccctctacccacagggatgatccaggcactgggtggcttcttcacctactttgtg

SEQ ID NO: 390550 - DNA, 201 bp, Homo sapiens
ctgcaaccgcgccgtcttcaaggcaggacaggagaacatctccgtgtctaaggtagggggtcaggacacacaccaggtatgttttgggggtgtctccaaagcctcttgctggccccagctttccttctcacatgatgtggctgccttgggggtttcagtgccgccttcacctgatcctccactcccttccctcccatgctg

SEQ ID NO: 390551 - DNA, 201 bp, Homo sapiens
caatgtaatttttatactgttttgtttttaaatttgtattatttttattgttgtattgttatttttatttagctccaaatattttcgatctgaggttggtygaatctatggacatggaatctgtgaatatggagggccaactgtacaaataaaaatcaccacacattacatttcctaagtttgttttttgttttgcttttg

SEQ ID NO: 390552 - DNA, 201 bp, Homo sapiens
gtggctcacacctataatcccagcattctgggaggccaaggtgggaggatcacttgagcccaggcaatatagtgagaccttatatctaaaaaaaaaaaaaraaagaaagaaagaaagaaaattgttttaaattagctgagcgtggtggtgcatgcttgtggccccagctacttgagaggctgaggtgggagtattgcttga

SEQ ID NO: 390553 - DNA, 201 bp, Homo sapiens
aggacccccttcgttaccaaaatctaaggatcctcaaaggccctgatatgaaatcgcataatatttgcatataatctgcgcacatcctcccatatactttraatcaactctagattacttataataccgagtgcaatgtaatttttatactgttttgtttttaaatttgtattatttttattgttgtattgttatttttat

SEQ ID NO: 390554 - DNA, 201 bp, Homo sapiens
acggctactgggaatccgcctcgactgggatgaccggaccatgaatgatctggaggacagctatggacaggagtgggtgagtggtgctgtgtaaacacagygcacatgtgtgaaggtacgggaagctgaatgcctggcaggagtggccagtggtggccaactgggactggggctaggggtggatcaggagaaaccatgcta

SEQ ID NO: 390555 - DNA, 201 bp, Homo sapiens
cagaaagaagcatctgaaccagcctggggctgagggaatagggccaggcaaggctttctgtggaaagtgacaggtgattgccaaagttgtgtgacactgayggtcaataatgtaggacttgagcagggtgtggaggtgcccacctgtagtctcagctacttgggaggctgaggtggaaggattgctttagcccagggttca

SEQ ID NO: 390556 - DNA, 201 bp, Homo sapiens
aggcgtgggcatcatatcagagggtaacgagactgtggaggacattgcagcccggctcaacattcccatgagtcaagtcaaccccaggtgaggcctctgcrggaagcccctgtgccctaatcaacacgtcctcttgcacagaaggcttgggtgtcccctgggagtatttggatagcatttctgggacctttataggcctta

SEQ ID NO: 390557 - DNA, 201 bp, Homo sapiens
cctcgactgggatgaccggaccatgaatgatctggaggacagctatggacaggagtgggtgagtggtgctgtgtaaacacagcgcacatgtgtgaaggtaygggaagctgaatgcctggcaggagtggccagtggtggccaactgggactggggctaggggtggatcaggagaaaccatgctaccttctggtcctaccctt

SEQ ID NO: 390558 - DNA, 201 bp, Homo sapiens
cccaaggcagccgctgcttttgaacacacacccccactgcctgggctccctggctgagtggtgggaatggaggccccagcccctctcttccctgactctcyggctctccctccctcaggctggccgtgagtactcacctgccgccaccacggcagagaatgggggcggcaagaagaaacagaaggagaaggaactggatga

SEQ ID NO: 390559 - DNA, 201 bp, Homo sapiens
cggctactgggaatccgcctcgactgggatgaccggaccatgaatgatctggaggacagctatggacaggagtgggtgagtggtgctgtgtaaacacagcrcacatgtgtgaaggtacgggaagctgaatgcctggcaggagtggccagtggtggccaactgggactggggctaggggtggatcaggagaaaccatgctac

SEQ ID NO: 390560 - DNA, 201 bp, Homo sapiens
atggacccagcccagccagcaggcaccttaggcctctggccaaagccccccttccctccctcccttcctctctgctttctttgcactcaggacacttagayctgccccactccgctggcttcccctcactccatctctgtgcccagagaaacaggggtactccaggggaatcctgtcctctgactgttcccagtagaaggc

SEQ ID NO: 390561 - DNA, 201 bp, Homo sapiens
gcagggctgctgcatgtggccacacacgttgcatcctgaatgaccccaggaggtgcattttcataactacagtgttagtgtctccccctgtggttgtgcarggcagagattctgtttacattcaccattttacagttgagtacatggaggctctcttggttaagcaagtaacccgaggtcacataagaagtcaggaggagt

SEQ ID NO: 390562 - DNA, 201 bp, Homo sapiens
tcgtgtattgaataccaattatgtgtcagctgctttatatatgttcgatgtgctatctgatgtaattctgaaagagtggtgtaatcatgcagggctgctgmatgtggccacacacgttgcatcctgaatgaccccaggaggtgcattttcataactacagtgttagtgtctccccctgtggttgtgcaaggcagagattct

SEQ ID NO: 390563 - DNA, 201 bp, Homo sapiens
ttctctcagtgtggggtgcttgtgcagtgcctccttgcatctgtgtgttatgaatgctctatgccccaggtatttctttgttgtccactttttagcaatcrtgtattgaataccaattatgtgtcagctgctttatatatgttcgatgtgctatctgatgtaattctgaaagagtggtgtaatcatgcagggctgctgcat

SEQ ID NO: 390564 - DNA, 201 bp, Homo sapiens
gagtgggggtgtctgagggtcatgttccctccccctgctaagtcccccaggacagctcatatgactgcatgtctgattgcaactagccccagctcccaaascttactccatcccttactacaatctgtcactctctcaactcttcttcccatagctccgcatcctctggcctagccttccaactcttctaccccagtcagt

SEQ ID NO: 390565 - DNA, 201 bp, Homo sapiens
gtgcacatctgtctcgggagatgggctgctgccttcactaggttcccaaaggcatctgtgaaagatgaagagccagggggcagtggtggttttcagtcttyagccttagacctcttttgcccaaggaaaagtttatttggactaccaatataatggaggaaaacagagcagtttttgttgaaatggggataagacccagaa

SEQ ID NO: 390566 - DNA, 201 bp, Homo sapiens
ggcagttagttcagtggcgcaatcttggctcactgcaacctccacctcctgggctcaagccatcctcccacctcagcctcccgagtaactgggactacagragcatgccactatacctggctaatttttgcatgctttgtagataccaggttttgccatattgcccaggctggtctcaaactcgtgagttcaagccatcca

SEQ ID NO: 390567 - DNA, 201 bp, Homo sapiens
tacaaaaaattagcggggcgtggtggcgggcgtctgtagtcccagctactcgggaggctgaggcaggagaatggcgtgaacccaggaggcggagcttgcarggagccgagattgcgccactgcattccagcctgggcaacagagcgagactctgtctcaaaaaaaaaaaaaaagaaaaaagaaaaagcaccagcaccatgc

SEQ ID NO: 390568 - DNA, 201 bp, Homo sapiens
tctgtggactttgggcaagttttcgttcctttctgggactcggtgtcctaaatgacagtggagggaactggcctcataatgataatacctgtcacttgacygagcactttcggcactgtgctaaaaacatcacctgccgacttcatttttatttccccaacaagcccgtgaggtagtgttgtttagtagacccggacatct

SEQ ID NO: 390569 - DNA, 201 bp, Homo sapiens
acggggagaaacgttgcagcccgcgccgaacgccgggcagcacaaaggatccccgactgccggggagcggtgctcggagggcacaggtctacgccatcccycacgcagtttcggagatggagcgctgggcccatggagggaaggcggcaggctcggcggctccggcagcttgctggggcaggggctcaaggcggcagtccg

SEQ ID NO: 390570 - DNA, 201 bp, Homo sapiens
ctcccgagtagctggggttacaggcacccgccaccacgcccagctaatttttgtatttttagtagagatgtggtttcaccatgttagccaggctggtctcraactcctgacctcaggtgatccaccggctttggcctcccacagtgctgggattacaggcgtgagccaccatgcccagcccagatgattttttattgctca

SEQ ID NO: 390571 - DNA, 201 bp, Homo sapiens
agggaggaaaaccagactggagcttgaccccttttctctctgcacaggaccaacctccctaccacctgaaagccttcaacctgcgcatcagcttcccgccrgagtatccgttcaagcctcccatgatcaaattcacaaccaagatctaccaccccaacgtggacgagaacggacagatttgcctgcccatcatcagcagtg

SEQ ID NO: 390572 - DNA, 201 bp, Homo sapiens
gttgtttgaaaaccactgatgtaatcagtcaaggccttgggtgtcaccagccaagaatgagcggggcgtttgatctggtcgtagagtaatcctaagcgatrtaacctttcccccaaggagtgagtgtggagtgtcaggacattgggaacgggcagccatgactcccttccctctgccctgatatcctgatctggcctgtct

SEQ ID NO: 390573 - DNA, 201 bp, Homo sapiens
tgggtgtcaccagccaagaatgagcggggcgtttgatctggtcgtagagtaatcctaagcgatgtaacctttcccccaaggagtgagtgtggagtgtcagracattgggaacgggcagccatgactcccttccctctgccctgatatcctgatctggcctgtctctccccagtcctggaggccctcaatgtgctggtgaat

SEQ ID NO: 390574 - DNA, 201 bp, Homo sapiens
aaagaccggagagctcccggtgcggccgccggcggagcgaagactggaacccgtatgagcgccccccagcgcccctgagcgctcgccgccggtgcacggcrcaccccgcgggaggcagggatcagcaaagccgtgcgccccgaggcccgcccccgtctccgcacaaagaccgtgagtcccgggtccgagccttccgcgcgg

SEQ ID NO: 390575 - DNA, 201 bp, Homo sapiens
gagagctcccggtgcggccgccggcggagcgaagactggaacccgtatgagcgccccccagcgcccctgagcgctcgccgccggtgcacggcgcaccccgsgggaggcagggatcagcaaagccgtgcgccccgaggcccgcccccgtctccgcacaaagaccgtgagtcccgggtccgagccttccgcgcggggatcggg

SEQ ID NO: 390576 - DNA, 201 bp, Homo sapiens
cctgagcctcccaagtagctgggattacaggcctgcaccaccatgcccagctaatttttgtatttttagtagaaacagggcctcaccacgttggccaggcyggtcttgcactcctaacctcaggtgatctgactgcctcggcctcccaaagtgctgggattacaggcatgagccactgcacccggcctcaattgcattttt

SEQ ID NO: 390577 - DNA, 201 bp, Homo sapiens
ctctgcctcctgggttcataccattctcctgcctcaacctcctgagtagctgggactacaggcgcccaccaccacgcccggctaattttttttttttttttgtatttttagtagagatgaggtttcaccgtgttagccaggatggtctcgatctcctgatctcgtgatccacctgcctcggcctcccaaagtctttgttta

SEQ ID NO: 390578 - DNA, 201 bp, Homo sapiens
tttattctttttttttatttttgagacggagtctcgctctgttgcccaggatggagtgccgtggcacaatcttggctcactgcaagctctgcctcctgggytcataccattctcctgcctcaacctcctgagtagctgggactacaggcgcccaccaccacgcccggctaattttttttttttttttgtatttttagtaga

SEQ ID NO: 390579 - DNA, 201 bp, Homo sapiens
gaggccattgtctagatcctgtaggcatacttcattctttgtttattctttttttttatttttgagacggagtctcgctctgttgcccaggatggagtgcmgtggcacaatcttggctcactgcaagctctgcctcctgggttcataccattctcctgcctcaacctcctgagtagctgggactacaggcgcccaccacca

SEQ ID NO: 390580 - DNA, 201 bp, Homo sapiens
tctttctctagatttgggaaattctctgctactatccgtttgaataaactttctagccctgtctctctccctacctcctatttaaggccagtaactcttakatttgcccttttgaggccattgtctagatcctgtaggcatacttcattctttgtttattctttttttttatttttgagacggagtctcgctctgttgccc

SEQ ID NO: 390581 - DNA, 201 bp, Homo sapiens
tggacctggaaggcctcctggagtaggtggcttgcgttcgtgagttctacaagtgttgaatgcctacatgtgctggccctgttctaggaggggggggggggcgggcagagatgaacacaaatccggcccttgttgaattttgttcctatcagggacacaatttgaaataagatctggaaggatggggagggggcagtttcc

SEQ ID NO: 390582 - DNA, 201 bp, Homo sapiens
ctgaattgattgcttctgagatccagatacttctgaggttcaccttctgataaagatgccaaaggacttttgacttagtaggagaccccttccttaaaccrgtagccaccaagcccaccacagaacttcaggagacaaacagcatcaaaaagaagaagaaataaagatttcttggacctttgtcaaggggtagggataaac

SEQ ID NO: 390583 - DNA, 201 bp, Homo sapiens
acacttttcattacttggaaataaaatttaagacattgaactttttgttagtcaaagctctttggaatatcaaaggaacaattcatcttatcatttaggayttggacttgtttttttttttgagacagagtcttactgtgtcacccaggctggagtgcagtgatgcgatgttcgtttcctgcaacctccactctggggttc

SEQ ID NO: 390584 - DNA, 201 bp, Homo sapiens
agaacttcaggagacaaacagcatcaaaaagaagaagaaataaagatttcttggacctttgtcaaggggtagggataaacttccaggctctcacagttggkagaatttgctcccgcaaacctaaattgtattttgtttttctgtagtcttatttcagaaaattgttacatatgaaaacacaaatagctcatttctactgtt

SEQ ID NO: 390585 - DNA, 201 bp, Homo sapiens
gcgggtcgtccttcgacggcctcctggcctcgccggagcgggtgcggggaggcccacgcagcgacggctggaggaggggtgggcggggctgccgggggtgkggtccccggggcggggcggggcgcgctgtgtcgcgggtcggagctcggtcctgctggaggccacgggtgccacacactcggtcccgacatgatggcgagc

SEQ ID NO: 390586 - DNA, 201 bp, Homo sapiens
  misc_feature (1)...(201): n = A,T,C or G
aggtggggttgggctttgcttggaggagggactgatactgggtagagattactggagagggggttcacagcttattctgagcttgaaaagccccaaagagnggagataaaaattgtgagtcttggctgaacttactatgagatagaagggatgcttcctggacagactgacctcctcctgcctctcttcttatacctgtgc

SEQ ID NO: 390587 - DNA, 201 bp, Homo sapiens
acccccattctaatgttttaagaaaggatgttccatccttttcttccataatctcagaaagtcttgaaagctgagatggtccttagagctcatctagtccatctttatccacttttcaaatgaggaaactgaggcctagaggtgggaagtggctcacccgtggtcacacagcaaaagccaggatcagacttctctgcctcc

SEQ ID NO: 390588 - DNA, 201 bp, Homo sapiens
cttgggaaggctttcgaggtattggaaggggcttggctgttgtgatctaagttttggtcactgcagccatgtctacataagggggcactccaagcctagtwacactgtagttcttgcagacttttagaggttactacctttgtggttttggataacatcaggaagaattctctggattaccaggtagagactctcattttc

SEQ ID NO: 390589 - DNA, 201 bp, Homo sapiens
caaccatcaccaccgttcatctctagaactttttgtctacctgtactgaaactctgtaccccttcagtaactccccattcctttctttccccagcacctgrtgaccacttttgtattttgtttctatgaatttgactattctgggtactgcacataagtggtatcttgcaaatctgtcctttttttgtctagcttatttcc

SEQ ID NO: 390590 - DNA, 201 bp, Homo sapiens
attactagagtcctgagaaacacggaatgctgattagaatttgggacaaagttccctgagtattctctggaggaaaagatgcggaggtggacctggaaggyctcctggagtaggtggcttgcgttcgtgagttctacaagtgttgaatgcctacatgtgctggccctgttctaggaggggggggggggcgggcagagatga

SEQ ID NO: 390591 - DNA, 201 bp, Homo sapiens
acaaccatcaccaccgttcatctctagaactttttgtctacctgtactgaaactctgtaccccttcagtaactccccattcctttctttccccagcacctsgtgaccacttttgtattttgtttctatgaatttgactattctgggtactgcacataagtggtatcttgcaaatctgtcctttttttgtctagcttatttc

SEQ ID NO: 390592 - DNA, 201 bp, Homo sapiens
gatgcggaggtggacctggaaggcctcctggagtaggtggcttgcgttcgtgagttctacaagtgttgaatgcctacatgtgctggccctgttctaggagkggggggggggcgggcagagatgaacacaaatccggcccttgttgaattttgttcctatcagggacacaatttgaaataagatctggaaggatggggaggg

SEQ ID NO: 390593 - DNA, 201 bp, Homo sapiens
tttgtagtctgggcttgtttgtactcatccttcttgggaaggctttcgaggtattggaaggggcttggctgttgtgatctaagttttggtcactgcagccrtgtctacataagggggcactccaagcctagtaacactgtagttcttgcagacttttagaggttactacctttgtggttttggataacatcaggaagaatt

SEQ ID NO: 390594 - DNA, 201 bp, Homo sapiens
gcggaggtggacctggaaggcctcctggagtaggtggcttgcgttcgtgagttctacaagtgttgaatgcctacatgtgctggccctgttctaggaggggsgggggggcgggcagagatgaacacaaatccggcccttgttgaattttgttcctatcagggacacaatttgaaataagatctggaaggatggggagggggc

SEQ ID NO: 390595 - DNA, 201 bp, Homo sapiens
aacctgagatttgaggagacaaaacatccaaccacagcaccctcccatcctgctctgaggcctcagctgttggccttctctgactgataggcacagccttytctccttactgagaccataaaaaatgagatattttctttatcttcctacttttttttactccatctctctttttttttttttttttttttttgagacgga

SEQ ID NO: 390596 - DNA, 201 bp, Homo sapiens
ccgccacgtaggtcttggggatcaaatttcaacctgagatttgaggagacaaaacatccaaccacagcaccctcccatcctgctctgaggcctcagctgtkggccttctctgactgataggcacagccttttctccttactgagaccataaaaaatgagatattttctttatcttcctacttttttttactccatctctct

SEQ ID NO: 390597 - DNA, 201 bp, Homo sapiens
atctgcccgccttggcctcccaaaatgctgggattacaggtgtgagccactgcgtccggccttctcaccctcatttttaacatgaagaacttaaggcccaracagacgtggcagttaataagcaggaagtcagtagttctgggtttaagttccatcttagagagtgtgtgaccttgggccagtagtcacctagcctcagtt

SEQ ID NO: 390598 - DNA, 201 bp, Homo sapiens; identical to SEQ ID NO: 85655

SEQ ID NO: 390599 - DNA, 201 bp, Homo sapiens
ttcaagcaattctcatgcctcagcctcctgagtagctgggactacaggcacacgctaccacgcccagctacctttttgtattttagtggaggcggggtttyatcatgttgcccaggctgatctcaaactcctgagcccaggcaatccatctgcctcagcctcccaaagtgctaggattacaggcgcgagccaccgccacgt

SEQ ID NO: 390600 - DNA, 201 bp, Homo sapiens
tgcggccgccggcggagcgaagactggaacccgtatgagcgccccccagcgcccctgagcgctcgccgccggtgcacggcgcaccccgcgggaggcagggwtcagcaaagccgtgcgccccgaggcccgcccccgtctccgcacaaagaccgtgagtcccgggtccgagccttccgcgcggggatcgggcggttgtccggc

SEQ ID NO: 390601 - DNA, 201 bp, Homo sapiens
ctctgctacctccttcctctgttaagtcctacgaagcccagaaagaagccccttcaggcaggacacactgatacccctgtcttagtccattagtgttgctktaaaggaatacccgaggctgagtaatatataaagaaaagaggttaatttggctcaagcttctgcaggctgtacaagaagcatggcgctgggcatggtggc

SEQ ID NO: 390602 - DNA, 201 bp, Homo sapiens
gcctctatccactctcccgatttatgacaacggaacaatgttcccagatattaccgaatgtccctggctgggtaaaatcgcccctggttgagaaccactgktttgtaccaattcattgttccagagaaatgtgacctgcccttgagtgtctttatcttccccaacaagaaaaggcctgtagtcccacaagatggactctaa

SEQ ID NO: 390603 - DNA, 201 bp, Homo sapiens
tctgaggcatgtgagaggtgaagtggttgcctaaggtcatacagatgacaaacggcagcacttggctgactcgcaagccacatgtggctgttgcaactgargaactcaattctttttcttttttaagacagagtctcgctctgtcgcctaggctggagtgcagtggcgcgatcttggctcactgcaacctccacctcccag

SEQ ID NO: 390604 - DNA, 201 bp, Homo sapiens
atttctttgagtttcctcaaaacagctattttgatttctctgtctgaaaggtcacatatctctgtttctctggaattggccctgtgtgccttatttagttygtttggtgaggctgtgttttcctggatcgtcttgaagcttgtggatgtttgttggtgtctgggcactaaggagttaggtatttattatagtctttgtagt

SEQ ID NO: 390605 - DNA, 201 bp, Homo sapiens
ggcagcacaaaggatccccgactgccggggagcggtgctcggagggcacaggtctacgccatcccccacgcagtttcggagatggagcgctgggcccatgkagggaaggcggcaggctcggcggctccggcagcttgctggggcaggggctcaaggcggcagtccgatagtggaggccgctgagaactgtcacggagctgc

SEQ ID NO: 390606 - DNA, 201 bp, Homo sapiens
tcccaggttcaacttctgcctctcggttcttgcctcagcctcccgtgtagcggatattacaggcatgcaccaccacacccggctaattttgcatttttaayagagacagggtttctccatgttggtcaggtttgtcttgaactcccgacctcaggggatctgcccactttggactcccaaagtgctgggattacaaacgtg

SEQ ID NO: 390607 - DNA, 201 bp, Homo sapiens
acagccttttctccttactgagaccataaaaaatgagatattttctttatcttcctacttttttttactccatctctctttttttttttttttttttttttgagacggagttttgctcttgttgcccaggctggagtgcaagggtgtgatctctgctcaccacaacgtcagcctcccaggttcaacttctgcctctcggtt

SEQ ID NO: 390608 - DNA, 201 bp, Homo sapiens
cacagccttttctccttactgagaccataaaaaatgagatattttctttatcttcctacttttttttactccatctctctttttttttttttttttttttttgagacggagttttgctcttgttgcccaggctggagtgcaagggtgtgatctctgctcaccacaacgtcagcctcccaggttcaacttctgcctctcggt

SEQ ID NO: 390609 - DNA, 201 bp, Homo sapiens; identical to SEQ ID NO: 85663

SEQ ID NO: 390610 - DNA, 201 bp, Homo sapiens
gcacagccttttctccttactgagaccataaaaaatgagatattttctttatcttcctacttttttttactccatctctctttttttttttttttttttttttgagacggagttttgctcttgttgcccaggctggagtgcaagggtgtgatctctgctcaccacaacgtcagcctcccaggttcaacttctgcctctcgg

SEQ ID NO: 390611 - DNA, 201 bp, Homo sapiens
tcactctggagtgcagagcaagactcactgcaacctctgcctcctggattcaagcaattctcatgcctcagcctcctgagtagctgggactacaggcacaygctaccacgcccagctacctttttgtattttagtggaggcggggtttcatcatgttgcccaggctgatctcaaactcctgagcccaggcaatccatctgc

SEQ ID NO: 390612 - DNA, 201 bp, Homo sapiens
tcctgcaacctccactctggggttcaagcgattctcctgcctcagcctcctgagtagctgtgactacaggcacgtgccactatgcctggctaatttttgtrtttttagtggagacaggattttgctatgttggccaggctggtctcaaactcctggcctcaagtgatctgcccacctcggcctcctaaagtgctgggatta

SEQ ID NO: 390613 - DNA, 201 bp, Homo sapiens
ggcgtgaacccaggaggcggagcttgcagggagccgagattgcgccactgcattccagcctgggcaacagagcgagactctgtctcaaaaaaaaaaaaaaagaaaaaagaaaaagcaccagcaccatgcctgatacatactaagtgctcagtaaatgtaggctctgactttaccggcttctgcccctaagatggccagttt

SEQ ID NO: 390614 - DNA, 201 bp, Homo sapiens
ggggcgtggtggcgggcgtctgtagtcccagctactcgggaggctgaggcaggagaatggcgtgaacccaggaggcggagcttgcagggagccgagattgygccactgcattccagcctgggcaacagagcgagactctgtctcaaaaaaaaaaaaaaagaaaaaagaaaaagcaccagcaccatgcctgatacatactaa

SEQ ID NO: 390615 - DNA, 201 bp, Homo sapiens
cctcaggtgatctgactgcctcggcctcccaaagtgctgggattacaggcatgagccactgcacccggcctcaattgcatttttcgactccggaatttctscttgattctttttaattatttcaatttatttgttaaatttgttgatgggattctgaattccttctctgtggaggaaatattgaatttctttgagtttcct

SEQ ID NO: 390616 - DNA, 201 bp, Homo sapiens
tacttgggaggctgaggtagcaagatcacctgagcccaggaggttgaggctgcagtgagctgtgattgtgccactggactccaatctgggtgacagagtgrgacattgtctcaaaaaaaaaaaaaaaaaaaaaaaaaacaactaatacaaactgtatactttaacttcgtctttccgcttactaactttttgttgtttcta

SEQ ID NO: 390617 - DNA, 201 bp, Homo sapiens
gggattacaggtgtgtgccaccacgcccagctaatttttgtatttttagtagagacaaggtttcaccatgttggccaggctgatcttgaactcctgacctmaagtgatccccacgcctcggtctcctaaagtgctaggattacaggtgtgagccactgcacccagctgtggtattttttaatagggtgctcagggtaggcc

SEQ ID NO: 390618 - DNA, 201 bp, Homo sapiens
gatattcaggtgtttgggccacagttttgggaagatgagtcactccttgcccccttgtttccccacttggtgtgtagagttcttctctgctatggtcttcsggagtcatttcccttctccagccctgatctggcagagtttgaagcggtggggtcatgtctttgctgcagatgctcagtcgatgcttacggaaggaagaaa

SEQ ID NO: 390619 - DNA, 201 bp, Homo sapiens
ggccgccggcggagcgaagactggaacccgtatgagcgccccccagcgcccctgagcgctcgccgccggtgcacggcgcaccccgcgggaggcagggatcmgcaaagccgtgcgccccgaggcccgcccccgtctccgcacaaagaccgtgagtcccgggtccgagccttccgcgcggggatcgggcggttgtccggcggg

SEQ ID NO: 390620 - DNA, 201 bp, Homo sapiens
gctgccccggctgccttagtgttgcggaacaaggccgtggggccggaagctgccctgtgaggggagaggggtgcaaggccaagccagagaggcaggaggcyatgaagggccccactgggaggatccccagcccccaggtgtcagtcctcctgccttggcctgggctgttcccactgcccctgaggccaccctcccaccaac

SEQ ID NO: 390621 - DNA, 201 bp, Homo sapiens
ctcccaccaacccagggttcctatgggaaagcccagcccagcccctggcctgtgtcctacccgccaaacttgtccacgatggctttgcggttctgtgcccsgggcccccggggccgagcaggggctgataccctgcgctctggtgccttctccttcttctcccctgaggaaggggactcagggggactctggggcacgtcg

SEQ ID NO: 390622 - DNA, 201 bp, Homo sapiens
gatgatgccaatgtcctggtgtggcacgctctcctcctacccgtgagtatccatggggaccatggctttggattggggccaaattaggccagggacatggkcagggagggttaggactaggcaagaattttccctgcttgagatccttttactggaggttatcattgctggagggggcttctctctgaattgattgcttct

SEQ ID NO: 390623 - DNA, 201 bp, Homo sapiens
tcacttgtgtcccctgcaggagctggaggatcttcagaagaagcctcccccatacctgcggaacctgtccagcgatgatgccaatgtcctggtgtggcacrctctcctcctacccgtgagtatccatggggaccatggctttggattggggccaaattaggccagggacatgggcagggagggttaggactaggcaagaat

SEQ ID NO: 390624 - DNA, 201 bp, Homo sapiens; identical to SEQ ID NO: 85660

SEQ ID NO: 390625 - DNA, 201 bp, Homo sapiens
cagccaagaatgagcggggcgtttgatctggtcgtagagtaatcctaagcgatgtaacctttcccccaaggagtgagtgtggagtgtcaggacattgggarcgggcagccatgactcccttccctctgccctgatatcctgatctggcctgtctctccccagtcctggaggccctcaatgtgctggtgaatagaccgaata

SEQ ID NO: 390626 - DNA, 201 bp, Homo sapiens; identical to SEQ ID NO: 85669

SEQ ID NO: 390627 - DNA, 201 bp, Homo sapiens
ccttagctagtgaggaaatgggatatagccaaggcgatcacttacctggggtgacagcaagtaaacatgaaaaatgtgctggggaacacaaaaggacagtkatcagaaaggctttttctttcaacctaagtcatgatgttttgggcgtcggctagagttttccaagttatttataactgtccatccctgttaggagatata

SEQ ID NO: 390628 - DNA, 201 bp, Homo sapiens
aacttgaagccatttctgtggctcccccaataactgttagacataaattggaggtgggctaattaactgattgcagggcaaagggctcaaacctctgcctytcctcccttgcaccttgatcttgcctatttgattgtgacaattcttcttcccaccttagctagtgaggaaatgggatatagccaaggcgatcacttacct

SEQ ID NO: 390629 - DNA, 201 bp, Homo sapiens
tgtatttttttagttctaaggtttttgtttggttctcctttatatattctggttatttgctgagactttgtttctcctttttttttcccccccagctttamtgaggtataattaacaaataaaaattatatatttttatataatgtgatgttttgatgtatgtatacattgtgaaatgattatcaccatcagagacttgct

SEQ ID NO: 390630 - DNA, 201 bp, Homo sapiens; identical to SEQ ID NO: 85670

SEQ ID NO: 390631 - DNA, 201 bp, Homo sapiens; identical to SEQ ID NO: 85671

SEQ ID NO: 390632 - DNA, 201 bp, Homo sapiens
ccagatttcagaattccctaagtatatcatagtatctggtaatacttggctggactgagctggggacagggttgtcctttccagttagccacatcctcacygccttcccggcattcccgtcactggcctctgacgccacaggagtttgcagccagcacatttccttcattactgccccatgatgtcctctatcacaagtac

SEQ ID NO: 390633 - DNA, 201 bp, Homo sapiens
gaagctgggctcacattttccacgttttccttctcccgagaaggggggtcctaacgggatgctccagatgccaggcagcttgtgagaaggacacaggtccrccacaagggctggtgcagaggcagagagaggccgtatgagaggtggccaatgacctggggttgggcattagcctgggcttgagccctgggaccatcattc

SEQ ID NO: 390634 - DNA, 201 bp, Homo sapiens
cgtgggtgatgtgacggatgcacagaaacccctaggaagaggcctgtcactcaagagtagtagggtctggggcccaaggggcaccggcatcccaggcgtcsggctggaggctcagagcacgtgcagggaggaaggagggagcaaggcctgtactcagcctgggaggtaccccagctggggagcctggacttgaccctgggg

SEQ ID NO: 390635 - DNA, 201 bp, Homo sapiens
ttggaggctttagaactgctgaccttggccccaggagcctccctggggcatgtggcccacgtggtttccaggcagggtaaacagcaatggcctcatctttyagatgtggcccagggatgcccagaaaccacatactttctctaaagtcttataggatatgttaatttcaaaataataacaccccaaaggcacagggttggt

SEQ ID NO: 390636 - DNA, 201 bp, Homo sapiens
caggggactccccgacattgtcagccaagcgagtgtggcacctttctctgaagctgcggttatggcaggcatggggcaaggggagggagccagggacaagycatcgaccccacccttttccccagtgtgctgagagccaaccccaacccggaatagaggacgagggaggccagtgaggcagcccccatgggcccaccgcct

SEQ ID NO: 390637 - DNA, 201 bp, Homo sapiens
gacgagggaggccagtgaggcagcccccatgggcccaccgcctccccgccggcagggcccagagtgggtcatggctcagatctggagggtcatgggattaygcatcagacctgaggctgcagtgacaacggtcctatgacctccaggcaagactgggatggtcaactctgccttgtcctccaaaaagcagtgtcagtgtgg

SEQ ID NO: 390638 - DNA, 201 bp, Homo sapiens
cacttgagcccagaagttcaagaccagcctgggtaacagagtgagaccttgtctctacaaatccttttttaaattagggagtaaatagtggtgcatgcctrtgtcccggctaccaggggaggcagaggctggaggattgcttgagtccaggaggtcaaggctgcggtgagccttgatggtgacactgcactccagcctggg

SEQ ID NO: 390639 - DNA, 201 bp, Homo sapiens
gaggcaaaacagctgacagactaattcacattaaggtgtggatgactgacaggagaggtcccttcccaagagcggggtctgcaggggagggctcaggacastgggtgctgcagaaggaggcaggtgcaccttaggattgggaatggagactagaaccaggacactggggacacctaagacaagcttcaccagccaaaagca

SEQ ID NO: 390640 - DNA, 201 bp, Homo sapiens
cgcaccgtacagggagagttggaggggtaagaaagaagtgagcagacaccccgaaagagatccacgcagcaggcaagtgtgtcgctgtggcccttcacctsccctgacctggacttccttgtctggcttcctcataggaagtgtctacaccactacactcatgaaaagtgaaattcaagggactcacgaggacccctggaa

SEQ ID NO: 390641 - DNA, 201 bp, Homo sapiens
caaaagccaaaaaatactggaggccaccaaaacaaataaaaaaccccactgagatgtaatagtgactggtagaagggtgaggacaaccctaaatagctgtsgatcaggctgacatttagagaggaggtgacatttaagctgaggcctgaggaagaggagcctgccatgggaggagctgagggagcaacaggtatatctctg

SEQ ID NO: 390642 - DNA, 201 bp, Homo sapiens
gtgtgtataatacaaggcggagaatgacgaaggaccaaatagggacaagaagaggatgatacagaattgacccacatcacagagggtgagtcaattgtagragggccgcgggagcagtagaaatgtctgggctcgctggtcggatgaacagtgctgtcagaaatccagacatgtgacatcattaactgagcaaacggaagc

SEQ ID NO: 390643 - DNA, 201 bp, Homo sapiens
ttttctttctttcctttctcttctttcttttcctttcttcctttctttctttttctttttgttgttgttgttgttgagacagggtctggctctgttgcctrggctagagtgcagtggcaggatctcggctcactgcaacctgtgcctgcctccagggctcaagtgatcctcctgccttactttcccaagtagctgggaata

SEQ ID NO: 390644 - DNA, 201 bp, Homo sapiens
gggacaggagcttcatggagtccccacctttaaacagcacatctgatgtgcttcctgccaggagtacaggtcggagaaatctctggaagagctgaccaagmtggttcctccagaatgtaactggtaagtcagagcctccctgggactttttggttcactggaggagccagggagctggagagtttggcaaatgtttgctga

SEQ ID NO: 390645 - DNA, 201 bp, Homo sapiens
cctattcagcacagtattagaagtcctagccagtgtaatatggcaagaaaagttaaaaggcattagcaaagagcctggaaaggagaaaatcacagataacrtaattgtccacacagaaaatcccaacaaatctttttaaaaaagaaaaaccctcctagaatcaacgagtttagtaaagccacaagatacaaggttaacaca

SEQ ID NO: 390646 - DNA, 201 bp, Homo sapiens
tggtctcccaaatagctgggattgtaggcgtgagccactgtgcctggcctgagcaccttttgatggctgtcattccccacttctttccgtttgttccagcyggtattttaaaatacaaacacagactcattccacacgatggaatttcctacttccaattaaaaggctggagtaggccgggtgcggtggctcatgcctgta

SEQ ID NO: 390647 - DNA, 201 bp, Homo sapiens
atatataaaataaagtaaaaatcttctcaggaagttttgggaacggctgttttagagagggacatcattggagtccctagaggctgttacaggagcaggckgttactgagtttggtgactgggatgtgcaggatttggggagctggtgtggtgagagaggatccttggccgtcctgagccaggactggcatcttgccgaaa

SEQ ID NO: 390648 - DNA, 201 bp, Homo sapiens
cgtggtcactgtcgccttcatccaggtgagtatttcctgaggtcccagtcagggtaagctgggcgggacaggagcttcatggagtccccacctttaaacascacatctgatgtgcttcctgccaggagtacaggtcggagaaatctctggaagagctgaccaagctggttcctccagaatgtaactggtaagtcagagcct

SEQ ID NO: 390649 - DNA, 201 bp, Homo sapiens
ctcagaaagtggcccttctctccggaaccaggaactgtagtatctcctgctgcctgcagacaagcttgatttcccactgccccaaagacttccaaaaaccsatctgctcttccacgtgacagatggcagaggagagaggtctccatgctgttcttctgcctgaagccacgccagaaccaccaaagggaaccagaaggggaa

SEQ ID NO: 390650 - DNA, 201 bp, Homo sapiens; identical to SEQ ID NO: 85721

SEQ ID NO: 390651 - DNA, 201 bp, Homo sapiens
  misc_feature (1)...(201): n = A,T,C or G
atgctcccagctgcctgccagacccaccctgtgctctggagctgcctggtgtttgcctggaaccacaggcaggcccttctggaactgcagcattttggatnctgggttaggaagatctccctgccttcaggggaatgaaaagggctggtcctccgcacctctcactttatcaggaggactggcagggaaggcgcttcctgc

SEQ ID NO: 390652 - DNA, 201 bp, Homo sapiens
ccagctggtggaatccttacacgtggaattgaatgggggcttggctgtcagggcaatccagcctgggggtttcacaagcctgaggatggcaacttctcttttctataaactggtgtttgttgtaccaggttgctgcagcgttctctgttctgacaagacggggactctgactgccaatgaaatgacagtgacccagcttgt

SEQ ID NO: 390653 - DNA, 201 bp, Homo sapiens
cccgtacatcaggaatcatcaacagggagccagggatggttcctcaaaacagcatgtgacaggagcagagggagacgctgggaattcatcccagggaacakgtcgctgggaattcatcccagggaacatgtcggggtgcactggacagggagcccagactggtcactcaggacatttgcaagcagcagggcactgggacag

SEQ ID NO: 390654 - DNA, 201 bp, Homo sapiens
gtgattctcctgcctcagcctccccaagtagctgggactacaggtgctcgctaccacacccggctaatttttgtattttggtagagacggggtttcaacaygttggccaggctagtctcaaacccctgacctcaagtgatccatccgtttctgcgtttcaaagtgctgggaatgcaggtgtgagccaccacacccggccca

SEQ ID NO: 390655 - DNA, 201 bp, Homo sapiens
cctgaacccagagatggaggttgcagtgagccaagagtgctccattgtactccagcctgtgcgataagagcgaaactctgtctcaaaaaaaaaaaaaaaaagtatctcatggtctggggtgtctgggaacaactcagcccaccctctgagtctccaagacccatttccaacatttggcaaacatacggcaactccgtattt

SEQ ID NO: 390656 - DNA, 201 bp, Homo sapiens; identical to SEQ ID NO: 85699

SEQ ID NO: 390657 - DNA, 201 bp, Homo sapiens
tagctgggcatggtggtgggtgtctgtaatcccagctacttgggaggctgaggcaggagaattgcctgaacccagagatggaggttgcagtgagccaagaktgctccattgtactccagcctgtgcgataagagcgaaactctgtctcaaaaaaaaaaaaaaaaagtatctcatggtctggggtgtctgggaacaactcag

SEQ ID NO: 390658 - DNA, 201 bp, Homo sapiens
actttgggaggccgaggtaggcagctcacctgaggtcaggagttcaagaccagcctggccaacatggtgaaactctgtctctactaaaaattaaaaaaaaattagctgggcatggtggtgggtgtctgtaatcccagctacttgggaggctgaggcaggagaattgcctgaacccagagatggaggttgcagtgagccaag

SEQ ID NO: 390659 - DNA, 201 bp, Homo sapiens; identical to SEQ ID NO: 85701

SEQ ID NO: 390660 - DNA, 201 bp, Homo sapiens
tctcctacaaatgtgtccccaagaatgccagcaaggggaaccagcaggggcccaagtataacatcaatctgggcgagtcaccactgccccttgcagcaacsgatgcactggtccagccctcacgcaggcccgctccgtgagtaaatggctctcttctcttgcaggaatgcagtggaggaaggcaagggtattttttacaac

SEQ ID NO: 390661 - DNA, 201 bp, Homo sapiens
  misc_feature (1)...(201): n = A,T,C or G
gaaaagatacagattagaacagccccagggctgcaactgcagagactggtcaccctctccctctgagctcaacagtttctgagtcctgagtctttctagcnaatcactgggtctgagagtggtttcctgccccccacaacacaagttctatgaaattgtatgacacacatcaattcaggtaaccactgctacaatgaggag

SEQ ID NO: 390662 - DNA, 201 bp, Homo sapiens
ttccacacgatggaatttcctacttccaattaaaaggctggagtaggccgggtgcggtggctcatgcctgtaatcccagcactttgggaggcctggggggyggatcacgaggtcaggagatcgagaccatcctggccaacatggtgaaagcccgtctctacaaaaaatacaaaaaaattagcagggcatggtggcatgtgc

SEQ ID NO: 390663 - DNA, 201 bp, Homo sapiens
ctcaagcagtcctcccatttctgcctcccaaagggctgggattacagtgtgagcctctgcacccagcccttgttgatattgtaactctcttccttatcctratctttggtctgccttctgaatccggttttatgtgtttgcatttcttttcaatcctctgtaacatgagctaccatgagatgtctctgaaatgaaagggca

SEQ ID NO: 390664 - DNA, 201 bp, Homo sapiens; identical to SEQ ID NO: 85697

SEQ ID NO: 390665 - DNA, 201 bp, Homo sapiens
ctggggagcctggacttgaccctggggccagtaatgtgacttagagatctggtcacctgaaggcagggagctgggctgtcttccagttttggctgaaaggsacatgattcagtcaccgtggttttccaagggcacacgccctggtgtggagcccaggggactccccgacattgtcagccaagcgagtgtggcacctttctc

SEQ ID NO: 390666 - DNA, 201 bp, Homo sapiens
gggagcaaggcctgtactcagcctgggaggtaccccagctggggagcctggacttgaccctggggccagtaatgtgacttagagatctggtcacctgaagrcagggagctgggctgtcttccagttttggctgaaagggacatgattcagtcaccgtggttttccaagggcacacgccctggtgtggagcccaggggactc

SEQ ID NO: 390667 - DNA, 201 bp, Homo sapiens
gggagagtgtatgtgtccacagccaatatcatactgaatgggcaaaaactggaagcattccctttgaaaactggcacaagacagggatgccctctctcacygctcctattcaacatagtgttggaagttctggccagggcaatcaggcaggagaaggaaataaagggtattcaattaggaaaagaggaagtcaaattgtcc

SEQ ID NO: 390668 - DNA, 201 bp, Homo sapiens
ttcaggaccagcccaaagcacaagctcaaaatcatcaaggttcgctgggcaaggcaggcacaggctgcgctgctggggccgggccagagacactgtggctsgaggagctcatgcgtccgtcgggtgacagtgcagggcccgaccgtggcttccttctctaggtccagggcagctgccccgggagttaccttttcatagcca

SEQ ID NO: 390669 - DNA, 201 bp, Homo sapiens
ctgggaggctcaggcacagctgtttcaagggtcctttatttcattcctggttcatttcaaagtgtctgtgtcttgttcggagcagcttgggggtagagccygttgacaaagacgccttcaggcagccaccacggagtgtgcgggacaccatcctcagcagagccctcatcctgaagatcctcatgtccgcggccatcatca

SEQ ID NO: 390670 - DNA, 201 bp, Homo sapiens
atggtctgattggaggcatcaggtgtacccttggcacagaagggcgaacatggctcaaggatcagttcccagtggccgaggggcacctgttagaacaccamcgtctcctacaaatgtgtccccaagaatgccagcaaggggaaccagcaggggcccaagtataacatcaatctgggcgagtcaccactgccccttgcagca

SEQ ID NO: 390671 - DNA, 201 bp, Homo sapiens
cctgccccctgtgccaacttggcctgggaggctcaggcacagctgtttcaagggtcctttatttcattcctggttcatttcaaagtgtctgtgtcttgttbggagcagcttgggggtagagcccgttgacaaagacgccttcaggcagccaccacggagtgtgcgggacaccatcctcagcagagccctcatcctgaagat

SEQ ID NO: 390672 - DNA, 201 bp, Homo sapiens
  misc_feature (1)...(201): n = A,T,C or G
agctggcggtcatttacatccccccgctgcagagggtcttccagacggagaacctgggagcgcttggtgagtggtggggacgggaacgacaggtgacctcnaccagggccatggggggcggcagctgccaggtggggagctgcagcccaggaggggtcagtgcgggaaagcagagctcaccaggggccggctctgtcttca

SEQ ID NO: 390673 - DNA, 201 bp, Homo sapiens
gttccagggacttgctccaggccttgcgggagagcgtaatgagaacgggtcagtggcggaggagcagtgagaccttttcctgtcttcccccagtgtacacrcaggtccttttttgtttacaaatggacttgtcttccacctgtggctgggaaaactacaacctgggaactggccttagagaaggcctgtgcgtttttccaa

SEQ ID NO: 390674 - DNA, 201 bp, Homo sapiens
tccctggaacctgctactgtggagatagaggggggggtctcgcggagtccccagggagagctgaatctcggggctcgtcagtgtggcaggtgcccccaacyccaagtaccaacagcctctcatagcagggtcatggggtccatgatgcctggggctagtcacatgctgcccccaggggaatgttacggatatgaagcagag

SEQ ID NO: 390675 - DNA, 201 bp, Homo sapiens
aaaaatgcctggggtcaccagcttctccctggaacctgctactgtggagatagaggggggggtctcgcggagtccccagggagagctgaatctcggggctcgtcagtgtggcaggtgcccccaaccccaagtaccaacagcctctcatagcagggtcatggggtccatgatgcctggggctagtcacatgctgcccccagg

SEQ ID NO: 390676 - DNA, 201 bp, Homo sapiens
ccatcatgtaagctgcccttctggttgtttttcagttgcaaaaatgcctggggtcaccagcttctccctggaacctgctactgtggagatagaggggggggtctcgcggagtccccagggagagctgaatctcggggctcgtcagtgtggcaggtgcccccaaccccaagtaccaacagcctctcatagcagggtcatggg

SEQ ID NO: 390677 - DNA, 201 bp, Homo sapiens
tgttgccaacaatgcggtcatcagaaagaacgccgtgatggggcagcccaccgagggtgcattgatggccctggcgttgaaggtaggaggtcctggggtgkctctgcggggaattctttcgctcggggctggattcattggtagaaagccagctcctgtctgagctaacaggagtggggacgttaggtaatcatggaagaa

SEQ ID NO: 390678 - DNA, 201 bp, Homo sapiens
cgggaagctgcaagccatgtccggggaggaggtggacagcgtggagaagggcgagctggccgaccgcgtggggaaggtgggtccccggaggcttggctggyggtggggctgggtcacagctttgaaatctgattcttcgtcttccccgtctccgtgtccaggtgtccgtgttcttcaggaccagcccaaagcacaagctca

SEQ ID NO: 390679 - DNA, 201 bp, Homo sapiens
cactaccacagagcattgtggggaaaaccaccccatgattcaattatctcccactgggtccctcccacaacacgtgggaattatgggagctacagttcaasatgagatttgggtggggacacagccaaaccatatcaagcagacagcagtggtattttctgctatgcagctgtttctggcttccttctccatctgttgtgc

SEQ ID NO: 390680 - DNA, 201 bp, Homo sapiens
aacccgaagttcttttcagtcaaggaacatattttttcccttagccattttcaattttctgcagcagagccagtgccatccctgatgggctgaactgaacattaaatctcacatttcccttggtgtcatttgtcaccctggccagttacagaggaagcgtttagaagtgctcctgagcactggtattcccttgggggaaag

SEQ ID NO: 390681 - DNA, 201 bp, Homo sapiens
aaacccgaagttcttttcagtcaaggaacatattttttcccttagccattttcaattttctgcagcagagccagtgccatccctgatgggctgaactgaacattaaatctcacatttcccttggtgtcatttgtcaccctggccagttacagaggaagcgtttagaagtgctcctgagcactggtattcccttgggggaaa

SEQ ID NO: 390682 - DNA, 201 bp, Homo sapiens
tgggtccctcccacaacacgtgggaattatgggagctacagttcaagatgagatttgggtggggacacagccaaaccatatcaagcagacagcagtggtaytttctgctatgcagctgtttctggcttccttctccatctgttgtgcacctgcgcaggcctgagagccgctggaggcatctctgccctccctttcaggcta

SEQ ID NO: 390683 - DNA, 201 bp, Homo sapiens
aaaacccgaagttcttttcagtcaaggaacatattttttcccttagccattttcaattttctgcagcagagccagtgccatccctgatgggctgaactgaacattaaatctcacatttcccttggtgtcatttgtcaccctggccagttacagaggaagcgtttagaagtgctcctgagcactggtattcccttgggggaa

SEQ ID NO: 390684 - DNA, 201 bp, Homo sapiens
gccacagctcacatctgggagaggcaaacatgtacacacaccggacaatgtgatgccatcagaggcgtggggtgcatgaggcaaagggactgggtgacccytgaaagaagggaggtcgccaggtgtgtgcctgggaactacagaggccagcggggtggagatgactttgccgagacgggagttgaaatgtacatgaggaca

SEQ ID NO: 390685 - DNA, 201 bp, Homo sapiens
gctgttcttggaatagaagcactcttctatgctagttcttagttttcttaaccatcacttgtactggctgcagagtatcccactgagtcaacttgctgcarctcactcatgcctggtactgtgtccatccatgacgtatccaattaatcaataatctttcagagaacatcttcatactgaaagccctgtccacgtttagga

SEQ ID NO: 390686 - DNA, 201 bp, Homo sapiens
cactcatgcctggtactgtgtccatccatgacgtatccaattaatcaataatctttcagagaacatcttcatactgaaagccctgtccacgtttaggattrtgtccctggaatggatccccaggacagagattgtgggccaactgggggagcatgtttttgactcttggcgaaaccctttcttctgcctcgccctgcaggt

SEQ ID NO: 390687 - DNA, 201 bp, Homo sapiens
gagcttgtaagtggctcccagccatgccccaggagcagtgaggcaggcctgtgccctttggttcaggatggaggttgtctcttcccgcctaacctctcacstttgtgctcaccttccagatgcctgaagacagagcaagcactccccgcaccacgacgatgacgttcacttgttttgtgtttttcgatctcttcaacgcct

SEQ ID NO: 390688 - DNA, 201 bp, Homo sapiens
ttttgtctcttccccaggtctcatcatgctcattggctggtcgcaagggaaacaactcctgagtatgttcacgatcggggtcaggtaagagtgctatggcsgccccttgccttgccagggtggtcaatgggctctgagcccttccctgccgcaagagaaggtggggaggctgcagaataggaagggttgggaaggtgcagc

SEQ ID NO: 390689 - DNA, 201 bp, Homo sapiens
tcctggggcagctggcggtcatttacatccccccgctgcagagggtcttccagacggagaacctgggagcgcttggtgagtggtggggacgggaacgacasgtgacctcgaccagggccatggggggcggcagctgccaggtggggagctgcagcccaggaggggtcagtgcgggaaagcagagctcaccaggggccggct

SEQ ID NO: 390690 - DNA, 201 bp, Homo sapiens
  misc_feature (1)...(201): n = A,T,C or G
tcctccgcacctctcactttatcaggaggactggcagggaaggcgcttcctgccggcgcaacagagctgcagcccgtcctgaatcttttctgttttctccnttggcagatttgctgtttttaactggattggcctcatccgtcttcattttgtcagagctcctcaaactatgtgaaaaatactgttgcagccccaagagag

SEQ ID NO: 390691 - DNA, 201 bp, Homo sapiens
  misc_feature (1)...(201): n = A,T,C or G
gccttcaggggaatgaaaagggctggtcctccgcacctctcactttatcaggaggactggcagggaaggcgcttcctgccggcgcaacagagctgcagccngtcctgaatcttttctgttttctcccttggcagatttgctgtttttaactggattggcctcatccgtcttcattttgtcagagctcctcaaactatgtga

SEQ ID NO: 390692 - DNA, 201 bp, Homo sapiens
gccctctccactttctcccaactaccctttccaggccctggtaaccatcctactatctccatgagttcagttattttaatttttagcttccactaatcagygagaacctgcaaagtttgcctttctgtgtctggaggtcactatgttatttgacttaatataatgacctccagttccatccatgttgttgcaaatgacagg

SEQ ID NO: 390693 - DNA, 201 bp, Homo sapiens
ggaagagctggggatgcaggctggaggcagaatttcctcctcctcaagggagttcagccttttcctcttatagtcctcaactgatcggatgaggcccactsacgttatgaaggataaactgtttgttttacttcaagtctacgggcttacatgttagttacacagcgccatctagaccagtgtttgtttgacgaaaatcaa

SEQ ID NO: 390694 - DNA, 201 bp, Homo sapiens
gccagcatcctggagacccagggaagagctggggatgcaggctggaggcagaatttcctcctcctcaagggagttcagccttttcctcttatagtcctcawctgatcggatgaggcccactcacgttatgaaggataaactgtttgttttacttcaagtctacgggcttacatgttagttacacagcgccatctagaccag

SEQ ID NO: 390695 - DNA, 201 bp, Homo sapiens; identical to SEQ ID NO: 85672

SEQ ID NO: 390696 - DNA, 201 bp, Homo sapiens
ggaaaacccgaagttcttttcagtcaaggaacatattttttcccttagccattttcaattttctgcagcagagccagtgccatccctgatgggctgaactgaacattaaatctcacatttcccttggtgtcatttgtcaccctggccagttacagaggaagcgtttagaagtgctcctgagcactggtattcccttggggg

SEQ ID NO: 390697 - DNA, 201 bp, Homo sapiens; identical to SEQ ID NO: 85675

SEQ ID NO: 390698 - DNA, 201 bp, Homo sapiens
aggaaaacccgaagttcttttcagtcaaggaacatattttttcccttagccattttcaattttctgcagcagagccagtgccatccctgatgggctgaactgaacattaaatctcacatttcccttggtgtcatttgtcaccctggccagttacagaggaagcgtttagaagtgctcctgagcactggtattcccttgggg

SEQ ID NO: 390699 - DNA, 201 bp, Homo sapiens
aatatatattacatatattacatatattatttaatatatattatgtaatatatattataattgtataagaatatattagttatatataatatataatatayatataaataatataatgtaatataatacatataaataatatacaatacatatgtactataattaatgtattaacatctgtaattaatattatatttatta

SEQ ID NO: 390700 - DNA, 201 bp, Homo sapiens
gttgctgacaacagcgaacctgtgtggaagaaatacctggatcaggtaggaccagaggtgtcattctttgcattaacatgcataagccagcgagggtgggkcagccattccatctttcaatgttgatggaaggcatccttggacagctcccgcccctttcacgctgccccagccagcctgagcatcagtcatgagcaaatc

SEQ ID NO: 390701 - DNA, 201 bp, Homo sapiens
tgaggtgggaggattgttggaacccaggaggtggaggctgcagtgaactgagattgtgccactgtgctccagcctggacaacagagtgagaccttgtctcmacaacaacaacaaaaccaaagtgaatttcagatagataaacaagaagcaatttctagtataagtgtgtcccaatacagtggacgtgcttatactaaaaac

SEQ ID NO: 390702 - DNA, 201 bp, Homo sapiens
tgaaggtaggaggtcctggggtggctctgcggggaattctttcgctcggggctggattcattggtagaaagccagctcctgtctgagctaacaggagtggrgacgttaggtaatcatggaagaaaatggcccacactggccttgggccatctgttggtggtggaggaggtgagctctgagattccacgggacttcagcaag

SEQ ID NO: 390703 - DNA, 201 bp, Homo sapiens
ctttatgggaaccaacattcagcacagccaagaaatagtcacgatgtttcttttaaaaagccgggacgctgagttgttttaaagagcaagtcttgtccccrcaaccccagctgtaaaaatgggacaggcccacaatgtctaactttttcatgagcccagtactaactacagatgtccggacaatccccttttaggcgggct

SEQ ID NO: 390704 - DNA, 201 bp, Homo sapiens
cactccagcctgggtaatagaatgagactccatctcgaatgaatgaatgaatgaaacaaaaatatgcaaaactagtaagtaataataaaaaagaaaagaartgggcagagaagtaatgcgagtgtccaggctcaccaggccgggaaggaagagcgctgggaatcccactctttttgcttgtctctttttcattttttaaat

SEQ ID NO: 390705 - DNA, 201 bp, Homo sapiens
cacctgtagtcccagctactcaggagcctgagacaggagaattgccttgaaccagggaggcagaggttgcagtgagctgaggtcatgccactgcactccascctgggtaatagaatgagactccatctcgaatgaatgaatgaatgaaacaaaaatatgcaaaactagtaagtaataataaaaaagaaaagaaatgggcag

SEQ ID NO: 390706 - DNA, 201 bp, Homo sapiens
agtggctgatctctgctcactgtaaccttcacttctcgggttcaagcgactctcctgcctcagcttcccaagtagctgggactacaggcatgccctaataygccgagcttatttttgtattttctagtagagacggggtatcactatatgttggccaggctggtctcaaactcctgacctcaggtgatccgcccgccttgg

SEQ ID NO: 390707 - DNA, 201 bp, Homo sapiens
gcttgttattgtatataaagaaaaaaaagagtttgctgtaggggggaaaaaggagcatacagaagaaagaaaggaaagcaaatccacatccttctttaccstaatatcaaggtgccctggtttattcggccactgcttgcttgctggacacacaggtgcttctgggtctttgctagagcagtgttgcagggaattcctttc

SEQ ID NO: 390708 - DNA, 201 bp, Homo sapiens
agcccatggggtaagtctggcctcctttttacagattgggaaacaggcttacactagcacaacttatgggatcagggcatggaagagacagacttcaaacyactgaagcctgatccaaagccgggctccttgtcagcaacccaacccccccacctcagcaggatggggactctgctgccagccactgcccctcactcccta

SEQ ID NO: 390709 - DNA, 201 bp, Homo sapiens
tgtctgtgtatgtgtgtgcgtgtgtgtatgcatgtgtgtgtctgtgtctccgtgtgtgtgtctgtgcatgtgtatgtgtgcatgtgtgtatatgtgtctgsctgtgtgtgcatgtgtctgtgtgtgtatgcgtgtgtgtgtgtgtgtgtgtatgtgtgtgtgtggagatggggtttcactatgttgctcagtctgggaaaa

SEQ ID NO: 390710 - DNA, 201 bp, Homo sapiens
tctgtgaagatgataacgggggatgccctggagacggccttggccataggtaactgggacagggtcgggggtgaggacgaaaggacccatccatcctttaygatggggggctgctaccaaagggaagcctccgcaaactcggtcaggagtgctcacgcctagccctacaggcttagaaaagacgctgagtattcgtgtgcc

SEQ ID NO: 390711 - DNA, 201 bp, Homo sapiens
ctggtgtgtctgtgaagatgataacgggggatgccctggagacggccttggccataggtaactgggacagggtcgggggtgaggacgaaaggacccatccrtcctttatgatggggggctgctaccaaagggaagcctccgcaaactcggtcaggagtgctcacgcctagccctacaggcttagaaaagacgctgagtatt

SEQ ID NO: 390712 - DNA, 201 bp, Homo sapiens
cttgtgggcatcattgaccccccgagagttggcgtgaaggaagcagtccaggttctctccgagtctggtgtgtctgtgaagatgataacgggggatgcccwggagacggccttggccataggtaactgggacagggtcgggggtgaggacgaaaggacccatccatcctttatgatggggggctgctaccaaagggaagcc

SEQ ID NO: 390713 - DNA, 201 bp, Homo sapiens
tccccctctctcctcagtgctggccctggcttctgggcccgagctggggcggctgacgtttctaggtcttgtgggcatcattgaccccccgagagttggcrtgaaggaagcagtccaggttctctccgagtctggtgtgtctgtgaagatgataacgggggatgccctggagacggccttggccataggtaactgggacag

SEQ ID NO: 390714 - DNA, 201 bp, Homo sapiens
tgggggctggctaacaaagggctgcgcacgttgcctcacacctgtaatcccagcacttggggaggctgaggtgggcagatcacctgaggtcaggagtttgrgaccagcctggccaacatggtgaaatcctgtctctactaaaaatacaaaaattagctgggcctggaggcgcatgcccgtaatcccagctactcaagaggc

SEQ ID NO: 390715 - DNA, 201 bp, Homo sapiens
caaaaaacgacggcccctaagcccccggtgacccctccttactccccctctctcctcagtgctggccctggcttctgggcccgagctggggcggctgacgyttctaggtcttgtgggcatcattgaccccccgagagttggcgtgaaggaagcagtccaggttctctccgagtctggtgtgtctgtgaagatgataacggg

SEQ ID NO: 390716 - DNA, 201 bp, Homo sapiens
ttagctgggcctggaggcgcatgcccgtaatcccagctactcaagaggctgaggcaggagaacggtttgaacccaggaggcagaggctgcagtgagccaayattacaccactgcactccaacctgggcgataagaacaaaactctcttaaaaaacaacaacaacaaccaacaacaaaaaacgacggcccctaagcccccgg

SEQ ID NO: 390717 - DNA, 201 bp, Homo sapiens
ctgcaaaacgttccatggatggattctagaacttcgcgaacctgtccagcacccgtgaacagcaccagcctatgataaataactccgctgcaaagatcccygtgtgtgtctttgtaaccttgtgcagagtggggtgatggtcagtatgaaccaaggcttccagtgatagtggatttcttccctttgtcttttctaaggatc

SEQ ID NO: 390718 - DNA, 201 bp, Homo sapiens; identical to SEQ ID NO: 85735

SEQ ID NO: 390719 - DNA, 201 bp, Homo sapiens; identical to SEQ ID NO: 85738

SEQ ID NO: 390720 - DNA, 201 bp, Homo sapiens
  misc_feature (1)...(201): n = A,T,C or G
gttaggaagatctccctgccttcaggggaatgaaaagggctggtcctccgcacctctcactttatcaggaggactggcagggaaggcgcttcctgccggcncaacagagctgcagcccgtcctgaatcttttctgttttctcccttggcagatttgctgtttttaactggattggcctcatccgtcttcattttgtcagag

SEQ ID NO: 390721 - DNA, 201 bp, Homo sapiens
ctgggcaacatagcgaaaacccatctctacaaaaaatataaaaattagctgggcatggtggtgcatgcctgtggtcccagctactcaggaggctgaggcargaggatcccttgagcccaggagtctgaggctgcaatgagctatgatcacaccactgcactccagtctagatgagagagatcctgcctcaaaaaaaaaaaa

SEQ ID NO: 390722 - DNA, 201 bp, Homo sapiens
cagctggtggaatccttacacgtggaattgaatgggggcttggctgtcagggcaatccagcctgggggtttcacaagcctgaggatggcaacttctcttttctataaactggtgtttgttgtaccaggttgctgcagcgttctctgttctgacaagacggggactctgactgccaatgaaatgacagtgacccagcttgta

SEQ ID NO: 390723 - DNA, 201 bp, Homo sapiens
cataccgcctgctgcgggtctagcctcaaccctgctgtgtggagttggctggaggctggtctctctcagctgatgaggggctctgcggagggcggagcctrgagcctgtttctccaggcgcaacgttggggggggtcccctcggggtgatggagatcatctgggtgtatggaactgtgtgtggttggccttactgggtggt

SEQ ID NO: 390724 - DNA, 201 bp, Homo sapiens
ctctcaggaactcactccagcaagaacggctcgaaggagatggcgctaatccattcatgagggatccaccccatcgtccaatctcctcccacctccaacaytggggcttatgtttcaacttgaggtttgagttgggacacacattcaaactgtatcagctttcttgtcactctttgcctgtgggtttgggtctttctggct

SEQ ID NO: 390725 - DNA, 201 bp, Homo sapiens
gctctcctcgaatccagccaaccctggttatgagagagtggggtcgcaccgtacagggagagttggaggggtaagaaagaagtgagcagacaccccgaaasagatccacgcagcaggcaagtgtgtcgctgtggcccttcacctgccctgacctggacttccttgtctggcttcctcataggaagtgtctacaccactaca

SEQ ID NO: 390726 - DNA, 201 bp, Homo sapiens
acctctcctgccagccctccctgggagcagaagtgggaccaggaagctggcctcagctgtgtctgagcggcagggcctcacccggccactcccaccatacygcctgctgcgggtctagcctcaaccctgctgtgtggagttggctggaggctggtctctctcagctgatgaggggctctgcggagggcggagcctggagcc

SEQ ID NO: 390727 - DNA, 201 bp, Homo sapiens
aggctcaagtgatcctcctacctcagcctcctcagtagctgggattataggtgcacactgccacacccagctaatttatatatacatatgtatatataatwtttttttttgtagaaataaaaaaatgttgcccaggctggtctcgaactcttgagctcaaatgatctgccagtgtgatcctcccaaagtgctggtattata

SEQ ID NO: 390728 - DNA, 201 bp, Homo sapiens
aaggaagtcattaaggaattttccaatgtctcagtgggaaagttagtggaggtaggtgtcaaaagcgccatgagggaaataggcatttacattgaggcttmtggggctcctctctgaaaagggaaacagccattgaacctactggttcttgacaatgactggcccatccaggggtgaggctggcacagcactgaaaaaatg

SEQ ID NO: 390729 - DNA, 201 bp, Homo sapiens
aaaaaaaaaataaaaaacaggcaaggcacagaggatcacgcctgtgatcccaccactttgggaggccgaggcaggtggatcacttgaggccaggagttcargaccagcctggccaacatggtgaaacctcatctctactaaaaattcaaaaattagccaggtgtggtggcacatgcctgtaattccagctacgcgggaggc

SEQ ID NO: 390730 - DNA, 201 bp, Homo sapiens
aggattgcttgagtccaggaggtcaaggctgcggtgagccttgatggtgacactgcactccagcctgggcgacagagcaagaacctgcctcaaaaaaaaartaaaaaacaggcaaggcacagaggatcacgcctgtgatcccaccactttgggaggccgaggcaggtggatcacttgaggccaggagttcaggaccagcct

SEQ ID NO: 390731 - DNA, 201 bp, Homo sapiens
gccactgagtcagaaggtggagatggcagcttagccagcggagattttccaaaataagtaaaatgagagaatcatttttttaaaactttaagaactttttwaaaacgaattcctgggtcgggcacggtggctcatgcctgtaaccccagcactttgggaggccgaggcgcgtggatcatgaggtcaagagatagagatcat

SEQ ID NO: 390732 - DNA, 201 bp, Homo sapiens
gcaccactgcactccagcctagggaacagagcaagactccgtctcaaaaacaaaacaaaacaaacaacaacaacaaaacacacacacacacacacacaccctcctgccaataatggtgcatccaatccctgtcttataagccatgagaagcttcatgaggcaagaaagacgattaaatatttccagaagaaaaagcaaaaa

SEQ ID NO: 390733 - DNA, 201 bp, Homo sapiens
atcgcaccactgcactccagcctagggaacagagcaagactccgtctcaaaaacaaaacaaaacaaacaacaacaacaaaacacacacacacacacacacaccctcctgccaataatggtgcatccaatccctgtcttataagccatgagaagcttcatgaggcaagaaagacgattaaatatttccagaagaaaaagcaa

SEQ ID NO: 390734 - DNA, 201 bp, Homo sapiens
gagttaggatgtgaacatattttattggagggacacaattcaaccccttagcagcaggcactgggctgccgggagaagggggtggatggacaacaagctcrttgaaggagatgaggacaaggaggcctgagccagggctgggaagacccgtctacgcgaacggcaaagttgccaagagcagcctgcaggtggacagagtaa

SEQ ID NO: 390735 - DNA, 201 bp, Homo sapiens
tcaaggtttcagtgagccatgatcttgccactgcactccaacctgggcaacacagcaagaccctatcttaaaaaacaaaaacaaaagaaaaccaaaaaacsaaaaaaatctcctgcagatcatgagttcaggagtttgagaccagcctggccaaaacagtgaaacctcgtctctactaaaaatacaaaaattagccgggca

SEQ ID NO: 390736 - DNA, 201 bp, Homo sapiens
ctttaaacaacctataaatgagcggagatgtatgccaggggttggactttccccctagacctgtttggaaccatgaaaatgatgcagtggtgctgtacagstgtctttgctgggttgcagccctttttccctgaatatatgcccaggttctcggtttgttttactaatggccctgcgaaagggcatcttaggctctggata

SEQ ID NO: 390737 - DNA, 201 bp, Homo sapiens
acaaaaattagctgggcctggaggcgcatgcccgtaatcccagctactcaagaggctgaggcaggagaacggtttgaacccaggaggcagaggctgcagtragccaacattacaccactgcactccaacctgggcgataagaacaaaactctcttaaaaaacaacaacaacaaccaacaacaaaaaacgacggcccctaag

SEQ ID NO: 390738 - DNA, 201 bp, Homo sapiens
gcttctgttacatctccctgacatcagacacatctccaaccctccgtcctcccctcccttatgaggaccctcgtgatctcacggggcccaccccggtcacscagaccatattctccccacgccaaggtccttcagttagtcacgtctgcatagtctctgtcaccacatcagagaacacattcccaagttgaggattaggat

SEQ ID NO: 390739 - DNA, 201 bp, Homo sapiens
gtcttttctaaggatcaggaagacatttacttcatgaaaggggccttggaagaggtgatccgctactgcaccatgtacaacaacgggggcatccccctgcygctgacgccccagcagaggtcattctgcctgcaggaagagaagaggatggggtcgctcggtttgcggggtcagtgcctgtggtcccggcccagagcttta

SEQ ID NO: 390740 - DNA, 201 bp, Homo sapiens
tcatctgttttttggaattatttagtaggattggtatcgcttcttcgagtgtttggtagaattcagcagtgaagccactgggtcctgggcttttcctaacyggaagactttttattatggctttgatcttattacttgttattggtctattcagcttttggatttcttcatggttccatcttggtaggttctgtgtgtcta

SEQ ID NO: 390741 - DNA, 201 bp, Homo sapiens
aggtgatccgctactgcaccatgtacaacaacgggggcatccccctgccgctgacgccccagcagaggtcattctgcctgcaggaagagaagaggatgggrtcgctcggtttgcggggtcagtgcctgtggtcccggcccagagctttaagcttgcatgtaacattgacttttaagtgcattcaagcagggtccctagtca

SEQ ID NO: 390742 - DNA, 201 bp, Homo sapiens
tcggtttgcggggtcagtgcctgtggtcccggcccagagctttaagcttgcatgtaacattgacttttaagtgcattcaagcagggtccctagtcaaggargtcacccgtcccaaggagtcaggcagcatgctgacggcaataatgtgtgcttggaacctgatggtcacatgaaaggcacagaggtccccacctcatccca

SEQ ID NO: 390743 - DNA, 201 bp, Homo sapiens
gttgccaacaatgcggtcatcagaaagaacgccgtgatggggcagcccaccgagggtgcattgatggccctggcgttgaaggtaggaggtcctggggtggmtctgcggggaattctttcgctcggggctggattcattggtagaaagccagctcctgtctgagctaacaggagtggggacgttaggtaatcatggaagaaa

SEQ ID NO: 390744 - DNA, 201 bp, Homo sapiens
aggtaatcatggaagaaaatggcccacactggccttgggccatctgttggtggtggaggaggtgagctctgagattccacgggacttcagcaagttctgcrggtctctaatccctccaccagcgattccaaaagaatcctatgagcttccctgtggttcaggccctggtcaggtgttgaggcgacagacagtggaacgaga

SEQ ID NO: 390745 - DNA, 201 bp, Homo sapiens
gtactggctgcagagtatcccactgagtcaacttgctgcaactcactcatgcctggtactgtgtccatccatgacgtatccaattaatcaataatctttcrgagaacatcttcatactgaaagccctgtccacgtttaggattgtgtccctggaatggatccccaggacagagattgtgggccaactgggggagcatgttt

SEQ ID NO: 390746 - DNA, 201 bp, Homo sapiens
aactcactcatgcctggtactgtgtccatccatgacgtatccaattaatcaataatctttcagagaacatcttcatactgaaagccctgtccacgtttagrattgtgtccctggaatggatccccaggacagagattgtgggccaactgggggagcatgtttttgactcttggcgaaaccctttcttctgcctcgccctgc

SEQ ID NO: 390747 - DNA, 201 bp, Homo sapiens
ggagagctgaggtctcccgccgagctgaagaacgggagggtccctgagagagatggcaaacctggatggccgctcccccaactcggggctgggtggggccygagactcacatttctttctttctttttattatttcagtaggcttttcgggaacaggtggtgtttcgttacgtgaataagctatttagtggtgatttctga

SEQ ID NO: 390748 - DNA, 201 bp, Homo sapiens
tcaataatctttcagagaacatcttcatactgaaagccctgtccacgtttaggattgtgtccctggaatggatccccaggacagagattgtgggccaactsggggagcatgtttttgactcttggcgaaaccctttcttctgcctcgccctgcaggtcagcggagttgggtatgacggtcaagggactgtgtgtcttctac

SEQ ID NO: 390749 - DNA, 201 bp, Homo sapiens
tgcagaggcaggcactggagagctgaggtctcccgccgagctgaagaacgggagggtccctgagagagatggcaaacctggatggccgctcccccaactcrgggctgggtggggcccgagactcacatttctttctttctttttattatttcagtaggcttttcgggaacaggtggtgtttcgttacgtgaataagctatt

SEQ ID NO: 390750 - DNA, 201 bp, Homo sapiens
ataaattggggtcatcttataatctccttgctaacatgactgattttgtttttaatcatcccatacttccttttaatagatatgaccaatttaaggtagcmtccttttttagttacttattaattataagcacattgcaaaatttaaaagctagaaaaaatcttccataccttccacgataaactaaccgtgattagtcca

SEQ ID NO: 390751 - DNA, 201 bp, Homo sapiens
acctcatcatcagagcctttcccaatacgccacgccaggctgtctctgtgacactttggaagcagagagatgaaaagtgttggccacccttgatttagagsccgaaggaagtgggaggtgggagccccagcttattacagaagcgggggctgggaggaagggggcactggagcaggacgccgagctgtgctggggacagtg

SEQ ID NO: 390752 - DNA, 201 bp, Homo sapiens
caggacagagattgtgggccaactgggggagcatgtttttgactcttggcgaaaccctttcttctgcctcgccctgcaggtcagcggagttgggtatgacrgtcaagggactgtgtgtcttctaccatccaaggaagtcattaaggaattttccaatgtctcagtgggaaagttagtggaggtaggtgtcaaaagcgccat

SEQ ID NO: 390753 - DNA, 201 bp, Homo sapiens
gaagaaataaattggggtcatcttataatctccttgctaacatgactgattttgtttttaatcatcccatacttccttttaatagatatgaccaatttaargtagcctccttttttagttacttattaattataagcacattgcaaaatttaaaagctagaaaaaatcttccataccttccacgataaactaaccgtgatt

SEQ ID NO: 390754 - DNA, 201 bp, Homo sapiens
gtcacttgggggggaccacagctgagctctgtgagcagaatgagatgatggagttgcttagatcatggggaaactcatggccccttctcctattcctaacytcatcatcagagcctttcccaatacgccacgccaggctgtctctgtgacactttggaagcagagagatgaaaagtgttggccacccttgatttagaggcc

SEQ ID NO: 390755 - DNA, 201 bp, Homo sapiens
gaacatcagtttcatggaggcggagtttgtgtttcatccctgatgtctagagataaagggcttgccactcagtaggtgctcaggagtccacctgctccgcsacttaatatccccttcaacaagctggccaagtggtgtgggggaaggaatgcgctttggagtcaggggacccatctggccacgtgtgcgtaaccgtatgag

SEQ ID NO: 390756 - DNA, 201 bp, Homo sapiens
ccttgtcagcaacccaacccccccacctcagcaggatggggactctgctgccagccactgcccctcactccctatccttggcggccattggcaatgggctygagtttgtttgccccatgaatatgtattgggcatctgttgactctctgtttacatcaaaagtgctgatccagctggatcaggtagatctctgccctcctg

SEQ ID NO: 390757 - DNA, 201 bp, Homo sapiens
tcccagaaaactgaagtgtgttgcactggagtgagactgggagtagaaggcagaggagaaagtacctgggccggcagagctgggtgaggatggaactttcygctccctctgcctggatgctctctctgggcaacctgcatggctcattctcatgcttcattccagtcaccagtcactgccttcaggaagtcttccctgatt

SEQ ID NO: 390758 - DNA, 201 bp, Homo sapiens
ctgatccaaagccgggctccttgtcagcaacccaacccccccacctcagcaggatggggactctgctgccagccactgcccctcactccctatccttggcrgccattggcaatgggctcgagtttgtttgccccatgaatatgtattgggcatctgttgactctctgtttacatcaaaagtgctgatccagctggatcagg

SEQ ID NO: 390759 - DNA, 201 bp, Homo sapiens
  misc_feature (1)...(201): n = A,T,C or G
caccggcgcagaggtgaggcagggccggctgggagccctgtgtctctttacccacctgcggggcttcctccaggggctgctggctgtgccccaaggctatngggatgaacaaatacagccactttccatcaggagttcccagaaaactgaagtgtgttgcactggagtgagactgggagtagaaggcagaggagaaagtac

SEQ ID NO: 390760 - DNA, 201 bp, Homo sapiens
ctagcacaacttatgggatcagggcatggaagagacagacttcaaactactgaagcctgatccaaagccgggctccttgtcagcaacccaacccccccacstcagcaggatggggactctgctgccagccactgcccctcactccctatccttggcggccattggcaatgggctcgagtttgtttgccccatgaatatgta

SEQ ID NO: 390761 - DNA, 201 bp, Homo sapiens
  misc_feature (1)...(201): n = A,T,C or G
ccctcaacgccatgcagatcctatggatcaacatcatcatggatgggccaccggcgcagaggtgaggcagggccggctgggagccctgtgtctctttaccnacctgcggggcttcctccaggggctgctggctgtgccccaaggctatagggatgaacaaatacagccactttccatcaggagttcccagaaaactgaagt

SEQ ID NO: 390762 - DNA, 201 bp, Homo sapiens
tgtttcacttttctgtatttttttcttaatacatttaccttcctaattttaattagttctgagactctcctcataagctaatcgcagtggttagttgggggtgagggaaaactttttaagcctgatacaaaaaatccaaataaacaaatattgaggctaggtggatcgtgcactttacaaaggtgtctccacagttgattc

SEQ ID NO: 390763 - DNA, 201 bp, Homo sapiens
accccatggtttccagggccgcactgttgattactgtttattactgggactggataacctttatgagcctttactgaccgtgctgggcaccgtcacatccrtcatctcagtttgggcctcacaacagccctgggaagaagaaactgttgctcccactttgcagatagggaaactgaggtcaagagggtcaagggctcgccc

SEQ ID NO: 390764 - DNA, 201 bp, Homo sapiens
gcagacggatcacttgaggttaggagtttaagaccaggttggccaacatggtgaaaccccatctgtactaaaaatacaaaaatcagccaggcgtggtggcrcgtgcctataatcccagctactggggggcagaggcaagagaattgcttgaacccgggaggcagaggttgtagtgagctgagatcacactactgccctcca

SEQ ID NO: 390765 - DNA, 201 bp, Homo sapiens
ttttggctttattcctgttactcaactccgtgcctccgtttcctcatctgtaaaatgggggaactattaatgccgtcagctgattcacagggttggtagaraattaaacaaagccaggcccatgaatctcttggcacacagcaggagcccaataaagagctgatgtgatttttctgactctgaataccaaaaaaaggtaga

SEQ ID NO: 390766 - DNA, 201 bp, Homo sapiens
ggcactgggctgccgggagaagggggtggatggacaacaagctcgttgaaggagatgaggacaaggaggcctgagccagggctgggaagacccgtctacgygaacggcaaagttgccaagagcagcctgcaggtggacagagtaaagtcagttctgggccgggtgcggtggctcacgtctgtaatcccagcacttttggac

SEQ ID NO: 390767 - DNA, 201 bp, Homo sapiens
tcggtgttactgtgtatagcacgtgactgcgtgatctgttcttatcactttcattgaatccctttcatgttcatgtagtgttgggattgggggaggttgtkaacaagacagtcatggttcccaccttcaaagattgtaggtctcagtggggatggagaatcgatgggaatcaagggctagaggaagagagctgggaagaga

SEQ ID NO: 390768 - DNA, 201 bp, Homo sapiens
atctggtaattagtagtagaagagattccaaatgccttattttttcaacgacactgcatggtgtgcattaattgaggggcaggtggtaaaatcaacatgtrggcagctgtgtgtcctatgacaaaagcattcaataactgttttttgagttaatgggaattggaaatactgtgtctggctttggatactttgtcactcagt

SEQ ID NO: 390769 - DNA, 201 bp, Homo sapiens
gtacagagtgcccggcgaatgcttgcaaaatgaatgacagcaaatgatccagggtgtcccttttgtattaggctgttcttgcattgctaaaaaaaaaaaaatacctgaggcttggtaatttattaagaaaatagtttaattggcctatggttctacaggccgtacaggaagcatggtgtctgctcagcttctggggaggct

SEQ ID NO: 390770 - DNA, 201 bp, Homo sapiens
ggtacagagtgcccggcgaatgcttgcaaaatgaatgacagcaaatgatccagggtgtcccttttgtattaggctgttcttgcattgctaaaaaaaaaaaaatacctgaggcttggtaatttattaagaaaatagtttaattggcctatggttctacaggccgtacaggaagcatggtgtctgctcagcttctggggaggc

SEQ ID NO: 390771 - DNA, 201 bp, Homo sapiens
gtctcaaactcctggcctcaagtgatctgcccgccttggcctcccaaagtgctaggattacaggcatgagccaccgcactgggctttttttttttttttttaacattttgggaactgctctagcagatggagagttttgacactcagtcccatggaccccctagaaggcccaaggggcaggtgcagggaagcaacaccatg

SEQ ID NO: 390772 - DNA, 201 bp, Homo sapiens
ggtctcaaactcctggcctcaagtgatctgcccgccttggcctcccaaagtgctaggattacaggcatgagccaccgcactgggctttttttttttttttttaacattttgggaactgctctagcagatggagagttttgacactcagtcccatggaccccctagaaggcccaaggggcaggtgcagggaagcaacaccat

SEQ ID NO: 390773 - DNA, 201 bp, Homo sapiens
tggtctcaaactcctggcctcaagtgatctgcccgccttggcctcccaaagtgctaggattacaggcatgagccaccgcactgggctttttttttttttttttaacattttgggaactgctctagcagatggagagttttgacactcagtcccatggaccccctagaaggcccaaggggcaggtgcagggaagcaacacca

SEQ ID NO: 390774 - DNA, 201 bp, Homo sapiens
tctgggattacaggcatgcaccatcacgcccagctaatttttgtatttttggtagagacagggttttgtcatgttggccaggctggtctcaaactcctggyctcaagtgatctgcccgccttggcctcccaaagtgctaggattacaggcatgagccaccgcactgggctttttttttttttttttaacattttgggaact

SEQ ID NO: 390775 - DNA, 201 bp, Homo sapiens
tgaggggggtgctggtgagtgtagccaaaactgcgaagccagagaacagtcttgagagaaacagcttatgtaagcccatgtttcttaagttaaattagaayttaaattgacatgtccacagcaagacccatgatatcattcagacattttttttgagggggcaggaatggagtctcactctgttgcccagactggagagca

SEQ ID NO: 390776 - DNA, 201 bp, Homo sapiens
caccactgcttctgttacatctccctgacatcagacacatctccaaccctccgtcctcccctcccttatgaggaccctcgtgatctcacggggcccacccyggtcacgcagaccatattctccccacgccaaggtccttcagttagtcacgtctgcatagtctctgtcaccacatcagagaacacattcccaagttgagga

SEQ ID NO: 390777 - DNA, 201 bp, Homo sapiens
catagtgctgccccagtcccttctggggcttcttcctgctctttccatatctggccttacttctgtgtcctttattccagcctttaggatcaacccatgcytggcccctaatagattctcagtaaatatttgttgagtaaaacatttaatcaaggaataaaccaacaagccactgcctatagcacatctagtgatgagggg

SEQ ID NO: 390778 - DNA, 201 bp, Homo sapiens
cccacctgctgaacccacacacaaccaccttcactccttcttggtccggaggtgccacctgatcttctacctgcctttatttttgtcatatgaagacaacraatatttttcagtataacaggtctatgctaaccaccgtatgaaaattgtttcatttgttctcccaacacccttaagagaccagcactgttatttttcctc

SEQ ID NO: 390779 - DNA, 201 bp, Homo sapiens
tggtgatgcccatagggtacttgggaggattacagatcttcagagatgccaaaagtgctcagaacggtgcctggcacaggtgagtgagaggcaggtgtggsggctgccgtactgcagtgtgtgttggaagtcagagaaccccaggccccatagctcctagggcgtgactcggggaaggaattcacctctctgagcttcgat

SEQ ID NO: 390780 - DNA, 201 bp, Homo sapiens
aaacataggtcacttcatagaaacagaaagtaggttagtgtttgccagggcctggggttggggagtgtgtagtgactcctaacagttatggggtttccttygggggtgaagaaaatgttccaaaattgattgtgcggataggtgcacgactctgcatacactaaccaccattcaattatatatgttaaaggagtgaatttt

SEQ ID NO: 390781 - DNA, 201 bp, Homo sapiens
cacaataaggaagaaataaattggggtcatcttataatctccttgctaacatgactgattttgtttttaatcatcccatacttccttttaatagatatgascaatttaaggtagcctccttttttagttacttattaattataagcacattgcaaaatttaaaagctagaaaaaatcttccataccttccacgataaacta

SEQ ID NO: 390782 - DNA, 201 bp, Homo sapiens
tcctttgcagaaaagcatggacaggctaggaaagcaactgacactcttctcctttggcataatcggtgagtgaagcagtttccatactgggtttgttctgyagatggaggggagccatcataggggggttgccatggccgtttctcaaatatcttgctactcagctgcataaggcttggggattgggatcagaggctctcc

SEQ ID NO: 390783 - DNA, 201 bp, Homo sapiens
ccagccaaaagcattgccagccccagctgagagtcacacactccttaaatgtgttagaggggactcatttgacctttcgatccagcctggctgtggcggcyattccagagggtctgcccatcgtcgtcatggtgacgctggtcctgggagtgctgcggatggccaagaagcgggtcatcgtgaagaagttacccatcgtgg

SEQ ID NO: 390784 - DNA, 201 bp, Homo sapiens
aatccctccaggcatcagcgtgtgtagtgcatatggagataaggatgtttttgtctcttccccaggtctcatcatgctcattggctggtcgcaagggaaasaactcctgagtatgttcacgatcggggtcaggtaagagtgctatggccgccccttgccttgccagggtggtcaatgggctctgagcccttccctgccgca

SEQ ID NO: 390785 - DNA, 201 bp, Homo sapiens
acaacaaacagcattgacatgatgctgcggttctgaatctagatcttaaggcttgacatccccatagtgctgccccagtcccttctggggcttcttcctgytctttccatatctggccttacttctgtgtcctttattccagcctttaggatcaacccatgcctggcccctaatagattctcagtaaatatttgttgagta

SEQ ID NO: 390786 - DNA, 201 bp, Homo sapiens
gtgagtggttccaaacccttgtcaatggggtatttgatggagctggtcaaggagcagacacttagctaattgtaggcatgtatagtctctctcatacacamatgctcaaacatacatgcacatgcatacacacaagacaggaagttagcagacaagcgtgttctacgcatagagcccctcaaaccatatttcataaattgt

SEQ ID NO: 390787 - DNA, 201 bp, Homo sapiens
gtgtatgtgtgtgcgtgtgtgtatgcatgtgtgtgtctgtgtctccgtgtgtgtgtctgtgcatgtgtatgtgtgcatgtgtgtatatgtgtctgtctgtstgtgcatgtgtctgtgtgtgtatgcgtgtgtgtgtgtgtgtgtgtatgtgtgtgtgtggagatggggtttcactatgttgctcagtctgggaaaacagct

SEQ ID NO: 390788 - DNA, 201 bp, Homo sapiens
atgtgtctgtgtatgtgtgtgcgtgtgtgtatgcatgtgtgtgtctgtgtctccgtgtgtgtgtctgtgcatgtgtatgtgtgcatgtgtgtatatgtgtstgtctgtgtgtgcatgtgtctgtgtgtgtatgcgtgtgtgtgtgtgtgtgtgtatgtgtgtgtgtggagatggggtttcactatgttgctcagtctggga

SEQ ID NO: 390789 - DNA, 201 bp, Homo sapiens; identical to SEQ ID NO: 85692

SEQ ID NO: 390790 - DNA, 201 bp, Homo sapiens
gatgtcgtatctctctcgatcggagaccggatccctgcagacatccgactcactgaggtgagtggttccaaacccttgtcaatggggtatttgatggagckggtcaaggagcagacacttagctaattgtaggcatgtatagtctctctcatacacacatgctcaaacatacatgcacatgcatacacacaagacaggaag

SEQ ID NO: 390791 - DNA, 201 bp, Homo sapiens
cttttgctttttaccatgtcaaatgcagcctaagagaaggaaaactccagcacctgcttgctcgagaactggttcctggtgatgtcgtatctctctcgatyggagaccggatccctgcagacatccgactcactgaggtgagtggttccaaacccttgtcaatggggtatttgatggagctggtcaaggagcagacactta

SEQ ID NO: 390792 - DNA, 201 bp, Homo sapiens
ttggacactgaggcagacggatcacttgaggttaggagtttaagaccaggttggccaacatggtgaaaccccatctgtactaaaaatacaaaaatcagccrggcgtggtggcgcgtgcctataatcccagctactggggggcagaggcaagagaattgcttgaacccgggaggcagaggttgtagtgagctgagatcacac

SEQ ID NO: 390793 - DNA, 201 bp, Homo sapiens
aagtcagttctgggccgggtgcggtggctcacgtctgtaatcccagcacttttggacactgaggcagacggatcacttgaggttaggagtttaagaccagsttggccaacatggtgaaaccccatctgtactaaaaatacaaaaatcagccaggcgtggtggcgcgtgcctataatcccagctactggggggcagaggcaa

SEQ ID NO: 390794 - DNA, 201 bp, Homo sapiens
agaaccacatctcactgggagttctaaggcctggtctccgcctgccaataggtcgctgtgtgtcctcgggcatgtcactcaacctctctgggcctcagctycatcatcagtgtctaaatcagggtgcctagcctgaggaccacaggtagcaggagtgactctgggaagagggtagcccacaaagcctgtgaaataatgtgc

SEQ ID NO: 390795 - DNA, 201 bp, Homo sapiens
gacaagagaaccacatctcactgggagttctaaggcctggtctccgcctgccaataggtcgctgtgtgtcctcgggcatgtcactcaacctctctgggccwcagctccatcatcagtgtctaaatcagggtgcctagcctgaggaccacaggtagcaggagtgactctgggaagagggtagcccacaaagcctgtgaaata

SEQ ID NO: 390796 - DNA, 201 bp, Homo sapiens
cttggtagtgtcggacaagagaaccacatctcactgggagttctaaggcctggtctccgcctgccaataggtcgctgtgtgtcctcgggcatgtcactcamcctctctgggcctcagctccatcatcagtgtctaaatcagggtgcctagcctgaggaccacaggtagcaggagtgactctgggaagagggtagcccacaa

SEQ ID NO: 390797 - DNA, 201 bp, Homo sapiens
cgtcgggtgacagtgcagggcccgaccgtggcttccttctctaggtccagggcagctgccccgggagttaccttttcatagccagggggaggggaggaggwtgagcaggggcgcgtgggcagctcccttggagaggacgaggctctgaagttgccagcaacacttgcgctgacagccccttggccagaacacagtcacggg

SEQ ID NO: 390798 - DNA, 201 bp, Homo sapiens
gaaacagaagcttattctcaccattctagaggccagaagtccgaggtccaggtgtggcaggagcatgctgttcttgaagaccctagggggagaatcagccraatgcttctcagcttctggtgtcacaggcagtcctgagcacatagatatcttgcctctagtctctgtctgtcacatggtctcctcctctgtctctgcgtc

SEQ ID NO: 390799 - DNA, 201 bp, Homo sapiens
ggaggagactgggtgtgcatattcctgtggctgtcaaaacaaagcaccacaggctgcagggctggaaacagaagcttattctcaccattctagaggccagragtccgaggtccaggtgtggcaggagcatgctgttcttgaagaccctagggggagaatcagccaaatgcttctcagcttctggtgtcacaggcagtcctg

SEQ ID NO: 390800 - DNA, 201 bp, Homo sapiens
aggggctggtataagaaggtccttttcacctcgctgacaccagcgacggggctgtggcgtccctcctgcacagtggagagattgggagacaatctggcacrtgggtggcagctgcttttgtcatggttgatacgaccaagccattcagtagctccctgttcttgtcacatcacgcctctgctgacgaaatggctcacttaa

SEQ ID NO: 390801 - DNA, 201 bp, Homo sapiens
cttggaggagactgggtgtgcatattcctgtggctgtcaaaacaaagcaccacaggctgcagggctggaaacagaagcttattctcaccattctagaggcyagaagtccgaggtccaggtgtggcaggagcatgctgttcttgaagaccctagggggagaatcagccaaatgcttctcagcttctggtgtcacaggcagtc

SEQ ID NO: 390802 - DNA, 201 bp, Homo sapiens
gtgtgctgggacacagaggtttgtcctgctggccagtgtgggcaagagaatcttgctttaagggttgagtgtactgggtctggtacatggtatcaggtacmtagtatcaggtgtacatggctctggtgcatagtcaggcttgcctgtgtatacatgaatgtacacgattatctggtaattagtagtagaagagattccaaa

SEQ ID NO: 390803 - DNA, 201 bp, Homo sapiens
tcccagtgtgtgctgggacacagaggtttgtcctgctggccagtgtgggcaagagaatcttgctttaagggttgagtgtactgggtctggtacatggtatsaggtacctagtatcaggtgtacatggctctggtgcatagtcaggcttgcctgtgtatacatgaatgtacacgattatctggtaattagtagtagaagaga

SEQ ID NO: 390804 - DNA, 201 bp, Homo sapiens
ggcacagaggtccccacctcatcccagttccttagtgacccccattaatccagagaagagggtaccctcccttgctgagtttcctaaggcaggtgaatggrctgcaccccaaacattgattttcccaataggtctttttgctcattgcctcttgtcaggaaaacccgaagttcttttcagtcaaggaacatattttttccc

SEQ ID NO: 390805 - DNA, 201 bp, Homo sapiens
aaaatgttccaaaattgattgtgcggataggtgcacgactctgcatacactaaccaccattcaattatatatgttaaaggagtgaattttattatatacarattatatatcaatagagaaaccagaaaggtatagaacaggcaactaagaatgctgttattgagagggtcctcggagcctttctaatttatatatgaagag

SEQ ID NO: 390806 - DNA, 201 bp, Homo sapiens
gttgaagattggccttgttctttctctggactgcaaaacgttccatggatggattctagaacttcgcgaacctgtccagcacccgtgaacagcaccagccyatgataaataactccgctgcaaagatccccgtgtgtgtctttgtaaccttgtgcagagtggggtgatggtcagtatgaaccaaggcttccagtgatagtg

SEQ ID NO: 390807 - DNA, 201 bp, Homo sapiens
aagaacaagggtagtacaggttgaagattggccttgttctttctctggactgcaaaacgttccatggatggattctagaacttcgcgaacctgtccagcasccgtgaacagcaccagcctatgataaataactccgctgcaaagatccccgtgtgtgtctttgtaaccttgtgcagagtggggtgatggtcagtatgaacc

SEQ ID NO: 390808 - DNA, 201 bp, Homo sapiens
agctcgcctacaaacagtgacttgggcccaggcccctgttacattgctgctctatcttcctctgggtccttggaggccatgtttctgttcagccagcagayggtgaaagaggaaacatggaggcttgtggaggacatttttaaggcatagaccaggaagtggaatcatcaatttgaccatcttttattggccagaatggag

SEQ ID NO: 390809 - DNA, 201 bp, Homo sapiens
cccaggctggagtgcagtggggcaatctcggctcactgcaacctccgcctcctgggttcaagagattctcctgcctcagcctcctgagtagctgggattayaggcgcctgcccccatacccggctaatttttgtatttttagtagagacagggtttcactgtgttggccaggctggtctcgaactcctgacttcaagtgat

SEQ ID NO: 390810 - DNA, 201 bp, Homo sapiens
cccagttaatcacacccccaaaggcacagtcccagctgggatgatacctcccgtgcatgaaacatacaagacgctctgagtgaccataacaagggaactgraaaaagaacaagggtagtacaggttgaagattggccttgttctttctctggactgcaaaacgttccatggatggattctagaacttcgcgaacctgtcca

SEQ ID NO: 390811 - DNA, 201 bp, Homo sapiens
ctgtgacagtttctgatgttccttgtttttgaccttgaccttgacagtttcggttttgtttttgttttgagcagagtctctctctgtcacccaggctggartgcagtggggcaatctcggctcactgcaacctccgcctcctgggttcaagagattctcctgcctcagcctcctgagtagctgggattacaggcgcctgcc

SEQ ID NO: 390812 - DNA, 201 bp, Homo sapiens
caggcgtggtggcgtgcacctgtagtcccagctactcaggagactgaggcaggagaattgcttgaacctgggaggtggggttttagtgagccgagattgcrccactgcactgtagcctgggtgacagagtgagaccccatctttaaaaaaaaaaaaaaaaaaaaaaaaaaaaaagtgctactggggccatgctcctgcaga

SEQ ID NO: 390813 - DNA, 201 bp, Homo sapiens
aaaaattagccaggcgtggtggcgtgcacctgtagtcccagctactcaggagactgaggcaggagaattgcttgaacctgggaggtggggttttagtgagscgagattgcaccactgcactgtagcctgggtgacagagtgagaccccatctttaaaaaaaaaaaaaaaaaaaaaaaaaaaaaagtgctactggggccatg

SEQ ID NO: 390814 - DNA, 201 bp, Homo sapiens
ttttgtggggtaaacagtcaccagatacttgtgattgcttttattttttatcattatcgttctatacaacggttctttgaaacaactttttagaccccagrtaacttccttactgcttcagctggctttctctctgccctgcttatgttaaattaaactgtggctgggcacagtggctcatacctgtcatcccaatacttt

SEQ ID NO: 390815 - DNA, 201 bp, Homo sapiens
cccatagggtacttgggaggattacagatcttcagagatgccaaaagtgctcagaacggtgcctggcacaggtgagtgagaggcaggtgtgggggctgccrtactgcagtgtgtgttggaagtcagagaaccccaggccccatagctcctagggcgtgactcggggaaggaattcacctctctgagcttcgatctcctcat

SEQ ID NO: 390816 - DNA, 201 bp, Homo sapiens
ggaacggctgtctgtggccaatccccgcctacaaggaggactggggaagctgggctcacattttccacgttttccttctcccgagaaggggggtcctaacrggatgctccagatgccaggcagcttgtgagaaggacacaggtccaccacaagggctggtgcagaggcagagagaggccgtatgagaggtggccaatgacc

SEQ ID NO: 390817 - DNA, 201 bp, Homo sapiens
cctggccaacatggtgaaactctctactaaaaatacaataattagctaggcatggtggcatgcgcctgtagtcccagctactcaggaggctgaggcaggaraatcacttgaacccgggaggcggaggttgcagtgagccgagaccacgccactgcactctagcctgggcaacagagcgagaagcacacgcttttagagtag

SEQ ID NO: 390818 - DNA, 201 bp, Homo sapiens
gatatataaaataaagtaaaaatcttctcaggaagttttgggaacggctgttttagagagggacatcattggagtccctagaggctgttacaggagcaggytgttactgagtttggtgactgggatgtgcaggatttggggagctggtgtggtgagagaggatccttggccgtcctgagccaggactggcatcttgccgaa

SEQ ID NO: 390819 - DNA, 201 bp, Homo sapiens
ggctgagtgcagtggctcaaatcccagcactttaagaggctaaggcgggaggatcatttgaggccaagagtttgagaccagcctgggcaacatagcgaaamcccatctctacaaaaaatataaaaattagctgggcatggtggtgcatgcctgtggtcccagctactcaggaggctgaggcaggaggatcccttgagccca

SEQ ID NO: 390820 - DNA, 201 bp, Homo sapiens
gttttgcaagaagaaaggaaatcaatcattaaagacaagcccctagcctgccatgccctgtcccccctcccactgagcctctggtactgacaccctcctcygtttgctgtctaggcagtgcttgtcgtggtcactgtcgccttcatccaggtgagtatttcctgaggtcccagtcagggtaagctgggcgggacaggagct

SEQ ID NO: 390821 - DNA, 201 bp, Homo sapiens
agtatgaggacgccgtcagcatcgccacggtgagttccctgacagcgctcggctcccgggcgggcagccacaggtctgctgagtctctgcttgttattgtrtataaagaaaaaaaagagtttgctgtaggggggaaaaaggagcatacagaagaaagaaaggaaagcaaatccacatccttctttaccctaatatcaaggt

SEQ ID NO: 390822 - DNA, 201 bp, Homo sapiens
atccttctttaccctaatatcaaggtgccctggtttattcggccactgcttgcttgctggacacacaggtgcttctgggtctttgctagagcagtgttgcrgggaattcctttcccgtgaccctgggatgaggggaatagagcctgggctgtgcacatttgccttccgaagaacaacacctttgatccattaccgagaggt

SEQ ID NO: 390823 - DNA, 201 bp, Homo sapiens
ataaagaaaaaaaagagtttgctgtaggggggaaaaaggagcatacagaagaaagaaaggaaagcaaatccacatccttctttaccctaatatcaaggtgscctggtttattcggccactgcttgcttgctggacacacaggtgcttctgggtctttgctagagcagtgttgcagggaattcctttcccgtgaccctggga

SEQ ID NO: 390824 - DNA, 201 bp, Homo sapiens; identical to SEQ ID NO: 85696

SEQ ID NO: 390825 - DNA, 201 bp, Homo sapiens; identical to SEQ ID NO: 85700

SEQ ID NO: 390826 - DNA, 201 bp, Homo sapiens; identical to SEQ ID NO: 85702

SEQ ID NO: 390827 - DNA, 201 bp, Homo sapiens
tcacctaaggtcaggagttctagaccagtctggccaacatggtgaaaccctgtctctactaaaaatacaaaaattaactgggtgtggtggcaggcacctawaatcccagctactcgggaggctgaggcagaagaatcgcttgagcccgggaggtggagtttgcagtgagccgagattgcgccactgccctccagcctgggt

SEQ ID NO: 390828 - DNA, 201 bp, Homo sapiens
ccgctctcaggtgagacccgggctgaccctcctcgctgcagagctgctgtgtgttctcgacagcagcgccccgaccctgcccgcagcattgagcggctctrgctcagcgtgggcagtcagagctcccctgcctgtacctggggtgtggacagcacacaatcccccgtgtgaccttctccctgcagaccaagctgatatttg

SEQ ID NO: 390829 - DNA, 201 bp, Homo sapiens
ttaatgttgaagccattttcctaggtgaaagaagccagttgcacatgttatatgattttatttatataaaatattcaaaaataggtcactcggccaggcgmggtggctcatacctgtaatcctagcgctttgggaggccaaggcagacgatcacctaaggtcaggagttctagaccagtctggccaacatggtgaaaccct

SEQ ID NO: 390830 - DNA, 201 bp, Homo sapiens
atgttcctctactccgtcctggggtccatcctggggcagctggcggtcatttacatccccccgctgcagagggtcttccagacggagaacctgggagcgcytggtgagtggtggggacgggaacgacaggtgacctcgaccagggccatggggggcggcagctgccaggtggggagctgcagcccaggaggggtcagtgcg

SEQ ID NO: 390831 - DNA, 201 bp, Homo sapiens
tcataagtcatcccaagcccctgggtcctggtggccgagacagggagaggcacgggcagcccagcatcgtgcagcggtttgactttgtcagtagttcttcygtggctatttgccaagagcaagggaagcagaggccggggattgtcactaactgggtatgtcccattggaagggagcctaggggctgtgccaggacacgga

SEQ ID NO: 390832 - DNA, 201 bp, Homo sapiens
cgctgcagagctgctgtgtgttctcgacagcagcgccccgaccctgcccgcagcattgagcggctctggctcagcgtgggcagtcagagctcccctgcctktacctggggtgtggacagcacacaatcccccgtgtgaccttctccctgcagaccaagctgatatttgagatcggctttctcaggaaccacatgttcctct

SEQ ID NO: 390833 - DNA, 201 bp, Homo sapiens
tacattcacactgtgcacccacgtgagccaggtatgtccggtattgaggctaggggtacagtgtgactctcactgacccagggcctccccccgtggagttyatagtctacatgtttgtcatgacagagcttaagaaaaacacaggaaaaatgatcagctactcatgtggcttcactattacaagccaagtgctgggggtgg

SEQ ID NO: 390834 - DNA, 201 bp, Homo sapiens
ggccacacgcggacagcagggctgggagtcatcatcacttgatgatgctaagccgaggggacccgcccttcttctacgtagtgattcataagtcatcccargcccctgggtcctggtggccgagacagggagaggcacgggcagcccagcatcgtgcagcggtttgactttgtcagtagttcttctgtggctatttgccaa

SEQ ID NO: 390835 - DNA, 201 bp, Homo sapiens
tttaattggcctatggttctacaggccgtacaggaagcatggtgtctgctcagcttctggggaggctccaggaagtttccaatcaaggcggaaggggaagrgggagcaggcatgtcacatggcaagagcaggggcaggagagggaggaaggggagatgccacatgctttgaaacaattagatctctcaggaactcactcca

SEQ ID NO: 390836 - DNA, 201 bp, Homo sapiens
aaacactgcaggtttgtttctaagcagatttcagatagaagctgttgcaaagaccgtcttgtctgcccttcagccaagagaagagacttttttttttttttctaggtgggacattccaagagaaatggccttttttctatgtgctaaatgcttggatttcttatctgccagaggtggtttgaacaatgaataatttaaatg

SEQ ID NO: 390837 - DNA, 201 bp, Homo sapiens
gagtgctatggccgccccttgccttgccagggtggtcaatgggctctgagcccttccctgccgcaagagaaggtggggaggctgcagaataggaagggttsggaaggtgcagccccgtcacccaaactccagcctcccaatagcacgttctccgacaggtacagagtgcccggcgaatgcttgcaaaatgaatgacagcaa

SEQ ID NO: 390838 - DNA, 201 bp, Homo sapiens
aattgacgatatctgcaaaggcgctattccaaatcaggtcacattcagaggttccgaggttaggacttcaacatatcttttgtggggtacaattcaacccmactaaggagatggtttaggcatttcttccctaatcaccccactccctccccatgaaatttaatatggtagatacactgtattgtacgcatatctgcactt

SEQ ID NO: 390839 - DNA, 201 bp, Homo sapiens
aatagagctccccttgctaatctatttcatttgagttcatttgggttctagctaagatttcagctgatgactgagtttagtagccaatagtagaatgcccraaacaaaactaacagatactgtggcagctgcccccctcaatacatacacacacacaccccgctaccatccatcagaaaacatccctggccccctggcccc

SEQ ID NO: 390840 - DNA, 201 bp, Homo sapiens
caggcatgagccaccatgcccggccttcctcctcttatatccagtcatgttggcttagggccaaccctaatagcctcaaattgacgatatctgcaaaggcsctattccaaatcaggtcacattcagaggttccgaggttaggacttcaacatatcttttgtggggtacaattcaaccccactaaggagatggtttaggcat

SEQ ID NO: 390841 - DNA, 201 bp, Homo sapiens
gctttctgctgtgtgacttgtctctgactcgggtgtgatcagaaccctctccatcaaggtcaagggaaaagcccgactcagggtgctcatcccccagcackgacccctcgctgccgccgagcctggcccctgcactcaccctcccttcctgcttcctcctggactttgaccactcctgcctgttctcactggcgagtgccg

SEQ ID NO: 390842 - DNA, 201 bp, Homo sapiens
atctcagctcactgcaccctctgcctcctgggttaaccaattctcctgcctcagcctcctgaatctctgggattacaggcatgcaccatcacgcccagctratttttgtatttttggtagagacagggttttgtcatgttggccaggctggtctcaaactcctggcctcaagtgatctgcccgccttggcctcccaaagtg

SEQ ID NO: 390843 - DNA, 201 bp, Homo sapiens
ccggtcagctcccacgtctgtttccatggccacttggcctgggtccctcctcttcagccagagctggggctcccctggacactgtgggagctcctttcccmgacccgctccgtgctttctgctgtgtgacttgtctctgactcgggtgtgatcagaaccctctccatcaaggtcaagggaaaagcccgactcagggtgctc

SEQ ID NO: 390844 - DNA, 201 bp, Homo sapiens
gtgtctgtaatcccagctacttgggaggctgaggcaggagaattgcctgaacccagagatggaggttgcagtgagccaagagtgctccattgtactccagyctgtgcgataagagcgaaactctgtctcaaaaaaaaaaaaaaaaagtatctcatggtctggggtgtctgggaacaactcagcccaccctctgagtctcca

SEQ ID NO: 390845 - DNA, 201 bp, Homo sapiens
ttagaagaaggagaggcagaaaacatgggctgggaatgcaggtgacaggaaagcaaggagaagagaggacaaaggacatgggaaaggaggggccggcagakgttaagaggagggagcaaaggaaggaagaaggtggccccggtcagctcccacgtctgtttccatggccacttggcctgggtccctcctcttcagccagag

SEQ ID NO: 390846 - DNA, 201 bp, Homo sapiens
catggtggtgggtgtctgtaatcccagctacttgggaggctgaggcaggagaattgcctgaacccagagatggaggttgcagtgagccaagagtgctccaytgtactccagcctgtgcgataagagcgaaactctgtctcaaaaaaaaaaaaaaaaagtatctcatggtctggggtgtctgggaacaactcagcccaccct

SEQ ID NO: 390847 - DNA, 201 bp, Homo sapiens
gtgtggaggggatgggtgggagctgatgggggcctgctgcattctgtgctcagaggacaagttagaagaaggagaggcagaaaacatgggctgggaatgcrggtgacaggaaagcaaggagaagagaggacaaaggacatgggaaaggaggggccggcagaggttaagaggagggagcaaaggaaggaagaaggtggcccc

SEQ ID NO: 390848 - DNA, 201 bp, Homo sapiens
gcgcggtggctcacacctgtaatcccagcactttgggaggccgaggtaggcagctcacctgaggtcaggagttcaagaccagcctggccaacatggtgaarctctgtctctactaaaaattaaaaaaaaattagctgggcatggtggtgggtgtctgtaatcccagctacttgggaggctgaggcaggagaattgcctgaa

SEQ ID NO: 390849 - DNA, 201 bp, Homo sapiens
gccaccacacctgactacttttttgtatcagctgctacaaaagttactgcattttttgcatttttattttttaaacctgattgtgtatgtgtgtgtatgtatgtgtgtacgtgtgtgcacgtatgtgtgtgtgtgcgagcatgtctgcacgtgtgtgtcgtgtgtgtctgtatgcgtgtgtctgcgtgcgtgtgtgcatgt

SEQ ID NO: 390850 - DNA, 201 bp, Homo sapiens
tgccaccacacctgactacttttttgtatcagctgctacaaaagttactgcattttttgcatttttattttttaaacctgattgtgtatgtgtgtgtatgtatgtgtgtacgtgtgtgcacgtatgtgtgtgtgtgcgagcatgtctgcacgtgtgtgtcgtgtgtgtctgtatgcgtgtgtctgcgtgcgtgtgtgcatg

SEQ ID NO: 390851 - DNA, 201 bp, Homo sapiens
atgccaccacacctgactacttttttgtatcagctgctacaaaagttactgcattttttgcatttttattttttaaacctgattgtgtatgtgtgtgtatgtatgtgtgtacgtgtgtgcacgtatgtgtgtgtgtgcgagcatgtctgcacgtgtgtgtcgtgtgtgtctgtatgcgtgtgtctgcgtgcgtgtgtgcat

SEQ ID NO: 390852 - DNA, 201 bp, Homo sapiens
catgccaccacacctgactacttttttgtatcagctgctacaaaagttactgcattttttgcatttttattttttaaacctgattgtgtatgtgtgtgtakgtatgtgtgtacgtgtgtgcacgtatgtgtgtgtgtgcgagcatgtctgcacgtgtgtgtcgtgtgtgtctgtatgcgtgtgtctgcgtgcgtgtgtgca

SEQ ID NO: 390853 - DNA, 201 bp, Homo sapiens
cttgctctgtcgcccaggctggagtgcagtggcacaatctcagttcgctgcaacctccgcctcctgggttcaagcagttctcctgcctcagcctcccaaakagctgggactacaggcatgcaccactacacctggctaatttttatatttttagtagaggtggggtttcgccacgttggctaggctcgtctcgacctcctg

SEQ ID NO: 390854 - DNA, 201 bp, Homo sapiens
ctggagtaggccgggtgcggtggctcatgcctgtaatcccagcactttgggaggcctggggggtggatcacgaggtcaggagatcgagaccatcctggccmacatggtgaaagcccgtctctacaaaaaatacaaaaaaattagcagggcatggtggcatgtgcctgtggtcccagctacttgggaggccgaggcaggaga

SEQ ID NO: 390855 - DNA, 201 bp, Homo sapiens
atcccagggaacatgtcggggtgcactggacagggagcccagactggtcactcaggacatttgcaagcagcagggcactgggacagctgctgtagggaaargaaactcattccccttccagcccgagtccataacatgctcccagctgcctgccagacccaccctgtgctctggagctgcctggtgtttgcctggaaccac

SEQ ID NO: 390856 - DNA, 201 bp, Homo sapiens; identical to SEQ ID NO: 85723

SEQ ID NO: 390857 - DNA, 201 bp, Homo sapiens
ttgtctctttttcattttttaaatatttatgtataaattgaggtagaagtcatctaccatgaattcaccccgttaaagtgcacaattcagtggtttcaatwtgttcacaagttgtgcaaacttcaccactgtctagaatactttgtcaccccaagtggaaatgccatcatccccattatcggtcgctccccgttaccccac

SEQ ID NO: 390858 - DNA, 201 bp, Homo sapiens
tatttgagatcggctttctcaggaaccacatgttcctctactccgtcctggggtccatcctggggcagctggcggtcatttacatccccccgctgcagagsgtcttccagacggagaacctgggagcgcttggtgagtggtggggacgggaacgacaggtgacctcgaccagggccatggggggcggcagctgccaggtgg

SEQ ID NO: 390859 - DNA, 201 bp, Homo sapiens
ccagccatgccccaggagcagtgaggcaggcctgtgccctttggttcaggatggaggttgtctcttcccgcctaacctctcacctttgtgctcaccttccmgatgcctgaagacagagcaagcactccccgcaccacgacgatgacgttcacttgttttgtgtttttcgatctcttcaacgccttgacctgccgctctcag

SEQ ID NO: 390860 - DNA, 201 bp, Homo sapiens
gcccatggacccaggctctggggcttctggaaggtgccgaggagggcaggtgcgatgcctgggggcgttcagcaaatgcctggccctgccccctgtgccawcttggcctgggaggctcaggcacagctgtttcaagggtcctttatttcattcctggttcatttcaaagtgtctgtgtcttgttcggagcagcttgggggt

SEQ ID NO: 390861 - DNA, 201 bp, Homo sapiens
catcatcagcgggaccctctttatcttctggaaggaggtgagcgagggtcaccccggcctgttctccaagccctggtgcggtgcagacgctggggactgcrgtccctgccctcctgccacagctcacatctgggagaggcaaacatgtacacacaccggacaatgtgatgccatcagaggcgtggggtgcatgaggcaaag

SEQ ID NO: 390862 - DNA, 201 bp, Homo sapiens
gacaccatcctcagcagagccctcatcctgaagatcctcatgtccgcggccatcatcatcagcgggaccctctttatcttctggaaggaggtgagcgaggrtcaccccggcctgttctccaagccctggtgcggtgcagacgctggggactgcagtccctgccctcctgccacagctcacatctgggagaggcaaacatgt

SEQ ID NO: 390863 - DNA, 201 bp, Homo sapiens
gcgggacaccatcctcagcagagccctcatcctgaagatcctcatgtccgcggccatcatcatcagcgggaccctctttatcttctggaaggaggtgagckagggtcaccccggcctgttctccaagccctggtgcggtgcagacgctggggactgcagtccctgccctcctgccacagctcacatctgggagaggcaaac

SEQ ID NO: 390864 - DNA, 201 bp, Homo sapiens
tcattcctggttcatttcaaagtgtctgtgtcttgttcggagcagcttgggggtagagcccgttgacaaagacgccttcaggcagccaccacggagtgtgygggacaccatcctcagcagagccctcatcctgaagatcctcatgtccgcggccatcatcatcagcgggaccctctttatcttctggaaggaggtgagcga

SEQ ID NO: 390865 - DNA, 201 bp, Homo sapiens
gacctttggtaacacaacaaacagcattgacatgatgctgcggttctgaatctagatcttaaggcttgacatccccatagtgctgccccagtcccttctgkggcttcttcctgctctttccatatctggccttacttctgtgtcctttattccagcctttaggatcaacccatgcctggcccctaatagattctcagtaaa

SEQ ID NO: 390866 - DNA, 201 bp, Homo sapiens
tgggaggctcaggcacagctgtttcaagggtcctttatttcattcctggttcatttcaaagtgtctgtgtcttgttcggagcagcttgggggtagagcccrttgacaaagacgccttcaggcagccaccacggagtgtgcgggacaccatcctcagcagagccctcatcctgaagatcctcatgtccgcggccatcatcat

SEQ ID NO: 390867 - DNA, 201 bp, Homo sapiens
tgacctttggtaacacaacaaacagcattgacatgatgctgcggttctgaatctagatcttaaggcttgacatccccatagtgctgccccagtcccttctsgggcttcttcctgctctttccatatctggccttacttctgtgtcctttattccagcctttaggatcaacccatgcctggcccctaatagattctcagtaa

SEQ ID NO: 390868 - DNA, 201 bp, Homo sapiens
catggacccaggctctggggcttctggaaggtgccgaggagggcaggtgcgatgcctgggggcgttcagcaaatgcctggccctgccccctgtgccaactkggcctgggaggctcaggcacagctgtttcaagggtcctttatttcattcctggttcatttcaaagtgtctgtgtcttgttcggagcagcttgggggtaga

SEQ ID NO: 390869 - DNA, 201 bp, Homo sapiens
ctgacctttggtaacacaacaaacagcattgacatgatgctgcggttctgaatctagatcttaaggcttgacatccccatagtgctgccccagtcccttcwggggcttcttcctgctctttccatatctggccttacttctgtgtcctttattccagcctttaggatcaacccatgcctggcccctaatagattctcagta

SEQ ID NO: 390870 - DNA, 201 bp, Homo sapiens
ccgccctgagtctcatcactctgtccaccgtgttcaacctgcccagccccctcaacgccatgcagatcctatggatcaacatcatcatggatgggccaccrgcgcagaggtgaggcagggccggctgggagccctgtgtctctttacccacctgcggggcttcctccaggggctgctggctgtgccccaaggctataggga

SEQ ID NO: 390871 - DNA, 201 bp, Homo sapiens
ggctgtgcagggttgccccaggccattctgtacccagcaccaggtaccaagtggctgcttgcagtgtggaggggatgggtgggagctgatgggggcctgcygcattctgtgctcagaggacaagttagaagaaggagaggcagaaaacatgggctgggaatgcaggtgacaggaaagcaaggagaagagaggacaaaggac

SEQ ID NO: 390872 - DNA, 201 bp, Homo sapiens
tattggccagaatggagtcacatggcctacataactgcaaaggagactgggaaatgtagtttatctgtgcacccaaacatatttctatgcttctaagcagsctgttcctggactgggacttcctgacctttggtaacacaacaaacagcattgacatgatgctgcggttctgaatctagatcttaaggcttgacatcccca

SEQ ID NO: 390873 - DNA, 201 bp, Homo sapiens
atgtggggactcacacaggtgttttgaaaggtatatcctaaaatagccatcaccttcattttttttttagattgtatcaaaatttcgaacaacattaagcraagatatgagacttttatgtttttaagagaggccgctcattcaaagcttttctgatcctggaggcctcagaggccgtcgttgtgacactcattctgtagg

SEQ ID NO: 390874 - DNA, 201 bp, Homo sapiens
gcttccctgtggttcaggccctggtcaggtgttgaggcgacagacagtggaacgagactccctatgcacccaacacgaccctgtgctcaccgaggcaccaytgggaggggctggttcctgggaatgtattcgattgactccggggttcagtgttagaccctgagctctgtggctgtgcagggttgccccaggccattctgt

SEQ ID NO: 390875 - DNA, 201 bp, Homo sapiens
aagagtgggctgcgtatgtggggactcacacaggtgttttgaaaggtatatcctaaaatagccatcaccttcattttttttttagattgtatcaaaatttygaacaacattaagcaaagatatgagacttttatgtttttaagagaggccgctcattcaaagcttttctgatcctggaggcctcagaggccgtcgttgtga

SEQ ID NO: 390876 - DNA, 201 bp, Homo sapiens
gcgttgaaggtaggaggtcctggggtggctctgcggggaattctttcgctcggggctggattcattggtagaaagccagctcctgtctgagctaacaggastggggacgttaggtaatcatggaagaaaatggcccacactggccttgggccatctgttggtggtggaggaggtgagctctgagattccacgggacttcag

SEQ ID NO: 390877 - DNA, 201 bp, Homo sapiens
gtatctcccttccctttgccagggtgtgtgagtgtctctgtgtccctgtctgtgtttctggtgttactgttgccttagattctgactgaataacctggctyggttattgtgtgggattgtgtgggaaccatacagattgtacaggcatctccaaggtaaagagtgggctgcgtatgtggggactcacacaggtgttttgaa

SEQ ID NO: 390878 - DNA, 201 bp, Homo sapiens
gacaatccccttttaggcgggctgtgttgccaacaatgcggtcatcagaaagaacgccgtgatggggcagcccaccgagggtgcattgatggccctggcgwtgaaggtaggaggtcctggggtggctctgcggggaattctttcgctcggggctggattcattggtagaaagccagctcctgtctgagctaacaggagtgg

SEQ ID NO: 390879 - DNA, 201 bp, Homo sapiens
ctgagggctaagccttgtggggagctgcgcacagggcctggtgtgtagtcagtgttctgcaaatgtcagtatctcccttccctttgccagggtgtgtgagkgtctctgtgtccctgtctgtgtttctggtgttactgttgccttagattctgactgaataacctggctcggttattgtgtgggattgtgtgggaaccatac

SEQ ID NO: 390880 - DNA, 201 bp, Homo sapiens
tcctccccatgtagcaggcacccttcttcctctgtacagttcagtgagcgccacttgcaaaggacctgcctccaggggccacttcactatcacagcaaacrctgtcttggttttgcagattaaaaatcaaaaatatgaccaggcgtggtggctcatgcctataatcccagcactttgggaggccaaggcgggtggatcacc

SEQ ID NO: 390881 - DNA, 201 bp, Homo sapiens
ccctagggataggcccacccagccccgctttatgaactcagaggtgtctggcacggttctggccctgggagcctcacctcgggagtgagatgtgttaagtytggggtcaagttgcggttttgcaagatggttaagagtatcgtttctggaaccagagcttcggttcaaatctctgttttgccactaactagctacggaaac

SEQ ID NO: 390882 - DNA, 201 bp, Homo sapiens
cgtgcccgatgaatggtaaaaagtgagcctgtgatgaatttcccctattgttattagtgagcctgtgatgatgttcccctgttgctgtgatgagtcctgcrgtccgagctgtactcaccctttcacaggggctccctcctccccatgtagcaggcacccttcttcctctgtacagttcagtgagcgccacttgcaaaggac

SEQ ID NO: 390883 - DNA, 201 bp, Homo sapiens
cttcttatgcttcattgtccagagctggagccgcgggagccacagggaggtgggaatgtgactgcgcagccggaggcctcgcctccctgacgctgtggggyccactgggaaggaagtggggagacgggcattacctgggtgacaggcggccactgtcgttcttggggactgagatgctatggcagtgcacatatttttaaa

SEQ ID NO: 390884 - DNA, 201 bp, Homo sapiens
cccactgggaaggctctaaggagactcctgcccagagacgtgcccgatgaatggtaaaaagtgagcctgtgatgaatttcccctattgttattagtgagcmtgtgatgatgttcccctgttgctgtgatgagtcctgcagtccgagctgtactcaccctttcacaggggctccctcctccccatgtagcaggcacccttct

SEQ ID NO: 390885 - DNA, 201 bp, Homo sapiens
tcccagcactttgggaggccaaggcaggagaatcacttgaggccaggagttcgagaccagcctgagcaacgtagtgagaccctgtttctattatttttttwaaaaaaattatttaaaaagaagagctagaagcctctgtactcatcactgcccactgggaaggctctaaggagactcctgcccagagacgtgcccgatgaa

SEQ ID NO: 390886 - DNA, 201 bp, Homo sapiens
cagtggctaatgcccgttatcccagcactttgggaggccaaggcaggagaatcacttgaggccaggagttcgagaccagcctgagcaacgtagtgagaccytgtttctattattttttttaaaaaaattatttaaaaagaagagctagaagcctctgtactcatcactgcccactgggaaggctctaaggagactcctgcc

SEQ ID NO: 390887 - DNA, 201 bp, Homo sapiens
tcagaagtaagacgacagctaggctgggcacagtggctaatgcccgttatcccagcactttgggaggccaaggcaggagaatcacttgaggccaggagttygagaccagcctgagcaacgtagtgagaccctgtttctattattttttttaaaaaaattatttaaaaagaagagctagaagcctctgtactcatcactgcc

SEQ ID NO: 390888 - DNA, 201 bp, Homo sapiens
aatcagcatgtgctggggagaccctggggtagcagccactgacctcacacctggaggaagctgtgtgaccgattcatgagcttgtaagtggctcccagccrtgccccaggagcagtgaggcaggcctgtgccctttggttcaggatggaggttgtctcttcccgcctaacctctcacctttgtgctcaccttccagatgcc

SEQ ID NO: 390889 - DNA, 201 bp, Homo sapiens
cctgtgttacactctagaggtgattgtttgctttggatctaggcctgggtcaccttttcatggcctgcaggttcagggagctctgtgccaggacgggccaygatctaggtgggaaatgaggcaggtgacccatgtgaccacaccacagattgcccatgtgcaggaagcgggaggggaccctggccgggtaccctgcctcca

SEQ ID NO: 390890 - DNA, 201 bp, Homo sapiens
atctgctaaatatcctcctgtgttacactctagaggtgattgtttgctttggatctaggcctgggtcaccttttcatggcctgcaggttcagggagctctrtgccaggacgggccacgatctaggtgggaaatgaggcaggtgacccatgtgaccacaccacagattgcccatgtgcaggaagcgggaggggaccctggcc

SEQ ID NO: 390891 - DNA, 201 bp, Homo sapiens
  misc_feature (1)...(201): n = A,T,C or G
gatcctcatgtccgcggccatcatcatcagcgggaccctctttatcttctggaaggaggtgagcgagggtcaccccggcctgttctccaagccctggtgcngtgcagacgctggggactgcagtccctgccctcctgccacagctcacatctgggagaggcaaacatgtacacacaccggacaatgtgatgccatcagagg

SEQ ID NO: 390892 - DNA, 201 bp, Homo sapiens
ggagcctggagcctgtttctccaggcgcaacgttggggggggtcccctcggggtgatggagatcatctgggtgtatggaactgtgtgtggttggccttackgggtggtcttccttcactgtctgcgggacagatggaggggcacagctgcccatggacccaggctctggggcttctggaaggtgccgaggagggcaggtgc

SEQ ID NO: 390893 - DNA, 201 bp, Homo sapiens
tcacccttacacagcccatggggtaagtctggcctcctttttacagattgggaaacaggcttacactagcacaacttatgggatcagggcatggaagagayagacttcaaactactgaagcctgatccaaagccgggctccttgtcagcaacccaacccccccacctcagcaggatggggactctgctgccagccactgcc

SEQ ID NO: 390894 - DNA, 201 bp, Homo sapiens
gctttggagtcaggggacccatctggccacgtgtgcgtaaccgtatgagcacagagccagtgcttccgctggagctcagtgctgctgttatcaccagtgayagctgccaagggaaagagagtcctcatttgtgtccccaaagccaagtgtgagggttacctctcctgccagccctccctgggagcagaagtgggaccagga

SEQ ID NO: 390895 - DNA, 201 bp, Homo sapiens
gttggccaacatggtgaaaccccatctgtactaaaaatacaaaaatcagccaggcgtggtggcgcgtgcctataatcccagctactggggggcagaggcargagaattgcttgaacccgggaggcagaggttgtagtgagctgagatcacactactgccctccagcctgggcagcagagtgagacaccatctcaaaaaaaa

SEQ ID NO: 390896 - DNA, 201 bp, Homo sapiens
cccctttagaacatcagtttcatggaggcggagtttgtgtttcatccctgatgtctagagataaagggcttgccactcagtaggtgctcaggagtccaccygctccgccacttaatatccccttcaacaagctggccaagtggtgtgggggaaggaatgcgctttggagtcaggggacccatctggccacgtgtgcgtaac

SEQ ID NO: 390897 - DNA, 201 bp, Homo sapiens
ttcctccaggggctgctggctgtgccccaaggctatagggatgaacaaatacagccactttccatcaggagttcccagaaaactgaagtgtgttgcactgsagtgagactgggagtagaaggcagaggagaaagtacctgggccggcagagctgggtgaggatggaactttctgctccctctgcctggatgctctctctgg

SEQ ID NO: 390898 - DNA, 201 bp, Homo sapiens
  misc_feature (1)...(201): n = A,T,C or G
accggcgcagaggtgaggcagggccggctgggagccctgtgtctctttacccacctgcggggcttcctccaggggctgctggctgtgccccaaggctatanggatgaacaaatacagccactttccatcaggagttcccagaaaactgaagtgtgttgcactggagtgagactgggagtagaaggcagaggagaaagtacc

SEQ ID NO: 390899 - DNA, 201 bp, Homo sapiens
  misc_feature (1)...(201): n = A,T,C or G
agaatgccagcaaggggaaccagcaggggcccaagtataacatcaatctgggcgagtcaccactgccccttgcagcaaccgatgcactggtccagccctcncgcaggcccgctccgtgagtaaatggctctcttctcttgcaggaatgcagtggaggaaggcaagggtattttttacaacatcaaaaactttgtccgattc

SEQ ID NO: 390900 - DNA, 201 bp, Homo sapiens
attccagctgagcacgtaagtagaggccagcattccgagtgtcattaagcaccacgcctggcgggcggccgctgactggctgcgtgtgccccgcaggagcmtctccgccctgagtctcatcactctgtccaccgtgttcaacctgcccagccccctcaacgccatgcagatcctatggatcaacatcatcatggatgggcc

SEQ ID NO: 390901 - DNA, 201 bp, Homo sapiens
gggtcaccagcttctccctggaacctgctactgtggagatagaggggggggtctcgcggagtccccagggagagctgaatctcggggctcgtcagtgtggsaggtgcccccaaccccaagtaccaacagcctctcatagcagggtcatggggtccatgatgcctggggctagtcacatgctgcccccaggggaatgttacg

SEQ ID NO: 390902 - DNA, 201 bp, Homo sapiens
agcgtggagaagggcgagctggccgaccgcgtggggaaggtgggtccccggaggcttggctggcggtggggctgggtcacagctttgaaatctgattcttygtcttccccgtctccgtgtccaggtgtccgtgttcttcaggaccagcccaaagcacaagctcaaaatcatcaaggttcgctgggcaaggcaggcacaggc

SEQ ID NO: 390903 - DNA, 201 bp, Homo sapiens
  misc_feature (1)...(201): n = A,T,C or G
gggaagctgcaagccatgtccggggaggaggtggacagcgtggagaagggcgagctggccgaccgcgtggggaaggtgggtccccggaggcttggctggcngtggggctgggtcacagctttgaaatctgattcttcgtcttccccgtctccgtgtccaggtgtccgtgttcttcaggaccagcccaaagcacaagctcaa

SEQ ID NO: 390904 - DNA, 201 bp, Homo sapiens
gtcaggtttcccatcagtccaaacccacactcactccccaccccatgtgcctcctctcttccaaacgccttctcctccttcctccttctcttcgtagtttycttcccggggtgggggtcatctttgatctctccctttctttcttttttttttttttttaaaggacttcattgtttagaaatgttttagatttgtgggaaa

SEQ ID NO: 390905 - DNA, 201 bp, Homo sapiens
ggtcaggtttcccatcagtccaaacccacactcactccccaccccatgtgcctcctctcttccaaacgccttctcctccttcctccttctcttcgtagttktcttcccggggtgggggtcatctttgatctctccctttctttcttttttttttttttttaaaggacttcattgtttagaaatgttttagatttgtgggaa

SEQ ID NO: 390906 - DNA, 201 bp, Homo sapiens
tactacgtatgcggccctgggctgggtaccgaggacaccgtgcaggaagcagacctggtccctgtgctcgtgagtttatagcccagagtgacagactgacytaaatctactcgtgacaagtactgttccaggactgctaagggacccatgagtggaagtactgggaatcctggatttcccaaatgggagagacttgcctgg

SEQ ID NO: 390907 - DNA, 201 bp, Homo sapiens
caccacacccatttgtgtacatattgccaatggctgctttcatgcctcagtgtgccgcaacggcagagctgagtagccacgacaaaggtggtatgggctgyaaaggctaacacgtttacccagcgctgttcttggaatagaagcactcttctatgctagttcttagttttcttaaccatcacttgtactggctgcagagta

SEQ ID NO: 390908 - DNA, 201 bp, Homo sapiens
gccttggggcccccgaccccactccccatccacatcgctcattcattcaacaagtgtttcctgagcacctactacgtatgcggccctgggctgggtaccgrggacaccgtgcaggaagcagacctggtccctgtgctcgtgagtttatagcccagagtgacagactgacctaaatctactcgtgacaagtactgttccagg

SEQ ID NO: 390909 - DNA, 201 bp, Homo sapiens
gatattttttctacaaaactggccaaaccaaggggtgaacaggtgatggtccatgggccagtgcttgtttgaaaataaagtttccttggtgtaccaccacmcccatttgtgtacatattgccaatggctgctttcatgcctcagtgtgccgcaacggcagagctgagtagccacgacaaaggtggtatgggctgcaaaggc

SEQ ID NO: 390910 - DNA, 201 bp, Homo sapiens
tcgggttcaagcgactctcctgcctcagcttcccaagtagctgggactacaggcatgccctaatatgccgagcttatttttgtattttctagtagagacgrggtatcactatatgttggccaggctggtctcaaactcctgacctcaggtgatccgcccgccttggcctcccagagtgctgggattacaggcgtgagccac

SEQ ID NO: 390911 - DNA, 201 bp, Homo sapiens
ggggcttaaaacaaggtgaagatatggtctgaccttctggaggtcaaaattgaaatcgttttcactgggtggaaatcaacagtgctaacagggtccaggcrcggtggctcactcctgtaatcccagcactttgggaggctgaggtgggtggatcacctgaggtcaggagttggagaccagcctggccaacatggcaaaacc

SEQ ID NO: 390912 - DNA, 201 bp, Homo sapiens
aaaagctagaaaaaatcttccataccttccacgataaactaaccgtgattagtccatttgtggtttgtttgtttgtttgtgagagacagagtcttgctccrtcacccaggctggaatgcagtggctgatctctgctcactgtaaccttcacttctcgggttcaagcgactctcctgcctcagcttcccaagtagctgggac

SEQ ID NO: 390913 - DNA, 201 bp, Homo sapiens
gtcagatgggcttcgtgccgaggtgagtcccaaaggaatttacaagccttaaggatgcacccagccaggctgtctcctttctagacaaagcacacaatgtsttctagaacacaataaggaagaaataaattggggtcatcttataatctccttgctaacatgactgattttgtttttaatcatcccatacttccttttaat

SEQ ID NO: 390914 - DNA, 201 bp, Homo sapiens
  misc_feature (1)...(201): n = A,T,C or G
gtgacccagcttgtaacgtcagatgggcttcgtgccgaggtgagtcccaaaggaatttacaagccttaaggatgcacccagccaggctgtctcctttctanacaaagcacacaatgtcttctagaacacaataaggaagaaataaattggggtcatcttataatctccttgctaacatgactgattttgtttttaatcatc

SEQ ID NO: 390915 - DNA, 201 bp, Homo sapiens
gccctttagctatcactctacattcccacctatgcccacatcccagccctaagcaatcgctcatctttctttcttgtgtagatttccccattctgaacatmccttatgaatggactcgtgctctgagtggccttctatgtctggcttcttccactcagcagcatgttttccaggctcatccacatggtggcatgtgccagt

SEQ ID NO: 390916 - DNA, 201 bp, Homo sapiens
ctctcaggttcaagcaattctcctgcctcagcctcctgagtacctgggattacaggtgcatgccaccacacctggctaatttttgtatttttagtagagayggggtttcaccacgttgtccaggttggtctcaaactcctgacctcaggtgatctgcccacctgggcctcccaaagtgctgggattacaggcgtgagccac

SEQ ID NO: 390917 - DNA, 201 bp, Homo sapiens
ggtttctccatgttggccaggctggtgtcgaactcccgacctcaggtgatcgaggcgcctcagcctcccaaagtgctgggattacaggcatgagccgccasacccggcctttttctttcttaaacagctttattgagatataattcacatatataattcatccatttaaagcatacaatttaatggtttttagtgtattca

SEQ ID NO: 390918 - DNA, 201 bp, Homo sapiens
  misc_feature (1)...(201): n = A,T,C or G
gaacctgctactgtggagatagaggggggggtctcgcggagtccccagggagagctgaatctcggggctcgtcagtgtggcaggtgcccccaaccccaagnaccaacagcctctcatagcagggtcatggggtccatgatgcctggggctagtcacatgctgcccccaggggaatgttacggatatgaagcagagatggga

SEQ ID NO: 390919 - DNA, 201 bp, Homo sapiens
acaaagccaggcccatgaatctcttggcacacagcaggagcccaataaagagctgatgtgatttttctgactctgaataccaaaaaaaggtagaaaatgtrcttggttttctcgcctgtgctctgaaagtttgctcttgagctcttttagtagacgggctttcttctttcatgttatttttagctctacagagtaaatccc

SEQ ID NO: 390920 - DNA, 201 bp, Homo sapiens
atcccacgtggcactggcctctaaatctgcacctggcacttgggccccacctgtgtgctgggcaccaggttaagtgcctgtgtgaggccacgccctgaatycccaccgggcagaggagccggcccaggtgacacagccctgcctagtgcagccagcgccttcgcccggatgtctgctgcggagcgtaatgacgcgttccag

SEQ ID NO: 390921 - DNA, 201 bp, Homo sapiens
aaggaggcctgagccagggctgggaagacccgtctacgcgaacggcaaagttgccaagagcagcctgcaggtggacagagtaaagtcagttctgggccggrtgcggtggctcacgtctgtaatcccagcacttttggacactgaggcagacggatcacttgaggttaggagtttaagaccaggttggccaacatggtgaaa

SEQ ID NO: 390922 - DNA, 201 bp, Homo sapiens
ggtttcgccatgttggccaggctggtctcaaactcctgacctcaggtgatccgcctatcttcgcctcccaaagtgctgggtgctttttggctttattcctkttactcaactccgtgcctccgtttcctcatctgtaaaatgggggaactattaatgccgtcagctgattcacagggttggtagaaaattaaacaaagccag

SEQ ID NO: 390923 - DNA, 201 bp, Homo sapiens
tttctgggggtggggttgtaggtacggagtcttgctctgtcacctaggctgcagtgcagtggcacaatctcggcttacttcaacctctgcctcccagggtyaagcgattctcctgcctcagtctccccaagtagctgggattgcggtgtgcaccagcacacccggctaatgtttgtaattttagtagaggcagggtttcgc

SEQ ID NO: 390924 - DNA, 201 bp, Homo sapiens
ttacggatatgaagcagagatgggatttgctgcctgtgggtgcatttcatgtggtactgggaatgcccgcctggctcaggctggtgggcagcagctgaatmtgtaaggaaaacctgtggccaaatacgtgctcacacttgagtgtggggtgagaaaggattaaaatgaacatcttccgtttgaggcctgcgtgttgataca

SEQ ID NO: 390925 - DNA, 201 bp, Homo sapiens
tgtggctcgaggagctcatgcgtccgtcgggtgacagtgcagggcccgaccgtggcttccttctctaggtccagggcagctgccccgggagttaccttttyatagccagggggaggggaggaggttgagcaggggcgcgtgggcagctcccttggagaggacgaggctctgaagttgccagcaacacttgcgctgacagcc

SEQ ID NO: 390926 - DNA, 201 bp, Homo sapiens
gcccccaaccccaagtaccaacagcctctcatagcagggtcatggggtccatgatgcctggggctagtcacatgctgcccccaggggaatgttacggatakgaagcagagatgggatttgctgcctgtgggtgcatttcatgtggtactgggaatgcccgcctggctcaggctggtgggcagcagctgaatatgtaaggaa

SEQ ID NO: 390927 - DNA, 201 bp, Homo sapiens
  misc_feature (1)...(201): n = A,T,C or G
gcacaagctcaaaatcatcaaggttcgctgggcaaggcaggcacaggctgcgctgctggggccgggccagagacactgtggctcgaggagctcatgcgtcngtcgggtgacagtgcagggcccgaccgtggcttccttctctaggtccagggcagctgccccgggagttaccttttcatagccagggggaggggaggaggt

SEQ ID NO: 390928 - DNA, 201 bp, Homo sapiens
aggggtgggaacgcgggcctcagagcaggccctcagaacaggttcttctgaaggaagaaacatcggcctgtgcaacgggaagctgcaagccatgtccgggraggaggtggacagcgtggagaagggcgagctggccgaccgcgtggggaaggtgggtccccggaggcttggctggcggtggggctgggtcacagctttgaa

SEQ ID NO: 390929 - DNA, 201 bp, Homo sapiens
  misc_feature (1)...(201): n = A,T,C or G
gaggccgtgcagcatggtaggtcctcagtaaaccgtctccagcatggttttattcttggtgttccccatggccgaggtggggccgggagtgaggggtgggnacgcgggcctcagagcaggccctcagaacaggttcttctgaaggaagaaacatcggcctgtgcaacgggaagctgcaagccatgtccggggaggaggtgg

SEQ ID NO: 390930 - DNA, 201 bp, Homo sapiens; identical to SEQ ID NO: 85687

SEQ ID NO: 390931 - DNA, 201 bp, Homo sapiens
aacgacggcccctaagcccccggtgacccctccttactccccctctctcctcagtgctggccctggcttctgggcccgagctggggcggctgacgtttctmggtcttgtgggcatcattgaccccccgagagttggcgtgaaggaagcagtccaggttctctccgagtctggtgtgtctgtgaagatgataacgggggatg

SEQ ID NO: 390932 - DNA, 201 bp, Homo sapiens
aatcccagctactcaagaggctgaggcaggagaacggtttgaacccaggaggcagaggctgcagtgagccaacattacaccactgcactccaacctgggcrataagaacaaaactctcttaaaaaacaacaacaacaaccaacaacaaaaaacgacggcccctaagcccccggtgacccctccttactccccctctctcct

SEQ ID NO: 390933 - DNA, 201 bp, Homo sapiens
ggtccaccacaagggctggtgcagaggcagagagaggccgtatgagaggtggccaatgacctggggttgggcattagcctgggcttgagccctgggaccaycattcaaagccttgtgaaccttgagcaagttagttaacctctctgtgcctcagttttctcatctgcaaaatggggggtggtgatgcccatagggtacttg

SEQ ID NO: 390934 - DNA, 201 bp, Homo sapiens
tccccgtgttcagctccagcagtcagcgtctgaccccaagtctggggtgcatggatccggtcagaggaacggctgtctgtggccaatccccgcctacaagsaggactggggaagctgggctcacattttccacgttttccttctcccgagaaggggggtcctaacgggatgctccagatgccaggcagcttgtgagaagga

SEQ ID NO: 390935 - DNA, 201 bp, Homo sapiens
ttggaagctaccccctgggacctgggtttacaacattcctagcctgtctgtgaaataggaggcaggggccagggcttatgtgtggccactcggacattgakcctctctgccgtgaccttcagatttccaggcagggcagggataagggtgggagatgttcagttaccaaagtgagggagggttcgccctcgggctcaggct

SEQ ID NO: 390936 - DNA, 201 bp, Homo sapiens
cgaacagtccaaaatagactgattgagccttttacttaaatttggcttggacctttcctaagaaagtaaaatcgggtttttgtaggtataaacgtatctcycttagaaaagagaagagacgggttgaaagtggttgaggttatcaggcgttcctctgtgcatgcattcctgtaaactctttaaggaagtgagtttgaatcc

SEQ ID NO: 390937 - DNA, 201 bp, Homo sapiens
cctccacctcccaggttcaagtgattctcctgcctcagcctcccgagtagctgggattacaggcatgcgccaccacgcctggctaattttgtatttttagkagagacggggtttctccatgttggccaggctggtgtcgaactcccgacctcaggtgatcgaggcgcctcagcctcccaaagtgctgggattacaggcatg

SEQ ID NO: 390938 - DNA, 201 bp, Homo sapiens
  misc_feature (1)...(201): n = A,T,C or G
tccagcacctgcttgctcgagaactggttcctggtgatgtcgtatctctctcgatcggagaccggatccctgcagacatccgactcactgaggtgagtggntccaaacccttgtcaatggggtatttgatggagctggtcaaggagcagacacttagctaattgtaggcatgtatagtctctctcatacacacatgctcaa

SEQ ID NO: 390939 - DNA, 201 bp, Homo sapiens
gcactgtgcattgctgtggtccctggtgacttggtggtggctctttgtttagaggagggcctgggctctgggatcgccacgtgggcttgctcgccctggcsgatttcacgtatttcctgggcagcctggccccagggcctggaccgggcgtgtctcgaggggcttctgcagggtccctggcagtggctgtgggtgggttgc

SEQ ID NO: 390940 - DNA, 201 bp, Homo sapiens
  misc_feature (1)...(201): n = A,T,C or G
gatatgttaatttcaaaataataacaccccaaaggcacagggttggtgtatattaaaagagaaaagtgtgtttctattctccttgttcaaatgtatcaagntgcataaaaacaaatgtcagcatggatgcttttgctttttaccatgtcaaatgcagcctaagagaaggaaaactccagcacctgcttgctcgagaactgg

SEQ ID NO: 390941 - DNA, 201 bp, Homo sapiens
tagccagaaaatgtgttttgtttgaactgtatctttttcattggaatttgttgccaacgtttaaaaattgggagtttgcatgaaaaagatactggatttcsagcttctcttgggagcatgggaggcccggcagcactgtgcattgctgtggtccctggtgacttggtggtggctctttgtttagaggagggcctgggctct

SEQ ID NO: 390942 - DNA, 201 bp, Homo sapiens
  misc_feature (1)...(201): n = A,T,C or G
tcttataggatatgttaatttcaaaataataacaccccaaaggcacagggttggtgtatattaaaagagaaaagtgtgtttctattctccttgttcaaatntatcaaggtgcataaaaacaaatgtcagcatggatgcttttgctttttaccatgtcaaatgcagcctaagagaaggaaaactccagcacctgcttgctcg

SEQ ID NO: 390943 - DNA, 201 bp, Homo sapiens
taattccagctacgcgggaggctgaggcaggagaattgcatgaagctggggggtggatgttgcagtgagctgagactgcaccactgcactccagcctgggwgacagagtgagactccatctcaaacaaacccagccacccttgtgtgatatagccagaaaatgtgttttgtttgaactgtatctttttcattggaatttgt

SEQ ID NO: 390944 - DNA, 201 bp, Homo sapiens
tgcaggatgggttgaaggggccaggtcggaggtcagagtcagctgggacgggcaaggggcggtggtgtgggggattccatttggagcctgtacggaagcayatccgtagtctgagggcagctggtcatggccctgcgggaatggaggtcctgggcttcctcccagctgtgataaggctctgccatccctgacttcctgaga

SEQ ID NO: 390945 - DNA, 201 bp, Homo sapiens
gccgtgcagcatggtaggtcctcagtaaaccgtctccagcatggttttattcttggtgttccccatggccgaggtggggccgggagtgaggggtgggaacrcgggcctcagagcaggccctcagaacaggttcttctgaaggaagaaacatcggcctgtgcaacgggaagctgcaagccatgtccggggaggaggtggaca

SEQ ID NO: 390946 - DNA, 201 bp, Homo sapiens
gagtttggtaccagggtcatgggaaagccatcggagggtttggagcaggagggggttgggatctggtttggggttctaagagcgctccagctgccatatgyaggatgggttgaaggggccaggtcggaggtcagagtcagctgggacgggcaaggggcggtggtgtgggggattccatttggagcctgtacggaagcatat

SEQ ID NO: 390947 - DNA, 201 bp, Homo sapiens
aatcatggcagaaggtgaaaggcacgtcttacatggcagccggcaagagagaatgagagccaagcctaaggggaaacccctcataaaaccatcagctctcstgagatgtattcactaccacagagcattgtggggaaaaccaccccatgattcaattatctcccactgggtccctcccacaacacgtgggaattatgggag

SEQ ID NO: 390948 - DNA, 201 bp, Homo sapiens
taagcattgttatacccacttcttcatgcagcaaatatttactgtatacctccttgctttgctggattttctaatgcagaggataaaaacagccacctggycaagcttggaggctcatgcctgtaatcccagcacttgggaatgctgaggagggaggatcacttgagcccagaagttcaagaccagcctgggtaacagagt

SEQ ID NO: 390949 - DNA, 201 bp, Homo sapiens
ctggctggccgtggaggagatctttgagtttggtaccagggtcatgggaaagccatcggagggtttggagcaggagggggttgggatctggtttggggttytaagagcgctccagctgccatatgcaggatgggttgaaggggccaggtcggaggtcagagtcagctgggacgggcaaggggcggtggtgtgggggattcc

SEQ ID NO: 390950 - DNA, 201 bp, Homo sapiens
ctctgatgaaatgtggtctctctgtgtgatcctggttgaatggattctcaccaggtgttcagccaacccaggtggagtgctcactgtgtgctaggccagcscaggcctaagcattgttatacccacttcttcatgcagcaaatatttactgtatacctccttgctttgctggattttctaatgcagaggataaaaacagcc

SEQ ID NO: 390951 - DNA, 201 bp, Homo sapiens
aggtctgcaaagcccctgaggccagaaggagcctgtgcgtttaagggggctggatggaatgagatgggagctgcaggaggctggctggccgtggaggagayctttgagtttggtaccagggtcatgggaaagccatcggagggtttggagcaggagggggttgggatctggtttggggttctaagagcgctccagctgcca

SEQ ID NO: 390952 - DNA, 201 bp, Homo sapiens
aaacgaattcctgggtcgggcacggtggctcatgcctgtaaccccagcactttgggaggccgaggcgcgtggatcatgaggtcaagagatagagatcatcycggcccacattgtgaaaccccgtctctactaaaaatacaaaaattagccaggtgtggtggtgggcgcctgtagtcccagctactcgggaggctgagggag

SEQ ID NO: 390953 - DNA, 201 bp, Homo sapiens
acaacaacaaaacacacacacacacacacacaccctcctgccaataatggtgcatccaatccctgtcttataagccatgagaagcttcatgaggcaagaargacgattaaatatttccagaagaaaaagcaaaaaaggcttctgtgctcaagccccaaataccccaattctctccccacccagtgctatggtcacttccgg

SEQ ID NO: 390954 - DNA, 201 bp, Homo sapiens
gaagggcgccagcgtcattggcgcagtgtcatgactgtgtaggaggcatgccagccccatctttggtgtcagtgagggggcaaggatgttcttacaccacmccctctcagatcacccaggggcaggagctgggcctggcttctgtgccacagaaacagagtcaaggcccagggcaagctcacagcaagagtcccctcagct

SEQ ID NO: 390955 - DNA, 201 bp, Homo sapiens
ctctgctgacgaaatggctcacttaagagtggacacgttagtaagtaaacatcccacgtggcactggcctctaaatctgcacctggcacttgggccccacytgtgtgctgggcaccaggttaagtgcctgtgtgaggccacgccctgaatccccaccgggcagaggagccggcccaggtgacacagccctgcctagtgcag

SEQ ID NO: 390956 - DNA, 201 bp, Homo sapiens
gaccaagccattcagtagctccctgttcttgtcacatcacgcctctgctgacgaaatggctcacttaagagtggacacgttagtaagtaaacatcccacgwggcactggcctctaaatctgcacctggcacttgggccccacctgtgtgctgggcaccaggttaagtgcctgtgtgaggccacgccctgaatccccaccgg

SEQ ID NO: 390957 - DNA, 201 bp, Homo sapiens
gtaagctgcccttctggttgtttttcagttgcaaaaatgcctggggtcaccagcttctccctggaacctgctactgtggagatagaggggggggtctcgcrgagtccccagggagagctgaatctcggggctcgtcagtgtggcaggtgcccccaaccccaagtaccaacagcctctcatagcagggtcatggggtccatg

SEQ ID NO: 390958 - DNA, 201 bp, Homo sapiens
ttgattgctgtgaggattggaagagacggtgaatcccatcttagcttgccctgagccttgactctgtttcggtggcagagaagccaggcccagcttctgcragccaggtgatctgagaggggctggtataagaaggtccttttcacctcgctgacaccagcgacggggctgtggcgtccctcctgcacagtggagagattg

SEQ ID NO: 390959 - DNA, 201 bp, Homo sapiens
tggcactttgcccccccaaatggtttgtgttgcgctgggtctacaataggcttacaggtaaatactgtgcctcagtttccccatatgcctaaggaaggcasgagagcagtgacttcattgattgctgtgaggattggaagagacggtgaatcccatcttagcttgccctgagccttgactctgtttcggtggcagagaagc

SEQ ID NO: 390960 - DNA, 201 bp, Homo sapiens
gaacaagggtagtacaggttgaagattggccttgttctttctctggactgcaaaacgttccatggatggattctagaacttcgcgaacctgtccagcaccygtgaacagcaccagcctatgataaataactccgctgcaaagatccccgtgtgtgtctttgtaaccttgtgcagagtggggtgatggtcagtatgaaccaa

SEQ ID NO: 390961 - DNA, 201 bp, Homo sapiens
taatcaccatcatacctttgattctcttgggtctgcttctggctttttgtttaaaacagaagttcttaaagcagggtccctggagtagcagcggttgttaycacgcgagactttattagaaatgcagaatctcaggttccatgccagacctcctgagtcgaagggtccaggggtgggacccagtaaccttcattttctgca

SEQ ID NO: 390962 - DNA, 201 bp, Homo sapiens
gttcttggaatagaagcactcttctatgctagttcttagttttcttaaccatcacttgtactggctgcagagtatcccactgagtcaacttgctgcaactyactcatgcctggtactgtgtccatccatgacgtatccaattaatcaataatctttcagagaacatcttcatactgaaagccctgtccacgtttaggattg

SEQ ID NO: 390963 - DNA, 201 bp, Homo sapiens
cgggccagagacactgtggctcgaggagctcatgcgtccgtcgggtgacagtgcagggcccgaccgtggcttccttctctaggtccagggcagctgccccrggagttaccttttcatagccagggggaggggaggaggttgagcaggggcgcgtgggcagctcccttggagaggacgaggctctgaagttgccagcaacac

SEQ ID NO: 390964 - DNA, 201 bp, Homo sapiens
aaaccatatcaagcagacagcagtggtattttctgctatgcagctgtttctggcttccttctccatctgttgtgcacctgcgcaggcctgagagccgctgraggcatctctgccctccctttcaggctagggacttgttgcctgagccctctgcagaccgaggaggatctgggccatggtgggggctggctaacaaagggc

SEQ ID NO: 390965 - DNA, 201 bp, Homo sapiens
ctctcctcatggtcccagatggctgccacagctccttgcatcacagccaaacacgcaaaggccctatagaagaagggtgtgtgtgtgtgcgtgcacgcgcrtgtacagtaaggaaatcttttcccacaagcccccagcaaacatccactcatgtctctcgggccagtgttgcatgatgtgctgatacctaagccaatcaag

SEQ ID NO: 390966 - DNA, 201 bp, Homo sapiens
ctggctctcctcatggtcccagatggctgccacagctccttgcatcacagccaaacacgcaaaggccctatagaagaagggtgtgtgtgtgtgcgtgcacrcgcgtgtacagtaaggaaatcttttcccacaagcccccagcaaacatccactcatgtctctcgggccagtgttgcatgatgtgctgatacctaagccaat

SEQ ID NO: 390967 - DNA, 201 bp, Homo sapiens
atatatcccaggcacatgttgtgcaactgagccatggggctagggtagaaagccgtagtgagatacggtcccgcgtctcaaagagtcagcattcaaggggygtgtgtgtataatacaaggcggagaatgacgaaggaccaaatagggacaagaagaggatgatacagaattgacccacatcacagagggtgagtcaattgt

SEQ ID NO: 390968 - DNA, 201 bp, Homo sapiens
tgcactccagcctagggaacagagcaagactccgtctcaaaaacaaaacaaaacaaacaacaacaacaaaacacacacacacacacacacaccctcctgcmaataatggtgcatccaatccctgtcttataagccatgagaagcttcatgaggcaagaaagacgattaaatatttccagaagaaaaagcaaaaaaggcttc

SEQ ID NO: 390969 - DNA, 201 bp, Homo sapiens
aaacctcgtctctactaaaaatacaaaaattagccgggcatggtggcgtatgcctgtagtcccagctactcaggggctgaggcaggagaatctcttgaacycgggaggtggaggttgtggcgagccgagatcgcaccactgcactccagcctagggaacagagcaagactccgtctcaaaaacaaaacaaaacaaacaaca

SEQ ID NO: 390970 - DNA, 201 bp, Homo sapiens
acatttgagcctcaaggaggctgccagagaacacaggactctcagaagacagaatgcttaaaatcttccccaagtaggctgggcacagtggctcacacctrtaatcctagcactttgggaggctgaggcaagaggatcccttgagcccaggagtttgagaccagcctagacaacatagtgagactgtctgtacaaaaacaa

SEQ ID NO: 390971 - DNA, 201 bp, Homo sapiens
tagaaaatgaaatgatttcaaaaaaggccaaagtcttctccccacccctgctaacattggttgaggtcctgtcaggctgatctgtctttcccgaacatacstggctgctcaaagtgatagaaggtatcctgtgatcagccgggcgcggtggctcacacctgtaatcccagcactttgggaggccgaggtaggcagctcacc

SEQ ID NO: 390972 - DNA, 201 bp, Homo sapiens
tctcctgggttcaaactattctcctgcctcagcctcccaagtagctgagattacaggtgcctgccaccacacccagctaatttttgtatttttaatagagrtggggtttcactatgttggccaggctcatctcgaactcctgacctcaggtgatctgcctgcctctgccttccaaagtgctgggattacaggtgtgagcca

SEQ ID NO: 390973 - DNA, 201 bp, Homo sapiens
gaattctttcgctcggggctggattcattggtagaaagccagctcctgtctgagctaacaggagtggggacgttaggtaatcatggaagaaaatggcccamactggccttgggccatctgttggtggtggaggaggtgagctctgagattccacgggacttcagcaagttctgcaggtctctaatccctccaccagcgatt

SEQ ID NO: 390974 - DNA, 201 bp, Homo sapiens
gacaggcctgggtgtggatgtccccctccctgtgtccatgtattctcattgttcaactcccacttaggagtgagaacatgccgtgtttgcttgcttgtttytgagatggagtcttgctctgtccaggctggagtgcagtggcgtgatcttggcccactgccacctccatctcctgggttcaaactattctcctgcctcagc

SEQ ID NO: 390975 - DNA, 201 bp, Homo sapiens
cccgacaggcctgggtgtggatgtccccctccctgtgtccatgtattctcattgttcaactcccacttaggagtgagaacatgccgtgtttgcttgcttgwttttgagatggagtcttgctctgtccaggctggagtgcagtggcgtgatcttggcccactgccacctccatctcctgggttcaaactattctcctgcctc

SEQ ID NO: 390976 - DNA, 201 bp, Homo sapiens
cagggtctggctctgttgcctaggctagagtgcagtggcaggatctcggctcactgcaacctgtgcctgcctccagggctcaagtgatcctcctgccttastttcccaagtagctgggaatacaggtgcatgccatgccaccacacctgactacttttttgtatcagctgctacaaaagttactgcattttttgcattttt

SEQ ID NO: 390977 - DNA, 201 bp, Homo sapiens
ttgctgcacctaccaacccgtcatctaggttttaagccccacatgcattaggcatttggcctaatgctctcccccgaaccccccgacaggcctgggtgtgkatgtccccctccctgtgtccatgtattctcattgttcaactcccacttaggagtgagaacatgccgtgtttgcttgcttgtttttgagatggagtcttgc

SEQ ID NO: 390978 - DNA, 201 bp, Homo sapiens
tttctttaagttctaggatacatgtgcagaatgtgcaggtttgttacataggtatacacgtgccatggtggtttgctgcacctaccaacccgtcatctaggttttaagccccacatgcattaggcatttggcctaatgctctcccccgaaccccccgacaggcctgggtgtggatgtccccctccctgtgtccatgtattc

SEQ ID NO: 390979 - DNA, 201 bp, Homo sapiens
aatgtgttgagactcacatttcttttgtttgcttttttatttttaaatttttctttaagttctaggatacatgtgcagaatgtgcaggtttgttacatagstatacacgtgccatggtggtttgctgcacctaccaacccgtcatctaggttttaagccccacatgcattaggcatttggcctaatgctctcccccgaacc

SEQ ID NO: 390980 - DNA, 201 bp, Homo sapiens
  misc_feature (1)...(201): n = A,T,C or G
ttgtgacactcattctgtaggttcactgtgttcttgagttcatgtccatgaaggtgctggtaccattttgtgcttttaacaccaattctcggggtgacagngagattccacagccttttccccttgctctcctaggtcacggacctcttggtggatgaatccagtttcaccggggaagccgagccatgtagtaaaacagac

SEQ ID NO: 390981 - DNA, 201 bp, Homo sapiens
acccagcttgtaacgtcagatgggcttcgtgccgaggtgagtcccaaaggaatttacaagccttaaggatgcacccagccaggctgtctcctttctagacwaagcacacaatgtcttctagaacacaataaggaagaaataaattggggtcatcttataatctccttgctaacatgactgattttgtttttaatcatccca

SEQ ID NO: 390982 - DNA, 201 bp, Homo sapiens
agccagggacaagtcatcgaccccacccttttccccagtgtgctgagagccaaccccaacccggaatagaggacgagggaggccagtgaggcagcccccaygggcccaccgcctccccgccggcagggcccagagtgggtcatggctcagatctggagggtcatgggattatgcatcagacctgaggctgcagtgacaacg

SEQ ID NO: 390983 - DNA, 201 bp, Homo sapiens
ctgcagcgttctctgttctgacaagacggggactctgactgccaatgaaatgacagtgacccagcttgtaacgtcagatgggcttcgtgccgaggtgagtsccaaaggaatttacaagccttaaggatgcacccagccaggctgtctcctttctagacaaagcacacaatgtcttctagaacacaataaggaagaaataaa

SEQ ID NO: 390984 - DNA, 201 bp, Homo sapiens
tccaaaaagcagtgtcagtgtgggtcaccagtgaatgccctgtaggaacagacaagaggaccccccaaaacactctgctcactggctgtttccacccgccrggaaggaagtcggcttcccacgcctgaaggggttgtgcttgggcagcccgtacatcaggaatcatcaacagggagccagggatggttcctcaaaacagca

SEQ ID NO: 390985 - DNA, 201 bp, Homo sapiens
  misc_feature (1)...(201): n = A,T,C or G
aagttacccatcgtggagactttaggtgagggactccagctggtggaatccttacacgtggaattgaatgggggcttggctgtcagggcaatccagcctgngggtttcacaagcctgaggatggcaacttctcttttctataaactggtgtttgttgtaccaggttgctgcagcgttctctgttctgacaagacggggact

SEQ ID NO: 390986 - DNA, 201 bp, Homo sapiens
tttctctctaataaatgagaataatgtaaatgcaaaatacttttaaagaggcaaaacagctgacagactaattcacattaaggtgtggatgactgacaggrgaggtcccttcccaagagcggggtctgcaggggagggctcaggacactgggtgctgcagaaggaggcaggtgcaccttaggattgggaatggagactaga

SEQ ID NO: 390987 - DNA, 201 bp, Homo sapiens
gctcagagcacgtgcagggaggaaggagggagcaaggcctgtactcagcctgggaggtaccccagctggggagcctggacttgaccctggggccagtaatstgacttagagatctggtcacctgaaggcagggagctgggctgtcttccagttttggctgaaagggacatgattcagtcaccgtggttttccaagggcaca

SEQ ID NO: 390988 - DNA, 201 bp, Homo sapiens
cccctggaaccaaaaactcttaatcccacttactgtctgattttgggaattccttttatggaacccaaaaccttttctctctaataaatgagaataatgtmaatgcaaaatacttttaaagaggcaaaacagctgacagactaattcacattaaggtgtggatgactgacaggagaggtcccttcccaagagcggggtctg

SEQ ID NO: 390989 - DNA, 201 bp, Homo sapiens
gtggacacgttagtaagtaaacatcccacgtggcactggcctctaaatctgcacctggcacttgggccccacctgtgtgctgggcaccaggttaagtgcckgtgtgaggccacgccctgaatccccaccgggcagaggagccggcccaggtgacacagccctgcctagtgcagccagcgccttcgcccggatgtctgctgc

SEQ ID NO: 390990 - DNA, 201 bp, Homo sapiens
tgaaaagtgaaattcaagggactcacgaggacccctggaaccaaaaactcttaatcccacttactgtctgattttgggaattccttttatggaacccaaarccttttctctctaataaatgagaataatgtaaatgcaaaatacttttaaagaggcaaaacagctgacagactaattcacattaaggtgtggatgactgac

SEQ ID NO: 390991 - DNA, 201 bp, Homo sapiens
ttcatgtttgtttttacattttttaaaggaaaatttcaagcctgtacaaaagcagagaggatgataaagtgaacacctgtgtagccactacccagcttcarcagtggcccacttgcaaacactcttgccctttctacagcccacccctggctatgtcaaactggacaccaggcaccaggcatcatacctttccaccacttc

SEQ ID NO: 390992 - DNA, 201 bp, Homo sapiens
ttccccattctgaacatcccttatgaatggactcgtgctctgagtggccttctatgtctggcttcttccactcagcagcatgttttccaggctcatccacmtggtggcatgtgccagtgccttgttcctttctttggctaaagtgtattctgctgtatagatagaccacatttggctcatccatttgttcactgatggaca

SEQ ID NO: 390993 - DNA, 201 bp, Homo sapiens
tactggcagccccgggcgttccttgactcgcagacgcatccctgccttggtctctcacaccaagctctgtctctgtcacgaggtgctccccgccacgcctmtgcgcagcgttttcctcttttttttttttttttgagacggagtctcgctctgttgcccaggctggagtgcactggcttgatctccgctcactgcaacctc

SEQ ID NO: 390994 - DNA, 201 bp, Homo sapiens
gaccactcctgcctgttctcactggcgagtgccgactttctcttcaagttcactccagtttccaccccagcagacacctctcctcatcccgggctcacttyactgccttgtattttcagcttacctgtcccatcactgagcaccagggctcacttcactgccttctgttatcagcttacctgtccctccctccagtgcaag

SEQ ID NO: 390995 - DNA, 201 bp, Homo sapiens
taggtaatttacaaagaaaaagaggttgaatggactcagttccacgtggctggggaggccttgcaatcatggcagaaggtgaaaggcacgtcttacatggyagccggcaagagagaatgagagccaagcctaaggggaaacccctcataaaaccatcagctctcctgagatgtattcactaccacagagcattgtggggaa

SEQ ID NO: 390996 - DNA, 201 bp, Homo sapiens
acctttctctgaagctgcggttatggcaggcatggggcaaggggagggagccagggacaagtcatcgaccccacccttttccccagtgtgctgagagccamccccaacccggaatagaggacgagggaggccagtgaggcagcccccatgggcccaccgcctccccgccggcagggcccagagtgggtcatggctcagatc

SEQ ID NO: 390997 - DNA, 201 bp, Homo sapiens
acatggacctagtggctaccatattgggcagctcagctcagaacatctgcgggggcccttctaggaacagctgccattggtggaggaagctgacaggcccwggagggaaaacagctttttcctttttcttttctttctttcctttcttttcttttctttcttttctttctttcctttctcttctttcttttcctttcttcc

SEQ ID NO: 390998 - DNA, 201 bp, Homo sapiens
cgtgcccggccgacaaactaaattcttaatgttatttaattttaatttttatttaaatatgcacatggacctagtggctaccatattgggcagctcagctyagaacatctgcgggggcccttctaggaacagctgccattggtggaggaagctgacaggcccaggagggaaaacagctttttcctttttcttttctttctt

SEQ ID NO: 390999 - DNA, 201 bp, Homo sapiens
cgccacgttggctaggctcgtctcgacctcctgacctcagatgatctgcctgcctcagcctcctaaagtagtgggattacaggtgtgagccaccgtgcccrgccgacaaactaaattcttaatgttatttaattttaatttttatttaaatatgcacatggacctagtggctaccatattgggcagctcagctcagaacat

SEQ ID NO: 391000 - DNA, 201 bp, Homo sapiens
atagaacttgcaggaaatgttctattaatatcatctgccctgtccaatatggcatctgacaattctttttttgttgttttttaagatagagtcttgctctstcgcccaggctggagtgcagtggcacaatctcagttcgctgcaacctccgcctcctgggttcaagcagttctcctgcctcagcctcccaaagagctggga

SEQ ID NO: 391001 - DNA, 201 bp, Homo sapiens
tcttaccaaagatgtttaacaaggaaagagacaagactaaaatgtctgccagtaccacatggccctttctgcttagcgtagccctgtgtgatagaacttgyaggaaatgttctattaatatcatctgccctgtccaatatggcatctgacaattctttttttgttgttttttaagatagagtcttgctctgtcgcccaggc

SEQ ID NO: 391002 - DNA, 201 bp, Homo sapiens
agcatagggtataggaagagtgaacttgagtaactactcagcagctgcaacagcctctttcctgcccacagttttccattggttactgcacggctcttaccaaagatgtttaacaaggaaagagacaagactaaaatgtctgccagtaccacatggccctttctgcttagcgtagccctgtgtgatagaacttgcaggaaa

SEQ ID NO: 391003 - DNA, 201 bp, Homo sapiens
gactctgggaagagggtagcccacaaagcctgtgaaataatgtgcagaactgtgtgcattttttctagggagagggtctggaggtttatttgaattctcartgaatggtctcaggagagtgagatccaggtctttaacaagcagagccatcagaacattggctgcagcatagggtataggaagagtgaacttgagtaacta

SEQ ID NO: 391004 - DNA, 201 bp, Homo sapiens
ctgctcttttggctagtatattttctaaatttctgtactgtgcacatgttttgcaagaagaaaggaaatcaatcattaaagacaagcccctagcctgccaygccctgtcccccctcccactgagcctctggtactgacaccctcctccgtttgctgtctaggcagtgcttgtcgtggtcactgtcgccttcatccaggtga

SEQ ID NO: 391005 - DNA, 201 bp, Homo sapiens
tcttcaggaccagcccaaagcacaagctcaaaatcatcaaggttcgctgggcaaggcaggcacaggctgcgctgctggggccgggccagagacactgtggytcgaggagctcatgcgtccgtcgggtgacagtgcagggcccgaccgtggcttccttctctaggtccagggcagctgccccgggagttaccttttcatagc

SEQ ID NO: 391006 - DNA, 201 bp, Homo sapiens
cacctggtcaagcttggaggctcatgcctgtaatcccagcacttgggaatgctgaggagggaggatcacttgagcccagaagttcaagaccagcctgggtwacagagtgagaccttgtctctacaaatccttttttaaattagggagtaaatagtggtgcatgcctgtgtcccggctaccaggggaggcagaggctggagg

SEQ ID NO: 391007 - DNA, 201 bp, Homo sapiens
tgtgatcctggttgaatggattctcaccaggtgttcagccaacccaggtggagtgctcactgtgtgctaggccagcccaggcctaagcattgttatacccmcttcttcatgcagcaaatatttactgtatacctccttgctttgctggattttctaatgcagaggataaaaacagccacctggtcaagcttggaggctcat

SEQ ID NO: 391008 - DNA, 201 bp, Homo sapiens
tacaggtgctcgctaccacacccggctaatttttgtattttggtagagacggggtttcaacacgttggccaggctagtctcaaacccctgacctcaagtgwtccatccgtttctgcgtttcaaagtgctgggaatgcaggtgtgagccaccacacccggcccattctaatctttattagtctgtggattaattctttatta

SEQ ID NO: 391009 - DNA, 201 bp, Homo sapiens
tggtggggacgggaacgacaggtgacctcgaccagggccatggggggcggcagctgccaggtggggagctgcagcccaggaggggtcagtgcgggaaagcrgagctcaccaggggccggctctgtcttcagggcccttctgtcctcacaggaagggactctaacgtgggtgatgtgacggatgcacagaaacccctaggaa

SEQ ID NO: 391010 - DNA, 201 bp, Homo sapiens
tgaatgttaacaatttaagcacacattaataaaaataattacaacttatgagtgctacaaaggaataactgccgagaaagagattaaaagggaggtagaarccagctgggcatggtggctcacacctgtaatcacagcactttgggactctgaggtgggcagatcacttgagatcaggagttcaagaacagcctggccaat

SEQ ID NO: 391011 - DNA, 201 bp, Homo sapiens
ggcgggtggatcacttaaggtcaggagttcaagaccaccctggccaacatggtgaaactctctactaaaaatacaataattagctaggcatggtggcatgygcctgtagtcccagctactcaggaggctgaggcaggagaatcacttgaacccgggaggcggaggttgcagtgagccgagaccacgccactgcactctagc

SEQ ID NO: 391012 - DNA, 201 bp, Homo sapiens
ccagcctgggcagcagagtgagacaccatctcaaaaaaaaaaaaaaaaaaaagtcagttctagaatcttcaaggaattgaagagggagggaccagggtctkttggtgctggagaaggagcaggagtagaacatgtgatcccagttcacccttacacagcccatggggtaagtctggcctcctttttacagattgggaaaca

SEQ ID NO: 391013 - DNA, 201 bp, Homo sapiens
tcctgacctcaggtgatccgcccgccttggcctcccagagtgctgggattacaggcgtgagccaccacgcccagcctgttttattttttaagccagggtcytgctgtgtcgcccaggttgcagtgcagtggtgcaatcatggctcactgcagcctctaacttctgggctcaagggatcctcccacctcagcctcccaagtc

SEQ ID NO: 391014 - DNA, 201 bp, Homo sapiens
tttggacactgaggcagacggatcacttgaggttaggagtttaagaccaggttggccaacatggtgaaaccccatctgtactaaaaatacaaaaatcagcyaggcgtggtggcgcgtgcctataatcccagctactggggggcagaggcaagagaattgcttgaacccgggaggcagaggttgtagtgagctgagatcaca

SEQ ID NO: 391015 - DNA, 201 bp, Homo sapiens
gggctgccgggagaagggggtggatggacaacaagctcgttgaaggagatgaggacaaggaggcctgagccagggctgggaagacccgtctacgcgaacgrcaaagttgccaagagcagcctgcaggtggacagagtaaagtcagttctgggccgggtgcggtggctcacgtctgtaatcccagcacttttggacactgag

SEQ ID NO: 391016 - DNA, 201 bp, Homo sapiens
attataggtgcacactgccacacccagctaatttatatatacatatgtatatataatatttttttttgtagaaataaaaaaatgttgcccaggctggtctygaactcttgagctcaaatgatctgccagtgtgatcctcccaaagtgctggtattataggtgtgagctactgtgcctggccttagaacattttcttttttc

SEQ ID NO: 391017 - DNA, 201 bp, Homo sapiens
ctgggattataggtgcacactgccacacccagctaatttatatatacatatgtatatataatatttttttttgtagaaataaaaaaatgttgcccaggctrgtctcgaactcttgagctcaaatgatctgccagtgtgatcctcccaaagtgctggtattataggtgtgagctactgtgcctggccttagaacattttctt

SEQ ID NO: 391018 - DNA, 201 bp, Homo sapiens
gggtactctgaaatgtgcacgtctgggtggtaaaagatagtgtcaattttttcctgctcttttggctagtatattttctaaatttctgtactgtgcacatrttttgcaagaagaaaggaaatcaatcattaaagacaagcccctagcctgccatgccctgtcccccctcccactgagcctctggtactgacaccctcctcc

SEQ ID NO: 391019 - DNA, 201 bp, Homo sapiens
caagcgagtgtggcacctttctctgaagctgcggttatggcaggcatggggcaaggggagggagccagggacaagtcatcgaccccacccttttccccagkgtgctgagagccaaccccaacccggaatagaggacgagggaggccagtgaggcagcccccatgggcccaccgcctccccgccggcagggcccagagtggg

SEQ ID NO: 391020 - DNA, 201 bp, Homo sapiens
gacttagagatctggtcacctgaaggcagggagctgggctgtcttccagttttggctgaaagggacatgattcagtcaccgtggttttccaagggcacacrccctggtgtggagcccaggggactccccgacattgtcagccaagcgagtgtggcacctttctctgaagctgcggttatggcaggcatggggcaaggggag

SEQ ID NO: 391021 - DNA, 201 bp, Homo sapiens
tcaagagtagtagggtctggggcccaaggggcaccggcatcccaggcgtcgggctggaggctcagagcacgtgcagggaggaaggagggagcaaggcctgkactcagcctgggaggtaccccagctggggagcctggacttgaccctggggccagtaatgtgacttagagatctggtcacctgaaggcagggagctgggct

SEQ ID NO: 391022 - DNA, 201 bp, Homo sapiens
ctcccttggtctcccaaatagctgggattgtaggcgtgagccactgtgcctggcctgagcaccttttgatggctgtcattccccacttctttccgtttgtyccagctggtattttaaaatacaaacacagactcattccacacgatggaatttcctacttccaattaaaaggctggagtaggccgggtgcggtggctcatg

SEQ ID NO: 391023 - DNA, 201 bp, Homo sapiens
ttttctttttttgagacagagtcttgctgtgtcgtccaggctggacagcagtgccgtgatctcagctcagtacaacctctgcttctcctgcctcagccttytgagcagctgggattacaggtgcccgccaccactcctggttaatttttgctaatttttatatttttagtagagatgaggtttccctgtgttggccaggct

SEQ ID NO: 391024 - DNA, 201 bp, Homo sapiens
gtgttgacctggaagcctggccctgaactgagacccctgtcacacaaacttctgcacagtaagaaacccattctggtccctgagactaaagaacgtgcccyaccctgttatttcctcttcagtttaagaaccccctgatcctgctgctgctgggctctgccctggtgagtgtcctcaccaaggagtatgaggacgccgtca

SEQ ID NO: 391025 - DNA, 201 bp, Homo sapiens
gaatgttattcatcgatgcgttttggcagcaaaataggcttctgggtatgtaggtggttctggctagcccagaagcttcctaaaactgcagggctgagaasaggcagtggaggctcccggaagttggggttcagggaaggaggccgagacatgggctgtgagggaggagctcccctctgcggctggagatctctttgctct

SEQ ID NO: 391026 - DNA, 201 bp, Homo sapiens
tggtggtgggcgcctgtaatcccaggctactcgggaggctgaggcaggagaatcgcttgaacctgggaggcagaggtagcagtgagctgagatcacaccayggcactccagcctgggcaatgaagtgaggctctgtcttaaaaaaataataatacagatgacatctctaatcactatgcaatctaatttaaagacgagtga

SEQ ID NO: 391027 - DNA, 201 bp, Homo sapiens
ctgagcccttccctgccgcaagagaaggtggggaggctgcagaataggaagggttgggaaggtgcagccccgtcacccaaactccagcctcccaatagcaygttctccgacaggtacagagtgcccggcgaatgcttgcaaaatgaatgacagcaaatgatccagggtgtcccttttgtattaggctgttcttgcattgct

SEQ ID NO: 391028 - DNA, 201 bp, Homo sapiens
gggaactgctctagcagatggagagttttgacactcagtcccatggaccccctagaaggcccaaggggcaggtgcagggaagcaacaccatgctggtcagygcttctagaggaaagtagcatttgccaattcccatggtgcaaatactctcagtgtggccgttttcaagctactaatgtatagacacagaacatggatttc

SEQ ID NO: 391029 - DNA, 201 bp, Homo sapiens
gtctcactctgctacataggctgtagcacagtgacatgatcatggcccactgcagcctcagccttgacctcccaggctcaagtgatcctcctacctcagcstcctcagtagctgggattataggtgcacactgccacacccagctaatttatatatacatatgtatatataatatttttttttgtagaaataaaaaaatgt

SEQ ID NO: 391030 - DNA, 201 bp, Homo sapiens
tgataaagatacagctttcagacagtaatacgcacagatcttcagtgcaaaagtcaatgaatgttgacatatgtgtacccctgtgtaatcatcactgaagytgtaggatggcaaggtgaagacattttgaacaaaggcaggcagaagctaggatcttgtccaactaacccattgtgctcaccctttcagacacctaaaact

SEQ ID NO: 391031 - DNA, 201 bp, Homo sapiens
attacaggcataagccaccacacctggcctcttttcaaacacgtaagacatttgttagcattttgataaagatacagctttcagacagtaatacgcacagrtcttcagtgcaaaagtcaatgaatgttgacatatgtgtacccctgtgtaatcatcactgaagttgtaggatggcaaggtgaagacattttgaacaaaggc

SEQ ID NO: 391032 - DNA, 201 bp, Homo sapiens; identical to SEQ ID NO: 85745

SEQ ID NO: 391033 - DNA, 201 bp, Homo sapiens; identical to SEQ ID NO: 85746

SEQ ID NO: 391034 - DNA, 201 bp, Homo sapiens
gcttacaacggctgtgacgggaagatggccctggtttaaaaccatttagcagtctgaaagtttatgcatagtctcttgtctgatgattaatctcagttctytttatacttgcaattccagggtactgaaatggctaaatattttgaatctctggtcagaaacgacccttcctttgaaattcctgccaagaggcaccttggc

SEQ ID NO: 391035 - DNA, 201 bp, Homo sapiens
gttaactgtcttgcccaaagtcacagaattagtacctggtagatccaggattttaccctagaccagtcttacttcacaggctgtgccgtttctcctacccyctgtcacctctactggtgggtgcctgaatgtgcctggctaagcctgggcccctagcattgcctgtctggctccacacccccacacaagctgtgtcttccc

SEQ ID NO: 391036 - DNA, 201 bp, Homo sapiens
acctaggtctgcagggctctagtgtctgtgctctaactaccatactttacattttgggaggaataaaaatagaactttattttctgctattcaaggaatawagattcatttagagtaaaaatgtatttcccttatgttgagtttctgggccgggatgaaatgtttaaagcagcacttgaaagcaaagtgcccttctcattg

SEQ ID NO: 391037 - DNA, 201 bp, Homo sapiens
cctggtgccaactctgtgcatgctctgcctccaggtggtacattggcagagcccccatatgcacgcctactacccagccctcacctcttggccctccctgmtaggagacatgctggctgatgccatcaactgcttgggattcacctgggtgagtagcaacggctgtaactactcgcaatggggaacgtagcagggagtggt

SEQ ID NO: 391038 - DNA, 201 bp, Homo sapiens
cacacatttcttgcccacgcctccacccacacaacaaccctaggagacaggatttattttacgatgagaaactgaggttgagggaggtgcaggagaggctyctggtcttatggggtctgtactgtaaacactttttgagacctccttttgaaaaacaaaaaagaaggaggccggacacagtggtgcacgcctgtaatccca

SEQ ID NO: 391039 - DNA, 201 bp, Homo sapiens
tgaggagagatgagataatccatgaggccgatgaaccaccagggctgcttctgagttctgatggggggcccttcctgcccactcagctcctccttacatcmggttttgattgtgggctcagggcttagcctggaggtcggcctcccatacgcttggtctgggctctcctctctaccgtctcctttcctcactacattccca

SEQ ID NO: 391040 - DNA, 201 bp, Homo sapiens
ggtatgtgtgaccacagggatgtggcctctctctgtcagccccagttctcgcctgcaaaacagagataatgtgtaggtcctaccccatagggtcctgtgaraagtaagtaagagaaggcttggagagcaggagatgtggttattaccgatcatgactcttacatggtgaaaattggaggaagaggtttgattctctgagtc

SEQ ID NO: 391041 - DNA, 201 bp, Homo sapiens
ttgctcagtgcctcattgaaaactgaattagtttttctcttcctgccaccacctagaaaataagagaagaaaaactctctttcccctttaattccaacccyggttagacaatcctcatttacttttcatgagagagagagagcatccccacgggaaaagtcaggacaccaccctgctcgggtgtctgggcttctgcctcat

SEQ ID NO: 391042 - DNA, 201 bp, Homo sapiens
tatttctgcttaaaagtgtcagcccatctctagagtgacacttcaccttgccagagatggtctctggagaaagaaagcctgctggaaatgcctcctggtgmcaactctgtgcatgctctgcctccaggtggtacattggcagagcccccatatgcacgcctactacccagccctcacctcttggccctccctgctaggaga

SEQ ID NO: 391043 - DNA, 201 bp, Homo sapiens
acattttgtctgaggggaaaggacaactgtgtatagtaagacaggggagaggaagctggtggtagtgcctggccctgacgacggagccagagactcttctrtacagtgtctgagaccacaccaaagagaaggaaggaagtggggaacacatcctggcaaggacacgctggtgaccaggttgcgttggcccaggaaactgag

SEQ ID NO: 391044 - DNA, 201 bp, Homo sapiens; identical to SEQ ID NO: 85742

SEQ ID NO: 391045 - DNA, 201 bp, Homo sapiens
tcccacaactgggttactgtagtgattttccttttgcatatttccttctggactttgcatatatgaaaaggctccactgatgatctagcataggacatggrccacattagtgacaagaacaccagtgaacaagtctgattttcatggagttatgtcacttatttctgcttaaaagtgtcagcccatctctagagtgacact

SEQ ID NO: 391046 - DNA, 201 bp, Homo sapiens
aatgctgggacttccagagcacttcttgcaccaccaccccagcagccagggcggaggcgtcctgcaggtacctcccttggcaaagcttcacctagcttggsggctaagtagcgaaagacaagccaaaccctaacctggcaattctcccgttctccatggagtttcccccacattacccacaccgtcatcaccaacagcacc

SEQ ID NO: 391047 - DNA, 201 bp, Homo sapiens
tgagaatgcatccttcagccacttggccaccaacaccccagcccatctgctaggcatgtggagggcaggactttgactggtattaggtttctttttctttytttttgcccagttgtgccatggcatgaggtttctgatgccagggcagggctggccagaacacctgcattccagagcacagcctggcagaagtgtggaagt

SEQ ID NO: 391048 - DNA, 201 bp, Homo sapiens
gcctggttctgtctcccaggctggagtgcagtggagccatcatggctcactgcagcctccatctcctgggcccaagcaatcctccaacctcagcctcccaygtagctgggactacaggtgtgcaccactacacctggctttttgttttttgttttttttgtagagacagggtctcactatgttgtccaggctggtctcaaa

SEQ ID NO: 391049 - DNA, 201 bp, Homo sapiens
gtcaggggatttcagcctgatttctctatgtcacttctagggagagagatggtggattacatctgccagtacctgagcactgtgcgggagagacgtgtgaygccagacgtgcagcctggctacctgcgagcccagctgcctgagagtgctcctgaggaccccgacagctgggacagcatctttggggacattgaacgaatc

SEQ ID NO: 391050 - DNA, 201 bp, Homo sapiens
tagtcaggatggtcttgatctcctgacctcgtgatccgcctgcctcagcctcccaaagtgctgggattacaggcatgagccactgtgcccggccaaatccrtctccttctttaccaagtctcttggcccggacctgagagggatgggcacaaatcggtcaggcccagtcaggggatttcagcctgatttctctatgtcact

SEQ ID NO: 391051 - DNA, 201 bp, Homo sapiens
caaaaatgctgggacttccagagcacttcttgcaccaccaccccagcagccagggcggaggcgtcctgcaggtacctcccttggcaaagcttcacctagcwtgggggctaagtagcgaaagacaagccaaaccctaacctggcaattctcccgttctccatggagtttcccccacattacccacaccgtcatcaccaacag

SEQ ID NO: 391052 - DNA, 201 bp, Homo sapiens; identical to SEQ ID NO: 85744

SEQ ID NO: 391053 - DNA, 201 bp, Homo sapiens
gggtttcaccatgttagccaggatggtctcaatctcttgatctcgtgatccacctgcctcggcctcccaaagtgctgggattataggcatgagccaccgcrcccggcctgcccttccttttattgctgggcaggggcggcatgaggggtaagtactggggactaatgtgaataccacccagaatcccacaactgggttact

SEQ ID NO: 391054 - DNA, 201 bp, Homo sapiens
acaaatacatttagcactgttcctggatcagtggagggttaggtctagagctctcagatctctggtggggccctgctggagaagaaccaggatgtgagagsgttgaaggggagcagaaggaagatagaatggtgtggaaatctacctttgtctcataagttttgtctggggttggttctgttcttaagaactttgcataag

SEQ ID NO: 391055 - DNA, 201 bp, Homo sapiens; identical to SEQ ID NO: 85747

SEQ ID NO: 391056 - DNA, 201 bp, Homo sapiens
tggtatttttagtagagatggggtttcaccatgttagccaggatggtctcaatctcttgatctcgtgatccacctgcctcggcctcccaaagtgctgggawtataggcatgagccaccgcacccggcctgcccttccttttattgctgggcaggggcggcatgaggggtaagtactggggactaatgtgaataccacccag

SEQ ID NO: 391057 - DNA, 201 bp, Homo sapiens
ggatagtgctggtggggccaggaagctgatggaagctggctgatgcatgggcttgagctggagcctgccttgatgggtggtggacacccctgaccactggyggtgaggagctctgccatggtgctcatgctaaagtggcatcgactcccttcctgtggcggggctccctgccatgtgccagctctgtgctggccacatgac

SEQ ID NO: 391058 - DNA, 201 bp, Homo sapiens; identical to SEQ ID NO: 85748

SEQ ID NO: 391059 - DNA, 201 bp, Homo sapiens
ccgggttcacatcattctcctgcctcagcctcctgagtagctgggactacaggcttctgccaccccgcctggctaatttttttggtatttttagtagagayggggtttcaccatgttagccaggatggtctcaatctcttgatctcgtgatccacctgcctcggcctcccaaagtgctgggattataggcatgagccaccg

SEQ ID NO: 391060 - DNA, 201 bp, Homo sapiens; identical to SEQ ID NO: 85749

SEQ ID NO: 391061 - DNA, 201 bp, Homo sapiens
cactgcaagctcagcctcccgggttcacatcattctcctgcctcagcctcctgagtagctgggactacaggcttctgccaccccgcctggctaatttttttggtatttttagtagagatggggtttcaccatgttagccaggatggtctcaatctcttgatctcgtgatccacctgcctcggcctcccaaagtgctgggat

SEQ ID NO: 391062 - DNA, 201 bp, Homo sapiens
gctccataaaacaaaaacaaaaggtgccttttgcaagaaactggatgaaacaagtagtctgcttttctggagctcacagtctgcccttccttttttttttytgagacggagtcttgctctgtcgcccaggctggagtgcagtggagcgatcttggctcactgcaagctcagcctcccgggttcacatcattctcctgcctc

SEQ ID NO: 391063 - DNA, 201 bp, Homo sapiens
accctgcaggtgaatagtaccattccccaatgttttgagataagagcactgaagttcagagagattaaataatttgccctagcttacacagctgataagcrgaagaacgaggattcaaactgatgcctgtctaaatccaaaccatgctttctcctgtatcgtcagccatgtgaacttgagttagtcccatcacctctctga

SEQ ID NO: 391064 - DNA, 201 bp, Homo sapiens
ctctaagtatgtgtggacagtaaagaacaggatgatgccctaagatgttatcaaatgagtcctcagtagagtgaaacatctagaattctagagttctatcrctcagggaagggatcgaagggagctgtgggagctgggggagagttcgaggaggaaatgaatatttagtagctttctaagaactggcaggttttggaaggt

SEQ ID NO: 391065 - DNA, 201 bp, Homo sapiens
cagtggtgcacgcctgtaatcccagcactttgggaggctgaggcgggtggatcatgaggtcaggagttcgagactagcctggccaacatagtgaaacactktctctattaaaaatacaaaaaattagccaggcatggtggtgggcacctgtaatcccagctacttgggaggctgaggcaggagaatctcttgaacctggga

SEQ ID NO: 391066 - DNA, 201 bp, Homo sapiens
tgcaggagaggctcctggtcttatggggtctgtactgtaaacactttttgagacctccttttgaaaaacaaaaaagaaggaggccggacacagtggtgcaygcctgtaatcccagcactttgggaggctgaggcgggtggatcatgaggtcaggagttcgagactagcctggccaacatagtgaaacactgtctctattaa

SEQ ID NO: 391067 - DNA, 201 bp, Homo sapiens
aaaaaaaaaaaagtgacaaaaatatgcctagaggcaggggtgggaaaatattcaaactcagaaagtgatggcaattttgacttttttttttttttttttttgaagcaatagagacaaggtcttgctatgttgcccaagctggtctccaactcctgggctcaagtgatcctcctgcctcggccttccaaagtgttgggatga

SEQ ID NO: 391068 - DNA, 201 bp, Homo sapiens
cctgaggagtacagagagagaggtgagcaacgggcatccctggccctcttccctgctgctactcctgcaggaacggctgctggtgggtggcccttagattstggggtgacatttgatgggagcattagaattgccttctgagagttggcaccagcaacatttttttttctgcgaaaggaatgtgggatcagagtgtaaaac

SEQ ID NO: 391069 - DNA, 201 bp, Homo sapiens
atttctgtgccaggatgttctaggctgaggccaagagggtgctggccctttacccagtggaagaaaaaggcaagggtgaggctttgtagactttcccattmggaggtaatgatgcctccttcagccccacttcttcaaactgactccacctgctcccatctccacacccctccgtttctcatttagccaaagcacatcatc

SEQ ID NO: 391070 - DNA, 201 bp, Homo sapiens
agctgtgtatttccttctgtgaatagctatgacacacacatacacaaacacatacacacacagagagagagagagagagagagagagagagagagagagaraaaactagaaagcctggggaaatttggcaagagaatacagaaaggctgccatgataatccttttcccctgcagagcacggtcagtgaatccactttgatt

SEQ ID NO: 391071 - DNA, 201 bp, Homo sapiens
aaccccttaagcaccactcagctttaaatggtgccaaaagccttccagaacatctttttattttaagcctgaactcctatgggtgtgtgggtgggtgggcsggggtattcatatcttttctaggaaaacatccccctgggcatttgaggacttctcagctatgtattttagcgacttggagaaccaaatccaagccaacca

SEQ ID NO: 391072 - DNA, 201 bp, Homo sapiens
taattacgtatatatttatggggtatgtgtgaggttttgatacaggcatacaatgtgcaatgatcaaattagggtaactgggtatccaccactcaaccatytatcatttctttgtgttagaaacattctagttccattctttaagttagtttgaaatgtacagcaaattatagttaactatagttgccttattgtgccgcc

SEQ ID NO: 391073 - DNA, 201 bp, Homo sapiens
agccagagcccaagggagatgatggagcctgaggagtacagagagagaggtgagcaacgggcatccctggccctcttccctgctgctactcctgcaggaayggctgctggtgggtggcccttagattctggggtgacatttgatgggagcattagaattgccttctgagagttggcaccagcaacatttttttttctgcga

SEQ ID NO: 391074 - DNA, 201 bp, Homo sapiens
agggagcgttaccttagccttggcaagggagccctgcaaggaccttacaaggacacagaggaggctggagatgcctcaaggtaaagaagagccctgtcagsctttatacgtccagattttttgatccaacagaaaatgttggctagaaccactctgctgagtcagcatggatcagttttggaatagtgacaagaaaaggag

SEQ ID NO: 391075 - DNA, 201 bp, Homo sapiens
cgtggccaccgacttcatggtgagtggccagggacgggcagcctggtgggctcgggtggccagtgggaactgtaggcgtctgaccccccaaaatctgtacrgtggctcccttcagaaggcagcacactatgagctcatctcataatactgccaatgcataccttggtttctaattgtgcctaagtatatagaatgaaaccc

SEQ ID NO: 391076 - DNA, 201 bp, Homo sapiens
ggagcattatattcacccttgcccttttgaatttcatgttaccgtttaaattcatttaccacagtgcctcaggatcttcccggggttcattcctaggagtytggagattttacagtgctctctgtcttccagataactcataaaaatgttagagtaaactcttcccagccctgctctggggaaccttattatttttacctc

SEQ ID NO: 391077 - DNA, 201 bp, Homo sapiens
gtgcccgtgaggggctgtggctccacatcgatgctgcttatgcaggcactgccttcctgtgccccgagttccgggggtttctgaaggggattgagtatgcygactccttcacctttaatccttccaagtggatgatggtgcattttgactgtactgggttctggtgagtgtagcagcccagctccgagcacgcaggaacgc

SEQ ID NO: 391078 - DNA, 201 bp, Homo sapiens
agcattcctgactttcccaactgactgcgcctcaactctctaactcactctctctctcttttcttttgttttctttctttctttctttctttttttttttytgagacagagtctcgctctgtcaaccaggctggagagcagtggcgccatcttggctcactgcaacctccgccttccaggttcaagcgattctcctgcctc

SEQ ID NO: 391079 - DNA, 201 bp, Homo sapiens
cttcaaactgactccacctgctcccatctccacacccctccgtttctcatttagccaaagcacatcatccttgcagcccaccactcagcttggccaggtgygagacatctttccccacttcatacctcccctccggccaggtgatgtttgcctcctcaggtgcccgtgaggggctgtggctccacatcgatgctgcttatg

SEQ ID NO: 391080 - DNA, 201 bp, Homo sapiens
ctagacgtgagtacgctggggttctgagcagctcagacatgggagcttgtctccagcaactgtagggaagacaagcttccaatgatcatatttggttcccragtcttaggcttcagcagtttctggggggtgatcattccaggatgactctttgctgacaggtttctgtggcccttctaggctcactcctctgtggaaaag

SEQ ID NO: 391081 - DNA, 201 bp, Homo sapiens
ggagctgtgtatttccttctgtgaatagctatgacacacacatacacaaacacatacacacacagagagagagagagagagagagagagagagagagagaraaaaaactagaaagcctggggaaatttggcaagagaatacagaaaggctgccatgataatccttttcccctgcagagcacggtcagtgaatccactttga

SEQ ID NO: 391082 - DNA, 201 bp, Homo sapiens
ggtttgccttcatcattcccaaagaacttttgacttcaatgtgacaaaaaggccaggcgcgggggctcacacctgtaatcccagcactttgggaggccaargcaggtggatcacctgaggtcgggagttcaagaccagcctgaccaacatggagaaaccccgtctctactaaaaatacaaaattagctgggcatggtggca

SEQ ID NO: 391083 - DNA, 201 bp, Homo sapiens
gagggacatgggcaccctgggcaggaggagctgtgtatttccttctgtgaatagctatgacacacacatacacaaacacatacacacacagagagagagasagagagagagagagagagagagagagaaaaaactagaaagcctggggaaatttggcaagagaatacagaaaggctgccatgataatccttttcccctgca

SEQ ID NO: 391084 - DNA, 201 bp, Homo sapiens
agtgcagtggcacgatctcggctcactgcaacctccgtctcccaggttcaagcgattctcctgcctcagcctcccaagtagctgggattacatgcgcctgycaccacgcccggctaattttttgtatttttagtagagaggggtttgaccatgttagtcaggatggtcttgatctcctgacctcgtgatccgcctgcctca

SEQ ID NO: 391085 - DNA, 201 bp, Homo sapiens
gggagggacatgggcaccctgggcaggaggagctgtgtatttccttctgtgaatagctatgacacacacatacacaaacacatacacacacagagagagasagagagagagagagagagagagagagagaaaaaactagaaagcctggggaaatttggcaagagaatacagaaaggctgccatgataatccttttcccctg

SEQ ID NO: 391086 - DNA, 201 bp, Homo sapiens
tctgtgccaggatgttctaggctgaggccaagagggtgctggccctttacccagtggaagaaaaaggcaagggtgaggctttgtagactttcccattcggwggtaatgatgcctccttcagccccacttcttcaaactgactccacctgctcccatctccacacccctccgtttctcatttagccaaagcacatcatcctt

SEQ ID NO: 391087 - DNA, 201 bp, Homo sapiens
gttggggagggacatgggcaccctgggcaggaggagctgtgtatttccttctgtgaatagctatgacacacacatacacaaacacatacacacacagagasagagagagagagagagagagagagagagagagaaaaaactagaaagcctggggaaatttggcaagagaatacagaaaggctgccatgataatccttttcc

SEQ ID NO: 391088 - DNA, 201 bp, Homo sapiens
accagggtgaacaacctagtgagaccactgtctttacaaaaaaattaaaaaatgtagctgggcatggtggtgcatgtctgtagtcctagctactcaggagrtgaaggtgggaggattacttgagctcaggagttcaaggctgcagtgagctttgattgtgcaacatgcctctgtactctagcctgtgtgacaaagcaagac

SEQ ID NO: 391089 - DNA, 201 bp, Homo sapiens
gaaagttggggagggacatgggcaccctgggcaggaggagctgtgtatttccttctgtgaatagctatgacacacacatacacaaacacatacacacacasagagagagagagagagagagagagagagagagagagaaaaaactagaaagcctggggaaatttggcaagagaatacagaaaggctgccatgataatcctt

SEQ ID NO: 391090 - DNA, 201 bp, Homo sapiens
ctttgattgccctgctggcagcaaggaagaacaaaatcctggaaatgaaaacgtctgagcccgatgctgatgagtcctgcctaaatgcccgactcgtggcytatgcctctgaccaggtgagttgcccgacgcaggacagcccttcgggttggtgcttggcttctggaatcttggtccttgagcaatttttttctagacgtg

SEQ ID NO: 391091 - DNA, 201 bp, Homo sapiens
gtattctcctctcccctgacctctgcttctgttattgcaaacagcatgtgttgtaggagggataaaagcacagtgggaggagatctacctactgtcacttrtaccttgggaaagtcactttcccttggttccttctaaaaaatggaaagattgagctgggcacaggggcacgtgtctgtagtcccagctacttgggaggct

SEQ ID NO: 391092 - DNA, 201 bp, Homo sapiens
tttatattgttcagtagcaatttaaaaaaatcatccactatgttcaatgaaataaaaggccagatttaaaaatttggcaaggagttgaaaactataaaaargaaccaaataaaaattctttttttgcccccataaggcagaagaaatacaaattctacaactgaaaaaatataatatctgatattaagaaatcaataaatg

SEQ ID NO: 391093 - DNA, 201 bp, Homo sapiens; identical to SEQ ID NO: 85753

SEQ ID NO: 391094 - DNA, 201 bp, Homo sapiens; identical to SEQ ID NO: 85754

SEQ ID NO: 391095 - DNA, 201 bp, Homo sapiens
tacaaggacagaaacccagacaccaaatgattaatatatccaagggctgggattcccagcctagtagcccaaggaaagatagcttaaagatattctctaaratttttcttctctccctgctcttaactaaagcttgcaaaggaggtgattgtacatctccatccaagaacaaaactagcactttgctggcatatatgggaa

SEQ ID NO: 391096 - DNA, 201 bp, Homo sapiens
actgcaagctaacttttattaaaatgacctttgtatgagtcttctcctccatagattggaagcccctatcgaacaaaaccatgtcttactaattttttgcrtttgaatataaggtactcaatacttgtttgcaaatataatttatttttaaatttctaccgttcaaagttgacaaattaaacataactgggagaatttttt

SEQ ID NO: 391097 - DNA, 201 bp, Homo sapiens
ggagttcaagaccagcctggtcaacatagaccccatctccattaaaataataataataatataaaatgcataacgataagcatcatttgtcatgcccacayatttaagcaaaaaattatgctgaaaataaaattatgatgcttgttgaagcactaatagaactttaatagactgatttagtttgttttgatttttttctta

SEQ ID NO: 391098 - DNA, 201 bp, Homo sapiens
ggttgcagtgagccaagatcgcgccactgcaccccagcctgggcgacagagccagactctgtctcaaaaaaaaaaaaaaaaaaaaaaaaatatatatatawatatatatatatatatatatatatatatatatatatgtatgtacattcacttccgttatcacaattcaagacaagtaggcttaaaagcagtctcacttta

SEQ ID NO: 391099 - DNA, 201 bp, Homo sapiens
tgggattacaggactggccaacttttatcttttgacacaacaatctcacttcagtgaatttatccaaaagatatggtgtcattcatagtgtgaattgccaygtggacgagcttcttcactgcagcatcatttataacagcaaatagtataaataaattataatacacttataaaaggacttgaaggagctgagaaagagaa

SEQ ID NO: 391100 - DNA, 201 bp, Homo sapiens
ttgcagtgagccaagatcgcgccactgcaccccagcctgggcgacagagccagactctgtctcaaaaaaaaaaaaaaaaaaaaaaaaatatatatatatawatatatatatatatatatatatatatatatatatgtatgtacattcacttccgttatcacaattcaagacaagtaggcttaaaagcagtctcactttacg

SEQ ID NO: 391101 - DNA, 201 bp, Homo sapiens
tgagattagattgagaaaaactgatggtacaacaatttgattttcaaagcaagaaacatttagagggaggagaggccaccaaaaaaaaaaaaaaaaggagwgagagtcccaacaaggtacaagctagttttctctgtgccatgatgggatggagaaataagatgaattagttcaaggatcttacagtccagtaaaagaact

SEQ ID NO: 391102 - DNA, 201 bp, Homo sapiens
gtttgcacttgccacaagaagtacagatttcagccaaccatctgctatgcttgtgaaaccatcaaaacccaaccttccctcaaatattggaatcctgtgatttttttttcaaatgtagtaaatttcatgtttaaaatgcataatagggctgggtgcagtggctcatgcctgtaatccccacactttgggaggccaaaatgg

SEQ ID NO: 391103 - DNA, 201 bp, Homo sapiens
tgacttcacttcatacagtcacttttgctaagtatttaagtaaatgagaggaagccaggaatgacatattaaagctggtgcccaaaacataatgtctatcttttttttttttatttttattgccaggccaacagaaaggtgagatggcacaattaaccaattgcttctgctgcatgcagacactcccttaacatatgggac

SEQ ID NO: 391104 - DNA, 201 bp, Homo sapiens
tcccagcactttgggaggccaaggcaggaggattgcttgaggccaggagttcaagaccagcctgggcaacatagcaaacctcatctctaaaaaaaaaaaawatatatatatatatatatagccaggcatggtggctcaagtctgtagtcccagctacccaggaggctgaagtagaagaattgcttgagtccaagagttcaa

SEQ ID NO: 391105 - DNA, 201 bp, Homo sapiens
tggtcaacgtggcaaaaccccatcccttcttaaaaaatacaaaaattagccaggcatgatggtgtccacctgtaatcccagctacttagaggctgaggcaygagaacccacaaggcagaggttgcagtgagccaagatttcaccactgaactccagcctgggcaatagagtgagacccgggccaggtacggtggctcacgc

SEQ ID NO: 391106 - DNA, 201 bp, Homo sapiens; identical to SEQ ID NO: 85755

SEQ ID NO: 391107 - DNA, 201 bp, Homo sapiens
aagatttcaccactgaactccagcctgggcaatagagtgagacccgggccaggtacggtggctcacgcctgtaatctcagcactttgggaggccaaggggkacagatcacgaggtcaggagattgagaccatcctggctaacacagtgaaaccccttctctactaaaaatacaaaaaatttgccaggtgttgtggcacgcg

SEQ ID NO: 391108 - DNA, 201 bp, Homo sapiens; identical to SEQ ID NO: 85757

SEQ ID NO: 391109 - DNA, 201 bp, Homo sapiens
atcttaggaattctagggccctgcccactgctggtgcctgtccacactattacagctgatgctttctggaaagtaccacctcctggcaggaggccaacagyacaaaacagggaattaaaccaccaaagttaaggatcccatggagtcattgcatcctctgccacttccactggaacaggtgctggtatccatggctgagag

SEQ ID NO: 391110 - DNA, 201 bp, Homo sapiens
gctattcccctcttccactgtgtgggagacaggaggatttttctctggagagctaaagaagctttgactgaaggaccccaagaacagaggagagcagggaygaggcactgaaaacagagattaagaaagtatctacgtactaaccagggagaccccaccagctcctttcccctgcacagatactggaactccagtagccag

SEQ ID NO: 391111 - DNA, 201 bp, Homo sapiens
atgggagaattcacatgttttggttgttaaatcatagttccagctgtcagaccatactgcttgtgctagaggaatagggaacgatgtgtgtgggtggcagraaaaaggcagacactaaggggcatttataaccaacataaatatgtaataaaggcaatgtcagtataaattaaatacatacaaaataaaggcaattattaa

SEQ ID NO: 391112 - DNA, 201 bp, Homo sapiens
aaacacttgaaaaacatatttgggtgaataattgaggaaaacttccaagccttgctagacctagacatgcaaatacatgaagcacaaagaacacctgggawattcatcacataaagatctttgcctaggcacattgtcatcaggttatccaaagttaagaccaaggaaagaatcttaagagctgtgagacagaaacacctg

SEQ ID NO: 391113 - DNA, 201 bp, Homo sapiens
tgtgaaggcacagcctacctcccttaatttaggaggtaactctgaagggcatcccaggtccagagtccccttaggattagaggatctgctgagggagactyctgttgtgactgcattacagttcaatgtctccctctatccagtctgcttcccttgcagcctcacaggtcccattcccaagagcactcctgcatgcacatc

SEQ ID NO: 391114 - DNA, 201 bp, Homo sapiens
agcatcataaatagccttaacacttctaattttttctcactttatttctagatcatgagggtcgcattggcatggcctccatcaaaatgaaagaaaaccaygaatttgatggaaagaaactctttcagcacattgctgattacctacctagttatgcaaggccccggtttctaagaatacaggtgagatctcttattatcc

SEQ ID NO: 391115 - DNA, 201 bp, Homo sapiens
tcaaagaagaattggtaccaattcttttgacactattccacaagatagagaaagaaggaaccctccctaattcattccatagagccagaatcaccctaatrccaaaaccagaaaggacataaccaaaaaagaaaactgcagaccaatatccttcatgaacacagatgctaaaatccttaacaaaatactagctagccaaat

SEQ ID NO: 391116 - DNA, 201 bp, Homo sapiens
ctgccactgaaggcaatattggatttatgaattatgcgagaaaagttggtgctgttggaagagtaaactacctacagaaagtaagtacattgaaaaatgaragcatacgtagccagttttcagaatacagagacttcttaaaagccaagtcatgatgatgttatcagaagtcaggcagcatcagagccatggcccattcct

SEQ ID NO: 391117 - DNA, 201 bp, Homo sapiens
tgaatggggaaaagttgaaagcattccccctgagaactggaacaagacaaggatgcccattctcaccactcctctttaacatagtactggaagtcctagcyagaccaatcagacaagagaaagaaatacagggcatccaaatcagtaaagaggaagtcaaactgtcactgcttgctgacgatatgatcatttaccttgaaa

SEQ ID NO: 391118 - DNA, 201 bp, Homo sapiens
aataattatatccaaatactgtcatgtttgcatttttcttccaacaaggaaaataatatatttattattgctcttactgaattgctgataattaaattctyatgctttgaattatatgttaaatatgatagagttttcataattttatagtcatgggcatgaaataattatggcttcgattctaaaatatattagataaca

SEQ ID NO: 391119 - DNA, 201 bp, Homo sapiens
gtaatcccagctactcgggaggctgaggcaggagagccgcttgaacccaggaggcagagattgcagtgagttgagatcgcgccattgcactccagcctggrtgacagagtgagactccatctcaaaaaaaaaaaaaagaaaaaagaaaatatgtaggcccaaacatatctacaaaagactcaagaaaataaaagacattaa

SEQ ID NO: 391120 - DNA, 201 bp, Homo sapiens
ttattccattttagagattcagaaaatgatgcttagagaggttaagaacttctcaagataagcggtagaactgtcagtagaactgttaccttttactatgytaagatgtgcttcaaaatttctatttccttaagtatttttcattttttaaaatatcgctcagtttaaatgattttaacaatccactactgtaattatgac

SEQ ID NO: 391121 - DNA, 201 bp, Homo sapiens
ggcaggcttcaatgttgcttccagctctcaactgctgttagcatcctgtcccctccctgcagaacaaaggtgaccccacctgatccccagggagaagataytggggatctgctacaggaccgttgtgagcccccactgcatctatcacaatagtgaccctttcagttctgtggttagctcctgccacatttcagccagact

SEQ ID NO: 391122 - DNA, 201 bp, Homo sapiens
ttttatagcagcacaattcacaattgcaaaatcgtggaaccaacccaaatgcccatcaatcaacaagtggataaagaaactgtggtgtgtgtgtgtgtgtrtatatatatatatatatatatatatatatatatagtatagtttgaagtgaggtaatgtaatgcctccagatttgttctttttgcttagtcttgctttggc

SEQ ID NO: 391123 - DNA, 201 bp, Homo sapiens
ctagtccagactggagcagaggagacaaagaagcataatggaaaacaggaaattccatgagcagatagatttcaccatgaggaaaattttagaggctgttggaggataaggggaaacttaccaatagaaactaaggaaatgaagcaaattggaagaaaggcaattaattccaggaaaaataaaaatttgttcatagtgtat

SEQ ID NO: 391124 - DNA, 201 bp, Homo sapiens
ttcacatcttactccccacctagcatatcctgcatttccccctctgcttactaaaagccattgtcaaagcccagttcaaatgatacctcatacattaaacmtatttgggtcactccaacaaaagtcattactcttctcccctacgtcattttatttctaccctctgtggcccttgtcatgttgcaggagtttgtgttcatg

SEQ ID NO: 391125 - DNA, 201 bp, Homo sapiens
cactgaagttgctgatacagttggactggttgattttgtccaagaagtaaatgtttatggagtgcatgtgccaggtatatacaagatatgatctgtacctaaacccatagagtaactgaacataattttggcctcaaggcgaagtttgtcattgctttctcccgccatccagagttaaacagttctttcagctgccaggga

SEQ ID NO: 391126 - DNA, 201 bp, Homo sapiens
tggaagtctgatttagggggtgatgaaaatgcactagaactagatcctggtaatgatagtacaacattgtaagtgtgtaaaataccactgaattgtacacttttttttttttttttttttgagacggagtttcgctctcgttgcccaggctggagtgcaatggcgcgatctcggctcactgtaacctctgcctcccatgtt

SEQ ID NO: 391127 - DNA, 201 bp, Homo sapiens
gccaagtattgctggaattttttaattattcagaaaacagaaatccatcagaacttattaacattagtgtcactaaagttgatctacaaccaccccccccgcccacatacacactctcacaactacgaagtttgactggctttttaaaaagaaaacaaatccagatatgtatgtgaatctcccaatttttgaaatctgaag

SEQ ID NO: 391128 - DNA, 201 bp, Homo sapiens
ttgtctttatggagatatcatacacaaacatctgaaaaacaaagcatatcagatgaattaggtgtagcctccccaaggtaataccctgggacatttagtcmccttcctacccagcactttgggaggccgaggcgggcggatcccgaggtcgggagattgagaccatcctggctaacactgtgaaaccccgtctctactaaa

SEQ ID NO: 391129 - DNA, 201 bp, Homo sapiens
cttatctagtagttctgggggtacaaagatgatttgattattatcttaatttcaaagatctccctgtctaatagaggagaaaatgaattaaaccacatccrccaggcatggtggctcacacctgtaatcccagcactttgaaaggctgaggtgggaggatcacttgagctcacaagtttcagatcagcctgggcaacgtag

SEQ ID NO: 391130 - DNA, 201 bp, Homo sapiens
  misc_feature (1)...(201): n = A,T,C or G
agcccctatcgaacaaaaccatgtcttactaattttttgcatttgaatataaggtactcaatacttgtttgcaaatataatttatttttaaatttctaccnttcaaagttgacaaattaaacataactgggagaattttttccaccatttctttcttgacactttctgtgctttctctgtaggtgctactcttgccttgcg

SEQ ID NO: 391131 - DNA, 201 bp, Homo sapiens
gattattatcttaatttcaaagatctccctgtctaatagaggagaaaatgaattaaaccacatccgccaggcatggtggctcacacctgtaatcccagcaytttgaaaggctgaggtgggaggatcacttgagctcacaagtttcagatcagcctgggcaacgtagcgggacatcatctctacaaaaagttagctgggcat

SEQ ID NO: 391132 - DNA, 201 bp, Homo sapiens
gtaagcaaggcatacttgtatctcagaaattatttcatcttacattatgtttcattaaaggtttatcaactgccagatctgaatcctttaagcagctttascttattcctctgtgtcttccacactaatatcatattttgtgcaaaattttttcaattataaacatttattgagcacttatctagtagttctgggggtaca

SEQ ID NO: 391133 - DNA, 201 bp, Homo sapiens
acagaggacagtagttcatgtgcgtaagagccctggctgtggagagcaaatctcagtgccaccatatgctagctgagtgaccttgggcaggtcacatatgytcctcaggcctcaatttcatcatctgtaaaacagagataacaagagaaaatattgaacccagtgcctagcccacactcgataagggaaaaggattgttga

SEQ ID NO: 391134 - DNA, 201 bp, Homo sapiens
ggttctttagaaacaggtcaactgcctgacccacagaaaagccttcaatagaagctttctgcctgtgttaattacctggcacccttcattcctctctggasatcttgacctcttgctcctcatcagtcccccaggtgtgtttgcatgtttcaccttagctctaatgtgacgaagaaggtttttttcttgtttaaaaaaaat

SEQ ID NO: 391135 - DNA, 201 bp, Homo sapiens
atgcccacacatttaagcaaaaaattatgctgaaaataaaattatgatgcttgttgaagcactaatagaactttaatagactgatttagtttgttttgatwtttttcttattaaattaagaactacaagcagctgtcgaagagatactgccaagccttaaaaaagatgatgtgtccatctattatgtgagcagaacttcta

SEQ ID NO: 391136 - DNA, 201 bp, Homo sapiens
ttctcaagataagcggtagaactgtcagtagaactgttaccttttactatgttaagatgtgcttcaaaatttctatttccttaagtatttttcattttttwaaatatcgctcagtttaaatgattttaacaatccactactgtaattatgacccacaggttgggaaacactgctctaaattaatcactccttttttttccc

SEQ ID NO: 391137 - DNA, 201 bp, Homo sapiens
gttgacacaggttttcaaatctctttctttggcaaaacgtattgggtaactaatacttcaggagatttagttatttgcctgcggaaactgatcttatttcrtagcatgtgatcccatttgggtttctccaagctatgcatattttccgccagttggtatagaacagataaagaggttaaccaagaactacagaagtagtta

SEQ ID NO: 391138 - DNA, 201 bp, Homo sapiens
ggaagaagcaatattaagagtagtgtgtactaggcatttttcaaggagctctataacatttattgataagattctgctaccactcttgagatgagtactayttttattccattttagagattcagaaaatgatgcttagagaggttaagaacttctcaagataagcggtagaactgtcagtagaactgttaccttttacta

SEQ ID NO: 391139 - DNA, 201 bp, Homo sapiens
tcttcatctccaccgtctgctcatctttcaggtctcagtttacagggcacttcttctaggtcgtctttctgccccccaccacctgctccccaaataccttytccttcccctgttgtgacacctgtggcaatttattttgatttttgtttgtttgtttctcctctattagacctgggctctatgaaaacagggagagcgttt

SEQ ID NO: 391140 - DNA, 201 bp, Homo sapiens
ctatgggagctgtagaagggagcagctaactttgcagagggagggaagataacagaaaagaagtgctacctacactgagtcttgaaggataagcaggagtkttccaggtgaccagggggtgagaaaccatgaaacaacctgggcaaaagtaatgagacgtgagcatacaggtaccttcagggattttccatagatcaatgt

SEQ ID NO: 391141 - DNA, 201 bp, Homo sapiens
ctttagcagtaggagttgttgttttaaaatttgcctctgtgggcccttacttgtaagcaaggcatacttgtatctcagaaattatttcatcttacattatrtttcattaaaggtttatcaactgccagatctgaatcctttaagcagctttagcttattcctctgtgtcttccacactaatatcatattttgtgcaaaatt

SEQ ID NO: 391142 - DNA, 201 bp, Homo sapiens
tcctgtagtcccagttacttgagaggctgaaatgggaaaatcacttgagcccaggaggttgacgctgcagtaagccatgatcacgccactgcactccagcmtgggagacagagcaggaccctgtctctaaagaaaaattaaaaaattgaaccctatcatactgtgtataagtgccctgataattataaatacgggctccta

SEQ ID NO: 391143 - DNA, 201 bp, Homo sapiens
gggtggctgtagcataagacctaaaatactgtatttcatcaaatctaggatgccttcaactgtaagctgccccattatgagccactaagaagaaacactgycaattaacaatgttatgggaacactgctgtatggaagaagcaatattaagggtagcatgtgtactaggcattcttcaaggagctttacaacatttgttga

SEQ ID NO: 391144 - DNA, 201 bp, Homo sapiens
atgctctgaccctgtttgttgtttccagttttaaagaacacagaaatccacagaagttctacacctttctgtggtgtgaaatttaattggacattagccagctggaattgcctaagacttaactatcaccgctaggaggattttttttcttcctccaacattaaccctttggttggtttaatactctcacttttagacttt

SEQ ID NO: 391145 - DNA, 201 bp, Homo sapiens
tctgaaggagttaaatgttgacacaggttttcaaatctctttctttggcaaaacgtattgggtaactaatacttcaggagatttagttatttgcctgcggraactgatcttatttcatagcatgtgatcccatttgggtttctccaagctatgcatattttccgccagttggtatagaacagataaagaggttaaccaaga

SEQ ID NO: 391146 - DNA, 201 bp, Homo sapiens
cttttttctttctacatctttaagggaagaaaggcttccatagtgtgtccagatatggttggcaagccgctggaaactcaagtctgcccaaataacaaatctacaccaacagcctagaggagatggaaggagatggtgtagggcaggggcaatggccctcccttcagattagatgacttgcataaaaggtcaggaatcaca

SEQ ID NO: 391147 - DNA, 201 bp, Homo sapiens
ctctttctttggcaaaacgtattgggtaactaatacttcaggagatttagttatttgcctgcggaaactgatcttatttcatagcatgtgatcccatttgsgtttctccaagctatgcatattttccgccagttggtatagaacagataaagaggttaaccaagaactacagaagtagttatgatgatgaatgagatttgg

SEQ ID NO: 391148 - DNA, 201 bp, Homo sapiens
aagacaattagaagggtgtttattttacttttttcattttctctgaatcaaatatttgctaggccaagcacagtggctcacatctacaatctcagaacttkgggaggccaaggcaggaggattacttgagcccaggagtttgagaccaggctgggcaacatagcgagaccacatctttacaaaaacattaaaaaattagct

SEQ ID NO: 391149 - DNA, 201 bp, Homo sapiens
aggctggagtacagtggcaggatcagggctcactgtagcctcaacctcctgggctcaggcgatcatcccacccaagtagctaggactacaggtgcataccrccacacccagctaatttgttttactttttgtagaggaggggtctcactatgttgcccagactggtgctgaactcctgggctcaagcgatcctcctgcctc

SEQ ID NO: 391150 - DNA, 201 bp, Homo sapiens
ggtactcctgtagtcccagttacttgagaggctgaaatgggaaaatcacttgagcccaggaggttgacgctgcagtaagccatgatcacgccactgcactycagcctgggagacagagcaggaccctgtctctaaagaaaaattaaaaaattgaaccctatcatactgtgtataagtgccctgataattataaatacgggc

SEQ ID NO: 391151 - DNA, 201 bp, Homo sapiens
ttgctctgtcacccaggctggagtgcagtggcgctatctcggctcactgcaacctttgcctcccaggttcatgccattctcctacctcagcctcctgagtmgctaggactataggcacccaccaccacgcccggctaattttttgtatttttagtagagacggggtttcaccatgttagccaggatggtcttgatctcctg

SEQ ID NO: 391152 - DNA, 201 bp, Homo sapiens
aagccatgatcacgccactgcactccagcctgggagacagagcaggaccctgtctctaaagaaaaattaaaaaattgaaccctatcatactgtgtataagygccctgataattataaatacgggctcctatgggagctgtagaagggagcagctaactttgcagagggagggaagataacagaaaagaagtgctacctaca

SEQ ID NO: 391153 - DNA, 201 bp, Homo sapiens
ctccagaactgcaagagataaatgttgtttaagccacccatctgtactattttgttatagcagctcaaacacacacacatacacacacacacacacaatcyaaaaatttgaaatccaaaatgctccaaaatctgtaactttttaagcaccaggacaccacaagtggaaaatactacacataagtacttaacacaaactttg

SEQ ID NO: 391154 - DNA, 201 bp, Homo sapiens
gccactgcactccagcctgggagacagagcaggaccctgtctctaaagaaaaattaaaaaattgaaccctatcatactgtgtataagtgccctgataattrtaaatacgggctcctatgggagctgtagaagggagcagctaactttgcagagggagggaagataacagaaaagaagtgctacctacactgagtcttgaag

SEQ ID NO: 391155 - DNA, 201 bp, Homo sapiens
tgtatttttaataaaaattccagctatccaaatgaaacccatgctataaatgttgtctgagcccacagttctttgaactaataaagcatcataaatagccwtaacacttctaattttttctcactttatttctagatcatgagggtcgcattggcatggcctccatcaaaatgaaagaaaaccatgaatttgatggaaaga

SEQ ID NO: 391156 - DNA, 201 bp, Homo sapiens
gctaactttgcagagggagggaagataacagaaaagaagtgctacctacactgagtcttgaaggataagcaggagtgttccaggtgaccagggggtgagaraccatgaaacaacctgggcaaaagtaatgagacgtgagcatacaggtaccttcagggattttccatagatcaatgtggttagaggaaagagggcaagagg

SEQ ID NO: 391157 - DNA, 201 bp, Homo sapiens
ctgattacctacctagttatgcaaggccccggtttctaagaatacaggtgagatctcttattatccagttcaatgatctgtcctcttggagattcctaccwcttagggaacaactcgccttctcccaggatgactacatttgccaagttttcaccgcactttccaggaagctcagaaaagtgtcatagaccaataaggaag

SEQ ID NO: 391158 - DNA, 201 bp, Homo sapiens
ccagcactttgggaggccaaggcaggaggattgcttgaggccaggagttcaagaccagcctgggcaacatagcaaacctcatctctaaaaaaaaaaaatawatatatatatatatatagccaggcatggtggctcaagtctgtagtcccagctacccaggaggctgaagtagaagaattgcttgagtccaagagttcaaga

SEQ ID NO: 391159 - DNA, 201 bp, Homo sapiens
gagccaagatcacactactgcattccagccggggtgacagagtgagactgtctagataggtagatagatagatagataaatagatagatagatagatagayagatagatagatagatagatagatagatgcatacaaacatacatacatacatacatacataatggatagataatgtctgttgaattaatgggttccatta

SEQ ID NO: 391160 - DNA, 201 bp, Homo sapiens
gcttacttacctctcaaaggtcctcctaatcaatgactctgtccagctctctggcagtacatggtaggacagcggtgctctccttgggtctcagtgcagcwagtaagcaggtggtgagcacaggatgggctggaaaggacctgtgagtagggtggtggaggaccctgtacaaggacagaaacccagacaccaaatgattaa

SEQ ID NO: 391161 - DNA, 201 bp, Homo sapiens
ccgggcatggtgacagccgcctgtaatcccagctactcgggaggctgaggcaggagagccgcttgaacccaggaggcagagattgcagtgagttgagatcrcgccattgcactccagcctgggtgacagagtgagactccatctcaaaaaaaaaaaaaagaaaaaagaaaatatgtaggcccaaacatatctacaaaagac

SEQ ID NO: 391162 - DNA, 201 bp, Homo sapiens
ttcgtgtgatagatatttagtgtctgcctactacaggccaggaagaccaaaatgtaataatatgaagcctgagggatatatttaaaagaaggacaggaagmcagccccagcatgccaattattattattaatattggaaaattgaatctatgagtcttttacctctgttgattaaaattttaatttaatttaagcaggtaa

SEQ ID NO: 391163 - DNA, 201 bp, Homo sapiens
tccacactaatatcatattttgtgcaaaattttttcaattataaacatttattgagcacttatctagtagttctgggggtacaaagatgatttgattattrtcttaatttcaaagatctccctgtctaatagaggagaaaatgaattaaaccacatccgccaggcatggtggctcacacctgtaatcccagcactttgaaa

SEQ ID NO: 391164 - DNA, 201 bp, Homo sapiens
tgtttccttgaatcgcaaataatgatcttttaggaccacctgttgtggaagctgataatgtgctaggttctgtgttaagcactctacaggcagtgtggttkttaatcctcacaatgggtaggctttgttataggacttttatagatgagaccactgaggtcctgagaggtgaagcctcatgcccagctatctatctccaaa

SEQ ID NO: 391165 - DNA, 201 bp, Homo sapiens
tcaggcttagtcagtcccagctgatcttcatctccaccgtctgctcatctttcaggtctcagtttacagggcacttcttctaggtcgtctttctgcccccmaccacctgctccccaaataccttttccttcccctgttgtgacacctgtggcaatttattttgatttttgtttgtttgtttctcctctattagacctgggc

SEQ ID NO: 391166 - DNA, 201 bp, Homo sapiens
aagcgataacttcactactttgtaactagaagactctcctaagcctattactttaccagcttgcttggagggaaattattaacacagtgatctttgtaccrcttcaggaagcatttaaattctgtttatcactttagtatcccaggtcccctgagagggaggtcacagggtttggagttttgttgacaaagaagttcagga

SEQ ID NO: 391167 - DNA, 201 bp, Homo sapiens
acagaataaaaaaaagacaagtttaaaggtggctaaattatttggaagagatggtcctttcaagaaaattcccattaatttctagctgcctgagaaaagcrataacttcactactttgtaactagaagactctcctaagcctattactttaccagcttgcttggagggaaattattaacacagtgatctttgtaccacttc

SEQ ID NO: 391168 - DNA, 201 bp, Homo sapiens
aacagaataaaaaaaagacaagtttaaaggtggctaaattatttggaagagatggtcctttcaagaaaattcccattaatttctagctgcctgagaaaagygataacttcactactttgtaactagaagactctcctaagcctattactttaccagcttgcttggagggaaattattaacacagtgatctttgtaccactt

SEQ ID NO: 391169 - DNA, 201 bp, Homo sapiens
aggcagtgtggtttttaatcctcacaatgggtaggctttgttataggacttttatagatgagaccactgaggtcctgagaggtgaagcctcatgcccagcyatctatctccaaattccaagctcttaatcaatacttataacatctgcattaaaatgcagaggatcttgagtgcgaactctagtggatccagaggggctct

SEQ ID NO: 391170 - DNA, 201 bp, Homo sapiens
ttgggaggttgaggtgggcgaatcacttgaggtcaggagtttgagactagcctggtcaacgtggcaaaaccccatcccttcttaaaaaatacaaaaattarccaggcatgatggtgtccacctgtaatcccagctacttagaggctgaggcacgagaacccacaaggcagaggttgcagtgagccaagatttcaccactga

SEQ ID NO: 391171 - DNA, 201 bp, Homo sapiens
ggccaagggggacagatcacgaggtcaggagattgagaccatcctggctaacacagtgaaaccccttctctactaaaaatacaaaaaatttgccaggtgtkgtggcacgcgcctgtaatcccagctactcaggaggctgaggcaggagaatcacttgaacctggggggcgggtgttgcagtgagtcgagatggcaccactg

SEQ ID NO: 391172 - DNA, 201 bp, Homo sapiens; identical to SEQ ID NO: 85756

SEQ ID NO: 391173 - DNA, 201 bp, Homo sapiens
attattatgatgatgattatttcctgcctttttacttgttttcacatcttactccccacctagcatatcctgcatttccccctctgcttactaaaagccaktgtcaaagcccagttcaaatgatacctcatacattaaacctatttgggtcactccaacaaaagtcattactcttctcccctacgtcattttatttctacc

SEQ ID NO: 391174 - DNA, 201 bp, Homo sapiens
tgacacatcataggcatcaacagattttgtggactgaacctctaaatccttgcccctgaaaaatgtgtagttgagttgagggagctaaaatgtttccccaraatgtttgggcttagcacatattattctgattttttggcatattcaatagattctcgaggatcatcattagcagtgagttgggttagggtattttccaca

SEQ ID NO: 391175 - DNA, 201 bp, Homo sapiens
gatccctgctttaggactgacggactcactcttcagctgctgggagctctcagctgagacctctcccaggacttctccttggttgaagagagacactttgsccaaggttaagcaccaccaccccagcctgagtccattggactggtcaatgggcaggtgtgaaggcacagcctacctcccttaatttaggaggtaactctg

SEQ ID NO: 391176 - DNA, 201 bp, Homo sapiens
cagttctgttcatgtcattattgaatttttttcacattaatattccacgtggcctccaagatagcatgtctctctattaaaatccagaaatccatatgggrcccttctgctgggcttttcttctctaccttaaaggcactcctttgtcagttagaaaatctcctggggagtgtgtgttgtttctgtatgttctaatgggag

SEQ ID NO: 391177 - DNA, 201 bp, Homo sapiens
aagccatgactaaagggccttacatggaagagcaatgtgggagatggcatttttagacagtccttttggctacgatgtgagaatacacagaaggatgaagrgcctcttctgtaaagcaaacaggtggagccttgtccaggcagaagtgtaacatattaattattaagaacagggactctggagtttttctaaggtgataaa

SEQ ID NO: 391178 - DNA, 201 bp, Homo sapiens
acactccatttatgtatgtgtatggctgcttttgactacaatagcagagttcagttgttgcaacagagattgtatgacccacaatcccaaaacatttactmcctggtcctttatagaaaacatttgtcaactcctggactaactggtcatggcccttcccagtgcaattctcaaaatacagggtgatgaatcttcctaagc

SEQ ID NO: 391179 - DNA, 201 bp, Homo sapiens
ctgaatgagcattgggtcaaaaacaaaatcaagacagaaatgaaaaaattcttcaaactgaacgacaataatgacacaacccatcaaaacctctgggatamaacaaaggcggtgctaagaggaatcttcatagccctaaacgcctgtaacaaaaacactgaaagagcacaaacagacaatctaaggtcacacctcaagaaa

SEQ ID NO: 391180 - DNA, 201 bp, Homo sapiens
agttaatcactctcatctgaggttgagtaggggatgggatagcaaagctactgacttaagtgatttttaaaatattatagtgaatattttctattttgccrtcttcccgcattgtatttgggcctttgctttcaaagcgactgtttgtaatgaaaggccattctgattcatttcttgcagtgtatggttgtcagctcccat

SEQ ID NO: 391181 - DNA, 201 bp, Homo sapiens
tgaaaaaattcttcaaactgaacgacaataatgacacaacccatcaaaacctctgggatacaacaaaggcggtgctaagaggaatcttcatagccctaaaygcctgtaacaaaaacactgaaagagcacaaacagacaatctaaggtcacacctcaagaaactagagaaacaagaacaaaccaaacccaaacccagcagaa

SEQ ID NO: 391182 - DNA, 201 bp, Homo sapiens
ttttatccttggggcggcagtgggagggggtggtctctgaatactgacagtccttatggaagaggatagtgccttgtgggcagggtgaccctacaattcaktatccaaacagggacacttgagagtgaaggtaatgaaagataaccagcattccaggacacgtatagccagggcttgccctggcaaaccagacatatgatc

SEQ ID NO: 391183 - DNA, 201 bp, Homo sapiens
cttgctttcctcgtgtcttgaccatagcacgtggccagctcacactttatcttgagtaagtctaaaagctcttctttggtttcccaggtgtatgaagcttrtggtcaaacagaatgcacaggtggctgtacatttacattacctggggactggacatcaggtaagtcctccatctgctgggcaggaggtgccatggttggg

SEQ ID NO: 391184 - DNA, 201 bp, Homo sapiens
  misc_feature (1)...(201): n = A,T,C or G
tctacactatatgcagttcaaggcatctcagatctacacagtgtaccgcctatacagctgtctgtggtagtcctgggaggaggtagttttaaaatctccantggaattgaaagttggcattaatctcatgttgcctcctcttacttccctggcctacatagcatgcttatgagcccactcctgatgatgtggccatatcct

SEQ ID NO: 391185 - DNA, 201 bp, Homo sapiens
ctgcttaattcctaagtacttccttcccaatgcccactccctgagggtcctaaggtgaatctcaaagaccctcagggagtaagcactggaaagggactctaccactggagaccctcagggaataagcactggaaagggactctaccaccggagaccctcagggaataagcactggaaagggactctaccaccggagaccct

SEQ ID NO: 391186 - DNA, 201 bp, Homo sapiens
gtgctgcttaattcctaagtacttccttcccaatgcccactccctgagggtcctaaggtgaatctcaaagaccctcagggagtaagcactggaaagggactctaccactggagaccctcagggaataagcactggaaagggactctaccaccggagaccctcagggaataagcactggaaagggactctaccaccggagac

SEQ ID NO: 391187 - DNA, 201 bp, Homo sapiens
acaggcatgagccaccgccccctccaagttcaaggttttaagacactaagtggtctcgaacccttagagaccttgctttcctcgtgtcttgaccatagcaygtggccagctcacactttatcttgagtaagtctaaaagctcttctttggtttcccaggtgtatgaagcttatggtcaaacagaatgcacaggtggctgta

SEQ ID NO: 391188 - DNA, 201 bp, Homo sapiens
tctttaactttttgttttccccacttccgaccccggcgttgatctgcatcctgacatttggagctgccatcttcttgtggctgatcaccagacctcaaccygtcttacctcttcttgacctgaacaatcagtctgtgggaattgaggtaatttaccagtcatccttttagtttgtcaaccttcctcaaactcaaactgtaa

SEQ ID NO: 391189 - DNA, 201 bp, Homo sapiens
ggcggagcttgcagtgagccaagatcacaccactgcactccagcctgggggacagagcgagtctctgtctcaaaaaaaaaaaaaaaaaaaaaaaaaaaaawatatatatatatatatatatatatataggctggaagtcatgagatttgtgttctggttgcagctcttccatggatcaacaatataaaattctgagaaagt

SEQ ID NO: 391190 - DNA, 201 bp, Homo sapiens
tttctcagctgattcagcacggtatgttctaggtcacgttggggtgcccctggcttgcaattacgtgaagctggaagatgtggctgacatgaactactttrcagtgaataatgaaggagaggtgggtaggtcatgccctgtggtcagacagtcatggtggggaggtttatatcagaaagagcaaataattgtaagcaaact

SEQ ID NO: 391191 - DNA, 201 bp, Homo sapiens
gtctcgaactcctgacctcaagtgatcaccctacctcagcctcccaaattgttagtctttcttcttgatcttctaactgccccatcgtggcagttgggaamcctcatcaagttgctcatgtgtccttttgacaatacccctgtagcctctgatagcttccttggtttctggcacaagatgtctcaacctcatcttgtatat

SEQ ID NO: 391192 - DNA, 201 bp, Homo sapiens
gggtgcccctggcttgcaattacgtgaagctggaagatgtggctgacatgaactactttacagtgaataatgaaggagaggtgggtaggtcatgccctgtsgtcagacagtcatggtggggaggtttatatcagaaagagcaaataattgtaagcaaacttggatttggcccctttgagattgttagcaaagaattaagca

SEQ ID NO: 391193 - DNA, 201 bp, Homo sapiens
gtttatatcagaaagagcaaataattgtaagcaaacttggatttggcccctttgagattgttagcaaagaattaagcattctgaacttcactttcctatcscctatagtggagacttagatctggtgctcttcacagtgtagtggaagccatcaaatgatttaaggggagcaggtgtttcataaactgcccacgctgggag

SEQ ID NO: 391194 - DNA, 201 bp, Homo sapiens
agacacaggaagccctggacagtgatggctggcttcacacaggagacattggtcgctggctcccggtaggtatatcatcagaactcctggaagtctatgcyaatggactgagaagaacaatctgcttatagcaagaggtgcagaaatgcaagtaggttaatcagctgaggcagctggaggggattaggtttgtaccctacc

SEQ ID NO: 391195 - DNA, 201 bp, Homo sapiens
tccctcatttgcagccaagcttggggtgaagggctcctttgaggaactgtgccaaaaccaagtaagtcttgcctaggaaagctttatgcacacccatgggyccatcgtggaggagaggatgcctcaccagttcctgcatctgtcacaagtggctgcagcccaaacagactgaatagttttatgggactcggggataggatg

SEQ ID NO: 391196 - DNA, 201 bp, Homo sapiens
tggggtgaagggctcctttgaggaactgtgccaaaaccaagtaagtcttgcctaggaaagctttatgcacacccatgggcccatcgtggaggagaggatgmctcaccagttcctgcatctgtcacaagtggctgcagcccaaacagactgaatagttttatgggactcggggataggatggagagtttaaaaaataaaact

SEQ ID NO: 391197 - DNA, 201 bp, Homo sapiens
attctcccttctccctactcattactttcttaaattatgtttgtgggaatgggcatgtgttactgttacctttaccctttcactgcatcaacctcactttyttcacagagcactcagggggctctgcagagaagtccaaatcactaatgagcatggatgtgtgtgtgttcatcttccaggtcaaagccatttttcttcatc

SEQ ID NO: 391198 - DNA, 201 bp, Homo sapiens
ccgcccccaccaacccaccactctcttgatttgacaccgctggaatggtttcattcaatcaagataactcagtgatagttctccataaagggcttcaaccycaccctacatccacccatctgttagaatgcttaatagtttttaatgtggtccatcatggtctacagttatattctttctagtatgcccagtttataaggt

SEQ ID NO: 391199 - DNA, 201 bp, Homo sapiens
accaccacctctcatgcctttcctttcccaccagagttctttgagagtagtttgcttatcgatttcctcttctgaacttcaacccactgagatctgacctyttaccactaccatctcctccaaagtgctctgaatcactcataacctaacttctaaattcagtgacttctctttcagctttcctctcaattgacttgagac

SEQ ID NO: 391200 - DNA, 201 bp, Homo sapiens
ccaacattaaaaaggcagtcatttctcaaaattgtttgggaaatgattaacttgtttcctttgatcctccctgctctgtgtgaggacagtcaagtagcagrggtggagaatgtgttctattattttcaacagtgctaagtaaacactgggggaaattctgccactagagaggtacaactgtgtttgagggtttgaaggcgt

SEQ ID NO: 391201 - DNA, 201 bp, Homo sapiens
agaaaaaatgaattgtcgttttgtaggttttcatagagaagtagcaatagggaatgatgggtgaatttggacaagtcactttatcccaaagcgtccatttrctcttctgtgaaatactactttatagtgttgtttggcctaaattaaacaaaccatgcaaaaagcccagccctgtgcctggcatacagtgagtgctcatgt

SEQ ID NO: 391202 - DNA, 201 bp, Homo sapiens
gtgtgtgagtctagtgacatcacagctaggagcttactatctatctgcccttaattctgagctgacacaagacattgtcttctttttaaattttattttgkttagaatttttgaaaagatctaggattagagaaaaggaagttccctacagaggatcagggaaggagcatttgatctacataaggtgtgagatgtcccccg

SEQ ID NO: 391203 - DNA, 201 bp, Homo sapiens
cacatgaaatgccaccaaccaaggtggtagaactttctaaattagctgcctgtgttggaggtgggattatatggagctgttcattttattcttttttttttgtaagtgtgcatatttcagattaaacagtacacatcaagtgttaccttcccactgagactacgctacgcctccctaattaaaactcatccaccaggcgcg

SEQ ID NO: 391204 - DNA, 201 bp, Homo sapiens
cttgagccctggaggcggaggttgcagtgagccaagatcgtaccactgcactccagcctgggtgacagagtgagactgtctcaaaaaaaaaaaaaaaaaaagaggccgggtgcggtggctcacacctgtaatcccagcactttgggaggtcgaggtgggtggatcacgaggtcaggagtttgagaccagactggccaatat

SEQ ID NO: 391205 - DNA, 201 bp, Homo sapiens
aggttaagtctcaggtgctgcttaattcctaagtacttccttcccaatgcccactccctgagggtcctaaggtgaatctcaaagaccctcagggagtaagcactggaaagggactctaccactggagaccctcagggaataagcactggaaagggactctaccaccggagaccctcagggaataagcactggaaagggact

SEQ ID NO: 391206 - DNA, 201 bp, Homo sapiens
gcaactgtatattagtctgctagaactgccataatctaatacacagaccatgtggcttaaacaacagaaatttattttctcacagttctggagtctaggawtccaaggtcagagtgtcagcaggtttagcttctcccgaggcctctctccttgacttgtagacagccactttttcattttgtcttcacacggccttttctc

SEQ ID NO: 391207 - DNA, 201 bp, Homo sapiens
ttgttcatatgttgttgttgttgtacattttttatttttcagagatagttattgtataatataatacctaatacacagttcacttctggaatgtatttttkttttgttttgtttttgtttttgagacggagtctcgctctgtcgcccaggctggagtgcagtggcacgatctcggctcactgcaagctccacctcccgggt

SEQ ID NO: 391208 - DNA, 201 bp, Homo sapiens
tggcctaaacttggtcttgtgtcttagggaggagcacggaagggggtttcccagaagaacaatgacctaacaagttgctgcttctcagatgccaagactaygtatgaggttttccaaagaggactcgctgtgtctggtaagcctggtggtctgtccttgcctgaagaagacaaggtgaggtctgtggcccatctctctttc

SEQ ID NO: 391209 - DNA, 201 bp, Homo sapiens
ccagctatttagatgcagtgatccaagtagaatcgcaacatgcaaaatagaggcaacattagaacatagtattaggatgggcgttggaaccagtgtcagamggacttaggtttgaaacctggttcttccatttccagcttcataaccttgtgcagaccactttgcttctctgaatctgtttctcaacacaagaagaacgtc

SEQ ID NO: 391210 - DNA, 201 bp, Homo sapiens
ctgaaatttagcttgcagctccaatgcttgtccaacaccttgggcaacttgcaagataccttcccaagaggacagtgttcttgttctccaggggtggcacrtgaggagtagattagactcatgctgtgaagctctgagaataatttccacaagacaactttgaaactcatgccaggagaggacaaagttctgtggccagct

SEQ ID NO: 391211 - DNA, 201 bp, Homo sapiens
gaaaacttttaaaacctcttccttcttgcaaggcaatcaggtacttagcagagagagggaatgacctctggttctattttggcttccagctgatatcgccrtggtgatctgtgacacaccccaaaaggcattggtgctgatagggaatgtagagaaaggcttcaccccgagcctgaaggtgatcatccttatggacccctt

SEQ ID NO: 391212 - DNA, 201 bp, Homo sapiens
aaaagacacagtgacaggaaatgctcttggccttctggaataaaaccaattgaatctagtttctttcaaggccaaaggctacctattagctacataaagtrtctttctctccacctcttatttcctacaggtgaccccaaaggagccatgataacccatcaaaatattgtttcaaatgctgctgcctttctcaaatgtgtg

SEQ ID NO: 391213 - DNA, 201 bp, Homo sapiens
cacacacacacacatacacacacacacacacacacgttaaaggctggagtgtggacaaacaccagcgtgttctttgtttagaggactgtacattttcaagygttggtcttttaggatcactgcaaatttctacactatatgcagttcaaggcatctcagatctacacagtgtaccgcctatacagctgtctgtggtagtcc

SEQ ID NO: 391214 - DNA, 201 bp, Homo sapiens
aattctgtgcacctcctacttgagttggatacctggtcagtggtagcaaactaagcaagctatttccattgacaaatacaaataaatccttccttcattgkcttcctcaaataaaatcccttgccaatataggcaaggtattttcattctcatgaaactgtggctttgaaatgtgtaaatatctcccttgtttgtaatgaa

SEQ ID NO: 391215 - DNA, 201 bp, Homo sapiens
ggccaaggtgggaggaccgcttgagcccaggagtttgaaaccagcctgggcagcatggtgaggctgtgtctttacaaaaaattaaagaattggccaggtayggtggctcacacctgtaatcccagcattttgggaggccaaggcaggcggatcacgaggtcaggagatcgagaccatcctggccaacatagtgaaaccccg

SEQ ID NO: 391216 - DNA, 201 bp, Homo sapiens
tttttcccccttgtttctttgaacttacttggaagtgttaacagattctaatggttagaatggtaaacagagcttcctactcctgtcgtggtttgacccakgagtctcaccttctctcaggcccttagtttcttccacttaaacagtgagagagttacatgatatggttgcaaatcctctcagcgctaatcttgtaaggtt

SEQ ID NO: 391217 - DNA, 201 bp, Homo sapiens
actgcttacaggggattctgtggagtgactaaaccagagctgtagtttgagtcacacaggacgtgtgacaaaaggagggtgacttttttcccccttgtttmtttgaacttacttggaagtgttaacagattctaatggttagaatggtaaacagagcttcctactcctgtcgtggtttgacccaggagtctcaccttctct

SEQ ID NO: 391218 - DNA, 201 bp, Homo sapiens
gggacatcctggtgtgtactggggcttgttcagctatttgtatattacgtgaaacaggaaatcccagacacagcatgacagagccctctttcctcttttcyttaccactattgtgcttttccctaccgtaaccaggagtgatgttaaaaggaagaggaaatgccagtcacgcccactgcttacaggggattctgtggagtg

SEQ ID NO: 391219 - DNA, 201 bp, Homo sapiens
cctaagaaagccttcattagggttgcattaaatgtatagatacctttaaggtgacaggaaccttgaatatttcaggtatgtctttccatttttctagcctycttaggtacttcagatctaaacttttaaaatataggttttacgcatttattcttatatacactattgtgaatagcatctttttcatgacttctaaatcag

SEQ ID NO: 391220 - DNA, 201 bp, Homo sapiens
tcctaagaaagccttcattagggttgcattaaatgtatagatacctttaaggtgacaggaaccttgaatatttcaggtatgtctttccatttttctagccktcttaggtacttcagatctaaacttttaaaatataggttttacgcatttattcttatatacactattgtgaatagcatctttttcatgacttctaaatca

SEQ ID NO: 391221 - DNA, 201 bp, Homo sapiens
accaggagctcaagaccagcctggacaacatggcgaaatcctgtctctactaaaaatacaaaaattagccaggcacacacctgtaatcccagctacttggkaggctgaggcatgagaatcgcttgaacccaggaggcagaggttgcagtgagccgagatcacaccactgcattccagcctgggcaacagagcaagactctg

SEQ ID NO: 391222 - DNA, 201 bp, Homo sapiens
atctgtcttatctgtcatgccaccacaacagaaataaatgtccatcctttcttgggggaaggttctcagagtcctgaattgggagggaggtgctgtgcaaraaaagtgtctgtgtgcctcagcccacttcccaaattccttccaagacaggtccccactgaaggggttgtttgcctcagcccacctcctgaattccttcca

SEQ ID NO: 391223 - DNA, 201 bp, Homo sapiens
caccacctctcggcggagatgataagaaggaccttccccactgggtgccatggctcatgcctgtaatcccagaactttaggaggctgaggcaggtggatcrcttcagcccaggagttcaagcccaggctgggcaacttagggagaccccatctctacaaaaaacttaaaaacaaaaaacaaaaaacaaaagccgagtgtgg

SEQ ID NO: 391224 - DNA, 201 bp, Homo sapiens
cttctcatggcatgaagcccctggctgtggcattcctgaggaagactccgccgaccctgtcctgctgtgtgcatagaagcatgttctgttccttgtgggaytgaacactgcaaactttccttcagcagactctcctcgctagttgcctttctctcaaattgtgccaatggtgagtaaaaggtgaaggtggcttggtaacag

SEQ ID NO: 391225 - DNA, 201 bp, Homo sapiens
gtctctactaaaaatacaaaaaaattagctgggcgtggtggtgggcgcctgtagtcccagctactcgggaggctgaggcgggagaatggcgtgaacccggsaggtggagcttgcagtgagctgagattgcgccactgcactccagcctgggcaacagagcaagactccatctcaaaaaaataaaaataaaaaaaatacttg

SEQ ID NO: 391226 - DNA, 201 bp, Homo sapiens
ctggaactctctctctcctttctttctttctttttctttctttctctctctttctttctttctttctttctttctttctttctttctttctttcttccttycttccttcctttctttctttctttttctttctttccttctttctttctttccttttctttctttctttccttctttccttcctcccaccttctctttctt

SEQ ID NO: 391227 - DNA, 201 bp, Homo sapiens
tcacagagtaatacaggttgagtatctccctatttgaaatgcttgggactaaaagtgttttgaattttgcatttttttccaattttgtaatgtttgcattrtaaaacagttgagcattctgaatctgaaaatccaaaatctgaaatgctccaaaaagcatttccttggaacatcatgttggcactcaaaaagttttggatt

SEQ ID NO: 391228 - DNA, 201 bp, Homo sapiens
cttcctggaactctctctctcctttctttctttctttttctttctttctctctctttctttctttctttctttctttctttctttctttctttctttcttycttccttccttcctttctttctttctttttctttctttccttctttctttctttccttttctttctttctttccttctttccttcctcccaccttctctt

SEQ ID NO: 391229 - DNA, 201 bp, Homo sapiens
tttttccaattttgtaatgtttgcattataaaacagttgagcattctgaatctgaaaatccaaaatctgaaatgctccaaaaagcatttccttggaacatyatgttggcactcaaaaagttttggattttggaacattttggatttcaaacatttggattagaatagtcaacctgtaatattaacttttgtcatgttggaa

SEQ ID NO: 391230 - DNA, 201 bp, Homo sapiens
ccaggaggcggaggttgcagtgagctgagatctcgccactgcactccagcctgggtgacaagagtgaaactccatctcaaaaaaaagaaaaaaaaaaaaaagagatgagggcttgttaaaacctttgcacagaagtggaggggcagtaatcgttcaagaccgtggtcatctcttttcttttgggacatctcgtaatagaac

SEQ ID NO: 391231 - DNA, 201 bp, Homo sapiens
ggggtttcaccatgttggccaggctggtctcaaactcctgatctcaggtgatcctcccgcctcggcctcccaaagtgctgggattacaggcatgagccacygccccctccaagttcaaggttttaagacactaagtggtctcgaacccttagagaccttgctttcctcgtgtcttgaccatagcacgtggccagctcacac

SEQ ID NO: 391232 - DNA, 201 bp, Homo sapiens
ctctgctagcatttttatcaatcaagaggtgataagatgcagtataattccttcctggaactctctctctcctttctttctttctttttctttctttctctctctttctttctttctttctttctttctttctttctttctttctttcttccttccttccttcctttctttctttctttttctttctttccttctttcttt

SEQ ID NO: 391233 - DNA, 201 bp, Homo sapiens
attggtgccaggtgatttttcagtcttcctcttctagagtcaattcataaatatcttagaaatgtgcctggaattatcaccatgcaagagtttctcagctrattcagcacggtatgttctaggtcacgttggggtgcccctggcttgcaattacgtgaagctggaagatgtggctgacatgaactactttacagtgaataa

SEQ ID NO: 391234 - DNA, 201 bp, Homo sapiens
cttgcctaggaaagctttatgcacacccatgggcccatcgtggaggagaggatgcctcaccagttcctgcatctgtcacaagtggctgcagcccaaacagrctgaatagttttatgggactcggggataggatggagagtttaaaaaataaaactctcttttctatttaaaataatatgttcattgtgggaaaagattggg

SEQ ID NO: 391235 - DNA, 201 bp, Homo sapiens
attgatatttaaggcccatcactagcagattcctacctacctttccagttttatttcctgtagtcttcaagcttgctaatgtgtatccacacaatgatgtyatgctgtctgtattagttcgttatcacactgttacgaagaaatacctgagactgggtaatttataaaggaaagaggtttaattgactcacagttctgcag

SEQ ID NO: 391236 - DNA, 201 bp, Homo sapiens
cgtgaacccgggaggtggagcttgcagtgagtcgagattgtaccactgcactccagcctgggtgacagagcgagattctgtctcaaaaaaaaaaaaaaaaattaaagaattaactgggtgtggtggcacacacctgtagtcccagttattcaggagcctgaggtgggaggttcacttgagcccacgaggttgaggctgcag

SEQ ID NO: 391237 - DNA, 201 bp, Homo sapiens
cacagaggattgataggaatacaactctgatgggcctttagaatgactcaaccttcctgaacttgagcatttttactggaggaggtcaataaaaaaaaaaataaataaaacctcatcttcccctggccctgagccctttggtgaaggaagacagcacccggtgaagggctcagaggtattagtgtggctgagattcgacac

SEQ ID NO: 391238 - DNA, 201 bp, Homo sapiens
gttttgtgtagcatttcctaaatgtttcaactatagtttataggactcttcatttttgaggactcagtgctttctgactttgaatttcctggacatataakagaagctcaaatccttgttggacttaccctttgtgtcttgccccttcttaatctccttttagcttccttggtccagagaatttgcaactggagttgattt

SEQ ID NO: 391239 - DNA, 201 bp, Homo sapiens
ccatatggatggctttctctgaatgtctacattatcatggaggttacatattcaacactgaaccactcctgttttgtgtagcatttcctaaatgtttcaastatagtttataggactcttcatttttgaggactcagtgctttctgactttgaatttcctggacatataatagaagctcaaatccttgttggacttaccct

SEQ ID NO: 391240 - DNA, 201 bp, Homo sapiens
gatgcccacacaacaggcttattttctgtgaaggaaccaactgatctcccccacccttggattagagttcctgctctaccttacccacagataacacatgytgtttctacttgtaaatgtaaagtctttaaaataaactattacagatacttacgttgtggtgtttctttcctcatggaccatgatgaaaatcagtcttaa

SEQ ID NO: 391241 - DNA, 201 bp, Homo sapiens
ggtgtttggacttctcttttttctcagcctatcatgtgttttttgaagtcagtctgattgttacatgaggaaaataaggaagctaggagggaccgccaaataagatcttgaagatattgtggaaagtatgtattagtattagaactgaaacttgcaatttgtaattgaactagtaaattcagccattcattgctactgagt

SEQ ID NO: 391242 - DNA, 201 bp, Homo sapiens
aacgtgatggcccatgtaaattttccctgatgtcctagactaagtcagatctcttgttacatcctcgtgtgttttcctgtacttttatagctctcactttkgatactaatttacattgttgaatgcttatttaattgttgcctgttcttctctacacgaaacttcatgagagttggaccactggaccacacccgcagcacc

SEQ ID NO: 391243 - DNA, 201 bp, Homo sapiens
gaggtctgtggcccatctctctttctctgtctcacttctaaaaccccagctatttagatgcagtgatccaagtagaatcgcaacatgcaaaatagaggcarcattagaacatagtattaggatgggcgttggaaccagtgtcagacggacttaggtttgaaacctggttcttccatttccagcttcataaccttgtgcaga

SEQ ID NO: 391244 - DNA, 201 bp, Homo sapiens
gctttaattggcagtgctttcttagtgccacataatgaattgcgtcttacaaaggatgattatcttagactgtcacacagacctgtggtggagtctgggggaccacacagtctcaatatctgtcttatctgtcatgccaccacaacagaaataaatgtccatcctttcttgggggaaggttctcagagtcctgaattggga

SEQ ID NO: 391245 - DNA, 201 bp, Homo sapiens
tatcattgaacataatgcctggcacacacacgtttacttttaaaagctgctggcttatagctctttctgtgcctttggtcttttgggtgacattctggccrtgtaacttttatccgtcccttgacttctgcatgttaactaagactaagagcatattcatagccaactcctgtcaagtgttaactatacaatagctactgc

SEQ ID NO: 391246 - DNA, 201 bp, Homo sapiens
gctgggtacagtggctcacacttgtaatcccagcactttgggaggccaaggcaggtagatcacttgaagtcagagttcgagaccagcctggccaacatggkgaaaccccctctactaaaaatacaaaaattagccggatgtgatgatgcatgcttgttgtaatcccagctactcgggaggctgaggcaggagaatcgcttg

SEQ ID NO: 391247 - DNA, 201 bp, Homo sapiens
agaactagaaaatgtcagagctgataggaaaatctaagtgtgtctgtttgacttggttgttctattttaggttagctcgtaagtgttttataaaagtagtyactcctccagacaatgaaagatttattgtcaagaaaacatctatctgaagagtccgatggggcctgtacttagtatatctggctccaaatcagcatttac

SEQ ID NO: 391248 - DNA, 201 bp, Homo sapiens
ttaccccagttctgtcataatatacttggtcagcagcaggcctgggatgccctttgggggtgttactgacacaagttgtcccggggtcgggatttggactrtgactcacttgaagcccagtggtggatcaaggttgactctatcgacctgagctcctgtgggatttgtcacttctggggtcacatcctgtgggtgactcaa

SEQ ID NO: 391249 - DNA, 201 bp, Homo sapiens
ttggttgttctattttaggttagctcgtaagtgttttataaaagtagtcactcctccagacaatgaaagatttattgtcaagaaaacatctatctgaagastccgatggggcctgtacttagtatatctggctccaaatcagcatttacttatagacttcatgcaaataacaaataaaaacaaaccaaacatcagtttctt

SEQ ID NO: 391250 - DNA, 201 bp, Homo sapiens
acactttgggaggccgaggcaggcagatcacttgaaatcaggagtttgagaccagcctggccaacatggtgaaaccccatctctgctaaaaatacaaaagytagctgggcgtggtggcagctgcctgtaatcccagctactcgggaggctgaggcaggagaatcgcttgaacccaggaggcggaggttgcagtgagctgag

SEQ ID NO: 391251 - DNA, 201 bp, Homo sapiens
caacttgtcctccctggcgcagggcctgacacttcctaggttctcaactcattgtttgaataaatacatgagatctggagtttggaaggtcagacagcccrtgcaatgctgtggtcaggccacactattagccttctttggggaagctggtggatctcccagtcttcatgggccattctattctaagagttgtgaggttgc

SEQ ID NO: 391252 - DNA, 201 bp, Homo sapiens
gaggcctgagcccgctccctcagcttgtggggaggtgtggagggagaggcgtgggcggaaccggggctgcgcatggtgcttgcgggccagcccgagttccrggtgggtgtgggctccgcgggccctgcactcagagcggccggctggccctgccggccccaggcaatgaggggcttagcaccccggccagcggctgcagag

SEQ ID NO: 391253 - DNA, 201 bp, Homo sapiens
tgtgagggtgtgacagaggccaagggggcatcctgacccccgactttctttaagcgacttagaatcaagggccggctgagttccacgggcacatcatgctstctccctcctggtctcggtcatgccttcagaccctgtgtcaggaggagcaacgggaaggaaggatgtggggcatgcatggggctcactttccttctctcg

SEQ ID NO: 391254 - DNA, 201 bp, Homo sapiens
ttagactcatgctgtgaagctctgagaataatttccacaagacaactttgaaactcatgccaggagaggacaaagttctgtggccagctgtatggacttckaagtggataatatataaataggggtttagtaatagttaaaggatgtggctcctggagccaggctgcttgggttcgcatgccagctccacatctgttaggc

SEQ ID NO: 391255 - DNA, 201 bp, Homo sapiens
ttcgacacccactctgccatcctctgctctcctctagaggaagttgcctcttggggagctgagttcctgaaactaagcaaatgacaagtgctcctccagcygtgagatgagccagaggatggaatgccacaggccccacttcgtctcccagcccttcatctttcttccatgtccaaaggcggctccccagaggccaagggc

SEQ ID NO: 391256 - DNA, 201 bp, Homo sapiens
acagaggattgataggaatacaactctgatgggcctttagaatgactcaaccttcctgaacttgagcatttttactggaggaggtcaataaaaaaaaaaadaaataaaacctcatcttcccctggccctgagccctttggtgaaggaagacagcacccggtgaagggctcagaggtattagtgtggctgagattcgacacc

SEQ ID NO: 391257 - DNA, 201 bp, Homo sapiens
  misc_feature (1)...(201): n = A,T,C or G
aagtgatgttttgtattcttaggttgtaagggaagccattttagaagacttgcagaaaattgggaaagaaagtggccttaaaacttttgaacaggtgtgtnctaccactgatgttatactggcctcttgtcagaaagttttgtttaaagtttccatctaatgaggtttaaatgtataatttctaaggaattgattttagat

SEQ ID NO: 391258 - DNA, 201 bp, Homo sapiens
ctcagctgacttgtgtgggaggcaaagaaaaaaatcagttggaaaaggggtggagatatatgagctatccaaatgctagcaggggatggaattggaagggwacactgattttggtaagtgtactaaagcacaccaagccagaatgtgggtctccttcatcttccattaagaaatttctgtctcagtgtagttagaaggatc

SEQ ID NO: 391259 - DNA, 201 bp, Homo sapiens
ggctcttcggtgcagggacttgtgaagaaggttttgattcctttattcagagggcagcaggcaccactataatcttctattactttatagcgaacctgtcrtcagtgatcagaagaaacctttaaatattcacccatgatatctgagttttaagtctgaatttcaaattttaaagcaagatccaaaatatccagtgacaag

SEQ ID NO: 391260 - DNA, 201 bp, Homo sapiens
taattcctaagtacttccttcccaatgcccactccctgagggtcctaaggtgaatctcaaagaccctcagggagtaagcactggaaagggactctaccactggagaccctcagggaataagcactggaaagggactctaccaccggagaccctcagggaataagcactggaaagggactctaccaccggagaccctcaggg

SEQ ID NO: 391261 - DNA, 201 bp, Homo sapiens
atcgcctgaacctgggaggcagaggttgcaatcagccgagatcataccactgcactccagctgggcagcagagccagactgtgcctcaaaaaaaaaaaaaattgaggaaggaaccatgtgaaattctgtgcacctcctacttgagttggatacctggtcagtggtagcaaactaagcaagctatttccattgacaaataca

SEQ ID NO: 391262 - DNA, 201 bp, Homo sapiens
tcacttgagcccagcagttcagaaccagcctgggcaacatagtgagacaccatatctaaaataaaattgttaattgtaaaaaaataaaaataaaaaagagattatcaagatagtaaaaagacaacctacagaatggaagaaaatattgcaaatcatatctctgataagtgttgtgtgtatatatatatatgacctaatttt

SEQ ID NO: 391263 - DNA, 201 bp, Homo sapiens
atctcttgacctcgtgatcttcccatctcagcctcccaaagtgctgggattacaggcatgaaccactgcacccggcctcaagttgagatttgaatgggtaygcagctaaaccacgtcaaacagtatgagggtaaccacccccatgattcaattacctcccactgggttcctcccacgacacatggggattatgggaactac

SEQ ID NO: 391264 - DNA, 201 bp, Homo sapiens
atcacttgagcccagcagttcagaaccagcctgggcaacatagtgagacaccatatctaaaataaaattgttaattgtaaaaaaataaaaataaaaaagagattatcaagatagtaaaaagacaacctacagaatggaagaaaatattgcaaatcatatctctgataagtgttgtgtgtatatatatatatgacctaattt

SEQ ID NO: 391265 - DNA, 201 bp, Homo sapiens
ttatcacactctgcctttgtattctggtctacctttgtattgcagttgtccctgtgcctttcttatctcccttatttaattgtactttatagcagtatttrcaactgtccctatggccccacagtgatttttttttttacataaaagtcaacaaataagtaatcccagcactttgggaggcccaggtaggcagataggttg

SEQ ID NO: 391266 - DNA, 201 bp, Homo sapiens
ttcatttatcatcaatggaatgtttcaggttgtacattataaatctgatttgcaggtgtaatctcctttggacacctgttagctttgaaaacttttaaaamctcttccttcttgcaaggcaatcaggtacttagcagagagagggaatgacctctggttctattttggcttccagctgatatcgccatggtgatctgtgac

SEQ ID NO: 391267 - DNA, 201 bp, Homo sapiens
tgagactcacttggggctactgtttaaaatatatatcttctggttacaccttaggttcactgaattaaatttccagataatgaaacctaaaaatcctcagraagctttgtatttttagcaacacttccaggggattctgtataccagagttggaattctacttagtttagagggacaactttgccaagaatttgttaatgg

SEQ ID NO: 391268 - DNA, 201 bp, Homo sapiens
cccgcccccaccaacccaccactctcttgatttgacaccgctggaatggtttcattcaatcaagataactcagtgatagttctccataaagggcttcaacyccaccctacatccacccatctgttagaatgcttaatagtttttaatgtggtccatcatggtctacagttatattctttctagtatgcccagtttataagg

SEQ ID NO: 391269 - DNA, 201 bp, Homo sapiens
ggattacaggcacatgccaccacgcccagctaatttttgtatttttagtagagacaggatttcaccatgttggccaggatggtctcaatctcttgacctcrtgatcttcccatctcagcctcccaaagtgctgggattacaggcatgaaccactgcacccggcctcaagttgagatttgaatgggtacgcagctaaaccac

SEQ ID NO: 391270 - DNA, 201 bp, Homo sapiens
taaacagagcttcctactcctgtcgtggtttgacccaggagtctcaccttctctcaggcccttagtttcttccacttaaacagtgagagagttacatgatrtggttgcaaatcctctcagcgctaatcttgtaaggttaaaaatgtttgagtgtattgggcattaaaaaggagactatacaccaggcacagtggctcacgc

SEQ ID NO: 391271 - DNA, 201 bp, Homo sapiens
agtcatctttaccttgagtgggttgaggaggagggagaagagaggttggtcttgctgtctcagacctggcagaggtggaagaggtagaggagatggaaagrgaggcaggaaatataggcaccctcaatgtaacttttattgaaaaaaaaaatccacaagcagacccttacagttcaaacccatgtgttcaaggagcaactg

SEQ ID NO: 391272 - DNA, 201 bp, Homo sapiens
gttgaaaaagaggctctcattaaaatgtgaatctgtcataagatttttatttttgaggttagagcaggcagacacacacacacacatacacacacacacayacacacgttaaaggctggagtgtggacaaacaccagcgtgttctttgtttagaggactgtacattttcaagcgttggtcttttaggatcactgcaaattt

SEQ ID NO: 391273 - DNA, 201 bp, Homo sapiens
gggaagttaacactgcagtgagctgagcatgttaggatggggctgcgatagcgccactgcattccagcctgagcaacaaagcgagactctgtcccaaaatwaatatataaataaataaaataaggcccttcccatctgcctggggccatggctattataagacaatggcttgagcaactggtgaatggctgggaagttatc

SEQ ID NO: 391274 - DNA, 201 bp, Homo sapiens
ccttcccaatgcccactccctgagggtcctaaggtgaatctcaaagaccctcagggagtaagcactggaaagggactctaccactggagaccctcagggaataagcactggaaagggactctaccaccggagaccctcagggaataagcactggaaagggactctaccaccggagaccctcagggaataagcactggaaag

SEQ ID NO: 391275 - DNA, 201 bp, Homo sapiens
tccttcccaatgcccactccctgagggtcctaaggtgaatctcaaagaccctcagggagtaagcactggaaagggactctaccactggagaccctcagggaataagcactggaaagggactctaccaccggagaccctcagggaataagcactggaaagggactctaccaccggagaccctcagggaataagcactggaaa

SEQ ID NO: 391276 - DNA, 201 bp, Homo sapiens
gcaacctctgcctcccaggttcaagagattctcccacctcagcctctcaagtagctgggattacagacacctgccatcatgcccagctaattttttttgtrtttttgtagagatggggtttcaccatgttggccaggctggtctcaaactcctgatctcaggtgatcctcccgcctcggcctcccaaagtgctgggattac

SEQ ID NO: 391277 - DNA, 201 bp, Homo sapiens
cttccttcccaatgcccactccctgagggtcctaaggtgaatctcaaagaccctcagggagtaagcactggaaagggactctaccactggagaccctcagggaataagcactggaaagggactctaccaccggagaccctcagggaataagcactggaaagggactctaccaccggagaccctcagggaataagcactgga

SEQ ID NO: 391278 - DNA, 201 bp, Homo sapiens
agtctgtttttatgctgctgataaagacatacctaagacctggaagaagaggaggtttaattggacttacagttccacatggctggtgaggcctcagaatyatggtaggaggcaaaaggcacttcttacatcgtggcagcaagagaaaatgaggaagaagcaaaaagtggaaacccctggtaaacccatcagatctcatgg

SEQ ID NO: 391279 - DNA, 201 bp, Homo sapiens
acttccttcccaatgcccactccctgagggtcctaaggtgaatctcaaagaccctcagggagtaagcactggaaagggactctaccactggagaccctcagggaataagcactggaaagggactctaccaccggagaccctcagggaataagcactggaaagggactctaccaccggagaccctcagggaataagcactgg

SEQ ID NO: 391280 - DNA, 201 bp, Homo sapiens
ttcctaagtacttccttcccaatgcccactccctgagggtcctaaggtgaatctcaaagaccctcagggagtaagcactggaaagggactctaccactggagaccctcagggaataagcactggaaagggactctaccaccggagaccctcagggaataagcactggaaagggactctaccaccggagaccctcagggaat

SEQ ID NO: 391281 - DNA, 201 bp, Homo sapiens
ttaattcctaagtacttccttcccaatgcccactccctgagggtcctaaggtgaatctcaaagaccctcagggagtaagcactggaaagggactctaccactggagaccctcagggaataagcactggaaagggactctaccaccggagaccctcagggaataagcactggaaagggactctaccaccggagaccctcagg

SEQ ID NO: 391282 - DNA, 201 bp, Homo sapiens
ctgcacaggctattatacccactctacagtggaggaaattgaagccaagagaataggttttagtatgtcttttgtttccactgaacaggacagcctgggcrgaagggttcgtgtaattgtcactggagctgcccccatgtccacttcagtcatgacattcttccgggcagcaatgggatgtcaggtaagccaagcaccttc

SEQ ID NO: 391283 - DNA, 201 bp, Homo sapiens; identical to SEQ ID NO: 85764

SEQ ID NO: 391284 - DNA, 201 bp, Homo sapiens
tgcttaattcctaagtacttccttcccaatgcccactccctgagggtcctaaggtgaatctcaaagaccctcagggagtaagcactggaaagggactctaccactggagaccctcagggaataagcactggaaagggactctaccaccggagaccctcagggaataagcactggaaagggactctaccaccggagaccctc

SEQ ID NO: 391285 - DNA, 201 bp, Homo sapiens; identical to SEQ ID NO: 85814

SEQ ID NO: 391286 - DNA, 201 bp, Homo sapiens; identical to SEQ ID NO: 85815

SEQ ID NO: 391287 - DNA, 201 bp, Homo sapiens; identical to SEQ ID NO: 85816

SEQ ID NO: 391288 - DNA, 201 bp, Homo sapiens; identical to SEQ ID NO: 85817

SEQ ID NO: 391289 - DNA, 201 bp, Homo sapiens; identical to SEQ ID NO: 85818

SEQ ID NO: 391290 - DNA, 201 bp, Homo sapiens; identical to SEQ ID NO: 85819

SEQ ID NO: 391291 - DNA, 201 bp, Homo sapiens
agcatttatatcaataaatatcacaggaagtcacaagacataagctatgcctctcaccttttttcggtcttcactgcttatagcattaatattataaactrtcattattctccagaggattatctcttttaagtcattcatcatcacctctgccacattacttatgtatattttattacttaagaaaaaagaaattaaata

SEQ ID NO: 391292 - DNA, 201 bp, Homo sapiens
gttttcttgcaatatgaggaagacacttacagtcacatcatgggtctcatcgaacagtatgcagcgctcctgcccccagccatctttctggggcttgcacrcaaaatctacaagcggaaaaagtgacttagagactgcaagggaggcgagaggaggctgtcaataaataaattattgtgggaaaaaaagggggcatgcata

SEQ ID NO: 391293 - DNA, 201 bp, Homo sapiens
ctggagtgcagtggcataatctcggctcactgcaagttctgcccccgggttcacaccattctcctgcctcagcctccagagcagctgggactacaggcacrcaccaccacgcccggctaatttttttgtattttttagtagagacagagtttcaccgtgttagccagggtggtctcgatctcctgaccttgtgatccgccc

SEQ ID NO: 391294 - DNA, 201 bp, Homo sapiens; identical to SEQ ID NO: 85821

SEQ ID NO: 391295 - DNA, 201 bp, Homo sapiens
atcattattctccagaggattatctcttttaagtcattcatcatcacctctgccacattacttatgtatattttattacttaagaaaaaagaaattaaatrtccaaaatgaaatttgtatcattttagggacttaaatctttaaagcaagggcattcagagcaaggactgagtttatagtcactattttctgctctatcta

SEQ ID NO: 391296 - DNA, 201 bp, Homo sapiens
taacggcaaataataaagaatgaattgttaggtataaaacatctttaaaaactaaaatctttcactacctgcttgttatgctctccaatgtgacttgcttrgccaatggaactttatcaaatataatgcagacagacacttgcaaaaagtatttgcatactagggtttactctcttgttggacttggaaccctatatccat

SEQ ID NO: 391297 - DNA, 201 bp, Homo sapiens
aagtttgacattggttgtatctctgtcttcatcgccttcacaggagaaaaggaaatgtctgcagagttggaagcactctatggtgacatcgatgctgtggrgctgtatcctgcccttctggtagaaaagcctcggccagatgccatctttggtgaaaccatggtagaagttggagcaccattctccttgaaaggacttatg

SEQ ID NO: 391298 - DNA, 201 bp, Homo sapiens
ctttgactattaagacttagttattaccgcttatacccatattttaaaatccctaaaaatgtgttccttaactttttaactgatgtttatttatttatttatttttttagataattgatggagagatgtatcctcccacagtcaaagatactcaggcagagatgatctaccctcctcaagtccctgagcatctacggtttg

SEQ ID NO: 391299 - DNA, 201 bp, Homo sapiens
tctatcactggcatccccttctgcctgacacctttcaaattcatgaccagaaatacaactatcaacagtttatctacaacaactctatattgctggaacayggaattacccagtttgttgaatcattcaccaggcaaattgctggcagggtaagcattattattgaaaaccaaaacaaaagactagtcagtaactttagaa

SEQ ID NO: 391300 - DNA, 201 bp, Homo sapiens
aatagctatcttttgatactgacaaggaagaaaacagaaatgaaggaatagcaaattttaaaaattgcattccagttgcttgaaagcttgtgatcagatgyaataaatgtttttattatttattttgtgcaaataggagagactattaagattgtgattgaagattatgtgcaacacttgagtggctatcacttcaaactg

SEQ ID NO: 391301 - DNA, 201 bp, Homo sapiens
gtatttcaagtggccattagactataaagtgtagttgtttaaaaatagattttttttattttggagttacattcaacctcaggtgccactttccacatttyacaataaaaataatggttgatttacttaacaaatgagaataaataaaacatttttttctttgaaaatttcagccagatcacatttgattgacagtccacc

SEQ ID NO: 391302 - DNA, 201 bp, Homo sapiens
  misc_feature (1)...(201): n = A,T,C or G
ggtgaaactctggctagacagcgtaaactgcgccttttcaaggatggaaaaatgaaatatcaggtatgcttcctttgactattaagacttagttattaccncttatacccatattttaaaatccctaaaaatgtgttccttaactttttaactgatgtttatttatttatttatttttttagataattgatggagagatgt

SEQ ID NO: 391303 - DNA, 201 bp, Homo sapiens
tttataaataatacatttttatacttttttataattaccatatcatcatagtgaagtatataatatatatgatataagctcaatatagtatattaattccyttaaacacaaagacatatcagtttgtagctttggtggataaacaaattaatttagcaattcatggctatgaaaaatgtatattttatttaaaaattttaa

SEQ ID NO: 391304 - DNA, 201 bp, Homo sapiens; identical to SEQ ID NO: 85828

SEQ ID NO: 391305 - DNA, 201 bp, Homo sapiens; identical to SEQ ID NO: 85829

SEQ ID NO: 391306 - DNA, 201 bp, Homo sapiens
gggattttggaacgttgtgaataacattcccttccttcgaaatgcaattatgagttatgtgttgacatgtaagtacaagtgtctttctaaggtttttagcyttctcaaagaaaaatatgctttataatactgtaagcctaatctaaaaacatatttccaagcttatcaaaaagactttaagatagcttttaagtttgcctt

SEQ ID NO: 391307 - DNA, 201 bp, Homo sapiens
acgtaagtttgtcctttggttgcctcattaggagtggggctggatacagttatcattgtatagatttgtgtcttataatgagtcccattaatttctccctscctttcttcgtcttcttgcagcggaatttttgacaagaataaaattatttctgaaacccactccaaacacagtgcactacatacttacccacttcaaggg

SEQ ID NO: 391308 - DNA, 201 bp, Homo sapiens
ctttccagcaaataaaaattgtctccgctgggagtttcagttttacctgatttgtacctaaggcaagctgaatacaaacagtaaatatgcctaaaattctkgttttacaactaattttactttccacaggttgctggtggtaggaatgttccacccgcagtacagaaagtatcacaggcttccattgaccagagcaggcag

SEQ ID NO: 391309 - DNA, 201 bp, Homo sapiens
aaatgatttatataaaaccctcttccccagggaaaattagtgtgctatctttgttatgttttgagtaaatgacaagatgtggtaaatgaaaactcacacaytctatatacattaaatatgtaagcatgactgataaaatagctatcttttgatactgacaaggaagaaaacagaaatgaaggaatagcaaattttaaaaat

SEQ ID NO: 391310 - DNA, 201 bp, Homo sapiens; identical to SEQ ID NO: 85843

SEQ ID NO: 391311 - DNA, 201 bp, Homo sapiens; identical to SEQ ID NO: 85844

SEQ ID NO: 391312 - DNA, 201 bp, Homo sapiens
gcgtgagccaccgcgcctggcccctaaacttcttaaaagaatcaggggtcaaatggaaacagagaagttggcagcaaattgagcaaaagaatcaaactgtyttttattttgtgaagtttgacattggttgtatctctgtcttcatcgccttcacaggagaaaaggaaatgtctgcagagttggaagcactctatggtgaca

SEQ ID NO: 391313 - DNA, 201 bp, Homo sapiens
tccagttgcttgaaagcttgtgatcagatgcaataaatgtttttattatttattttgtgcaaataggagagactattaagattgtgattgaagattatgtrcaacacttgagtggctatcacttcaaactgaaatttgacccagaactacttttcaacaaacaattccagtaccaaaatcgtattgctgctgaatttaaca

SEQ ID NO: 391314 - DNA, 201 bp, Homo sapiens; identical to SEQ ID NO: 85846

SEQ ID NO: 391315 - DNA, 201 bp, Homo sapiens
agcacgtccaggaactcctcagcagcgcctccttcagctccacagccagacgccctcagacagcaaagcctacccccgcgccgcgccctgcccgccgctgsgatgctcgcccgcgccctgctgctgtgcgcggtcctggcgctcagccatacaggtgagtacctggcgccgcgcaccggggactccggttccacgcacccg

SEQ ID NO: 391316 - DNA, 201 bp, Homo sapiens
ttaacaccctctatcactggcatccccttctgcctgacacctttcaaattcatgaccagaaatacaactatcaacagtttatctacaacaactctatattrctggaacatggaattacccagtttgttgaatcattcaccaggcaaattgctggcagggtaagcattattattgaaaaccaaaacaaaagactagtcagta

SEQ ID NO: 391317 - DNA, 201 bp, Homo sapiens; identical to SEQ ID NO: 85849

SEQ ID NO: 391318 - DNA, 201 bp, Homo sapiens; identical to SEQ ID NO: 85850

SEQ ID NO: 391319 - DNA, 201 bp, Homo sapiens
tcctgggttcaagcaattctcctgcctcaacttcctgagtagctgggactacaggctcacgtcgcacgcatggataattttttgtattttcagtatagacrgggtttcaccgtgttagccaggctggtctcaaactcctgacctagtgatccgccggcttcggcctcccgaagtgctgggattacaggcgtgagccaccgc

SEQ ID NO: 391320 - DNA, 201 bp, Homo sapiens
aggtaagaaacagtttctaaacttcttcgttttttgtttgtttgtttgtttttgttgtttttggttttcttttcgagatggagccgccctctgtcacccargctggagtgcagtggcgccatctcggctcactgcaacctccgcctcctgggttcaagcaattctcctgcctcaacttcctgagtagctgggactacaggc

SEQ ID NO: 391321 - DNA, 201 bp, Homo sapiens; identical to SEQ ID NO: 85823

SEQ ID NO: 391322 - DNA, 201 bp, Homo sapiens; identical to SEQ ID NO: 85824

SEQ ID NO: 391323 - DNA, 201 bp, Homo sapiens
gccctatgaatcatttgaagaacttacaggtaagaaacagtttctaaacttcttcgttttttgtttgtttgtttgtttttgttgtttttggttttcttttygagatggagccgccctctgtcacccaggctggagtgcagtggcgccatctcggctcactgcaacctccgcctcctgggttcaagcaattctcctgcctca

SEQ ID NO: 391324 - DNA, 201 bp, Homo sapiens
gtgaggtttttgccgcattattattttttggatttcaatagcatagcttcaagttattcgtaagaattttttataaataatacatttttatacttttttakaattaccatatcatcatagtgaagtatataatatatatgatataagctcaatatagtatattaattccgttaaacacaaagacatatcagtttgtagctt

SEQ ID NO: 391325 - DNA, 201 bp, Homo sapiens
attaaatatgtaagcatgactgataaaatagctatcttttgatactgacaaggaagaaaacagaaatgaaggaatagcaaattttaaaaattgcattccasttgcttgaaagcttgtgatcagatgcaataaatgtttttattatttattttgtgcaaataggagagactattaagattgtgattgaagattatgtgcaac

SEQ ID NO: 391326 - DNA, 201 bp, Homo sapiens
gaaggcaggaaactttatattggtgacccgtggagctcacattaactatttacagggtaactgcttaggaccagtattatgaggagaatttacctttcccscctctctttccaagaaacaaggagggggtgaaggtacggagaacagtatttcttctgttgaaagcaacttagctacaaagataaattacagctatgtaca

SEQ ID NO: 391327 - DNA, 201 bp, Homo sapiens
cacacacatatataaacattcacacacatacatatgtacaggtattgttatttgtaatttgacccttgtattttttagtttaaaatgttagtactgcaaamtgttatgtcctcaaaaacacattgtaccatgattatgccgctttcaatattgtaaagtgaggtttttgccgcattattattttttggatttcaatagcat

SEQ ID NO: 391328 - DNA, 201 bp, Homo sapiens
agcatctacggtttgctgtggggcaggaggtctttggtctggtgcctggtctgatgatgtatgccacaatctggctgcgggaacacaacagagtatgcgaygtgcttaaacaggagcatcctgaatggggtgatgagcagttgttccagacaagcaggctaatactgataggtaaacaagaaaatgatttatataaaaccc

SEQ ID NO: 391329 - DNA, 201 bp, Homo sapiens
tccactttttttaaaaagaagtcttatctataaaaaccttaaaggaattttccatttacttcactggtctagtaaaattatacacacacacagacatgcayacacatatataaacattcacacacatacatatgtacaggtattgttatttgtaatttgacccttgtattttttagtttaaaatgttagtactgcaaaatg

SEQ ID NO: 391330 - DNA, 201 bp, Homo sapiens
tctatataaactattatgtaaaagcaaatgagcgtcttggtataatgtcttaatattttcaaattatttctttagaaatgaaataattctaattaaaatarataaaatcattcagtaagaagttgttccaccatatcttagaactgttgtttatattatgatcctattcacaattgtaattctcatataaatgaagaattc

SEQ ID NO: 391331 - DNA, 201 bp, Homo sapiens
ggatttgaccagtataagtgcgattgtacccggacaggattctatggagaaaactgctcaacacgtaagtttgtcctttggttgcctcattaggagtgggkctggatacagttatcattgtatagatttgtgtcttataatgagtcccattaatttctccctccctttcttcgtcttcttgcagcggaatttttgacaaga

SEQ ID NO: 391332 - DNA, 201 bp, Homo sapiens
tctttcctgctcccaggaaagcccggattatgttttaagataagcaaaatgtcttaaaagtaagctgttttactttgaatttttccctaaatgttgattartgtactagatccattttaatttggaaagtgaagtgctacttatttgaacttcttaaaaatgctaattttaacatctaaagagttaactaagaaaagctta

SEQ ID NO: 391333 - DNA, 201 bp, Homo sapiens; identical to SEQ ID NO: 85827

SEQ ID NO: 391334 - DNA, 201 bp, Homo sapiens
atgtttgcattctttgcccagcacttcacgcatcagtttttcaagacagatcataagcgagggccagctttcaccaacgggctgggccatggggtaagatmgagttaatatcttagagttagtaaaattataccaaatcatagtcaagggctaacattaaaggagatatacagatagatagatccaaataacttatccact

SEQ ID NO: 391335 - DNA, 201 bp, Homo sapiens; identical to SEQ ID NO: 85831

SEQ ID NO: 391336 - DNA, 201 bp, Homo sapiens
catttttttctttgaaaatttcagccagatcacatttgattgacagtccaccaacttacaatgctgactatggctacaaaagctgggaagccttctctaayctctcctattatactagagcccttcctcctgtgcctgatgattgcccgactcccttgggtgtcaaaggtgagtaagaagaatccattagagatgtattaa

SEQ ID NO: 391337 - DNA, 201 bp, Homo sapiens
ggagaaaactgctcaacacgtaagtttgtcctttggttgcctcattaggagtggggctggatacagttatcattgtatagatttgtgtcttataatgagtmccattaatttctccctccctttcttcgtcttcttgcagcggaatttttgacaagaataaaattatttctgaaacccactccaaacacagtgcactacata

SEQ ID NO: 391338 - DNA, 201 bp, Homo sapiens
cgtccaggaactcctcagcagcgcctccttcagctccacagccagacgccctcagacagcaaagcctacccccgcgccgcgccctgcccgccgctgcgatrctcgcccgcgccctgctgctgtgcgcggtcctggcgctcagccatacaggtgagtacctggcgccgcgcaccggggactccggttccacgcacccgggca

SEQ ID NO: 391339 - DNA, 201 bp, Homo sapiens
gggggtacgaaaaggcggaaagaaacagtcatttcgtcacatgggcttggttttcagtcttataaaaaggaaggttctctcggttagcgaccaattgtcakacgacttgcagtgagcgtcaggagcacgtccaggaactcctcagcagcgcctccttcagctccacagccagacgccctcagacagcaaagcctacccccg

SEQ ID NO: 391340 - DNA, 201 bp, Homo sapiens
  misc_feature (1)...(201): n = A,T,C or G
cagagtttccgctctgacctcctgggtctatcccagtactccgacttctctccgaatagagaagctacgtgacttgggaaagagcttggaccgctagagtncgaaagaactccgtggatattccagctttcccacaagcactgatcattatgagccagttacttaaccgatctgagacactctcacctcctaaatagggat

SEQ ID NO: 391341 - DNA, 201 bp, Homo sapiens
ccactccaaacacagtgcactacatacttacccacttcaagggattttggaacgttgtgaataacattcccttccttcgaaatgcaattatgagttatgtsttgacatgtaagtacaagtgtctttctaaggtttttagccttctcaaagaaaaatatgctttataatactgtaagcctaatctaaaaacatatttccaag

SEQ ID NO: 391342 - DNA, 201 bp, Homo sapiens; identical to SEQ ID NO: 85835

SEQ ID NO: 391343 - DNA, 201 bp, Homo sapiens
ctttatataagaaaaacttcaacagcaacaaattaaaattttttcatcattttctaggtggacttaaatcatatttacggtgaaactctggctagacagcrtaaactgcgccttttcaaggatggaaaaatgaaatatcaggtatgcttcctttgactattaagacttagttattaccgcttatacccatattttaaaatc

SEQ ID NO: 391344 - DNA, 201 bp, Homo sapiens; identical to SEQ ID NO: 85837

SEQ ID NO: 391345 - DNA, 201 bp, Homo sapiens; identical to SEQ ID NO: 85838

SEQ ID NO: 391346 - DNA, 201 bp, Homo sapiens; identical to SEQ ID NO: 85839

SEQ ID NO: 391347 - DNA, 201 bp, Homo sapiens; identical to SEQ ID NO: 85842

SEQ ID NO: 391348 - DNA, 201 bp, Homo sapiens; identical to SEQ ID NO: 85841

SEQ ID NO: 391349 - DNA, 201 bp, Homo sapiens
gagcacgtccaggaactcctcagcagcgcctccttcagctccacagccagacgccctcagacagcaaagcctacccccgcgccgcgccctgcccgccgctscgatgctcgcccgcgccctgctgctgtgcgcggtcctggcgctcagccatacaggtgagtacctggcgccgcgcaccggggactccggttccacgcaccc

SEQ ID NO: 391350 - DNA, 201 bp, Homo sapiens
tgactattaagacttagttattaccgcttatacccatattttaaaatccctaaaaatgtgttccttaactttttaactgatgtttatttatttatttatttttttagataattgatggagagatgtatcctcccacagtcaaagatactcaggcagagatgatctaccctcctcaagtccctgagcatctacggtttgctg

SEQ ID NO: 391351 - DNA, 201 bp, Homo sapiens
ttgactattaagacttagttattaccgcttatacccatattttaaaatccctaaaaatgtgttccttaactttttaactgatgtttatttatttatttatttttttagataattgatggagagatgtatcctcccacagtcaaagatactcaggcagagatgatctaccctcctcaagtccctgagcatctacggtttgct

SEQ ID NO: 391352 - DNA, 201 bp, Homo sapiens
tttgactattaagacttagttattaccgcttatacccatattttaaaatccctaaaaatgtgttccttaactttttaactgatgtttatttatttatttatttttttagataattgatggagagatgtatcctcccacagtcaaagatactcaggcagagatgatctaccctcctcaagtccctgagcatctacggtttgc

SEQ ID NO: 391353 - DNA, 201 bp, Homo sapiens
acctagtgcaagccactcgcctctttgggacccagctgccccctctgtctaaccagggggttggaggagtcacttctcccagctctgacaccctctaatcrttaactcacttgttcttgtcttgtaggaacaaaagcggatcctggagatgggcatcacgggtcccgagggccatgccctgagcagacctgaagaggtaag

SEQ ID NO: 391354 - DNA, 201 bp, Homo sapiens
gagaattcctgttgcagaggaagagctgggtctcactctgatcactgacctgaaaccaaaggtttttaatcttctgttaaactggggcctggtgacatggwcaagatgtcatagtggctcttgcgtcaacatacctctgtgcggttaattaaatgtcctctctgatgaggctgggccttctggggttcttgatgatggcac

SEQ ID NO: 391355 - DNA, 201 bp, Homo sapiens
agtgggctcgggttccggggcgggcctcaccgctccagggcttcgcaacgggtgccccggcccttccccccccgcccaccaggcttctccctgggctgcakgaggggtttctgcggcgcaggcgcaaggattgccgctgccggaggctgagcggctgcggcgctttgtaccggcgaaatctgcttgggagcagcgatctgt

SEQ ID NO: 391356 - DNA, 201 bp, Homo sapiens
tgggagggtgagctgagcctccttggctcggcccccgcaccgtccggcccatgcaccccacagcccggtacctcccccgctggaggagggaaaaagatcawccagcgctccccactccccgcctttactgatggagtggaagtccggacctagggacagcgccatgatggaagctcggtccacccctccccgcagctaaaa

SEQ ID NO: 391357 - DNA, 201 bp, Homo sapiens
tgcctctgaaagtgtgcagtcccagtctgctaagctgaagtggtcaccaggcctactgcctgttgccctctggagtggagatgcctaggcttttccagccratggagctgggtgtctgatgcctctctgaacctcagtgctctgctgtacgatgtaggccccttcacaggactcctgaacatcctaggtgaccctccaaag

SEQ ID NO: 391358 - DNA, 201 bp, Homo sapiens
acacgcttatgatataatgttaggcaaaatcgctgttatgaacagctcgtttggggcagagcaaatcctgggaagtaacgctgaggctgttggtgcaggcrgtggagtacaacatcttcgagggtatggagtgccacggctccccactagtggtcatcagccagggcaagatcgtctttgaagacggaaacatcaacgtca

SEQ ID NO: 391359 - DNA, 201 bp, Homo sapiens
tctggcgctcccggggctccgaaagcactcgagcttcgcgactgtggaactcaggggctcgcgatctccacggagggagggttttactttctgccggcagrgcggccttgaggcttgggttacagtgggctcgggttccggggcgggcctcaccgctccagggcttcgcaacgggtgccccggcccttccccccccgccca

SEQ ID NO: 391360 - DNA, 201 bp, Homo sapiens
gccactgcactccagcctgggtgacagagtgagactccgtctcaaaaaaaaaaattatgtatatatatatatatatatatatatatatatatatatatagatatatagtcatgaagaatgtgcggcaagttgggatgtgcttatggtaaaatgcagaaaggacagaactgtgttctttttggttcccataatgttctggtt

SEQ ID NO: 391361 - DNA, 201 bp, Homo sapiens
tcccaatggcactcatctctcctggcgactaccactctgctctgtggtcattgatttattggaaagacatgcttctgttttttcttaaacatatttttctrtcctttctatcttgaaacaggcgtcaattccttccaagtctacatggcctataaggatgtctaccaaatgtccgacagccaggtaggtccctcacactca

SEQ ID NO: 391362 - DNA, 201 bp, Homo sapiens
gcaaaaaggtggctatttgaggaaattttgaacctgcccccaaattatgttgccatgtatttttaaatcataccatatccatagacccttagggcttaagrtctaataaaatctcagcaaatgtttgatttctataacctcaacgttgaatggaacttttaaattatgtaaaattttatgttgtacaattaaggaggaagg

SEQ ID NO: 391363 - DNA, 201 bp, Homo sapiens
caaaataccaggacttggtgctcaacaaatgtgtgggaacaaaattagatgttgacctgatccctcctgactttcttaaggtctcagggcagtgtatctgygatttggtgagatggccacatgagggcaggcacgcacacgttgagaaagttgaactggaattttgtcctgcaaactctttgaggcgttgcatgggttgca

SEQ ID NO: 391364 - DNA, 201 bp, Homo sapiens
acaagagcctatgaaagcacacgaggacaacagtccagggctctgaaagggtccccgcccttccccatcttcattcaacagatgttaagtaagagttgtcygcaccaggcactgtaccaggtgaacaaaagcaggaatgatgctcgttgtcaaggggactgccatctcttggggagtcactaatcgtccacatgtatgact

SEQ ID NO: 391365 - DNA, 201 bp, Homo sapiens
ctgacagcctcctgcctggaagccctgctgctttcagggtctctgcccccacaaccctttcccagtggggctagggctgtggctccattgccctccttccycgtcctcctgcaggctggtgtggaggtgtcctccccacagcatccccagccctgccccccatagacctggcccactccttgtccctctgtactgagtttt

SEQ ID NO: 391366 - DNA, 201 bp, Homo sapiens
ctaggtagatcacccctctttcccaaagagtaaactgaggctcagagagattcagaggcttgtaaaggttcttcattggccagtggaggaaggagagcttrcattcaagcagggaggataggtgggctggtctgcgtgctaggaaaaccactgcccgtgtgtgtgtgtgtgtgtgtgtgcatgcatagttgtgtgtgtgag

SEQ ID NO: 391367 - DNA, 201 bp, Homo sapiens
tatgtaaaatacctttggagtgtgggacagtgtgcctaagatcatgggctttgaaaaccaaccagtttgggcttcaatcctggcttccccacccaacaccygtgtcccgcaagacacgtggcctgaacctcaaattgctcacccgtaagttgggagtacaaacacccccttcatagtatgattgtgtgccctaaatgcagt

SEQ ID NO: 391368 - DNA, 201 bp, Homo sapiens
ggaagcacagcgattgggtttggaagaaaaatcccaccattggttcttaggttgtattggatttggtagcaagctcgaaattgaggtgtctcaatggacartaaggaatagattggaatgagggtgagaggcaaaggacagagatagatattaggggcccatgtacaaaaggtattggtagaagacagaaaaatgcaagct

SEQ ID NO: 391369 - DNA, 201 bp, Homo sapiens
agcagcgtattccatccacatgaatgtgtttgcagaggctggcaggtgaatgaccgaatgggtgtgatcggaacggtcttcatgaatgcacacgctgtgatttttttttttttttaaatctcacaccaacccctgtttatctctccatagctctatgaagcctttaccttccttaagggcctgggagctgtgatcttggtc

SEQ ID NO: 391370 - DNA, 201 bp, Homo sapiens
actgggaacctcttaaacgagtttaaaggcttcctaaggccatcaactcctctgagaagctgataaaagcaattgaagctttttcctgcatcctcaaatgsatgaacatttggcatagaatgttagagcatttggcatagaatgttaaacttcataggacagtgttcagtgtattgggtgcttttacatattatttcaagt

SEQ ID NO: 391371 - DNA, 201 bp, Homo sapiens
tggatacggattctcatggaggacatggcatagtggataataggaaagtggagccgcatgcccaagcccagcacccaggagacaactcccactgcctgccstgttcccaagccttgaaaaaggatgacttcccctggactggctgtgtgtgtatgtgtgtgtgtgagtgtgtgtatgttagtgtgtgtgtgtgagagagac

SEQ ID NO: 391372 - DNA, 201 bp, Homo sapiens
tcctggatagtgtggcaaagggccactggctgacaggctgtcgtccccggaggcaaaatcaaaggcaaatggatggtttctgtgaataaatatgagtgtgyagctggatgggatggcagcacttgccgttgcaaggaggccagagtggggagcttgctcaaggggaaggctctggttattcaaggtagggaccaagtcatg

SEQ ID NO: 391373 - DNA, 201 bp, Homo sapiens
gcccttcccactgaggaatcaggtaacctcatctgaatttgcgtggcctctgagaccctatgttgacacccacctcttcgtgattgcaatgactgctctartgggggccatgggagttgcttgccctcaccccaacttcctggggtgggagaattaagtattggaagtagtgtaaggtcttcatctaccaacactgaaatg

SEQ ID NO: 391374 - DNA, 201 bp, Homo sapiens
tctgcttattgccagtctcccccatccctcagtatagctgacacatgcagaagctctctctttctgatcttagatgcagtccccattccttaaattgtacygggcacataggaagcatgcaacacaattttgttgaataaatgagtgaagaaaacttctaaatatactcctctgcatctaggcaattgctaacatttcctg

SEQ ID NO: 391375 - DNA, 201 bp, Homo sapiens
aaaatctagaccttaatagattttgtatgccttctgacatccaccttcatggtggagatgacagatttattcccaccatgcaggagggagaacagaacccrgggaggtttaatgcctcactcaggaatagacagtgatgcagaacattcactgtcatccagaacctcccctctgagctgaggctgactgtggttgctgctg

SEQ ID NO: 391376 - DNA, 201 bp, Homo sapiens
ggctctagcctgcatccttactggttgtgtgaacctggaggtcacacctgttcgtggacctcatttccctgcgaggtgggatcagacctaacattccacayggaccattctgtgcaaatggtcacaaagcacgtaacttcaaagcccatttcctacggtctcttctgtgggaaagtatcccttcagattttccacaccaca

SEQ ID NO: 391377 - DNA, 201 bp, Homo sapiens
cccagagatttctttttttttcttttttttggtgggcggggagcggggaatctcactctgttgcccaggctggagtgcagtggtgcgatctcggctcactrcaacctccttctcccttgttcatgccattctcctgcctcagcctcctgagtagctgggaccacaggcgtgcgccaccacgcccggctaattttttgtatt

SEQ ID NO: 391378 - DNA, 201 bp, Homo sapiens
ggtaacccctgtctgggcctgtacctactaaaatctctctgagcttgagttctgaagcacatggctttgaaaatgcctgtttaagaggcaaaggaactacwaattttaagaaagaacatgaagaggttgaatcagtgcttggcttcctgtgggcttattttttcagaagtagaccagcacctgagagacactaagggcttg

SEQ ID NO: 391379 - DNA, 201 bp, Homo sapiens
cctagtcctcctcctgacccccagcttgtccccagggctgtggagaccttggtgccagtggcccagccctccaaacacctgctgtcttggaggcaattctrtggggtgacctggtggccccagtgtcaggctgctgtgtgatgagggagctgctgttggagtagaacaggtcagcattaattaaggccgtacccttctgtc

SEQ ID NO: 391380 - DNA, 201 bp, Homo sapiens
acggaagagcaaaaaagcagaaacacttagctcctgcccccaaggactgtgtgaaatatttataaagctctctttcatgcgtgtcttttttttttttttttaatgaatggcacacttggggattaacttagctgaagcggcttcttgtgcccactgcagtgagtagagcatcctgggtgtggctctgagcaaacaaaggca

SEQ ID NO: 391381 - DNA, 201 bp, Homo sapiens
gaacacctggcccaagaggcttaacctctgccctactatttactatcaaacaaatcaaaccatggttcaaagattaagataaaataaagctatgaaaggaytagaatacaacacacattttttgaaagaatgataattttgaaggggaaaggatcttgctaagcaagacacaaaacttagaaatggtaaagaatggtctgt

SEQ ID NO: 391382 - DNA, 201 bp, Homo sapiens
tgagcctcagcttcctcatctataatgtgggccttatggtgggaagtgcctagggtggtttggagacgtacatgagattccttcatgtagtgcatgggacrtgagagttctgagagatgggcatggaagttctgggttcaggaggactgcacagggcaggggaaggagtactggatgaggagccagggttcctgggatgtc

SEQ ID NO: 391383 - DNA, 201 bp, Homo sapiens
gccttctggggttcttgatgatggcacgtttttagctgggagaggagagaattccaagccttgcaaggcctcagctggcagtcttccatttgtgcccagcygcccctcctcctggccccattatgagatgctcttctcatctgtgggtcttgcctgtaggctactggcaaaatggatgagaaccagtttgtcgctgtcacc

SEQ ID NO: 391384 - DNA, 201 bp, Homo sapiens
tgatggctgaataatacccccttgtagggatggaccacgtttagtttatgcacacatgagcttgagtggctgctctttaaagggtataaaagaaaccagtyctccctggaggggaccagggaaatggggctcatggatggcaagaggttttttcatcatggtgttttgtgttgtttaaatttttacattgtttgtatgtta

SEQ ID NO: 391385 - DNA, 201 bp, Homo sapiens
tacggcggggcggaggaaaccccagcagggacactcagcctggtcctaggggagacagaggggacaggaggagagcagggttctttgtggagcccatgggkccccagaggtaaaggagttggcatgctggagaaactgaaggaaagacggcctcgggagagcccaccctctgcttcccagggcaaccgctgcacagttaga

SEQ ID NO: 391386 - DNA, 201 bp, Homo sapiens
tccgtgctatatcatggatgggtaccatgttcctttgatggctgaataatacccccttgtagggatggaccacgtttagtttatgcacacatgagcttgastggctgctctttaaagggtataaaagaaaccagttctccctggaggggaccagggaaatggggctcatggatggcaagaggttttttcatcatggtgttt

SEQ ID NO: 391387 - DNA, 201 bp, Homo sapiens
agagcttagccaaggctgacatttcagcctgaagtgttagtgaagtgtaaagggtatcatacggcggggcggaggaaaccccagcagggacactcagcctkgtcctaggggagacagaggggacaggaggagagcagggttctttgtggagcccatgggtccccagaggtaaaggagttggcatgctggagaaactgaagg

SEQ ID NO: 391388 - DNA, 201 bp, Homo sapiens
tttagtatattgagaaggttgtacaatcataattccagaatgttttcatcacctccagaaaagaaaccctgtacccatgaacaatcagtccctctctctcwcccccattccctagcaaccactaatctgctttctgtttctatggatttgcctattctggacatttcatataaatggaatcatccaatatgtggcctttta

SEQ ID NO: 391389 - DNA, 201 bp, Homo sapiens
gatgaatgggtttgccctggcccttctagagcttagccaaggctgacatttcagcctgaagtgttagtgaagtgtaaagggtatcatacggcggggcggargaaaccccagcagggacactcagcctggtcctaggggagacagaggggacaggaggagagcagggttctttgtggagcccatgggtccccagaggtaaag

SEQ ID NO: 391390 - DNA, 201 bp, Homo sapiens
caatgaaaagagatcattccttatatattgaccagtgattagattttaaatctacttttctataaaacacaacttttattctttcctatctttgtggaaarcattcacatcaaagtgccacatcatgggtatgcatacatgtttgtatatcatagactatctggatgtttttaagtttcttatcgagatataattcatata

SEQ ID NO: 391391 - DNA, 201 bp, Homo sapiens
tgggtgccaggaagagtgggaaggagatgaatgggtttgccctggcccttctagagcttagccaaggctgacatttcagcctgaagtgttagtgaagtgtwaagggtatcatacggcggggcggaggaaaccccagcagggacactcagcctggtcctaggggagacagaggggacaggaggagagcagggttctttgtgg

SEQ ID NO: 391392 - DNA, 201 bp, Homo sapiens
ttttgtttttatatgttttaaaaaaatgttacttttaacaatgaaaagagatcattccttatatattgaccagtgattagattttaaatctacttttctayaaaacacaacttttattctttcctatctttgtggaaaacattcacatcaaagtgccacatcatgggtatgcatacatgtttgtatatcatagactatctg

SEQ ID NO: 391393 - DNA, 201 bp, Homo sapiens
aggagtatgggctcacatactggagaaggagaccacaggtgtggggacaggacatgaggcacaaggaagtttcataagaaagccacaggaaacacttgtarcagctcacggccatggccctggagtatccattggctgccacagacatggcctgcagaagcagaggtctcggtagctgctcactgaccttgtccggctcac

SEQ ID NO: 391394 - DNA, 201 bp, Homo sapiens
ggcagagcggccttgaggcttgggttacagtgggctcgggttccggggcgggcctcaccgctccagggcttcgcaacgggtgccccggcccttccccccccgcccaccaggcttctccctgggctgcaggaggggtttctgcggcgcaggcgcaaggattgccgctgccggaggctgagcggctgcggcgctttgtaccgg

SEQ ID NO: 391395 - DNA, 201 bp, Homo sapiens
ggctcacatactgcagaaggagtatgggctcacatactggagaaggagtatgggctcacatactggagaaggagaccacaggtgtggggacaggacatgargcacaaggaagtttcataagaaagccacaggaaacacttgtagcagctcacggccatggccctggagtatccattggctgccacagacatggcctgcaga

SEQ ID NO: 391396 - DNA, 201 bp, Homo sapiens
cggggctccgaaagcactcgagcttcgcgactgtggaactcaggggctcgcgatctccacggagggagggttttactttctgccggcagagcggccttgargcttgggttacagtgggctcgggttccggggcgggcctcaccgctccagggcttcgcaacgggtgccccggcccttccccccccgcccaccaggcttctc

SEQ ID NO: 391397 - DNA, 201 bp, Homo sapiens
gccatgtatttttaaatcataccatatccatagacccttagggcttaaggtctaataaaatctcagcaaatgtttgatttctataacctcaacgttgaatsgaacttttaaattatgtaaaattttatgttgtacaattaaggaggaaggaaaaagtgtctgtctactgcttctcccctgcccccaccattctcccctcag

SEQ ID NO: 391398 - DNA, 201 bp, Homo sapiens
acctaccaaagatgcgtgcacagagagggtgcatgcagagatggcagaagacaactgtgcctccctgaagggcttgctttaacaccctcctgcatggccargagtggccttgggtctggattaacaactacacgcacagacccaagaggccacagtggtccctggttcactggagtctgtgcaagcacacaggccagaagt

SEQ ID NO: 391399 - DNA, 201 bp, Homo sapiens
tgggaggagggatctgagcaggctcaactaagctgcttctccttctctttctctctctctcttcctctcctctctctctgtctctttgctcctgcccatgkatgcatgtgttcccagccatctgacactgcttataatgtgtaagcttcagggctcagcgagggaaagtattagatctaaggttctcaatttaattatcaa

SEQ ID NO: 391400 - DNA, 201 bp, Homo sapiens
ctttattggattcatttattgaacaggataccctccctccagaccctggaaccacctcccagatgtaccacctgcctccaggttcttgagttaggctctgmtgtcagagcaccacctactgtgggttgttcttgtcagtttacttcttttctttttcttttttttttttttttttttgacggagtcttgctctgttgccca

SEQ ID NO: 391401 - DNA, 201 bp, Homo sapiens
caacttcagcttatcaggtaggaaagagtggtggcccaggctccccacaattgcagcagttcaggccgagtccttcctgctgcttctgaggaaatggacaygtggccttggacactagatgaagaagcagggaagggagtgtgccccacccgagcctgctctcactggtggggcagagtgggctggcatggtcaccaagca

SEQ ID NO: 391402 - DNA, 201 bp, Homo sapiens
tgtgtgtgtgcgcgtgtgtgtatgcgagcatgtggtgagctctgtgtgtgtggccatgtgtgtacctgtgtggtcctgttctttgtatgcttcctaagtgrccaattgagatggagaagtccagagaccttcctgcattcccaggctccagcccggactgggaggctctgcatctggttttggtctctccccagcttccat

SEQ ID NO: 391403 - DNA, 201 bp, Homo sapiens
gagtggtggcccaggctccccacaattgcagcagttcaggccgagtccttcctgctgcttctgaggaaatggacacgtggccttggacactagatgaagawgcagggaagggagtgtgccccacccgagcctgctctcactggtggggcagagtgggctggcatggtcaccaagcagaggggggtccatgttaggggggca

SEQ ID NO: 391404 - DNA, 201 bp, Homo sapiens
aagggttaatgttcccgacgctgggccgcgagagggtggggacggtggtggaggcagaacagccgggctgcgtccctgggtgtggccggaaacaaaggaayccccgtctttacgctttgtctcggggtggggagctgagggcgcagcggtcaggagctggccctccgccccagttcctgcctggcatcagcgtggagcctg

SEQ ID NO: 391405 - DNA, 201 bp, Homo sapiens
gagagaaaaaaaaacattggaacacgcttatgatataatgttaggcaaaatcgctgttatgaacagctcgtttggggcagagcaaatcctgggaagtaacrctgaggctgttggtgcaggcggtggagtacaacatcttcgagggtatggagtgccacggctccccactagtggtcatcagccagggcaagatcgtctttg

SEQ ID NO: 391406 - DNA, 201 bp, Homo sapiens
tgtttgttctgcaagcacagcacaaacactctggccagcccttaagccaactgccttatgtcaagaagacaaatgtcagcacacattactcactttgtaaygtgcaaagcatgaggccagtgacataaatggggcatccctgacttgtgacacgtgcaggcacacgctagagagtctctcttacccactggcttccttatc

SEQ ID NO: 391407 - DNA, 201 bp, Homo sapiens
gcctgtccccagcacgcctcatccccacctgctttggttgaatccctgacactcactctaacagcgcccatgtgccccattcgcctctgcttattgccagwctcccccatccctcagtatagctgacacatgcagaagctctctctttctgatcttagatgcagtccccattccttaaattgtaccgggcacataggaagc

SEQ ID NO: 391408 - DNA, 201 bp, Homo sapiens
ggcaccatggtgtatcgggaagcactcaggatcagggatggagacaaggctgtgtcaccccggacctggcacgtcacccgtgacatctctctgtctccctygttttactcaaagtggaagcagacagtacctgtggcagagctgcctatgggacagtgcaggaaaaggacctggaaccgagtgctccagaagtggccgctg

SEQ ID NO: 391409 - DNA, 201 bp, Homo sapiens
gacgtaattttctgattatcctcctggaaatggcatctccagcctgtccccagcacgcctcatccccacctgctttggttgaatccctgacactcactctracagcgcccatgtgccccattcgcctctgcttattgccagtctcccccatccctcagtatagctgacacatgcagaagctctctctttctgatcttagat

SEQ ID NO: 391410 - DNA, 201 bp, Homo sapiens
gctctgtgacttccttcagatctttgctagaaggctcctcagtgacgtaattttctgattatcctcctggaaatggcatctccagcctgtccccagcacgyctcatccccacctgctttggttgaatccctgacactcactctaacagcgcccatgtgccccattcgcctctgcttattgccagtctcccccatccctcag

SEQ ID NO: 391411 - DNA, 201 bp, Homo sapiens
gaaaatgtcaggaacacggaccagaggccctagagtctgacaacgcctcacctgtctgctgtggccatcctggctcaggccaccatcatccctggcttcckaccaagactttctatttccacacgggcccaccccaccctacccatcacagtctgctgtcagacatttagaacctagattagatcaagcacccctctgctt

SEQ ID NO: 391412 - DNA, 201 bp, Homo sapiens
aattctttggtcccaatgaccttaggatattcacctcgataagctcagctccatttaaagagaattttaataatatattatgtttaatctaatggatccamatattaattcagcatgtcatcaatgtaaaaatcattaatattttgcatgatgttttctgtactctcttcaaaattcagtatcttacatgtacacaactca

SEQ ID NO: 391413 - DNA, 201 bp, Homo sapiens; identical to SEQ ID NO: 85853

SEQ ID NO: 391414 - DNA, 201 bp, Homo sapiens
cccgaactcagacaggcagccggaggagggaggggtggagcggggatgctcctgacacaaggatggtggctggaattctttggtcccaatgaccttaggayattcacctcgataagctcagctccatttaaagagaattttaataatatattatgtttaatctaatggatccacatattaattcagcatgtcatcaatgta

SEQ ID NO: 391415 - DNA, 201 bp, Homo sapiens
acagtaggcactcagtaagtgtttgatcacctgtctcaggaatgtcggattttactggggattttgacaagaacaccacaaggtggtcagggctgaaggtkgggggagcccagggactgaggggcacagaagagggagcagtggactctgtggaggccagggaggcttcccatggctggtcctggactgagccctgaatga

SEQ ID NO: 391416 - DNA, 201 bp, Homo sapiens
aagcgctgttggactcagtatgtccttctcattcaatggagcagatttcccttctgatcacattcaattaaggaaaatggagatgggtggtagctgttacmccagccttccctcctgtgacactgtgtgtgccgtgttcagctggaggccgaggcggtgttccgggccatcaccattgcgggccggatcaactgccctgtg

SEQ ID NO: 391417 - DNA, 201 bp, Homo sapiens
gcgcttggatgttgctgccgtatcccagcgtgagaccaatgctccaccccggagagcagggggcactgtcaagcgctgttggactcagtatgtccttctcrttcaatggagcagatttcccttctgatcacattcaattaaggaaaatggagatgggtggtagctgttacaccagccttccctcctgtgacactgtgtgtg

SEQ ID NO: 391418 - DNA, 201 bp, Homo sapiens
aagcggatcctggagatgggcatcacgggtcccgagggccatgccctgagcagacctgaagaggtaaggactcctcaacttgggcatgactctgacactcrccactgagcactcaccttgatgctgttccagctggagtagcccagccaggacccggcctcttcccgtgtcctctcccagaccatcccaaaccatcttgtt

SEQ ID NO: 391419 - DNA, 201 bp, Homo sapiens
gcccatggtgaggtcaggacagaactgggaggcagtgctataaacttgtatagcgcttggatgttgctgccgtatcccagcgtgagaccaatgctccaccmcggagagcagggggcactgtcaagcgctgttggactcagtatgtccttctcattcaatggagcagatttcccttctgatcacattcaattaaggaaaatg

SEQ ID NO: 391420 - DNA, 201 bp, Homo sapiens
agtaacatgttaaagcaccaaatgtgcgcctgcacacagtaggcactcagtaagtgtttgatcacctgtctcaggaatgtcggattttactggggattttracaagaacaccacaaggtggtcagggctgaaggtggggggagcccagggactgaggggcacagaagagggagcagtggactctgtggaggccagggaggc

SEQ ID NO: 391421 - DNA, 201 bp, Homo sapiens
cacccacgggaggtgctgtgatcctccttttgcagcccagagcagtgaagggcttagccagagtcacggctcagaaaccctcgggtctggccctgtggagmaaggtgttacccctggcatcttgcaggcagggcttccttcagatccgccctttcttcctttccttcctcccttgacgtttctgccctgtcgttccttatt

SEQ ID NO: 391422 - DNA, 201 bp, Homo sapiens
ttctagaggagatgtgaggattgaatgtgaaagttctgacatgtaaaagatgctaatacacacccgtggaagctgataatgaggtggtcaggaagcacagsgattgggtttggaagaaaaatcccaccattggttcttaggttgtattggatttggtagcaagctcgaaattgaggtgtctcaatggacaataaggaatag

SEQ ID NO: 391423 - DNA, 201 bp, Homo sapiens
aatggggaaagtgaaacccagagaggtgcagtaacgtctcaagtgccacacagcaactgaggcctgaactcagctctccctgacggagcagctgtcactgktgatgtctttatgggaattgcaaacacaattctttaaagaaatgggataaaaaagcacatgctttaggacactttctagaagctgcatgactaatgtctt

SEQ ID NO: 391424 - DNA, 201 bp, Homo sapiens
ggagagaagcacaaagtcagtctttctagaggagatgtgaggattgaatgtgaaagttctgacatgtaaaagatgctaatacacacccgtggaagctgatratgaggtggtcaggaagcacagcgattgggtttggaagaaaaatcccaccattggttcttaggttgtattggatttggtagcaagctcgaaattgaggtg

SEQ ID NO: 391425 - DNA, 201 bp, Homo sapiens
caatggagcagatttcccttctgatcacattcaattaaggaaaatggagatgggtggtagctgttacaccagccttccctcctgtgacactgtgtgtgccrtgttcagctggaggccgaggcggtgttccgggccatcaccattgcgggccggatcaactgccctgtgtacatcaccaaggtcatgagcaagagtgcagcc

SEQ ID NO: 391426 - DNA, 201 bp, Homo sapiens
ggggcatggtgaggacttgccacagagggtctgtgttgaaattatctggggatgtttgttaataatataaattcctggcttgtaatctagatctggtgaaygaatatcttgataaaagccccgatgggaatttttagcaggcaattccagggcattctgaggaccagctgggccatgctgtcgtgctatcagttttcagaa

SEQ ID NO: 391427 - DNA, 201 bp, Homo sapiens
taaatatgagtgtgcagctggatgggatggcagcacttgccgttgcaaggaggccagagtggggagcttgctcaaggggaaggctctggttattcaaggtrgggaccaagtcatggaagtttgacgtatttgagctataaaacctcttatgcagcaacccctgtggctcccagcacagaacctttacgatgtattaatttg

SEQ ID NO: 391428 - DNA, 201 bp, Homo sapiens
ctgccctgtgaaagccgatgcattatgcacgctgggttcttaaaagttcccttcttacatggaggcggaagcagatatactaggagggcgcaggagggaaygcataacttgagagatagtagctcaagtccgggagaggcctctgcatttgtggatgtcacccttgtcctttacatcttaagattgaaaaatgttttgttt

SEQ ID NO: 391429 - DNA, 201 bp, Homo sapiens
tatgttcctggcccatggtgaggtcaggacagaactgggaggcagtgctataaacttgtatagcgcttggatgttgctgccgtatcccagcgtgagaccartgctccaccccggagagcagggggcactgtcaagcgctgttggactcagtatgtccttctcattcaatggagcagatttcccttctgatcacattcaatt

SEQ ID NO: 391430 - DNA, 201 bp, Homo sapiens
atagtagctcaagtccgggagaggcctctgcatttgtggatgtcacccttgtcctttacatcttaagattgaaaaatgttttgttttgtttctcaaccacrtcttagttcctgtggaaatggctctgtaacgctgtgtgtgtgcatgtgcacacgtgttaggagttgggatgttgagtgggtagagagagaattcctgttg

SEQ ID NO: 391431 - DNA, 201 bp, Homo sapiens
actggctaattttttgtattttcagtagagacagggtttcaccgtgttagccaggatggtctcgatctcctgacctcgtgaatagagactgggtttcaccrtggtggccagtctggtctgaaacttccgacctcaagtgatccatccgtcttggcctcccaaagtgctgggattacaggtgtgagccaccgtgcctggcca

SEQ ID NO: 391432 - DNA, 201 bp, Homo sapiens
cctgtgccaccacgcctggctaatttgtgttttttgtttgtttgttttgtttgtttttgagacagagtctcgctctgtcgcccaggctggagtgaagtggygccatcttggctcactgcaagctctgcctcccgggttcacaccattctcctgcctcagcctcccaagtagctgggactacaggcacctgccaccacactg

SEQ ID NO: 391433 - DNA, 201 bp, Homo sapiens
agagagtatttgcttttaaccaggcttatgttttcccctcctaagggcccctagtttttggagagcccattgccgccagcctggggaccgatggcacccaytactggagcaagaactgggccaaggctgcggcgttcgtgacttcccctcccctgagcccggaccctaccacgcccgactacttgacctccctactggcct

SEQ ID NO: 391434 - DNA, 201 bp, Homo sapiens
agactagagtaggattcctagttgaagatatccatgttgtacccaaacaccacgtttcttcccagaggagaggcctgcagggagactccgagattcagagrgtggtgggtggccttggaagctcgtgtcttataaccctgcttcctctcattgatcccgggagattcaatataaagcaggtgcagatggagccatgcaggg

SEQ ID NO: 391435 - DNA, 201 bp, Homo sapiens
agctgctctgggcgctgtcctgcgtcatcttaagtaatcctgcccacccacgggaggtgctgtgatcctccttttgcagcccagagcagtgaagggcttarccagagtcacggctcagaaaccctcgggtctggccctgtggagcaaggtgttacccctggcatcttgcaggcagggcttccttcagatccgccctttctt

SEQ ID NO: 391436 - DNA, 201 bp, Homo sapiens
atcaaagactagagtaggattcctagttgaagatatccatgttgtacccaaacaccacgtttcttcccagaggagaggcctgcagggagactccgagattsagagagtggtgggtggccttggaagctcgtgtcttataaccctgcttcctctcattgatcccgggagattcaatataaagcaggtgcagatggagccatg

SEQ ID NO: 391437 - DNA, 201 bp, Homo sapiens
gagacggctgttctggatctggactcccagtttcgggatctttgatttcaacatcaaagactagagtaggattcctagttgaagatatccatgttgtaccsaaacaccacgtttcttcccagaggagaggcctgcagggagactccgagattcagagagtggtgggtggccttggaagctcgtgtcttataaccctgcttc

SEQ ID NO: 391438 - DNA, 201 bp, Homo sapiens
ccatgattgcataacaaattacttcagaacatagcgtcttaaagcaaattatctcatggtcctgtgggtctggactccaggtgcagctcagctatttctgrctgagggtctcacaggccatagtgagtggcaggttgggggcggtgagcatctcaaggctcaactggtgcaggatttgcatccagcctctcgtaggtggtg

SEQ ID NO: 391439 - DNA, 201 bp, Homo sapiens
ggcttcccatggctggtcctggactgagccctgaatgaaggtgggtccagtggagtgcatggcagagtacatggcctccaggagcagcgtggaactgatgytaacagatcccatccagcagcgattggcgctctctttcaggtgcccagatagatgacaacaatcccaggcgcaccggccaccgcatcgtggcgccccctg

SEQ ID NO: 391440 - DNA, 201 bp, Homo sapiens
tgtgaggactcaatgtcctcagaggccctatttcttctaagagtccattcaaggctatttaaattgctgtttgggaattcatttgctgcctggttccagakcctcttccacacatttagatatcttttatggtaacaccctacttctggtaacaaaacctgtactagtcatccatgattgcataacaaattacttcagaac

SEQ ID NO: 391441 - DNA, 201 bp, Homo sapiens
acctccgtttccttatctgttaaatgggttgagacgctggcctgggctcctgtctgaggacaggagtgagcatcaaatgaggacatgcaagttccagggckttgcaaactgtagaggggtgtgcacccgtgagggtgggtggatcatgggagggacgcttaccaagctgctctgggcgctgtcctgcgtcatcttaagtaa

SEQ ID NO: 391442 - DNA, 201 bp, Homo sapiens
ataatgtcatcgccctgggaacctccgtttccttatctgttaaatgggttgagacgctggcctgggctcctgtctgaggacaggagtgagcatcaaatgargacatgcaagttccagggctttgcaaactgtagaggggtgtgcacccgtgagggtgggtggatcatgggagggacgcttaccaagctgctctgggcgctg

SEQ ID NO: 391443 - DNA, 201 bp, Homo sapiens
tccacatgaatgtgtttgcagaggctggcaggtgaatgaccgaatgggtgtgatcggaacggtcttcatgaatgcacacgctgtgattttttttttttttwaaatctcacaccaacccctgtttatctctccatagctctatgaagcctttaccttccttaagggcctgggagctgtgatcttggtccatgcagaaaatgg

SEQ ID NO: 391444 - DNA, 201 bp, Homo sapiens
tcttcctctcctctctctctgtctctttgctcctgcccatggatgcatgtgttcccagccatctgacactgcttataatgtgtaagcttcagggctcagcragggaaagtattagatctaaggttctcaatttaattatcaagctggaaaggatttgatttggtatgtcggaaacctcccactcggttttgtggctggctg

SEQ ID NO: 391445 - DNA, 201 bp, Homo sapiens
ttctggaaccatctcccaacaaactatctgccccccgaatctttgcctcgctgttgacttctacaagaacatacatgaagatgggcccgttgctgctgccttgtctgggactcaggggtcctttccgggggtgggtaggtggtagtgtcaggcaaagtgacttctctttggaagggatttggggtcctcctgcatgaagct

SEQ ID NO: 391446 - DNA, 201 bp, Homo sapiens
cacaatatgtaaaatacctttggagtgtgggacagtgtgcctaagatcatgggctttgaaaaccaaccagtttgggcttcaatcctggcttccccacccarcacctgtgtcccgcaagacacgtggcctgaacctcaaattgctcacccgtaagttgggagtacaaacacccccttcatagtatgattgtgtgccctaaat

SEQ ID NO: 391447 - DNA, 201 bp, Homo sapiens
catcagggtgggggccttatgacgggattagtggctttataaggagaagaagagaggcctgagctggcatgcacctgctgtctcatgtgatgcccaccgcmatgctatgatgcagcaagaaggccctcaccagatgctggcaccttgttattagatttcccagcctccagaaccatgggaaatacacttattttctgtaaa

SEQ ID NO: 391448 - DNA, 201 bp, Homo sapiens
ctcaccagatgctggcaccttgttattagatttcccagcctccagaaccatgggaaatacacttattttctgtaaaattaccaagtctatggtattctgtwatagcatcagaaaacagagtaagacatcgtgtatgtgaggttcagaatctgacacataatggactgcagccatgcaaaagttttggataaaatgagacat

SEQ ID NO: 391449 - DNA, 201 bp, Homo sapiens
gggagcgggcccacccgtgggaccagagccgacagcgtctcttggggaatcgagatctgacgtgtgcagagttaataatgtcatcgccctgggaacctccrtttccttatctgttaaatgggttgagacgctggcctgggctcctgtctgaggacaggagtgagcatcaaatgaggacatgcaagttccagggctttgcaa

SEQ ID NO: 391450 - DNA, 201 bp, Homo sapiens
ataaaatgagacatgaacatattttgataattctagctgtggagtggagaatttgttgggaaaagaatgaaagctgggagttgtggctcacgcctgtaatmccagcactttgagaggccgaggtgggctgatcacttgaggccaagagtgtgagaccagcctggccaacatggcaaaaccccatctctactaaaaaataca

SEQ ID NO: 391451 - DNA, 201 bp, Homo sapiens
cacccatcagaaacctccaccagtccaacttcagcttatcaggtaggaaagagtggtggcccaggctccccacaattgcagcagttcaggccgagtccttsctgctgcttctgaggaaatggacacgtggccttggacactagatgaagaagcagggaagggagtgtgccccacccgagcctgctctcactggtggggcag

SEQ ID NO: 391452 - DNA, 201 bp, Homo sapiens
caaaccaggtccaggtgtggatgaggctccttggctgtatttcccataatctgtaggtctatgaagctaaagaaggaagatatctccctgaccctcctgayatacaacatgcagtggtggacctgacattcctattcaaaaagggaaaaatagaaggcaccaaggagttattggttcatggcggttctgaaatctggctgg

SEQ ID NO: 391453 - DNA, 201 bp, Homo sapiens
ggcggtggagtacaacatcttcgagggtatggagtgccacggctccccactagtggtcatcagccagggcaagatcgtctttgaagacggaaacatcaacrtcaacaagggcatgggccgcttcattccgcggaaggcgttcccggagcacctgtaccagcgcgtcaaaatcaggaataaggtgagtgtgtctgcagggga

SEQ ID NO: 391454 - DNA, 201 bp, Homo sapiens
tttcttcgcaagactgtttatggctgcttcttgcctcctgtgaggactcaatgtcctcagaggccctatttcttctaagagtccattcaaggctatttaarttgctgtttgggaattcatttgctgcctggttccagagcctcttccacacatttagatatcttttatggtaacaccctacttctggtaacaaaacctgta

SEQ ID NO: 391455 - DNA, 201 bp, Homo sapiens
gtaatcccagctattacaggtgggaatacaggtattacaggtgagaatacagccattatcaggtgtgaggctgaggcagagaattgcttgaacctggaagktggagcttgcagtgagctgagatcacgccactgcactccagcctgggcaacagagtgagactctgtctcaaaaaaaaaaaaaaatgaagtcagggtgact

SEQ ID NO: 391456 - DNA, 201 bp, Homo sapiens
gacttggaccagttgtgccccatcctcagcttcctgcttttgggtctgcaagatgtcagggtcaaggaatgatccttccaagtctgacttgtgtagcagcrtattccatccacatgaatgtgtttgcagaggctggcaggtgaatgaccgaatgggtgtgatcggaacggtcttcatgaatgcacacgctgtgattttttt

SEQ ID NO: 391457 - DNA, 201 bp, Homo sapiens
tggaggctacagccaagccaggtgcttgctctgcagccaggggcagctttcccaacttctctgtgctttaggctcatgatagccctaccttatagaggcasttgaatgatttcataagaagagtaaagtgctaggatggtgcctagcagagaatggtgccatacaggcatcagttagcagggtaattggttattaccatga

SEQ ID NO: 391458 - DNA, 201 bp, Homo sapiens
tcaagggatatggagccgcaagttgttcttcaggaggagtggttacgacttacaggacacctggccttcttatactactgggtctcctagttttgtttcaytgtcagtttcccttgctctgcttgttagtgtggtggagaaaatcatggaggctacagccaagccaggtgcttgctctgcagccaggggcagctttcccaa

SEQ ID NO: 391459 - DNA, 201 bp, Homo sapiens
ccacctgtgtttttattttctaatcagcttaaatgctctcagcaattccacattatccccagaataaattgcaagctgtctgcctggctcatcaggatgckcctgctcctccagactggcttgttccagttcctggggcccagagccccagccccctgcacctccgtttcccatctgctcgaggctgcctctggctcttgg

SEQ ID NO: 391460 - DNA, 201 bp, Homo sapiens
agaaaaaaattttatttaaagacacattttaagtaaaatgaagaacattttacttatttttatgtccagtacagtcaaagcagccacattgcataaccccrggggacccccttcctctttgtgatgccccagaacaatattgatttgattatagaaagccaccggcagcctacatgcgcaacggtgagttgttggttatat

SEQ ID NO: 391461 - DNA, 201 bp, Homo sapiens
acttcttccaagggaccagggcggcactggtgggcgggaccacgatgatcagtgagtgacactgtcccctgccttagggacatagactgtgaggtctcctycccatcaccagcatcacaagtgctcagtgtgttcgaggctctctgcccagggtgccattggatttcattctccccccagccctatgacacaggtcactgt

SEQ ID NO: 391462 - DNA, 201 bp, Homo sapiens
gtgattactccctccacgtggacatcacaagctggtacgatggcgttcgggaggagctggaggtgctggtgcaggacaaaggtcagttaaagcctcggaayggggttttggggaatcccttgttctttggtagatccaaagattatgtggagtgaaaaatccccctgtctgcatctgttctgagcctgattatgagctgca

SEQ ID NO: 391463 - DNA, 201 bp, Homo sapiens
tctgagctgaggctgactgtggttgctgctgtttgtttttttgttctgtggataaaaatgcctgaagctttaaaggctagtttttgtaagcagagctcaayctaatgcttaatgtttgtgaaaaagaacaaaagcgtcctgccaatgtcagctgtctcctcccagtgggggctggatgggagatgacagtaggtttggaga

SEQ ID NO: 391464 - DNA, 201 bp, Homo sapiens
tcaggctgtgtctttgaggaaatgaaaattcagaatggtagctaaccagcaggtgtggtgggcaagcatgtgtgtgtgtgtgtgtgtgtgtgtgtgtgtgkccctgaccttaattatcttgccatctaagtgacaaagtgcatgcacataaaacaacttaagaaagactaaagggtgcctgtaatcccagcactttgggag

SEQ ID NO: 391465 - DNA, 201 bp, Homo sapiens
ttgtgtgtgtgtgtgcatgcacatttgaagtgacctcaggtttctctctcgcccgcagggctctgctttatctgcccagaagggcacacatgcacagtgtygatcaatcacactctcccttcctctgtttaggtttttggattgcaaggggtttccaggggcatgtatgacggtcctgtgtacgaggtaccagctacaccc

SEQ ID NO: 391466 - DNA, 201 bp, Homo sapiens
  misc_feature (1)...(201): n = A,T,C or G
gttcaggccgagtccttcctgctgcttctgaggaaatggacacgtggccttggacactagatgaagaagcagggaagggagtgtgccccacccgagcctgntctcactggtggggcagagtgggctggcatggtcaccaagcagaggggggtccatgttaggggggcaacatggtggtacctgatgtgggtttacaaagag

SEQ ID NO: 391467 - DNA, 201 bp, Homo sapiens
cgggtgacctgggcctctggctgtggaaccgttggttggtgatgtccaccacagctggggtcggggtggggagagtattgcatgaggttttggacattctsatttgggggagcttttgagtcatctcggtggagaagccaagaacacaaccgggttcagagttctgtagctcagagcaagtggtgtgtttcaatgagctgg

SEQ ID NO: 391468 - DNA, 201 bp, Homo sapiens
caggggatgactgcggctgatgacttcttccaagggaccagggcggcactggtgggcgggaccacgatgatcagtgagtgacactgtcccctgccttagggacatagactgtgaggtctcctccccatcaccagcatcacaagtgctcagtgtgttcgaggctctctgcccagggtgccattggatttcattctcccccca

SEQ ID NO: 391469 - DNA, 201 bp, Homo sapiens
gtggcctggatgggatgtgtctggaccagttgggaggcgattgcgtaattcagctgagagatgagggtggcgtggccatggagtgggcagaattggacagytccagggatatggaggaggccagtcaacagccttcggtgctgggtcacacacgggggcatgtgagggaaaggaagtgccacgggtgacctgggcctctgg

SEQ ID NO: 391470 - DNA, 201 bp, Homo sapiens
agcttctcacaggagcccaggagggcagaggctgctgtcttggctgcctggctgtggattctgtctagagctgcacttttggtcactgaagcagcatcttyctgtgtctttattactagggttttttgtgacttagaaaattaatatgctgcccaatctcaagcgttcacaacaattggattttttttagaataaaaatca

SEQ ID NO: 391471 - DNA, 201 bp, Homo sapiens
gccctgtgcagcccgatggctgtttcttgtgttgattttgaagagccgcttttgcttggattcattttaataagcaattttaattaaataggccacagttkattgtaaatgttctttcaactgttaggctcttcggtttcaggaggcctgtctgtaagctggccccaaccctgcccatctctcccgctccttcacaaagga

SEQ ID NO: 391472 - DNA, 201 bp, Homo sapiens
ccataggttcacatctttagctggtatatacctaagagaggaatggctgggtcctagggtgtgtgtagattcagcgttagtggttactgctacacagtttyccagcgtgcacgcacccctgcaccagtgtgagagaggtccagcctgcagcccccagctcctgagtggcacataaggggctttgctctcctcactgccagc

SEQ ID NO: 391473 - DNA, 201 bp, Homo sapiens
cttctgcctggaccgtgcccaggcctttgcctgagatggcatttggggtgcgaccctgtcctctgttagagctggttgtgagccttcaatgagagaagccrtgatgcgcttagaagacgctgttctccagttgctgttccttttaagttaagggtcgagtgtcttcccaacccctttcccttcagctcttggcaagcccac

SEQ ID NO: 391474 - DNA, 201 bp, Homo sapiens
acttcccctggactggctgtgtgtgtatgtgtgtgtgtgagtgtgtgtatgttagtgtgtgtgtgtgagagagacagtgcgtgtgtgtgtgtgtgagtgagtgtgtgtgtgtgtgtgtgagagagtgtgtgagtgtgggtgcatgtgcatgcacctgcagggagtgtggaaggaggaaggcaagctgatcgggcatggaat

SEQ ID NO: 391475 - DNA, 201 bp, Homo sapiens
tcattagagtacttgttggcccccactgaatggtgactcggtcacaggcttgaatcagactgagctgtgattccgctgacactcacgtgtaggtccgtgcscatgtgtagacacaccacgtgcatgtctacagccagcggcccttctgcctggaccgtgcccaggcctttgcctgagatggcatttggggtgcgaccctgt

SEQ ID NO: 391476 - DNA, 201 bp, Homo sapiens
cttcccctggactggctgtgtgtgtatgtgtgtgtgtgagtgtgtgtatgttagtgtgtgtgtgtgagagagacagtgcgtgtgtgtgtgtgtgagtgagtgtgtgtgtgtgtgtgtgagagagtgtgtgagtgtgggtgcatgtgcatgcacctgcagggagtgtggaaggaggaaggcaagctgatcgggcatggaata

SEQ ID NO: 391477 - DNA, 201 bp, Homo sapiens
ctaaccaggctgttgaggaaaaatgcagtttccctaaattcattatctgtcagcccctcttggttgtaatccccttttacttgaacccgttgctgagaagytctctgcgtgttggcagtcctactccggacttgtgaagctgagtgagtgacggtgactgaggcctcacagggcccttgggtgtttattctgaacgtgcat

SEQ ID NO: 391478 - DNA, 201 bp, Homo sapiens
gcagcggccactgtccctacagcactgcccagaaggcggtgggcaaggacaactttaccctgatccccgagggtgtcaacgggatagaggagcggatgacsgtcgtctgggacaaggcggtggtaaggctggatctcttctcaggagcattctagaaacactctacctgccctgtgaaagccgatgcattatgcacgctgg

SEQ ID NO: 391479 - DNA, 201 bp, Homo sapiens
tacccatcacagtctgctgtcagacatttagaacctagattagatcaagcacccctctgcttggaaccagtaagtcctctgccagtgaaacccaagtcccygcaacatccaacaaggcagaactcaatccggtgcacacgccctgaccaacctccctccctgggcctcctctgcccttggctccctcggtccagtcccagc

SEQ ID NO: 391480 - DNA, 201 bp, Homo sapiens
tgtgttttttgtttgtttgttttgtttgtttttgagacagagtctcgctctgtcgcccaggctggagtgaagtggtgccatcttggctcactgcaagctcygcctcccgggttcacaccattctcctgcctcagcctcccaagtagctgggactacaggcacctgccaccacactggctaattttttgtattttcagtaga

SEQ ID NO: 391481 - DNA, 201 bp, Homo sapiens
agtcccagactttgaccatttcaaatccagcccgggcctcccctcctctggcttcattccttgcttgctcttccagccataatgaaaacttgggactcacrggacttgccaggctgctgtcacctgagagccttgcacccatcagtcccctgcctggaacaccttttcccctgtccctctgccttcccctcatctcttatt

SEQ ID NO: 391482 - DNA, 201 bp, Homo sapiens
ctgagcagacctgaagaggtaaggactcctcaacttgggcatgactctgacactcaccactgagcactcaccttgatgctgttccagctggagtagcccasccaggacccggcctcttcccgtgtcctctcccagaccatcccaaaccatcttgttttccccgggaaccctggggactgctggctggagaagacaggaaga

SEQ ID NO: 391483 - DNA, 201 bp, Homo sapiens
aagcactttatgtccttcctttcagataaacacttggggttacagaaaataacttatcccaagatgtcctggaggcctttgatacagtcaacaaaagacaytcaaagagctgaaaattggttcagttacatagaaaacatagcatgtgatgtgctggcataattgtgattttcacctgtttcattctaactactggagcca

SEQ ID NO: 391484 - DNA, 201 bp, Homo sapiens
atttcctgggcctctggattggaggacagcctcaccttcctcaccttgcatttagaaccactaataatggtccattcattttttattttattttattttatttattttattttattttattttattttattattttattttattttattttttgagactgcgttttgctcttgtcgcccaggctggagtgcaatggtgcaa

SEQ ID NO: 391485 - DNA, 201 bp, Homo sapiens
ttctttaacattgagtgtgtacttttagaaatcagtaagaagaatgccaagaccctgagaaatagaataatgtgcaaaacacagtgacaccgtaagaaatwaatatagaaatggcatgtgttgatttaaaaagagacccagtctcagtcacagatgcaaataaccacctagagatagtatttttcacctgtgccagcaact

SEQ ID NO: 391486 - DNA, 201 bp, Homo sapiens
gatcagagaggaagaagtggaccatttttagggaaaacattattttgtttaaatcaaattcttaaaaatgtctcagaggggacataaaagtgaaagtgacrtaactataccaccttaaccgtgaatgcccatttcttctaataaacatggccaagactgaatacatggagcacacacaatacaacatacatgagtgtgcat

SEQ ID NO: 391487 - DNA, 201 bp, Homo sapiens
tccacggagggagggttttactttctgccggcagagcggccttgaggcttgggttacagtgggctcgggttccggggcgggcctcaccgctccagggcttygcaacgggtgccccggcccttccccccccgcccaccaggcttctccctgggctgcaggaggggtttctgcggcgcaggcgcaaggattgccgctgccgga

SEQ ID NO: 391488 - DNA, 201 bp, Homo sapiens
agagcaagcagctaaaaggaagaaagcaatgtttgtggatatatgaggttgtagttccccactccttccttgggcctgtgtcccaggcatccagagcattygccttgacctggcacaccatgtgtggccctctgcctttgtatcagctgtgtccattctctataaaggattcctcctcctgggctgggggtggtgagcact

SEQ ID NO: 391489 - DNA, 201 bp, Homo sapiens
gagctgagggcgcagcggtcaggagctggccctccgccccagttcctgcctggcatcagcgtggagcctgactgttcctgagggatgcggaccactggagyccatgtatgcaggagcagcccggggccgggaggcgggattctgggcgtggtggaatcctccagggtgactccagaggtttgactactggagacccagcct

SEQ ID NO: 391490 - DNA, 201 bp, Homo sapiens
gactgaccccagggaacgccctggtacggggaacctaggacttaacaactccaaggaagggagtgtaggagttggggagggacagtgtccccatctgcaayttccggtcattgacagggattttaggccccgctgagagccagggatgcatgaatgcgtggagggaaatgagttgtaaacagagtgtaggggaacctggca

SEQ ID NO: 391491 - DNA, 201 bp, Homo sapiens
gctgcggcgctttgtaccggcgaaatctgcttgggagcagcgatctgtttggccagtggcaggcggatgctcctccccctgatacgcacgtggtcttgtcycttgctgtaggggctttctgctcagatctccagactgaccccagggaacgccctggtacggggaacctaggacttaacaactccaaggaagggagtgtag

SEQ ID NO: 391492 - DNA, 201 bp, Homo sapiens
ggcctctggattggaggacagcctcaccttcctcaccttgcatttagaaccactaataatggtccattcattttttattttattttattttatttattttwttttattttattttattttattattttattttattttattttttgagactgcgttttgctcttgtcgcccaggctggagtgcaatggtgcaatctcggtt

SEQ ID NO: 391493 - DNA, 201 bp, Homo sapiens
tttgaaggagtgacagtacaattttgtgacatagctatattgaatagtggtgaagtctgagcctttattgtaaccatcacccaaatagtgtacgttttacscattaatttctcatcatccactcccctcccatcgtcccgccgcccttctgtgtctctgttgtccatccttccactctcttttttttttttgagacagagt

SEQ ID NO: 391494 - DNA, 201 bp, Homo sapiens
caggaatttgctgggcaaaaacagagaggaaaggtgttactggcggacagaagagtgtgaggtaggagcagggtggcattttcacacctcggagcactccrcacgcacagctgcctatccatgctaaaggtggccctgacttcaggtctagaaattcgacccctttcagaaaatctgccctaaaagatgggaaggaggcag

SEQ ID NO: 391495 - DNA, 201 bp, Homo sapiens
  misc_feature (1)...(201): n = A,T,C or G
cacctgaagaccctgcagggtacgggaccccccctcagggaagccccagaagagactggcaatgtgtgcttttagtttggggcagaataggatgtcagatnctgtgaattttatttttgggaatataattatttcagtgttttaatgtatttatcccgtgctttgtctcaaaaagcctttttcaaaaggcacttaaagaaa

SEQ ID NO: 391496 - DNA, 201 bp, Homo sapiens
gaagagtgtgaggtaggagcagggtggcattttcacacctcggagcactccacacgcacagctgcctatccatgctaaaggtggccctgacttcaggtctrgaaattcgacccctttcagaaaatctgccctaaaagatgggaaggaggcaggcagggagcaataatggaaacagggtggctggatttggatgttcctgac

SEQ ID NO: 391497 - DNA, 201 bp, Homo sapiens
tttcattacagaaaatcccatttgtgtgaggttatacagtgagatgtaaggtgagagtataaagtgtggctaagcaaagtggctgcctttaaaaaaatcaratcttccagaatggaagcatttagcagagtgttggccctttcagagtgttctccactggcgatggcagtcgcagagtgacagtggtaagaatacagcagt

SEQ ID NO: 391498 - DNA, 201 bp, Homo sapiens
ataacagatcgaaagaaataattagtaagttgtagagctgggagttacacccaggtaggctggctccaggcctcctgcatgtagccaccaagctctgggarcagctgctgctctttgacccatgaatgaggcacaagcccacagtctcttaagctctatccaggagagctccgaggagcaggcaggactcacggacctcgc

SEQ ID NO: 391499 - DNA, 201 bp, Homo sapiens
  misc_feature (1)...(201): n = A,T,C or G
cccctgccccaggaaagaggggacctgggggtgcccaacaatgaggaccttgcctccggggaccagacctcaggctcactcaggtatgactgggccccggncctgttgcctgtggctgggtttggtaaatgcactcagctgctgtgtgccaaaagtcagggcaggaaaatcatcagtcccctcagaggcattaaatgtgaa

SEQ ID NO: 391500 - DNA, 201 bp, Homo sapiens
tttgtgggcagtaagccatgatgataccaggggtgccacatggctgttacccttcctgtttgtgtctcatttggccagatgagccttgacctacctccacwccccattggcatccagcctgaagtgttgggcagtcccttctttgaccagggatggctgtggtcatggcacttggatgacctcctacccaaggagggaaac

SEQ ID NO: 391501 - DNA, 201 bp, Homo sapiens
  misc_feature (1)...(201): n = A,T,C or G
ggcagtaagccatgatgataccaggggtgccacatggctgttacccttcctgtttgtgtctcatttggccagatgagccttgacctacctccacaccccantggcatccagcctgaagtgttgggcagtcccttctttgaccagggatggctgtggtcatggcacttggatgacctcctacccaaggagggaaacgggttt

SEQ ID NO: 391502 - DNA, 201 bp, Homo sapiens
  misc_feature (1)...(201): n = A,T,C or G
tttgaccagggatggctgtggtcatggcacttggatgacctcctacccaaggagggaaacgggttttattggtttcttaacaacccatgtcaaagtaaaanttgttttgatcacctttggctgcattttcatttaatccgattgggtaagttatggcatcatgatgggcatggagtcagcgttctaactggctgcctttct

SEQ ID NO: 391503 - DNA, 201 bp, Homo sapiens; identical to SEQ ID NO: 85863

SEQ ID NO: 391504 - DNA, 201 bp, Homo sapiens; identical to SEQ ID NO: 85864

SEQ ID NO: 391505 - DNA, 201 bp, Homo sapiens; identical to SEQ ID NO: 85868

SEQ ID NO: 391506 - DNA, 201 bp, Homo sapiens; identical to SEQ ID NO: 85869

SEQ ID NO: 391507 - DNA, 201 bp, Homo sapiens
gaacttcactgtagaacgtgattgttgccaagataaactcactgaaactgtagaattgtttagaatctttgtttgtgatagggagtgaattgtaattcccragcacgcaccgtttggctttcttaagtaagtttttcacctcacttcttgctgcttgtgctcatttcacagatggaagctttctggaaacagatggcaaat

SEQ ID NO: 391508 - DNA, 201 bp, Homo sapiens
ccagacaatggaaccagaaagaacttcactgtagaacgtgattgttgccaagataaactcactgaaactgtagaattgtttagaatctttgtttgtgatarggagtgaattgtaattcccgagcacgcaccgtttggctttcttaagtaagtttttcacctcacttcttgctgcttgtgctcatttcacagatggaagctt

SEQ ID NO: 391509 - DNA, 201 bp, Homo sapiens; identical to SEQ ID NO: 85878

SEQ ID NO: 391510 - DNA, 201 bp, Homo sapiens; identical to SEQ ID NO: 85880

SEQ ID NO: 391511 - DNA, 201 bp, Homo sapiens; identical to SEQ ID NO: 85881

SEQ ID NO: 391512 - DNA, 201 bp, Homo sapiens
agcactcagggccaggggagagagaagaggatcagcagtgcagccccaggatgcctcgcaggtaccctgcctccattttggttaccatccccacttattaygggctgtgggctgttatggtgatggatggatgtggatttggaaggggaccatgagagatgatgtattatgatgaactcatgatttaattctttggtgaaa

SEQ ID NO: 391513 - DNA, 201 bp, Homo sapiens
atagggaaagactttgaagtccacatccaggcataatggatagccaggctgcctaagtggtttgatagatctcccagaaaattcccagatggactctggaygcacagccatgccacagctttcctcctcttgggaacagactaccagtgagaggctttactctgaagccaggtgcaccagggcccctgtgtcttttcctct

SEQ ID NO: 391514 - DNA, 201 bp, Homo sapiens
agaaggagagagaatactctgaacagctaatcgataatgtgcgtgccggactttctttcctgtacacaaattttggttcctaaaacagttaaattggctamattagagagatgatagttagaagtgtgcctaatacttgaattcccctatcgcattctgccctagaggcaggatccagtttctgatgctaagtgataggga

SEQ ID NO: 391515 - DNA, 201 bp, Homo sapiens
gaaaaatagaaagttcaacttgctaagagccccttttgcttaggaaacttcttttcatggtttttcacttcataaatggacttgattggaatgaacctttrggcaaatgacactgtcaatgggcatcacggccacactctgccttggaaagagtaacacagaggagggttacgcacttacgtcagaagagtagctctgttg

SEQ ID NO: 391516 - DNA, 201 bp, Homo sapiens
tggtagaccctactggtgacatctgaaaatggtttggctttacgtagatgaaggaaaagtatgtgcaaagaccttgcccattctgtctcactttttaagartcaatatgcaatctggaggcaaagatagacaaaccaactgatgtggtttggctgtgtccccacccaaatctcatcttgaattgtagctcccataattccg

SEQ ID NO: 391517 - DNA, 201 bp, Homo sapiens
tacactcagccccctcaccatgtgatgccctgcactgccttaggactctgcagagtccccaccagcaagaaggctctcaccaaatgcaccagcaccacccsaaccttggacttctcagtctcaaagtctgtaagaaatgaattccttttctttataaattaccccatctcaggtattcagttacagtgatgccaaatggac

SEQ ID NO: 391518 - DNA, 201 bp, Homo sapiens
tgcaacccatgcaacgcctcaaagagtttgcaggacaaaattccagttcaactttctcaacgtgtgcgtgcctgccctcatgtggccatctcaccaaatcrcagatacactgccctgagaccttaagaaagtcaggagggatcaggtcaacatctaattttgttcccacacatttgttgagcaccaagtcctggtattttg

SEQ ID NO: 391519 - DNA, 201 bp, Homo sapiens
aaaactcagtacagagggacaaggagtgggccaggtctatggggggcagggctggggatgctgtggggaggacacctccacaccagcctgcaggaggacgrggaaggagggcaatggagccacagccctagccccactgggaaagggttgtgggggcagagaccctgaaagcagcagggcttccaggcaggaggctgtcag

SEQ ID NO: 391520 - DNA, 201 bp, Homo sapiens
gaggcgtcacacacagaagaccaagcttgagaagcacagaggcgagcagaagtggctgctggactgggggagttgactggcaaaagtcacggtggggaccrggccgactgacctcaatgttgtgtttctatccacccccaactcctgaccttcgggttttagaaagacgacactcaaaatctgctcaagaatttggagtct

SEQ ID NO: 391521 - DNA, 201 bp, Homo sapiens
agcaatgagggcagcaagggatcactttcatcaccatccactggttcctgccggtttcttcactttatcctgtctggaccagatcccattttgatcagcakggttgtgatcagaaaacaagtcctgccagtctcctacctcaccttatcctcaccatcattgtcatcattattctcgttactactatcaccagcctcttat

SEQ ID NO: 391522 - DNA, 201 bp, Homo sapiens; identical to SEQ ID NO: 85893

SEQ ID NO: 391523 - DNA, 201 bp, Homo sapiens
gccgaggcccaggaggtggggcagcttctgcagcagcacatggagtgcgccattgggcaggcgctgctggtgcatgcacggaatgcagccaccaagagccrggccaaggacagggatgacttcaaggtatgcactgacctctgtccctggggacaccgagggcaagaatgttcagggtagggtccatgcctgggtctgctc

SEQ ID NO: 391524 - DNA, 201 bp, Homo sapiens
gctgcttttctgaggcataatttacatacagtcaaatgcgcagactttaggttttacagtttgatgagttttgacaattgcatgccccttagaacaaatayccccctgagaatgttttcatcacccagcaagtcctctagtgcccctttctggtcacttcccgcccccacacacttccagaggtgcccatgcgtgggattt

SEQ ID NO: 391525 - DNA, 201 bp, Homo sapiens
cagctgccacattggcattcattttttcattcaccccacagtaaaagttttcaggcaccttctacagccagtcactggcctagggacgacattcatgagcrggagagaccctgccttgaggctgtgaacctcaaggagaaggacgaattgcaagtttgcaagtaaactatcggttatgacaccgcatggggagtctgcgat

SEQ ID NO: 391526 - DNA, 201 bp, Homo sapiens
atgtggaaacaacccaaatagaaaaactggaaaaataaaatgtgatatatgcagacattggaaggttatttggccataaaataaaatgaagggccgatggrtgctacaacctgaatgaacctagaaaacatgctaaatgaaagaagccactcacaaaagaccacatgttataggattccattcctgtgaaatgtctagaat

SEQ ID NO: 391527 - DNA, 201 bp, Homo sapiens
gggtgtcatgtagacaagcctctgacagatatagtttcccaatgggctgcttttctgaggcataatttacatacagtcaaatgcgcagactttaggttttmcagtttgatgagttttgacaattgcatgccccttagaacaaatatccccctgagaatgttttcatcacccagcaagtcctctagtgcccctttctggtca

SEQ ID NO: 391528 - DNA, 201 bp, Homo sapiens
taagtgttccagctccaaagcccgacagctgatgatgactctgacggaaagaatgattgcagccgaagggctattgtgcgattctcaggagctgcaggctytggtaatgctggagggggcgggagggaacataaagatattcagactagagatatggaatcctgaggcttgacatccttaaatctaacagattcatgttgt

SEQ ID NO: 391529 - DNA, 201 bp, Homo sapiens
ggtgcctgttacatcccactccgttgggtgatccttgacagcagcccaactgcgccacgcctcggtctcctcatctgcagcaccaagggtttggacaggaygctggccctgctcgccatggtggacagaaggacggctggggctcccacgcctgaatgcctattcctgcttctgcctcttccatccttgcggtgtgggtta

SEQ ID NO: 391530 - DNA, 201 bp, Homo sapiens
atggaagctggggagagaccaaaaccagatgcagagcctcccagtccgggctggagcctgggaatgcaggaaggtctctggacttctccatctcaattggycacttaggaagcatacaaagaacaggaccacacaggtacacacatggccacacacacagagctcaccacatgctcgcatacacacacgcgcacacacaca

SEQ ID NO: 391531 - DNA, 201 bp, Homo sapiens
gatgtgatccttgcgacaaccttctttctaatgagattattttcctcctgtctcctccctctagtttttatttataaaatgtatgtcagacaatatgattstcctgattaaacacctccagtgactcctggctgcctgcaaaagataatgcccaggctgggcactgtggctcatgcctgtcatcccagcactttgggaggc

SEQ ID NO: 391532 - DNA, 201 bp, Homo sapiens
gaggccacctctttctgccctttctccatcccttttccaacccctgggccctggataggaccagccccacatcccagtcctggccagagcttctctgtgaraggagcacttggcccctgctcccagtcctttccctcccaggaggcgcgtgtgctggaggaggccagccggctagaggaggaagcacagcagacacggctg

SEQ ID NO: 391533 - DNA, 201 bp, Homo sapiens
agaccccaacacctggctatggttacaccttccatggcgcttccaggagccctcagcctgggaggtgctttgtgcaaaaaagtttcctagtgaaataagtwtgggaaaatgtggcttgctttcttggtattcaggatgacgagctctggagtcacagcatctcagtcctaaccccatctcagccattcactgtgtggcgtt

SEQ ID NO: 391534 - DNA, 201 bp, Homo sapiens
cccaactcctgaccttcgggttttagaaagacgacactcaaaatctgctcaagaatttggagtctaatgcgcagaccccctcggaaactggctccccatcraggaggaggaagagagaagtgcagatgtcgaaggacaaggaagctgttgatgtaagcttggtgttgatgtttgtttgtggaggcacatgtgggaggtggg

SEQ ID NO: 391535 - DNA, 201 bp, Homo sapiens
cttttccttcctgagttcagaatcatttgagagagtcaggaggacagatatagaaatgtagctttgttactgattagaggccagcttggacgatgtggctwacatgcacagctatcatggcttcctaatactgaatcccagaattcactcaattgcctagctagtcacgggcaatgctgggccacctcaggcttccccaca

SEQ ID NO: 391536 - DNA, 201 bp, Homo sapiens
atgagggtcggggtggctgcctgaaggagaccagtggatgcttcctatgcaagtggccctcatggaattggctgtgcatggcaacacctggcatatggcasgcattccatgaatagtggtatggccactattttaggtccttgcaacttctgcctctttggggtgggaggagagtaaagtctgcgcgatcagaaacaagat

SEQ ID NO: 391537 - DNA, 201 bp, Homo sapiens
gagagatacggattctagttccacactggccactaactagctgtgtgaccttaggcatcgtgcctaggctctctgggcttttgtgaccttgtctgtaaatkagcaggcttggctaggccacccctcaggcccacttgctctctagcatttgataattccagttcttgggtctggtgttcactggctgtgtctcctaactga

SEQ ID NO: 391538 - DNA, 201 bp, Homo sapiens
actggagcaggggtcctcccagtgcctggacgagcatcagtggcagctgctcagggccctggtaagaccagcatggtggccccacccattccagacaggcrgtgcccctgcagcaggccccagcttccagcaggtttgccagaacccgaatcctatcacccttggtgctgcagggtgcggtattcattcgccggggctgcc

SEQ ID NO: 391539 - DNA, 201 bp, Homo sapiens
atcagacctggacaaggtctgtgtgagtgaaaggcccctgcatgcccaggtgtggccctgcaccctgcatgttaaaggtgctcaggagaaatgtgttgcaygtgtgattggcaccgccctgaaagagctgcttcccagcagggtccttcctgctctggggagcataactctatcgtcgtgtgctgggactgtaagaacctg

SEQ ID NO: 391540 - DNA, 201 bp, Homo sapiens
atggtgcatacagtggcttaccttcccctgagcacctaccctgatgcacaggtgcccagccacttgcctcatcctgctctccagccactcaagacacctcrctgttgcccgtacacctctgcacttctgcacatctgttctctccgcctgcgcggtcctttcttagactctatcctgctcagccctcaggacccagagaga

SEQ ID NO: 391541 - DNA, 201 bp, Homo sapiens
agacattttcaagtgatgctgatgctccctctgtgggatatatatattttttcctcgatgtctttactgtaggactatctgactgggttcttctttgcagracccttgtactggtctgctatggttggtaaacaaccccccaaatctctggcctcatcatctaccccaagacccacgacagactgctgcatctacacaggt

SEQ ID NO: 391542 - DNA, 201 bp, Homo sapiens
gggaagttgagaagtgtctgggataacagagttttaaatatagtctactctccttattcatggtacttatgttctgtaaactcactgagaacacagcattrgcgaacactgaaccattgttcctggggggaaaacagggttaggttcctacaagcctctggtcacaacatttccattaaccagtcaatacatagcatagtt

SEQ ID NO: 391543 - DNA, 201 bp, Homo sapiens
tgattgcagccgaagggctattgtgcgattctcaggagctgcaggctctggtaatgctggagggggcgggagggaacataaagatattcagactagagatwtggaatcctgaggcttgacatccttaaatctaacagattcatgttgtagctggttatatagagcctcagggaaaaaaaaaccaacaacaacagtaaattc

SEQ ID NO: 391544 - DNA, 201 bp, Homo sapiens
caaaaactgtgctactagagtatgaaaagaatgtttgtttacagcatgagagcagagacaagaaggcagagtgctactttgttccatctcaactgagcacrtgcatgctgggcaactcagattgttcatgctctgcatgtatttgtgaataactgtaaaagcgccatgagcattggtttgggggttctaaataaatattag

SEQ ID NO: 391545 - DNA, 201 bp, Homo sapiens
gctgcgtccccacacccaacttctagcctctgctcctttccaacctgttccatcctgttccgcagccttagcttaccacagaagaaagtgggctcgggatwtaaaaacggatttccccaaaggtccgaagtcagtagggctcagcttctagttactctgaacaatcagcttttgcgttagccctgcatctccctccctggc

SEQ ID NO: 391546 - DNA, 201 bp, Homo sapiens
tttggccataaaataaaatgaagggccgatggatgctacaacctgaatgaacctagaaaacatgctaaatgaaagaagccactcacaaaagaccacatgtyataggattccattcctgtgaaatgtctagaataggaagatttatacagacagaaagtagattagtggtttccaggggctgcagcagaggaaagggaggga

SEQ ID NO: 391547 - DNA, 201 bp, Homo sapiens
atgtgatgaaaacacatctggctttgggagctagaatcctggaacccagtcccagctctgccacatgtttgctgtgtgatgttgggcaggaagcataaccygtctgagcctcaagtttctcattttaaatgacagcagtgatggtgctccccctgccattcccgagtcacccagggctgagttaatgcgtgtgaacgttcc

SEQ ID NO: 391548 - DNA, 201 bp, Homo sapiens
agtgctgctgaaataagcgccccagagcaagatgctcatgggagggagggagccaatgctcctgtcctctgaataggtccaatattgagaggagaggcttrgagatggagggtctccatgagagcccaggttagaggactttgagggccagaatgttcttagaactgtgggccaggatgctaaggaagagggccagcctgg

SEQ ID NO: 391549 - DNA, 201 bp, Homo sapiens
  misc_feature (1)...(201): n = A,T,C or G
gagtcacagatgcttgagttgcagcgggaagcactctgggctgagagatacggattctagttccacactggccactaactagctgtgtgaccttaggcatngtgcctaggctctctgggcttttgtgaccttgtctgtaaatgagcaggcttggctaggccacccctcaggcccacttgctctctagcatttgataattcc

SEQ ID NO: 391550 - DNA, 201 bp, Homo sapiens
ctggcctgtggcctcggcccagcacagaggtgcctaggcctgagctgggcgtggctgggagtggggggtgcagagtctgtgccgagggagatgccaacgtycgccgtccgctcctcctttcccccttactctcattccacaagcagctgctctcaggtgtgcagggcccttggctgcctccggttgacatttccccctgtc

SEQ ID NO: 391551 - DNA, 201 bp, Homo sapiens
agtccctgaaatgatgaggtggggctggggagggccttctgtagaatctgactgcggggagtcgtgttggaagccaatcattcccctgaaaatctcggccrtcctcagcagtcaggctctctggggctctaacaaaagccaggaactgctggcactttgcatttcctccacagccctgtgggggccacagggccagattgg

SEQ ID NO: 391552 - DNA, 201 bp, Homo sapiens
gtggtatggccactattttaggtccttgcaacttctgcctctttggggtgggaggagagtaaagtctgcgcgatcagaaacaagatggcgtggtcttgctrcccccatttctggcccgtgggaagatgagacagatcttgtgcggtttccatgtaggcacaggctctttcagaatataggggaatttggtgactcatgggg

SEQ ID NO: 391553 - DNA, 201 bp, Homo sapiens
agtctcaaactcctgacctcaggtgattcacccgccttggcctctcggtgctgggattacaggtgtgagccactgcgcccagcctgtcattctactcgctstgtccatgtgcacacattattgagctcccactcataactgaaaatatgagatatttctgtttctgagttgtttcacttaagaaaatggcctccagttcca

SEQ ID NO: 391554 - DNA, 201 bp, Homo sapiens
gatcaggtggagccttcctgccagctgggatgtgtttctgatgcccatttcccggctcctccatccccaggtgctgcgcctacaggtcttgggtggacccmgcaccaacatcctttccttcttttttttttttttttgagatgaagtctcactctgttgtccagtctggagtgcagtggtgcgatctcggctccctgcaac

SEQ ID NO: 391555 - DNA, 201 bp, Homo sapiens
ttcacatcatgttgacagagccagcatggcatcagctaaagagggcggacctggggccagcaaagctgagttcagatcccggttctagtgatgattagctktgtggccttgggcacgtgacttcacctctctgtgactcattttctctgtctggaagtggagacagtgacctctgtggcagggtccttggaagcttgggga

SEQ ID NO: 391556 - DNA, 201 bp, Homo sapiens
cgccgcgctcggcctcggcctcggcctttggcttggctgccgcgcgggccgccagcgcacgcgacaccaggtgggtcggccgagcagacagcggcggggcsgggagcgcggggcgcgtggcttctgggtcctgcgggcccggagccccggctctgcgactccttgagcctggttgggaacttcgcacgcaaccgcttaggc

SEQ ID NO: 391557 - DNA, 201 bp, Homo sapiens
ttgtcacccaagtctttttgtgagttgtaaggtacagagaaacgacaagaacaggagcccctggtgtggagtgtccctcccgtgttgctcacagggcatcrcggtgcagctcttcctggagaggtatctaggccacagtgctggctcagtggaggctgtgtcagcacctcaaattaggagcaagtgatcaatcctgtgttt

SEQ ID NO: 391558 - DNA, 201 bp, Homo sapiens
cacagatgcagttttcttccatcagtgtgttcagaattgcccagtagagatttctcatggtctgcagcgccaggctttgggcttgcctgtctgcttatctwcattcactatccggttgtttccaaagcattgattcagcactgactttacaaagtgcagggctggggtgaggatgacccaagaggagagagatgcagagga

SEQ ID NO: 391559 - DNA, 201 bp, Homo sapiens
ctcttatgatagcatttgtctgttcatccatctgtccatatccccatctattttttcatccacccatctatctctccaccttttcattcacccatctgtcwgtccatccttccatccaaccacccatctattcatctgtctacctatccatccatccacctgtctatccatctgcccacccacccattcattcacccatcc

SEQ ID NO: 391560 - DNA, 201 bp, Homo sapiens
  misc_feature (1)...(201): n = A,T,C or G
tccacccatccatccattttccttctggcaaggaagagctaatatgaatctaaatgtgcctatcatggtccctttctgaggctgctattacaaatgggatntggcattttggaaaaacttgacaacttatccttcattttacagaaagtttcccatgccgtttgtgtctttccctcccaggaatgtgagccgccttccaac

SEQ ID NO: 391561 - DNA, 201 bp, Homo sapiens
aatcctcattcacagagccctggactaataatgccagcagctggcacttactgaacacttatgtggacagggccagtgttgtgttaagtatttgtcatgcmtcaggcgtttcaacttggtgttatgcctatcaggtaaataatgtctccactttacacgtaaggaaactgaggcccagagaggcgagtgacctgaggtcac

SEQ ID NO: 391562 - DNA, 201 bp, Homo sapiens
agatcctgctggtgattaagagacactaagagatgctggcttgttgcatggagagagaaagggaagtaacacacagagacttggctgggtgtcctgtgcartgtttatagacatctggttctttatcctccagcccatgaggtggaggaactgccattatccccactttacagtgaggcagtggatgctctgcaagggtgt

SEQ ID NO: 391563 - DNA, 201 bp, Homo sapiens
tggctgggtgtcctgtgcagtgtttatagacatctggttctttatcctccagcccatgaggtggaggaactgccattatccccactttacagtgaggcagkggatgctctgcaagggtgtttgtccagggtgccacgatgagtaaacagtgggactgaatttcaaccctagttggtttgaaccccaaagctagagccttaa

SEQ ID NO: 391564 - DNA, 201 bp, Homo sapiens
ttgcaaagccctggaacttgcatgtcctcatttgatgctcactcctgtcctcagacaggagcccaggccagcgtctcaacccatttaacagataaggaaayggaggttcccagggcgatgacattattaactctgcacacgtcagatctcgattccccaagagacgctgtcggctctggtcccacgggtgggcccgctccc

SEQ ID NO: 391565 - DNA, 201 bp, Homo sapiens
tgagtcagctgaggcttaccgggattaaccaagccatctgggtttgcacagctagtcagttgagggtgatggtggctcagaccagggtggcagccatggakgggtctgtggctcaaagtaggactaataggattttgttacagtttgatgtgatccttgcgacaaccttctttctaatgagattattttcctcctgtctcc

SEQ ID NO: 391566 - DNA, 201 bp, Homo sapiens
ctgccccaccagtgagagcaggctcgggtggggcacactcccttccctgcttcttcatctagtgtccaaggccacgtgtccatttcctcagaagcagcagsaaggactcggcctgaactgctgcaattgtggggagcctgggccaccactctttcctacctgataagctgaagttggactggtggaggtttctgatgggtg

SEQ ID NO: 391567 - DNA, 201 bp, Homo sapiens
ataatatgaatgtctctattgaaaagccaaaaggatctacaaactgtcacaactatgaagattgctctgaaatgtcaccatatacgaaatcagtatcccaraccagtagatttcctccataccagcaacacccagtgacaaagaaagatcatcttcagaataaaagccacaaggtacctaaaaataagttgaccaatgtgt

SEQ ID NO: 391568 - DNA, 201 bp, Homo sapiens
cggaggtattcatcaggcatgaggttatctgcctacttcccatgtgtcagccgagtgaccgaatctcagtcccttagcccctacatccctagggtcctagwggactgtaagctggtgataagagttgtgctgccctcactgggctgctgagaagaggagggggtaggatccgtagagagcttggcagagtgcagacgcatg

SEQ ID NO: 391569 - DNA, 201 bp, Homo sapiens
ctgtccctctgtcccgagttcaggtgtggatggaggagtgtgcgctgtccagcgtgctgcagacacacctgcgggaggaccacgagggcaccatccgcggygtcttgggccgactgggcggcctcactgaagagtgagtacagctccctgaaggcccagggctttgtgtcctgcatgatgctccctccagcctcagtgtcc

SEQ ID NO: 391570 - DNA, 201 bp, Homo sapiens
gcatgagggtccccactgaaattctggctcacagagtcacctcctatgctgtggcttttttcaatcccagagtttgtccagcgaggcaaagacctggtcamggcgtctctggctcaccaggtggagggaacggcaaaactcacgctggcccaagaggaggaacagagaagcttcctggctgaggcccagccgactgctgac

SEQ ID NO: 391571 - DNA, 201 bp, Homo sapiens
tggattgcttgagctcgggagtttaagaccagcccaggcaacatagtgagaccccatctctaaaataaaatccaaaatcaaccgggtatggtggtgcatgyctgtagtccgagctacacgggaggctgaggtgggaggattgcttgagcccgggaggtggaggctgcagtaagccgtgattgtaccactgcactccagcct

SEQ ID NO: 391572 - DNA, 201 bp, Homo sapiens
atttataagccaagttccccacaccagggggtacgtggcagctgtcaggcatgtgacaagaccacaagctaaatgccaagcatgttgctggaccgttggarttgtttgacagtcagtcatttaaaggttaatttaacagtcaacaactttatgataaagtaaaaagcaaataaccctacatttaaaaaatcttcttagtat

SEQ ID NO: 391573 - DNA, 201 bp, Homo sapiens
  misc_feature (1)...(201): n = A,T,C or G
aggagctgggagacaaggactctgtgtgcagtgagtcccagagacccttgagaggcagacatcagtggaaacagagccgctgtgaggtgggggaaagcggngctgtcaggcatgcagccacaaaatggaaaagcacttcacgcctgttggtggggcatggccttgacttcaaccagagctgtaggggcctcagcagaaaga

SEQ ID NO: 391574 - DNA, 201 bp, Homo sapiens
caaggactctgtgtgcagtgagtcccagagacccttgagaggcagacatcagtggaaacagagccgctgtgaggtgggggaaagcggcgctgtcaggcatscagccacaaaatggaaaagcacttcacgcctgttggtggggcatggccttgacttcaaccagagctgtaggggcctcagcagaaagatgagtgcctcctc

SEQ ID NO: 391575 - DNA, 201 bp, Homo sapiens
gaccctgccttgaggctgtgaacctcaaggagaaggacgaattgcaagtttgcaagtaaactatcggttatgacaccgcatggggagtctgcgatgggacrctggcaatgctagcgtttattaagtgctgtgtaccaggcactgaactagaccctctccctaaatgatctcaatgaatctccacaacagtttgtctctgct

SEQ ID NO: 391576 - DNA, 201 bp, Homo sapiens
agagataaaagatatttaaaagagaacaatatgtttaaaggaatgataataatgataagaatatttatgagcatgaattttcttgagtcttgctatgtacsaggtcccaggagtattacacttaaacctcagcacaacccagaggggcgggtgtcattatcatgtccactctgcaggtgagaaaactgaggcacagggcag

SEQ ID NO: 391577 - DNA, 201 bp, Homo sapiens
aatgataataatgataagaatatttatgagcatgaattttcttgagtcttgctatgtacgaggtcccaggagtattacacttaaacctcagcacaacccasaggggcgggtgtcattatcatgtccactctgcaggtgagaaaactgaggcacagggcagaggatttacccaaagttataaagctgcaggagtggcactga

SEQ ID NO: 391578 - DNA, 201 bp, Homo sapiens
gtagaacgtgattgttgccaagataaactcactgaaactgtagaattgtttagaatctttgtttgtgatagggagtgaattgtaattcccgagcacgcacygtttggctttcttaagtaagtttttcacctcacttcttgctgcttgtgctcatttcacagatggaagctttctggaaacagatggcaaatatccagcact

SEQ ID NO: 391579 - DNA, 201 bp, Homo sapiens
  misc_feature (1)...(201): n = A,T,C or G
agaaatgtcgggggctggtgactctgagtacatcaccctggctgatgtggaaaagaaggagagagaatactctgaacagctaatcgataatgtgcgtgccngactttctttcctgtacacaaattttggttcctaaaacagttaaattggctaaattagagagatgatagttagaagtgtgcctaatacttgaattcccct

SEQ ID NO: 391580 - DNA, 201 bp, Homo sapiens
cccatgcctcagtttccttgtgtgtaatacaggtgccaacatccttctttctaacctgagatgcaggggatggttggagaaccttctggaaaaaaaaaaamaaaccctgcatgtttctaccagactcagctcttgttttcctcacaggcttttcatgaggtcctggagaggcagaggctgatgcagtgtgacctggaggaa

SEQ ID NO: 391581 - DNA, 201 bp, Homo sapiens
  misc_feature (1)...(201): n = A,T,C or G
aaacacagaaatgtcgggggctggtgactctgagtacatcaccctggctgatgtggaaaagaaggagagagaatactctgaacagctaatcgataatgtgngtgccggactttctttcctgtacacaaattttggttcctaaaacagttaaattggctaaattagagagatgatagttagaagtgtgcctaatacttgaat

SEQ ID NO: 391582 - DNA, 201 bp, Homo sapiens
gggtggcagccatggatgggtctgtggctcaaagtaggactaataggattttgttacagtttgatgtgatccttgcgacaaccttctttctaatgagattmttttcctcctgtctcctccctctagtttttatttataaaatgtatgtcagacaatatgattgtcctgattaaacacctccagtgactcctggctgcctgc

SEQ ID NO: 391583 - DNA, 201 bp, Homo sapiens
atgtcagacaatatgattgtcctgattaaacacctccagtgactcctggctgcctgcaaaagataatgcccaggctgggcactgtggctcatgcctgtcaycccagcactttgggaggccaaggcgagctgttcaactgaggtcaggagttcgagaccagcctggccaatatggtgaaaccctgcctctactaaaaataca

SEQ ID NO: 391584 - DNA, 201 bp, Homo sapiens
gggtgtagctggtacctcgtacacaggaccgtcatacatgcccctggaaaccccttgcaatccaaaaacctaaacagaggaagggagagtgtgattgatcracactgtgcatgtgtgcccttctgggcagataaagcagagccctgcgggcgagagagaaacctgaggtcacttcaaatgtgcatgcacacacacacacaa

SEQ ID NO: 391585 - DNA, 201 bp, Homo sapiens
  misc_feature (1)...(201): n = A,T,C or G
ctctttgtaaacccacatcaggtaccaccatgttgcccccctaacatggacccccctctgcttggtgaccatgccagcccactctgccccaccagtgagancaggctcgggtggggcacactcccttccctgcttcttcatctagtgtccaaggccacgtgtccatttcctcagaagcagcaggaaggactcggcctgaac

SEQ ID NO: 391586 - DNA, 201 bp, Homo sapiens
cattttacttcctttaattaaatctctgggggtgggggtgctgggcctctggaagagatgttaaaaaaattctctttgttcctgccttcctggaacccttmctctatccacagaacatcgctttctgggtgagccccgtgggtggagaggatgtgacatttctagtcacctccttgtcccctaggaagtactgcaggcttc

SEQ ID NO: 391587 - DNA, 201 bp, Homo sapiens
tgagccccgtgggtggagaggatgtgacatttctagtcacctccttgtcccctaggaagtactgcaggcttcatcttctggaataaggggaagagatggarctagcattattttttagcatcactcatgccaggcagttttacacctctcacctgtgagtgatgccaacactcacgtgaatgatctcgtgcccttctctca

SEQ ID NO: 391588 - DNA, 201 bp, Homo sapiens
ggatccgtagagagcttggcagagtgcagacgcatggcaggagcacacagatggtggcaatggcgtgaagggagcaatgtgtggcccagaggggacaagcrtgtcccggagagtaaggcaggctcacacacccagggacagggcccttgtgggtcggctgcaagtccaggagaaggaagggagttcccagccttgcatgtg

SEQ ID NO: 391589 - DNA, 201 bp, Homo sapiens
aatagacaagcagatggcggcgtggtgcccagggagcacccatgcctaagaggatggcagcagagggcggtgattccaacctgcttccttttggaggggcytcttgtgggctgtggctgtttggggagcttgtcactggcttcgtgaagccaagagcattgaccccacccctcacctgctttcctcaaaggtccacgcggt

SEQ ID NO: 391590 - DNA, 201 bp, Homo sapiens
gagcacgcaccgtttggctttcttaagtaagtttttcacctcacttcttgctgcttgtgctcatttcacagatggaagctttctggaaacagatggcaaayatccagcactttcttgtggaccagtttaagtgttccagctccaaagcccgacagctgatgatgactctgacggaaagaatgattgcagccgaagggctat

SEQ ID NO: 391591 - DNA, 201 bp, Homo sapiens
caggtgagaaaactgaggcacagggcagaggatttacccaaagttataaagctgcaggagtggcactgagatgagaagttcagtaccttttcatggggccrcgtgttctcttgactgaatgaacaagaactcagaactgtggatgtggggaaaacaacattagtctctgccagatgcacctggcctctgattgaatcagcc

SEQ ID NO: 391592 - DNA, 201 bp, Homo sapiens
gtgttctcttgactgaatgaacaagaactcagaactgtggatgtggggaaaacaacattagtctctgccagatgcacctggcctctgattgaatcagccayggacctgagctatgggaagccagagagaggagtcccactttagccgcagaaccccggtgggtttattcaggcatcaagatgacgggggttaaaaaaaagt

SEQ ID NO: 391593 - DNA, 201 bp, Homo sapiens
cctctgattgaatcagccacggacctgagctatgggaagccagagagaggagtcccactttagccgcagaaccccggtgggtttattcaggcatcaagatsacgggggttaaaaaaaagtgttatttctccataaggcacattctctgaattactgaatgaggaatgagaccctacagagagaaggcagatgagagaaaga

SEQ ID NO: 391594 - DNA, 201 bp, Homo sapiens
acagcgacatcctgtctcaaaaaacaaaaaacaagaatagcacactggggatgtgcctggaagaagcttgggctctgtgtgagcaggactgactggcctcrtaaacgggtgccaatgtttgaaaccgtaaatatgctagaattcaagaactagagcatggcccttcaccccctctatccccagccccatggaggtccctgg

SEQ ID NO: 391595 - DNA, 201 bp, Homo sapiens
aaaaacaagaatagcacactggggatgtgcctggaagaagcttgggctctgtgtgagcaggactgactggcctcataaacgggtgccaatgtttgaaaccrtaaatatgctagaattcaagaactagagcatggcccttcaccccctctatccccagccccatggaggtccctggatgggggccaccaggcagcctgtgtc

SEQ ID NO: 391596 - DNA, 201 bp, Homo sapiens
cagcgagtgtccacagggagcagcttacagtcctggagggagcgttcagcatcactcaccatccagcacaggggtgtggcctctgcacactgccaggcackgtgtcagaccccaggggcagcctctgcctttgtggagcccactctctggggcagtggggagggcagtaaacagatgtcacaaaataaacggtggcaggca

SEQ ID NO: 391597 - DNA, 201 bp, Homo sapiens
catggcaaaggcctgtgacaaagcatcatgcgagtgtgaagggggcacctgagggaatgcagagctggggagatggtcaggcttccctgtggggagtctcktgggtggaaacccagggaagttccaggagcactggattaagggacagtcctagaccctagtccaccctttgacaattaggagctgtgtgactttgggtaa

SEQ ID NO: 391598 - DNA, 201 bp, Homo sapiens
tggcaaaggcctgtgacaaagcatcatgcgagtgtgaagggggcacctgagggaatgcagagctggggagatggtcaggcttccctgtggggagtctcgtkggtggaaacccagggaagttccaggagcactggattaagggacagtcctagaccctagtccaccctttgacaattaggagctgtgtgactttgggtaagt

SEQ ID NO: 391599 - DNA, 201 bp, Homo sapiens
tctataaaatgggataatgatatctatttgatagagttgtctgtcataggaacttttttaaacagcttttttcaggtatagtttacatacatttattttaygagtacaattcaatgattgttagtaaattttacagagttctaccccatcaccacaatccaaatttagaacatttctatcaccccaaaaattgctacagcg

SEQ ID NO: 391600 - DNA, 201 bp, Homo sapiens
agaattctgggttcaaatctcagctctgtcgcatgtggctgtgtggcaggaggcaagtggcccctgcaagttgctgggcattttctcatctgtaaaatgcrgaagatggtaccaacctccccgcatgccatggagatcaagtgatagtatgtataatacatacattaggctggcccagaagagtgattaacaagccttaat

SEQ ID NO: 391601 - DNA, 201 bp, Homo sapiens
agaaggaaaaattaactggaattcatcaaaattaaaaacttttgctttgcaaaagacctctttaagaagatgagaagacaagctacagagtgagagaaaaygtttgcaaaacagatgtccaccaaaggactagtacctagaccagataaggaaatttccaaactcagctgaagacaggaagcaatccagttagaaaatggg

SEQ ID NO: 391602 - DNA, 201 bp, Homo sapiens
ggatatttctgggcccctgtccttgatgtcacagagcccagtgtgagtccagagtgtggagacagtgcctgggtgaccttggtgtcccagggcctcggtayagtcctcggaacgcctcagcgctggcgttcaggacacgtgggacgcaggcagggaagggtgaatgagcgcatgcgtgcatgaatgaaccaggacatggac

SEQ ID NO: 391603 - DNA, 201 bp, Homo sapiens
aaagggacttcaggtcaaactgtcaaacacagaaatgtcgggggctggtgactctgagtacatcaccctggctgatgtggaaaagaaggagagagaatacyctgaacagctaatcgataatgtgcgtgccggactttctttcctgtacacaaattttggttcctaaaacagttaaattggctaaattagagagatgatagt

SEQ ID NO: 391604 - DNA, 201 bp, Homo sapiens
ccttgatgtcacagagcccagtgtgagtccagagtgtggagacagtgcctgggtgaccttggtgtcccagggcctcggtacagtcctcggaacgcctcagygctggcgttcaggacacgtgggacgcaggcagggaagggtgaatgagcgcatgcgtgcatgaatgaaccaggacatggacaaatgggcaaacgagcgaat

SEQ ID NO: 391605 - DNA, 201 bp, Homo sapiens
tggtgtcccagggcctcggtacagtcctcggaacgcctcagcgctggcgttcaggacacgtgggacgcaggcagggaagggtgaatgagcgcatgcgtgcmtgaatgaaccaggacatggacaaatgggcaaacgagcgaatgaaggaggatggaatgggtgggagaatgaacgaacgacaccaggctcccagtacacact

SEQ ID NO: 391606 - DNA, 201 bp, Homo sapiens
tgcccttctctcagcagccacgtgaggctgatctgatttatattcccattttccagatgaggaagccgaggctcagaggtaggctgctttcctgagtcccrcagctgggggagtagccaagctgatatttgtccttgggtttgccaggcccctgctccagagtgctgcgtccccacacccaacttctagcctctgctcctt

SEQ ID NO: 391607 - DNA, 201 bp, Homo sapiens
  misc_feature (1)...(201): n = A,T,C or G
ctgggctgtcgatgtggcagaacctgggacggaaactctgtggtgtctgctggcaccctggccagtctcctccaggcagaccttcctgtgagcggctagcntgaatcactggtagaattatgaatactagatcaaatcccagaggcatcacatggactgagtgtgactcctactgccaccccagcctctggccgatggctc

SEQ ID NO: 391608 - DNA, 201 bp, Homo sapiens
ggggcacagatccaggttggcagtttaggggaaggaacctggtgcagaggggctggccttgtgaggacaagtgaactgtgattcgggcctctgggctgtcratgtggcagaacctgggacggaaactctgtggtgtctgctggcaccctggccagtctcctccaggcagaccttcctgtgagcggctagcgtgaatcactg

SEQ ID NO: 391609 - DNA, 201 bp, Homo sapiens
  misc_feature (1)...(201): n = A,T,C or G
tcttttgttatctttcctttcttggcaatagatgtttattcagatttttaaaatgtgcctccttgaccttcttcctaaaaagaagtcagatgatgaattanaccagaagatcctttcaaaacaagaaaaagtaagtcttcaacctatgtttcaaggtaacttaaaaatagtttattataatatatacaacttatgatgcaa

SEQ ID NO: 391610 - DNA, 201 bp, Homo sapiens
tctcagtcttttatggaaagtttattttgtctcaggcgcagcaaagagtcagggcttggagtcagactggttgaggttggtatcctggctttatcttttasaagctctcagaatcgtagtttcctttttgtatagtgagataattcctgttctgcgagagtgcagaaaggataagagagatgtgtatgatacacctagcaa

SEQ ID NO: 391611 - DNA, 201 bp, Homo sapiens
atcattgttgtgatagtcttcatcagcaccaccatcatcaccatcttcatcagcaccaccatcaccacctttatcatctttcctgctacctctaccttcamcttcattagagtcctcattgtcatcgtcatcgtccttgttcctaccactgtgagatctgggggtttgggaaggaatgtttcttctttactccactggatt

SEQ ID NO: 391612 - DNA, 201 bp, Homo sapiens
cctcattgtcatcgtcatcgtccttgttcctaccactgtgagatctgggggtttgggaaggaatgtttcttctttactccactggattccatgaggaaggrtgactcactgcatcccaggaaggaggaaggacatcatcatcttcactgtcatcctcagtatcaccaccatggtcatggtcctcaggcagtgcacgtcgtg

SEQ ID NO: 391613 - DNA, 201 bp, Homo sapiens
ttatttttgttttacagctgaagaaactgagactccataagttcaaatgactttccaatggcaaaaatgataatgatgatgatgacatttataatggtatyagtaataatgaaacaatactgtctgttataatagaaagaataagagccttggagtctgcagacctcagatcagattccatctctacgagttaaacaaggc

SEQ ID NO: 391614 - DNA, 201 bp, Homo sapiens
tgatgatgatgacatttataatggtattagtaataatgaaacaatactgtctgttataatagaaagaataagagccttggagtctgcagacctcagatcarattccatctctacgagttaaacaaggctgtctgaacttaagcaagcatgttaattataatagtggctactatttgttgagataggctagccaagtgattt

SEQ ID NO: 391615 - DNA, 201 bp, Homo sapiens
tttctttcctgtacacaaattttggttcctaaaacagttaaattggctaaattagagagatgatagttagaagtgtgcctaatacttgaattcccctatcrcattctgccctagaggcaggatccagtttctgatgctaagtgatagggaagaagtaattaagcagcaaagattcacaaagggaggtttattttttatatc

SEQ ID NO: 391616 - DNA, 201 bp, Homo sapiens
cctgaaccaaatcctggctttcactgggtccatgacctctgacaagtgacctaactcccccgagcctgttcctacacctctagatacatactttatcatgwtatcaaatgtgtgaagcacagagcctggcgaacagcctgtgggccatgagggaaagttgctccgattcctagtgtcattgtccttagagctctgactggc

SEQ ID NO: 391617 - DNA, 201 bp, Homo sapiens
gagtttctgacttaatcagattggggtgcaacctggctgggcattggggtttttagagctccccaatgacgatggtgggagctggggttgacgcccactgstgtagacagagcattgattgactttcctgattgccctgttttgcctgcagagttctttaacaatgccttttcctggccttcactctgaggttctaatatg

SEQ ID NO: 391618 - DNA, 201 bp, Homo sapiens
cctgaactattctgacgggaggccagggatacaaacccctggtgcatgggtgtccaaccttttggcttccctgggccacattggaagaagaagaattgtcytaggccacacataaaatacattaacactaacgatagctgatgagcggaaaaaaaaaaaaaaaaaaaggtccctgcttatttttgtgaagcctgccaacca

SEQ ID NO: 391619 - DNA, 201 bp, Homo sapiens
aggctcagaggtaggctgctttcctgagtcccgcagctgggggagtagccaagctgatatttgtccttgggtttgccaggcccctgctccagagtgctgcrtccccacacccaacttctagcctctgctcctttccaacctgttccatcctgttccgcagccttagcttaccacagaagaaagtgggctcgggatttaaaa

SEQ ID NO: 391620 - DNA, 201 bp, Homo sapiens
ggccttcctcacccgctgcctctgtcctggtctctgccctccatgcagcacctggagtggcacctggcacaaatgagtgagcaggtcatggtgtggtggcrgcttcattcccaggtttaagtggcattcacagcccggacacaggtctaagccatgtttagacacgcgcctaccctctcatactttgggcattctcagaag

SEQ ID NO: 391621 - DNA, 201 bp, Homo sapiens
aacgtggacggggggagagatggggaagcctctgctgctatcccgggacatggcttgcaggagatgagtctggaacaagcagatgtttaactttaccgttkgtaattattatcttgataatgggcatctgctaggtgtagctaaatagtgaacaggtaagacattactaggcaggaaaatatgagttaatttacagcaggg

SEQ ID NO: 391622 - DNA, 201 bp, Homo sapiens
ttggagcttctgcatttgccacaaaggggtagggtaggtttttctatctttgagacccatttgaaataagaggaagataaggctattcagctcctcgttayttggatatttctgggcccctgtccttgatgtcacagagcccagtgtgagtccagagtgtggagacagtgcctgggtgaccttggtgtcccagggcctcgg

SEQ ID NO: 391623 - DNA, 201 bp, Homo sapiens
gcctctgctgctatcccgggacatggcttgcaggagatgagtctggaacaagcagatgtttaactttaccgttggtaattattatcttgataatgggcatstgctaggtgtagctaaatagtgaacaggtaagacattactaggcaggaaaatatgagttaatttacagcagggtaaaaagacttaggtctccctccaaac

SEQ ID NO: 391624 - DNA, 201 bp, Homo sapiens
caagcaccccgtcagagtctgtcttagagaaggtgctagggctgcttctgcttccacttccaccctgacaggactgaggaggccaggcccagagaacaggstggataacttcatcctgccaactttacttttctggaagtttccctttaatagtccaaatgggccaaagccgaacatcaaaaatccttaccatccgttctt

SEQ ID NO: 391625 - DNA, 201 bp, Homo sapiens
acaggatccacctgtccagcctggcccatgaggtccacacaacctggcccactcatcacccttcctaaagttctgtcccttgctccctgacttccagctgrcctcagatgtctctcagttcccccaagggtgcacttgtccctcccaccccagtgcctgaaactgtcttcctcccttccctgggctttgcctagccagctc

SEQ ID NO: 391626 - DNA, 201 bp, Homo sapiens
aggggagccctcctctgacctctccccagacctgtctaacttaggacttccatcctcctggtcatcacatgtgccacagcctggggggagcatgtgtgcamtgtcccctgttgggctgtgaactccctcgggtctgggtccacacctgcctcggtcaccgcagtgtccctggcacagggccttgcctgcggtaggtgccag

SEQ ID NO: 391627 - DNA, 201 bp, Homo sapiens
tctgctcctttccaacctgttccatcctgttccgcagccttagcttaccacagaagaaagtgggctcgggatttaaaaacggatttccccaaaggtccgamgtcagtagggctcagcttctagttactctgaacaatcagcttttgcgttagccctgcatctccctccctggctggtgggatccctgtagaggggggcatt

SEQ ID NO: 391628 - DNA, 201 bp, Homo sapiens
gattccattcctgtgaaatgtctagaataggaagatttatacagacagaaagtagattagtggtttccaggggctgcagcagaggaaagggagggatgggrtgacagtgaaagaggacaggtttctctttgatgccatgaaaatgttctaaagttgacgataggctgggcatggtggctcatgcctgtaatcccagcattt

SEQ ID NO: 391629 - DNA, 201 bp, Homo sapiens
tgtttaaaaatattttgtgaaatttgaaaaataaaagcatttatttttctagaatttaagacacgctaaactttttctttgtttatttgctttcttttttyttcttcttcttcaggatttggaggaactagaaaagggacttcaggtcaaactgtcaaacacagaaatgtcgggggctggtgactctgagtacatcaccct

SEQ ID NO: 391630 - DNA, 201 bp, Homo sapiens
gtggcttcttctcagctgttaattaacatgccctggtggttcccaggacaccccagctatggtcctgtgtgtttctttttgcaggacgccctggagaggaygatggggcgggcgcacatggcaaaagtgattgagtttctgaagctgcaagtccaggaggagaccaggtgccggctggctgccatctcccacggcctggag

SEQ ID NO: 391631 - DNA, 201 bp, Homo sapiens
gtgaagccaagagcattgaccccacccctcacctgctttcctcaaaggtccacgcggtgtgtcctgcaggggcatgacctgctgttgcgctcagccctccrgaggctggcactccgcggcaacgccctggccaccctgacgcagatgcggctatcggggaagaagcacctcctgcaggagctgcgggaacagcgtgcactg

SEQ ID NO: 391632 - DNA, 201 bp, Homo sapiens
tgcagaatgagagtttgaggcagggtgtgctgtggcttgtactgatgagggacgtgccaatattcttactcttcatttccgataccctgaaagtcttttcygcttctcattttattttgcagtgtagacgttgacctgtgtatctacagccttcacttaaaagacctgctgcatttggacacggcactgaggcaggaaaag

SEQ ID NO: 391633 - DNA, 201 bp, Homo sapiens
tgacctcaatgttgtgtttctatccacccccaactcctgaccttcgggttttagaaagacgacactcaaaatctgctcaagaatttggagtctaatgcgcmgaccccctcggaaactggctccccatcaaggaggaggaagagagaagtgcagatgtcgaaggacaaggaagctgttgatgtaagcttggtgttgatgttt

SEQ ID NO: 391634 - DNA, 201 bp, Homo sapiens
gccaggcaggatgtgatgaggttaaaaagattaatagacaagcagatggcggcgtggtgcccagggagcacccatgcctaagaggatggcagcagagggcrgtgattccaacctgcttccttttggaggggcctcttgtgggctgtggctgtttggggagcttgtcactggcttcgtgaagccaagagcattgaccccacc

SEQ ID NO: 391635 - DNA, 201 bp, Homo sapiens; identical to SEQ ID NO: 85877

SEQ ID NO: 391636 - DNA, 201 bp, Homo sapiens
acacagttgtttgagaacttcatgtgctttttctcggtatatacacacatggccttttttttctgtcaacactgccgaaagataggtatggaagatatttwattcacagcacgcagataaggagcccactcagtgatccacctaagatccccgtcctctctaatgacatcgctgagcctgggcctgaagcttcctggtttg

SEQ ID NO: 391637 - DNA, 201 bp, Homo sapiens
caggtcctgggagccaagtctgagcctggcactgttgactcagccacactcagagcacatcagggcccccttcccccattccacatccctcttctcacgcmactctctccacttccatcctccctccaatataagcacatcgattgcaccaccactgccgaatccagccagcctgtgttgggttctcaacatgctctttag

SEQ ID NO: 391638 - DNA, 201 bp, Homo sapiens
atcagggcccccttcccccattccacatccctcttctcacgccactctctccacttccatcctccctccaatataagcacatcgattgcaccaccactgcygaatccagccagcctgtgttgggttctcaacatgctctttagaggtggccagagccgcccttcccgcggcccacctggcacctccgcttatcctcttgca

SEQ ID NO: 391639 - DNA, 201 bp, Homo sapiens
agggcccccttcccccattccacatccctcttctcacgccactctctccacttccatcctccctccaatataagcacatcgattgcaccaccactgccgamtccagccagcctgtgttgggttctcaacatgctctttagaggtggccagagccgcccttcccgcggcccacctggcacctccgcttatcctcttgcaccc

SEQ ID NO: 391640 - DNA, 201 bp, Homo sapiens
tttagaggtggccagagccgcccttcccgcggcccacctggcacctccgcttatcctcttgcaccctctagggttcacgggctgctggaatgagcctcgcygtccttgtccatcgctgggggatgttcttgccctagtcttgtgttgtgggaacagaggccagtgcagctcagcgcacagtgtggccatggctggtcaagg

SEQ ID NO: 391641 - DNA, 201 bp, Homo sapiens; identical to SEQ ID NO: 85883

SEQ ID NO: 391642 - DNA, 201 bp, Homo sapiens
ttgtccatcgctgggggatgttcttgccctagtcttgtgttgtgggaacagaggccagtgcagctcagcgcacagtgtggccatggctggtcaaggggacrtgggcgactcaggcctggcccctgtcttcaagggctctcagtccaggctgggactgcccctcacaatcacctcctcgaagacaggagccctggggcagtg

SEQ ID NO: 391643 - DNA, 201 bp, Homo sapiens
tttgtggccttgggcacgtgacttcacctctctgtgactcattttctctgtctggaagtggagacagtgacctctgtggcagggtccttggaagcttgggkaggtagcgtacgttggtggttttccctgttatttttttttttttacttcttgaaaccttttcttcaacttttattttaagttctggggtacacatgcagg

SEQ ID NO: 391644 - DNA, 201 bp, Homo sapiens
gacctctccccagacctgtctaacttaggacttccatcctcctggtcatcacatgtgccacagcctggggggagcatgtgtgcaatgtcccctgttgggcygtgaactccctcgggtctgggtccacacctgcctcggtcaccgcagtgtccctggcacagggccttgcctgcggtaggtgccaggagacatttgcaaaat

SEQ ID NO: 391645 - DNA, 201 bp, Homo sapiens
actccctcgggtctgggtccacacctgcctcggtcaccgcagtgtccctggcacagggccttgcctgcggtaggtgccaggagacatttgcaaaatgaacrtatgcatgctgtgaggatgacacacatatttatcccagagcgttcacttttaggaccccctccatctcctgctgtccaggtaactatgatcacagtcatg

SEQ ID NO: 391646 - DNA, 201 bp, Homo sapiens
actgcatttagggcacacaatcatactatgaagggggtgtttgtactcccaacttacgggtgagcaatttgaggttcaggccacgtgtcttgcgggacacrggtgttgggtggggaagccaggattgaagcccaaactggttggttttcaaagcccatgatcttaggcacactgtcccacactccaaaggtattttacata

SEQ ID NO: 391647 - DNA, 201 bp, Homo sapiens
gcagggaagtgctctccactcaccttgagaagtccctgcaaagttatgtggcaaggggtgtgggtgccgggagagagactgggaggcggtgcgctgagctrccggggtgttttgtgggatcccccatagtccctgcaggtttgtatgcaggtatcctcccttccttttttaagggagttggcccatggtcatgcttctggt

SEQ ID NO: 391648 - DNA, 201 bp, Homo sapiens
cccagccctttgcagaaaacaaattgtgcataccatcaagaagcaggtgtctagctatggaattggataatacaagggaaacatcagaagaggatggaggytgggtgtggtggcttacatctgtaatcccagcactttgggaggctgaggtgggcagatcgcctgagctcaggagttcaagaccaccctaggcagcatggt

SEQ ID NO: 391649 - DNA, 201 bp, Homo sapiens
tttaacacaagctttaccgaactaatttttccatggaaactttgtggtgagcagtaactggctcaaggagctgttccctggaacccacattgggaaccacrtccttcacgtggttgaagggtgggacgggtgggtggatgaagggcatttctccatcctctgggtaggccctgcgtgggccctggggatcacgccatagtc

SEQ ID NO: 391650 - DNA, 201 bp, Homo sapiens
tctgtacagtgggcacgctgactgcccctcagcttcctttgaatgtaaatgacttaacgtttcttagcctcgatttcctcatctataaaatgggataatgmtatctatttgatagagttgtctgtcataggaacttttttaaacagcttttttcaggtatagtttacatacatttattttatgagtacaattcaatgattg

SEQ ID NO: 391651 - DNA, 201 bp, Homo sapiens
tggtgagcagtaactggctcaaggagctgttccctggaacccacattgggaaccacatccttcacgtggttgaagggtgggacgggtgggtggatgaaggrcatttctccatcctctgggtaggccctgcgtgggccctggggatcacgccatagtcagcagagcgtcagccccaccctggaggccctcactgcctgagtg

SEQ ID NO: 391652 - DNA, 201 bp, Homo sapiens
gcagagcgtcagccccaccctggaggccctcactgcctgagtggattgaaatacaccgagaatgcaggacagtgcatgatgaaataggcaagaggcagatscccagggacctgtggagccagtatggggtccaggatccacgcctggaggaagggacgcttctgcccagcaaacaacaaatggggggtgtttcaggtaggg

SEQ ID NO: 391653 - DNA, 201 bp, Homo sapiens
ctggtctttgctccatgtcaccttcacagcaaggcctactctgaccatgctgtttaaaactgcaatgcccccctcacccccagcactccagtgtttgcctygggagttgattgtagagtccaccccacctaaaaaccctccctgtttctaggaggacactaacaaactttcagcacatgctaggcatcaatcaatagatct

SEQ ID NO: 391654 - DNA, 201 bp, Homo sapiens
tctctcttcagctgcacctaaactgctattaaacctgtacactgagtttaatatttttcaattctagacaatattttcaattctagaactgctagttggctctttttaaactaagtagtgttactttttataatttccagctccttgcttaaaggtttaagagtggcttttagcttcatgagcatagtaagcattgatatt

SEQ ID NO: 391655 - DNA, 201 bp, Homo sapiens
agatttggaatttataggtcaatttgaggagaattaatgtgtttacaatatcaagtcttccaatcaagaaacatggtatattgctacaattatttaggtcktatttaatttagtttttcttaatattgctttgtggtttctaccattagctataatatgtaatatagctgttgtttttttttaatcaagttaaggaagttt

SEQ ID NO: 391656 - DNA, 201 bp, Homo sapiens
gaagccaatcattcccctgaaaatctcggccgtcctcagcagtcaggctctctggggctctaacaaaagccaggaactgctggcactttgcatttcctccrcagccctgtgggggccacagggccagattggccgggggagatgactataagccaggtggcttttcctccttgaccgtttgtaaatctggattccctccta

SEQ ID NO: 391657 - DNA, 201 bp, Homo sapiens
actgctggcactttgcatttcctccacagccctgtgggggccacagggccagattggccgggggagatgactataagccaggtggcttttcctccttgacmgtttgtaaatctggattccctcctaggagggtggccctctggggagcgctactggtgactaagtgcctacatgctaagctgcgtcagcctccccgcaccc

SEQ ID NO: 391658 - DNA, 201 bp, Homo sapiens
ggctgaccctggggtgggggtggggcaaggctcaagacgtggaggcatctgggcttagctgaggtcacactactagtgggacctacagaaaaacccaggtstgtcaccagcagggcgggcaccatctctgcagccgacaccagcttccccaacctccagacaggagaaagcatgagggtccccactgaaattctggctcac

SEQ ID NO: 391659 - DNA, 201 bp, Homo sapiens
gcccctgtccttgatgtcacagagcccagtgtgagtccagagtgtggagacagtgcctgggtgaccttggtgtcccagggcctcggtacagtcctcggaaygcctcagcgctggcgttcaggacacgtgggacgcaggcagggaagggtgaatgagcgcatgcgtgcatgaatgaaccaggacatggacaaatgggcaaac

SEQ ID NO: 391660 - DNA, 201 bp, Homo sapiens
agagactccattgaaacatctccccaacagggaattttctcctgcaacccttccctgagaagggtctgttcctctgtccttctgccccacctcgcccctckctgatgctctgtttagggctggctgggtctccccctgctgattcccgggttagcccagtctcctgctgctctgctggggtcctcagggaagggcctccac

SEQ ID NO: 391661 - DNA, 201 bp, Homo sapiens
gcaacccttccctgagaagggtctgttcctctgtccttctgccccacctcgcccctctctgatgctctgtttagggctggctgggtctccccctgctgatkcccgggttagcccagtctcctgctgctctgctggggtcctcagggaagggcctccaccccgtggtcacagtggggcctggctggttgctgactgcactga

SEQ ID NO: 391662 - DNA, 201 bp, Homo sapiens
gcactgacctccaatcgccagtctgtgtcacccctgctgggttcccatcagtgggtcttccatggcctgggtggtcagaaagtgatgtctgggtggctgcrgccaggacagaggagtgacagaagtggtccagtggcccctcctcatcctggctttaacaaaagcgtggtggtttgtggtgtttcctggaaatcggatttg

SEQ ID NO: 391663 - DNA, 201 bp, Homo sapiens
cagaggtggttcaggtccaaccccgcactcattggccggtgatccacgcaggctgtgtcccctccatgcgatcctccttgcccacatcagaaaccgaggcrgttggccttggtcctctctgaggcaccgtccatttttggggtgctgaggattcttatctccacacatccctgtcagcaaagctctttggaaatccgttct

SEQ ID NO: 391664 - DNA, 201 bp, Homo sapiens
caccacctctttcccctgtgcaaccgtgtgcaggtctggggtggggaggtgaagctggccatgcttgccctgcagggtgactttcagagagcaggagaggrcacctgagccctctttaggggcaggagtcacaggatgccatgctgagccagacagagcccctgcctcaggcagcatcctcagttgttggaaagacaggag

SEQ ID NO: 391665 - DNA, 201 bp, Homo sapiens
acccctgcccccctccccagccctctgcccagtggctcctagccactcctcacatggagtcaggactcacatctccagagatccccctctgcccccaaccmtgaacaacatcagggccccccttagattctaggtcctgtgttctttgctgctgggactggggtgaggtcggtgggggagcatataaataaccttccttta

SEQ ID NO: 391666 - DNA, 201 bp, Homo sapiens
aagaaagcagaggaggaattggatgggctttgcagaagcaggagaaaatcatgtcatggacgccaagagaatcaggagtttgtaagcagagcgggctgtgyagagttggcaggtgacagtctgcagtcacgtggcaggtggaaggcaggtcatctgatggctccaaggggaagagcagggtgagagcgtgagggtgtcagg

SEQ ID NO: 391667 - DNA, 201 bp, Homo sapiens
catcaccctggctgatgtggaaaagaaggagagagaatactctgaacagctaatcgataatgtgcgtgccggactttctttcctgtacacaaattttggttcctaaaacagttaaattggctaaattagagagatgatagttagaagtgtgcctaatacttgaattcccctatcgcattctgccctagaggcaggatccag

SEQ ID NO: 391668 - DNA, 201 bp, Homo sapiens
tctgttgggatcagtcatacgggcacatctccttcctgtcacgtaccaagagtccagactccaggaaggaaagcagatgttcagctaagccacattgcacytaatgagaccctgtgttcagagtgccttgccagaaaaggagacctcgaattgatttttggaacatgtgaggagagttcctgggcagaggggaatgtgggt

SEQ ID NO: 391669 - DNA, 201 bp, Homo sapiens
ctccctggcatgactggcctccccccggaagagtgtgactacttgaggcaggaagtccaggagaacgctgcctggcagctggggaagtcaaatcgcttccrgaggcagcagtggaaactcttccaggagctcctagagcaagaccagcaggtgcgggcatttgggaacccaggggctggggtctgcattttagaaacacac

SEQ ID NO: 391670 - DNA, 201 bp, Homo sapiens
ggtgtccaaccttttggcttccctgggccacattggaagaagaagaattgtcttaggccacacataaaatacattaacactaacgatagctgatgagcggraaaaaaaaaaaaaaaaaaggtccctgcttatttttgtgaagcctgccaaccacagataagcaaaaaagtcctcacattcaaagggttggacacccatggg

SEQ ID NO: 391671 - DNA, 201 bp, Homo sapiens
  misc_feature (1)...(201): n = A,T,C or G
taggtggaagatctgaaccagggcatggggaggcagggactggatgggccgtgggtggctcccacgtgtgacttctctgctgtccctgtccttcctttctnccctcagaggacactgatggaggcggcagtggagagcgtctacgtgaccagcgctggtgtcagccgcctggtgcaggcgtattaccagcaaatcggaagg

SEQ ID NO: 391672 - DNA, 201 bp, Homo sapiens
atgactttccaatggcaaaaatgataatgatgatgatgacatttataatggtattagtaataatgaaacaatactgtctgttataatagaaagaataagagccttggagtctgcagacctcagatcagattccatctctacgagttaaacaaggctgtctgaacttaagcaagcatgttaattataatagtggctactatt

SEQ ID NO: 391673 - DNA, 201 bp, Homo sapiens
gggtgtccaaccttttggcttccctgggccacattggaagaagaagaattgtcttaggccacacataaaatacattaacactaacgatagctgatgagcgraaaaaaaaaaaaaaaaaaaggtccctgcttatttttgtgaagcctgccaaccacagataagcaaaaaagtcctcacattcaaagggttggacacccatgg

SEQ ID NO: 391674 - DNA, 201 bp, Homo sapiens
ctagaggcaggatccagtttctgatgctaagtgatagggaagaagtaattaagcagcaaagattcacaaagggaggtttattttttatatcatgaattatyctcatttaaatttcagattggtctttttatcattcaaagcaaaggttgctataacccttgatgtcatcactgccctttggaatagagtagaagaaagctg

SEQ ID NO: 391675 - DNA, 201 bp, Homo sapiens
ccaacccaccggatgtcatgatattttccaggacttcataatgattgaaagatactattttattgatttttaaagtatggtctagttttttttttttttttgagggaggatatagaggaaaataatccattattcttgaggctctatgtttaatgagaaaatgggtcaaacctcatgtacaacaacccccagagcatttaa

SEQ ID NO: 391676 - DNA, 201 bp, Homo sapiens
ataatgatatctatttgatagagttgtctgtcataggaacttttttaaacagcttttttcaggtatagtttacatacatttattttatgagtacaattcartgattgttagtaaattttacagagttctaccccatcaccacaatccaaatttagaacatttctatcaccccaaaaattgctacagcgcaattgtaaaaga

SEQ ID NO: 391677 - DNA, 201 bp, Homo sapiens
cccaacccaccggatgtcatgatattttccaggacttcataatgattgaaagatactattttattgatttttaaagtatggtctagttttttttttttttttgagggaggatatagaggaaaataatccattattcttgaggctctatgtttaatgagaaaatgggtcaaacctcatgtacaacaacccccagagcattta

SEQ ID NO: 391678 - DNA, 201 bp, Homo sapiens
aaccttcagcaaccactaccctcataagtcagtagccatcaacattgagacaagaccctccaccagctaaaagattacaactttttttttttttttaagayggagatctcaactcactgcaaactttgcctcccagattcaagtgattctcccgcctcagcctcccgagcagctgggaccacaggcgcgcaccacctcgcc

SEQ ID NO: 391679 - DNA, 201 bp, Homo sapiens
accctaaccttcagcaaccactaccctcataagtcagtagccatcaacattgagacaagaccctccaccagctaaaagattacaactttttttttttttttaagacggagatctcaactcactgcaaactttgcctcccagattcaagtgattctcccgcctcagcctcccgagcagctgggaccacaggcgcgcaccacc

SEQ ID NO: 391680 - DNA, 201 bp, Homo sapiens
aatgggaaggacatgaacagatatttcaccaaaaaggatatatagatggtaagtaaacacgtaaaaaggtgttcaatgtcattaagccagcatgaaaatcsaagttgaactcacaataagatatcaccacacacttgtcaaaatggctaaaataaaaaatagtgacaccaccaaattctggcaaagatgtggagaaactgg

SEQ ID NO: 391681 - DNA, 201 bp, Homo sapiens
ataaaagtatgtatacaaatatttaaaaagtgtattattaaaatttggaatactatttatagcaaagagaataatattggtcatatctactactcaaagayggtcactgttaatgtttttttctgcacacatttgggatatttttaaagacataatttgtttattggttatagctatgtatactactttgtattctattct

SEQ ID NO: 391682 - DNA, 201 bp, Homo sapiens
cttgctggtcacacagccgtgagtgacggagccggatttgacccaacccagagcagggctccgcacgtggtgggggcttaagaagctcagtctggcgggttcacacaccaggcctcaggcctctctctgctccaaaattccgctgagtccaagaggtgggatgatccagggcacagcctctgctcagagttgctgcagaaa

SEQ ID NO: 391683 - DNA, 201 bp, Homo sapiens
acttgctggtcacacagccgtgagtgacggagccggatttgacccaacccagagcagggctccgcacgtggtgggggcttaagaagctcagtctggcgggttcacacaccaggcctcaggcctctctctgctccaaaattccgctgagtccaagaggtgggatgatccagggcacagcctctgctcagagttgctgcagaa

SEQ ID NO: 391684 - DNA, 201 bp, Homo sapiens
tgcttggtgaccatgccagcccactctgccccaccagtgagagcaggctcgggtggggcacactcccttccctgcttcttcatctagtgtccaaggccacrtgtccatttcctcagaagcagcaggaaggactcggcctgaactgctgcaattgtggggagcctgggccaccactctttcctacctgataagctgaagttg

SEQ ID NO: 391685 - DNA, 201 bp, Homo sapiens
tgcccccctaacatggacccccctctgcttggtgaccatgccagcccactctgccccaccagtgagagcaggctcgggtggggcacactcccttccctgcwtcttcatctagtgtccaaggccacgtgtccatttcctcagaagcagcaggaaggactcggcctgaactgctgcaattgtggggagcctgggccaccactc

SEQ ID NO: 391686 - DNA, 201 bp, Homo sapiens
tgaccacaggagcatcacttggcctctagccctcagtttccccatctgtgaaatggggacagtcataattcttcttcatggtgtgctaggaggactgtgtktggggacccgagacagcagctggcactcggaacaccccagggcacgttgtctccagtgacagcttccctgcttctgagtgcagaggagaggcaaggggct

SEQ ID NO: 391687 - DNA, 201 bp, Homo sapiens
aaggacagcagcctgtaggaggcattgctgagccaagcattggatgagaccaggcccaagtggacaaggagtcagcgggcatccccatcagggagaagctyatgcagtggtgggaagtgcaactcctcacccggatgggagctgcactggggtcagtcatgtctctgttaacctgctagggctgccgtggtgaataccact

SEQ ID NO: 391688 - DNA, 201 bp, Homo sapiens
caacaggattgacttctggtgaggcctctcttccgggcttgcagacagctgccttcccgttgcctcctcacacggttatttctctgtgcttggaagactgmagggcaggggagagaatgaaagagagggctctggtctctcccttttcttataaggacaccagttctatgggattagggccccaccctgatgacctcatct

SEQ ID NO: 391689 - DNA, 201 bp, Homo sapiens
tgtctcattgatctgtctaatgttgacagtggggtgttaaagtctcccattattaatgtgtgggagtctatgtctctttggaggttactcaggacttgctttatgaatctgggtgctcctgtattgggtgcatatatatttaggatagttagctcttcttgttgaattgatccctttaccattatgtaatggccttctttg

SEQ ID NO: 391690 - DNA, 201 bp, Homo sapiens
tagggccccaccctgatgacctcatctaaccttaattacctccttaaaggccctgtctccaaatacagccacatgggatattggaggttagagcttcaacrtaagaatttgattacttaattacctccaaatacagtcacatgggatattggaggttagggcttcaacctaagaattttggagggagacacaatttagtcc

SEQ ID NO: 391691 - DNA, 201 bp, Homo sapiens
caaatacagccacatgggatattggaggttagagcttcaacataagaatttgattacttaattacctccaaatacagtcacatgggatattggaggttagrgcttcaacctaagaattttggagggagacacaatttagtccaaacagtgtccttcaaaacgtcatgtccatctggaacctcggaatgtggccacacttgg

SEQ ID NO: 391692 - DNA, 201 bp, Homo sapiens; identical to SEQ ID NO: 85885

SEQ ID NO: 391693 - DNA, 201 bp, Homo sapiens
atggaagctttctggaaacagatggcaaatatccagcactttcttgtggaccagtttaagtgttccagctccaaagcccgacagctgatgatgactctgayggaaagaatgattgcagccgaagggctattgtgcgattctcaggagctgcaggctctggtaatgctggagggggcgggagggaacataaagatattcaga

SEQ ID NO: 391694 - DNA, 201 bp, Homo sapiens
cccagagcctttggagggggcgaggctctgccaacaccttggtttcatactaatgccctccggaacggtgagagaataaacttcgttgtcttaatgcaccsagtttgcggcgctttgtcatggcagccacaggaaactaaacggaaggcgatctttgttcagggctagctcctatcttaagtgcctcttgagtatttgatt

SEQ ID NO: 391695 - DNA, 201 bp, Homo sapiens
aagcggggaaggtgagatttaaaataaaggctttctaatgttagtgctgatgtgctcaccccaaccatgctgctcagtgttgacggctgttgtgaaacctygcttcttgtgtttttagtttaaaagtatgtaaacaagagaccacagtaaaggggatgcagcacagagcaatttattgcaaaggagaaagaatgttctgaa

SEQ ID NO: 391696 - DNA, 201 bp, Homo sapiens
ctcgccttggcctcccaaagtgctgggattataggcgtgagccaccgctcccggcctggcccaaggcctgtgtcagcatgtctcccagaattagtctggasggatttccttagatttactttgccatttcatcacaagcttttaggttccaggtcgcctggcatattttacatttcctcaatttggaaatcattgcctttg

SEQ ID NO: 391697 - DNA, 201 bp, Homo sapiens
ggcaatgcctcgccctgcttcggctagcacatggtgcgctgcacccactgacctgcgcccactgtctggcactccctagtgagatgaacccagtacctcakgtggaaatgcagaaatcacccatcttctgcgtcgctcacgctgggagctgtagaccggagctgttcctattcggccatcttggcccctccccccaccggc

SEQ ID NO: 391698 - DNA, 201 bp, Homo sapiens
caccatgttggccaggatgggtctcaatctcttgaccttgtgatccacctgcctccgcctcccaaagtgctgggattacgggtgtgagccaccgcacccarcccaacaacttttttttaataatcatcttaggctcagatgatcattagcattttttaggaagaagttatttttaaaattaaggtatgtacttttttagac

SEQ ID NO: 391699 - DNA, 201 bp, Homo sapiens
tgcgctgcacccactgacctgcgcccactgtctggcactccctagtgagatgaacccagtacctcatgtggaaatgcagaaatcacccatcttctgcgtcrctcacgctgggagctgtagaccggagctgttcctattcggccatcttggcccctccccccaccggcagcttagaattttacttttcttcctcagtctgct

SEQ ID NO: 391700 - DNA, 201 bp, Homo sapiens; identical to SEQ ID NO: 85888

SEQ ID NO: 391701 - DNA, 201 bp, Homo sapiens
caccaacaccaccatcatcatcaccactatcgtcaccatcatcaccatcaccaccatcattactgtcaccaccatcattgtcatcactattactaacaacagctaatggaagcaagcaactttgcctgctgtttttatccgtcctttagtgtatctctagctcatggaaatggaaggaagaaatgtgaagtttaggagatt

SEQ ID NO: 391702 - DNA, 201 bp, Homo sapiens
tctgactgccccgtcaactgcctcagagggaccaggactcaggccacgcaggggcagccatcagccccccatcgtcagccccgaatggggatggggagacmtctttctgagtgtgaacctggctcggcctgaagcctagagctggcttgaagaacacacacagaccagaagacagcacggtgagttacaagtgccacggag

SEQ ID NO: 391703 - DNA, 201 bp, Homo sapiens
tcaccaacaccaccatcatcatcaccactatcgtcaccatcatcaccatcaccaccatcattactgtcaccaccatcattgtcatcactattactaacaacagctaatggaagcaagcaactttgcctgctgtttttatccgtcctttagtgtatctctagctcatggaaatggaaggaagaaatgtgaagtttaggagat

SEQ ID NO: 391704 - DNA, 201 bp, Homo sapiens
tcattcagggctcagtccaggaccagccatgggaagcctccctggcctccacagagtccactgctccctcttctgtgcccctcagtccctgggctcccccmaccttcagccctgaccaccttgtggtgttcttgtcaaaatccccagtaaaatccgacattcctgagacaggtgatcaaacacttactgagtgcctactgt

SEQ ID NO: 391705 - DNA, 201 bp, Homo sapiens
atcaccaacaccaccatcatcatcaccactatcgtcaccatcatcaccatcaccaccatcattactgtcaccaccatcattgtcatcactattactaacaacagctaatggaagcaagcaactttgcctgctgtttttatccgtcctttagtgtatctctagctcatggaaatggaaggaagaaatgtgaagtttaggaga

SEQ ID NO: 391706 - DNA, 201 bp, Homo sapiens
taaaccaaccaatcaaatacacaccacttcctgccctggggtgttgttctttcccaggaaaaccagaagaggagcaaagaaacattccttcccaacccacyggatgtcatgatattttccaggacttcataatgattgaaagatactattttattgatttttaaagtatggtctagttttttttttttttttgagggagga

SEQ ID NO: 391707 - DNA, 201 bp, Homo sapiens
agagaggctgcgtgacttgctggtcacacagccgtgagtgacggagccggatttgacccaacccagagcagggctccgcacgtggtgggggcttaagaagytcagtctggcgggttcacacaccaggcctcaggcctctctctgctccaaaattccgctgagtccaagaggtgggatgatccagggcacagcctctgctca

SEQ ID NO: 391708 - DNA, 201 bp, Homo sapiens
caaatctgcctggccttatgggcggcgttccctggctcttaggagaaaaagccagatctttaccatggaccatgaggctcagagaggtctaggctgagcccacccctgcggcctagcagatgcccttccccttcactctgcacctggtccctgtcttctctcatggcctcacatgggccacacccctgccccccactgggc

SEQ ID NO: 391709 - DNA, 201 bp, Homo sapiens
gacttgctggtcacacagccgtgagtgacggagccggatttgacccaacccagagcagggctccgcacgtggtgggggcttaagaagctcagtctggcgggttcacacaccaggcctcaggcctctctctgctccaaaattccgctgagtccaagaggtgggatgatccagggcacagcctctgctcagagttgctgcaga

SEQ ID NO: 391710 - DNA, 201 bp, Homo sapiens
cagagaggctgcgtgacttgctggtcacacagccgtgagtgacggagccggatttgacccaacccagagcagggctccgcacgtggtgggggcttaagaarctcagtctggcgggttcacacaccaggcctcaggcctctctctgctccaaaattccgctgagtccaagaggtgggatgatccagggcacagcctctgctc

SEQ ID NO: 391711 - DNA, 201 bp, Homo sapiens
tgacttgctggtcacacagccgtgagtgacggagccggatttgacccaacccagagcagggctccgcacgtggtgggggcttaagaagctcagtctggcgggttcacacaccaggcctcaggcctctctctgctccaaaattccgctgagtccaagaggtgggatgatccagggcacagcctctgctcagagttgctgcag

SEQ ID NO: 391712 - DNA, 201 bp, Homo sapiens
taaagggaaacacagagaggctgcgtgacttgctggtcacacagccgtgagtgacggagccggatttgacccaacccagagcagggctccgcacgtggtgrgggcttaagaagctcagtctggcgggttcacacaccaggcctcaggcctctctctgctccaaaattccgctgagtccaagaggtgggatgatccagggca

SEQ ID NO: 391713 - DNA, 201 bp, Homo sapiens
aatcacttgaacctgggagatggaggttgcagtgggccgagattgtgctccagcctaggcaacagagtgagtctccatctcaaaaaaaaaaaaaaaaaaaagatgcggggaaggcctcttagccgactttccctaacatcgcatttcattggctctagacatccctgacctaagaagataggattcccatgactagtttaa

SEQ ID NO: 391714 - DNA, 201 bp, Homo sapiens
ccagcctgcctgccttcctccccccaggatgctgtcccagcagaagaggttcctggcccagttcccagtgcaccagcagatgcgtctgcacgcccagcagyagcaggcaggagtcatggaccttctggaagcccagctggagacccagctacaggtacaagttacagaactggaccttccaaaagcagtggtttaaagagg

SEQ ID NO: 391715 - DNA, 201 bp, Homo sapiens
gtgacttgctggtcacacagccgtgagtgacggagccggatttgacccaacccagagcagggctccgcacgtggtgggggcttaagaagctcagtctggcgggttcacacaccaggcctcaggcctctctctgctccaaaattccgctgagtccaagaggtgggatgatccagggcacagcctctgctcagagttgctgca

SEQ ID NO: 391716 - DNA, 201 bp, Homo sapiens
cacccctatgaagttggtactgtcatttcctccagttcacaaagaataaagggaaacacagagaggctgcgtgacttgctggtcacacagccgtgagtgayggagccggatttgacccaacccagagcagggctccgcacgtggtgggggcttaagaagctcagtctggcgggttcacacaccaggcctcaggcctctctc

SEQ ID NO: 391717 - DNA, 201 bp, Homo sapiens
gatgagtttcttctcttttcttttttttttttttttttattatactttaagttttagggtacatgtgcacattgtgcaggttagttacatatgtatacatstgccatgctggtgcgctgcacccactaactcgtcatctagcattaggtacatctcccgatgctatccctcccccctccccccacccgacaacagtcccca

SEQ ID NO: 391718 - DNA, 201 bp, Homo sapiens
gcctccctggcctccacagagtccactgctccctcttctgtgcccctcagtccctgggctccccccaccttcagccctgaccaccttgtggtgttcttgtyaaaatccccagtaaaatccgacattcctgagacaggtgatcaaacacttactgagtgcctactgtgtgcaggcgcacatttggtgctttaacatgttact

SEQ ID NO: 391719 - DNA, 201 bp, Homo sapiens
atggatgagggtcggggtggctgcctgaaggagaccagtggatgcttcctatgcaagtggccctcatggaattggctgtgcatggcaacacctggcatatrgcaggcattccatgaatagtggtatggccactattttaggtccttgcaacttctgcctctttggggtgggaggagagtaaagtctgcgcgatcagaaaca

SEQ ID NO: 391720 - DNA, 201 bp, Homo sapiens
aataaggaacgacagggcagaaacgtcaagggaggaaggaaaggaagaaagggcggatctgaaggaagccctgcctgcaagatgccaggggtaacaccttkctccacagggccagacccgagggtttctgagccgtgactctggctaagcccttcactgctctgggctgcaaaaggaggatcacagcacctcccgtgggtg

SEQ ID NO: 391721 - DNA, 201 bp, Homo sapiens
ggcactgaactagaccctctccctaaatgatctcaatgaatctccacaacagtttgtctctgctttgcagatgaggaaactgaggcacagagaggttaagyaacttactaaagtgacagaagtgtctaaccccaaagccactgtgttcttcatggatgagggtcggggtggctgcctgaaggagaccagtggatgcttcct

SEQ ID NO: 391722 - DNA, 201 bp, Homo sapiens
gctgcttgtgctcatttcacagatggaagctttctggaaacagatggcaaatatccagcactttcttgtggaccagtttaagtgttccagctccaaagccygacagctgatgatgactctgacggaaagaatgattgcagccgaagggctattgtgcgattctcaggagctgcaggctctggtaatgctggagggggcggg

SEQ ID NO: 391723 - DNA, 201 bp, Homo sapiens
agcttcctttgaatgtaaatgacttaacgtttcttagcctcgatttcctcatctataaaatgggataatgatatctatttgatagagttgtctgtcatagsaacttttttaaacagcttttttcaggtatagtttacatacatttattttatgagtacaattcaatgattgttagtaaattttacagagttctaccccatc

SEQ ID NO: 391724 - DNA, 201 bp, Homo sapiens
gagatgaacccagtacctcatgtggaaatgcagaaatcacccatcttctgcgtcgctcacgctgggagctgtagaccggagctgttcctattcggccatcytggcccctccccccaccggcagcttagaattttacttttcttcctcagtctgctaaccaggcatcttgggagagtttgttcattcattcattcgttcatt

SEQ ID NO: 391725 - DNA, 201 bp, Homo sapiens
aatatcacagcattcgccctgaaggccaaagtcatctaccccatcaatcagaagttccgggtgagagtcctgagctccatcatagaaagccagttacttcygtcatgtgccagagattgggaggaaagtggggggattaactgtgtgatgtttggtcctgtttgagggttttatggcaagtcattttagtagggatagttt

SEQ ID NO: 391726 - DNA, 201 bp, Homo sapiens
gggaggaaggtagggagaaaggggcagaagaggaggggatgagtccagagcgcctcatcttggaagacgttgcagactgttccaagatagttgcatttacwtctgagtgagacaggaaatcaccagcatgttttgagtagggaagtgacttgctttatgttttacaaggaccagtgtggtttccatgaggaaaacagactg

SEQ ID NO: 391727 - DNA, 201 bp, Homo sapiens
cctggaggctccaggggagaaacagttttcttgacttttccagtttctaaaggccacccacattccttggctcagggccctttcttccatcttcagggccrgctactcctgcctctgcttccaccattacatcttctctgactgtgaccctcctgcctccctcattcacttataagaaccctgtgatgacattggagccaa

SEQ ID NO: 391728 - DNA, 201 bp, Homo sapiens
ttacatcttctctgactgtgaccctcctgcctccctcattcacttataagaaccctgtgatgacattggagccaacagtgtcatccaggatcttctttccrtctcaggatccttaactcagtcccacctgcgaagtctctttaccatgtaaagttccgtgctcaaaggttccagggattgggacgtggacatctttaggga

SEQ ID NO: 391729 - DNA, 201 bp, Homo sapiens
acaacagtgatttgctctcatgggctgcagcttggccagcagttagctgatctaggctgggcttgattaacttgactcagccttgctccatgtccctcccrtcttccccctaagacctgtggactagcctgggcatgttcttctcatagcaatagctgaggtctagcctccaaagcagcacacctcacttccacctcattc

SEQ ID NO: 391730 - DNA, 201 bp, Homo sapiens
aaatcacttgaacctgggagatggaggttgcagtgggccgagattgtgctccagcctaggcaacagagtgagtctccatctcaaaaaaaaaaaaaaaaaaaagatgcggggaaggcctcttagccgactttccctaacatcgcatttcattggctctagacatccctgacctaagaagataggattcccatgactagttta

SEQ ID NO: 391731 - DNA, 201 bp, Homo sapiens
cccacttgtcaggggaactggagcacactttactctgaagtcattaaatgtgcatcttcagaacaatcaggctggggtccctggggaacattcttgggtcmtgtgatgaggaacaaaagtctcccaggggccagaccatgtccagggaatcccagaaagatccattccgtggactctgaaccttcattggtgcatcttcag

SEQ ID NO: 391732 - DNA, 201 bp, Homo sapiens
aaaatcacttgaacctgggagatggaggttgcagtgggccgagattgtgctccagcctaggcaacagagtgagtctccatctcaaaaaaaaaaaaaaaaaaaagatgcggggaaggcctcttagccgactttccctaacatcgcatttcattggctctagacatccctgacctaagaagataggattcccatgactagttt

SEQ ID NO: 391733 - DNA, 201 bp, Homo sapiens
gcatatttttgtgatttgaccattgtgaacaataaagaaaaaggtttgtcccaaccactgctgtagaataggagagtccaagaatgacagtcaacttaaamatctgtctcctggcagaaaattgggattctcagaggctagaaaataatgtccatcatccccactcattgaaagtgtttttactgtgaaatataagacata

SEQ ID NO: 391734 - DNA, 201 bp, Homo sapiens
gctgttgtttttttttaatcaagttaaggaagtttctttccattcctaatttgctaagtgtgtttctcatgcatagaaattaaattttgtaaaatgctttyatcttcctctactgaggtaatcagtgtaatatttttctcctttattctgttaatttggcaaatttcattgatttggtaatgttattaactacatacaaat

SEQ ID NO: 391735 - DNA, 201 bp, Homo sapiens
gtcctctacagagaagcccctaaggactaaaaggaagaagcccctgccccaggaaagaggggacctgggggtgcccaacaatgaggaccttgcctccgggraccagacctcaggctcactcaggtatgactgggccccggacctgttgcctgtggctgggtttggtaaatgcactcagctgctgtgtgccaaaagtcaggg

SEQ ID NO: 391736 - DNA, 201 bp, Homo sapiens
gaaaatcacttgaacctgggagatggaggttgcagtgggccgagattgtgctccagcctaggcaacagagtgagtctccatctcaaaaaaaaaaaaaaaaaaaagatgcggggaaggcctcttagccgactttccctaacatcgcatttcattggctctagacatccctgacctaagaagataggattcccatgactagtt

SEQ ID NO: 391737 - DNA, 201 bp, Homo sapiens
cattggcagtaagggatgagcaggggctcgggagttagaagaccagctcagacctgcactgccactccgggctgtacaggctagtcacctccgcagcctcsgcgccacacctgtgtgctcaggtacctttctcagatgctgtggtgagagtaagtgggtattttttcttacccaaagcctagcaccatccaataaatattt

SEQ ID NO: 391738 - DNA, 201 bp, Homo sapiens
aagaaagggcggatctgaaggaagccctgcctgcaagatgccaggggtaacaccttgctccacagggccagacccgagggtttctgagccgtgactctggytaagcccttcactgctctgggctgcaaaaggaggatcacagcacctcccgtgggtgggcaggattacttaagatgacgcaggacagcgcccagagcagct

SEQ ID NO: 391739 - DNA, 201 bp, Homo sapiens
ctccctcttctctttctgggactccagtgacaggatttctgaggcttttccactttatcccatatgtctcttacatgctcctctgtatttttcattcttctctccgtggttcagcatggatattttcctttgaggtatcttccagccactctctcttcagccatattttatcaggtgctaaacccatctcctgagttgttc

SEQ ID NO: 391740 - DNA, 201 bp, Homo sapiens
tctccctcttctctttctgggactccagtgacaggatttctgaggcttttccactttatcccatatgtctcttacatgctcctctgtatttttcattcttytctccgtggttcagcatggatattttcctttgaggtatcttccagccactctctcttcagccatattttatcaggtgctaaacccatctcctgagttgtt

SEQ ID NO: 391741 - DNA, 201 bp, Homo sapiens
ctctccctcttctctttctgggactccagtgacaggatttctgaggcttttccactttatcccatatgtctcttacatgctcctctgtatttttcattcttctctccgtggttcagcatggatattttcctttgaggtatcttccagccactctctcttcagccatattttatcaggtgctaaacccatctcctgagttgt

SEQ ID NO: 391742 - DNA, 201 bp, Homo sapiens
tgctcatttcacagatggaagctttctggaaacagatggcaaatatccagcactttcttgtggaccagtttaagtgttccagctccaaagcccgacagctsatgatgactctgacggaaagaatgattgcagccgaagggctattgtgcgattctcaggagctgcaggctctggtaatgctggagggggcgggagggaaca

SEQ ID NO: 391743 - DNA, 201 bp, Homo sapiens
ggtgcccaccatcatgcctggctaatttttgtattttttgtagagatggggtttcaccatgttggccaggctggtctcaaactcctaacctcaaatgatcyacccacctcagccttccaaagtgctaggattacaggcgtgagccaccatgcccagtcgagaaaaaaatttttgatatagctattttttagttttattttt

SEQ ID NO: 391744 - DNA, 201 bp, Homo sapiens
cagggggcgccacgatgcggtggccggtgcgcctgggattgttgtcatctatctgggcacctgaaagagagcgccaatcgctgctggatgggatctgttarcatcagttccacgctgctcctggaggccatgtactctgccatgcactccactggacccaccttcattcagggctcagtccaggaccagccatgggaagcc

SEQ ID NO: 391745 - DNA, 201 bp, Homo sapiens
aaaacagctgccaagacagatgggactggctgtagataatggtgaaaacagctgacactcagggaggctcactgttccctggccgttgttctcaatgcttsacgtattttgacttacttaatcctcatgtcaaatctgtgtggcaagggtcaggtgaggagcttgtgctcaggtcctgggagccaagtctgagcctggcac

SEQ ID NO: 391746 - DNA, 201 bp, Homo sapiens
gacagactctcgctctgtcgcccaggctagtgtccagtggtgcaatcttggctcactgcaagttccctctgcctcccgggttcaagtgattctccagcttyagcctcccgagtagctgggattacaggtgcccaccatcatgcctggctaatttttgtattttttgtagagatggggtttcaccatgttggccaggctggt

SEQ ID NO: 391747 - DNA, 201 bp, Homo sapiens
attttttatatatatatatttttttttcttttttctcgagacagactctcgctctgtcgcccaggctagtgtccagtggtgcaatcttggctcactgcaasttccctctgcctcccgggttcaagtgattctccagctttagcctcccgagtagctgggattacaggtgcccaccatcatgcctggctaatttttgtattt

SEQ ID NO: 391748 - DNA, 201 bp, Homo sapiens
ttacttaagatgacgcaggacagcgcccagagcagcttggtaagcgtccctcccatgatccacccaccctcacgggtgcacacccctctacagtttgcaamgccctggaacttgcatgtcctcatttgatgctcactcctgtcctcagacaggagcccaggccagcgtctcaacccatttaacagataaggaaacggaggt

SEQ ID NO: 391749 - DNA, 201 bp, Homo sapiens
cagcgcccagagcagcttggtaagcgtccctcccatgatccacccaccctcacgggtgcacacccctctacagtttgcaaagccctggaacttgcatgtcytcatttgatgctcactcctgtcctcagacaggagcccaggccagcgtctcaacccatttaacagataaggaaacggaggttcccagggcgatgacattat

SEQ ID NO: 391750 - DNA, 201 bp, Homo sapiens
ggcacctcacaaacaggttgctgcaccaaagccagtgtcatcccaataacagcggggctctgggtggagtttgctgtcatcccattccaggggccacacarcccacctgttcatttggatgtctgtctgactgtccccccatagctgtttctcttgaaaggctctgggagaaggtggtaaaatcacagccctgtcatgcgg

SEQ ID NO: 391751 - DNA, 201 bp, Homo sapiens
agcttcatgcaggaggaccccaaatcccttccaaagagaagtcactttgcctgacactaccacctacccacccccggaaaggacccctgagtcccagacaaggcagcagcaacgggcccatcttcatgtatgttcttgtagaagtcaacagcgaggcaaagattcggggggcagatagtttgttgggagatggttccagaa

SEQ ID NO: 391752 - DNA, 201 bp, Homo sapiens
gctctacggagatgactgttgcctccctttcacaatggcccaccacaggggtgggatgagagagcagagcccttatctccctcaacaggaagtcggagatsataccttaagttgatcgattaagaagagcagcaaagcttgttctttagaacgagagaaataagtagccaaccaaatggcaggaaggaaaggggttcacag

SEQ ID NO: 391753 - DNA, 201 bp, Homo sapiens
acctgtgtatctacagccttcacttaaaagacctgctgcatttggacacggcactgaggcaggaaaagcatatggtaggtggagatgttcgcattccctcsttttcatggggacaggagctgggagacaaggactctgtgtgcagtgagtcccagagacccttgagaggcagacatcagtggaaacagagccgctgtgagg

SEQ ID NO: 391754 - DNA, 201 bp, Homo sapiens
atttagggcacacaatcatactatgaagggggtgtttgtactcccaacttacgggtgagcaatttgaggttcaggccacgtgtcttgcgggacacaggtgytgggtggggaagccaggattgaagcccaaactggttggttttcaaagcccatgatcttaggcacactgtcccacactccaaaggtattttacatattgtg

SEQ ID NO: 391755 - DNA, 201 bp, Homo sapiens
ctggagaagagtcacttctgtgctcactcacatggctccccctctcaggtttcagttcctcaagggtcgttggactgagagccaacagcttccaaatttayatgctcagctcaggatcattcctgaactcagatctacatgaagtctccatttagatgattgatagacatgagaaatgggtgtgtcaaaaacagccgttgc

SEQ ID NO: 391756 - DNA, 201 bp, Homo sapiens
tctgtcctctacagagaagcccctaaggactaaaaggaagaagcccctgccccaggaaagaggggacctgggggtgcccaacaatgaggaccttgcctccrgggaccagacctcaggctcactcaggtatgactgggccccggacctgttgcctgtggctgggtttggtaaatgcactcagctgctgtgtgccaaaagtca

SEQ ID NO: 391757 - DNA, 201 bp, Homo sapiens
tcccctgcagacacactcaccttattcctgattttgacgcgctggtacaggtgctccgggaacgccttccgcggaatgaagcggcccatgcccttgttgaygttgatgtttccgtcttcaaagacgatcttgccctggctgatgaccactagtggggagccgtggcactccataccctcgaagatgttgtactccaccgcc

SEQ ID NO: 391758 - DNA, 201 bp, Homo sapiens
aaaatatatatatttatatatatatttatatatttatatatatttatatatatttttatatatttatatttttatatatttatatatatttatatatatatttatatatttatatatatttatgtatttatatttatatacatatatatatattttttatatatatatatttttttttcttttttctcgagacagactctc

SEQ ID NO: 391759 - DNA, 201 bp, Homo sapiens
aaaaatatatatatttatatatatatttatatatttatatatatttatatatatttttatatatttatatttttatatatttatatatatttatatatatatttatatatttatatatatttatgtatttatatttatatacatatatatatattttttatatatatatatttttttttcttttttctcgagacagactct

SEQ ID NO: 391760 - DNA, 201 bp, Homo sapiens
gtgaggtggggttagagcatggggcagagatgggaggctggggagcaggactggcctgtggcctcggcccagcacagaggtgcctaggcctgagctgggcrtggctgggagtggggggtgcagagtctgtgccgagggagatgccaacgtccgccgtccgctcctcctttcccccttactctcattccacaagcagctgct

SEQ ID NO: 391761 - DNA, 201 bp, Homo sapiens
tctctgtctggaagtggagacagtgacctctgtggcagggtccttggaagcttggggaggtagcgtacgttggtggttttccctgttatttttttttttttacttcttgaaaccttttcttcaacttttattttaagttctggggtacacatgcaggatgtgcatctttgtaacataggtaaacgtgtgccatggtggttt

SEQ ID NO: 391762 - DNA, 201 bp, Homo sapiens
ttttgctataacaattagtgcaatatggtctttccaatttgctggaaagtatttttttccttctttcattatgagaaaaaaatatatatatttatatatakatttatatatttatatatatttatatatatttttatatatttatatttttatatatttatatatatttatatatatatttatatatttatatatatttat

SEQ ID NO: 391763 - DNA, 201 bp, Homo sapiens
gtgggtgagggtgggccatggtccagcatgtggggcaggaaggggagccgtgcatgtgtcccacacatgctcctgccccaaggctgaccctggggtggggrtggggcaaggctcaagacgtggaggcatctgggcttagctgaggtcacactactagtgggacctacagaaaaacccaggtgtgtcaccagcagggcgggc

SEQ ID NO: 391764 - DNA, 201 bp, Homo sapiens
acatttttgctataacaattagtgcaatatggtctttccaatttgctggaaagtatttttttccttctttcattatgagaaaaaaatatatatatttatatatatatttatatatttatatatatttatatatatttttatatatttatatttttatatatttatatatatttatatatatatttatatatttatatatat

SEQ ID NO: 391765 - DNA, 201 bp, Homo sapiens
ccccatgcctcagtttccttgtgtgtaatacaggtgccaacatccttctttctaacctgagatgcaggggatggttggagaaccttctggaaaaaaaaaamaaaaccctgcatgtttctaccagactcagctcttgttttcctcacaggcttttcatgaggtcctggagaggcagaggctgatgcagtgtgacctggagga

SEQ ID NO: 391766 - DNA, 201 bp, Homo sapiens
aataaaatagacaattttcaaaacagtaagtgagaacagagggagtgagagggaaataagaaataatattgggcaaaggaacattgatgattcaaacaatraactgaagagtttagaaatgagcgctttagatgaagagtttagaaaacagcgcagaaccaaaataatgaagagcagtatccaggaaggcagagagaacac

SEQ ID NO: 391767 - DNA, 201 bp, Homo sapiens
aagaggagaatgtcagagccaccgaggctgtggttgcactctgccaggtacatggcctctgtggggaccagcagagaagccccagggtctgtgtgtgtgcragaacctcacatcctcctggctggggaccccagaggtggttcaggtccaaccccgcactcattggccggtgatccacgcaggctgtgtcccctccatgcg

SEQ ID NO: 391768 - DNA, 201 bp, Homo sapiens
aaccagccatgcactctctgcctgcttcctgaccaatccaggttggtgagtaggtggaagatctgaaccagggcatggggaggcagggactggatgggccrtgggtggctcccacgtgtgacttctctgctgtccctgtccttcctttctcccctcagaggacactgatggaggcggcagtggagagcgtctacgtgacca

SEQ ID NO: 391769 - DNA, 201 bp, Homo sapiens; identical to SEQ ID NO: 85890

SEQ ID NO: 391770 - DNA, 201 bp, Homo sapiens
caacatggtgaaaccctgtctctactaaaaatacaaaacattaactgggcgtggtggcgggtgcctgtaatcccagctactccagaggctgaggcaggagratcgcttgaacccgggaggtgaagcttgcagtgagccgagatctcacaggagatcacttagcctgggcaacagagcaagactccatctcaaaaagaaaaa

SEQ ID NO: 391771 - DNA, 201 bp, Homo sapiens
ttggaaatccgttctccccaggtgagaaataggcccagggtttctgggtgtcatcagtgtaaagtggtgatgaagaaggggttctgggctgaaatggggaygtcagagatcacatgccacaccacctctttcccctgtgcaaccgtgtgcaggtctggggtggggaggtgaagctggccatgcttgccctgcagggtgact

SEQ ID NO: 391772 - DNA, 201 bp, Homo sapiens
gacaacttatccttcattttacagaaagtttcccatgccgtttgtgtctttccctcccaggaatgtgagccgccttccaacagcaatatcacagcattcgycctgaaggccaaagtcatctaccccatcaatcagaagttccgggtgagagtcctgagctccatcatagaaagccagttacttccgtcatgtgccagagat

SEQ ID NO: 391773 - DNA, 201 bp, Homo sapiens
aaaccagccatgcactctctgcctgcttcctgaccaatccaggttggtgagtaggtggaagatctgaaccagggcatggggaggcagggactggatgggcygtgggtggctcccacgtgtgacttctctgctgtccctgtccttcctttctcccctcagaggacactgatggaggcggcagtggagagcgtctacgtgacc

SEQ ID NO: 391774 - DNA, 201 bp, Homo sapiens
cttgaactcgggaagcggaggttgcagcgagctgagatcatagcacctcactccagcctgggtgacagagtgagactccatctcaaaaaaaaaaaaaaaaagacaacgatgactgtgcagaattttctagaatattctggtttccctagcactccaatagattattgtaaactccttacaagaggaatcagagatgggagt

SEQ ID NO: 391775 - DNA, 201 bp, Homo sapiens
gcttcctcactgcgtgaccacaggagcatcacttggcctctagccctcagtttccccatctgtgaaatggggacagtcataattcttcttcatggtgtgcyaggaggactgtgtttggggacccgagacagcagctggcactcggaacaccccagggcacgttgtctccagtgacagcttccctgcttctgagtgcagagg

SEQ ID NO: 391776 - DNA, 201 bp, Homo sapiens
atggtcatccttttctttgtcgtttcttttctcccctgtttgtaggaagtttacaaatgcacagggcccttttgcttttgtatctttcccttgagcaaatrtgtctcccctggacagtcagccagggctggtgtcctgggtgtgacctgtgaggtcacagggaccacgctcagataggcccactcttggctggtggactct

SEQ ID NO: 391777 - DNA, 201 bp, Homo sapiens
ccttgaactcgggaagcggaggttgcagcgagctgagatcatagcacctcactccagcctgggtgacagagtgagactccatctcaaaaaaaaaaaaaaaaagacaacgatgactgtgcagaattttctagaatattctggtttccctagcactccaatagattattgtaaactccttacaagaggaatcagagatgggag

SEQ ID NO: 391778 - DNA, 201 bp, Homo sapiens
  misc_feature (1)...(201): n = A,T,C or G
gctctcccaggcagtgccattagttaatgaccctggtggcttcttctcagctgttaattaacatgccctggtggttcccaggacaccccagctatggtccngtgtgtttctttttgcaggacgccctggagaggacgatggggcgggcgcacatggcaaaagtgattgagtttctgaagctgcaagtccaggaggagacca

SEQ ID NO: 391779 - DNA, 201 bp, Homo sapiens
ccttacccacagccttcctccatttttctactaaattagggcaaaaaccttggggtcatcctcgactcctctttctttcacaccctacatcggtggacaaraaatcccattgattttgccttccgtctaatcctgaatgtaaccactattcagcacctcccctcttagcaccctggtcaaaaccactcttgtctgggttac

SEQ ID NO: 391780 - DNA, 201 bp, Homo sapiens
ggtttttctatctttgagacccatttgaaataagaggaagataaggctattcagctcctcgttatttggatatttctgggcccctgtccttgatgtcacaragcccagtgtgagtccagagtgtggagacagtgcctgggtgaccttggtgtcccagggcctcggtacagtcctcggaacgcctcagcgctggcgttcagg

SEQ ID NO: 391781 - DNA, 201 bp, Homo sapiens
ctggcatgactggcctccccccggaagagtgtgactacttgaggcaggaagtccaggagaacgctgcctggcagctggggaagtcaaatcgcttccggaggcagcagtggaaactcttccaggagctcctagagcaagaccagcaggtgcgggcatttgggaacccaggggctggggtctgcattttagaaacacacgaag

SEQ ID NO: 391782 - DNA, 201 bp, Homo sapiens
tctgaatcccccctgtctctcggcctctaaacagtccattttcagttcacttgggatggatgctgtgcgatcgcgtgagctctgtggctcggcacctcacraacaggttgctgcaccaaagccagtgtcatcccaataacagcggggctctgggtggagtttgctgtcatcccattccaggggccacacagcccacctgtt

SEQ ID NO: 391783 - DNA, 201 bp, Homo sapiens
tggttctcagggctacagagaaaagtgcatttttctgaatcccccctgtctctcggcctctaaacagtccattttcagttcacttgggatggatgctgtgygatcgcgtgagctctgtggctcggcacctcacaaacaggttgctgcaccaaagccagtgtcatcccaataacagcggggctctgggtggagtttgctgtc

SEQ ID NO: 391784 - DNA, 201 bp, Homo sapiens
atatccagcactttcttgtggaccagtttaagtgttccagctccaaagcccgacagctgatgatgactctgacggaaagaatgattgcagccgaagggctrttgtgcgattctcaggagctgcaggctctggtaatgctggagggggcgggagggaacataaagatattcagactagagatatggaatcctgaggcttgac

SEQ ID NO: 391785 - DNA, 201 bp, Homo sapiens
cctgggtcctggattcaaatcctggttccatcacttcctaagtgtgtgatcctaaacaagttattgatctcactctgagtcagtttcctcatctgtacaayggggataataatccctacctcatagagcacctggcatatagcaactgctatacagctatcagcccatgtatttgttgtcattaccagcaacttcatcact

SEQ ID NO: 391786 - DNA, 201 bp, Homo sapiens
aacagctaatcgataatgtgcgtgccggactttctttcctgtacacaaattttggttcctaaaacagttaaattggctaaattagagagatgatagttagragtgtgcctaatacttgaattcccctatcgcattctgccctagaggcaggatccagtttctgatgctaagtgatagggaagaagtaattaagcagcaaag

SEQ ID NO: 391787 - DNA, 201 bp, Homo sapiens
ctcaggaaggtgacctgtgcagtcttgaaggacatgtagcggaccccacgtggggtgggaggcgtcacacacagaagaccaagcttgagaagcacagaggygagcagaagtggctgctggactgggggagttgactggcaaaagtcacggtggggaccaggccgactgacctcaatgttgtgtttctatccacccccaact

SEQ ID NO: 391788 - DNA, 201 bp, Homo sapiens
aggcaggtagatcacctgagatcaagagttcgagaccagcctggcctacatagcgaaaccccatctctactaaaaatacaaaaatgagtcgggcatggtgrcatgcaccagtaatcccagctacttgggagactgaggcaggagaatcccttgaactcgggaagcggaggttgcagcgagctgagatcatagcacctcact

SEQ ID NO: 391789 - DNA, 201 bp, Homo sapiens
cccctgaaatgcccagacaccccgccctggctgagccaagcctggcttcattaagccctccccagcccacacctgggcctttctaacccctctacacattstcccttgctgcatcaagtgataacccaatctgttcagccttaggggagctctgatggcctgtgcagtgcattgacagagtaaaataactaagcagaatat

SEQ ID NO: 391790 - DNA, 201 bp, Homo sapiens
ctgggtggagtttgctgtcatcccattccaggggccacacagcccacctgttcatttggatgtctgtctgactgtccccccatagctgtttctcttgaaargctctgggagaaggtggtaaaatcacagccctgtcatgcggggacttctcagcttcaggctgtcccaggaagttagggctgagaaaaagagaaaacactg

SEQ ID NO: 391791 - DNA, 201 bp, Homo sapiens
ttaataccccacctcacagaaaataacagaccgatcagaccgtaagtcaggccgtgaaaagatctgttctgaacaacacagtcagttaggatgagcagacrctcctacatcgaattttatgcaccatatttatggataatatgaatgtctctattgaaaagccaaaaggatctacaaactgtcacaactatgaagattgct

SEQ ID NO: 391792 - DNA, 201 bp, Homo sapiens
gaatagctcaggcagctttgaacaagaggataaggcaggacctaccctcgctgcattgatatttaattgctacattagtaagcatggtattggtgcggaartaaacacaccaatagaacaaagtacagaagctgggacaagatgtgtgtgtatatgttaattatacaagacaaagtggcgttagaggaaagccagaaaaaa

SEQ ID NO: 391793 - DNA, 201 bp, Homo sapiens
tgtaaatcctcatgctgatatatatttgggttttcatatcagtttatgaaaattctcagatgttttccctttagatcttcccctgcctattctctccctcytctctttctgggactccagtgacaggatttctgaggcttttccactttatcccatatgtctcttacatgctcctctgtatttttcattcttctctccgtg

SEQ ID NO: 391794 - DNA, 201 bp, Homo sapiens
gctcctctgtatttttcattcttctctccgtggttcagcatggatattttcctttgaggtatcttccagccactctctcttcagccatattttatcaggtrctaaacccatctcctgagttgttcatgtcagttattgtgttttcagttctaggatgtccatttgattccttgtatagtttccagttatctgctgaaattc

SEQ ID NO: 391795 - DNA, 201 bp, Homo sapiens
gctgcataccataggctgctgtacacatgcattggacagccaggcaggatgtgatgaggttaaaaagattaatagacaagcagatggcggcgtggtgcccmgggagcacccatgcctaagaggatggcagcagagggcggtgattccaacctgcttccttttggaggggcctcttgtgggctgtggctgtttggggagctt

SEQ ID NO: 391796 - DNA, 201 bp, Homo sapiens
cctccaggcagaccttcctgtgagcggctagcgtgaatcactggtagaattatgaatactagatcaaatcccagaggcatcacatggactgagtgtgactyctactgccaccccagcctctggccgatggctcctccaacccgtctctgcatgaaaacttaaagcaggctgttttgccacaccagccggtagaggcctctc

SEQ ID NO: 391797 - DNA, 201 bp, Homo sapiens
gccccacccattccagacaggcggtgcccctgcagcaggccccagcttccagcaggtttgccagaacccgaatcctatcacccttggtgctgcagggtgcrgtattcattcgccggggctgccatagcaaggtcccacagaccgggcagcttacactgcacacatttccctgctcaccatcctggaggccagaattcggag

SEQ ID NO: 391798 - DNA, 201 bp, Homo sapiens
gtggctcacgcctgtaatcccagcactttgggaggccaaggcgggtggatcacttgaggtcaggagtttgagaccagcctggccaacacagtgaaaccccrtctctactaaaaatacaaaaattagctaggtgtagtggtgtgcgcctgtaatcccagctactcgggaggctgaggcagcagactcacttgaatctgggag

SEQ ID NO: 391799 - DNA, 201 bp, Homo sapiens
aaaaaacagaaaagcattgagtttagtttctagaagaatggtcatttattcaacctgtattcaggggcttcctggaacactagtgcaaatgtgtgtgccartgggtacggggagactggccagaaaaaaactgaggaggaggagagaaggggtggccaaggatggagggcctggtgaagggaggagaggtgggtgcagagt

SEQ ID NO: 391800 - DNA, 201 bp, Homo sapiens; identical to SEQ ID NO: 85862

SEQ ID NO: 391801 - DNA, 201 bp, Homo sapiens
acctccagacaggagaaagcatgagggtccccactgaaattctggctcacagagtcacctcctatgctgtggcttttttcaatcccagagtttgtccagcraggcaaagacctggtcaaggcgtctctggctcaccaggtggagggaacggcaaaactcacgctggcccaagaggaggaacagagaagcttcctggctgag

SEQ ID NO: 391802 - DNA, 201 bp, Homo sapiens
agtgtgtctatgtgtgcaagtatgtatgagtctatgtgtgattcatgtgtgtatgtgtgcacttgtctatgcatggatgtatgtaggagtgtgtgcatggrtcaaatgtgaacgaaagtgtgcatgtgttcctgtgtgtgtgcatgtgtgtatatgtgcctgtgtctgcatgcatatgtgtatgagtacatgtgcatgtgt

SEQ ID NO: 391803 - DNA, 201 bp, Homo sapiens
gtctgttgttggtgtataagaatgcttgtgatttttgtacattgattttgtatcctgagactttgctgaagttgcttatcagcttaaggagattttgggcygagacaatggggttttctagatatacaatcatgtcgtctgcaaacagggacaatttgacttcctcttttcctaattgaataccctttatttccttctcct

SEQ ID NO: 391804 - DNA, 201 bp, Homo sapiens
gtattttattctctttgaagcagttgtgaatgggagttcactcatgatttggctctctgtttgtctgttgttggtgtataagaatgcttgtgatttttgtrcattgattttgtatcctgagactttgctgaagttgcttatcagcttaaggagattttgggctgagacaatggggttttctagatatacaatcatgtcgtc

SEQ ID NO: 391805 - DNA, 201 bp, Homo sapiens
tctagaataggaagatttatacagacagaaagtagattagtggtttccaggggctgcagcagaggaaagggagggatggggtgacagtgaaagaggacaggtttctctttgatgccatgaaaatgttctaaagttgacgataggctgggcatggtggctcatgcctgtaatcccagcattttgggaggctgaggcgggcag

SEQ ID NO: 391806 - DNA, 201 bp, Homo sapiens
ctcttttatttcattgagcagtagtttgtagttctccttgaagaggtccttcacatcccttgtaagttggattcctaggtattttattctctttgaagcarttgtgaatgggagttcactcatgatttggctctctgtttgtctgttgttggtgtataagaatgcttgtgatttttgtacattgattttgtatcctgagac

SEQ ID NO: 391807 - DNA, 201 bp, Homo sapiens
gaaatgtcgggggctggtgactctgagtacatcaccctggctgatgtggaaaagaaggagagagaatactctgaacagctaatcgataatgtgcgtgccgkactttctttcctgtacacaaattttggttcctaaaacagttaaattggctaaattagagagatgatagttagaagtgtgcctaatacttgaattccccta

SEQ ID NO: 391808 - DNA, 201 bp, Homo sapiens
tcaattcctgggtatccttgttaactttctgtctcattgatctgtctaatgttgacagtggggtgttaaagtctcccattattaatgtgtgggagtctatrtctctttggaggttactcaggacttgctttatgaatctgggtgctcctgtattgggtgcatatatatttaggatagttagctcttcttgttgaattgatc

SEQ ID NO: 391809 - DNA, 201 bp, Homo sapiens
ttcttcctacccatgagcatggaatgttattccatttgtttgtatcctcttttatttcattgagcagtagtttgtagttctccttgaagaggtccttcacrtcccttgtaagttggattcctaggtattttattctctttgaagcagttgtgaatgggagttcactcatgatttggctctctgtttgtctgttgttggtgt

SEQ ID NO: 391810 - DNA, 201 bp, Homo sapiens
tgctattgtgaatagtgccgcagtaaacatacgtgtgcatatgtctttatagcagcatgatttatagtcctttgggtatatacccagtaatgggatggccrggtcaaatggtatttctagttctagatccctgaggaatcgccacactgacttccacaatggttgaactagtttacagtcccaccaacagtgtaaaagtgt

SEQ ID NO: 391811 - DNA, 201 bp, Homo sapiens
gtgtatatgtgacacattttcttaatccagtctatcattgttggacatttgggttggttccaagtctttgctattgtgaatagtgccgcagtaaacatacrtgtgcatatgtctttatagcagcatgatttatagtcctttgggtatatacccagtaatgggatggccgggtcaaatggtatttctagttctagatccctg

SEQ ID NO: 391812 - DNA, 201 bp, Homo sapiens
gcgatagtttactgagaatgatgatttccaatttcatccatgtccctacaaaggacatgaactcatcattttttatggctgcatagtattccatggtgtayatgtgacacattttcttaatccagtctatcattgttggacatttgggttggttccaagtctttgctattgtgaatagtgccgcagtaaacatacgtgtgc

SEQ ID NO: 391813 - DNA, 201 bp, Homo sapiens
ggtgtttggttttttgttcttgcgatagtttactgagaatgatgatttccaatttcatccatgtccctacaaaggacatgaactcatcattttttatggckgcatagtattccatggtgtatatgtgacacattttcttaatccagtctatcattgttggacatttgggttggttccaagtctttgctattgtgaatagtg

SEQ ID NO: 391814 - DNA, 201 bp, Homo sapiens
atacatgtgacatgctggtgcgctgcacccactaactcgtcatctagcattaggtatatctcccagtgctatccctcccccctccccctaccccacaacastccccagagtgtgatgttccccttcctgtgtccatgtgttctcattgttcatttcccacctatgagtgagaatatgcggtgtttggttttttgttcttgc

SEQ ID NO: 391815 - DNA, 201 bp, Homo sapiens
tgttaactctttcagctgattattttgggaatttacttcccatttctaaataatgtgcctatattgctgctgcttgcattttttttttttttttggctgcrtgcaatagccgttgaccctccactgtggaaaggaagaggacttagctctgttgcctcccttcctccataaaatgtccactcttcccaacaccaccaccac

SEQ ID NO: 391816 - DNA, 201 bp, Homo sapiens
tgctttgtgcaaaaaagtttcctagtgaaataagtttgggaaaatgtggcttgctttcttggtattcaggatgacgagctctggagtcacagcatctcagkcctaaccccatctcagccattcactgtgtggcgtttcctgacttctcctgcctcagtctgtttatctgtcaaatggggatgatggtgctcctgcctcgcc

SEQ ID NO: 391817 - DNA, 201 bp, Homo sapiens
gccagaaaaaaactgaggaggaggagagaaggggtggccaaggatggagggcctggtgaagggaggagaggtgggtgcagagtggggtgtccgccactttrctgtggcaggaaggcaggtgcacataggatgtgaagatgtgggtgggcttgctgaccttcggggaaagaggatgggagctcccgacaggaagtgtaaggc

SEQ ID NO: 391818 - DNA, 201 bp, Homo sapiens
actttactgtggcaggaaggcaggtgcacataggatgtgaagatgtgggtgggcttgctgaccttcggggaaagaggatgggagctcccgacaggaagtgyaaggctggagcccaggtccttggaggggtggagtgggagccccctttgcagatggggcagaggagaaggaaaggaccattggcagtaagggatgagcagg

SEQ ID NO: 391819 - DNA, 201 bp, Homo sapiens
gagggtctttgtttctgaccctgcattcttgctgttaatttgttgcttcatagtcttaaaatggccactgtcactccagatgtcaggcctgcattccaggyaggaggagggaacagcagtctttcacctgctggtcctccaccttaatgtttagaaacggaaggcctcggccgggcgtggtggctcatgcctgtactccaa

SEQ ID NO: 391820 - DNA, 201 bp, Homo sapiens
  misc_feature (1)...(201): n = A,T,C or G
tctctgcctgcttcctgaccaatccaggttggtgagtaggtggaagatctgaaccagggcatggggaggcagggactggatgggccgtgggtggctcccangtgtgacttctctgctgtccctgtccttcctttctcccctcagaggacactgatggaggcggcagtggagagcgtctacgtgaccagcgctggtgtcagc

SEQ ID NO: 391821 - DNA, 201 bp, Homo sapiens
ctagtctgtggcccaggggttggggatccctgatctaggatatctgcctgcaaatcctaattagacgttcaatgatttcgtctgtgagcttcctggtggtsaaagagacagacacctacttagttaaagccaccgcagtgaccatgagtccagtggtccagggggtgtttgagaccccaagaattttcccgcatgggctct

SEQ ID NO: 391822 - DNA, 201 bp, Homo sapiens
ggctacacctcctgctggagatagagataaaagatatttaaaagagaacaatatgtttaaaggaatgataataatgataagaatatttatgagcatgaatkttcttgagtcttgctatgtacgaggtcccaggagtattacacttaaacctcagcacaacccagaggggcgggtgtcattatcatgtccactctgcaggtg

SEQ ID NO: 391823 - DNA, 201 bp, Homo sapiens
  misc_feature (1)...(201): n = A,T,C or G
acctgaagaccctgcagggtacgggaccccccctcagggaagccccagaagagactggcaatgtgtgcttttagtttggggcagaataggatgtcagatantgtgaattttatttttgggaatataattatttcagtgttttaatgtatttatcccgtgctttgtctcaaaaagcctttttcaaaaggcacttaaagaaac

SEQ ID NO: 391824 - DNA, 201 bp, Homo sapiens
ttgaaatgatatagcttaagccacatcaactcctttttccttatttagtaatctgttttatttaagagttgtacatgctatgtccccagaggctatccagrttcagtctccctgtaagtgccagcaagctctcccagctaattaagtgtgatgggcctcctgccgtggccactgatccttgagtgggttttcagctgagag

SEQ ID NO: 391825 - DNA, 201 bp, Homo sapiens
tctgcagtgcctggtccatgatggaagctgtgttgtttgtgcacacaatgccctgtccctgtgctggtggaaggatacactcttggagagctggtgtgtcycactcaccctgcaccccagcacctgccccagacctggcacagtggatcctccaaacagaccccttgattgtcctgtgttaaatggtctaggtgagaggat

SEQ ID NO: 391826 - DNA, 201 bp, Homo sapiens
acttgcaggttctgggcccacacctggagactcaggctcagaaagtgtgaggagagcccaagaatctgaattttagccgcacctctccgcaccaagggatwctgatagatgtggtccaagggcttcactttgacccaggtgatccaagagaaggagcctcagcagccagctgggccaacctgctttatggaagaggaaaag

SEQ ID NO: 391827 - DNA, 201 bp, Homo sapiens
gtatagaagagggatggattcactatgcctgcataccgggcaccaaagggaaaaaagatggcttccgtatctcagaacacagaagagttggaattcccagrgcggcatcccatctttctggcctgggcatttggagctgaaatgtgcatctgtaaatattaaaactggaagagcccttcaaagggaccctgacggtcatca

SEQ ID NO: 391828 - DNA, 201 bp, Homo sapiens
agtttcttttcttttttttttttttttttttgaaggagtgacagtacaattttgtgacatagctatattgaatagtggtgaagtctgagcctttattgtarccatcacccaaatagtgtacgttttacccattaatttctcatcatccactcccctcccatcgtcccgccgcccttctgtgtctctgttgtccatccttcc

SEQ ID NO: 391829 - DNA, 201 bp, Homo sapiens
gagtctgtgccgagggagatgccaacgtccgccgtccgctcctcctttcccccttactctcattccacaagcagctgctctcaggtgtgcagggcccttgkctgcctccggttgacatttccccctgtcttttctgagagtccctgaaatgatgaggtggggctggggagggccttctgtagaatctgactgcggggagtc

SEQ ID NO: 391830 - DNA, 201 bp, Homo sapiens
aatggggccctgagatgggaagccgcattgatgaggggtgttcatctgggtgcaggcttcctcctggcagagccagaccgacaccacagttgaggctgactagagtttcatgatcttgagtcacagcaacaaaatcagcatgggtttctggtgacactaacccctgccccctcccatgcccagtccagccagaagtgtcca

SEQ ID NO: 391831 - DNA, 201 bp, Homo sapiens
cgcagtgaccatgagtccagtggtccagggggtgtttgagaccccaagaattttcccgcatgggctcttgtaaaaggccaccctggggtgatagaaaggayagtatccccagttccagtaacatacagataaggatggttggaagccaatttcttaaatgccacttcttacaacaccctcccctgaatccagaacttctga

SEQ ID NO: 391832 - DNA, 201 bp, Homo sapiens
ggtttactgggaggcaatggggccctgagatgggaagccgcattgatgaggggtgttcatctgggtgcaggcttcctcctggcagagccagaccgacaccrcagttgaggctgactagagtttcatgatcttgagtcacagcaacaaaatcagcatgggtttctggtgacactaacccctgccccctcccatgcccagtcc

SEQ ID NO: 391833 - DNA, 201 bp, Homo sapiens
caaatgggccaaagccgaacatcaaaaatccttaccatccgttcttggtctttccatccaaaaatccttaccatccattcttggtctttctcagtagttasttaaccttgtttcaaggaagtctataactgaccctgagccaacacttctttcaaccttgacaaaggtatccacacgaagccgaggagcgggggaggagaa

SEQ ID NO: 391834 - DNA, 201 bp, Homo sapiens
cgtgagggtgtcaggcaggtttgaggtccctcctggcagggatgagaggaggagcagcatgtatggggtttactgggaggcaatggggccctgagatgggragccgcattgatgaggggtgttcatctgggtgcaggcttcctcctggcagagccagaccgacaccacagttgaggctgactagagtttcatgatcttgag

SEQ ID NO: 391835 - DNA, 201 bp, Homo sapiens
aatccttaccatccattcttggtctttctcagtagttagttaaccttgtttcaaggaagtctataactgaccctgagccaacacttctttcaaccttgacraaggtatccacacgaagccgaggagcgggggaggagaagggtacatgaaaagccctgcgttgatgtgggaccagagcatccaaagccatctgcctcaaat

SEQ ID NO: 391836 - DNA, 201 bp, Homo sapiens
tccttaccatccattcttggtctttctcagtagttagttaaccttgtttcaaggaagtctataactgaccctgagccaacacttctttcaaccttgacaawggtatccacacgaagccgaggagcgggggaggagaagggtacatgaaaagccctgcgttgatgtgggaccagagcatccaaagccatctgcctcaaatgc

SEQ ID NO: 391837 - DNA, 201 bp, Homo sapiens
gtgatcctaaacaagttattgatctcactctgagtcagtttcctcatctgtacaatggggataataatccctacctcatagagcacctggcatatagcaastgctatacagctatcagcccatgtatttgttgtcattaccagcaacttcatcactatcaccaacaccaccatcatcatcaccactatcgtcaccatcatc

SEQ ID NO: 391838 - DNA, 201 bp, Homo sapiens
gagccagagtcagaccccaacacctggctatggttacaccttccatggcgcttccaggagccctcagcctgggaggtgctttgtgcaaaaaagtttcctaktgaaataagtttgggaaaatgtggcttgctttcttggtattcaggatgacgagctctggagtcacagcatctcagtcctaaccccatctcagccattcac

SEQ ID NO: 391839 - DNA, 201 bp, Homo sapiens
ttattctgaccaaagtcagggttggcgatgagcttaagagtgtggcattcattaggttgaattaacattgatttgaatgaaattttttgttgttgttgttwttatactttaagttttagggtacatgtgcacaatgtgcaggttagttacgtatggatacatgtgacatgctggtgcgctgcacccactaactcgtcatct

SEQ ID NO: 391840 - DNA, 201 bp, Homo sapiens
aacccctgcctttttttgttttccatttgcttggtagctcttcctccatccttttattttgagcctatgtgtgtgtctgcacgtgagatgggtttcctgartacagcacactgatgggtcttgactcttcatccagtttgccagtctgtgtcttttaattggagcatttagtccatttacatttaaagttaatattgttat

SEQ ID NO: 391841 - DNA, 201 bp, Homo sapiens
ttccccttctgctccaggagggaggtggcggcgtgactaaagggcattggcctggggtcccctgcggtgcctgttacatcccactccgttgggtgatcctwgacagcagcccaactgcgccacgcctcggtctcctcatctgcagcaccaagggtttggacaggacgctggccctgctcgccatggtggacagaaggacgg

SEQ ID NO: 391842 - DNA, 201 bp, Homo sapiens
tgaattgatccctttaccattatgtaatggccttctttgtctcttttgatctttgttggtttaaagtctgttttatcagagactaggattgcaacccctgyctttttttgttttccatttgcttggtagctcttcctccatccttttattttgagcctatgtgtgtgtctgcacgtgagatgggtttcctgagtacagcac

SEQ ID NO: 391843 - DNA, 201 bp, Homo sapiens
gcaccctctgacctgtacttgagaccgcaggatgaagccagcacggttttttgtactcccccagggtgagtgcactctcccaggaccctcctggccaaccwggggtcacgttctgcaccacattccttctgaggccctggccagggcggtgctgatcttgctgttgccacagaagcctctcctgcccctgccatccgccca

SEQ ID NO: 391844 - DNA, 201 bp, Homo sapiens
ctgtctcattgatctgtctaatgttgacagtggggtgttaaagtctcccattattaatgtgtgggagtctatgtctctttggaggttactcaggacttgctttatgaatctgggtgctcctgtattgggtgcatatatatttaggatagttagctcttcttgttgaattgatccctttaccattatgtaatggccttcttt

SEQ ID NO: 391845 - DNA, 201 bp, Homo sapiens
tctgtctcattgatctgtctaatgttgacagtggggtgttaaagtctcccattattaatgtgtgggagtctatgtctctttggaggttactcaggacttgctttatgaatctgggtgctcctgtattgggtgcatatatatttaggatagttagctcttcttgttgaattgatccctttaccattatgtaatggccttctt

SEQ ID NO: 391846 - DNA, 201 bp, Homo sapiens
ttctgtctcattgatctgtctaatgttgacagtggggtgttaaagtctcccattattaatgtgtgggagtctatgtctctttggaggttactcaggacttgctttatgaatctgggtgctcctgtattgggtgcatatatatttaggatagttagctcttcttgttgaattgatccctttaccattatgtaatggccttct

SEQ ID NO: 391847 - DNA, 201 bp, Homo sapiens
ttctgttgatttggggtggagagttctgtagatgtctattaggtctgcttggtgcagagctgagttcaattcctgggtatccttgttaactttctgtctcrttgatctgtctaatgttgacagtggggtgttaaagtctcccattattaatgtgtgggagtctatgtctctttggaggttactcaggacttgctttatgaa

SEQ ID NO: 391848 - DNA, 201 bp, Homo sapiens
aaaaaaatgtatattctgttgatttggggtggagagttctgtagatgtctattaggtctgcttggtgcagagctgagttcaattcctgggtatccttgttractttctgtctcattgatctgtctaatgttgacagtggggtgttaaagtctcccattattaatgtgtgggagtctatgtctctttggaggttactcagga

SEQ ID NO: 391849 - DNA, 201 bp, Homo sapiens
gggacaggagctgggagacaaggactctgtgtgcagtgagtcccagagacccttgagaggcagacatcagtggaaacagagccgctgtgaggtgggggaargcggcgctgtcaggcatgcagccacaaaatggaaaagcacttcacgcctgttggtggggcatggccttgacttcaaccagagctgtaggggcctcagcag

SEQ ID NO: 391850 - DNA, 201 bp, Homo sapiens
ttcaaaactttttaaagaaaacagcacatgagggagactactattatgaccatgaggaggataataccaagagtttggagtatgctttttagccagagtcyccatgaaccaatccaactacaattaaatagatcaaagaattagctagacaaagagtctactcatttcaaccaggtagcctgttcattaatcccctagaaa

SEQ ID NO: 391851 - DNA, 201 bp, Homo sapiens
tgacaaacgccacagagacatttggtctaaagaaaaaacttgtgatcgcttaccaaaattcttggtaataggaccccagaaaactggtgagaactttttaygttatgattaacgagtgtaaattttctgatgactagacaatgagatcttgtcacaataagttcgtaaacttcccataactgctaatgaatgaataacatg

SEQ ID NO: 391852 - DNA, 201 bp, Homo sapiens
gaacctgggaggtggaggtcacagtgagcccagattgcaccattgcgctccagcctgggcagcaagagtgaaactccaactcaaaaaaaaaaaaaaaaatyctatttttttcactgcctgagtcattctgttgtagtaagtgtgccctgggcagtaatgtaagttactgatataatatactaagttttgagctgttaatat

SEQ ID NO: 391853 - DNA, 201 bp, Homo sapiens
taacatgtttttctctgacataattttcatttagcccagtaatatacctaaatgcttatcgaagtgttttttaagtgaagggaataaaacagatgtcacastgttcaaatatccagcagtcaatttggtagcacatgttttttttttttcccccaaatgttttaattgaaaagtattgtaattaacacttctaaaatcaaa

SEQ ID NO: 391854 - DNA, 201 bp, Homo sapiens
tagaagtatgccaaaagactttatgcaaaggaatatagtaaaaaagaattcagtttctctggttatagattgttatccaaataaaatatttatgtattggwcactatatcatatgtattggtcaccatatcatataaattggttgaaaaatgattttctggtttttctgtgtgtattcttttttttttaggtttgattctc

SEQ ID NO: 391855 - DNA, 201 bp, Homo sapiens
gtctgttgtgtagccagagcttttgcagtagaatctgctacagagcctatcatgagggataaatttctaatcattgcctcatctactcccaaccacagaawgagcgatctaacaaatgatatccatccaaaagagagaagatctcctgtaaaggttttctttaatccatgatgtaccttaagaggagtggaccaatgttct

SEQ ID NO: 391856 - DNA, 201 bp, Homo sapiens
agcacattcctgctgacagagcttggaaggcattgagcagttctgcatttgatcctacttttttcacaaagaggtgaatatcaaatattttaaacagcaarctaaagtttcagagcaaatataatttaaaatttggttctgctttgggaaatctgtttaggaggcatttgtaaacagttgaaaggctcattctaaactgga

SEQ ID NO: 391857 - DNA, 201 bp, Homo sapiens
atccaaaaaatttaatcatgctccgctgtagtcaacactttctactcaccttgacccctaggaatcatcaagctactttctttcacttagcataatgattytgagtttcctctatgttgctacatctatcaggagtcaattcttttttattgttatatattactccattttatggatgtaccacaatttgtttatcctttc

SEQ ID NO: 391858 - DNA, 201 bp, Homo sapiens
tgccactgccctccagcctaggtgacagagagagactccatctcaaaaaaaaaacaaaaatgctgttagaatatggacacaaagaagagagcagtagatayagataccagatatagatacttgagggtgaagagtgggagtagcgtgaggatgaaaaactacctattgggtaccatgctcattacctggatgatgaaataa

SEQ ID NO: 391859 - DNA, 201 bp, Homo sapiens
ccttaccgattcaaacaagaccataaacagcatgaaaacataaaatgttgtgtcctgatctgacacaattgctttaataatgatgagaaacaggctttacrtaaatggaaagtgattattctctctaatacacaaagtcatacagaggcagaaatctaggtttgtattcttttcatagggctagagttataaattctacaa

SEQ ID NO: 391860 - DNA, 201 bp, Homo sapiens
acaactaaaataaataaaacagaattcactcaagaagaaagcctttataaaaagaaattaacccacattgaaattgaaaaaaaatactgtaattttatatstgtatgtgcttttctctaaaattcatctgaaaggaaataatacattgacctaatgggaagttttatgtttctttttttgttcgctagttctggaacacat

SEQ ID NO: 391861 - DNA, 201 bp, Homo sapiens
ggtatgcacacagatgcctaggctaggtgccagctacacacacagtttttctcagtgaagcccagcatgacacctgctgcataagatctaattaattagcygacataaaagaaaaacctatttttcttttgattcttaattttagcatgtgtggagttcagtgcttcttagaaaaactttctctcagaagactactcattt

SEQ ID NO: 391862 - DNA, 201 bp, Homo sapiens; identical to SEQ ID NO: 85899

SEQ ID NO: 391863 - DNA, 201 bp, Homo sapiens
tggaaatgttctaaaattggattgtggtgataattgtacaactatataaacttgctaaatagtgctgaattgtatatttaacaatatgtaaataatacctwaaaaaagttgttaaaataaaatgcatatcagtaaaatgattccttaaatcataaacgtgtttgccaaaagagaactgattttaaaaaactgcaatgccta

SEQ ID NO: 391864 - DNA, 201 bp, Homo sapiens
gaaagaaagactttatctggaactagggatgacagcagggattgactgcaatgggctgcaaaaatatgggttttggaaggatagtggaaatgttctaaaaytggattgtggtgataattgtacaactatataaacttgctaaatagtgctgaattgtatatttaacaatatgtaaataatacctaaaaaaagttgttaaaa

SEQ ID NO: 391865 - DNA, 201 bp, Homo sapiens
aaatccatttccaggtgcactggatgtcacttttcttcataaatatgtaatcataaagatatgcaaattaaaataacattgaaataccactacatacccaytaaaatggctataatccaaaagacaataccaatttactgtattagtccattctcacgctgctatgaagaaatgccccagactgggtaatttataaagaag

SEQ ID NO: 391866 - DNA, 201 bp, Homo sapiens
taaggtttaattccatagattacttattaattacaaagagaaaaatcattcttcacaatagagaaatctgacagtttcttactgtacccaagtgatcagamttaacatcaccaaaggtggagtaacttaacaagataagctgatattatgcacctcctgtgattcaatacaaaataaagtagggtgacatcagcaaaatga

SEQ ID NO: 391867 - DNA, 201 bp, Homo sapiens
atatgaattctcaactaactacataaatctagtgctttgcatgtagtagaataaatgaatgaagcaaggtctatacaaatgttttgctatgcaatcttggygtgaaagagtactccaatttaagatatctctaaacttattatcttccatatagcaaatttcagcatcaaaactattttcaagaagaatcacaataagccc

SEQ ID NO: 391868 - DNA, 201 bp, Homo sapiens
ctcttctctcatttgtgtaattttcagaaacaatgtcatacagcaagaaatagtccataggtgattgaataagcagagagagatgtactattatcgctccyaaacaaacgtccttttttattttttcatctttgtctttatccactatttgaccctgtcatctctgcttcagagtcctcagcagttaaagcactggtttga

SEQ ID NO: 391869 - DNA, 201 bp, Homo sapiens
ttagatgtccaagtagagatgtgcaggcaatagggtattcgagtctagagttcagagagatgttgggaggaaagatataaatcaggaactcaatagcataytgatagtatttaaattcctgccactggataaaatcatctgggaaaagacagtagagaagagagtaaaagaggatcatccctggggtatgtcaccatgaag

SEQ ID NO: 391870 - DNA, 201 bp, Homo sapiens
cagggtcaggtgatgcatgcacatgcaatgtgtggcattatagaagaagaaccctaaagttcgagaacccatatcttttatggcataaattggatactcayatattagtttccttatctctcctaaaaaatacactatatttttatgcaaggtttttgcacttatgaattcattatgctcaggacatagctcacaattatg

SEQ ID NO: 391871 - DNA, 201 bp, Homo sapiens
gacaagatccttcatatgtaacaggagggatttcttacactgtagtaatttgctgcttttaaacagacttagcagcatccagaggcaaaggctgttatggkctcattatttcctgccccccagaggatgaactgtgctaattaagtacatttaaagggaaaaaatgcctctttgctgtgtccccattatgctactgtctct

SEQ ID NO: 391872 - DNA, 201 bp, Homo sapiens
ggaccccttttcctctttctatcagtcccatgtcctcacacagatctgggagaagaaaagggagggcttcgaatttactatacaccagttcatctgccaartactctgccacttatgctagtcaacaagataaaaacttgcttattttaatgctgcaaactgactgttttatattcttttctatttttcagactgtatttt

SEQ ID NO: 391873 - DNA, 201 bp, Homo sapiens
agcatgtgctaaataaatagtccatatgcttaatacaaattttaatccagatctggtatacttggtacttatttcaacgtagtcaaagtgtatgaaatgtrataaacaaaataaaatgtacttttctctcctcctctccacttagagcaggacatttctgtcaagctactatcgagatcacaacgtggaactctcaaagct

SEQ ID NO: 391874 - DNA, 201 bp, Homo sapiens
gtggaggtcacagtgagcccagattgcaccattgcgctccagcctgggcagcaagagtgaaactccaactcaaaaaaaaaaaaaaaaattctatttttttsactgcctgagtcattctgttgtagtaagtgtgccctgggcagtaatgtaagttactgatataatatactaagttttgagctgttaatatgctaataaaat

SEQ ID NO: 391875 - DNA, 201 bp, Homo sapiens
agaacctgaagctctttagttattaatactcattttccagatggtaatcttttttcacttttcttgtactgccaactttaacatgattctatttcatttakaaattgatttttactttgggatgatggtgggtgttagtggaagagaaaagataggttacattgacaagcaggcacttccccttgcagatattgcaatact

SEQ ID NO: 391876 - DNA, 201 bp, Homo sapiens
accctgcagagagagaatatctggtagggctgagatgtggaaatcatgagttcaactattaagactattaattccacttgtgatccaaatacttcatttaygttttatagttacatagccagattcctcagtgtttttgaaccatgtcctccactagaaaaatcttaacatagatttcagagttcctagatctaagatgct

SEQ ID NO: 391877 - DNA, 201 bp, Homo sapiens
atcttgcacaactttaattcacaccttcttttataattgcaaaaggctataaaaatttgaaaaaccttatcacgagtgtatataattgaagcagataatayatatatacaaaggatgaagagaagacctcttactaaatgaccttttatcattttgttgttacactttctaaaagtaacaaaccaagtgaataatctcttt

SEQ ID NO: 391878 - DNA, 201 bp, Homo sapiens
catttagtcaagattgaatctatggttcagatttcataacctcattaagtctccttgtgcctcttatgtgcagttctgggtacttactattatgtggaagsgttaacatttttagaaaggaaacatttataaaccctagttctttttaacaagctgatttagctagttcctaagataatttactttcagaaagtataaccc

SEQ ID NO: 391879 - DNA, 201 bp, Homo sapiens
aatagatatctacagaactagtccacccaacaaccacaaaatacacatatttttcatctgcacataaaacatattctaagactgaccacatgtttgttcaygaaggaagtctcaataaattttaacaaactgaaatcataccaagaacattcaccaacctcagtgcaatttaaaaaatcaatatcaagaaggtctctcaaa

SEQ ID NO: 391880 - DNA, 201 bp, Homo sapiens
acacacactttgcagtatgtattcagcacttcctgtttattctgttcagaatggagacatggtgatcacttaatgttacagttttctccatttctataccycacatttttactttaatgcttacttgacatatattaagatttactaataatatttttatttattattagtctagttagtagtttcaatataaccatgcaa

SEQ ID NO: 391881 - DNA, 201 bp, Homo sapiens
ataatttaggctttggggaatgtagacacacactttgcagtatgtattcagcacttcctgtttattctgttcagaatggagacatggtgatcacttaatgytacagttttctccatttctataccccacatttttactttaatgcttacttgacatatattaagatttactaataatatttttatttattattagtctagt

SEQ ID NO: 391882 - DNA, 201 bp, Homo sapiens
ttattagctgtgaattatacctgccagtaaattaacccttctttctccactcaatttgtcagataaaaaagttgcataaagttaaaagccagccagttggmttcctgagaatatagatatggaacaatttcctgcagcattgagcctcagaagaatttaacagctttggtgaatctagtaccaatgctcattttcaagcca

SEQ ID NO: 391883 - DNA, 201 bp, Homo sapiens
tagagaatcctaaaagtaatcactccatgatacactgaaaccttttctcttctattaccttctagttgtatgatacaagtagcatctaaatccatagacayggaagaaggctgacttgtttttaaaccctacaaagaaaaagaatgacttgtttttaaacccaaaaaaaaatttgaatatttatgcattttttccttccag

SEQ ID NO: 391884 - DNA, 201 bp, Homo sapiens
ttttgtgttcaactaatacttggcaaatgtttacaagagccaaacagtatgctaaatgctataaaatgggaagaatccttcacagcatatccttaagtgtyagaatgaaacctcaaatgagaaagagttatatgaaatattttggtaagataaaatgtgtattttaatgtgctattattatttattataattatggcataa

SEQ ID NO: 391885 - DNA, 201 bp, Homo sapiens
cacaatctcggctcactgcaagctccgcctcccgggttcacgccattctcctgcctcagcctcccaagtagctgggactacaggcgcctgccaccacgccyggctaattttttgtatttttagtagagatggggtttcactgtgttagccaggatggtcttgatctcctgacctcgtgatccgcctgcctcggccttataa

SEQ ID NO: 391886 - DNA, 201 bp, Homo sapiens
ccaaagaataggaaataaaatccagctttaactaaaccagtggaagcgggatcataaagaagtgagatgtgaaaagtatttctgacatagattcaataagkttttaatcagatggatgatgaggaagcataagagaataacaggtcaaaaataacattagggtttaagcctcccacttttctatctgtgtgtatctcttta

SEQ ID NO: 391887 - DNA, 201 bp, Homo sapiens
agtattacttgtgtcccaaactcataagaccttcaatgaacagcagtcccttcatctatgatggttctccatgaaggaccagacccagtccctcaggccaytgggtaaataaacatgctttcccttctagcttctccttctcattttcatcctgacacacttataccattgcctatgagggtatgcacacagatgcctagg

SEQ ID NO: 391888 - DNA, 201 bp, Homo sapiens
ttagagaaggagtgtttaggatgaagacaagcaggggaaaattggatgtaagtagacatactggattactaataaattaaccaaagaataggaaataaaayccagctttaactaaaccagtggaagcgggatcataaagaagtgagatgtgaaaagtatttctgacatagattcaataaggttttaatcagatggatgatg

SEQ ID NO: 391889 - DNA, 201 bp, Homo sapiens
tgtaacttcaaaagataagttaaagcattagaatacagtaaaagtgtcaaattaacctacaggtgtaagatgccattgtattccattaattccacaaaaartcattgctcctggcacaagtggtgcaatgataggcaaaagaaaggtactatctctaccctcttggagcttccaggcatacagaaagtctgactttaaaca

SEQ ID NO: 391890 - DNA, 201 bp, Homo sapiens
tctgatgctggaagagttcttacatttagttattttgaaccatgtaccaagacagtgtgataatattttggcaaatatgtgtacatgtgaaaactgcctawggagatcaatatagtggattttacatgaagggacagaaacagaagattgaagaaagtaattccaataagtggatgacttgttagtattgcctagtaagag

SEQ ID NO: 391891 - DNA, 201 bp, Homo sapiens
actttgttaaaataatgtcataagatttcaaaggatatgctgatgaataatgaaacacatttttgataaaggaaatcaaaaaccttggagaaaattgtackatttgccagttactggattatgtccttctcttggttaagagaatttatttcttctaacattccatgtttctagaaaataaatcagcatgtaaaaaatctt

SEQ ID NO: 391892 - DNA, 201 bp, Homo sapiens
atttcacactccataaatggaacagcatgttcctttgttatttaacctttatgtatttatattcccaggaagttttaattattacaaattaagtttaaaargttttattaatatcatagagggggaaggctgatacaacctctttcaaaagataccaggttgtagcacctggtacagtgttcctgcagtgagcaacttatt

SEQ ID NO: 391893 - DNA, 201 bp, Homo sapiens
gaagaaaccacatataggaagatgctgaggtagaaaagtgcttggtgagtttcagggaaagtttcatgtgactaaaattcagtgaaggatggagggtggcrcaagataaggctagacaaagaagcaaggatcatatgcagcgcttgcgatcatgctaagaattttgtaatttaagtggaaagggaaatcagggaaagattt

SEQ ID NO: 391894 - DNA, 201 bp, Homo sapiens
ttgagttgttttaaagatcacatagatgatatgtaaaaggacaatgtaacttttatgtttgtgtaattgcttataattctcaaaaagcttttacatatcawctcatttgagttggctactgtttttgcaagatcactacgaaggcagggaaagtcttaactctttctagctgataaaaagaatcctggaagatcccctgta

SEQ ID NO: 391895 - DNA, 201 bp, Homo sapiens
cctatcaatgcccctgagatgaatatgaagtcagcaatgggagttttttaattctatgataattggctgggagttctttgacctttaattaaacaaaataygaattaatgaactttctttctatttacagcagaggcttgaaatggtacaagttgggataacaatcaaaacaagatgctattttttcactaacaaataaat

SEQ ID NO: 391896 - DNA, 201 bp, Homo sapiens
aagttatctgaaataaattcgtaaagcctgagcctatttaacaggcaatatggggcttcttggaagtatgaacaggtgagtaactaggtagtttaggaacygactcttctctcatttgtgtaattttcagaaacaatgtcatacagcaagaaatagtccataggtgattgaataagcagagagagatgtactattatcgct

SEQ ID NO: 391897 - DNA, 201 bp, Homo sapiens
aaacacagcctttgggggtgattatttttcccgagtatttttacatcctcgtgccaatgcttcagatagtaccctaaattaactgtatcttttgctgtccrtggatacttacaagtttccttttgccacttgtcaagagcagtgaagagtcttgagatttcacttgcaaactaacaagtcaccctgacatagtttcatggt

SEQ ID NO: 391898 - DNA, 201 bp, Homo sapiens
ttaatttgctgaggattatggcctccagctccatccatgttgctgcaaaggccatgatttcatttttttataactgtgtactattccgtggtgtgtatatacagcattttctttattcaatccaccactgatgggcagctaggttgatcccatgtctttgctagtgtgaatagtgcaacaatgaacagaaaagtgcatgtg

SEQ ID NO: 391899 - DNA, 201 bp, Homo sapiens
gagggatgttagaggagagttataacgttgtatcatttttttctttctttggtttcaatttccacctttattcagatgaagctgaaaataagtggaacagytggcaataaaaccttagccactaacttgaattttttgtgaaatgccagtcaagtaacaggaatgacagacatgtaagtaagccccagtagtatccatttt

SEQ ID NO: 391900 - DNA, 201 bp, Homo sapiens
attaatttgctgaggattatggcctccagctccatccatgttgctgcaaaggccatgatttcatttttttataactgtgtactattccgtggtgtgtatatacagcattttctttattcaatccaccactgatgggcagctaggttgatcccatgtctttgctagtgtgaatagtgcaacaatgaacagaaaagtgcatgt

SEQ ID NO: 391901 - DNA, 201 bp, Homo sapiens
tcctccactaagtttttgttcttattttattaacttaatcaattaatttaataaaatgtattaatgcaataaaagaaactaaattaaaatataacaaaatwttatgtacttttttatatctatgcttctatatatctgcattttaaggtaataatttaaaatcattattttttcatctaatacttgtgtactctataaaga

SEQ ID NO: 391902 - DNA, 201 bp, Homo sapiens
tctaaaagtactgtgctcaaacaaaaatatttttatctgctaaaataggccaaaatataatctaagaagcataaataagaaacaaaaaaattatcaagacrttccaccaagaatgccacacgtgtcatcaatactaacataaatcttcatgtaaaacttctttgcaattacttttaatttcaatttctgcctcttcatcta

SEQ ID NO: 391903 - DNA, 201 bp, Homo sapiens
cacattataccttctcacagtaccaggatacctgaagaaacaacacttcactcctagtctagtcagcacctttgcaatttttcttggaatgacgttagctkttacataacccatagtagcaagcttgtgaaacaaagaaaccgcaatttagttcggggtaactctaaaatgtttgtgttcaaattaccaataagactcgtt

SEQ ID NO: 391904 - DNA, 201 bp, Homo sapiens
gcattaatttgctgaggattatggcctccagctccatccatgttgctgcaaaggccatgatttcatttttttataactgtgtactattccgtggtgtgtayatacagcattttctttattcaatccaccactgatgggcagctaggttgatcccatgtctttgctagtgtgaatagtgcaacaatgaacagaaaagtgcat

SEQ ID NO: 391905 - DNA, 201 bp, Homo sapiens
gtaatgaaaatacaaatgtgtaggagggattagagtgggcagtactgtcaccacaccttttgcctcttcctagtaagaaaaatgccagtacccaagactgtcagtaaaatatcatagcatgtgctaaataaatagtccatatgcttaatacaaattttaatccagatctggtatacttggtacttatttcaacgtagtcaa

SEQ ID NO: 391906 - DNA, 201 bp, Homo sapiens
tttgatatagttaggtcgatcactgttgcagtttgatcactctgtgtctacatttttgttattgcttatattttttcctgatattaagcaaaacataaagmaaatgtacttagaaaaacatcttccaaacacattattagtgttctagatatttttctcttcctaactatggaggacaaatgctgtaaagaaaaagccttt

SEQ ID NO: 391907 - DNA, 201 bp, Homo sapiens
tactagtggattttgtaccttcaggtgattatttattgctcattaatgtccttttctttcttattaaagtactccctttagcatttcttgtaaaaaaaaaagtctgatgttgatgaaatccctcaactttttttttgtctaggaaagtctttattttttcttcattcttgaaggatattttcaccagatatactattctag

SEQ ID NO: 391908 - DNA, 201 bp, Homo sapiens
ggtaatgaaaatacaaatgtgtaggagggattagagtgggcagtactgtcaccacaccttttgcctcttcctagtaagaaaaatgccagtacccaagactgtcagtaaaatatcatagcatgtgctaaataaatagtccatatgcttaatacaaattttaatccagatctggtatacttggtacttatttcaacgtagtca

SEQ ID NO: 391909 - DNA, 201 bp, Homo sapiens
ggcaaaatcaacacattataggtccaagatccagacttgcttgaggaggttttcaaagcctaaactgttccagatacaaaagacttctaggaaggtatggmaggtttaagaagctaaaatttctgctcttttgtgtgatttttgaagcctttttcagaacaagcaagtttgagtcaagcttggaccaaataagataccact

SEQ ID NO: 391910 - DNA, 201 bp, Homo sapiens
ggtgatatgatttagttagttgctttttattttttgtgtctccattgtatgttttttgatttgagggtatcatgaagcttgcaaatactacgttataaccmattattttaagctgataataacactgtttgcataaacaaactaacaaaaagaaaatttacaaagacttcctgcattaactttgtgcccctgctttaagtt

SEQ ID NO: 391911 - DNA, 201 bp, Homo sapiens
ccagtttgttcactaattctttgaataacctgaatttacattctataaatgtgagcctatttgtggagcttcaaggtctcatactaaaaatatgaaccttktatttacttctctattaatcgaacatctttcaaatgcctgtaagtgccagccactacactagaaaaatgcggacatataggcaaacaagagctgtgccct

SEQ ID NO: 391912 - DNA, 201 bp, Homo sapiens
cccagctaatttttgtatttttagtagagacagggtttcaccatgttggccaggatggtcttgatctcttgaccaagtgatatgcccacctcagcctcccraagtgctgggattacaggcgtgagccaccacacctggcctcattgtttttttattccttcagctactctgtgtcctttgaagaactgtgtccatttacat

SEQ ID NO: 391913 - DNA, 201 bp, Homo sapiens
atttatgtattggtcactatatcatatgtattggtcaccatatcatataaattggttgaaaaatgattttctggtttttctgtgtgtattcttttttttttaggtttgattctcataaaggtttctggtgtcagttactggaagaaggtaaaacaaaatgccttggaaagagcaaaggaagaaaataccctccaatggatt

SEQ ID NO: 391914 - DNA, 201 bp, Homo sapiens
gaacaaaaagtccagctgggcacactggctcacacctgtaatcccagcactttgggaggctgaggcgggcagatcacctgagctcaggagttccagaccarcctggccaacatggcaaaaccccgtctctactaaaaatacaaaaattagctgggcttgttggcaggtgcctgtaattcgagctactcaggaggatgaagc

SEQ ID NO: 391915 - DNA, 201 bp, Homo sapiens
tgttttttcaaagaacatatttttgaaaaatttatggtaaaaaattattgcaacagttattcttaattttttaccataaattttacaaaaatatattttgrtcatcatgtggctaggtactctaataggaacaaaaagtccagctgggcacactggctcacacctgtaatcccagcactttgggaggctgaggcgggcaga

SEQ ID NO: 391916 - DNA, 201 bp, Homo sapiens
ctagactcatattctacccaggacacaatcctcttatattatagtaaagcttgcttgtatttgccttccttgaagtacacagtgtcccactctttcactgyggtgctctgctccagcttctcttctgaattcatctcccaagactccttggtcttttcaaaactcttgaggtgtaattcatatttcagctaggcatttggt

SEQ ID NO: 391917 - DNA, 201 bp, Homo sapiens
gagcctatttgtggagcttcaaggtctcatactaaaaatatgaaccttttatttacttctctattaatcgaacatctttcaaatgcctgtaagtgccagcmactacactagaaaaatgcggacatataggcaaacaagagctgtgccctgccctctccatgagcccctggggcctggcaaaatcaacacattataggtcca

SEQ ID NO: 391918 - DNA, 201 bp, Homo sapiens
gtctgttccaatcttttttttttttttgagatggagttttgctcttgttgcccaggctggagtgcaatggcacaaactcggctcaccgcaacctctgcccsccaggttcaagtgattctcctgcctcagcctcctgagtagctgggattacaggcatgcagcaccatgcccggctaattttgtatctttagtagagacagg

SEQ ID NO: 391919 - DNA, 201 bp, Homo sapiens
aaagtgttgatcataggaaattgtgttttcatttaattaatttctgaacctctattgtctttctaggtaccactgctttgtatttgttcctggttatgcayccttccatccttagtaactcccccagcccaaaaacctttgaggaggtacagttctttaatagaaataactaccacagggggattgattggtaagatgggt

SEQ ID NO: 391920 - DNA, 201 bp, Homo sapiens
aaaaaaaattaaaaattagcccggcacagtggtgcatctctgtagtcacagctacttgggaggctcagacaggaggatcccacgagcctggtgtcaaggtygtagtgagccatgattgcaccaccacactccagcctgggcaatatagtaagatgctgaaaaaaaaagaaagaaagagagagaaagaaggaaagaaagaaa

SEQ ID NO: 391921 - DNA, 201 bp, Homo sapiens
aaaagaaatggattgagtataatttgagcacctactaggatttacatatattctaattgttatatatttcactgccaatttttcagttcagggtttgataytgattaattgtgtggtgttacataacagctggaaaatcaagaaaccatcgacagtggccaggcacagtggctcacatgtgtaatcccagcattttgggag

SEQ ID NO: 391922 - DNA, 201 bp, Homo sapiens
atagggctagagttataaattctacaagattaactacatatagactacagccccacatacacacacacacacacacacacacacacacattagatcacacwatcattttaagtgctttgttaatgtataatttacatataatcacccattgtaattgtgcagttcaatgaatacaaatatatacagttgtacgtaccacca

SEQ ID NO: 391923 - DNA, 201 bp, Homo sapiens
cagcaggttgaggttgcagtgagccaagatcacaccacttcactccagcctgggcgaaagagcaaaactccatctcaaaaaaaagaaaaaaaaaagtcactgtttagaggttgaatcattggagaatcttggtgcccctgcccacaagtcttttacagttatttctaaatatcccagatgatattccacacaagctttaga

SEQ ID NO: 391924 - DNA, 201 bp, Homo sapiens
atcccagcactttgggaggctgaggtgggcggatcacctgaggtcaggagttcgagaccagcctggccaacatggtgaaaccccgtctctactaaaaatasaaaaattagctgggcatggtggcaggtgcctgtaatcccagctgcttgtgaggctgaggcatgagaatcgcttgagcccaggaggcagaggttgcagtga

SEQ ID NO: 391925 - DNA, 201 bp, Homo sapiens
ttctgcacaacaacaaaactgtcaacagagtaaatagacagcctacaaaatgggagaaaatatttgcaaactatacatctgacaaaggtccaatagccagyatctataaggaacttaaacaaatttacaagaaaaaaaaaaaacaactttatttaaaaagtgagcaagggacatgaacagacacttttcaaaagaagacat

SEQ ID NO: 391926 - DNA, 201 bp, Homo sapiens
ctccaggtttctcatgaggttgcagtcagatggtaactagagctggaaaaccaggtggcagtgactagagcatctgtgagctggtgggcatctcttcatgyagtcccagggcttttccatgtgatctttaccggggggcttatctgggtctcttcccagaacaatcagacagctttaaggctccatcaagtgttgcagcaa

SEQ ID NO: 391927 - DNA, 201 bp, Homo sapiens
cctgtagtttcagatgacacatggccaggttgaggtaagaggccagttgaagggcctgtgccttctgtgtttcctcattggaaaaactagactcatattcyacccaggacacaatcctcttatattatagtaaagcttgcttgtatttgccttccttgaagtacacagtgtcccactctttcactgtggtgctctgctcca

SEQ ID NO: 391928 - DNA, 201 bp, Homo sapiens
ccaatggaagaggcccttctcgttgttgctgcccagttccagggccttgttacagctttcagtggcagcagagaaggcctgtagtttcagatgacacatgrccaggttgaggtaagaggccagttgaagggcctgtgccttctgtgtttcctcattggaaaaactagactcatattctacccaggacacaatcctcttata

SEQ ID NO: 391929 - DNA, 201 bp, Homo sapiens
tcctttcacattttataatcctcataagattaacagccaaaatccatgaccagaactctgaccacgtacagtctacagaggacttcatgctaccttgatawtaccccgtattttaccagcaaccatctctcagacttgactataaccctctggtgtacctcatcaattcaatgctccagtgtttatccttgatttcattgt

SEQ ID NO: 391930 - DNA, 201 bp, Homo sapiens
tgtacagtttatgacattgctcactttttgaaaaatcacacccttgctccccaatagtcacaaatatatatacgtacctgtgatacaccattctcttcccyagtaaatgcaaattctataagttatgtcgctaagaaagggcaccatttttttttccaatttagcaatttaaacaatttttgacactactaagtacattga

SEQ ID NO: 391931 - DNA, 201 bp, Homo sapiens
atcccatttgtctatttttggttggttgcctgtgcttgtggggtattactcaagaaattttgcccagatcaatgtcttagagagttccccaatgttttctygtagtagtttcacagtttgaggtctcaggtttaagtctttaatccattttgatttgatttttttatgtggcgagagataggcatctagtttcattcttct

SEQ ID NO: 391932 - DNA, 201 bp, Homo sapiens
ctcttatgaatccattgcacgtgatgagttcacttctctagctttgtacccttgttgtgagaattatgaaaataggcagttgaattattttctccataatratatagagaaataataatacagagaatgtggaatgttctcaaaaactggttaagaaaggctacattaagaaatatttattaaacttctaatatgagacac

SEQ ID NO: 391933 - DNA, 201 bp, Homo sapiens
ccagcaggttgaggttgcagtgagccaagatcacaccacttcactccagcctgggcgaaagagcaaaactccatctcaaaaaaaagaaaaaaaaaagtcactgtttagaggttgaatcattggagaatcttggtgcccctgcccacaagtcttttacagttatttctaaatatcccagatgatattccacacaagctttag

SEQ ID NO: 391934 - DNA, 201 bp, Homo sapiens
ataaactattttagcaatttaggacagttacaccacctataaatatcattaatatatgatatatttattatatattattaatatataatatattaataatktatatattaatttggattcctttatcatttccatgatgaatcatggattgtacagcttttaataatgaaaactttaaagactcagaaaagacaaagcagc

SEQ ID NO: 391935 - DNA, 201 bp, Homo sapiens
ttctccagtcactttagttgtgaataagtctcaatttagtaagtaatgtatccaatattatataataatcaaagtactaaatgtaatttaaggttgaaacytttaacccctgccctcatcctacagctctactttactacaaggaaggctcttcaatgggaaaatgaggatgatagactttgtctctatttcctaccttac

SEQ ID NO: 391936 - DNA, 201 bp, Homo sapiens
agtaagggaatgatagcattattcataatagctaaaaactagaaacaatacaaatgttcttcaactggtgcatggctttgttatatccacacaccaggggrgtttaaaaaaaaaaaaaaaaggaatgtccagaaaagagacaaatgtagagttagaaaaggtttatctgggccgggcatggtgactcattgctgtaatccc

SEQ ID NO: 391937 - DNA, 201 bp, Homo sapiens
aaagctgaaggacttggagtctaatgttcgaggacaggaggcgtccagcacagaaaaaaatgtaggctgagaggctaagccagtctgatctctccacgttsttctgcctgcttttattctgatcacattggcagctgattagattgtgcccactcagattaaagtgggtctgcctttcccagcccactgacttaaatgtta

SEQ ID NO: 391938 - DNA, 201 bp, Homo sapiens
caggatataagacaaaaggagaatctcatccagtttttgactcagttacctacagcaaagttagtttaactaaacagaagtctggtaagaactacaaatcyaccagcctgtcaggccagtttgagcaacaaccttagaaagcctatgcctgtgctccttgccctgtgattctgctgtttatgataaacaatacaaaagaca

SEQ ID NO: 391939 - DNA, 201 bp, Homo sapiens
aggttggggctgcagtgagctgtgattgcagcatgtactgtgcagagggagactctgtcaaaagaagagagagagagagagagagagagagaaaagaaagraaagaaagaaagaaagaaagaaagaaagaaagaaagaaagaaagaaagaaagaaagaaagaaaaagaaagaagaaaaaaagaaagaaaattctacatccc

SEQ ID NO: 391940 - DNA, 201 bp, Homo sapiens
caaggaagccagtttgagtcccaaagctgaaggacttggagtctaatgttcgaggacaggaggcgtccagcacagaaaaaaatgtaggctgagaggctaarccagtctgatctctccacgttgttctgcctgcttttattctgatcacattggcagctgattagattgtgcccactcagattaaagtgggtctgcctttcc

SEQ ID NO: 391941 - DNA, 201 bp, Homo sapiens
gagcctgggaggttggggctgcagtgagctgtgattgcagcatgtactgtgcagagggagactctgtcaaaagaagagagagagagagagagagagagagaaaagaaaggaaagaaagaaagaaagaaagaaagaaagaaagaaagaaagaaagaaagaaagaaagaaagaaaaagaaagaagaaaaaaagaaagaaaatt

SEQ ID NO: 391942 - DNA, 201 bp, Homo sapiens
gccagagcagcaacataagcatcaccagaaaatttattagaagtgcaggccaggcacggtggctcacgcctgtaatcccagcactttgggaggccgaggcrggcagatcatgagaggtcaggagatcgagaccatcctggctaacacggtgaaatcccgtctccactaaaaatacaaaaatttagccgggtgcggtggcgg

SEQ ID NO: 391943 - DNA, 201 bp, Homo sapiens
caaggtctcacaataggccgtctgcaagccaaggagcaaggaagccagtttgagtcccaaagctgaaggacttggagtctaatgttcgaggacaggaggcrtccagcacagaaaaaaatgtaggctgagaggctaagccagtctgatctctccacgttgttctgcctgcttttattctgatcacattggcagctgattaga

SEQ ID NO: 391944 - DNA, 201 bp, Homo sapiens
tgagcctgggaggttggggctgcagtgagctgtgattgcagcatgtactgtgcagagggagactctgtcaaaagaagagagagagagagagagagagagagaaaagaaaggaaagaaagaaagaaagaaagaaagaaagaaagaaagaaagaaagaaagaaagaaagaaagaaaaagaaagaagaaaaaaagaaagaaaat

SEQ ID NO: 391945 - DNA, 201 bp, Homo sapiens
gagttacagacagagctgatggtaaaacaataacaatcatcagaagtagaactcagtaactttttaccacagattgaagttgttaactctgaactttatastcaatgcattcagctttcaaccgtaagttaattacctcctgagcacacacagatgactccaagagacataactgcatatttagcaggttaaagttggtgg

SEQ ID NO: 391946 - DNA, 201 bp, Homo sapiens
taggacctatctacttccttaaagtttcagtttgattgtgtcatatttagcatgagtgactccattttagtttggtctggtctgctggggcctactgtacmaactcagtctaaaacaatggctcccataattttctttaaaaaaattcctccattttgattaacttctctgtattagtcagagttctctagagggacagaa

SEQ ID NO: 391947 - DNA, 201 bp, Homo sapiens
atcccagcactttagggggccaaggtggaaggattgcatgagctcaagtgttcaagactagcctgagcaacacagtgagacctcatttctactaaaaattwaaaaaaaattaaaaattagcccggcacagtggtgcatctctgtagtcacagctacttgggaggctcagacaggaggatcccacgagcctggtgtcaaggt

SEQ ID NO: 391948 - DNA, 201 bp, Homo sapiens
tgtgattatactgccctctagtgtcaaaataaatgttatttacactgaagttcatttgcttttttcagatcagcattttcatgacccatttgtccaactaygggaatgaccgactgggattatatacatttgttaatctggccaactttgtgaagagctggaccaacctgcgacttcagactctgcctccagtacaactgg

SEQ ID NO: 391949 - DNA, 201 bp, Homo sapiens
aaatcaaatgcactggtgtaataaaatttgtgatgataaatgcttgtaaattaaagccaataagtataagataaagtggtatctaataatatgtatattayacatttattataaattatatatattaattttataacatacatatgatatatgtagatatcattaaaagaaaaaccttagacaaattaaatttaacagttt

SEQ ID NO: 391950 - DNA, 201 bp, Homo sapiens
gcttgagcccaggaggcagaggttgcagtgagcccagatcgtgccactgcactccagcctgggcaacagagcaagactccatctaaaaaaaaataaataaataataataataatactatttaagtaaatactagcatattaatgctatttaagtaaatactatactatcatattaatactatttatactactattatttaa

SEQ ID NO: 391951 - DNA, 201 bp, Homo sapiens
caagtctctatagtcacaagccaattcctcaaaataaatctctgtctgtctgtctctcattttctctctgtctccctttgtctctctctctctctctacayacacacacacacacacacacacacacacacacacacacatattctctgtctctgttggttctgtttctctagagaaccctaagacatttttaatattgta

SEQ ID NO: 391952 - DNA, 201 bp, Homo sapiens
aatcgcttgagcccaggaggcagaggttgcagtgagcccagatcgtgccactgcactccagcctgggcaacagagcaagactccatctaaaaaaaaataaataaataataataataatactatttaagtaaatactagcatattaatgctatttaagtaaatactatactatcatattaatactatttatactactattat

SEQ ID NO: 391953 - DNA, 201 bp, Homo sapiens
cttaaagctacaaatacccattctacgtctacatcccagaccaatgcagtctaacctgcagagttcaaatttattttattataaaaagtttcctgcacttkctgtgattgtctttcaatgcatggattcaatctaggtcaggtgcttccataggaagagtcaattttatctagccaagcattaaagatttttcttaaagga

SEQ ID NO: 391954 - DNA, 201 bp, Homo sapiens
gagaatcgcttgagcccaggaggcagaggttgcagtgagcccagatcgtgccactgcactccagcctgggcaacagagcaagactccatctaaaaaaaaataaataaataataataataatactatttaagtaaatactagcatattaatgctatttaagtaaatactatactatcatattaatactatttatactactat
